United States Patent Application Publication US 2007/0054278 A1 - sequence listing, part 121

SEQ ID NO: 214590 - DNA, 201 bp, Homo sapiens
gcgtggtggtgggtgcctgtagtcccagctactcgggaggctgaggcaggagaatggcgtgaacccgggaggcggagcttgcagtgagccgagatcgcgcygctgcactccagacagagcaagactctgtctcaaaaaaaaaaaaacaaagaaagaaaaaagaaaaaagagatcacagatcaccatagcagatataataat

SEQ ID NO: 214591 - DNA, 201 bp, Homo sapiens
cctttgcatccctgcttcccagagggaggggaggtctgggtctgcagagctgggagggcttgctgttcccgcccccctcccccacaacacctcctcatctkgacatctttgggcacatgctcatactggggtctccctaggtccactgtgttccgttgagcctcctgcagtccccgagtgaatgtgacctccctgcccctg

SEQ ID NO: 214592 - DNA, 201 bp, Homo sapiens
cctacgttgtgtgtgccgtgctgggctggctcctcacagctcaccgtggtgctccccgaggactgctggggaggaaagagctaattaacttggggacccarctgctgaagttatcattaaacttgagcagtccaggggcccctctccttctgggtcctatgtcacccagcacagtggggcttaattgaattttttctcatc

SEQ ID NO: 214593 - DNA, 201 bp, Homo sapiens
aaaaggccaacagttcggtggggagaggaggcgcaaggctggttcctgttttctgggctttgatcgaaagggaacaggggacacatctggggacagtctcyttcctggaggaagaagggcttagggtgctggtgtggagtttgcacagatggggataatgagctggagggtgctgggcaggagctggccagtaataggctg

SEQ ID NO: 214594 - DNA, 201 bp, Homo sapiens
cacaggcacctcctgtgactgagcttctccttgttatttttcataaccatttcctttaattgagcacctcctaggtgccaggccctgggctggtactttgyatacaaggtgtcttttaatccccacgagagcccaacaaggtagattgggctgctgaggctccagcgctggaaggccggcccgggtcctcccagtccgcac

SEQ ID NO: 214595 - DNA, 201 bp, Homo sapiens
gcagacttacttgatgcagggctgccacgaaccttcaatttgtaaaaagtgcagtatctgtgaagcacaatgaaatgaggtgtgcctgtgttccttgtcaytgtaatgtcggtaggatccgtaaggaaaacacttcattccttttattgtgactttatgttcgccatctccctctcatccgcagcctggctaggaggttat

SEQ ID NO: 214596 - DNA, 201 bp, Homo sapiens
tggatcagaagatgggaatccctaaacccaccaaccagccttggtgccctgggagtgacaggagacggggcttctgggggactaacccagcacaagtggaygagatgggatgcaggggaaaggacaaagctctctgaggctttgggaagctgagttagggtagagccatgacagggtgagttccagaagcaacacaagaaa

SEQ ID NO: 214597 - DNA, 201 bp, Homo sapiens
cttacctggaggtttctaggcctggtcatgtggctctgagtgattacattgaaggggcagtggctggggctggagccggtgggctctgagcacagtcacgmaggcatgcgcactttctggctgctctcctgccattgtcccttgggttcccattttggtgaggcgtgcaccctggcggcgctccccagggaactaaatatg

SEQ ID NO: 214598 - DNA, 201 bp, Homo sapiens
ttgcacaaccgtgttcgtagcagggcgaggcctggaggtgcgatggggatctcaacggggcagctgccgtcttgctggagcccacggtctttggggggggwcacaggtgttaaccgcatatcatacaagcaggagtgtgaaatttcagggttgccaaattcagtgagggtcttgtgctggcctggccacttacagtggcat

SEQ ID NO: 214599 - DNA, 201 bp, Homo sapiens
tgtgtctgcagctcctgaggccaagaccaaggctgaggccgaggctgaggctgaggccaccttggtgaggaggaaattgcaggtggagaagctcgttgacygtgaccttgatctgaccgtaattttgatggtgccgatgccgtcagcacgcaggcctcctgccctcgccacgactggctcctgcagcccacctggctgaga

SEQ ID NO: 214600 - DNA, 201 bp, Homo sapiens
cctctgacccctgcttgggtagttgtccctcctgaactgaccgcctgtcctacacagtcccctgtggtttgcccgacagggtggccagcgagtcccctgcmcagcacacctcccccaggagtgctgcctgtgatgatggtgtaaagggtgcccccccgagcccccggaggcatgcagtggcgcaacagcgtgagcccagga

SEQ ID NO: 214601 - DNA, 201 bp, Homo sapiens
aaagaatgcacagcatcttaaagagctagagatatttgtacacccacattcatagcggctctgttcacagtagccagcgggtagaaacaacccgaatgccygcggtcaaatgaatggagaaatcaaaggcgggacaggccgggcgtggtggctcacgcctgtaatctcagcactttgggaggccgaggcgggtggatcatc

SEQ ID NO: 214602 - DNA, 201 bp, Homo sapiens
ctccccgaggactgctggggaggaaagagctaattaacttggggacccagctgctgaagttatcattaaacttgagcagtccaggggcccctctccttctrggtcctatgtcacccagcacagtggggcttaattgaattttttctcatcccccaaggctcctggctggcgtggctggggtttgggatacggggagcgaga

SEQ ID NO: 214603 - DNA, 201 bp, Homo sapiens
cactcccctgtggctgcccctgctgggtgcccaccggtcccagggaaaagccactcccctcccggaggactggcgggaggggccctgcctgggagcgtgcygtgtggtccctgtcttagcgcaggatgcctgaggccagatcctccctgggaggcaggatggggcaaaagtctccccgcaggcagagcagggcctggatgg

SEQ ID NO: 214604 - DNA, 201 bp, Homo sapiens
cactaatcatcagggaaatgaaaatcaaagccacaataaaatatgatttcacaccctttaaggtggctgttagccaaaacatggataacagcaagtgttgrcaaggatatggagaaattggagccccgtgcactgctggtgggaatgtaaaatggtgcagctgctgtggaaaatatataacaattgctcaaaaaattaaac

SEQ ID NO: 214605 - DNA, 201 bp, Homo sapiens
caatcccaggtccccaagacggggactcgctgtgcccaccatccccagcatgttgagcatgttggggctctggctgtgatgggtcagtgtcccggaccccygtgggccccgtcacactgagctccccacagacaactgagttttccaccaaaagtctgacaggcaaggggctcccaggggaaccgtcaccggcctgtgccg

SEQ ID NO: 214606 - DNA, 201 bp, Homo sapiens
cctctccttctgggtcctatgtcacccagcacagtggggcttaattgaattttttctcatcccccaaggctcctggctggcgtggctggggtttgggatayggggagcgagagggcttgggcctcttccagatttggagtgggttcaccagaaatggcccaggaaaccgcgggggccacccccagcagctgggggctcctg

SEQ ID NO: 214607 - DNA, 201 bp, Homo sapiens
atgaagcagggcttcgagttcaacatcatggtggtcggtgagtcctcaccttgcatgccactcaaccaatgccggaaaccagcctcagcccccagggcggyccacaagcctttgggcttggtcttcccttctgtaaaatggggcagcaaccctgacctcaaggacggattgccagtgacattgcgtgtgcatgcatgcgcc

SEQ ID NO: 214608 - DNA, 201 bp, Homo sapiens
ggatgggctggggatgtgggatacccatgccttcctggagcactggtgcggtgtgagggtgcccgagtcaggcaatcccaggtccccaagacggggactcrctgtgcccaccatccccagcatgttgagcatgttggggctctggctgtgatgggtcagtgtcccggacccctgtgggccccgtcacactgagctccccac

SEQ ID NO: 214609 - DNA, 201 bp, Homo sapiens
ttgaattttttctcatcccccaaggctcctggctggcgtggctggggtttgggatacggggagcgagagggcttgggcctcttccagatttggagtgggtycaccagaaatggcccaggaaaccgcgggggccacccccagcagctgggggctcctgtggtcatttcctcttggtcctgttgagcagccctggcccctgga

SEQ ID NO: 214610 - DNA, 201 bp, Homo sapiens
gccccatgctttgtttgctaccaaaaaatttcttaagaattcctcagctgcaaatcctcctaccggagggggggttccaggaacccagccttgctcggggytggggcacctcagcacctgctgcacaggcgttggtcattaaaggtcatgtgccgtatccgtgggccctcggggtctggtggcacctgggcacacagtcca

SEQ ID NO: 214611 - DNA, 201 bp, Homo sapiens
acttcctggctgggagtatggccaagccctgatttgggtttcctgaaagagctcggggaacctccttacctggaggtttctaggcctggtcatgtggctcygagtgattacattgaaggggcagtggctggggctggagccggtgggctctgagcacagtcacgcaggcatgcgcactttctggctgctctcctgccattg

SEQ ID NO: 214612 - DNA, 201 bp, Homo sapiens
tcattaaaatcctggagccccagactggacccagcccttagctatgatcaaaggacagctcgggatatgattaaagggctagagaaagatgatttaggctragaaagaggaggccaaggagcaactggattgtccttgaatgtggaaaaggtaattatgacttgaagggtggtgcccagctgtttcccatctcctctgagg

SEQ ID NO: 214613 - DNA, 201 bp, Homo sapiens
agcatcctgatctgtagaggagaggctgctgtgccggccccgcagggccctgtgcagaggggagtgtgtgcggctgtgagttcaggccatgccctcagacwggaggataggatcggaacagtgggtcaggatggccagagggtcccagcctcaggaggaggcctccacacctcccagcacctccacaccaggaaatgcagc

SEQ ID NO: 214614 - DNA, 201 bp, Homo sapiens
tacagccctcacctcttcctggccccctctctggtcatggggacgctgcctggggggggttcccttacatggaaggagctgcagctgagctggcgggcctygcacacccccaaggccgcctgacttccagcctccaagtggggttgcattcaccactcaggacctggagcctcagccagagagggaccctccactgcctct

SEQ ID NO: 214615 - DNA, 201 bp, Homo sapiens
ccaaaacatggataacagcaagtgttggcaaggatatggagaaattggagccccgtgcactgctggtgggaatgtaaaatggtgcagctgctgtggaaaakatataacaattgctcaaaaaattaaactcagaatgaccataacatccagtgattccacttctagatgtatactccaaagaactgacagcagggacttgaa

SEQ ID NO: 214616 - DNA, 201 bp, Homo sapiens
ttgattgctcagtacctacctctgggcaaaaaagcctccagaaaccagaaacttatctagttttattcccctctgtcaggtgtagactctactccagcttytacctacttgagatattctatactgactccaggctgttgttattttgttctttcaaatattttgtccagagctataatgttttctgcagaattgaccaga

SEQ ID NO: 214617 - DNA, 201 bp, Homo sapiens
ccaaatttcagctcagtttcctctctgctgccggcgtgcatcttctctgcccagtgccccttctgggactgtgtgtccaggccctgaggccctagaaaagsggggtggagggcctcctcactatcctgtagcaatgaggcctcattaaaatcctggagccccagactggacccagcccttagctatgatcaaaggacagct

SEQ ID NO: 214618 - DNA, 201 bp, Homo sapiens
acagcctccagcggctcctcagaggggcctgtcctgcacatccagggcccctgagatgactttggggagcccaggccggcctggagcaggtcctgatgagyggtcgctgcctctgagcaatgacgtcagcttgtgcagagggttctgtggcagctgtcccctcactgttgctccagcctggccctccaggctccccaccgc

SEQ ID NO: 214619 - DNA, 201 bp, Homo sapiens
attctttctgcagagacccttaaacagaatcaggtcacatttgaggttccaagtgggcatatctttgttttgggggggatcaccagcccactgtaggtctygttgtgcactgaagacgcaggcggtccctttggccaggcctgcagtcggtcttgccttcttttgtgaccgtggaagaatgcaccttgctggatgcacagg

SEQ ID NO: 214620 - DNA, 201 bp, Homo sapiens
gaaccagagtctctggggtgggccctctgcttgtctagcagcctccaggggacacttgtgcctgccagagcaagtctaataagcactgctgtaaacccctygtccccacagccttctggttcgtctcccttttcctgctgggatctgcatcaggattaaatgccaacatcagggatcaggttatacttgtgaaccctgaga

SEQ ID NO: 214621 - DNA, 201 bp, Homo sapiens
ctgagcaatgacgtcagcttgtgcagagggttctgtggcagctgtcccctcactgttgctccagcctggccctccaggctccccaccgcaccccaccgcascctggccagaggcttcccagcagctcagcttcagctctgccctggaattggggcctcgtggcttccacaccccctggtggccccggagagctggaggtca

SEQ ID NO: 214622 - DNA, 201 bp, Homo sapiens
tgggtgggcaggagctgggtgtctgagaagtttgctgaggtcccattgggctagagctggggtgctggagaaactcagtacagagcaggccccactgggcwcacgccactggcagctgtgccttcagaggaaaaagagaccctggaaccaggaagagaagctgctacctcagcaaggcctggcagctccccacagtgttgt

SEQ ID NO: 214623 - DNA, 201 bp, Homo sapiens
tgagatccttgcctaaattctttctgcagagacccttaaacagaatcaggtcacatttgaggttccaagtgggcatatctttgttttgggggggatcaccrgcccactgtaggtctcgttgtgcactgaagacgcaggcggtccctttggccaggcctgcagtcggtcttgccttcttttgtgaccgtggaagaatgcacc

SEQ ID NO: 214624 - DNA, 201 bp, Homo sapiens
agcaatgacgtcagcttgtgcagagggttctgtggcagctgtcccctcactgttgctccagcctggccctccaggctccccaccgcaccccaccgcacccyggccagaggcttcccagcagctcagcttcagctctgccctggaattggggcctcgtggcttccacaccccctggtggccccggagagctggaggtcacca

SEQ ID NO: 214625 - DNA, 201 bp, Homo sapiens
tctgagaagtttgctgaggtcccattgggctagagctggggtgctggagaaactcagtacagagcaggccccactgggcacacgccactggcagctgtgcmttcagaggaaaaagagaccctggaaccaggaagagaagctgctacctcagcaaggcctggcagctccccacagtgttgtcccctgtggatagagcctgac

SEQ ID NO: 214626 - DNA, 201 bp, Homo sapiens
ctggagagggatcatcttggaggggtcatactttccacccagtccttcagtccttctgtcctgtgtgtgtgcagcccctgaccaccaccatccctgccccygccacttgctcccagggttccatcaggttggatgttattgcaataaaatgtagcaacagaaggtccaggcagtgctgcagtccctggtggtatcatcaga

SEQ ID NO: 214627 - DNA, 201 bp, Homo sapiens
cagcctcagaccccacagagcagggtgccttcttcagaaaaacagtagggaggccaggacaccaagggccccagggacagcctgtttctcctggctggcaygagttctagccaagcctcctggtaccctgggggtgaggaggtaccagctgtgtgctttagtcactggctgctttgaggctgggtcggtgccaggctggcc

SEQ ID NO: 214628 - DNA, 201 bp, Homo sapiens
gacacctttctttcctcttctgcactgatctgggccctggctcccctggggtcttggtgtcctctctgcttcctgtagcctcatgggacccggctgctcayggccctgctgtgctcacagctgcctggaagctggcagcctgcttcaagggagggcggaggtgtggggtcccctcctacggcccccaccctgttctgcctg

SEQ ID NO: 214629 - DNA, 201 bp, Homo sapiens
accaaggcggggagaagtggcgtgagaggaggcagatgtggctggcaggagatcggcggccccggccttgctgagctccactctgtatgcaccaggtgacrgaggctgcccaggacggtgggcagggaagtgacaggtcacatggtcatcccaccaacagccgggagtccagcttggggggacccaagaccctggggaagg

SEQ ID NO: 214630 - DNA, 201 bp, Homo sapiens
caggaggctgcatcccccaaggcccccaccaggtaacttcattgggctgggtgtcgctgcaaaaccacccattgggtgcggtggtcttctggtggggggcrtggctggggaggatgcggtggaggagaagccagctccgtggttggggggagggcggactatccgtttcctgtctgtcccctgaactggagctcatggtcc

SEQ ID NO: 214631 - DNA, 201 bp, Homo sapiens
ccccagcagctgggggctcctgtggtcatttcctcttggtcctgttgagcagccctggcccctggagccctcagcaagggatgtgggggcctgccaggccrgggtcctcactgctgccgctatgcacagctgcatcttgcatccggggagtggggtgccgagtggggtgtttgggaggcaggttttcccttgtcccttctg

SEQ ID NO: 214632 - DNA, 201 bp, Homo sapiens
tgcaggcctgccttaggccgtgccggcacctgctgactgacgcttagcggatgctgataggagagggctgggatggggaagcagcaagtcccggtcactgygggctcgggttacagatggttgaggcacctcctggccatccccaggaagcaaggccccacgcagcctccgactcacccactgcccgtgtgtatttcagga

SEQ ID NO: 214633 - DNA, 201 bp, Homo sapiens
ctctgactgggtgctccttgtctaggttccttgcagcaaaagaattctctaatttattttgttcccttattgagtctctactccatgaagcccacctcctratcccagctgactggctcccacctcctcaagaggaaggccaggggcagacgaggctgaaggaggctgactcccctgtgccttcgcagtctgagctgatgc

SEQ ID NO: 214634 - DNA, 201 bp, Homo sapiens
ccctcccccttccccagggctggctgggaatggtggtctgttgcccagcctaggaggaagaggggctgtggcttccactctagaggtctctctcccggtcyctcccccggtgctggtctaactgcaggcctgccttaggccgtgccggcacctgctgactgacgcttagcggatgctgataggagagggctgggatgggga

SEQ ID NO: 214635 - DNA, 201 bp, Homo sapiens
cccccatcctgggagtgactgaaagtccttgggggttcctgcagggtgagctgcccattctggccctggtaaggacacccaggagagggccagggtgcctstatttggggcacagcataaagaacagccgtaagtgtttctcaggcaggagggtgccgaagcattgggaagctgggatttagaagcattgtttggggtggt

SEQ ID NO: 214636 - DNA, 201 bp, Homo sapiens
ggggtgcttctggtctgagctgaggcccctggaagccacagccaggaggcagcaagggacggctgtcatgtcccctctcccctgtctcccagggtccctgygggacagatttccctgcctgagcctcctggttgcccataccctggcctcccaaagcccagcctgaagccttaggcaccctacaacctgcttcctctagca

SEQ ID NO: 214637 - DNA, 201 bp, Homo sapiens
gctgcctttccaccctgcgggcctggttggggagtgtgaggatgcctgctggaagccaacgtgcacgaaagagttaatggtggatcccatttcctcagccycctctccagctttcccagggaaagggcaggaacagagaggccttatcttcagaggaaggggtgggcggggacacagcgctgttcggcacagtcccctctg

SEQ ID NO: 214638 - DNA, 201 bp, Homo sapiens
tatgggtgggcaggagctgggtgtctgagaagtttgctgaggtcccattgggctagagctggggtgctggagaaactcagtacagagcaggccccactggkcacacgccactggcagctgtgccttcagaggaaaaagagaccctggaaccaggaagagaagctgctacctcagcaaggcctggcagctccccacagtgtt

SEQ ID NO: 214639 - DNA, 201 bp, Homo sapiens
cagtgtgaatgcagcagcgcaagcttgccagcgccgcactgcgggatctggaggcctttgctcctgagccctgcctctgtgtaatccctaaagcacggacytcttaggggcttccattcctccacctggaaaaaccttacaccgtttagggcttgaggcagggctagagcatggagacgttgctggaggaccaagggagaa

SEQ ID NO: 214640 - DNA, 201 bp, Homo sapiens
gtggctctataggaaggggacataggtcctgagattttaggtccccaattggacaaagctgttttttttttctggataaatgttctagcttattcataatygagtggtcagttttcttttcttttcttttctttttttttttgagatggagtctcgctctttcgcccaggctggagtgcagtggcgctatctcggctcact

SEQ ID NO: 214641 - DNA, 201 bp, Homo sapiens
tatgcctggggtaggttgggaaaacctgtgggaatcacagagcttgctgtcatgctgtgttctggatacctgaagcttggcaggcaggtgggatcgagggygggcattaggaaagtgatgtggctctataggaaggggacataggtcctgagattttaggtccccaattggacaaagctgttttttttttctggataaatg

SEQ ID NO: 214642 - DNA, 201 bp, Homo sapiens
ggtctggaggtgccagtggtcactcatcagcacagcccagtctcacacatgtcactcccaaaggatgttgacacagaatgaagcagctaggggaggcggaygctttggcacgagggtggcgtttctggtaatccgtagtgctgttgtctgtggctgcctttggctggcatctcacctcctcctggctgtcctgcagccacc

SEQ ID NO: 214643 - DNA, 201 bp, Homo sapiens
taccacatgcactgatagctctctttgtatgaacagagctgtggcaggccctatgccagggagaaagtaagattggaaaagagcttaccaaggaggtggcrtttgcactgtgcttaaggggcaagaaaaacgtcttccaatcaggagccacaaatgcttggctgaagtgctactgctctttcatcctggagctggaacaga

SEQ ID NO: 214644 - DNA, 201 bp, Homo sapiens
ccgtcaaagctcacgtccaaggcatttgtgggcacccccgccccagacgtgagggttggcatcttctcttgcacgtgaagcaaaggcctgtttgaaggagsgtgtggaagcctgggtgtgatgaaggcaaggaccggtggctcacccctcttgcacctggaccttgggtggcaggcctggggccttcagtccttaattcag

SEQ ID NO: 214645 - DNA, 201 bp, Homo sapiens
gctttgtttgctaccaaaaaatttcttaagaattcctcagctgcaaatcctcctaccggagggggggttccaggaacccagccttgctcggggttggggcmcctcagcacctgctgcacaggcgttggtcattaaaggtcatgtgccgtatccgtgggccctcggggtctggtggcacctgggcacacagtccagtggcgg

SEQ ID NO: 214646 - DNA, 201 bp, Homo sapiens
agacaggtgggatgatggccataccttgagttagtcaaggcaccatctggctgtgtaacaaaagctaaaacatcagaggctgagcagcactcggacccacrtcccagtccaagtgtcagtcgttatgggggcccaggacagcccggacctagttcattcctttggtgcatcctcgacacacagcttccatctcttgagctg

SEQ ID NO: 214647 - DNA, 201 bp, Homo sapiens
aggaccgcccccacccttgggctacagaattgaaggaggggacacatgaaagatgttcctagactcgggctggaggctggggacatccgagggcaaggacracgctgtccctgctcttgtttgcagaggagtgcacagggctcaccagcttcttgttgctgtttaagtgatagctttatggagatagaattcacatactgt

SEQ ID NO: 214648 - DNA, 201 bp, Homo sapiens
ggagatgggaatgccgggaccttctcctgcacctcccgaacccccgttccctgtgagttagatggggagtgcacccctgccctcccctcctgggtatcccytgcgccccccgccccaggcacttgatgttgcctgttcattttccctctctgcccctcccgctggcccttcccatatggtcctaattaggaccttccgccc

SEQ ID NO: 214649 - DNA, 201 bp, Homo sapiens
agccctaatcctggctctgtcattaacactgtgcgaccctcagcaaatcattttgcctgtctaggtcctgttttcattcctatgaaacgagggcgttaaaytgtatgttataaataatgagggctaccagttaccaagctcctattttaggccaggcacttttcacatgttattatgagtcctttcaatctaggtattgtt

SEQ ID NO: 214650 - DNA, 201 bp, Homo sapiens
gttgacctttttaaaatctacagttcaatggttttgctgtattcacaaagtgattgtattagggtcatccagagaaacagaaccaatagaaggtgtgtacrtgtgtttagataaagagatttattattatgaggagttggctcacctcattacagaggttggcaagtgccaagattggcagagtaaatcagcaggctggag

SEQ ID NO: 214651 - DNA, 201 bp, Homo sapiens
ttacctttctcttccctccattctgttgtgaaaatgttcaaaacacatggtcaagttgaaagcattttacagggaacacattcagccatcacctagattcyaccactaacaccaagctacacctgctttatcacctcaccgtccatctatccctccttcgcctggccatgaatccattttatttttattttttggtgcatt

SEQ ID NO: 214652 - DNA, 201 bp, Homo sapiens
ggccagaggggtggggctggagcgggcgtctgacctgtggctggatctagctgcccgtggacaggctgtgagtgaatctgcagaggaagggagatgggaakgccgggaccttctcctgcacctcccgaacccccgttccctgtgagttagatggggagtgcacccctgccctcccctcctgggtatcccctgcgccccccg

SEQ ID NO: 214653 - DNA, 201 bp, Homo sapiens
gttggctcacctcattacagaggttggcaagtgccaagattggcagagtaaatcagcaggctggagacacgggagagcccatgttgcggctctggtgtccmcctgaaggcccaagacccaggagagccaatggcgtcgttccagtcccgagacccaggaaaagcgcatgtgtcagtttgagtctgaagcaggaaaaatctg

SEQ ID NO: 214654 - DNA, 201 bp, Homo sapiens
ccaccatctccagccgtggtgtccctctcggtcacaggatgctgcagccacgttgcagggaaggagagcctcccttcctgtgagcctagggagcccctccwtgcagccccttcactggccattgcctgagacccgacctggtggctcctgccccaaggagcagaaagggggttcgctaggtcagggtggggctgggtgcga

SEQ ID NO: 214655 - DNA, 201 bp, Homo sapiens
gggcaggatggagagctggcccacgccacctgtggaatcttccaggtgtgggggcagatggggaagcaagggggcttgaagacacatgcgctcattaaatktccttaaatcccaagaagaagaacaaggacacatccacaggggcagggctgaaagtctgatgcatggtgttttggggtctgctcctgctgcaacagctac

SEQ ID NO: 214656 - DNA, 201 bp, Homo sapiens
gtgtgtgtgtgtgtgtgtgtgtgctatttttatcagttttggtgtctgcattgtgctggcttagcaaaaacaatttggatgcatttcttttaccctctgcsttctggaacattttaagcagcaacataataatctctctgttaaaacttttcaagaattcactcgtgaaaccatctgagcctgatacttttgggggagtct

SEQ ID NO: 214657 - DNA, 201 bp, Homo sapiens
caagattggcagagtaaatcagcaggctggagacacgggagagcccatgttgcggctctggtgtccacctgaaggcccaagacccaggagagccaatggcrtcgttccagtcccgagacccaggaaaagcgcatgtgtcagtttgagtctgaagcaggaaaaatctgatgttccaggttgaaggcggttaagcgggaagaa

SEQ ID NO: 214658 - DNA, 201 bp, Homo sapiens
aagttcttggagactggaccctcaggctgttccaccagcccctcctcaggccagcttaacccttccgtgctcgttttctgagctgttagaggaagagagcrggaggaaggatggagtggggtttttgtggggactgagcggggggtgtgtgaggccctggaaatggtgcctgcggcactcacgcagcattagcttttgctg

SEQ ID NO: 214659 - DNA, 201 bp, Homo sapiens
ctgagggcacaaagggcaggatggagagctggcccacgccacctgtggaatcttccaggtgtgggggcagatggggaagcaagggggcttgaagacacatrcgctcattaaatgtccttaaatcccaagaagaagaacaaggacacatccacaggggcagggctgaaagtctgatgcatggtgttttggggtctgctcctg

SEQ ID NO: 214660 - DNA, 201 bp, Homo sapiens
ggcattggctgctttgtttctcccttgtccctgtcaccttcttccctcagcaggctctcattcacttgttcatttattcatggccgaggccccgtctgtgycaggcctggtgctgagaacgggggtagagagatgggggctgtgccctgctccctgacccaagggttccctttgcaatgtgaagttcttggagactggacc

SEQ ID NO: 214661 - DNA, 201 bp, Homo sapiens
ccacgttttcttctagtacttctgtggtttcatttttacatgttgaaatcatgaatccattggaatgtattttggtttcagcagcgaggtaggggtagatrgtattgcttggatacacagcagcgagcttggtctggagcgggtggggcgtgtgtgtgtgtgtgtgtgtgtgtgtgtgtgtgtgctatttttatcagtttt

SEQ ID NO: 214662 - DNA, 201 bp, Homo sapiens
aaaaaaaaaaaaaaaagttgccacgttgtcacctctctcagggattttcatcctttctacttttcgcccaagacttgccctgtaaaaggatgaggccaaayagccatgggagggtggtactggatgttcaaaaaaatgtttcgtggctggcgggacttagaaacaggttggggaggtttcagcagagggtggaccccagct

SEQ ID NO: 214663 - DNA, 201 bp, Homo sapiens
gacagagtgagatcctgtctaaaaaaaaaaaagagttatttgtacatctttatcacagcaggtacgagtatcttgtccccagctgcctacttttgattttrtttctgggatgttcttctacacagaacattttaatcctgatattgtcaagtctctgctttcccttttagcttttggaattcacatcctgtttagaggtct

SEQ ID NO: 214664 - DNA, 201 bp, Homo sapiens
gaggttgcagtgagccaagatcgtgccactgcattccagcctaggcaacgggagtgaaatgctgtctcaaaaaaaaaaaaaaaaaaaaaaaagttgccacsttgtcacctctctcagggattttcatcctttctacttttcgcccaagacttgccctgtaaaaggatgaggccaaatagccatgggagggtggtactggat

SEQ ID NO: 214665 - DNA, 201 bp, Homo sapiens
tgaccccgggggcctgcagctgggtcctggctgctgacttccagtttcctttgcctgttggagcccagaacaagtcagaaaggggaaatgcaaagttcgastgtcttttctgtggtagactggcaggcctgggtgggtgagccacttgcagctagttgcagcgtgagagaggaagtgggaggggagggagagggtgagttt

SEQ ID NO: 214666 - DNA, 201 bp, Homo sapiens
gctcagtttcctctctgctgccggcgtgcatcttctctgcccagtgccccttctgggactgtgtgtccaggccctgaggccctagaaaaggggggtggagrgcctcctcactatcctgtagcaatgaggcctcattaaaatcctggagccccagactggacccagcccttagctatgatcaaaggacagctcgggatatga

SEQ ID NO: 214667 - DNA, 201 bp, Homo sapiens
tttctccattgtccttctgtaagtggttctctaagtgggaactcaggcctggaaagggtgggcaccctgtctggtgggctctggcaggccaggcgctgagsagcctcaggagacacaaccctaggaaaaggctcatgcaggctggctgtcatgacggactgttggtgggagaggggaaggcgccgtggtaggggaagcttt

SEQ ID NO: 214668 - DNA, 201 bp, Homo sapiens
ttacagtcaggaacaaagcaatagatgttattttttaaagttcatgggctcgtgcccgtaatcccaacactctgggaggctgaggcaggaggattccttargcccaggagtttgagaccagcctgggcaacatagggagacccccacctttttttttttttttttttgacagagtttcactgtgtcccaggctgaagtggc

SEQ ID NO: 214669 - DNA, 201 bp, Homo sapiens
ggtttcaccatgttgaccaggctggtctcaaactcctgtcctcaagtgatccatccatctcggcctcccaaggttccaggattacaggcgtgagccactgygcccggccatgggagaccccctcttaaaacaagaataaaaataaaaataaataaaagtttactgtcaaaaagaaaaacacatcacccaacctaatctccc

SEQ ID NO: 214670 - DNA, 201 bp, Homo sapiens
tagggtgacaagagggatgaccctttcctctttctcccttctggttggtggaggcacggggctggcggacggcatgtgctttcgtgaattcaggccaaatctgttatcgcaaacacgattacaactcgggtctttgtgtaacaaaagcctttccaagtaccagctgttggcctgctttgctcagcggtgtttgctgtaacc

SEQ ID NO: 214671 - DNA, 201 bp, Homo sapiens
gatttttagagtctcattttctacttttccactgtacaaacgggcctccaggcgactgcagcacccgccactgcccgtaatagggtgacaagagggatgamcctttcctctttctcccttctggttggtggaggcacggggctggcggacggcatgtgctttcgtgaattcaggccaaatctgttatcgcaaacacgatta

SEQ ID NO: 214672 - DNA, 201 bp, Homo sapiens
gttcccaggaatggagagggtatcagtgtcttccatggactcaaacttcccgcatcccgcctttgctcccccttcaagataggtctccgagcttcaaggtyttagggctctgtggaggccgccacgtagcagcaaggagaatgttttgtatttggctgatgagatttttagagtctcattttctacttttccactgtacaa

SEQ ID NO: 214673 - DNA, 201 bp, Homo sapiens
ttcaggctcagggttcccaggaatggagagggtatcagtgtcttccatggactcaaacttcccgcatcccgcctttgctcccccttcaagataggtctccragcttcaaggttttagggctctgtggaggccgccacgtagcagcaaggagaatgttttgtatttggctgatgagatttttagagtctcattttctacttt

SEQ ID NO: 214674 - DNA, 201 bp, Homo sapiens
attgatccttgttcctgaattggcctctaaagtggttactagaattttttaggacccctcccctcgtcgacctgctcagctgtctgctgggccctgtgcastgatggtccagcagggaggtcctatgccccttacccctggctgagggccaaatgctctccaattggtgttttattttgtgcatctcggtcaagcgagagg

SEQ ID NO: 214675 - DNA, 201 bp, Homo sapiens
tcagtgtcccggacccctgtgggccccgtcacactgagctccccacagacaactgagttttccaccaaaagtctgacaggcaaggggctcccaggggaacygtcaccggcctgtgccggagttggctgaggaaggccattaatttccggtgtctccttggttgtcatcgctgcctacctggggttgccccggggtcagtca

SEQ ID NO: 214676 - DNA, 201 bp, Homo sapiens
gctgttcaggccgggtccttcaggctcagggttcccaggaatggagagggtatcagtgtcttccatggactcaaacttcccgcatcccgcctttgctcccycttcaagataggtctccgagcttcaaggttttagggctctgtggaggccgccacgtagcagcaaggagaatgttttgtatttggctgatgagatttttag

SEQ ID NO: 214677 - DNA, 201 bp, Homo sapiens
ccctatcaaaaaaaaaaaaaaaaaaaaaaaattgatccttgttcctgaattggcctctaaagtggttactagaattttttaggacccctcccctcgtcgasctgctcagctgtctgctgggccctgtgcagtgatggtccagcagggaggtcctatgccccttacccctggctgagggccaaatgctctccaattggtgtt

SEQ ID NO: 214678 - DNA, 201 bp, Homo sapiens
ttcctcccgccggctctgtccgcacctgacgtcgcccctagaggtcagtaagggcgggaggctgcatgtaccctggcaggtggactcttcatggcctcacrgaccctctgtcctcagctccctgtgcaccccctgccagacacctgtggctcaccctgagccagggctgggaggaggaggaccagaggccagcaggagtgg

SEQ ID NO: 214679 - DNA, 201 bp, Homo sapiens
ggcagtatacagggtagacggcaagtgacctggcatggggaaagaggcaggtgcccaggccggcacagcacacccgtaaggaacaggtagacgggaagccrtccgtgggcctgtgtgtgtgctcggagttaaaattctgccaatgtcccatgtcctgggcacatctaccccctccctggggagcacctttctcttcacctt

SEQ ID NO: 214680 - DNA, 201 bp, Homo sapiens
tcggggcccaaagtgtgggcagcccctaaccagaccctggattccagcagacagcctgggaggatgccatgtggtccaccctgacacactgtctcacctgkgacctcatttctgagagctgcagggaggcgcttcctcagttggactccacttcctctccggggttttctgtgggtgttataagtgactctgtctccttca

SEQ ID NO: 214681 - DNA, 201 bp, Homo sapiens
aggagcctggctggtgggcagcgggcctcacccagagtctgtgggaaaacccaagccggagttttcgagcccaccctctggcatcatcctctgtgggccarcaggagtcaggggcagggggccagctcgctgtccatgggcctctcctgaactgaacatctgccctcccaggcagaacggctcacctgcggtcctgtggca

SEQ ID NO: 214682 - DNA, 201 bp, Homo sapiens
aactgatgactttagggaacggagaatctgaggaaggcctcgcaggagagggtcagatgcgatcgagtaaatgtgagccgtctgtaaactgtagagtgcaygcacagcaccggtcagccctggggtcagtgttcccctggtgctcagctcggcctctgcaccttttagtgctcggctgggctctgtgggggtcagggctgg

SEQ ID NO: 214683 - DNA, 201 bp, Homo sapiens
cagcagccagcagcagtgggggaggctggaatgagctggctggagagggggctggggcataaggaggggcctgcctgtgaagatcatatgggccaggctgyggagggccaggcatgcccgccgggagtgcagctggtccacgggaagcatctggagtggctgggaatgggcgcaggagcagcgccgtgggagcacaggtct

SEQ ID NO: 214684 - DNA, 201 bp, Homo sapiens
gtgtgtctccttcgtggtgggacggggtggggccagagaacagagcctggctccagagcccaggaagagaacccctcccctcgccggcctgccaagcaccstgcagtggtgagaggaaaggagggctggtccgggaatgcagcgggtgccgagcagctgtggaataccttaaatagagcgcagctgcggggaagggtgggg

SEQ ID NO: 214685 - DNA, 201 bp, Homo sapiens
ctcacccagagtctgtgggaaaacccaagccggagttttcgagcccaccctctggcatcatcctctgtgggccaacaggagtcaggggcagggggccagcycgctgtccatgggcctctcctgaactgaacatctgccctcccaggcagaacggctcacctgcggtcctgtggcagctgttccagctgctccaagctttgc

SEQ ID NO: 214686 - DNA, 201 bp, Homo sapiens
cggctgggctctgtgggggtcagggctgggtctggtacattagaggacttctaccaagcccctggcagtgtctcagttactaaatccagtttgccagttastaaatccgctctgccggttcccgaatcactcttccgctggggccggccatgtcacgtcaggcttttcatgcaggacggcagatggatagacgctgggacc

SEQ ID NO: 214687 - DNA, 201 bp, Homo sapiens
gggtggacagacagacgtggggaagggatgattgaaggaggtggaggagagagtgtgattcagcccagccaggggtgatgtggacaggcagcttccgaatsagggtagagaaaagtcaccactagctagcaggggagaagtcagtatggaggaggcggaccttgagggagagtaggaattggattgcaagaggaaggagag

SEQ ID NO: 214688 - DNA, 201 bp, Homo sapiens
catcctctgtgggccaacaggagtcaggggcagggggccagctcgctgtccatgggcctctcctgaactgaacatctgccctcccaggcagaacggctcayctgcggtcctgtggcagctgttccagctgctccaagctttgcctcagctgaggctgatggcaggaggcagaagcctctcctgatgccagctgggcaagcc

SEQ ID NO: 214689 - DNA, 201 bp, Homo sapiens
ctctgtgggggtcagggctgggtctggtacattagaggacttctaccaagcccctggcagtgtctcagttactaaatccagtttgccagttactaaatccrctctgccggttcccgaatcactcttccgctggggccggccatgtcacgtcaggcttttcatgcaggacggcagatggatagacgctgggaccaagtcatc

SEQ ID NO: 214690 - DNA, 201 bp, Homo sapiens
cagttggcaatcctttggctctgggggaaggtttctcagtctcggggagtggggcctcaatctgctggttccctgtgtttatcagtctcccccttgtgtgycctgaatggttttgctgggaattctggtcttagagccatcaggtggcccgagtcgataggcgtgagagagtgtgtgtgtgcatgagtgcgcatgtgcatg

SEQ ID NO: 214691 - DNA, 201 bp, Homo sapiens
ctctgggggacaggtagggggatgtccatggggatgtacaagaacattctcctccaggggcagacacagtttagcccctaaattgtgccagagactgtgcygggagccaggcccagggacacaacctgcgggctctgctttctggagctcaccgagccgtgagcaggatggctgggacacaaggagtgtccagggagcttc

SEQ ID NO: 214692 - DNA, 201 bp, Homo sapiens
tcctctgtgggccaacaggagtcaggggcagggggccagctcgctgtccatgggcctctcctgaactgaacatctgccctcccaggcagaacggctcaccygcggtcctgtggcagctgttccagctgctccaagctttgcctcagctgaggctgatggcaggaggcagaagcctctcctgatgccagctgggcaagccga

SEQ ID NO: 214693 - DNA, 201 bp, Homo sapiens
catgctcatactggggtctccctaggtccactgtgttccgttgagcctcctgcagtccccgagtgaatgtgacctccctgcccctgcctctttgcaactcytccctgcgaccgctcctccaggggccttccttgtcccaaatgtccaagtggcacgacttagccggtctgaccactttccagtaagcccttatggagagag

SEQ ID NO: 214694 - DNA, 201 bp, Homo sapiens
tgggttgatgtgttcacactcagctgagtcaaacaggatgtggctggggaggcggttgtcaccgagccatctaaatctcggtgatggctggtgctggatgyacagggacgtggtcctggctctgggggacaggtagggggatgtccatggggatgtacaagaacattctcctccaggggcagacacagtttagcccctaaa

SEQ ID NO: 214695 - DNA, 201 bp, Homo sapiens
ggactccagctaggcatgttgcctggtcccgcccaaggcgtccagtcccatggggcaggggcgggccttggccatctctgcttaaacttctgcccggagcsggcttctccccagccatgtgtgtgaccgatttattctcactgtgggaaaagctcggctccagaactggggaagatggtgccccagttccagggccctgcc

SEQ ID NO: 214696 - DNA, 201 bp, Homo sapiens
ctgggttgatgtgttcacactcagctgagtcaaacaggatgtggctggggaggcggttgtcaccgagccatctaaatctcggtgatggctggtgctggatrcacagggacgtggtcctggctctgggggacaggtagggggatgtccatggggatgtacaagaacattctcctccaggggcagacacagtttagcccctaa

SEQ ID NO: 214697 - DNA, 201 bp, Homo sapiens
gacgggaagagacccccggccctcaccgccgcatcgcctgccttcctctgctgctccttagcaggaaacatgccggagtgttccctagccatccattcacyaattgcatcccctctctttatttttcagccttgaaaagatcttttgaggtcgaggaggtcgagacacccaactccaccccaccccggagggtccagactc

SEQ ID NO: 214698 - DNA, 201 bp, Homo sapiens
tccagcctgggtgacagagcgagactccatctcaaaaaaaaaaaaaaaaaaaaaagtttcaggagggatggtctctgccaccttcttctccgccaccgtcygaggcccctgctgtgggatagggaggggcatccaagcaagagggcagccctgggctcttcctcctgacagggcagcacatcagagccacatggggtgcct

SEQ ID NO: 214699 - DNA, 201 bp, Homo sapiens
ctgtgttagccaggatggtctcgatctcctgacctcgtgatctgcccgcctctgcctcccaaagtgctgggattacaggcgtgagccgccgcgcccggccrcacgtttctgttcttgaacaggtggctccctgaccctgggtgtggttactccaagaccttgctctggtggggcacgattctggccccaggtagggcgacc

SEQ ID NO: 214700 - DNA, 201 bp, Homo sapiens
caggacctttgtttgacgtgccggatacacccccatcctgggttgatgtgttcacactcagctgagtcaaacaggatgtggctggggaggcggttgtcacygagccatctaaatctcggtgatggctggtgctggatgcacagggacgtggtcctggctctgggggacaggtagggggatgtccatggggatgtacaagaa

SEQ ID NO: 214701 - DNA, 201 bp, Homo sapiens
agctcaggaatcaacacagatagtatttaatgcagtatttttcaatatcgaaatgatgcatagtaatctctatgatgaacaaatgttggaattttaaattragacaggcccagccctgcacgtgcacagccctgtcagagtttgttcagcgtggaatttgatttgtttaaaatgttgcttcaaaatattgtttgattcctg

SEQ ID NO: 214702 - DNA, 201 bp, Homo sapiens
ctgtactacaaatacaaaattagctgggcatggtggtgggcacctgtgatcccagctacttggaaggctgaggcaggagaattgcttgaacccaggaggcrgaggttgcagtgagccaagatcacaccattgcactccagcctggagaaaaaaagcaaaactctgtctcaaaaaaaaaaaaaaaaagcaaacccagggcca

SEQ ID NO: 214703 - DNA, 201 bp, Homo sapiens
ctcctgctccctactagggtaggttgttttttttttgttgtttttgttttttgtttctttttttttttgagacggagtctcgctctgtcgcccaggctggmgtggagtgatgcgatctccgctcactgcaagctccgcctccctggttcacaccattctcctgcctgagcttccagaatagctgggactacaggcgcccgc

SEQ ID NO: 214704 - DNA, 201 bp, Homo sapiens
cttgtcaggagcaaaatgtaaggggacaccaaagagctcaggaatcaacacagatagtatttaatgcagtatttttcaatatcgaaatgatgcatagtaayctctatgatgaacaaatgttggaattttaaattaagacaggcccagccctgcacgtgcacagccctgtcagagtttgttcagcgtggaatttgatttgtt

SEQ ID NO: 214705 - DNA, 201 bp, Homo sapiens
gagctccctcagggcttgtgcctatcctgtgatcctgtgatccagccttttttttgagatgaagtcttgctttgtcgcccaggctggagtactgtggcacratctgggctcactgcaacctctgcctcccgaatttaagtgattcttctgcctcagccttccaagtagctgggattacaggcgcccacccccatgcctagc

SEQ ID NO: 214706 - DNA, 201 bp, Homo sapiens
ggcaaggtgtgtcaggcacttgtcaggagcaaaatgtaaggggacaccaaagagctcaggaatcaacacagatagtatttaatgcagtatttttcaatatygaaatgatgcatagtaatctctatgatgaacaaatgttggaattttaaattaagacaggcccagccctgcacgtgcacagccctgtcagagtttgttcag

SEQ ID NO: 214707 - DNA, 201 bp, Homo sapiens
acctcaggtgatccgcctgccttgggcctgccttggcctcccaaagtgctgggattacaggcatgagccaccacgcctggcatttagtaggttttggttgttttttttttttgagacagagtctcactctgtcatccaggctggagtgtagtggtgtgatcatggctcactgcagccttgatctcctggcctcaagtgatc

SEQ ID NO: 214708 - DNA, 201 bp, Homo sapiens
tggctgttatctagaacaaactcgcctttgagcagcgccgtcctgatggtggggtggcccctgcgggtggaacagcccctgctgtctcagagcttactgasagctagtgggcatgggagtggtgctggaccgaaacacccagagggatcatagagccaggcagtaagcacagaggccagctagtggggagggagggaccca

SEQ ID NO: 214709 - DNA, 201 bp, Homo sapiens
acacgatctcagctctgcaacctctgcctcccgggttcaagcgattctcctgcctcagcctcctgagtagctgggactataggcgagtgtcaccatgcccrgctaattttttatttttagtaaagatggggtttcaccacatcagccaggctgctcagtgttttaaaaagggcttgttttgctttgtgccagcatttaaag

SEQ ID NO: 214710 - DNA, 201 bp, Homo sapiens
cgcgacaagaaggaaatcaaggccgggcacggtggcgcacgcctgtaatcccagcactttgggaggccgaggcgggtggatcgcttgaggtcaggagtccsagaccagactgaccaacatggtgaaaccccatctctactaaaaatacaaaaattagccaggcatggtggcccgtgcctataatcccagctactggggagg

SEQ ID NO: 214711 - DNA, 201 bp, Homo sapiens
gagtctcgctctttcgcccaggctggagtgcagtggcgctatctcggctcactgcaagctccgcctcccaggttcacgccattctcccgcctcagcctccrgagtagctgggactacaggcgcctgccaccgcgtccggctaattttttgtatttttagtagagacagggtttcaccgtgttagccaggatggtctcgatc

SEQ ID NO: 214712 - DNA, 201 bp, Homo sapiens
ggcgctatctcggctcactgcaagctccgcctcccaggttcacgccattctcccgcctcagcctccggagtagctgggactacaggcgcctgccaccgcgyccggctaattttttgtatttttagtagagacagggtttcaccgtgttagccaggatggtctcgatctcttgacctcgtgatccgcccgcctcggcctccc

SEQ ID NO: 214713 - DNA, 201 bp, Homo sapiens
tctggagagcaggagctgagctgtccaggagcaggagctggtgctggtcactccagtatcccccagactgagggcagtgccaggtgtcctatactcagctkcagagcaggtggttcccctgccctcctgcccatggggctgccctcagactctgcttttggcaccagcatttctgggcagggggagagaggtggggtccgg

SEQ ID NO: 214714 - DNA, 201 bp, Homo sapiens
tttacaaagtgtgttgggacttgcggggctgctctgtccaagcctgggtctggcgtccgcgtctctgagcctgtgagtgcgtgcgctttcctgcgtcctcktgactgccggtgctggggctctgcgtcctgcgtccgcgggagtaaatacagcaggcgaaggggaagctcacacaatggtctccagcgctctggggcaggg

SEQ ID NO: 214715 - DNA, 201 bp, Homo sapiens
  misc_feature (1)...(201): n = A,T,C or G
tgagcccaggtgtctgtacccagtgctgtcaggctgaggctctcgtttttgggggacctcaggctcagggcagctcctcccgggggcccaggggagggaantgccttcccgcacatgtgtaaccaataccgtctgcccgttccccaggagatgatcccatttgctgtggtgggcagtgaccacgagtaccaggtcaacggc

SEQ ID NO: 214716 - DNA, 201 bp, Homo sapiens
ggtgctttttagaaaaacactcgagaataatgctgtggcttaggatggctgttgtgccggacccggcatcttcccaggggggctgtgttgttgggctgagyttcttaggtactggacccccaaatccccaaatacggcgtggacaggtggcccagtaggggctggactatccgataggcccaggtgctggagttcagacaa

SEQ ID NO: 214717 - DNA, 201 bp, Homo sapiens
aagaggatccttgggaggaagaccaagtggggtaccatcgaaggtactcgccgcaggcgccggggctccagacagatgggaagacagtctcttctgctgayccagagcctgtgggccacgcctgagccggggactcgtggaacctcatccactgccttgccccacccaagagggaggggtctccttgtccccattcaaccc

SEQ ID NO: 214718 - DNA, 201 bp, Homo sapiens
cagctcagtttcctctctgctgccggcgtgcatcttctctgcccagtgccccttctgggactgtgtgtccaggccctgaggccctagaaaaggggggtggrgggcctcctcactatcctgtagcaatgaggcctcattaaaatcctggagccccagactggacccagcccttagctatgatcaaaggacagctcgggatat

SEQ ID NO: 214719 - DNA, 201 bp, Homo sapiens
ggggtaccatcgaaggtactcgccgcaggcgccggggctccagacagatgggaagacagtctcttctgctgatccagagcctgtgggccacgcctgagccrgggactcgtggaacctcatccactgccttgccccacccaagagggaggggtctccttgtccccattcaacccttgggaaagtgagagggcaagtggcctg

SEQ ID NO: 214720 - DNA, 201 bp, Homo sapiens
ttttttgagacagggtcttgctctgtcctccaggctggcgtgcagtggtgtgatcactgcttactgcaacctctgccccctgggctcaagtgattccccarcctcagcctcccaagtacctaggaccacaggttgcgcgccaccatgcctggctaatttttaaattttttttgtagagacaggttctcactaggttgccca

SEQ ID NO: 214721 - DNA, 201 bp, Homo sapiens
aacagaatcaggtcacatttgaggttccaagtgggcatatctttgttttgggggggatcaccagcccactgtaggtctcgttgtgcactgaagacgcaggyggtccctttggccaggcctgcagtcggtcttgccttcttttgtgaccgtggaagaatgcaccttgctggatgcacaggcctttatagttcttttgttctt

SEQ ID NO: 214722 - DNA, 201 bp, Homo sapiens
ctctttcataggcacctgtgtggccctggacaaatcgcccaacctctctgggcctagaaaaggggtgggctgtagctctgtgagccagatggaccctcggmcccttaccctgctgaagttcctgggaccctcacaccttagtctcttgagtggctgttgtaaccaattagcacaaacgaggggacttaaaacaacacaaac

SEQ ID NO: 214723 - DNA, 201 bp, Homo sapiens
tcagaggctgaataatattctgttgtgcgatgcacttgtgttgtgtagctgttcctccatcggtggacccttgggttgcttccacatctctctaagtccckctttccatcttctttgacttttctttgacttttttgagacagggtcttgctctgtcctccaggctggcgtgcagtggtgtgatcactgcttactgcaacc

SEQ ID NO: 214724 - DNA, 201 bp, Homo sapiens
cataggcacctgtgtggccctggacaaatcgcccaacctctctgggcctagaaaaggggtgggctgtagctctgtgagccagatggaccctcggccccttrccctgctgaagttcctgggaccctcacaccttagtctcttgagtggctgttgtaaccaattagcacaaacgaggggacttaaaacaacacaaacgtattt

SEQ ID NO: 214725 - DNA, 201 bp, Homo sapiens
cattctattttctgtctttattatgaatttatttgaccactctaggaaccttgtgtgagtggaaaaatacaataactgcccattttgtgtctggctcattkcactcagcatgacgtcctaaaggttcatccgtcgtgctgtagcatggggcagaatttccttcctttcagaggctgaataatattctgttgtgcgatgcac

SEQ ID NO: 214726 - DNA, 201 bp, Homo sapiens
tgcctcttccagcttctggtggccccaggtgttccttggcctgtggctgcatcactccggtctctgcctctgtcttcacaaggcctttttctgtgtctctstactttcttttctgtctcttagaaggacacagcattgaatttagggcccaccttatcttgagatccttgcctaaattctttctgcagagacccttaaaca

SEQ ID NO: 214727 - DNA, 201 bp, Homo sapiens
cccttaccctgctgaagttcctgggaccctcacaccttagtctcttgagtggctgttgtaaccaattagcacaaacgaggggacttaaaacaacacaaacstattttcacagttccagaggccagaggtccgaaatcaggggctgtttccttctgaggccctgaggaccagcctcatccatgccttcctccttctggtggc

SEQ ID NO: 214728 - DNA, 201 bp, Homo sapiens
agaccaagctccccatgcccctcccccagctgctggcagccaccattctattttctgtctttattatgaatttatttgaccactctaggaaccttgtgtgwgtggaaaaatacaataactgcccattttgtgtctggctcatttcactcagcatgacgtcctaaaggttcatccgtcgtgctgtagcatggggcagaattt

SEQ ID NO: 214729 - DNA, 201 bp, Homo sapiens
ttaagcggctgcagatgtgatgagctcggtaagcccggcgcctcgccggcactgaaagctccagtgtccgcccttagtgtcattgatggggttttgttccygctgcggttctgattggttacagttgcggtcacttattattggaggcatgtcccccgctgtggctgatggtagaggtgtgtttgctggtggtgtcccagt

SEQ ID NO: 214730 - DNA, 201 bp, Homo sapiens
gccacgtggaggcagcagcgttcagagctgccaggaacctggcgctctggggggacggtggctttctccatggaataggatgtacacgttggagccggggyatgggagaaaaccatcagcatcccagacccggccgcccacggacagggacctgtgcaggtgggagtccagctcacgtggagaggtccgtgggctgggctg

SEQ ID NO: 214731 - DNA, 201 bp, Homo sapiens
atcagaacacagccagcagtttgcatgcagggtgcagagggacagagggacaccatgtcgggagcccacacctggcacacccctgactctggggctcagtrtcctgctgccctgcggccacgtgatcagctagaggtcatggctggacccataggcgaatacagcctgtggatttgattttgtttggccctgcggtgtttt

SEQ ID NO: 214732 - DNA, 201 bp, Homo sapiens
ccttggcccctctgcctgcagttcctctcttcctctctgcccaaagagttcttgctgtttaggaaactttttatgaaaggcaggtttgggagagttagggrtggatgggcctgggacgggccggcggctttgctatgggcgtgcctctgctgcaccctggtggccaaccttgagtaccgcaggtggccggtgacagaaact

SEQ ID NO: 214733 - DNA, 201 bp, Homo sapiens
cattcagttctgggcattgaaccctggactttctggctggtagaagtggacattcaacctttccttggggccctggggcttctgcagaatcagaacacagycagcagtttgcatgcagggtgcagagggacagagggacaccatgtcgggagcccacacctggcacacccctgactctggggctcagtgtcctgctgccct

SEQ ID NO: 214734 - DNA, 201 bp, Homo sapiens
ctttttatgaaaggcaggtttgggagagttagggatggatgggcctgggacgggccggcggctttgctatgggcgtgcctctgctgcaccctggtggccarccttgagtaccgcaggtggccggtgacagaaactgtcaggaaatgcacaagagagaggtccccgcacctctctgacctgtgcgttgttgagcaccactgg

SEQ ID NO: 214735 - DNA, 201 bp, Homo sapiens
aaggagggggttcaccggatctcccagggaaggtcatttgttttcttgggttggacctgggacaaggccttctcctgtctagtttctgttctccaacttgrccgcacggaaggatgctgaggacacctggaagccggcccctgctctacagcacccataggacagaggcacaccatgtggggacagtttggacagtgctca

SEQ ID NO: 214736 - DNA, 201 bp, Homo sapiens
ccctcgccggcctgccaagcaccgtgcagtggtgagaggaaaggagggctggtccgggaatgcagcgggtgccgagcagctgtggaataccttaaatagascgcagctgcggggaagggtggggccaggaggcaggcgctgggggcggtttctctgctccgccccctgcagctctgtggccctgaccacccagcctggccc

SEQ ID NO: 214737 - DNA, 201 bp, Homo sapiens
cgcagatggccaaggtggtgaggcgccagccacgcagacaactggaggaaggaggagtgccctaggggaggggccagctccggttctagaatgatccgctkgtgcacgtgggcctggctggaataaatcattgcatccgcaccgtagactcaatcgtaagctcacaccagggcagcctctgctttggtgcagtgtcttcga

SEQ ID NO: 214738 - DNA, 201 bp, Homo sapiens
ggcaggagaatcacttgaacccaggaggcggaggttgcagtgagctgagattgtgccagtgcagtccagcctgggcaacagaacaagactcccatctgggaaaaaaaaaaaaaagcgatgcccagtcattcttagatagaaaatgaagatcacatgaaatttggaaagaagtttttctctcccattccccaactctctccc

SEQ ID NO: 214739 - DNA, 201 bp, Homo sapiens
cttgtccccagctgcctacttttgattttgtttctgggatgttcttctacacagaacattttaatcctgatattgtcaagtctctgctttcccttttagcttttggaattcacatcctgtttagaggtctcctgcgttctgaaattataggaaagaatttcacccacgttttcttctagtacttctgtggtttcattttta

SEQ ID NO: 214740 - DNA, 201 bp, Homo sapiens
catgaatccattggaatgtattttggtttcagcagcgaggtaggggtagatggtattgcttggatacacagcagcgagcttggtctggagcgggtggggcktgtgtgtgtgtgtgtgtgtgtgtgtgtgtgtgtgctatttttatcagttttggtgtctgcattgtgctggcttagcaaaaacaatttggatgcatttctt

SEQ ID NO: 214741 - DNA, 201 bp, Homo sapiens
atgaagtcttgctttgtcgcccaggctggagtactgtggcacgatctgggctcactgcaacctctgcctcccgaatttaagtgattcttctgcctcagccktccaagtagctgggattacaggcgcccacccccatgcctagctaattttttgtgtttttagtagagacagggttttaccatgttggccaggctggtttcg

SEQ ID NO: 214742 - DNA, 201 bp, Homo sapiens
atgaatccattggaatgtattttggtttcagcagcgaggtaggggtagatggtattgcttggatacacagcagcgagcttggtctggagcgggtggggcgtgtgtgtgtgtgtgtgtgtgtgtgtgtgtgtgtgctatttttatcagttttggtgtctgcattgtgctggcttagcaaaaacaatttggatgcatttcttt

SEQ ID NO: 214743 - DNA, 201 bp, Homo sapiens
tgccatcttggctcactgcaatctccacctcctgggttcaagcaattctcctgcctcagcctcctgagtagctgggactacaggcgcgtgtcaccatggcmggctagtttttgtatttttagcagggaccggttttcaccatgttggccaggctggtcttgaactcctgacctcaagtgatctgcccacctcggcttccca

SEQ ID NO: 214744 - DNA, 201 bp, Homo sapiens
atctcgacctcctaggctcagcagtcctcccatctcagcctaccaagtagctgggactacaggtgtgtgccaccatgcctggttaattttttaattttaattttttttgtagaaatggagtcttactatatttcccaggctgaactccaactcctgggcttaaatgatcctcctgccttggcctgccaaagtgctgggatt

SEQ ID NO: 214745 - DNA, 201 bp, Homo sapiens
cagcagtcctcccatctcagcctaccaagtagctgggactacaggtgtgtgccaccatgcctggttaattttttaattttaattttttttgtagaaatggrgtcttactatatttcccaggctgaactccaactcctgggcttaaatgatcctcctgccttggcctgccaaagtgctgggattccaggcatgagccattgt

SEQ ID NO: 214746 - DNA, 201 bp, Homo sapiens; identical to SEQ ID NO: 37887

SEQ ID NO: 214747 - DNA, 201 bp, Homo sapiens
atgtgctctggaagcaggtgccagcgatgagctcatctggagggtggccgcccgccctgagccctgcctggggccagcagggaacactctgccagggcatgtcgctgggagcctgtccttggctcactttctgctgctttgagcgctgagcagatttgtttccattttagggacaacgcaaggaggctgtcattccacccc

SEQ ID NO: 214748 - DNA, 201 bp, Homo sapiens
aacagacactcccgcaactttctctgacgtgatacaatctcaaagtgggccacccagaggtgggaaggtgacttctggctctccaggccttgggcctgtctttttttttttttttttttttttttttgagatggagtctcactctgttgcccaggctggagtgcagtggtgtaatcttggctcactaccacctctgcctcc

SEQ ID NO: 214749 - DNA, 201 bp, Homo sapiens
agctttgacctcaaggcatgatgcagatgggaataaggcacgagtttctcctggctgctgtaacaactgtcgaaactgggtggcttatagcaaggggaatstgtcctctcacagttctggaggccagaagtctgaaatcaaggtgccagcagggccagcttcctctgaagactccaggggaaaacctttctttgcctcttc

SEQ ID NO: 214750 - DNA, 201 bp, Homo sapiens
gtgattgcttagacatctttgctgtatgaagctttgacctcaaggcatgatgcagatgggaataaggcacgagtttctcctggctgctgtaacaactgtcraaactgggtggcttatagcaaggggaatgtgtcctctcacagttctggaggccagaagtctgaaatcaaggtgccagcagggccagcttcctctgaagac

SEQ ID NO: 214751 - DNA, 201 bp, Homo sapiens
ccccaggccacctgcctgccacaggccatagtcctggaggccggtggtcacccactgcttccaccctgccagcaccctggacaccggcctggagcaacaaygctccagccctgtccctctgagtctatgcactgtccctgggccctggacccagggccatagggtggacccagagggagacacatgcactggaatatgtgt

SEQ ID NO: 214752 - DNA, 201 bp, Homo sapiens
gaacttgaggggctgtggaaggctctgccactgacggacccagggctcggcagctctgggaggcctactttgtgtcaggccacgcagagataagaccatctgggccctgcccttgggaagtctctgtctatgaggacacagcctgccacctaatggggtgtcccgtctggagcctcagtgttgctgggagaaagcccctca

SEQ ID NO: 214753 - DNA, 201 bp, Homo sapiens; identical to SEQ ID NO: 37897

SEQ ID NO: 214754 - DNA, 201 bp, Homo sapiens
gtggggtggcccctgcgggtggaacagcccctgctgtctcagagcttactgagagctagtgggcatgggagtggtgctggaccgaaacacccagagggatyatagagccaggcagtaagcacagaggccagctagtggggagggagggacccatccatgaaaagacaccaagcattgaaagagaggagaggatggttgggg

SEQ ID NO: 214755 - DNA, 201 bp, Homo sapiens
tgggaagtctggggaacagattggtcatgtgcttctttgagtgaaaccttatggttgcattgaagcggccaggcagagggtgtgatggggtgtggtagccrcacaccggctcagtcaggctgaatggggaaatgcaaactcaggtggcctgaaagagacttagtggtccacagcctggtggctgctcccagtacaggtgat

SEQ ID NO: 214756 - DNA, 201 bp, Homo sapiens; identical to SEQ ID NO: 37899

SEQ ID NO: 214757 - DNA, 201 bp, Homo sapiens
ctcactgttcttctagcacacagttgtattctcttgcagttctggaggctgtgagatctcctggctgttatctagaacaaactcgcctttgagcagcgccrtcctgatggtggggtggcccctgcgggtggaacagcccctgctgtctcagagcttactgagagctagtgggcatgggagtggtgctggaccgaaacaccc

SEQ ID NO: 214758 - DNA, 201 bp, Homo sapiens
ctgggaagtctggggaacagattggtcatgtgcttctttgagtgaaaccttatggttgcattgaagcggccaggcagagggtgtgatggggtgtggtagcygcacaccggctcagtcaggctgaatggggaaatgcaaactcaggtggcctgaaagagacttagtggtccacagcctggtggctgctcccagtacaggtga

SEQ ID NO: 214759 - DNA, 201 bp, Homo sapiens; identical to SEQ ID NO: 37900

SEQ ID NO: 214760 - DNA, 201 bp, Homo sapiens
cttgatctggtttcaggagctgggagcggtttgccaggcagcctgtggtcagagcaggggccttaacaatggtcccttgtgcggcacattcctctctaaayaggcccaggtccaggctgctcctgtttcgaccccgccatgggcctggaggggaaagtttgcatctggagggtggcccactgtggcctctttttgtgtagc

SEQ ID NO: 214761 - DNA, 201 bp, Homo sapiens
tcactggctgctttgaggctgggtcggtgccaggctggccactccttcttgtcccctagtgtgactttgcagagctcccggaagggtcagagggttttttyccatcactggtgtccatgggatactgtgtccccatctcatttttgtactccagtctcagacgggtgctaggaagttggagactttagccatttcacgact

SEQ ID NO: 214762 - DNA, 201 bp, Homo sapiens; identical to SEQ ID NO: 37902

SEQ ID NO: 214763 - DNA, 201 bp, Homo sapiens
gccaaggtccagtgtcacaggagagtgaagacaaggaggtgcccatggcgtacatgctgctggactcactctgtagatcctaagggttatggggagttatstgccaggtgaggttttcccgtggctttttcctgcaggctcagggtagcatacagggaggtgcttccctactccttggcaccatctgtccggcttccctga

SEQ ID NO: 214764 - DNA, 201 bp, Homo sapiens
cgtggaactagggcaggctggtgactcagccctcatccctgcactgcatcggtggcaagttgcctccagcctcagaccccacagagcagggtgccttcttsagaaaaacagtagggaggccaggacaccaagggccccagggacagcctgtttctcctggctggcacgagttctagccaagcctcctggtaccctgggggt

SEQ ID NO: 214765 - DNA, 201 bp, Homo sapiens; identical to SEQ ID NO: 37968

SEQ ID NO: 214766 - DNA, 201 bp, Homo sapiens
tggctccagaaatttcttcacaaccaccactggatggaaaaccagttctctaaagggccccagagccagttttgtttcttcttccacaggttcccatagtyagagcatcgggtctttgttagagatgcagaagagacgatgtccccagcccttatgtggttcggtctccactgtggatgttggtgatcttagtctccttct

SEQ ID NO: 214767 - DNA, 201 bp, Homo sapiens
ggactctgcatttcctacagagggggcatcggaacacactgagtagccagaggctagtgggccttggaaggtcctttccggccctcagtgtgcgagtcccrtgttccctctcccatctctctaagcttgactctgaagagccaccctgccccagccacccagactcagtgacagtggttgctggtggcatggtgtcaggcc

SEQ ID NO: 214768 - DNA, 201 bp, Homo sapiens; identical to SEQ ID NO: 37970

SEQ ID NO: 214769 - DNA, 201 bp, Homo sapiens
ttcctgtctgcctcccacgcagagcgttctgttcccaaggcggcaggccaagagcgcgagccgaggctcaggtgcaaagaggggtgcggcatgggggcacygcagggcacggggtgcatgcatttttatttatttttttactgagtgttagggtaatttgttaatggggtatatttggtgacataaaaccttctgtcgatt

SEQ ID NO: 214770 - DNA, 201 bp, Homo sapiens; identical to SEQ ID NO: 37972

SEQ ID NO: 214771 - DNA, 201 bp, Homo sapiens
gcaggtcctgagacagggatttcagtgggaggggacaccaggggatgcctgagtgtgggaatgggccaggcagggaatccagccaataaagggtgcctcaycagctcattgtgaccacaggtggctgcccagcccccataccgggcagcatggggagactgcagaccgtgcccccagccttgtcccacctggggttgggta

SEQ ID NO: 214772 - DNA, 201 bp, Homo sapiens
gggtctttgcagatgtcattaaggtaaggatctaaataatcactaaggcccttccagctgtgatggctttgtccatcccccatctgaagttcctggcagtycctctgccttgaagccctcttcctgcagactgaagtgtctccattttcacccccaatttccatccttgcacacagggagcctgtccagcggctgccctct

SEQ ID NO: 214773 - DNA, 201 bp, Homo sapiens
ggaaggcagagggggaggggactgggaaagggattgagctgggggtggggtggtaccctggttcttccctcccagacctttggcaggtttgaactatctgkctgcggctctctaaggagggagcgcctcctccgccttgatgtggactttgccttctgttcacgttgtccctgtccctaaacaaatgtggctctctgtggg

SEQ ID NO: 214774 - DNA, 201 bp, Homo sapiens
caggtgatgccaaggggcagaggttagaagtgctaagaagcaggccgagggtggtggctcacgcatgtaatcccaacactttgggaggccaaggcgggtgratcccttaaggtcaggagttcaagaccaggctggtcaacatggcgaaaccccatctctactgaaaatacaaaaattagccaggtatggtggtgcacgctt

SEQ ID NO: 214775 - DNA, 201 bp, Homo sapiens
gtgctgacccccctggtgcatttgaagttttcagggatactattgacgctccctgcacctccatccaggggttagtggaaatggttcttttcctccttgtycagaggtactgtggatgatgaccccaggtcccagacctcagtcattgggccacgtgtgcagataagcctgggcagtcagtaacctttggccaccaagctg

SEQ ID NO: 214776 - DNA, 201 bp, Homo sapiens
gcatgtaatcccaacactttgggaggccaaggcgggtgaatcccttaaggtcaggagttcaagaccaggctggtcaacatggcgaaaccccatctctactgaaaatacaaaaattagccaggtatggtggtgcacgcttgtaatcccagctactctggaggctgaggcaggagaatctcttgaacccgggaggcagaggtt

SEQ ID NO: 214777 - DNA, 201 bp, Homo sapiens
ccacctcagccaggcacggtggttcacgtctataatcccagaaagctgaggcaggcagattgcttgagcccacgagtttgagaccagcctgggcaacatgrcgaaactccatctctacaaaaaaacacaaaaattagcctggtgtggtggcacatgcctgtgctcccagctcctcaggaggctgaggcaggagaatagctt

SEQ ID NO: 214778 - DNA, 201 bp, Homo sapiens
agaccagcctggccaacatggtgaaaccctgtctctactaaaaatactggctaatccgggcatggtggcgcgtgcctgtaatggcagctactcgggaggcygagacaggagaatcacttgaacctgggaggtggaggttgcagtgagctgagattgtgctactgcactccagtctgggcaacaagagtgaaactctgtctc

SEQ ID NO: 214779 - DNA, 201 bp, Homo sapiens
tatttaaaagggtcatttagtgacttagcagatcccagtctgtgttacccagggcccttttaaaaatctgtggggaggctgggcttggtggctcacacctstaatcccagcactttgggaggctgaggcgggtggatcacctgaagtcaggagttcgagaccagcctggccaacatggagaaaccctacctctagtaaaaa

SEQ ID NO: 214780 - DNA, 201 bp, Homo sapiens; identical to SEQ ID NO: 37890

SEQ ID NO: 214781 - DNA, 201 bp, Homo sapiens
tcactgcaacctctgtctcctgggttcaagccattctcatgcctcagcctcccaagtagctgcgactacaggcgtgtgccaccacacccggctgatttttstatttttagtagggatggggttttaccatgttggccaggctgttcttcaactcctgacctcaagtgatctggccaccttggccttccaaagtgctgggat

SEQ ID NO: 214782 - DNA, 201 bp, Homo sapiens
ggggtctcggcaagacctgtgtactggggcccctctcagatcctctgtctctggagatgaggctgttcctttccgctgggtgtagggagggcacctcttaygtgaggggcttatgatctacttcagagaaggggcaggtcagtgagttcttcttggacctgccatttcttaaattccttcagctgaaaatatttactatgc

SEQ ID NO: 214783 - DNA, 201 bp, Homo sapiens
ttttttttttttttttttttttttgagatggagtctcactctgttgcccaggctggagtgcagtggtgtaatcttggctcactaccacctctgcctcctgygttcaagcaatcctcctgcctcagcctcctgagtagctgggattacaggcacctgccaccacacccggctaatttttgtatttttagtagagatggtgtt

SEQ ID NO: 214784 - DNA, 201 bp, Homo sapiens
ccacaggctctggcactaggcagacctgctcattctcacatcatcattgcagagtgagccaggcctcttgggtggggctgtgatgagcaggaaggacctcyggagtgcctgggacttcttgggcccagggttgccagaggcagagagaaagaagcctcctcctaacacttgagcaaagatagtcatcagaatccatcagag

SEQ ID NO: 214785 - DNA, 201 bp, Homo sapiens
aaggcggggagaagtggcgtgagaggaggcagatgtggctggcaggagatcggcggccccggccttgctgagctccactctgtatgcaccaggtgacggargctgcccaggacggtgggcagggaagtgacaggtcacatggtcatcccaccaacagccgggagtccagcttggggggacccaagaccctggggaaggcac

SEQ ID NO: 214786 - DNA, 201 bp, Homo sapiens
cccataggcagggtggagggtccccttgcagccagcgagctgctcttcctgtagcgtgcagagggaaggaggaggcttgtttatttctcttggcctcagcygaaaatccaaccacaggctctggcactaggcagacctgctcattctcacatcatcattgcagagtgagccaggcctcttgggtggggctgtgatgagcag

SEQ ID NO: 214787 - DNA, 201 bp, Homo sapiens
ccgcctctgagcgggacgccgggactcccgccgctgctaaatatatccgtaggaatggagagggaccggatctcaggtacgcagacagccccctccccatyggccgccccccactgccctggactcggggctttatttatgcctgggggaataagcatgcaaagggcgcttttgctcatttttcacagaaatatttctttt

SEQ ID NO: 214788 - DNA, 201 bp, Homo sapiens
acctgaaaggtcatctggtccctctcctacccccaggcaggccacacctagaccctcccacacagatccgtcccacccttctgctgccttccaccagggamggagggtgggcggccctcccacccaggccctggcggccccaccccagccaggaaattcttcctctttatctgcctcacatctcttcccctgcggcttccg

SEQ ID NO: 214789 - DNA, 201 bp, Homo sapiens
gggacatgcgtgagcctgcctgatgctcacaccagctccacgggggaaggactgtttatcccattttgcagatcaggaaactgagacacggtgaggtcagrtgacttgcccaggccctggccggtcagggaggagcagtttgaacacctgggctttggttgcaaccaccctggtgaactgcaggaatcccggccacctggt

SEQ ID NO: 214790 - DNA, 201 bp, Homo sapiens
gggaggctccttgttccgcgaccacaaagcccctttgatcctctgctcggctctgagccatgtgacccggtgggcgggccgcggctctcggcgcgtccagsgcagcccgacgttccgctgctggggtgagtcctgctcctttgttcttcccagccttgcaccactggctcgggggctctcaggtggcgcggccgcgaggcg

SEQ ID NO: 214791 - DNA, 201 bp, Homo sapiens
tggccactgtggctctgccgtcacctccagcccagcttggcgcgctttggatcatgtcattcagtgccggtcctccaaacctctcccctggctctgcaggyctgggaagcagctggctcctgggtgcagctgtgaccggagcctgaactctgctccctggggtcaccgtcccctgtaattaggctgcagctcatattggct

SEQ ID NO: 214792 - DNA, 201 bp, Homo sapiens
gaaatgccgtaaccgaagctccccgcggcgccggcactgggatccagggagctgctgctacagcgcagctctggattcctggatgtgttggatatgtgcarggcgttcctgggaggagcggggagggagggtgctgctggcggggctggtctgcgtgtgctttgcttctctacaatggcatgctgcgtgtcggccatgcag

SEQ ID NO: 214793 - DNA, 201 bp, Homo sapiens
agcaggaggggccccggctgagtccgagagtcccctcagtcacaccctgggctgtttggggcagccaggcagcccgtcttctggaggtgctgcctctctcyggttaccccttctggaatcttctgcgtccagttgcggcccctcctacacagcacacccaccacccccttttacctgtgactcttctttgtcaacctcttc

SEQ ID NO: 214794 - DNA, 201 bp, Homo sapiens
atttttagtagagatggggtttcaccgtggtctcaatctcctgacctcgtgatccacccgcctcagcctcccaaagtgctgggattacaggcatgagccamtgcgcccggctgacacaggaaattaaccatcacagttacacagccatcgccattaatcccagcacatttcatcatccccaaaagagaccctgcccccatt

SEQ ID NO: 214795 - DNA, 201 bp, Homo sapiens
ttcttccaggaggtcaccgttggagtcccacagtaggtcaaccccaggccctgggtcctcgggaggaggagaaagaagagaagcaggaggtgtggagggtrggccaggaccagaaggcacacagggtcggggcagtgtgggagaccctgggggctccctcatttaaccagctaacatcacagcgttcataagaacacgcta

SEQ ID NO: 214796 - DNA, 201 bp, Homo sapiens
cttagcagatcccagtctgtgttacccagggcccttttaaaaatctgtggggaggctgggcttggtggctcacacctctaatcccagcactttgggaggcygaggcgggtggatcacctgaagtcaggagttcgagaccagcctggccaacatggagaaaccctacctctagtaaaaatacaaaaaattggctgggtgtgg

SEQ ID NO: 214797 - DNA, 201 bp, Homo sapiens
ggcctcccaaagtgctggggttacaggtgtgagccactgtgcccggcctaggcctgaacagtttttatttgttttgcttgttttttaaatttgtttgttgsttgttttgagcagtttttttgtttatttcttttgcttgtcttttgcccaggctggagtgcagtggcatgatctctgctcactgcaacctctgtctcctgg

SEQ ID NO: 214798 - DNA, 201 bp, Homo sapiens
atcctagagaacacagcattcctacaagtgatgttaacattgttcttgatcagttgttggctgaagattcatttgatgaatctgatttttccagaatagaygactcagatgactctgttgttttgcttagaaataactgcaggaacaatttaaaaaattttttttctttttaatttttttgttttttgagacggactctct

SEQ ID NO: 214799 - DNA, 201 bp, Homo sapiens
ctgtggccctggctcccacgccggctccactcccctgtggctgcccctgctgggtgcccaccggtcccagggaaaagccactcccctcccggaggactggmgggaggggccctgcctgggagcgtgctgtgtggtccctgtcttagcgcaggatgcctgaggccagatcctccctgggaggcaggatggggcaaaagtctc

SEQ ID NO: 214800 - DNA, 201 bp, Homo sapiens
gggaccttcccagcatgtgcaggggaagacagtccacacaaagtgggtgtgtctgccggaggctacacacgggctgtggtctgtgcctgggcaggcgagcrgccgctcactgggatgtttctgttgcacgtacccatgtcgggctgctggcagggagctgagaggttactgcaggcggggcccctgctggaactggggact

SEQ ID NO: 214801 - DNA, 201 bp, Homo sapiens
gtccccaactcatcacctgaggccagcccggggaggctggtttgggaggccgagggtaaggctgtggcatctccgctcagcaagccagacctcccagggcrtgcatttcattggaaggtggggtgttgggctctgagtcctgggaatgcacgacctgcttggggagggcatctcatgtgcctgctgactcgtccccatccc

SEQ ID NO: 214802 - DNA, 201 bp, Homo sapiens
aagccagacctcccagggcatgcatttcattggaaggtggggtgttgggctctgagtcctgggaatgcacgacctgcttggggagggcatctcatgtgccygctgactcgtccccatcccccacgcagctggcagcccatcatgaagttcatcaatgaccagtacgagaaatacctgcaggaggaggtcaacatcaaccgc

SEQ ID NO: 214803 - DNA, 201 bp, Homo sapiens
ctttgccctttgtctctgtctttaggaggcacgcggacctccagtggccggctccggaggcttggtgactccagtggcccaggtaggtggctcgctccgcyctggccccacccagctcatgggtgtgtttgtgctggggtcccttcattctggtctgggacctgcctccccacctggcttccctggatgagtggggccact

SEQ ID NO: 214804 - DNA, 201 bp, Homo sapiens
ctgcctctacttcatccccgccaccggccactcgtacgtccctgcagtgtcggcgtcctcatgccgggtgccctgggttccctctgtcccctgggactgcmagacggtgctgtctgccctgctgctgggtgcagaggggctgagtcaggggccatggccgccagctatgaagttgggggtgtgccatgtctgcacctccaa

SEQ ID NO: 214805 - DNA, 201 bp, Homo sapiens
gctgggtgcagaggggctgagtcaggggccatggccgccagctatgaagttgggggtgtgccatgtctgcacctccaaagcctcacactgacccctatgcagtgtcctgcccagcccccatccttcagctgcgtcttggggagctgagggtcaggcaggccctgggctgttctggagcctggtggtctgtgtcctgccttc

SEQ ID NO: 214806 - DNA, 201 bp, Homo sapiens
ccacacttgatgggtgagtgtgtgaacggggctgggagcaggacacttgtcacttctgtggacagattccagaggctcatgaatctgctgctggggaaggygtctgatctagcctgaccctccacccccgcctcccccttcccgccccccttcaccagccctgttcccagagcttcacttccccaaaggcaggcgccgttt

SEQ ID NO: 214807 - DNA, 201 bp, Homo sapiens
cagtgctggccccttccagggctggacggggctgctgttggtgttggtgagagccctttcctcccgccggctctgtccgcacctgacgtcgcccctagagrtcagtaagggcgggaggctgcatgtaccctggcaggtggactcttcatggcctcacagaccctctgtcctcagctccctgtgcaccccctgccagacacc

SEQ ID NO: 214808 - DNA, 201 bp, Homo sapiens
actgcggcagctgatcttaggggaagcagaatgttctaagcttggggtgagcggagggaacgctgctgggtggggagtgggagaccaggctcggagacacygcggatctcctctgtctgatgagggcgtgatgaggttctcatctcaggtcctctgaatggcggctgcttctgaggagaccctttcccctggatctgcccc

SEQ ID NO: 214809 - DNA, 201 bp, Homo sapiens
ctggccccttccagggctggacggggctgctgttggtgttggtgagagccctttcctcccgccggctctgtccgcacctgacgtcgcccctagaggtcagyaagggcgggaggctgcatgtaccctggcaggtggactcttcatggcctcacagaccctctgtcctcagctccctgtgcaccccctgccagacacctgtgg

SEQ ID NO: 214810 - DNA, 201 bp, Homo sapiens
tgtggttagccccagatagctggggagctttgggtaccaggcttagcaggggaggagggcccccgtgacagtttgctggggctgctgcaacaaagccccaygaactttgggggctgaagatggttctagaggccagaagtccaaaatcaaggtgtcgaccaggctgatcctttggggcctctgcgggaggctccggcccag

SEQ ID NO: 214811 - DNA, 201 bp, Homo sapiens
  misc_feature (1)...(201): n = A,T,C or G
tggagctggccctggcccgcctggcctgtgcagtggtgtcacctgtgtctgggacacacccgtgtccttcctctgccccacactcacagcgtggccgactnggcccggggccctgtccttgccagcagggacccccgtgagccccgagccagcacctgagagtgtcgacacctgcttgggggtgggtgcccccccactgcc

SEQ ID NO: 214812 - DNA, 201 bp, Homo sapiens
tttaacttcagccttcagtgcagggcagatgagcactcagaggcccagaggactcatatcacgagagagaagctgtgaccgcacaggcactgaaggttaarcagaagagtgggacacacgggtgacctgaaagtcccagggtcagtgtggttagccccagatagctggggagctttgggtaccaggcttagcaggggagga

SEQ ID NO: 214813 - DNA, 201 bp, Homo sapiens
tggctgctgggggccgtccctgagatggcctctccagctcccccatatctcaaaagcagctttgtgggagtgccaattctccagcagagtctctgaggggsgttttggagaagacctggaccaggcagatggtgaatctctcttccagggagtgaggccgagcaggggccgtgcgacatggcccaccttgttttatgcccc

SEQ ID NO: 214814 - DNA, 201 bp, Homo sapiens
ggggtcagttctctccaggatttaacttcagccttcagtgcagggcagatgagcactcagaggcccagaggactcatatcacgagagagaagctgtgaccrcacaggcactgaaggttaaacagaagagtgggacacacgggtgacctgaaagtcccagggtcagtgtggttagccccagatagctggggagctttgggta

SEQ ID NO: 214815 - DNA, 201 bp, Homo sapiens
agatggcgcttgtgactcctgcatgccacgtgcagacagtccctcagctgtgggcttcccacgcaagcagccatgctggggataacttggctgaaacctgygatttaatgaagagaagaatgactcctcctgcagccctgtgccccacaggctccctcctgcccccacccctcctgcagaggggcctcatgctggtgggtg

SEQ ID NO: 214816 - DNA, 201 bp, Homo sapiens
gtgggccaaaggcagggtccttgacctctgcccaggagggtgaagtgggctggtcctccttgtccctgctccaaggcccctgcggctgtgcctttggaaaytgctggcccgagctagtgtgcggagctgggacagacctcaccgtggccctcgtggggtcattccatgtccgggctggaagggatctttcggtccagccct

SEQ ID NO: 214817 - DNA, 201 bp, Homo sapiens
gaagatcttggaagcccatcttctgaaaaagaaaacccactgggaaatgaagcaggcagtgaagatccttttcaacccctgcgaagttggctggatgggarggctgagctttgatccactgtggtctggcccgttagagctgcccggtggccactaagggcccagtgaggcctcatgtgcaggccctgccggcagcgtggg

SEQ ID NO: 214818 - DNA, 201 bp, Homo sapiens
accagggagccccgctcgtctcctgtcttcggcatctgctctctggcttgtgagcactgcatttctttctgcttggaacgccggcccatggtgggtccccrgactcctgccttctgctgtcttttgccatatctcgtcaaagtgtgttttatttatttattgttattattttttgaaacagagtcttgctctgtcgcccag

SEQ ID NO: 214819 - DNA, 201 bp, Homo sapiens
gaagccctgatggagagggtgctgggtgggtggtccctggagtgtgggccctggcctgggcaggttcttcctcagcaagcagctggcatggatgatgggartgttatcaagaggaggggcctccaggttggcgggggcaggggtggggggattccgggagccgttctgccattgtggggatactgggctttccaacctccc

SEQ ID NO: 214820 - DNA, 201 bp, Homo sapiens; identical to SEQ ID NO: 37905

SEQ ID NO: 214821 - DNA, 201 bp, Homo sapiens; identical to SEQ ID NO: 37906

SEQ ID NO: 214822 - DNA, 201 bp, Homo sapiens
ggcagctgaggctggacattgtccttggataactcccggggaggtgggggcagggtggggctgtgagctggcaactccgagtccctagcagcctccgaatkgaggctttcctcttgtaggattctcggggaggaaggaggggatgggggagatgaggcttgtgagtcttcaggagggcagaggttcacacctgcagcgccc

SEQ ID NO: 214823 - DNA, 201 bp, Homo sapiens
acagcccaccaggctgtgccttgtgtttgtgggtttagccctgagtggggaggtgttgagattagctgcactcttggatgagggtggagaggtgctgccamtgccactgcatggcacccagctgtgagatgacccctctgttggcacaggcagagttacaaaatcagcattgcaaaactgaggaatgggaaccagggacat

SEQ ID NO: 214824 - DNA, 201 bp, Homo sapiens
ctactacatgccaggcagggtgccaggccctagtggagaggggacaatgatgggcaagctggctcctgccctcaagggctgtcgagcagggaggaaggcgscggctgccctgactgtgacccggagtggggtgattcgcaaagaggctggcgggaggctggctgggggctggctgggggctgctccctctcctgcctgtgt

SEQ ID NO: 214825 - DNA, 201 bp, Homo sapiens
ggtcccgaccctggggtctgacgggggctgcctctgccccacttcagcctggctgctcttccactcaatgactgagtttgcaaaaccagaataacagtgckacctggctggtactttgggtggctgggaggcgtgggagagggtgcacggaggggctgagcgaggtgtcagcatcgtggggatctccgagggtagccttcc

SEQ ID NO: 214826 - DNA, 201 bp, Homo sapiens
ggtgtcttttaatccccacgagagcccaacaaggtagattgggctgctgaggctccagcgctggaaggccggcccgggtcctcccagtccgcacctgcatycatccatcactcccccactgtggagacctgttccctggcccctggctgagcacgatggaaatctctgtctactagtccttggagagtggggatggctgag

SEQ ID NO: 214827 - DNA, 201 bp, Homo sapiens
gaagaacaagaagtgctaagaagcatctgtcttcctgattgaaaagcaatctttgctgggcgtggtggctcacgcctgtaatcccagctttgggaggctgyggtgggagagtcgcttgaggccaggcgttcgagaccagtctgggcaacagaggtgctaggggtagtggcgcttgcctgtagtcccagctcctcaggaggc

SEQ ID NO: 214828 - DNA, 201 bp, Homo sapiens
gcaatttgttcaagagcaggggatgctcaggctgcgctcgcccccttcttatgaacggtttgctttgcgtcttctctgtgccaagggctgccaggcaccaratgcccattttaggaaatcagaaaaataaacagtgtaaataaaacaaaaactccacccaagaaatctgagacagatgctgttttccccaccgtttctcca

SEQ ID NO: 214829 - DNA, 201 bp, Homo sapiens
aagggccagctctgttctaggcactgggggtctaggcatgggctcaggagaaggggtagaacgggagggcttcctggaggaaggcttcctaaccagagacyggggtaggagtttgccaggcaggtgatgctggccagcttctcttgccattttccttttctttttttctttttctttctttctttttttttgagacagagt

SEQ ID NO: 214830 - DNA, 201 bp, Homo sapiens
cctcccaaagtgctgggattacaagcgtgagccactgagcccggcctgttttgactttttaattgtatctctttgtattgctattttagtagttactttayagattctattgcacattcttagcttttcacagtctacttagaattaacattgtttttcttcatggaaaaaaagtgtaagaactaggcaatcctatgggtt

SEQ ID NO: 214831 - DNA, 201 bp, Homo sapiens
ggatttccatgcagtccaggcaggatctccttctgtccccaccccccaccccatgtgcaggaagctggttccaagcagggacccttggccccgctttccaygtgggtgggcagtttccctgcgaggggcaggccaggcccctgccctatgtcccccagagaccgatgttatctacagtaagagcatacaagtctttttggc

SEQ ID NO: 214832 - DNA, 201 bp, Homo sapiens
cagtctggtggatttccatgcagtccaggcaggatctccttctgtccccaccccccaccccatgtgcaggaagctggttccaagcagggacccttggcccygctttccacgtgggtgggcagtttccctgcgaggggcaggccaggcccctgccctatgtcccccagagaccgatgttatctacagtaagagcatacaagt

SEQ ID NO: 214833 - DNA, 201 bp, Homo sapiens
tccatcatcgtgccggggatggggctggcctgctcctctgaagtctccttggtgtatagcctaggctggagccccggacgattccgccaccccctcccccractttttctttttattttgattcatcccagaaacccagccaaaaaccaagttcctgtgctctcccttgacaaagccactgaggaaaaatggtcaaacact

SEQ ID NO: 214834 - DNA, 201 bp, Homo sapiens
ttgccagccagccaaatgcccgtccatcatcgtgccggggatggggctggcctgctcctctgaagtctccttggtgtatagcctaggctggagccccggaygattccgccaccccctcccccgactttttctttttattttgattcatcccagaaacccagccaaaaaccaagttcctgtgctctcccttgacaaagccac

SEQ ID NO: 214835 - DNA, 201 bp, Homo sapiens
gggtgtggttgggaccccagaactcatggacgagggtgcttggagctggccctggcccgcctggcctgtgcagtggtgtcacctgtgtctgggacacaccygtgtccttcctctgccccacactcacagcgtggccgacttggcccggggccctgtccttgccagcagggacccccgtgagccccgagccagcacctgaga

SEQ ID NO: 214836 - DNA, 201 bp, Homo sapiens
aaacagctctctttgagggttgctgggggactctgagatgcagcccatggcgctgagcacgggtcctgcctcctacgggtgtggtgggtgtcgcggctggygtggcatctgggcgggaaaagggggcatttgcaaaggacaggtaggtttggatgcttaaatatgcagatctggggatgggaggtctcaggcaagggcctg

SEQ ID NO: 214837 - DNA, 201 bp, Homo sapiens
caggcctcttacacgggtcccacagccactggcagcactgacttgatgctctttgagttcagagcccagggccagacagacccactgtcccgactacgagytggttcatttagaggggggcggacacagcacccaggcagcagatgcactgtgatcagccttgcagcggggctgtgggttctctgggctggatgtccggga

SEQ ID NO: 214838 - DNA, 201 bp, Homo sapiens
aaaaggccccgttgcttggtaataggtgcagacctgtccctaattaatgccagtaggcctcttgcgtgatgaaccctgcctttcagccaagactcaaggcrtcctgtgaatactgcctctctgcagtttgagcttttgtggtgggaggcaggagccatggggagtgggggcaggcctcttacacgggtcccacagccactg

SEQ ID NO: 214839 - DNA, 201 bp, Homo sapiens
tgttagatgagagtgctgctggtcagtctgcaggaggttctagtgtggacaccgccctacacagggccgtggcaggagggcctaggcaaaggcaaccggcrtagcactgagagcacttgagggctgggcaaggtggaggccccggccctgcctgctggcctaccaagtaaaaactagacatttttaacttggggaaaagcc

SEQ ID NO: 214840 - DNA, 201 bp, Homo sapiens
actggctgtctgcacacacgggcactgtccctcgagtggcaccaccctgcaggccagcgccccctagcacatggccccacagaccccatgggacatgcgtkagcctgcctgatgctcacaccagctccacgggggaaggactgtttatcccattttgcagatcaggaaactgagacacggtgaggtcagatgacttgccca

SEQ ID NO: 214841 - DNA, 201 bp, Homo sapiens
catggcgaaaccctgtctctgctaaaaatacaaaaattagccaggcatgggggcatgtgcctgtaatcccagctactagggaggctgaggcaggagaatcrcttgaactagggaggtggaggttgcagtgagccgagaccatgccactgcactccagcctgggcgacagagcaagactgcctcaaaaaaaaaaaaaaaaaa

SEQ ID NO: 214842 - DNA, 201 bp, Homo sapiens
gtgtgcctgtgttccttgtcattgtaatgtcggtaggatccgtaaggaaaacacttcattccttttattgtgactttatgttcgccatctccctctcatcmgcagcctggctaggaggttatcaatctagatctttttaaagaaccagcattggactccccttttctggtgtccatttccttgagtttctctgttatcttc

SEQ ID NO: 214843 - DNA, 201 bp, Homo sapiens
  misc_feature (1)...(201): n = A,T,C or G
tgatggtgccgatgccgtcagcacgcaggcctcctgccctcgccacgactggctcctgcagcccacctggctgagaggtgtgctggctctcgcaggttgcnaaatggggacatcaccgtccgcctgggctacagcgtgctcgccgattgcatttggggagggactgagggctgattgtgttgtggggatgttggcagagaa

SEQ ID NO: 214844 - DNA, 201 bp, Homo sapiens
gaccttaagccatgaaattatattcttggggccagagggcactgagcccaggtgtctgtacccagtgctgtcaggctgaggctctcgtttttgggggaccycaggctcagggcagctcctcccgggggcccaggggagggaactgccttcccgcacatgtgtaaccaataccgtctgcccgttccccaggagatgatccca

SEQ ID NO: 214845 - DNA, 201 bp, Homo sapiens
ccccattcttcctgccggctctcgctgcccgtcagtgttagatgagagtgctgctggtcagtctgcaggaggttctagtgtggacaccgccctacacaggrccgtggcaggagggcctaggcaaaggcaaccggcatagcactgagagcacttgagggctgggcaaggtggaggccccggccctgcctgctggcctaccaa

SEQ ID NO: 214846 - DNA, 201 bp, Homo sapiens; identical to SEQ ID NO: 37907

SEQ ID NO: 214847 - DNA, 201 bp, Homo sapiens
agccccacacagcttgtccctccagctgggaatcggagctcacctggagtcccaggcagcagattcgatgcagtgatgcagggctgtcagccatgccagcrggccctgctgctcacagagggatgggtattgctgttgacaataattaaagaactacggcttcaggctgggtacagtggctcacacctgcaatcccagaac

SEQ ID NO: 214848 - DNA, 201 bp, Homo sapiens
aaaaaaaaaaatcccataagataccaagtaagtgacttggacataataggtgtgccatgaaattatgctgaaggagtgagccactggtggtgagttgggayggcttttttgtggttcttgtaggcagatgtagtgacccccatgggtcgtccctagagaccaagcagaaactttcctggtcaactttacccccaggacacc

SEQ ID NO: 214849 - DNA, 201 bp, Homo sapiens
ttgctctctgcgtgcgtgcctgcctgcgggccagccggggcctgcaaggccgcctctcgagggaggggttgcaggaatggctctcacctgtgcagaaggcmagccactgccctacgtcaatggcaaagatggggctcggctgcgttgtattattatttctcaagcggggcccctggtgggcaggatgtttggtttgatttg

SEQ ID NO: 214850 - DNA, 201 bp, Homo sapiens
gatgggggtggtaatgacggtgatgatgatggggtgatggtgatagtggagatgatggggatgatggtgatggtggtggtggtgatagtggtgggatggtrgtggtgatagtggtgggatggtagtggtgatgtgggtgatggtgattgtgatggtggtggtggtggtgatggaggtgatggtgatagtgatcatgagggt

SEQ ID NO: 214851 - DNA, 201 bp, Homo sapiens
taaggctgtggcatctccgctcagcaagccagacctcccagggcatgcatttcattggaaggtggggtgttgggctctgagtcctgggaatgcacgacctrcttggggagggcatctcatgtgcctgctgactcgtccccatcccccacgcagctggcagcccatcatgaagttcatcaatgaccagtacgagaaatacct

SEQ ID NO: 214852 - DNA, 201 bp, Homo sapiens
ctgtgttgactaagttggtctcgaactcctgacctcaagtaatccacccgtctcggcctcccaaagtgccggagttacaggcgtgagtcaccgcacccagsctgatatgcaaatattttaaacttctatgacgttccactttatctatttgttcttctgttgcctgtgcttttggcgccatatccaagaaatcattgccaa

SEQ ID NO: 214853 - DNA, 201 bp, Homo sapiens
ccactcatccacgcatccactcacccatccatctacccatccactcatccacccatccacttgtctactcatccactcacccacccatccactcatccacycattcactcatctactcatccactcatccatctatccactcatccaccaattcactcatccacctatctactcatccacccatccatccagtcattcatc

SEQ ID NO: 214854 - DNA, 201 bp, Homo sapiens
atgttttttctgcccctgaagtgcagttctttgggcctcgggacaggttggggtcagctgcaggtgggcaagaagcatgggcaagaaaaggtaggccgggygcggtggctcacgcctgtaatcccagcactttgggagactgaggcagttggatcacaaggtgaggaatttgagaccagcctggccaatatggtgaaaccc

SEQ ID NO: 214855 - DNA, 201 bp, Homo sapiens
gagtgcagtggcatgatcttggctcactgcaacctccgcctccctggttccagcgattttcctgcctcagcctcctgagtagttgggattacaggcacccrccaccacacccagctaatttttgtatttttagtagagacggggtttcactgtgttgactaagttggtctcgaactcctgacctcaagtaatccacccgtc

SEQ ID NO: 214856 - DNA, 201 bp, Homo sapiens
ctcctgcctcttcagagccaatcggtgctgccaggttttccatttcaagtgatcccccgcctgggccaaaatgtttggattttcaggcacggaggggagayggacctcaggccaaaccatgctgggtaaaactgagggtcaaggctgtgctcagcaagtgctccagccctggccgtcaaacccatagtgtgcacagcgtgc

SEQ ID NO: 214857 - DNA, 201 bp, Homo sapiens
acctgagttgctgctgactcccagcttgccccttctgtcccctggccatttctgtgtcggggtggctgagacactattgcattggccactttgtgttcccmctagcccccgcccctgtaggctgtcattgtgatggtgatggggccaattcagctgcggtggggaggacccactgtgtgcgcctggggggtggcgtggggc

SEQ ID NO: 214858 - DNA, 201 bp, Homo sapiens
tttctccattgtccttctgtaagtggttctctaagtgggaactcaggcctggaaagggtgggcaccctgtctggtgggctctggcaggccaggcgctgagragcctcaggagacacaaccctaggaaaaggctcatgcaggctggctgtcatgacggactgttggtgggagaggggaaggcgccgtggtaggggaagcttt

SEQ ID NO: 214859 - DNA, 201 bp, Homo sapiens
tcagaggagacccagtttgaccagggctagcgttcctggaacctgagcctggaattccaccctgccctgggcagaggccacgttgctccctcctacgagarctgagctgcgcatgagattattctgaccttgggctctaccatttctttgcatgacatttgtcccaggctggagcagggctctgtggctcgcttggtgttc

SEQ ID NO: 214860 - DNA, 201 bp, Homo sapiens
gagcagtccttaagctccttgaaggcacaccaggcctttgggcctcgtcccccaagtcctggataaataggaggtgaaggagcctttgcaactggaccccrctctgccagcgccaaggccctgcctgactacccaccccaccctacacagatcagggacctgtgccaaggtccagtgtcacaggagagtgaagacaaggag

SEQ ID NO: 214861 - DNA, 201 bp, Homo sapiens
ctatgcatccctcaaaacctggtccaaatacctcgtgtttggcttgggatataaatgatttgtgtataaactttctttcctctgctagacttttttttttwaatgtgaaagtagtttttcagatcataaaaagtaatcgagtaccctttctttaaaatgcaggaagtacagaaatgagaaagaacctaaaattcacctgta

SEQ ID NO: 214862 - DNA, 201 bp, Homo sapiens
aagtccagcaacttagcgccactttaaagtccgcctggaatgaccctgtggctgccggaaccaggggcacgcggtagatgacgggagcaggcacagagagkccttcgtcccggatcagtcgctgttgccctcttggaggctgggctgcctttcaagaagaggacccaaggccctgtgagcggtggcctcctctggagcctt

SEQ ID NO: 214863 - DNA, 201 bp, Homo sapiens
ctgtctcttgggaaaggtagggtctttgtgccccctcccacccagggacctggcatgttgggaggctaagaggaagctgccccccgctcatctaccccccraccctcccagccagcagagttttacctgtgtgcttagaatctgtgcgtggagccagaagtcacaaggttggcccagctgtgtctgaccctggttgtgcgg

SEQ ID NO: 214864 - DNA, 201 bp, Homo sapiens
aaaaaaaaaaaaaaagggccgggcgcagtggctcacgcctgtaatcccagcactttgggaggccgaggcgggcagatcatgaggtcaggggattgagaccrtcctggctaacacgatgaaaccccgtctctactaaagatacgaaaaaaatagccgggcgtggtggtgggtgcctgtagtcccagctactcgggaggctga

SEQ ID NO: 214865 - DNA, 201 bp, Homo sapiens
acacttgatgggtgagtgtgtgaacggggctgggagcaggacacttgtcacttctgtggacagattccagaggctcatgaatctgctgctggggaaggcgyctgatctagcctgaccctccacccccgcctcccccttcccgccccccttcaccagccctgttcccagagcttcacttccccaaaggcaggcgccgtttcc

SEQ ID NO: 214866 - DNA, 201 bp, Homo sapiens
tgttgcccaggctggagtgcagtggcgcaatctcggctcactgcaacctccgcctcccagattcaagtgattctcctgcctcagcctcccgagtagctggrattataggcacccaccaccacacccagctaatttttgtatttttagtagagacaggatttcaccatgttggccaggctggtcttgaactcctggtctcaa

SEQ ID NO: 214867 - DNA, 201 bp, Homo sapiens
ttggagaagacctggaccaggcagatggtgaatctctcttccagggagtgaggccgagcaggggccgtgcgacatggcccaccttgttttatgccccccctttttttttttgagaaagggtctggctcagttgccaaggttgcaatgtagtggcacaatcatggctcactgcagcctccacctcccaggctcagtccccga

SEQ ID NO: 214868 - DNA, 201 bp, Homo sapiens
tggagaagacctggaccaggcagatggtgaatctctcttccagggagtgaggccgagcaggggccgtgcgacatggcccaccttgttttatgccccccctttttttttttgagaaagggtctggctcagttgccaaggttgcaatgtagtggcacaatcatggctcactgcagcctccacctcccaggctcagtccccgag

SEQ ID NO: 214869 - DNA, 201 bp, Homo sapiens
agtgtgaattttggttgagattgtgttgaatctgtagatcaattaaggaagaattggcattttaacaatattgagtcttttgtatagatggtatatctccrttttaaaggtccttttgtatttcttttatttctctactgaaaaaaaatctctacagaattacattgttttgtagttttcaagaaaaagatcttgcatgcc

SEQ ID NO: 214870 - DNA, 201 bp, Homo sapiens
aggcatcacatgctctaatctctgccccattgtcacagggccttcttccctgtgtctctgtcccgtccctcctcttcctttttttttttttttttttttgkttgagacggagtctcgttctgtcacccaggctggagtgcagtgttgcaatctcagctcactgcaacctccgcctcctgggttcaagtaattctcctgcct

SEQ ID NO: 214871 - DNA, 201 bp, Homo sapiens
cctcttcctttttttttttttttttttttgtttgagacggagtctcgttctgtcacccaggctggagtgcagtgttgcaatctcagctcactgcaacctcygcctcctgggttcaagtaattctcctgcctcagcctcccgagtatctgggattacagtcacgtaccacccacctgacttaatttttgtatttttagtaga

SEQ ID NO: 214872 - DNA, 201 bp, Homo sapiens
ttggcagggatattgccgggaggtagcccaggcactgctgaatctcagactggagagcctcgtgcctgggtgggaggggccccatgtgcagaccctgctgrtctctccggagagacccctgaccggcctcccatcctctccccagggcagagcggcttgggtaaatccaccttaatcaacaccctcttcaaatccaaaatc

SEQ ID NO: 214873 - DNA, 201 bp, Homo sapiens
attcgcacctttgcaggcccagtactgtgcagagggaggagggtggaggcaaaggcgagggaggagggtggaagcaaaggcggggtccctccctagccccsctgccctgcctggttgctgctctcagacccctactcctggcccggaaacatggaatcttgggacagctggggtagggggcacagaacggagaccctggtg

SEQ ID NO: 214874 - DNA, 201 bp, Homo sapiens
gcacttttaatttctttcaataactttttcttggcattcacaacttggctagctatttggcataagagatctcacttttgcctgtcttggctttcgacacrccttcctcactcagcttaatcatttctagcttttgatttaaagtgagagacgggtgactcttcctttcacttgaacacttagaggccattgtagggttat

SEQ ID NO: 214875 - DNA, 201 bp, Homo sapiens
tccctgcccctcagatggccggaaaggcagcccagccccacggcctccttgtcaggctctgagagccgcctggcctccagctctgctctttttttttcttragatggagttttactctgttgcccaggctggagtgcagtggtgccatcttggctcactgcaatctccacctcctgggttcaagcaattctcctgcctcag

SEQ ID NO: 214876 - DNA, 201 bp, Homo sapiens
gctccggttcagcctcttgtgggtctgaagctcaggctgggccagtccctgcccctcagatggccggaaaggcagcccagccccacggcctccttgtcagsctctgagagccgcctggcctccagctctgctctttttttttcttaagatggagttttactctgttgcccaggctggagtgcagtggtgccatcttggctc

SEQ ID NO: 214877 - DNA, 201 bp, Homo sapiens
caggtgtggacaggatagccctgcctcatctcggagtcccgctccggttcagcctcttgtgggtctgaagctcaggctgggccagtccctgcccctcagayggccggaaaggcagcccagccccacggcctccttgtcaggctctgagagccgcctggcctccagctctgctctttttttttcttaagatggagttttact

SEQ ID NO: 214878 - DNA, 201 bp, Homo sapiens
gtggcgtgatctcggctcactgcatcctccgcctcctgggttcaagcgattctcctgcctcagcctcctgagtagctgagactccaggcacgcaccaccaygcccagctaattttttgtatttttagtagagacaaggtttcatcctgttggccaggctggtctcaaactccttacctcaggtgatccgcccaccttggct

SEQ ID NO: 214879 - DNA, 201 bp, Homo sapiens
ccctgcctgcctccactgctcccgtagctgggtctccaggggattgcccgtggccatgggggaggccgggaatgcggggctcagactctactgggcttctygtatttttttgtttttccttgtccatcttctttctcggaaatttctgaatatccccctacagcctttggcattctgtcactcctggcatctctgggccaa

SEQ ID NO: 214880 - DNA, 201 bp, Homo sapiens
agtgtgcatcccagggagtggtgcctgctgccctgaacattctcatccagcaggcctctgcaagggcccagtcaagtgtggtgcagagctgggctggcagytggaacagtctcatcttgtctagtggtgagaccaagggctgatgggccaaggctgcgtgctgcttgcccagcccgtggacccatccactgagcaccccca

SEQ ID NO: 214881 - DNA, 201 bp, Homo sapiens
cttgcttctccgtcctccctctctgtgtcacgaccgttctggacacggatccagttctctccaactcagcttcctgcccatctttccttcaggcccatccmcttctgcccctccatgtggggctgggctgggagttccctgagccccgacatgcacagctctgaccaatctctgcggcccctctgtcccccgagcaccagg

SEQ ID NO: 214882 - DNA, 201 bp, Homo sapiens
aacctggcgctctggggggacggtggctttctccatggaataggatgtacacgttggagccggggcatgggagaaaaccatcagcatcccagacccggccrcccacggacagggacctgtgcaggtgggagtccagctcacgtggagaggtccgtgggctgggctgacagtcctgagggcctaagcaagtccaggtggagg

SEQ ID NO: 214883 - DNA, 201 bp, Homo sapiens
ttctttttgaatgagagttctccagtggtcagtgggcttgggggctgggaggatgtggggcctggagagggtgtgggtttggggggagaccagtgctcctyatgctttcatgggcatgtggagtgcacatttgtcttggcgggtctggggcctgggactctgcatttcctacagagggggcatcggaacacactgagtagc

SEQ ID NO: 214884 - DNA, 201 bp, Homo sapiens
ccctcccaggggacggctagagactcactgactcatgcgtgtgtggtaggaatcttccaggaagtccccgtcccgttcgccctctctgcctgggcggggayggcaactgcctctgtcactgcagactaatgggacggaggggggtgacttctcagggttcctcctgggcaggtgctccggaaccttttctcagcacgctgg

SEQ ID NO: 214885 - DNA, 201 bp, Homo sapiens
aaagtgttgggattataggcatgagccacccaacccctttttggtttttctttttgaatgagagttctccagtggtcagtgggcttgggggctgggaggaygtggggcctggagagggtgtgggtttggggggagaccagtgctcctcatgctttcatgggcatgtggagtgcacatttgtcttggcgggtctggggcctg

SEQ ID NO: 214886 - DNA, 201 bp, Homo sapiens
acacagcaggaaaaggacatctctgaagcagggagctagctctcaccagacactgagcaccctgattttggacttcccagcctctagaactgtgagcactrcaatctgtttataaattacccagcctaaggcattttgttttaacatcctgaatgaactgaggtggtgttaaaatctccaactatgcatccaggcgcagtg

SEQ ID NO: 214887 - DNA, 201 bp, Homo sapiens
tttccttataaatttaagaagtagcttgttgatgtctacaaaaatgcagtgtgaattttggttgagattgtgttgaatctgtagatcaattaaggaagaaytggcattttaacaatattgagtcttttgtatagatggtatatctccgttttaaaggtccttttgtatttcttttatttctctactgaaaaaaaatctcta

SEQ ID NO: 214888 - DNA, 201 bp, Homo sapiens
tctgtgtctaccccgtgccccactttccccatctgtactgggggtactggtattctttacatcccagggttaagcggctgcagatgtgatgagctcggtargcccggcgcctcgccggcactgaaagctccagtgtccgcccttagtgtcattgatggggttttgttcccgctgcggttctgattggttacagttgcggtc

SEQ ID NO: 214889 - DNA, 201 bp, Homo sapiens
tgagaagtgaacagctctggccacgccgggcccatatcctctagggcagtgacggagctgagacagggcctgtgacaactgagagttctctggagtccacrcggctccttgcccagcttctggtggaggttgagcttagtgacccaggatttcgtctgtgtccaccaagaaggagaggtgcctgtggcttagagagggcgc

SEQ ID NO: 214890 - DNA, 201 bp, Homo sapiens
tagaacacagctgaggaagctgtcggccagacgtccagaagcatcaacctggtggctgggctgtggggggacctctctggacaggcagacaaggtgtcggrggaaggggctgacactcactcagtgtctgtcatgcactgagggcacaaagggcaggatggagagctggcccacgccacctgtggaatcttccaggtgtgg

SEQ ID NO: 214891 - DNA, 201 bp, Homo sapiens
tgtcatcgctgcctacctggggttgccccggggtcagtcaggtgtggggtgtctgtgagggtcttccgtctcccctctgactctgcgtccgtggctctgtrcagatattgaggagaaaggcgtccggatgaagctgacagtgattgacacaccagggttcggggaccacatcaacaacgagaactggtgaggcccctccag

SEQ ID NO: 214892 - DNA, 201 bp, Homo sapiens
  misc_feature (1)...(201): n = A,T,C or G
atatccgtaggaatggagagggaccggatctcaggtacgcagacagccccctccccatcggccgccccccactgccctggactcggggctttatttatgcntgggggaataagcatgcaaagggcgcttttgctcatttttcacagaaatatttcttttctttttgacggttccaagctcgtgggatgaactccgtctcag

SEQ ID NO: 214893 - DNA, 201 bp, Homo sapiens
gtaggtctgtgggccgtgcttccaggctggaccgagacccggtgcatggggtgcttctggtctgagctgaggcccctggaagccacagccaggaggcagcragggacggctgtcatgtcccctctcccctgtctcccagggtccctgcgggacagatttccctgcctgagcctcctggttgcccataccctggcctcccaa

SEQ ID NO: 214894 - DNA, 201 bp, Homo sapiens
agaggacctgggaatcctcagcccaactgtccagaggagtctttctcagtggggagagcctgagctgtcctcctggtggacagtcctttagatctcaggcrgacttccctgccggccgttcctcctgctgcccctgctcctctgtcccccatctgtctcccaccctctcccctgcagcagccagctggcacggggacctcc

SEQ ID NO: 214895 - DNA, 201 bp, Homo sapiens
ctctgcaggtcccgctttccccagggagcactcagggctggtcccggggagccgggctaatggtcacctcggatggtgcaggggtccatccccatgaaacygggcccatccccatgaaactgggcccacagaagcttttggttccggttctgttctgccccctggctcttgcttccaaagtaggactcaggatagctctga

SEQ ID NO: 214896 - DNA, 201 bp, Homo sapiens
agctttggaaacatccactagtggccttatttatgactcaggacacctgccaggtcactagaacacagctgaggaagctgtcggccagacgtccagaagcrtcaacctggtggctgggctgtggggggacctctctggacaggcagacaaggtgtcggaggaaggggctgacactcactcagtgtctgtcatgcactgagg

SEQ ID NO: 214897 - DNA, 201 bp, Homo sapiens
gcccgagggcacttgtgggtgcccgtggtctcctgcccagtctccctgagaagtggccactgtcccgagcttgggcttgtatgtattgtgtgaagtgcacrtgtccctgagcaatgtttagcattgctgattcttgagcttgtgaatggtcgtccacagtacgtagcccctgtgtgtgtccctgtgtgtgtgtgctctgag

SEQ ID NO: 214898 - DNA, 201 bp, Homo sapiens
agctccgattcctgcttcatcccattcccagcagcccagccccctgcctgtcttcaggcccctgctgggacgtcctgctctccctggtcaccccagtggtrcgggggcccactgccctggcttctccactgtggcttccttccatgctcctatttggcctggtcactgtgccatctcccattagccaggaactttctggag

SEQ ID NO: 214899 - DNA, 201 bp, Homo sapiens
gaggacgttgacccctggccggtgctgggcgcttgctcttcagtcatcttgccctgacctggcgtggcaggcccgagcactgctcttttacaaggaaacargctcagaggccttgagtcacttgcccgggctcccccagccaataattggctgagccaggatttccatccagctctgtgactccagaagtccaagttcttc

SEQ ID NO: 214900 - DNA, 201 bp, Homo sapiens
ggccagcgtcctcctgaggccaattccctgcctcccccagcgcaggcgcgaagccatctttgcttgtgtgtttgccacagacagtggagggcggtgcaatygtgacgcctgcttgttgcactttgcgtccttgaggacgttgacccctggccggtgctgggcgcttgctcttcagtcatcttgccctgacctggcgtggca

SEQ ID NO: 214901 - DNA, 201 bp, Homo sapiens
ctgggggagggctgaacgacccctcactcttggaggctgccggagcccctcctgcctgcatgcggccgctgccgggtggacaggcctgcttgtgggttgargctcccagcagctggggtggatcatttctcctcccaagaagctttgggagaagcagctgagggggccagcgtcctcctgaggccaattccctgcctcccc

SEQ ID NO: 214902 - DNA, 201 bp, Homo sapiens
ggtccctagaacaaggctccagcctcggcagtccctcccacttctggtgggaggatctccacagagaagaagggtcaagaagcacagctcttgatgctcayggtgtaccaagctctgctttaagcttgtgtcttattttttacttatttagcaaatctgtcgctcttgttttgtgccagatgctgttctcagcactttaca

SEQ ID NO: 214903 - DNA, 201 bp, Homo sapiens
ttcataaagtccaatttatcaactttttccagtttcgatttatgatttttgtgacctatggaggaaatctttgcctacactaaggtcaaaagaagttctcytattttctagaaattttatagttgtatattctatgattccttttattttttaattttttaaatttttacattttttaacctattatagccgtcaggatgt

SEQ ID NO: 214904 - DNA, 201 bp, Homo sapiens
cacatgcacaagaacacgaagacccgaggcaggtatagtccgtgagacagatccctctaggctgaaagactccccacaagggtccctagaacaaggctccrgcctcggcagtccctcccacttctggtgggaggatctccacagagaagaagggtcaagaagcacagctcttgatgctcacggtgtaccaagctctgcttt

SEQ ID NO: 214905 - DNA, 201 bp, Homo sapiens
tgtgtgcacacatgtatgcacacatgcacaagaacacgaagacccgaggcaggtatagtccgtgagacagatccctctaggctgaaagactccccacaagsgtccctagaacaaggctccagcctcggcagtccctcccacttctggtgggaggatctccacagagaagaagggtcaagaagcacagctcttgatgctcac

SEQ ID NO: 214906 - DNA, 201 bp, Homo sapiens
ccccaagatatgaagctagtaccaggtacctggaaggtgctagcgagtagagcttgactctttacagaaagaggtgtttttctcacaatgttcacttgagracggtggaacaggctatttcacaaggtagtgagttccccatgcctggaagcattcaagcaggggccatgtgggagttgttcaggagtgcatagaagggac

SEQ ID NO: 214907 - DNA, 201 bp, Homo sapiens
tccagaccaggctgggcaacatagcaaggctttgtctttacaaaaaataaaaaataataataataataaaaactacagcttcagaatgattgacttcagcwtgtttataaagtcaagggtcttcagtgtcctgggcctatgtcactgcgtcagagggagagaggaagaggctggggtgatgggcactggggcttatgctcc

SEQ ID NO: 214908 - DNA, 201 bp, Homo sapiens; identical to SEQ ID NO: 37894

SEQ ID NO: 214909 - DNA, 201 bp, Homo sapiens
ggaaaatgcactgacacttgctgaccagagccggggtgagcatctgggtgaccctgcagatgagacaaaataagggctgccgtgggggaggggcccttgcygggccaccctgctgaggccctgtgttactgtcctgcggctgtcataacaaaggaccacaaatgaggtgactcaaaacatccgaaatcggccacgtgcggt

SEQ ID NO: 214910 - DNA, 201 bp, Homo sapiens
caaattttgcctatggcactggggacattgagtggctcctgtcccgggctctggagggcttgggagacacgtctgcagctctgggcatctctcaaggtcaygggcggccacactcaaggttaggccctcctctgtgtgagctgcggtcagcaggaaggctgacctcagaggcggccccagggcccttggaggccctgcccc

SEQ ID NO: 214911 - DNA, 201 bp, Homo sapiens
gtcccccttctcttctcctcaagttgcccagcatcaggtcccaaccagcatcttttgcagacagggtgggtcggctcctcactagaggggcagggttgggmgggaagcctgttgagccctccttcctgtgcagcccacagccctggggttagctccagaggggtgcagaaaggagcccccaaaggcagaaactcacccttc

SEQ ID NO: 214912 - DNA, 201 bp, Homo sapiens
cccatctggtctcatttcccatgatcttggagaacttgcttcacggtttttgtagtgcaggtttgcagacagctaattccctttcattttcacttatctgmaaatctttattttgctgtcattctttctttttttatttttatttttatttttgagacagagtctcactctgtctccccacaggctacagtgcaatggtgt

SEQ ID NO: 214913 - DNA, 201 bp, Homo sapiens
aggagcgcttttggtgtctgagcccagtggtcctggctgtggtttggtacacttggccgtgggtgaggccaaggtggtttggatcctgggaaggttgggtrcctggcagcctcaaggcaggagctggggtgttggaggaggaagcacgctcatccctcgttccttcctgtttcgtgggatgctgagtctctgggcagggac

SEQ ID NO: 214914 - DNA, 201 bp, Homo sapiens
ccttgtgctttttccatgtgtttggaaattttccacactaaccagtagggaagggaaacagatgcacccatcagagctctggggctggccgtccaggacasgagttacagcttataggcttgaagggactctaccaacactgggtgcagcctgggcaagggagtgggacagagaggtcagggctctgcctccagcccttgc

SEQ ID NO: 214915 - DNA, 201 bp, Homo sapiens; identical to SEQ ID NO: 37913

SEQ ID NO: 214916 - DNA, 201 bp, Homo sapiens
aaggcacgagtcaggggcctgctagagccaggagctagtgggagaaggaaacagtgttgcttatgaattataaacagacactcccgcaactttctctgacrtgatacaatctcaaagtgggccacccagaggtgggaaggtgacttctggctctccaggccttgggcctgtctttttttttttttttttttttttttttga

SEQ ID NO: 214917 - DNA, 201 bp, Homo sapiens
gaggctgcccaggacggtgggcagggaagtgacaggtcacatggtcatcccaccaacagccgggagtccagcttggggggacccaagaccctggggaaggyacgagtcaggggcctgctagagccaggagctagtgggagaaggaaacagtgttgcttatgaattataaacagacactcccgcaactttctctgacgtgat

SEQ ID NO: 214918 - DNA, 201 bp, Homo sapiens
caggacctgtctctaaaaacaataaaataaaatcaaagttttaaaatggaaaaaaaatcatgagcacataactccagatgtatcctcaagatagcaaaccygggtgggcgcagtggctcatgcctgtaatcctggcactttgggaggccaaggtgggtggatcacctgaggtcaggagtttgagactagcctggccaacag

SEQ ID NO: 214919 - DNA, 201 bp, Homo sapiens
tttctccattgtccttctgtaagtggttctctaagtgggaactcaggcctggaaagggtgggcaccctgtctggtgggctctggcaggccaggcgctgagyagcctcaggagacacaaccctaggaaaaggctcatgcaggctggctgtcatgacggactgttggtgggagaggggaaggcgccgtggtaggggaagcttt

SEQ ID NO: 214920 - DNA, 201 bp, Homo sapiens
tgggtagatgccacgaggcatgccttccacaactagaagggctggtggagatgaccagaatgctccagacagaccttttatcaaacttccaaaattcaatyttgtttcatgaagcctgaggaccctgcagagtgaaagacaaggaagggctttcctgcaggggggtgtgtgtgcctgtgtgtgcctgtgtgctgtgtgccc

SEQ ID NO: 214921 - DNA, 201 bp, Homo sapiens
ggcgggggtgagggtgggaacaggaggtgggtagatgccacgaggcatgccttccacaactagaagggctggtggagatgaccagaatgctccagacagaycttttatcaaacttccaaaattcaatcttgtttcatgaagcctgaggaccctgcagagtgaaagacaaggaagggctttcctgcaggggggtgtgtgtgc

SEQ ID NO: 214922 - DNA, 201 bp, Homo sapiens
accttgaatggtgtctgcgccgcagcaggggagcagctggggattgccagcgcctgttgctggtgggctgtgcgccagatcccgtcttggatgtgtgggtrattgtcagccacatgtgtgtgaagggctgtgcgtgtaggatttgtgcaaatgtgcccctccctgctgccagcccatgggaggctgtcaagattctgcccc

SEQ ID NO: 214923 - DNA, 201 bp, Homo sapiens
gccagcgatatccatgcttgaggttttgctgtatagtcttcaaaattcctttcatgcccccactagattctgagggtagggctgttgtctttgtttttttktgtgttttttttttgttttttgttttttgagatggagtctctctctatcacccaggctggagtgcagtggcatgatctcagcttactgcaacctctgcct

SEQ ID NO: 214924 - DNA, 201 bp, Homo sapiens
atctagttttattcccctctgtcaggtgtagactctactccagcttctacctacttgagatattctatactgactccaggctgttgttattttgttctttyaaatattttgtccagagctataatgttttctgcagaattgaccagatagcagctactctctgtgaccaggagccttgatcttccagacttgctgatgggc

SEQ ID NO: 214925 - DNA, 201 bp, Homo sapiens
aaccagaaacttatctagttttattcccctctgtcaggtgtagactctactccagcttctacctacttgagatattctatactgactccaggctgttgttrttttgttctttcaaatattttgtccagagctataatgttttctgcagaattgaccagatagcagctactctctgtgaccaggagccttgatcttccagac

SEQ ID NO: 214926 - DNA, 201 bp, Homo sapiens
agtgactctctccatcccaccttgaatggtgtctgcgccgcagcaggggagcagctggggattgccagcgcctgttgctggtgggctgtgcgccagatccygtcttggatgtgtgggtgattgtcagccacatgtgtgtgaagggctgtgcgtgtaggatttgtgcaaatgtgcccctccctgctgccagcccatgggagg

SEQ ID NO: 214927 - DNA, 201 bp, Homo sapiens
actcttggaggctgccggagcccctcctgcctgcatgcggccgctgccgggtggacaggcctgcttgtgggttgaggctcccagcagctggggtggatcayttctcctcccaagaagctttgggagaagcagctgagggggccagcgtcctcctgaggccaattccctgcctcccccagcgcaggcgcgaagccatctttg

SEQ ID NO: 214928 - DNA, 201 bp, Homo sapiens
ggcctccagcatcaggccccacacactatgcatcatttttagggcagggaatgagagcaggctccattctttttggttgtctgtgaggaccaggaggcttsctgctgaggcagcttcctgtggaaacagtgtctcagccccgcaatccattcatcggagctccaacatcttaatgaaacactgtgtcagatgggttctggg

SEQ ID NO: 214929 - DNA, 201 bp, Homo sapiens
ggccctgattcaggctcacagtataaagagagaagtcagagaatcctagaaatttattgcttgaagaaggggttggtgtcctcatatctcaccttcctcakgctgggcttcatcaccaggcctcctcacagattcctgtcccttctgtgtcctggactccggatacctcaactctcagtactttgtgctcagcccaggtaa

SEQ ID NO: 214930 - DNA, 201 bp, Homo sapiens
agagattccagggcaggggcctatgtgtgaaagcaactctaccatgcctgggcccagtcttgagtcacctgtcagcacaccagcaggcaaggtaggagttrtgaaaggatgagggaggggaacaggaatactttgaactggcagtagaggatagaaagccctaagagagggggtaatggaaatatgactagatgctgtgac

SEQ ID NO: 214931 - DNA, 201 bp, Homo sapiens; identical to SEQ ID NO: 38003

SEQ ID NO: 214932 - DNA, 201 bp, Homo sapiens
ttcaggctcacagtataaagagagaagtcagagaatcctagaaatttattgcttgaagaaggggttggtgtcctcatatctcaccttcctcaggctgggcktcatcaccaggcctcctcacagattcctgtcccttctgtgtcctggactccggatacctcaactctcagtactttgtgctcagcccaggtaacacgtttt

SEQ ID NO: 214933 - DNA, 201 bp, Homo sapiens
tggttggaagggtagagaacaaaccccagaacagtgtaagctccagaggtgggtgatgggaacagtccccaaagtgagaagagggaataggtcagggcaawgcttgcagcatcaagttcctcaggagtttctgtcggcccagctcatagtcctcctcgtctacatttaccagcagcttgatggcttcatggcccacagctt

SEQ ID NO: 214934 - DNA, 201 bp, Homo sapiens; identical to SEQ ID NO: 38006

SEQ ID NO: 214935 - DNA, 201 bp, Homo sapiens
aagggaaataaaggggaagcccaggcacatgggtgcagggaggggtggggaataccacttccactttcttttgtctttttctttaaaaaaaaaaaaaaaaaggcaggggtgtgattggttggaagggtagagaacaaaccccagaacagtgtaagctccagaggtgggtgatgggaacagtccccaaagtgagaagaggga

SEQ ID NO: 214936 - DNA, 201 bp, Homo sapiens
catcaatgacatcaacaaagaggaaagaaagcacgcgcacatctctgtgtgtcagatgagtgcccacgatgtcaaacatgcggtgcaggctgtacagcccrtgttcctgctcaccatgctcttctggccacacctggcttgcccgccgctttaggcccgccatgctgggggctcaggtacgcaatgctttccagaatccct

SEQ ID NO: 214937 - DNA, 201 bp, Homo sapiens
tcaacgtgccctgtaagagcatgatcaaaaggaagtccagctttcctgcctctccacttgcaccccttagcattaaatttgcttccctgtgctatgaaatmtgagaatcctgcctatgctgttcacaggcccagagccatggctatctcctcttcctcctgcgaactgcccctggtggctgtgtgccaggtaacatcgacg

SEQ ID NO: 214938 - DNA, 201 bp, Homo sapiens
gccgcattgccctgaagagcctgcagcggctccacctgctaagccctctggaggagaaggggccccctggcctggaagtcaactatggctcagctgacaayccccagaccatctggtttgagctgccacaggtgagtggccaggcctctggccaccttgcgaaggtggatgtgagggccttgccccagcatggcgtgcagt

SEQ ID NO: 214939 - DNA, 201 bp, Homo sapiens
gaggccgaggcaggtggatcacctgaggtaggagttgcagaccagcccggccaacatggtgaaaccccgtctctactaaaaacacaaaaattagctgggcrtggtggagcacacctgtagtactcggaaggttgaggcaggagaatcgctagaacccaggagggtggaggttgcagtgagccaagatggcaccactgcact

SEQ ID NO: 214940 - DNA, 201 bp, Homo sapiens
tgagcacccattgcgtgcaggggggtgtggctgtgaagccaacaggctaagtctctgcagtgcttacaatgagataacttatgtgtctgggagtgagaggycactggagagtaagaatgcagggaaggggctgctgcagtggagaaggctttgtggcagaagccttcctacagggagggaaggagtgagcacggggtgaca

SEQ ID NO: 214941 - DNA, 201 bp, Homo sapiens; identical to SEQ ID NO: 38030

SEQ ID NO: 214942 - DNA, 201 bp, Homo sapiens; identical to SEQ ID NO: 38032

SEQ ID NO: 214943 - DNA, 201 bp, Homo sapiens; identical to SEQ ID NO: 38034

SEQ ID NO: 214944 - DNA, 201 bp, Homo sapiens
cacatgcagtcacagcgtccattcattcactgactccttaccgcgccagactgggctccacaagggcgggtgcccgtgtgaagggtttgagctctatctgyagcacgtgttaaggaaataatgaatgaatgaataactgtgccaggaactgtgctaaggataaaaggtgaacaaaattagacccagtctctcccctcttac

SEQ ID NO: 214945 - DNA, 201 bp, Homo sapiens
ccacaaatgctttctgactgcctcctgcctgctcagacttaaatagcagcctcgtccctgtttcccgtttcagcgcgcgtccacatgcagtcacagcgtcyattcattcactgactccttaccgcgccagactgggctccacaagggcgggtgcccgtgtgaagggtttgagctctatctgtagcacgtgttaaggaaata

SEQ ID NO: 214946 - DNA, 201 bp, Homo sapiens
gacacagcccgtggaggaccagggggtctccacccagctactcgcgccctctggcagcgtgtgcttctcctacaccggcacaccctggaagttgttcctaygcaaggaggtgggcatgagggtggggccttggcctggcctctttgggctggcagggaggcggcaggctttgtgcatcccagcctgggaccccagcatccc

SEQ ID NO: 214947 - DNA, 201 bp, Homo sapiens
tgcagtagcacccgccccctgccccgaacaatcttgtatctgggctgatccaagggcagttaccacgaggtctctgggcagtgagtgaaaagggagggctrgcagttgcaggggaggggacaggtgagacgtgtgaatggaggtggcccaagccctccatccctccctgccccacctaggccctctgctgagcacacaggc

SEQ ID NO: 214948 - DNA, 201 bp, Homo sapiens
gcggctccaccctggagctgtcactgaagagcgagcagctggtgctgcacacagcccgggcaagggccatcgaggcgctggttgagctattcctgaacgascttaagaaggtaagtgtggggcacgggttgagaggccgggcagacagccctcaccgatgctgcatctccctgtccgtcttccctgtgggggcaggggctg

SEQ ID NO: 214949 - DNA, 201 bp, Homo sapiens
ccgcctcaggacagccaggagggggctggagggagaggaggtggcccctgccctcagtccctggacgggcactattcatggccccctgttctgtcccacamtccagtgtgtccttgtgaccgtgccctccctgaggctggtggtgatggtggcctgtgtgtgcatccaagctcctgtgtgtgtgtttcaaggggcacaaag

SEQ ID NO: 214950 - DNA, 201 bp, Homo sapiens
agatggactcactctgcccaggactgggcctagcacccaaccctccctctctctcctcgtcctctcatcctctctctctctctctttctctctccatctcrctctcttctaccattcaccatccctccacgcattcgtcatttcttctcctctctgcaaacctctcctgtgctgatgcctgggcaccagagatgaggtggg

SEQ ID NO: 214951 - DNA, 201 bp, Homo sapiens
tctctccatctcgctctcttctaccattcaccatccctccacgcattcgtcatttcttctcctctctgcaaacctctcctgtgctgatgcctgggcaccagagatgaggtgggagcagtacctgccctaggcggggctcacggtctagtgcccacagcagctgtccagggagtgcaggctgaagcagtgagatggcagggg

SEQ ID NO: 214952 - DNA, 201 bp, Homo sapiens; identical to SEQ ID NO: 38040

SEQ ID NO: 214953 - DNA, 201 bp, Homo sapiens
ctcccaggagtgagcctctgttccccctaattctgcagtagcacccgccccctgccccgaacaatcttgtatctgggctgatccaagggcagttaccacgrggtctctgggcagtgagtgaaaagggagggctggcagttgcaggggaggggacaggtgagacgtgtgaatggaggtggcccaagccctccatccctccct

SEQ ID NO: 214954 - DNA, 201 bp, Homo sapiens
gggtcagggagtggaagccttgggaccctccagacaagtgggcagagcacaagcatgggacctgatgaccttggcagtttacttcgccttctgagcctccrtttcctcacctgtaaaatgggtatggagacctaagctctggcgttgctgtgagggtgagatgtagtaacgtggagatggcctggcaggtgcctggcacat

SEQ ID NO: 214955 - DNA, 201 bp, Homo sapiens
ctctagcacacagtaggtacttaataaatggttgtcactttgccacctctgaacgctcccaggagtgagcctctgttccccctaattctgcagtagcaccygccccctgccccgaacaatcttgtatctgggctgatccaagggcagttaccacgaggtctctgggcagtgagtgaaaagggagggctggcagttgcaggg

SEQ ID NO: 214956 - DNA, 201 bp, Homo sapiens
cctggacggcttcctggaccagatcttccagccagtgatatcctccggcctcagcgtgagtcgggcacagcccccaaatgcccctgccccaaccccccggrgcctctgctgccccttccatttttctcagggctctcactctgacctgtgaccattgtccctttaggatctggaacaaagctgggctctgagcagccgcat

SEQ ID NO: 214957 - DNA, 201 bp, Homo sapiens
gctctgtctcaggacctggtggtgaccacctcgctctgcccccagatcctacgggacaccttctccgagtcctgtatccggatttcccagaatgagcggcrgaaaatgaaagacctgctgggtatgggtccagggaccatggagttgggagcttgagtgctgggggccgcgcctgccctgaaggagggagcagcatgggag

SEQ ID NO: 214958 - DNA, 201 bp, Homo sapiens
tgtgagtagcgctgaattgctctgaaaataaccgttgaatgtaattgtctcaccatagagcgttactggagataacagttggtgttattgaatgggagacrttatttagatccacgatgccacacctttgttgtacctgcggtagtgccctgcttttgaagtcatgaccttaaagaatgtttattgacaagggaaattgtc

SEQ ID NO: 214959 - DNA, 201 bp, Homo sapiens
cgcccaggcctaagctcttcccgctggcctcaccgctctgagttagcacctgcctgacagatgctgcgtttttttccccgctgtcagctcttgccctcctycctccccagcctttggggctgtgagtagcgctgaattgctctgaaaataaccgttgaatgtaattgtctcaccatagagcgttactggagataacagttg

SEQ ID NO: 214960 - DNA, 201 bp, Homo sapiens
ccggcccagcctgactctcccagcagacattgacctgttccctttctccagcttcgtcgccatcggctttcaggtgggcgcccaggcctaagctcttcccrctggcctcaccgctctgagttagcacctgcctgacagatgctgcgtttttttccccgctgtcagctcttgccctcctccctccccagcctttggggctgt

SEQ ID NO: 214961 - DNA, 201 bp, Homo sapiens
cctgcgcagctacatcactgacaactgcagcctcctcagcttccaccgtggggacctcatcaagctgctgccggtggccaccctggagccaggtatcgccwgaggccggcaggggctcacacagggagggcatccacttggcagaggctgcccgggggcagagggtccagtgggtgagccacatccctgggtgccttccag

SEQ ID NO: 214962 - DNA, 201 bp, Homo sapiens
gccctcaccgatgctgcatctccctgtccgtcttccctgtgggggcaggggctgggagtttgggccaaatccctgaagtctggggtgctaggtggaggggsaggccagcagggggagcaggtgggcaggcaggacagggaggcacaggcagacttgctgctccaggccctcgcctgcttgcccacaggactccggctatgt

SEQ ID NO: 214963 - DNA, 201 bp, Homo sapiens
ggggcggctccaccctggagctgtcactgaagagcgagcagctggtgctgcacacagcccgggcaagggccatcgaggcgctggttgagctattcctgaaygagcttaagaaggtaagtgtggggcacgggttgagaggccgggcagacagccctcaccgatgctgcatctccctgtccgtcttccctgtgggggcagggg

SEQ ID NO: 214964 - DNA, 201 bp, Homo sapiens
accatgagggctgcaggcctgacacaccagctgtgcctcctctgccctccaggagacgccctatggccaggtctcgcgatccctgcccgtggaaagtgcckttgatgccaggtggccctagagacgggtgagagtcagagcagggcccgaggcacggctctatgtggctcacccacccgccatgcctacagggacgccctg

SEQ ID NO: 214965 - DNA, 201 bp, Homo sapiens
gcccagatctcctcgtgtgacatatctcccctttggtgacagggccacttaccaggcaaagcccggcctgccctgcctggggagtgtgtccattcctgaarcagagatctccctgtccctccctctctgtgtagcgagagtcccaggaggtggctgctgtgtctagctgggctgagatccacacagcagcccgactgctgc

SEQ ID NO: 214966 - DNA, 201 bp, Homo sapiens
ctaggtgacaattatggggtcagggagtggaagccttgggaccctccagacaagtgggcagagcacaagcatgggacctgatgaccttggcagtttacttygccttctgagcctccgtttcctcacctgtaaaatgggtatggagacctaagctctggcgttgctgtgagggtgagatgtagtaacgtggagatggcctgg

SEQ ID NO: 214967 - DNA, 201 bp, Homo sapiens
ggagttttgctcttgttacccaggctggagtgcagtggcgcgatctcagctcactgcaacctctgccccctgggttcaagtgattcgcctgcctcagcctyccgagtagctgggattacaggcttgtgccaccacactcagctaattttttttttgagatggagtttcactcttgttgcccaggctggagtgtaatggtgc

SEQ ID NO: 214968 - DNA, 201 bp, Homo sapiens
gaaagctgagacatagagcttctccactctcccaatgtctgtgcctctaagctgccacccctaagaacatctggcattagatgagcagctatggtcaggcmtggtgggtcacacctgtgatcccagcactttgggaggccgaggcaggaggatcgtgtgaagccaggagtttgagaccagcctaggcaacatagagaaacc

SEQ ID NO: 214969 - DNA, 201 bp, Homo sapiens
gaggccgaggcaggaggatcgtgtgaagccaggagtttgagaccagcctaggcaacatagagaaaccccgtctctattaaaaaaaaaaaaaaaaaaaaaargggttggcggtggtggctcacacctgtaatcctagcactttgggaggccgaggtggatggatcacttgagcccaggaattctagagcagcctgggcaaca

SEQ ID NO: 214970 - DNA, 201 bp, Homo sapiens
tgtctgtcctcagtcttcctgagagagagcaccctgctcagagccactgggctgtgctcttagcactctccctgcctggctggctgggatgagggcaggasggccaaacaagctgggctgtctccctctgccccccacaggctgggccagactgatggaggtgccgcaggaaaggacacggacagcctggtgcagtacacc

SEQ ID NO: 214971 - DNA, 201 bp, Homo sapiens
tagagaaaccccgtctctattaaaaaaaaaaaaaaaaaaaaaaagggttggcggtggtggctcacacctgtaatcctagcactttgggaggccgaggtggrtggatcacttgagcccaggaattctagagcagcctgggcaacatggcaaaatcttgtctctacaaaaaatatgaacagattaggccaaggcgagcagatc

SEQ ID NO: 214972 - DNA, 201 bp, Homo sapiens
gtgacacgtgcctgggtgtggtggcacatcccagctacttagagaagctgaggcaggagaattgcttgaacccgggaggtggaggtggcagtgacctgagrttgcgccactgtactccatccagcctaggtgacagagcgagactccgtctcagaaaaaaaaaaaaaaacaaaacagactgggcgtggtggctcatgcctg

SEQ ID NO: 214973 - DNA, 201 bp, Homo sapiens
actcccgcctgggtgacagagcgagactgtgtttcaacaacaacaagaagtagggaccattattcatctagttttatagataaagtttaaaagcaaagtgygtacagtgcacaacacaggctctagcacacagtaggtacttaataaatggttgtcactttgccacctctgaacgctcccaggagtgagcctctgttcccc

SEQ ID NO: 214974 - DNA, 201 bp, Homo sapiens
cttgaacccgggaggtggaggtggcagtgacctgagattgcgccactgtactccatccagcctaggtgacagagcgagactccgtctcagaaaaaaaaaamaaaacaaaacagactgggcgtggtggctcatgcctgtaatcccagcacactgggaggcctagatgggcggatcacctgaggtcaggagttcgagaccagc

SEQ ID NO: 214975 - DNA, 201 bp, Homo sapiens
aacagactgggcgtggtggctcatgcctgtaatcccagcacactgggaggcctagatgggcggatcacctgaggtcaggagttcgagaccagcctgaccartatggtgaaaccccgtctctactaaaaatacaaaattagccaggtgtggtggcacatgcctataatcccagctacttaggaggctgagacaggagaattg

SEQ ID NO: 214976 - DNA, 201 bp, Homo sapiens
ccacgccggagcctacggacatgggctcggaagggacaaaaaccgggccggagtcagcgctggagccaagcagcgacggcctggacagcgactggccccamgcagatacccggggccgggaagggtcgtcggggacggggcccctgggagccagcgagcattccggcggggactccgactcgagtccgctggggaccggac

SEQ ID NO: 214977 - DNA, 201 bp, Homo sapiens
agccaggtgtggtggcacatgcctataatcccagctacttaggaggctgagacaggagaattgcttgaacctgggaggtggaggttgcagtgagccaagaytatgccattgcactccagcctgagcaacaagagcgagactcagtctcagaagaaaaaaaaaaaaaaaaagattagctgggcatggtggcatgtgcctgta

SEQ ID NO: 214978 - DNA, 201 bp, Homo sapiens
tgtgagcaggtgagagctggcccacctgccagcctgagacatctgcagagacagcatccttcgtgccctttgtctaatggctgggccaggttaacaccacrtagggcatgttggcagccagcactggggggcacttctgtgtgcccagacctgccttcattgaaccttcacaacattcctgagaagtagggaccatggcca

SEQ ID NO: 214979 - DNA, 201 bp, Homo sapiens
agaatcgcttgaacccaggaggcggaggttgcagtgagccgagatcgtgccactacactccagcctggggacagagcaagactccgtctcaaaaaaaaaaraaaagaaaagaaaagaaaatgggccaggcgcggtggctcacgcctgtaatcccagcactttgggaggccaaggtggacagatctcaaggtcagcagatcg

SEQ ID NO: 214980 - DNA, 201 bp, Homo sapiens
tctcaaaaaaaaaaaaaaagaaaagaaaagaaaatgggccaggcgcggtggctcacgcctgtaatcccagcactttgggaggccaaggtggacagatctcraggtcagcagatcgagaccatcctggctaacatggtgaaacccggtctctactaaaaatacaaaaaattagccgggcgtgatagtgggcgcctgtagtcc

SEQ ID NO: 214981 - DNA, 201 bp, Homo sapiens
aaaatgctgggattacaggtgtgagccaccgtgcccagctacagtcatcttttcaaagcatgaatcatgttgttaaggacctgactacctccccagcccamtttaggccagacttttaccctgcagtgactttagacttctctttcctataacaccaccctcccacttctcacctaatcatctctttttcgccctcacagc

SEQ ID NO: 214982 - DNA, 201 bp, Homo sapiens
cctgccctcttcccggtgccctggcagatgggcacagacgcccacagtgctaaggctggtgagggccctggagggccaggggtggctggcccctcctgatstgttctcactcctttgctgagaacctcccaggggcaggaggggacagctgaacttcagagctggggaggtgcccccaggtgactcacatgggaggcatca

SEQ ID NO: 214983 - DNA, 201 bp, Homo sapiens
aggctgagtaagcaccatgagggctgcaggcctgacacaccagctgtgcctcctctgccctccaggagacgccctatggccaggtctcgcgatccctgccygtggaaagtgccgttgatgccaggtggccctagagacgggtgagagtcagagcagggcccgaggcacggctctatgtggctcacccacccgccatgccta

SEQ ID NO: 214984 - DNA, 201 bp, Homo sapiens
tggactttgtcccctgggaccatttcttcccttcttcctgccctcttcccggtgccctggcagatgggcacagacgcccacagtgctaaggctggtgaggkccctggagggccaggggtggctggcccctcctgatctgttctcactcctttgctgagaacctcccaggggcaggaggggacagctgaacttcagagctgg

SEQ ID NO: 214985 - DNA, 201 bp, Homo sapiens
ccacttggcagaggctgcccgggggcagagggtccagtgggtgagccacatccctgggtgccttccaggctggcagtttggctctgccgggggccgttccrgactctttcctgccgacatagtgcagccggctgccgctcccgacttttccttctccaaggagcagaggagtggctggcacaagggtcagctgtccaacgg

SEQ ID NO: 214986 - DNA, 201 bp, Homo sapiens
aagtttggactcttcatttcgcccccgctctttcccggcctccaggaagcggtacctccggcggcgggcagctttgggacagctgaacaccatcctgctgstggcccagcccctgctccagaggcggcagagactgcaggtgcaggggcttgggtggggcggttcagggtagaagccaggctgcctgagctggccgagctg

SEQ ID NO: 214987 - DNA, 201 bp, Homo sapiens
cgaccccaaggacgaggctctggccaagctgggtatcaacggtgcccactcgtccccgccggtgagcaccccagcctgtctcccccagagtgtgtgctgcygcactggggagctcaaggctctctggggcgaacttggccttgtgctgtgactcagcccgtgtactttctccgtatccccccagatgctgtcccccagccc

SEQ ID NO: 214988 - DNA, 201 bp, Homo sapiens
cgctggcccacgaccctgggctagaggtgggggcaggtggcaaggtgaccccagttcatgcccgatccctgcgcagcttcgcggaggtgctgggtgtggartgccggggcggctccaccctggagctgtcactgaagagcgagcagctggtgctgcacacagcccgggcaagggccatcgaggcgctggttgagctattcc

SEQ ID NO: 214989 - DNA, 201 bp, Homo sapiens
gattctctgctcatacaggtgcgctggcccacgaccctgggctagaggtgggggcaggtggcaaggtgaccccagttcatgcccgatccctgcgcagcttygcggaggtgctgggtgtggaatgccggggcggctccaccctggagctgtcactgaagagcgagcagctggtgctgcacacagcccgggcaagggccatcg

SEQ ID NO: 214990 - DNA, 201 bp, Homo sapiens
ggccccggcctccgccccgaccagctgaagattctctgctcatacaggtgcgctggcccacgaccctgggctagaggtgggggcaggtggcaaggtgaccycagttcatgcccgatccctgcgcagcttcgcggaggtgctgggtgtggaatgccggggcggctccaccctggagctgtcactgaagagcgagcagctggt

SEQ ID NO: 214991 - DNA, 201 bp, Homo sapiens
gctcactgctgcaaactccgcctctcgggttcacgccattctcctgcctcagcctcccgagtagctgggaccgcaggtgcccgccaccacgcccggctaaytttttgtattttttagtaaagacggggtttcaccatgttagccaggatggtctcgatctcctgacctcgtgatccacctgcttcggcctcccaaagtgct

SEQ ID NO: 214992 - DNA, 201 bp, Homo sapiens
gggaggatcgcttgagctagagcctcagaagtcaaggctgcagtgagccatgatggtaccactgcactctagcctgggtgacagagtgagaccctgcctcaaaaaaaaaaaaaaaaaaaaaatccgtggtctttggaagggatgtttataatcttggggttgagggtgtggggagggacactggtccctaggcccctcctg

SEQ ID NO: 214993 - DNA, 201 bp, Homo sapiens
cgcggtggctcacgcctgtaatcccagcactttgggaggccaaggtggacagatctcaaggtcagcagatcgagaccatcctggctaacatggtgaaaccyggtctctactaaaaatacaaaaaattagccgggcgtgatagtgggcgcctgtagtcccagctactggggaggctgaggcaggagaatggcgtgagcctgg

SEQ ID NO: 214994 - DNA, 201 bp, Homo sapiens
attgttaccccaaacccaagttctcatttacataatataggcaagttcccccatgcacttgctattttatgttcattagctcagtaaaataacgtccaacyaaattactttttagttttatttttatattttaaaaaatagagatggggtctccctatgttgcccaggctggtctcaacctcctgggctcaagcaatcctc

SEQ ID NO: 214995 - DNA, 201 bp, Homo sapiens
gagttactgtgtgtgtttgtgtatgtgtgttttaactgactcctactatcattcccaactgagttactttttgaaagtgatttttttttttttttgagacrgagtctcgctgttgcccaggttggagtgcagtggcgtgatcttggcccactgcaagctccgcctcgcgggttgacgccattctactgcctcagccttcca

SEQ ID NO: 214996 - DNA, 201 bp, Homo sapiens
gtgatttttttttttttttgagacggagtctcgctgttgcccaggttggagtgcagtggcgtgatcttggcccactgcaagctccgcctcgcgggttgacrccattctactgcctcagccttccaagtagctgggactacaggcacccgccaccatgcttggctaatttttttttctttttttttgtatttttagtagaga

SEQ ID NO: 214997 - DNA, 201 bp, Homo sapiens
cctcctctctgccaggcttgacacagcccgtggaggaccagggggtctccacccagctactcgcgccctctggcagcgtgtgcttctcctacaccggcacrccctggaagttgttcctacgcaaggaggtgggcatgagggtggggccttggcctggcctctttgggctggcagggaggcggcaggctttgtgcatcccag

SEQ ID NO: 214998 - DNA, 201 bp, Homo sapiens
ggtctgtggctcggggatgagggtctgaactggctgctcctcctgcttcaggcccagcagatgacagcccaggccatgtccctgtccctggagcagcagaygcagcagcggcagcagcaggctcgggcctccgaggctgcgtcccaggcctcaccctcagccgtcacctccaagcccaggaagccccccacacccccggag

SEQ ID NO: 214999 - DNA, 201 bp, Homo sapiens
tgtgcctgtcctcctgtctgggcctgaaggagatccccttctcttggtcactgtccttcaaatcattccaaagtatttactgagcacccattgcgtgcagsggggtgtggctgtgaagccaacaggctaagtctctgcagtgcttacaatgagataacttatgtgtctgggagtgagaggtcactggagagtaagaatgca

SEQ ID NO: 215000 - DNA, 201 bp, Homo sapiens
cttcgcggaggtgctgggtgtggaatgccggggcggctccaccctggagctgtcactgaagagcgagcagctggtgctgcacacagcccgggcaagggccmtcgaggcgctggttgagctattcctgaacgagcttaagaaggtaagtgtggggcacgggttgagaggccgggcagacagccctcaccgatgctgcatctc

SEQ ID NO: 215001 - DNA, 201 bp, Homo sapiens
ggagcctggccagaactgtccgccagcaaagagggaaagtaggactcgaactcagggccctgaaaaccatagcctcgctcctaatggcccagatctcctcrtgtgacatatctcccctttggtgacagggccacttaccaggcaaagcccggcctgccctgcctggggagtgtgtccattcctgaagcagagatctccctg

SEQ ID NO: 215002 - DNA, 201 bp, Homo sapiens
gggattccagtgccaggcaggaagcataagtttggactcttcatttcgcccccgctctttcccggcctccaggaagcggtacctccggcggcgggcagctytgggacagctgaacaccatcctgctggtggcccagcccctgctccagaggcggcagagactgcaggtgcaggggcttgggtggggcggttcagggtagaa

SEQ ID NO: 215003 - DNA, 201 bp, Homo sapiens
cagtgcagaacatcgggggagccaggcatctccactatctatttccaacacgttttcatcccgcaaacagaaactctggacccattaagcagtaactattscccccaagacccccagcccctggtaactttcagtctacttgagtctctatgaagttgcccattctagatacttcctgtaagttgactcatacaatatttc

SEQ ID NO: 215004 - DNA, 201 bp, Homo sapiens
cctaatcatctctttttcgccctcacagcctgtcttcacacattcctccaacagctgttggctgaccgtctgcctcatctacccttgggccagatgctggygacagagctggggatgccagagacggggcctcccaggctggttgggaagtcagattcagatggtagagcagccagtgatcttcccagagagtaactcgag

SEQ ID NO: 215005 - DNA, 201 bp, Homo sapiens
aacaccaccctcccacttctcacctaatcatctctttttcgccctcacagcctgtcttcacacattcctccaacagctgttggctgaccgtctgcctcatytacccttgggccagatgctggcgacagagctggggatgccagagacggggcctcccaggctggttgggaagtcagattcagatggtagagcagccagtga

SEQ ID NO: 215006 - DNA, 201 bp, Homo sapiens
aaaaaaaaaagaaaaaaaaaaaatcaaacgagcagctgttatgtacctgggtactgtgtaaatcactttgcatttgttttctaatttagtttgcaagacarccccctaggaagggttactgcttcccctttagcagtgaggccgtggggcgcaggaaggaaggagcctggccagaactgtccgccagcaaagagggaaagt

SEQ ID NO: 215007 - DNA, 201 bp, Homo sapiens
cctgggacagggcactggacactcaggtggcaccaggtttcttgtgatcccagcgccctgcccacccttggagccaggcacacagtgacgactcggaggcyaccagcctgtcctctgtggcctatgcctttctgcccgactcccacagctacaccatgcaggaattcgcccggcgttacttccggaggtcccaggccttgt

SEQ ID NO: 215008 - DNA, 201 bp, Homo sapiens
cttcctgtagggcgagagtggcagcgacgtgcagctgttagccgtgtcccaccgtgggctgcgactgctcaaggtgacccaaggccccggcctccgccccraccagctgaagattctctgctcatacaggtgcgctggcccacgaccctgggctagaggtgggggcaggtggcaaggtgaccccagttcatgcccgatccc

SEQ ID NO: 215009 - DNA, 201 bp, Homo sapiens
gtctatgttatgtgacatgtgccattttctgagtccgaggtgggtgctgagcctggaattgttaccccaaacccaagttctcatttacataatataggcargttcccccatgcacttgctattttatgttcattagctcagtaaaataacgtccaaccaaattactttttagttttatttttatattttaaaaaatagaga

SEQ ID NO: 215010 - DNA, 201 bp, Homo sapiens
acctcatcaagctgctgccggtggccaccctggagccaggtatcgccagaggccggcaggggctcacacagggagggcatccacttggcagaggctgcccrggggcagagggtccagtgggtgagccacatccctgggtgccttccaggctggcagtttggctctgccgggggccgttccggactctttcctgccgacata

SEQ ID NO: 215011 - DNA, 201 bp, Homo sapiens
gtcacgagtgtctttgaggtcccaagatcacttttggaatcccccagcatggatttccagggctcagcaatatcacttaggtctatgttatgtgacatgtrccattttctgagtccgaggtgggtgctgagcctggaattgttaccccaaacccaagttctcatttacataatataggcaagttcccccatgcacttgcta

SEQ ID NO: 215012 - DNA, 201 bp, Homo sapiens
gcaggagaatggcgtgagcctgggcgacagagcgagactccatctcaaaaaaaaaaaaaaagaaaaaagaaaatgaaaggtgaaaaacaatggtaaaatcrtcaaatgttattgtaatagttcgttgatcactgtcatattaatgcaatacatgtcttcatgtactatatattgatatataacaagtcacattaatatatg

SEQ ID NO: 215013 - DNA, 201 bp, Homo sapiens
cacttgaacctgggaggtggagattgtggtgagctgagattgcaccattgcactccagcctggacaatgagaatgaaactctgtctcaaaaaaaaaaaccraaaaggccgggcgcggtggctcacgcctgtaatcccagcactttgggaggccgaggcgggcagatcacgaggtcaggagatcgagaccatcctggctaac

SEQ ID NO: 215014 - DNA, 201 bp, Homo sapiens
ggtggagattgtggtgagctgagattgcaccattgcactccagcctggacaatgagaatgaaactctgtctcaaaaaaaaaaaccaaaaaggccgggcgcrgtggctcacgcctgtaatcccagcactttgggaggccgaggcgggcagatcacgaggtcaggagatcgagaccatcctggctaacacggtgaaaccctgt

SEQ ID NO: 215015 - DNA, 201 bp, Homo sapiens
gctaacacggtgaaaccctgtctctactaaaaatacaaaaaattagccgggtgcggtggcgggcacctgtagtcccagctactagggaggctgaggcaggrgaatggcctgaacccgggaggcggagcttgcagtgagccgagatcgcgccactgtactcccgcctgggcaaaagagcgagactccgtcttaaaaaaaaaa

SEQ ID NO: 215016 - DNA, 201 bp, Homo sapiens
caggtgctgggggccgaatcacctctctatcaccttggagccaccaaggtgggtgtgtgtatccctgtgtgcagagggcagcatgaatgggaaaggagagrtgcattctgggcccaaagggacaaacccaggatttggggatccatccaagtggtgggagacagaagggctggacggcagggccagaagaacaaatggttt

SEQ ID NO: 215017 - DNA, 201 bp, Homo sapiens
ggcttcctggaccagatcttccagccagtgatatcctccggcctcagcgtgagtcgggcacagcccccaaatgcccctgccccaaccccccggggcctctsctgccccttccatttttctcagggctctcactctgacctgtgaccattgtccctttaggatctggaacaaagctgggctctgagcagccgcatgaaggga

SEQ ID NO: 215018 - DNA, 201 bp, Homo sapiens
gtgtctcagcccccagctgagcgcctggcatagagcaggcactttccaaattttttaatgatctagaaatgaaataaatactgaggggctcagggtgtcgyacagcaagtgtgaaagggcttgggtgcagtggctcacgcctgtaatcccagcactttgggaggccaaggcaggcagatcacctgaggtcaggagattgag

SEQ ID NO: 215019 - DNA, 201 bp, Homo sapiens
ccctgcacccatgcccatgatgccagcaatgggcacagtccctgccatgccaggtaagtctgggctgggggcaccagagtcccttctcaggagagcagccrccagctctgggactggaggagggagggtcctgctaggagtcccgagtgcacagtgggcagcgagcttcaaggctggccatggtgcccaccactctggccg

SEQ ID NO: 215020 - DNA, 201 bp, Homo sapiens
agtgtctcagcccccagctgagcgcctggcatagagcaggcactttccaaattttttaatgatctagaaatgaaataaatactgaggggctcagggtgtcktacagcaagtgtgaaagggcttgggtgcagtggctcacgcctgtaatcccagcactttgggaggccaaggcaggcagatcacctgaggtcaggagattga

SEQ ID NO: 215021 - DNA, 201 bp, Homo sapiens
gcagggcagctggccgtccagcagcagaactttatccagcagcaggcgctaatcctggtgagcgctggcagggccctggggccacctggtggaggagaggyctgtggctcggggatgagggtctgaactggctgctcctcctgcttcaggcccagcagatgacagcccaggccatgtccctgtccctggagcagcagacgc

SEQ ID NO: 215022 - DNA, 201 bp, Homo sapiens
gctccggtggggctcccctgggctgtctgatagctggtgagcatggactgagccctctccttccttgcaggaaccgtccctgcccaggccagggcagccaytggcgaagcccctaacccagctggatggagacaaccctcagcgtgccctggacatcaacaaagtggtgagtgacacattggagaagggacaggataggcg

SEQ ID NO: 215023 - DNA, 201 bp, Homo sapiens
agagaccctccctgcccaagttcactgcagtgtctcagcccccagctgagcgcctggcatagagcaggcactttccaaattttttaatgatctagaaatgraataaatactgaggggctcagggtgtcgtacagcaagtgtgaaagggcttgggtgcagtggctcacgcctgtaatcccagcactttgggaggccaaggca

SEQ ID NO: 215024 - DNA, 201 bp, Homo sapiens
caggtacaactctccacccagcacagaccaggtctgctgatctgtgccattccctgatgcactgtggcatcccgtgaccacagactgtcacccacatcccyagaacctgcacggtgcttgcttggtacagactaactactgagtgtccattaagccaaactggtaccaccatctggacctgtgaaatgtccttcaacactc

SEQ ID NO: 215025 - DNA, 201 bp, Homo sapiens
gtctgggactaggggaccgctgggtgggggctggaggccaagagggaaggaatgcaggtagaggggcgaggaggggtctgcgcctgccctgtccctctcakctgacctgggggaccaagcagagcaggttccagggccccagcagtcagatttcctgcctgcaccctctccacccgcagaggccatgagccagctgcccct

SEQ ID NO: 215026 - DNA, 201 bp, Homo sapiens
tgcccccatcactctggctctgcagcccctcactgaggctcctcaccccctcctctctgccaggcttgacacagcccgtggaggaccagggggtctccacmcagctactcgcgccctctggcagcgtgtgcttctcctacaccggcacaccctggaagttgttcctacgcaaggaggtgggcatgagggtggggccttggc

SEQ ID NO: 215027 - DNA, 201 bp, Homo sapiens
atcttgtctcggggtgatcttgagcatgacatctggcctctgaggttcctcacgtacctgccacagaagggggacagtagtgcccgatgggcaaggtggcrgggactgcacgaggctcatgaagggcttctgcaggtccctcacaattgtggctaggtggccactgaggcctctgactggtcggggacaaaccccagggta

SEQ ID NO: 215028 - DNA, 201 bp, Homo sapiens
ggagaccactggccgactgaccctgcaacctgccttggcagaaaggacaagcgattcgcctgcttcttattcacctgccggggggtgtggattataggacraatatccagactttcacagtgagcttgggggccaccaagggaggaggccttgggcatcagttctgggtcccccagcctccctccccctcatcacagtctg

SEQ ID NO: 215029 - DNA, 201 bp, Homo sapiens
ggccccctggcctggaagtcaactatggctcagctgacaacccccagaccatctggtttgagctgccacaggtgagtggccaggcctctggccaccttgcraaggtggatgtgagggccttgccccagcatggcgtgcagtgggagcccaggcccaggccgatgcccactgctccggagtgctgtgggccggggcagaggc

SEQ ID NO: 215030 - DNA, 201 bp, Homo sapiens
tctgctgccccttccatttttctcagggctctcactctgacctgtgaccattgtccctttaggatctggaacaaagctgggctctgagcagccgcatgaagggagggggcgccattgggcccacacagcagggctaccccatgggtgagtgaggggctgattcctcacccagggcctccgggcccggcagcatggcaggca

SEQ ID NO: 215031 - DNA, 201 bp, Homo sapiens
gccctaaatggactggccaggagcagcggggcctgtggacatctgtcctctccaccccaccccgagctcctctggtgcaggaccctcacctcattcatgtrtatggatgtctagtcttgcccacaataggcactggttatttggcacgtgctgtatgcccagccctgtaccaggtggtcaggggccaaactgaccctggtc

SEQ ID NO: 215032 - DNA, 201 bp, Homo sapiens
gtcactgtcggggtgtggcctctaagcccctagggcactgagcccctaagccagtcctgtccccaaggcccaggctgagcggagcttccatgttttttacragctgctggcagggctggactccatagagcgggagcggctctccctgcagggaccggagacttactactacctcaaccaggtcgggggagcccttgtggt

SEQ ID NO: 215033 - DNA, 201 bp, Homo sapiens
ctggcctttggctattgactggatggcatcttgggaatcctctgaagggctggagtttaccccaagcacagggacagagggagcaggtggagtcacttctygttgatgtccagctgagctgggctggtggctgcctcagaagggagggggcagctactaggagcagcagcctcaccccagggctctgtggacctccttagc

SEQ ID NO: 215034 - DNA, 201 bp, Homo sapiens
caagaccatcctcaatgccaatgccagccgcttcggccaggtcttctgcctctacctacagcagtgagtggcagggttgcagggggcacctacaatcactyacccttcctgggtccttgggctgcttccctggggtccagaccctggtagggcttcttctgcacggggcccctgggtgttctgcatcctgggcactcacac

SEQ ID NO: 215035 - DNA, 201 bp, Homo sapiens
gagggccgtgaggtgaggaggggagcagcccccactgctgagcaaacctgggtcccggaccaggcggatccagggccaccctcccttcctcagccccctgyccccttggcccaccctgtggtccttgcccccttctggatggccgcctgcctcactgactggtcccctcccacccagaggcctggaggcgcctccccgggg

SEQ ID NO: 215036 - DNA, 201 bp, Homo sapiens
gaagcagtgagatggcaggggggacggagtgagaaaagagcctctcagaagggcaggaggggcggggaggggcggggtggcacatggagctgccaggaacyccagaggcagctctgttcccagagttcagaaacctccaagaaaagctggtggcattgtccgttttgttgtttgcctatctggcctttggctattgactgg

SEQ ID NO: 215037 - DNA, 201 bp, Homo sapiens
ggcacccatataattccgatggatttctgggacccccacagctccagctctccctgggggcactcgcgaggtgcttgtctgtctggcagggcgctttcagrgctccttctgcatctgctgggctgagcctgctggggtggggtgcagggatggagaggtaaaggagtggggctgcctctgaggatttagaatctctcaagg

SEQ ID NO: 215038 - DNA, 201 bp, Homo sapiens
ccggctgtgtcggcagatgctgcggctcctgggggacggatccctggagtcctggcagaggcagatcatgggcgcatacctggtgcggcaggggcagtgcyggccagggctgcggaatgagctctttagccagctggtggcccagctatggcagaacccagatgaacagcagagccagcgtggctgggccctcatggctgt

SEQ ID NO: 215039 - DNA, 201 bp, Homo sapiens
caccatccctccacgcattcgtcatttcttctcctctctgcaaacctctcctgtgctgatgcctgggcaccagagatgaggtgggagcagtacctgccctrggcggggctcacggtctagtgcccacagcagctgtccagggagtgcaggctgaagcagtgagatggcaggggggacggagtgagaaaagagcctctcaga

SEQ ID NO: 215040 - DNA, 201 bp, Homo sapiens
actgggctgtgctcttagcactctccctgcctggctggctgggatgagggcaggagggccaaacaagctgggctgtctccctctgccccccacaggctggkccagactgatggaggtgccgcaggaaaggacacggacagcctggtgcagtacaccaaggtgggagagaggcagggaggggtctggcccgtagatctgccc

SEQ ID NO: 215041 - DNA, 201 bp, Homo sapiens
ctagcacccaaccctccctctctctcctcgtcctctcatcctctctctctctctctttctctctccatctcgctctcttctaccattcaccatccctccaygcattcgtcatttcttctcctctctgcaaacctctcctgtgctgatgcctgggcaccagagatgaggtgggagcagtacctgccctaggcggggctcacg

SEQ ID NO: 215042 - DNA, 201 bp, Homo sapiens
gggcagacagagagaggttcaagggcacagcaccgctcagaggtcagggagttaaggtggagccagcagagatgagtaagagatcagagaagcaggggccgggcgcggcggctcccgcctgtaaccccagcactttgggaggccgaggcaggtggatcacctgaggtaggagttgcagaccagcccggccaacatggtgaa

SEQ ID NO: 215043 - DNA, 201 bp, Homo sapiens
cactgggctgtgctcttagcactctccctgcctggctggctgggatgagggcaggagggccaaacaagctgggctgtctccctctgccccccacaggctgrgccagactgatggaggtgccgcaggaaaggacacggacagcctggtgcagtacaccaaggtgggagagaggcagggaggggtctggcccgtagatctgcc

SEQ ID NO: 215044 - DNA, 201 bp, Homo sapiens
cctcccgcccctaagcccctccccttctctaaggtcaaggccatttgactggtacccttcctggccctaaatggactggccaggagcagcggggcctgtgracatctgtcctctccaccccaccccgagctcctctggtgcaggaccctcacctcattcatgtgtatggatgtctagtcttgcccacaataggcactggtt

SEQ ID NO: 215045 - DNA, 201 bp, Homo sapiens
cgagacccaccaccttcctgtagggcgagagtggcagcgacgtgcagctgttagccgtgtcccaccgtgggctgcgactgctcaaggtgacccaaggcccyggcctccgccccgaccagctgaagattctctgctcatacaggtgcgctggcccacgaccctgggctagaggtgggggcaggtggcaaggtgaccccagtt

SEQ ID NO: 215046 - DNA, 201 bp, Homo sapiens
tgggagccccgcacgtcctgtccttacccggctgtgtcggcagatgctgcggctcctgggggacggatccctggagtcctggcagaggcagatcatgggcrcatacctggtgcggcaggggcagtgccggccagggctgcggaatgagctctttagccagctggtggcccagctatggcagaacccagatgaacagcagag

SEQ ID NO: 215047 - DNA, 201 bp, Homo sapiens
cacttgaagtcaggagtttgagaccagcctggccaacatgctgaaaccctgtctctactaaaaatacaaaaattagctgggtgtggtgacacgtgcctggrtgtggtggcacatcccagctacttagagaagctgaggcaggagaattgcttgaacccgggaggtggaggtggcagtgacctgagattgcgccactgtact

SEQ ID NO: 215048 - DNA, 201 bp, Homo sapiens
ctgacgcctccctggacctgcccctagctgggatgcctgctggtgggggctactgctgcccagggatgcttgaacacccctccctgtacaggtggaggatrtgctgcctatactcagcagctttggccatgccaagaccatcctcaatgccaatgccagccgcttcggccaggtcttctgcctctacctacagcagtgagt

SEQ ID NO: 215049 - DNA, 201 bp, Homo sapiens
gctcccaggagtgagcctctgttccccctaattctgcagtagcacccgccccctgccccgaacaatcttgtatctgggctgatccaagggcagttaccacraggtctctgggcagtgagtgaaaagggagggctggcagttgcaggggaggggacaggtgagacgtgtgaatggaggtggcccaagccctccatccctccc

SEQ ID NO: 215050 - DNA, 201 bp, Homo sapiens
ctgatgggactgacgcctccctggacctgcccctagctgggatgcctgctggtgggggctactgctgcccagggatgcttgaacacccctccctgtacagktggaggatgtgctgcctatactcagcagctttggccatgccaagaccatcctcaatgccaatgccagccgcttcggccaggtcttctgcctctacctaca

SEQ ID NO: 215051 - DNA, 201 bp, Homo sapiens; identical to SEQ ID NO: 38062

SEQ ID NO: 215052 - DNA, 201 bp, Homo sapiens
tgcatcctcctgtggtgagtggtggccttcctgggtggctgaacccatgggccacactgagggttgatggggcggggcctgaggtcttcactggaagccaytggtatgctccactgctgggctacagttctggactcctcagggccgagctcctggctgaaatcatcacatgagcccctggaatgtggcatcttggggact

SEQ ID NO: 215053 - DNA, 201 bp, Homo sapiens
accgtgcagaaacatggccagtgcccctggcccgggccagggagggtggggtgtgctctgctccccggagttggtgcggcccatccaggagcccagctggsccagtatgggtaactttgaaggccatctggacacttgcagggcagccacagatcacagtgaggacgatgaagcccccggccaaggtccacatcccccagg

SEQ ID NO: 215054 - DNA, 201 bp, Homo sapiens
ccgtgcagaaacatggccagtgcccctggcccgggccagggagggtggggtgtgctctgctccccggagttggtgcggcccatccaggagcccagctgggscagtatgggtaactttgaaggccatctggacacttgcagggcagccacagatcacagtgaggacgatgaagcccccggccaaggtccacatcccccaggg

SEQ ID NO: 215055 - DNA, 201 bp, Homo sapiens
ctgtacaggtggaggatgtgctgcctatactcagcagctttggccatgccaagaccatcctcaatgccaatgccagccgcttcggccaggtcttctgcctytacctacagcagtgagtggcagggttgcagggggcacctacaatcacttacccttcctgggtccttgggctgcttccctggggtccagaccctggtaggg

SEQ ID NO: 215056 - DNA, 201 bp, Homo sapiens
ctcctggggtcagctgcaggcactgccctttctgatgggactgacgcctccctggacctgcccctagctgggatgcctgctggtgggggctactgctgccyagggatgcttgaacacccctccctgtacaggtggaggatgtgctgcctatactcagcagctttggccatgccaagaccatcctcaatgccaatgccagcc

SEQ ID NO: 215057 - DNA, 201 bp, Homo sapiens; identical to SEQ ID NO: 38028

SEQ ID NO: 215058 - DNA, 201 bp, Homo sapiens; identical to SEQ ID NO: 38029

SEQ ID NO: 215059 - DNA, 201 bp, Homo sapiens; identical to SEQ ID NO: 38031

SEQ ID NO: 215060 - DNA, 201 bp, Homo sapiens
caccaggcagccatactggaggccgtgggcacccgcagtgccaacttccccgtgcgtgtgccctttgaggccttcctggccaggtggggcccagcacctcrgggcaggactgacaaggaggccaccgggagtgactggcagccccgggggtccttctgattggagatggactcactctgcccaggactgggcctagcaccc

SEQ ID NO: 215061 - DNA, 201 bp, Homo sapiens
cctcccactgcagtgggcacagtggctcagggaagacggaagccgccaaaaagatcatgcagttcctaagcagcctggagcaggatcagacggggaaccgrgagtgtcaggtgagggccaggctggaggtacctcatgggttgagctggccgtctgtcttcctccaggggacagctgaccatgtccaagggactatctttc

SEQ ID NO: 215062 - DNA, 201 bp, Homo sapiens
gcaactgcaccaggcagccatactggaggccgtgggcacccgcagtgccaacttccccgtgcgtgtgccctttgaggccttcctggccaggtggggcccakcacctcggggcaggactgacaaggaggccaccgggagtgactggcagccccgggggtccttctgattggagatggactcactctgcccaggactgggcct

SEQ ID NO: 215063 - DNA, 201 bp, Homo sapiens
ccccatctctacaaaaacaataaaaattagctggacacagtagcacatgcctatagtctcagctactcaggaggtttgaggtgggaggatcgcttgagctrgagcctcagaagtcaaggctgcagtgagccatgatggtaccactgcactctagcctgggtgacagagtgagaccctgcctcaaaaaaaaaaaaaaaaaaa

SEQ ID NO: 215064 - DNA, 201 bp, Homo sapiens
tgccctgggactatctttccacatttatgggggtctctccaggctagctgtcacttctgggtggcacatcccacttcctgggttcactggggtggtcctaygtgcccctccctggagaccctaccaaccaacacatccttagctcctcccactgcagtgggcacagtggctcagggaagacggaagccgccaaaaagatca

SEQ ID NO: 215065 - DNA, 201 bp, Homo sapiens
gacaacattcttgtctagtcaacctattgactagcataggttaaagccccagtggggagagtgtggtcttgctggggactggacctgtccatggggtggartggaaagtccagtggcagacccaaggctaggtaaagggctggaaacaccaaggcagcctttcaggtcacctggggagagggtagattcttctcctccata

SEQ ID NO: 215066 - DNA, 201 bp, Homo sapiens
ccaggttatcaagcaggtcacgggacacccccggccgtgagtggggaccggtggggtggggtggcttctgggggcagctgggcactgtggcctggccagcytgaagcccgagcgctctgccctgcagggaacactgcactcgaggctggagcttcctcagccttctcacaggcttcttccccccgtcgaccaggctgatgc

SEQ ID NO: 215067 - DNA, 201 bp, Homo sapiens
gctgccatccctcaccccacctgcccttcctgtccccacagctgtgccagcaggagaagctgagggatgagatttactgccaggttatcaagcaggtcacrggacacccccggccgtgagtggggaccggtggggtggggtggcttctgggggcagctgggcactgtggcctggccagcctgaagcccgagcgctctgccc

SEQ ID NO: 215068 - DNA, 201 bp, Homo sapiens
accccatctctgctaaaaatacaaaagttagctgggcgtggtggcacgcgcctattaatacttgggaggctgaggcaggagaattgcttgaacctgggaarcagattgcagtgagctgagatcatgccattgcattccagcctgtgtgacagagggagacgggagcagcgaagaaagtaactgagtagccagtgcagtgat

SEQ ID NO: 215069 - DNA, 201 bp, Homo sapiens
atttttcatattttcagtagagacggggtttcaccatgttggccaggctggtcttgaactcctgtcttctgagtcgatccacccgcctcagcctctcaaastgctgggattacaggcgtgagccactgcacccggcctgttctagtctgtttacaaatctttggggtataggccaaggagtgaaagtgctggtaattctat

SEQ ID NO: 215070 - DNA, 201 bp, Homo sapiens
aggccaaggcgggtggatcacctgaggtcaggagttcgagattaaacctggccaacgtagtgaaaccccatctctgctaaaaatacaaaagttagctgggygtggtggcacgcgcctattaatacttgggaggctgaggcaggagaattgcttgaacctgggaagcagattgcagtgagctgagatcatgccattgcattc

SEQ ID NO: 215071 - DNA, 201 bp, Homo sapiens
taggccagacttttaccctgcagtgactttagacttctctttcctataacaccaccctcccacttctcacctaatcatctctttttcgccctcacagcctrtcttcacacattcctccaacagctgttggctgaccgtctgcctcatctacccttgggccagatgctggcgacagagctggggatgccagagacggggcct

SEQ ID NO: 215072 - DNA, 201 bp, Homo sapiens
cacctgtagtactcggaaggttgaggcaggagaatcgctagaacccaggagggtggaggttgcagtgagccaagatggcaccactgcactccagcctgggygacagggcaagactgtctcaaaaaaataaaaaataaatgaaaaggccgggcacggaggcccacatctgtaatcccagcactttgggaggccaaggcgggt

SEQ ID NO: 215073 - DNA, 201 bp, Homo sapiens; identical to SEQ ID NO: 38045

SEQ ID NO: 215074 - DNA, 201 bp, Homo sapiens
ttggcgccgccgtgctgctaccccgactctccttggagacccgcctgcagcaggagggagacccgggcctccgtgggtccctgagggagctgtgggaaccsgaggatgaggacgaggcggtgctggagagggacctggagctgagcctccggccgggcctggaggcgccacccttccccggtgccaagggcaggagcctcg

SEQ ID NO: 215075 - DNA, 201 bp, Homo sapiens
aacccccagaccatctggtttgagctgccacaggtgagtggccaggcctctggccaccttgcgaaggtggatgtgagggccttgccccagcatggcgtgcrgtgggagcccaggcccaggccgatgcccactgctccggagtgctgtgggccggggcagaggcgaggggctggctggggagccctcttgtaacaggccttt

SEQ ID NO: 215076 - DNA, 201 bp, Homo sapiens
ttctgcaggattcaggccccagccaaggtgcccgtgggaaggggagatggaggagaggcaggggtttctaggactgggaacttggtgggcttggggagacmtggccatctcataaccccaggctggcttctctgcagagctggcccggagcagccaggagcacctccagcgcacagtcaaatatggggggcgccggcggat

SEQ ID NO: 215077 - DNA, 201 bp, Homo sapiens
cggctgagctggccgtcatgctgaagacggcggaaagtgagtcttgttggtgtcctcttgttaggactccttctccagtccctttactgtggggtgtgtcygtcccttgtggttcctccctctgatgctccagactcccctgagctcatcacttgggtccctgtggacaggggctgatggctcgtggtgagggatggaggt

SEQ ID NO: 215078 - DNA, 201 bp, Homo sapiens
gagaggcccgggaggccggcctcaggggagcaggagtcggggtcggccagcgcggatggcgcgcccagccgggaacgccgttccgaccgcgggcaggcggmcagggcgaaaccggcggccgagcctgccaccgccgggggccagggaacccctggtggccgcaggaagcccactgcagaggggaacggcggctgcagacgc

SEQ ID NO: 215079 - DNA, 201 bp, Homo sapiens
ctcatcaaagagaagagtaagcttggggacggagcctcacggtggggccactcccctgcccaggggtgaggtggtttggtttctgctggggtggcagggcmgggtgtgtgtggtctgagcagcagtggacctaggctccccatgcaggccagctggtgcggcccctgcagcccgccgaatacctcaacagcgtggtagtgg

SEQ ID NO: 215080 - DNA, 201 bp, Homo sapiens
gcagagtgtgctgaccaattgcatgtgggctacgggaaggaggacaactactgtcttcaaggagcaggtcttggctggtggaggaaatctgttttggacamgtgaggtctgaaatcccagacttcccagtggaggagtctggggttcaagggagaaggctggaggcaggcaccaggagtcatcaaatgggaccagctgagg

SEQ ID NO: 215081 - DNA, 201 bp, Homo sapiens
agtctggcgcggtgcgaggctggcctggctggcagcgcctcccggcggcactgttgccctgtccgcagctgtagcgtctcctgtttcctgggcgcctctaytccattgttggccgagggggtcaggacccgccgccttctgcattattgatggtcctgtaaggcgggcacctcggggagtagagcctgtagcccctgcgag

SEQ ID NO: 215082 - DNA, 201 bp, Homo sapiens
tcctacagggagggaaggagtgagcacggggtgacagagaagggcaggcaacagttcagatgtggggggaagcctcggcaccatcacgcaccgggaccagygtggctgagcctagtgagctgcagggagaacggaggatgaggatggggagcggatggtgggtccaggccaccacaggccttgtagccatcattggcctct

SEQ ID NO: 215083 - DNA, 201 bp, Homo sapiens
tgaggtcccggggcctgtgagcacctctgctacacctcggagggtcccaggtccccatgtctggcaaccttctcatctccctcagacacatctttgccatygtggcatcagcctatgacctggctcagaatactgggcaggacccatgcatcctcctgtggtgagtggtggccttcctgggtggctgaacccatgggccac

SEQ ID NO: 215084 - DNA, 201 bp, Homo sapiens; identical to SEQ ID NO: 38091

SEQ ID NO: 215085 - DNA, 201 bp, Homo sapiens
tgttggccaggctggtctcgaactcctgaccttgtgatctgcctgtctcggcctcccaaagtgctgagattacatgcgtgagccaccgcgcccagcccaatttttaaattttttgtagagatgggatctcactaggttgcccaggctgatctcgaactcctatcctcaaacgatccgaccacctcggcctcccaaagcgct

SEQ ID NO: 215086 - DNA, 201 bp, Homo sapiens
tgcagccacaacttgtcatgcctccaccctgttgtccctacaggctggtgtgtgacagctctgtgctgctgtgcctcaagaagagatttcacctgggccgyatctatgtatggggagccacggggacggacagtgggcggggatccccttttctctggggacagagggctccctggcacccctggagattctccttcctct

SEQ ID NO: 215087 - DNA, 201 bp, Homo sapiens
ttgccacctctgaacgctcccaggagtgagcctctgttccccctaattctgcagtagcacccgccccctgccccgaacaatcttgtatctgggctgatccragggcagttaccacgaggtctctgggcagtgagtgaaaagggagggctggcagttgcaggggaggggacaggtgagacgtgtgaatggaggtggcccaag

SEQ ID NO: 215088 - DNA, 201 bp, Homo sapiens
tccctgcctggctggctgggatgagggcaggagggccaaacaagctgggctgtctccctctgccccccacaggctgggccagactgatggaggtgccgcargaaaggacacggacagcctggtgcagtacaccaaggtgggagagaggcagggaggggtctggcccgtagatctgccctctgacccccacggccccccaga

SEQ ID NO: 215089 - DNA, 201 bp, Homo sapiens
  misc_feature (1)...(201): n = A,T,C or G
ctgagagagagcaccctgctcagagccactgggctgtgctcttagcactctccctgcctggctggctgggatgagggcaggagggccaaacaagctgggcngtctccctctgccccccacaggctgggccagactgatggaggtgccgcaggaaaggacacggacagcctggtgcagtacaccaaggtgggagagaggcag

SEQ ID NO: 215090 - DNA, 201 bp, Homo sapiens
ccaccgaagacagcgtcaagaagcgcatcgtggtggccgctcgggacaactgggccaattacttctcccgcttctttcctgtctcggtcagtggcgctggrgtagggagtagggatgccaggcccccagcctggatcctggggtgcatgggcacagaccacaagcaggagagccggggagcagacgccaggggaaggacaa

SEQ ID NO: 215091 - DNA, 201 bp, Homo sapiens
  misc_feature (1)...(201): n = A,T,C or G
cctgtgcctgtctgtcctcagtcttcctgagagagagcaccctgctcagagccactgggctgtgctcttagcactctccctgcctggctggctgggatganggcaggagggccaaacaagctgggctgtctccctctgccccccacaggctgggccagactgatggaggtgccgcaggaaaggacacggacagcctggtgc

SEQ ID NO: 215092 - DNA, 201 bp, Homo sapiens
cagactcccctgagctcatcacttgggtccctgtggacaggggctgatggctcgtggtgagggatggaggtggtcccagggccaggtaccacacctggatrctcctgggctgcctcccggtgcttgttcccaggccatcgggacgccctggctgggagcatcaccgagtgcctgccgcctgaggttcctgcccggcccagc

SEQ ID NO: 215093 - DNA, 201 bp, Homo sapiens
gttagccgtgtcccaccgtgggctgcgactgctcaaggtgacccaaggccccggcctccgccccgaccagctgaagattctctgctcatacaggtgcgctrgcccacgaccctgggctagaggtgggggcaggtggcaaggtgaccccagttcatgcccgatccctgcgcagcttcgcggaggtgctgggtgtggaatgcc

SEQ ID NO: 215094 - DNA, 201 bp, Homo sapiens
  misc_feature (1)...(201): n = A,T,C or G
ctttcctgtctcggtcagtggcgctggggtagggagtagggatgccaggcccccagcctggatcctggggtgcatgggcacagaccacaagcaggagagcnggggagcagacgccaggggaaggacaaagcccagccactggccctgggcagctccagggcatcttgggcagtagcaggacccaggagactgcccgagacc

SEQ ID NO: 215095 - DNA, 201 bp, Homo sapiens
cactctggctctgcagcccctcactgaggctcctcaccccctcctctctgccaggcttgacacagcccgtggaggaccagggggtctccacccagctactygcgccctctggcagcgtgtgcttctcctacaccggcacaccctggaagttgttcctacgcaaggaggtgggcatgagggtggggccttggcctggcctct

SEQ ID NO: 215096 - DNA, 201 bp, Homo sapiens
ccctctttccctcatcaggagccatgtctatttcatccagtgcctcacccctaaccctggaaaggtgagctccccagcaactggcctcagggccctccccytccctgcacctccctccccacagctctaggccccttgactccagctgtctttggctctgtcttgtggccacagcttccaggcctctttgacgtgggacat

SEQ ID NO: 215097 - DNA, 201 bp, Homo sapiens
ggctgaggcaggagaattgcttgaacccgggaggcagaggttgtagtgagccgagattgtgccactgcactcccgcctgggtgacagagcgagactgtgtytcaacaacaacaagaagtagggaccattattcatctagttttatagataaagtttaaaagcaaagtgtgtacagtgcacaacacaggctctagcacacag

SEQ ID NO: 215098 - DNA, 201 bp, Homo sapiens
ccctggagcagcagacgcagcagcggcagcagcaggctcgggcctccgaggctgcgtcccaggcctcaccctcagccgtcacctccaagcccaggaagccycccacacccccggagaagccacagcgtgacctgggatcagagggtggctgcctgagggtgaggaggtgaccatattctcaggaagggatgtgagggtggg

SEQ ID NO: 215099 - DNA, 201 bp, Homo sapiens
gccggccagggcctctgccaggttagaagtcaccatcgcgctcccccaggggctgtgccgcctgctgcctggcagcctccaggaaggccagctccttggcwtccttcttctggtttcgcgcctcatactccaacctgagagggcagggtaagtctagcagagagcgcccatgaggcggctccgagggggagggcagggtaa

SEQ ID NO: 215100 - DNA, 201 bp, Homo sapiens; identical to SEQ ID NO: 38194

SEQ ID NO: 215101 - DNA, 201 bp, Homo sapiens
gcgctcccccaggggctgtgccgcctgctgcctggcagcctccaggaaggccagctccttggcttccttcttctggtttcgcgcctcatactccaacctgrgagggcagggtaagtctagcagagagcgcccatgaggcggctccgagggggagggcagggtaagtctagcggagagcgcccatgaggcggctccgaggtg

SEQ ID NO: 215102 - DNA, 201 bp, Homo sapiens
ctgcctggcagcctccaggaaggccagctccttggcttccttcttctggtttcgcgcctcatactccaacctgagagggcagggtaagtctagcagagagygcccatgaggcggctccgagggggagggcagggtaagtctagcggagagcgcccatgaggcggctccgaggtgcccccacccaactgcacctgttggtga

SEQ ID NO: 215103 - DNA, 201 bp, Homo sapiens
ggagctctgctgtgaccgcgtacggggctccaatcaccacttctgacacgtactgtggggacagtgggggcagaaagacttgctcggtccctgctactggwaagccagggccacagggtggtgagagacggctcagacatggggcggggctgccagtgagtagcagggatgggctgggcaggctggggacccctggggctc

SEQ ID NO: 215104 - DNA, 201 bp, Homo sapiens
gtacctcctgggccccgcctaggagcccacagccagcctgcattcccagcccatgcaggaacagaggtgaacagagggaacgaggtgagcccatgcggagsctcaccttgaagtgacttaggagctctgctgtgaccgcgtacggggctccaatcaccacttctgacacgtactgtggggacagtgggggcagaaagactt

SEQ ID NO: 215105 - DNA, 201 bp, Homo sapiens
ggtacctcctgggccccgcctaggagcccacagccagcctgcattcccagcccatgcaggaacagaggtgaacagagggaacgaggtgagcccatgcggascctcaccttgaagtgacttaggagctctgctgtgaccgcgtacggggctccaatcaccacttctgacacgtactgtggggacagtgggggcagaaagact

SEQ ID NO: 215106 - DNA, 201 bp, Homo sapiens
ttggcttccttcttctggtttcgcgcctcatactccaacctgagagggcagggtaagtctagcagagagcgcccatgaggcggctccgagggggagggcasggtaagtctagcggagagcgcccatgaggcggctccgaggtgcccccacccaactgcacctgttggtgatgatccgctggacgatgaggtctgtggtgag

SEQ ID NO: 215107 - DNA, 201 bp, Homo sapiens
gctgccagtgagtagcagggatgggctgggcaggctggggacccctggggctcctccatgagacaagaaggaacagcatctggagacctgaccacccctcytcatgcctcaacaaacaggtatgggcaggtgccacagaactcggggtgctgggtgcagctctgccagtgacccaagcccccctgccctggctcagggagg

SEQ ID NO: 215108 - DNA, 201 bp, Homo sapiens
catgcctcaacaaacaggtatgggcaggtgccacagaactcggggtgctgggtgcagctctgccagtgacccaagcccccctgccctggctcagggaggcmcttagtaggggggatgttgtgggaatgtctccccatccttgggctggctcctggcccccactcacccggcaggccagcacgctcagagtccgttcatgca

SEQ ID NO: 215109 - DNA, 201 bp, Homo sapiens; identical to SEQ ID NO: 38195

SEQ ID NO: 215110 - DNA, 201 bp, Homo sapiens
gcacagtgagtcattaaatggctgggaggtgccaatggcaacccctgtgcccagcaagggccagcatgacccacctggtatgggtcggagccatccctgtmagggataatttctgtcttgccgtgacacaccaggtccacctggagaaggagtggggtcaggagccctccccggggaggcagcggccgtcgccacccacag

SEQ ID NO: 215111 - DNA, 201 bp, Homo sapiens; identical to SEQ ID NO: 38197

SEQ ID NO: 215112 - DNA, 201 bp, Homo sapiens
atagagacagggttttgccatgttgggcaggctggtttcgaactcctgacctcaggtgatgtgaatttttttttttttcttgcaaaggaacatttcacaarttttcgtatcacgcttgcacaggggccacgctaatcatctctttgttgttccaatttagcagtatatgtgctgctgaagcaaagcacctaccttctattt

SEQ ID NO: 215113 - DNA, 201 bp, Homo sapiens
gtcctttattagccggtgaccgagagacggctaacggtcaaaattctctcagccctgaggaagaggcttgattaacttttatatcttggtttaggaagttggggggggggtctagttaaaagaattttacagaagttaagtagtcaaaaagttaaaaggataaatggttacaggaaagtgaacagttccaggtgcaggggc

SEQ ID NO: 215114 - DNA, 201 bp, Homo sapiens
ctccacgtgctgagaactagggatagagaaaatgctgagagctcctgcccttggagtccccagatcagagcagcacagtgcaatggaagcaaagcctcacmgaacttgacatttctctagcagctatattaaaacaggcccaaggctgggtgtggtggctcacacctgtaatcccagaactttgggagtccgaggcagaca

SEQ ID NO: 215115 - DNA, 201 bp, Homo sapiens
gcagtggaccgagattgcactgctgcactccagcctgggcaacaagagtgaaactctgtctcaaaaaaaaaaaaaagggccaggcgcggtggctcatgccyctaatcccagcactttgggagaccaaggcgggcggatcatctaaggtcaggagttcgagattagcctggctaacatggtgaaatcccgtttctactaaat

SEQ ID NO: 215116 - DNA, 201 bp, Homo sapiens
cgaagtcagctcggtgcatctgttgagagggggattcctgatagaggctgtgaagattaaagaggggaggggcaggatgacaaaggttctcaaaaaacagygtcccatctggaggcctgtgtcactggagcacttgtattaatagaaacttggccatctctgccagtgaggggctgtaggaccttgggcaaggtgcttacc

SEQ ID NO: 215117 - DNA, 201 bp, Homo sapiens
caccccctcttatcactggaggcggggtaggatccaggaagcagcgctggcctgagagtggggcctgggctctggccccaggtctgccagcaattcacggsagatcttgggaaagttgaagagttcgcttcctccagtgggtcccccaagctagtgtcctgggtggacaccccagatgctgggaagggatttcctgagcct

SEQ ID NO: 215118 - DNA, 201 bp, Homo sapiens
tcacacctacagcacatctcactcaagctggccacatccctgccatccagacgtaaaacagtcacaagacagggctggcagggccgcggaggaggccggcwggggccatcacggagtgcccatcctgcactgtggtcccagcaagtttcttcctcctggcaagaagcctgtcccaggctggcaggggacagcgtgaggtgc

SEQ ID NO: 215119 - DNA, 201 bp, Homo sapiens
cagcctcccgagtagctgggactacaggcgcccgccaccacgcccggctaattttttgtatttttagtagagacggggtttcactgtcttaaccaggatgstcttgatctcctgacctcgtgatccgcccaccttggcctcccgcctgccttggcctcccaaagtgctgggaatacaggcgtgagccactgcgcccggccc

SEQ ID NO: 215120 - DNA, 201 bp, Homo sapiens
aaaaattcaaaaataaacggcatggtggcacacctgtggtcccagctacttaggaggctgaagtgggagactcacatgagctcaggagtcggaggctgcaytgaaccttgattgtgccactgcactctagcaagaccctggctttttctttttttcttttttttgttgttgttgttttcaacagggtcttgctctgtcact

SEQ ID NO: 215121 - DNA, 201 bp, Homo sapiens
gctcccagccctgtctcctttggtggacactagggaagcacgaggaggcggcagagggtgggaaaggggagtcagggacccgctccccaacagatgacacscttctgctgcttatacccctagcagtggtcaggacaaggggtgtgggggaccccttggaaactggatgtgtggctcgggatctgcagaatgccaggctga

SEQ ID NO: 215122 - DNA, 201 bp, Homo sapiens
gctgaagtgggagactcacatgagctcaggagtcggaggctgcactgaaccttgattgtgccactgcactctagcaagaccctggctttttctttttttcytttttttgttgttgttgttttcaacagggtcttgctctgtcactcaggctggaatgcagtggcgtgaccatggctcactgcagccttggcctcatgggct

SEQ ID NO: 215123 - DNA, 201 bp, Homo sapiens
ctgcactctagcaagaccctggctttttctttttttcttttttttgttgttgttgttttcaacagggtcttgctctgtcactcaggctggaatgcagtggygtgaccatggctcactgcagccttggcctcatgggctcaggcgatcctcctacctcagcctcttgagtagctgggaccacaagtgtgcagaccacacctg

SEQ ID NO: 215124 - DNA, 201 bp, Homo sapiens
aactcacttctctgcctttaatctcacaggcatacccggtggcaaaggagtatgggaaatggagtcaggctgggtagccacgagcccaggaagaagggagracagacttggagagggcaggagtctctggccaccaggggctaaagagccttcgatgaggcagtgatgtggggtcctgggctcagacccagggtgggtggc

SEQ ID NO: 215125 - DNA, 201 bp, Homo sapiens
gaactgaaggaacaaggactgacccctctgaccaccactacccataaccagtactgtctctgcgtctgagtcctggcctggtttacctgctgggtgacccytggcaagttactttgcctctctgggccttagttcccgcacgtgtaaaatgaggttgggctcaatgacctggccagctctgacatcctgtcattttcttgc

SEQ ID NO: 215126 - DNA, 201 bp, Homo sapiens
gctgggcgtggtggcacatgcctgtcatcccagctacttgggaggccgaggcaggagaatcgcttgaacccaggaggcggaggttgcagtgagccgagatygcgccattgcactccagcctgggcaacaagagggaaactccgtctccaaaaaaaaaaaaaaaaaaaaaaaaaagaatgacggcagatcccataaggataa

SEQ ID NO: 215127 - DNA, 201 bp, Homo sapiens
aggcggaggttgcagtgagccgagattgcgccattgcactccagcctgggcaacaagagggaaactccgtctccaaaaaaaaaaaaaaaaaaaaaaaaaaraatgacggcagatcccataaggataaggatcatgtccatctctgtcaccacatccccaatcctggcacctagtaagggctcagtaaatgttccttgcatg

SEQ ID NO: 215128 - DNA, 201 bp, Homo sapiens
ctggccacacctcaccacccaccccctcccctctccagcagttccagtttgtggaagtcccaggcaatcactgtgtccacatgagcgaaccccagcacgtsgccagtatcatcagctccttcttacagtgcacacacatgctcccagcccagctgtagctctgggcctggaactatgaagacctagtgctcccagactcaa

SEQ ID NO: 215129 - DNA, 201 bp, Homo sapiens
aggaaacaaaatgaggccccgcatctgcagcctggccctccccgccacctgcaccccttcctctgaggtccccggctctgcaggggccgagcgggcggcasccgctcctggtggtggcattgttgggacccgctcacaaaacacagttgttctctgcaatggctcatttccctttctgagactttttgtttatttgtttgt

SEQ ID NO: 215130 - DNA, 201 bp, Homo sapiens
aacttgcatggcaataaatctctgcacactcaaagccatgatttcctcagcaggtggatgcagaatgctcggagacctataataatcagcctttggcaacragcactttttcttctgactcattattgccgcgttttaagaggagaagggagcaactgctctcacggggctacagagacacggaaacacgctggggaggct

SEQ ID NO: 215131 - DNA, 201 bp, Homo sapiens
tttcctcctgagagtgaaactctacagtgcacaccacctacagtgcattgaagcagacattatgcaaacacttcaagagaaaggacacttggtctcggacyagcgaagcccgtgggccctcggtgtgatagtctcaatgtatctgtaggaagagtaggtcagtggctggtcagcatcagataaaacagtcaacaaagccag

SEQ ID NO: 215132 - DNA, 201 bp, Homo sapiens
aatcgcttgaatgggaggcagaggttgcattgagccgagatagcaccactgcactgcagcctgggcgacagagcgagactccatctcaagaaaaaaaaaamaaaagaaattatatagctaacataatacttaatgattgtcaatttaaccgtttgtaagtatgcacttcagtggcattaaatacagtcgatggaggtgagg

SEQ ID NO: 215133 - DNA, 201 bp, Homo sapiens
tggtcagacagtgaatgcccatctgtacttgggtctgtctctgactgcctgtctatgatcttactgtaccacacattttaaactgaggcccgacacaggatttttttttttctttttttttgagacggggtcttgcttttgtcgtccaagctggagtataatggcacaatctcggctcaccgcaacctccacctcctgggt

SEQ ID NO: 215134 - DNA, 201 bp, Homo sapiens
gttgtcttgagtccagaaatggacagcatcccccgagggtctaaggagcggcacctgtgggctgttttggcctcgggtcgccagtttgggaccagttgggycttcgtgatcatcttggctgaacctttatcttgcctccctggaaacccatcatggggaggggaggtcaaggaccccgggcccaggcttcctggacatgcc

SEQ ID NO: 215135 - DNA, 201 bp, Homo sapiens
ctgtgcttgctcactggcttccccactccttggggcctcagctgggaaccctgccctgacacccccaggcaagctgtccctgccctgcaggtaaccacacygtccaataagagcctattgattcctctgtttcccgaggcatgtgaactccgcaacccccactatggctgatttggtcatctttgtgcctcctgcatctgg

SEQ ID NO: 215136 - DNA, 201 bp, Homo sapiens
gctgggaaccctgccctgacacccccaggcaagctgtccctgccctgcaggtaaccacactgtccaataagagcctattgattcctctgtttcccgaggcmtgtgaactccgcaacccccactatggctgatttggtcatctttgtgcctcctgcatctggcagtgggcctggtaggtcagagctccacacatatttgttg

SEQ ID NO: 215137 - DNA, 201 bp, Homo sapiens
aaccctgccctgacacccccaggcaagctgtccctgccctgcaggtaaccacactgtccaataagagcctattgattcctctgtttcccgaggcatgtgarctccgcaacccccactatggctgatttggtcatctttgtgcctcctgcatctggcagtgggcctggtaggtcagagctccacacatatttgttgtctgaa

SEQ ID NO: 215138 - DNA, 201 bp, Homo sapiens
ccctgccctgacacccccaggcaagctgtccctgccctgcaggtaaccacactgtccaataagagcctattgattcctctgtttcccgaggcatgtgaacyccgcaacccccactatggctgatttggtcatctttgtgcctcctgcatctggcagtgggcctggtaggtcagagctccacacatatttgttgtctgaagg

SEQ ID NO: 215139 - DNA, 201 bp, Homo sapiens
ttcttgaaggcagacacaagtctgcaggctgttcacgcccccatctcattatcttttctcacgggtacctcttctgatacaatcacagcaaccctggcctyggccccgccctgtccctgccatgcaacttcacaactcagctggcctagacccctgggaggcctccaagtccctagggttagacacctcctggggtgctat

SEQ ID NO: 215140 - DNA, 201 bp, Homo sapiens
atctcattatcttttctcacgggtacctcttctgatacaatcacagcaaccctggcctcggccccgccctgtccctgccatgcaacttcacaactcagctrgcctagacccctgggaggcctccaagtccctagggttagacacctcctggggtgctatggactgtcggggctccaaggagccgagtgtgggggaaactca

SEQ ID NO: 215141 - DNA, 201 bp, Homo sapiens
gctggtcagcatcagataaaacagtcaacaaagccagctctggctgtgcccatagctcacggcaactcacttcctccagctgctcaggccaacacccgtgsgtcatccctgactcctcccactctcacaacacccagcagcaaatcctgttggctccacttcaaaatggattctgggcccagcactgtggttcacccctgt

SEQ ID NO: 215142 - DNA, 201 bp, Homo sapiens
tccctgactcctcccactctcacaacacccagcagcaaatcctgttggctccacttcaaaatggattctgggcccagcactgtggttcacccctgtaatcycagtactctgaggggccgaggagggtggatcacttgaggtcaggagtttgaagcaagcctggccaacatgatgaaaccctgtctctactaaaaatacaaa

SEQ ID NO: 215143 - DNA, 201 bp, Homo sapiens
gatgcgggatgttattgcccttgggatgggaaggagagatgagagggagaattggctggatcttaaaattgtgttgcaccctttcaaacactctaccatcyttgcctctgtagttcaatattagtctgttcctatcttctaaacttgcaaatgaacttgcatggcaataaatctctgcacactcaaagccatgatttcctc

SEQ ID NO: 215144 - DNA, 201 bp, Homo sapiens
gaccccaagctccagttagctcaagtcctagagaatgtgccagctacatagagctatgcagagcgtggccctggggatgcgggatgttattgcccttgggwtgggaaggagagatgagagggagaattggctggatcttaaaattgtgttgcaccctttcaaacactctaccatccttgcctctgtagttcaatattagtc

SEQ ID NO: 215145 - DNA, 201 bp, Homo sapiens
gctgaggcaggagaatcacttgaacccgggggcagaggttgcagtgagccaggatcgcgccactgcactccagcctggcaacagagtgaggctccatctcaaaaaaaaaaaaaaaaaaaaaagctgctaaatttgtagtaatttgttgcatagcatagaaaattaatatagcctccctaaatattatagttagtactgcct

SEQ ID NO: 215146 - DNA, 201 bp, Homo sapiens; identical to SEQ ID NO: 38200

SEQ ID NO: 215147 - DNA, 201 bp, Homo sapiens
ctgaggcaggagaatcacttgaacccgggggcagaggttgcagtgagccaggatcgcgccactgcactccagcctggcaacagagtgaggctccatctcaaaaaaaaaaaaaaaaaaaaaagctgctaaatttgtagtaatttgttgcatagcatagaaaattaatatagcctccctaaatattatagttagtactgcctg

SEQ ID NO: 215148 - DNA, 201 bp, Homo sapiens; identical to SEQ ID NO: 38202

SEQ ID NO: 215149 - DNA, 201 bp, Homo sapiens
tgaggcaggagaatcacttgaacccgggggcagaggttgcagtgagccaggatcgcgccactgcactccagcctggcaacagagtgaggctccatctcaaaaaaaaaaaaaaaaaaaaaagctgctaaatttgtagtaatttgttgcatagcatagaaaattaatatagcctccctaaatattatagttagtactgcctgc

SEQ ID NO: 215150 - DNA, 201 bp, Homo sapiens; identical to SEQ ID NO: 38204

SEQ ID NO: 215151 - DNA, 201 bp, Homo sapiens; identical to SEQ ID NO: 38209

SEQ ID NO: 215152 - DNA, 201 bp, Homo sapiens
gggctgaagtgatcttcccacctcagcctccggagtagctaggactacaggtgtgcgctaccacacccagctaaattttttacttttgtagagacaggtcktgccatgttgcccaggctggtcttgaatgcctgggctcaagctatcctcccgcctcagtttcccaaagtactgggattacaggtgtgagccactgcagcc

SEQ ID NO: 215153 - DNA, 201 bp, Homo sapiens
gtagagacaggtcttgccatgttgcccaggctggtcttgaatgcctgggctcaagctatcctcccgcctcagtttcccaaagtactgggattacaggtgtragccactgcagccagccatcgtaattgtttttctagatgaacagctagttattccaataccagctgttgggtggtcctccctacccactaaggctcactc

SEQ ID NO: 215154 - DNA, 201 bp, Homo sapiens
aggtcttgccatgttgcccaggctggtcttgaatgcctgggctcaagctatcctcccgcctcagtttcccaaagtactgggattacaggtgtgagccactrcagccagccatcgtaattgtttttctagatgaacagctagttattccaataccagctgttgggtggtcctccctacccactaaggctcactcactggtgg

SEQ ID NO: 215155 - DNA, 201 bp, Homo sapiens
tcttgccatgttgcccaggctggtcttgaatgcctgggctcaagctatcctcccgcctcagtttcccaaagtactgggattacaggtgtgagccactgcasccagccatcgtaattgtttttctagatgaacagctagttattccaataccagctgttgggtggtcctccctacccactaaggctcactcactggtggttt

SEQ ID NO: 215156 - DNA, 201 bp, Homo sapiens
gatctcggctcactgcagcctctgcctcctgggctcaaagaacccttccacttgagtcttcccagtagctgggactacaggagtgtgccaccatgctcggsgcgcgcgtgtgtgtgtgtgtgtgtgtacacgcaacaaggccatttatttcacctgggtgcaggcgggccgagtccgaaaagagagcaaagggtgatggga

SEQ ID NO: 215157 - DNA, 201 bp, Homo sapiens
gttgcccaggctggtcttgaatgcctgggctcaagctatcctcccgcctcagtttcccaaagtactgggattacaggtgtgagccactgcagccagccatygtaattgtttttctagatgaacagctagttattccaataccagctgttgggtggtcctccctacccactaaggctcactcactggtggtttgtcccttgt

SEQ ID NO: 215158 - DNA, 201 bp, Homo sapiens
aaggagaaacacctgctacttagcagaccgggaaagggagtctccctttccccggggtagtttagagaagactctgctccacacctcttgtggagggcctractgatcgcccacagttatccggaggcctaaccgtctccctgtgatgctgtgcttcagcggtcacactcctgtttcactttcatgttccactctgtacac

SEQ ID NO: 215159 - DNA, 201 bp, Homo sapiens
aattttcatatttttagtagagacagggtcaagtttgcctgttcaccttgtgcccaggaagcccctcctgtgtgcaggcccaaaaagcttggtcacacccygctgtgagatgtggcagctgacatatgagaacacgcaggccttgggaacagtatgggaacccctgtttcagggaaggcacttcaggtcattttagtctga

SEQ ID NO: 215160 - DNA, 201 bp, Homo sapiens
taattttttgtatttttcatagagacagggttttgccatgttgggcaggctggtttcgaactcctgacctcaggtgatgtgaatttttttttttttcttgyaaaggaacatttcacaaattttcgtatcacgcttgcacaggggccacgctaatcatctctttgttgttccaatttagcagtatatgtgctgctgaagcaa

SEQ ID NO: 215161 - DNA, 201 bp, Homo sapiens
atcaacataaagcttgattgcattattttgcatgctaagttttccaaatccagcttcgtgtcacacctacagcacatctcactcaagctggccacatcccygccatccagacgtaaaacagtcacaagacagggctggcagggccgcggaggaggccggcaggggccatcacggagtgcccatcctgcactgtggtcccag

SEQ ID NO: 215162 - DNA, 201 bp, Homo sapiens
taagttttccaaatccagcttcgtgtcacacctacagcacatctcactcaagctggccacatccctgccatccagacgtaaaacagtcacaagacagggcwggcagggccgcggaggaggccggcaggggccatcacggagtgcccatcctgcactgtggtcccagcaagtttcttcctcctggcaagaagcctgtcccag

SEQ ID NO: 215163 - DNA, 201 bp, Homo sapiens
cgtaaaacagtcacaagacagggctggcagggccgcggaggaggccggcaggggccatcacggagtgcccatcctgcactgtggtcccagcaagtttcttyctcctggcaagaagcctgtcccaggctggcaggggacagcgtgaggtgcagcctatggactgggaaaggggtgtggaagggccacacctaagtcctaaaa

SEQ ID NO: 215164 - DNA, 201 bp, Homo sapiens
gaagcctgtcccaggctggcaggggacagcgtgaggtgcagcctatggactgggaaaggggtgtggaagggccacacctaagtcctaaaatccaggcccaraagtggcccaactcacttctctgcctttaatctcacaggcatacccggtggcaaaggagtatgggaaatggagtcaggctgggtagccacgagcccagga

SEQ ID NO: 215165 - DNA, 201 bp, Homo sapiens
tgatatcttgattttaacttgttcacctctgagaagaacctatctccaaataagatgacattctgaggtagtaggagttggaacttcaacatgtgaatttrgtggggagaacgagtcatgattcaatccattacagtcctaccgaattgtgagctaacaatgggtgttatttgaagctactgaatttggtgtaatggtgtg

SEQ ID NO: 215166 - DNA, 201 bp, Homo sapiens
agctactcagcagccttagttgggaggagtgcttagccccaggaggtcgaggctgcagacagccatgatcatgccactgcactccagtctgggtgacaaastgagaccctgtctcaattagaatacaaggtccaggcacggtggctcatgcctgtaatcccagcactttggaaggcggaggtgggcagattacgaggtcag

SEQ ID NO: 215167 - DNA, 201 bp, Homo sapiens
gggagctggaatgctgtgggagggccctgaccccggggcccatggagctccctaggctcctctggccacacctcaccacccaccccctcccctctccagcrgttccagtttgtggaagtcccaggcaatcactgtgtccacatgagcgaaccccagcacgtggccagtatcatcagctccttcttacagtgcacacacatg

SEQ ID NO: 215168 - DNA, 201 bp, Homo sapiens
ctgaagctggctgtgccctggggccacatcgcagccaaagcctggggctccctgcagggccctccagttctctgcctgcacggctggctggacaatgccarctccttcgacagactcatccctcttctcccgcaaggtgtgaggctggggctgaagggaaggccagggggaaagtgggcaggaaggtgaggggggaggtct

SEQ ID NO: 215169 - DNA, 201 bp, Homo sapiens
tttcttcctataaattgatcattgcatctagagtgctaatcagattaagctttttatgtttttgttaagactctttcaaagtacacagctacaaggtgtttgtgtgtgtgtgtgtgtatgtgaatttgtgtattttttttaagataagatgcctcatgaaacatactgatacttctgattcaaattcaggagacaagatgt

SEQ ID NO: 215170 - DNA, 201 bp, Homo sapiens
ttcttcctataaattgatcattgcatctagagtgctaatcagattaagctttttatgtttttgttaagactctttcaaagtacacagctacaaggtgtttgtgtgtgtgtgtgtgtatgtgaatttgtgtattttttttaagataagatgcctcatgaaacatactgatacttctgattcaaattcaggagacaagatgtt

SEQ ID NO: 215171 - DNA, 201 bp, Homo sapiens
gttagaataaaaatttaacattaccagtccatatgatcactaaaaacagttccaaaaaattttattttagtattattattattatttttgagacggagtcttgctctgtcacccaggctggagtgcaatggtgcgatcttggttccctgcaacctctacctcctgggttcaagtgattctcctgccccagcttcccaagta

SEQ ID NO: 215172 - DNA, 201 bp, Homo sapiens
gccttcaacctggggcccgttggccagagctcggcctctcagagaccgctgcaggccctgcctcacctcatgttcctcctggccctgcacctccagccatycactgcggctctcacggctcagtagggtcggaatttgcgctgggcccgcagcagctcgatcctctgcttgtcctcctcaaacttcttgcgcagctgcgct

SEQ ID NO: 215173 - DNA, 201 bp, Homo sapiens; identical to SEQ ID NO: 38213

SEQ ID NO: 215174 - DNA, 201 bp, Homo sapiens
cctccaccatgctgggttaattttttgtatttttcatagagacagggttttgccatgttgggcaggctggtttcgaactcctgacctcaggtgatgtgaatttttttttttttcttgcaaaggaacatttcacaaattttcgtatcacgcttgcacaggggccacgctaatcatctctttgttgttccaatttagcagtat

SEQ ID NO: 215175 - DNA, 201 bp, Homo sapiens
gacagcgtgaggtgcagcctatggactgggaaaggggtgtggaagggccacacctaagtcctaaaatccaggcccagaagtggcccaactcacttctctgmctttaatctcacaggcatacccggtggcaaaggagtatgggaaatggagtcaggctgggtagccacgagcccaggaagaagggagaacagacttggagag

SEQ ID NO: 215176 - DNA, 201 bp, Homo sapiens
aggtgcagcctatggactgggaaaggggtgtggaagggccacacctaagtcctaaaatccaggcccagaagtggcccaactcacttctctgcctttaatcwcacaggcatacccggtggcaaaggagtatgggaaatggagtcaggctgggtagccacgagcccaggaagaagggagaacagacttggagagggcaggagt

SEQ ID NO: 215177 - DNA, 201 bp, Homo sapiens
cagcattgacttcatcagcagggagctgtgtgcgcattccatcaggaagctgcaggcccatgtcctgttgatcaagtaagtctggacccatccccttcagycacccgccaaggagacatgggcgccaggaatctccgggagggggccctggcatgaggctccaagttctctgcgtgtcgaccacatcgctaaggctcaaga

SEQ ID NO: 215178 - DNA, 201 bp, Homo sapiens
cgtgtcacacctacagcacatctcactcaagctggccacatccctgccatccagacgtaaaacagtcacaagacagggctggcagggccgcggaggaggcyggcaggggccatcacggagtgcccatcctgcactgtggtcccagcaagtttcttcctcctggcaagaagcctgtcccaggctggcaggggacagcgtgag

SEQ ID NO: 215179 - DNA, 201 bp, Homo sapiens
attccatcaggaagctgcaggcccatgtcctgttgatcaagtaagtctggacccatccccttcagccacccgccaaggagacatgggcgccaggaatctcbgggagggggccctggcatgaggctccaagttctctgcgtgtcgaccacatcgctaaggctcaagatcttttttgggaagcccccctggcagcagggtcat

SEQ ID NO: 215180 - DNA, 201 bp, Homo sapiens
tctgcgtgtcgaccacatcgctaaggctcaagatcttttttgggaagcccccctggcagcagggtcatggaaggaggaaggtcagaggaggggagggctcrggcagcaggggatgggccggggctgtcccatgcctttccacaggtgtcagcggggggcatgcccaggtaaggctccataaccagtgagcccagtctcggc

SEQ ID NO: 215181 - DNA, 201 bp, Homo sapiens; identical to SEQ ID NO: 38221

SEQ ID NO: 215182 - DNA, 201 bp, Homo sapiens
tccaataagagcctattgattcctctgtttcccgaggcatgtgaactccgcaacccccactatggctgatttggtcatctttgtgcctcctgcatctggcrgtgggcctggtaggtcagagctccacacatatttgttgtctgaaggaggagaagccccccactgccccaccacacgcacgcgcacacacacccacacaca

SEQ ID NO: 215183 - DNA, 201 bp, Homo sapiens
cgaggcatgtgaactccgcaacccccactatggctgatttggtcatctttgtgcctcctgcatctggcagtgggcctggtaggtcagagctccacacatayttgttgtctgaaggaggagaagccccccactgccccaccacacgcacgcgcacacacacccacacacacacaccctgccgctgtaaacatgcaatcgaaa

SEQ ID NO: 215184 - DNA, 201 bp, Homo sapiens
gggcagggtaaggagtgtgagccatctccaatgatagataagttcacgtgggtcacatgtccatgggacagggggcccttccccgcctggcacccaaggcaagagagaggagagagagacagcttacaccattatttctgcatatcagagacttttagtactttcactaatttgctactgctatctagagggcagagccag

SEQ ID NO: 215185 - DNA, 201 bp, Homo sapiens
gaggcatgtgaactccgcaacccccactatggctgatttggtcatctttgtgcctcctgcatctggcagtgggcctggtaggtcagagctccacacatatytgttgtctgaaggaggagaagccccccactgccccaccacacgcacgcgcacacacacccacacacacacaccctgccgctgtaaacatgcaatcgaaac

SEQ ID NO: 215186 - DNA, 201 bp, Homo sapiens
acacatatttgttgtctgaaggaggagaagccccccactgccccaccacacgcacgcgcacacacacccacacacacacaccctgccgctgtaaacatgcmatcgaaacacgggacacaggccaggcgcagtggctcacacctgtaatcccagcacattgggaagctgaggtgggaagatagcttgagcccaggagttaga

SEQ ID NO: 215187 - DNA, 201 bp, Homo sapiens
taaggagtgtgagccatctccaatgatagataagttcacgtgggtcacatgtccatgggacagggggcccttccccgcctggcacccaaggcaagagagaggagagagagacagcttacaccattatttctgcatatcagagacttttagtactttcactaatttgctactgctatctagagggcagagccaggtgtacag

SEQ ID NO: 215188 - DNA, 201 bp, Homo sapiens
aacctggggcccgttggccagagctcggcctctcagagaccgctgcaggccctgcctcacctcatgttcctcctggccctgcacctccagccatccactgmggctctcacggctcagtagggtcggaatttgcgctgggcccgcagcagctcgatcctctgcttgtcctcctcaaacttcttgcgcagctgcgctagatct

SEQ ID NO: 215189 - DNA, 201 bp, Homo sapiens
catatttgttgtctgaaggaggagaagccccccactgccccaccacacgcacgcgcacacacacccacacacacacaccctgccgctgtaaacatgcaatygaaacacgggacacaggccaggcgcagtggctcacacctgtaatcccagcacattgggaagctgaggtgggaagatagcttgagcccaggagttagagac

SEQ ID NO: 215190 - DNA, 201 bp, Homo sapiens
aaaattagccaagcgtggtggtggcgggcgcctgaatatctatccagaagaggcgttagacattctctagatgtaacgaagaatggcatgaacccgggagrcagagcttgcagtgaacccagattgcgccactgtactccagcctgggcaacagagcaagactctgtctcacaaagaaaaaaaaagaaaaaaaaatcacga

SEQ ID NO: 215191 - DNA, 201 bp, Homo sapiens
gagtgtgagccatctccaatgatagataagttcacgtgggtcacatgtccatgggacagggggcccttccccgcctggcacccaaggcaagagagaggagagagagacagcttacaccattatttctgcatatcagagacttttagtactttcactaatttgctactgctatctagagggcagagccaggtgtacagagtg

SEQ ID NO: 215192 - DNA, 201 bp, Homo sapiens
aggcagagcttgcagtgaacccagattgcgccactgtactccagcctgggcaacagagcaagactctgtctcacaaagaaaaaaaaagaaaaaaaaatcasgagacacatgcacgctttgtgggtgacctcccttttgctgcccttgtctccatttttttgttgttgttgtgttttgtttttggagaccaaatctcgctct

SEQ ID NO: 215193 - DNA, 201 bp, Homo sapiens; identical to SEQ ID NO: 38203

SEQ ID NO: 215194 - DNA, 201 bp, Homo sapiens
gaggctgcagctccacttcctcttttgaataggaaggtctgggtgggcctcatgagaaggtgacttttgagcaaagcagtgaaggtacgggagctgctccyacggactccaggaggagaaaggagctggcaggacaggcctggaggtgtgagctggtggtgcaggatggggagagagcagcagagatgagctctttatctt

SEQ ID NO: 215195 - DNA, 201 bp, Homo sapiens
ggctgcagctccacttcctcttttgaataggaaggtctgggtgggcctcatgagaaggtgacttttgagcaaagcagtgaaggtacgggagctgctcccayggactccaggaggagaaaggagctggcaggacaggcctggaggtgtgagctggtggtgcaggatggggagagagcagcagagatgagctctttatcttct

SEQ ID NO: 215196 - DNA, 201 bp, Homo sapiens
cttgaatggccatttttccccattatatgccacttgatctagatagcaagatgactagataactgtatcattccaggttctccagagaaacagaaccaackgtgtgtgtgtgtgtgtgtgtgtgtgtgtgtgtgtgtgtgtattatatatatatatagaaagagagagacagagattgagatttattttgaggaactggct

SEQ ID NO: 215197 - DNA, 201 bp, Homo sapiens
gcacttcaggtcattttagtctgagaagcagaaaatagctggagggccagggtggaaacagggcagtgagttttcactggtgtgtgtgtgttcatagcaakttgtgtgtgtgtgtgtgtgtgtgtgtgtgttcatggcaattttatattcacaatggtgcaggagtatcgggtgtaacttaggggagctggtccttacggg

SEQ ID NO: 215198 - DNA, 201 bp, Homo sapiens
cttcaggtcattttagtctgagaagcagaaaatagctggagggccagggtggaaacagggcagtgagttttcactggtgtgtgtgtgttcatagcaatttgtgtgtgtgtgtgtgtgtgtgtgtgtgttcatggcaattttatattcacaatggtgcaggagtatcgggtgtaacttaggggagctggtccttacgggagc

SEQ ID NO: 215199 - DNA, 201 bp, Homo sapiens
gcccacctcagcctcccaaagtgctgggattacaggcgtgagtcaccgcacccagccgacaactgctatttttatacttaaaagttagtttgaccaggccrggtgcggtggctcacgcttgtaatccaagcactttgggaggccaaggcaggctgaccacctgacgtcgagagttcgagaccagcctgaccaacatggaga

SEQ ID NO: 215200 - DNA, 201 bp, Homo sapiens
aggagaatctcttgaactcaggaggcggaggttacagtggcctgagatcacgccaccatactccagcctgggcaacagagcgagactctgtctcacacagacacacacacacacacacacacacacacaaaagatgaatcaaaacagcctagaaaaggcttcagtgatcctcagactggatgatcgaatcccgaataatgg

SEQ ID NO: 215201 - DNA, 201 bp, Homo sapiens
gcgtcatccctgactcctcccactctcacaacacccagcagcaaatcctgttggctccacttcaaaatggattctgggcccagcactgtggttcacccctrtaatcccagtactctgaggggccgaggagggtggatcacttgaggtcaggagtttgaagcaagcctggccaacatgatgaaaccctgtctctactaaaaa

SEQ ID NO: 215202 - DNA, 201 bp, Homo sapiens
cctgtcgctactaaaaatacaaaattaggcctggtggcgcatgcctgtaatcccagctactcggtaggctgaggcaggagaatcgcttgaacccaggaggmgggaggttgcggtaaactgagatcgcgccattgcattccagcccgggcaccaagagcaaaactcggtctcaaataaataaggctctaacaattgttctca

SEQ ID NO: 215203 - DNA, 201 bp, Homo sapiens
ggagaatctcttgaactcaggaggcggaggttacagtggcctgagatcacgccaccatactccagcctgggcaacagagcgagactctgtctcacacagacacacacacacacacacacacacacacaaaagatgaatcaaaacagcctagaaaaggcttcagtgatcctcagactggatgatcgaatcccgaataatggg

SEQ ID NO: 215204 - DNA, 201 bp, Homo sapiens
agtcctttattagccggtgaccgagagacggctaacggtcaaaattctctcagccctgaggaagaggcttgattaacttttatatcttggtttaggaagtkggggggggggtctagttaaaagaattttacagaagttaagtagtcaaaaagttaaaaggataaatggttacaggaaagtgaacagttccaggtgcagggg

SEQ ID NO: 215205 - DNA, 201 bp, Homo sapiens
cagaatacccgactgcctcatccctctgcacccatcatgacagtgggcgtgctggctgtaggcagaggtggcttttcccccaggttcctgggagcacgtgktgttttatggtcacctacccaggaacactgaccctggggcctctgcaggtttcttggcattgtcacaaagggaagaagcccacctgtggctggccggctg

SEQ ID NO: 215206 - DNA, 201 bp, Homo sapiens
ctggaattacaggcgtgagccaccgcgcccggcctaatttttgtatttttagtagagacgggggtttcacgtgttagccaggatggtctcgatctcctgayctcgtgatctgcccgcctcagcctcccaaagtgctaggattacaggcgtgagccaccgcgcccggccatgttcaagtattaacctctcccttcccccacc

SEQ ID NO: 215207 - DNA, 201 bp, Homo sapiens
gttaagactctttcaaagtacacagctacaaggtgtttgtgtgtgtgtgtgtgtatgtgaatttgtgtattttttttaagataagatgcctcatgaaacayactgatacttctgattcaaattcaggagacaagatgttactcattctcttctatttcacatctgtaactccttttccctacaccaggaattcagttctct

SEQ ID NO: 215208 - DNA, 201 bp, Homo sapiens
ccctctgcacccatcatgacagtgggcgtgctggctgtaggcagaggtggcttttcccccaggttcctgggagcacgtggtgttttatggtcacctacccrggaacactgaccctggggcctctgcaggtttcttggcattgtcacaaagggaagaagcccacctgtggctggccggctgccaggtcagagccaaggcagg

SEQ ID NO: 215209 - DNA, 201 bp, Homo sapiens
cgggcggcacccgctcctggtggtggcattgttgggacccgctcacaaaacacagttgttctctgcaatggctcatttccctttctgagactttttgtttrtttgtttgttttgagacagagtcttgctctattgcccaggctggagtgcaatggcacaatctgggctcattgcaacctccgcctcccgggttcaagcaat

SEQ ID NO: 215210 - DNA, 201 bp, Homo sapiens
ctacagctgagctccaggggggtgctggtggcatggcacaaagtgatttctcttgtcttcttggggtgacgacgagctagccagcccagggggtgggaggyggggagggtcacaggaatgaaagtgaagagaggcaggtggggaaaggctgaggtgtgataacaggatgtgagtgtgaagatgaggatgggggcggggggg

SEQ ID NO: 215211 - DNA, 201 bp, Homo sapiens
tacctgtgtaatttttccacgtgaacttgagaatcaggtggtttaggccccccaccaagaaaatcttgttggtatatcatatatgtatggttttttagtgktttttgtttgattttttgagacagagtcttgctctgtcgcctaggctggagtgcagtggcacgatctcagctcaccacaaccagtgacaccattggtact

SEQ ID NO: 215212 - DNA, 201 bp, Homo sapiens
ctgaggtgtgataacaggatgtgagtgtgaagatgaggatgggggcgggggggggcggtggaagtgggggactgaggccgcgaatctgctggacagagggrgtgggtgcctctgtgttgaaggggctggtagagccacagcaggttgagatggaggtcaggtccccacccctgagtcaggctggagcctggcgcccaggca

SEQ ID NO: 215213 - DNA, 201 bp, Homo sapiens
ccaccacacccagctaatttttgtattttttattagagacaaggttttgccatgttggccaggctggtcttgaacccctgacctcaggtgatccgcctgcyttggcctcccaaaatgctggattacaggtgtgaaccaccacatccagccaaagaggaagtttcttaaagcaggtggtgaaaatagggtggacagggacag

SEQ ID NO: 215214 - DNA, 201 bp, Homo sapiens
gtggcacaatctcagctcactgcaacctctgcctcctgggttcaagtgattctcatgcctcagcttcccaagtagctgggattacaggcacatgccaccaygtccagctaagttttgtatttttagtagagatgaggttttaccatgttggccaggctggtctcaaactcctgacctcagatgatccgcccatcttgtcct

SEQ ID NO: 215215 - DNA, 201 bp, Homo sapiens
ttgtaaaagggtccaggcccatagaaagccaaactgtttactgagctgatggactgtaccgtgcatggacctttctagaagcagttttgtcatctcccagyccctagcctccccagggccccaccactcagaataagggccaagctcctcggccccacatgcaaggcctgttgtaacctaatgccacaccaagctccagtc

SEQ ID NO: 215216 - DNA, 201 bp, Homo sapiens
ggcactgatgctaccgctagaccacggtccgcttggcaacgggcgtcttcccagacgctggcattaccgctagaccaaggagccctctggtggccctgtcygggcataacagaaggctcgcactcctgtcttccggtcacttctcgctatgtcccctcagctcctatccctgtatggcctgatttttcctaggttatgatt

SEQ ID NO: 215217 - DNA, 201 bp, Homo sapiens; identical to SEQ ID NO: 38201

SEQ ID NO: 215218 - DNA, 201 bp, Homo sapiens
cgcccgccaccaggcctggcttatttttgtatttttagtagagacgaggtttcgccatgttggccaggctgctctccatctcctgacctcatgatccgccygcctcggcctcccagtgttgggattacaggcgtgagccaccgtgcgtggcccaccatagacgatttttaagccataaaaagaaacgaagcactgacacgg

SEQ ID NO: 215219 - DNA, 201 bp, Homo sapiens
agggccatctctacttaatgtctactgattggaaactttgatcaaagctatcaaataccttcacagtcttaaaagaagaactttggacaaaataaatgtaacagtttatttgagcaaagaacaaattcatgaatcacgaagcaccaaaccaaaaggaaggtatgggctccactccagcaacacgagtagtgagcttatttt

SEQ ID NO: 215220 - DNA, 201 bp, Homo sapiens
gggccatctctacttaatgtctactgattggaaactttgatcaaagctatcaaataccttcacagtcttaaaagaagaactttggacaaaataaatgtaacagtttatttgagcaaagaacaaattcatgaatcacgaagcaccaaaccaaaaggaaggtatgggctccactccagcaacacgagtagtgagcttattttt

SEQ ID NO: 215221 - DNA, 201 bp, Homo sapiens
ccttcagccacccgccaaggagacatgggcgccaggaatctccgggagggggccctggcatgaggctccaagttctctgcgtgtcgaccacatcgctaagrctcaagatcttttttgggaagcccccctggcagcagggtcatggaaggaggaaggtcagaggaggggagggctcgggcagcaggggatgggccggggctg

SEQ ID NO: 215222 - DNA, 201 bp, Homo sapiens
agagctcggcctctcagagaccgctgcaggccctgcctcacctcatgttcctcctggccctgcacctccagccatccactgcggctctcacggctcagtasggtcggaatttgcgctgggcccgcagcagctcgatcctctgcttgtcctcctcaaacttcttgcgcagctgcgctagatctgggggtgagaggaggcgcg

SEQ ID NO: 215223 - DNA, 201 bp, Homo sapiens
ccccaacagagatgggtttcgtgcccacgagagtgcctgtgccttgtgacgagaattcaccatgtttttgtctctgcaggcagagaacagcattgacttcrtcagcagggagctgtgtgcgcattccatcaggaagctgcaggcccatgtcctgttgatcaagtaagtctggacccatccccttcagccacccgccaagga

SEQ ID NO: 215224 - DNA, 201 bp, Homo sapiens
ctcactgcagcctctgcctcctgggctcaaagaacccttccacttgagtcttcccagtagctgggactacaggagtgtgccaccatgctcggcgcgcgcgygtgtgtgtgtgtgtgtgtacacgcaacaaggccatttatttcacctgggtgcaggcgggccgagtccgaaaagagagcaaagggtgatgggatgactacg

SEQ ID NO: 215225 - DNA, 201 bp, Homo sapiens
agactcgttcagaatcgtggggctgactagccagggctggggctgtgtgcccctttgccgagaggggctcagctgagagcagagggcagggctaggagggrcagagacctcgtctgcagcctggatccctgcccaccagccaactgtgcctccttaggaaatggagaacttgctgacctacaagcggagagccatagagca

SEQ ID NO: 215226 - DNA, 201 bp, Homo sapiens
ccgttggccagagctcggcctctcagagaccgctgcaggccctgcctcacctcatgttcctcctggccctgcacctccagccatccactgcggctctcacrgctcagtagggtcggaatttgcgctgggcccgcagcagctcgatcctctgcttgtcctcctcaaacttcttgcgcagctgcgctagatctgggggtgaga

SEQ ID NO: 215227 - DNA, 201 bp, Homo sapiens
gggaggacctgggccccgggcagcgctcccagccctgtctcctttggtggacactagggaagcacgaggaggcggcagagggtgggaaaggggagtcaggracccgctccccaacagatgacacccttctgctgcttatacccctagcagtggtcaggacaaggggtgtgggggaccccttggaaactggatgtgtggctc

SEQ ID NO: 215228 - DNA, 201 bp, Homo sapiens
aagctgaggcaggagaatcgcttgaacctgggaggcagaggttgtggtgagccaagatcaccccattgtactccagcctgggtgacaagagagaaactccrtctcaaaataaataaataaataataaataaaaagttagtttgaccagatataaaatcctggcttagctggtgtttgtcttgagtatcctaaatgtattat

SEQ ID NO: 215229 - DNA, 201 bp, Homo sapiens
tcctaaagaccgagtctccagatacaatcacactggggattggggcttcaacacctgaatttggggggggtggggggtcacacacaattcagtccatagcsctatgaaaaccttgaatggccatttttccccattatatgccacttgatctagatagcaagatgactagataactgtatcattccaggttctccagagaaa

SEQ ID NO: 215230 - DNA, 201 bp, Homo sapiens
cattccaggttctccagagaaacagaaccaactgtgtgtgtgtgtgtgtgtgtgtgtgtgtgtgtgtgtgtgtattatatatatatatagaaagagagagmcagagattgagatttattttgaggaactggctcacagattgtggggtctggcaagtctgaaatctgtaggcaggctgcaggctggacactcaggcaggat

SEQ ID NO: 215231 - DNA, 201 bp, Homo sapiens
tcctctggcctcttggtcagcaccctccccccagcctaaaagatgtttcggggaactccagggtccccagggaaaggcgggagtgtcctttccttcttccycctattcattctccccttttggcatcctcacagtttttctgtaccttccccgagatggtggataaacttatcttgctggacacgccgctctttctcctgg

SEQ ID NO: 215232 - DNA, 201 bp, Homo sapiens
ctcctctggcctcttggtcagcaccctccccccagcctaaaagatgtttcggggaactccagggtccccagggaaaggcgggagtgtcctttccttcttcmccctattcattctccccttttggcatcctcacagtttttctgtaccttccccgagatggtggataaacttatcttgctggacacgccgctctttctcctg

SEQ ID NO: 215233 - DNA, 201 bp, Homo sapiens
tttattagagacaaggttttgccatgttggccaggctggtcttgaacccctgacctcaggtgatccgcctgctttggcctcccaaaatgctggattacagrtgtgaaccaccacatccagccaaagaggaagtttcttaaagcaggtggtgaaaatagggtggacagggacagggtaaaaacaaagtagccctgttgggcg

SEQ ID NO: 215234 - DNA, 201 bp, Homo sapiens
aggaaagaaagaaagaaaattgaatataaaaatgttttagataaatacatgactgggaaataaatttcttctttttttttttgagaaggagtttcactctygttgcccaggctggagtgcaatggtgctcaccgcaacttccgcctcccaggttcaagcaattctcctgcctcagcctcccgagtagctgggattacaggc

SEQ ID NO: 215235 - DNA, 201 bp, Homo sapiens
gccggggctgtcccatgcctttccacaggtgtcagcggggggcatgcccaggtaaggctccataaccagtgagcccagtctcggctgactgcaacctctgyctcctggattcaaacgattctcctgcctcagcctcccgagtagctgggactacaggcgcccgccaccaggcctggcttatttttgtatttttagtagaga

SEQ ID NO: 215236 - DNA, 201 bp, Homo sapiens
tttcacgtgttagccaggatggtctcgatctcctgacctcgtgatctgcccgcctcagcctcccaaagtgctaggattacaggcgtgagccaccgcgcccrgccatgttcaagtattaacctctcccttcccccaccactcttccattcctgtgaatgtgacctgaatatggaaacagggtctttgcaaatgtaatcaggt

SEQ ID NO: 215237 - DNA, 201 bp, Homo sapiens; identical to SEQ ID NO: 38216

SEQ ID NO: 215238 - DNA, 201 bp, Homo sapiens
ctccataaccagtgagcccagtctcggctgactgcaacctctgtctcctggattcaaacgattctcctgcctcagcctcccgagtagctgggactacaggygcccgccaccaggcctggcttatttttgtatttttagtagagacgaggtttcgccatgttggccaggctgctctccatctcctgacctcatgatccgccc

SEQ ID NO: 215239 - DNA, 201 bp, Homo sapiens
ttcaccagggcattctgttcaaaccttgggcctcacttcgtaaaagtccaggaaattactctccctttctgtttgcactcggcctcatgccatgggcctcstgggcaggtgcactgctgctccaccggtgctcaacacatttttgctaaaggaatggatgaccccagaaaacacatacaagctgggcacaatggcatgtgt

SEQ ID NO: 215240 - DNA, 201 bp, Homo sapiens
tagacacctcctggggtgctatggactgtcggggctccaaggagccgagtgtgggggaaactcactgtgggaggcgctcctgacctgcagggagctggaakgctgtgggagggccctgaccccggggcccatggagctccctaggctcctctggccacacctcaccacccaccccctcccctctccagcagttccagtttg

SEQ ID NO: 215241 - DNA, 201 bp, Homo sapiens
tattcttaccgaggatgtcaaggacttgccttagaccaggcaggatactaagcgctttgcaaacagcatctcactgaatccccctcctgcctcaccctcawcccatttagagcaggagaaaccaaggctcagcattgccaagcaacccgggtgaggccatacagttactgcacatcccagaaagccacgctctgggagagt

SEQ ID NO: 215242 - DNA, 201 bp, Homo sapiens
gactgtcggggctccaaggagccgagtgtgggggaaactcactgtgggaggcgctcctgacctgcagggagctggaatgctgtgggagggccctgaccccrgggcccatggagctccctaggctcctctggccacacctcaccacccaccccctcccctctccagcagttccagtttgtggaagtcccaggcaatcactgt

SEQ ID NO: 215243 - DNA, 201 bp, Homo sapiens
tggcggggcctgcttcagagcagtggtccaggaagcagctctcccagggtgagggaacagctggagggagatggtgtcgtcggatggaaaatgtgctaagytgggcaacacaactttgcttcctgacactgccagctcagtgatcttgggacagtcccttcccttttagactccccttgtttgctcaggtgacaaacaagg

SEQ ID NO: 215244 - DNA, 201 bp, Homo sapiens
ccctctccagcagttccagtttgtggaagtcccaggcaatcactgtgtccacatgagcgaaccccagcacgtggccagtatcatcagctccttcttacagygcacacacatgctcccagcccagctgtagctctgggcctggaactatgaagacctagtgctcccagactcaacactgggactctgagttcctgagcccca

SEQ ID NO: 215245 - DNA, 201 bp, Homo sapiens; identical to SEQ ID NO: 38219

SEQ ID NO: 215246 - DNA, 201 bp, Homo sapiens
accgctgggaggcggttctaagatgaaccccaacaacccccaactcctcactttccagagcagtccacggatattttgattcaagacagaattactctgasaaggagtccctgtcgttcatgatagacacgatgaaatccaccctcaaagaggtaagacggggctcaggcagctggtgtccagccactgtcgcccactctg

SEQ ID NO: 215247 - DNA, 201 bp, Homo sapiens
cggggatggtcgtcctcttcgaccgagtgcacagtttcgggagggacgcacatggagcggtaaggaagggaggggacacccgcctagccgccagatcagcygaatcaaccctggcgatcaatggggtgacagatgtcgcagccagatcaccctcacatcttttttttttttttgagacggagtctcactctgtcacctggg

SEQ ID NO: 215248 - DNA, 201 bp, Homo sapiens; identical to SEQ ID NO: 38198

SEQ ID NO: 215249 - DNA, 201 bp, Homo sapiens
accgagtgcacagtttcgggagggacgcacatggagcggtaaggaagggaggggacacccgcctagccgccagatcagctgaatcaaccctggcgatcaawggggtgacagatgtcgcagccagatcaccctcacatcttttttttttttttgagacggagtctcactctgtcacctgggctggaatgcagtggctcgatc

SEQ ID NO: 215250 - DNA, 201 bp, Homo sapiens
gcccaggctggtcttgaactcctgacctcgtgattcgcctgcctcggcctcccaaagtgctgggattacaggcttgagccaccatgcctggccttggctarttttttagtttttttgtgtagagatggggtcctgctccattgcccacgctggtctcaagtgatcctcccacttcggcctcccaaagtgctggaattacag

SEQ ID NO: 215251 - DNA, 201 bp, Homo sapiens; identical to SEQ ID NO: 38206

SEQ ID NO: 215252 - DNA, 201 bp, Homo sapiens; identical to SEQ ID NO: 38208

SEQ ID NO: 215253 - DNA, 201 bp, Homo sapiens
ccaaaaaaaataaataaacctaatgttcttggccatgtctgttccagggtccagtccagaataccacattgcatttagtgtcagtttttatttcaccgacrtagcttaggggccttgtcttgctgatgaaggaggaactcctgggaaacctttgtctctcacaagtgtttatgtgaacacttcatacactcctgtgtctct

SEQ ID NO: 215254 - DNA, 201 bp, Homo sapiens
ttccaatattctctctgtagaggatagacaaatacaaccgtggaatagtcacccagcagaagacttcacaagtataaaaaagagtgaggcagctttgtgatttttttttttttgacaaatataggagaagctcaggaatatattgctaaggtgcagaacagtgtacacagccaacctcctttttttctttttttttgagat

SEQ ID NO: 215255 - DNA, 201 bp, Homo sapiens
tggagatagggcccggaattgcgggcgtcactctgctcctgcgacctagccaggcgtgagggagtgacagcagcgcattcgcgggacgagagcgatgagtragaacgccgcaccaggtctgacggggaggccttgtgcgagcgtcccactgcccacccacctggttgggacagtagaagagggcgggatggagtggagggt

SEQ ID NO: 215256 - DNA, 201 bp, Homo sapiens
aaactgggcttccagtaccagagcagccagcaacctgccctaagcagaaaggtagggggctagacgtggatgtgtgcagtgcacctttcacaggatacttmttgtaactagtggacaacctcatgcctagtgtctgacctatgaccagaggcccctcacatgggaaaggccctagtggctctggtgagacccatgtctggt

SEQ ID NO: 215257 - DNA, 201 bp, Homo sapiens; identical to SEQ ID NO: 38214

SEQ ID NO: 215258 - DNA, 201 bp, Homo sapiens
gagccctacttctggtaggaaaaatttgaatcttatcaaaatggatgccaaggcaacataaaattataagaaatcactatcagtacttggccaggcgtggkggctcacgcctataatcccagcactttgggaggccgaggcggagggatcacgaggtcaggagatcgagaccatcctggctaacacggtgaaactccgtct

SEQ ID NO: 215259 - DNA, 201 bp, Homo sapiens
agttttcactggtgtgtgtgtgttcatagcaatttgtgtgtgtgtgtgtgtgtgtgtgtgtgttcatggcaattttatattcacaatggtgcaggagtatygggtgtaacttaggggagctggtccttacgggagcttcccggaattaatccactcagctgcatttatgaagcttctcctctgtactccacgtgctgagaa

SEQ ID NO: 215260 - DNA, 201 bp, Homo sapiens
cagagcaagtatgggctccagcgcctgttcagatcccagctctgcttttcagggctgactgtgaccaagtcctgaactccctgtgccccagaaaggctgtkccttcagcattcacttgtgcctggcttgtgccagctgagcatgagctgagattaactgagcctcaaatccaacccagggtcaagggacccagctgtggga

SEQ ID NO: 215261 - DNA, 201 bp, Homo sapiens; identical to SEQ ID NO: 38217

SEQ ID NO: 215262 - DNA, 201 bp, Homo sapiens
aacacagcaagttaatatctttgggtagacacgtgcagctacagctgtggaataaatttcctcctgagagtgaaactctacagtgcacaccacctacagtrcattgaagcagacattatgcaaacacttcaagagaaaggacacttggtctcggaccagcgaagcccgtgggccctcggtgtgatagtctcaatgtatctg

SEQ ID NO: 215263 - DNA, 201 bp, Homo sapiens
ctggtcccgcgcggacgtgggggcggccatcaggactgcccgggggttggcgccctgctgggttccaagccggtgggcgcggacagtgtggcgggaaggcsgggcctggcgggtgggggcgcggcctggcggtgggggtggaccttcctggggtggagcccgcggctgtgggagcagggcccgccggggctcgggcagggc

SEQ ID NO: 215264 - DNA, 201 bp, Homo sapiens
gagtctccactcccatgtctgactctctccccataaccttctggggcagctaagggtctgagtccctctggacatgagcccctggctcaagcacatcaggsagagataaggggctcagggagcaccagcttcatgggtgaatgaatgaaggaatgaaagacccggctgtgtctttcaggtctgatctcagagctgaagctg

SEQ ID NO: 215265 - DNA, 201 bp, Homo sapiens
accctttcaaacactctaccatccttgcctctgtagttcaatattagtctgttcctatcttctaaacttgcaaatgaacttgcatggcaataaatctctgyacactcaaagccatgatttcctcagcaggtggatgcagaatgctcggagacctataataatcagcctttggcaacaagcactttttcttctgactcatta

SEQ ID NO: 215266 - DNA, 201 bp, Homo sapiens; identical to SEQ ID NO: 38207

SEQ ID NO: 215267 - DNA, 201 bp, Homo sapiens
gagtggggcctgggctctggccccaggtctgccagcaattcacgggagatcttgggaaagttgaagagttcgcttcctccagtgggtcccccaagctagtstcctgggtggacaccccagatgctgggaagggatttcctgagcctggggactagaagcaagatcgtgggctgagcctgtgcccagccggaccttctggct

SEQ ID NO: 215268 - DNA, 201 bp, Homo sapiens
ccgagatagcaccactgcactgcagcctgggcgacagagcgagactccatctcaagaaaaaaaaaaaaaaagaaattatatagctaacataatacttaatkattgtcaatttaaccgtttgtaagtatgcacttcagtggcattaaatacagtcgatggaggtgaggagaggagggagacatcccaggcactggctgctgc

SEQ ID NO: 215269 - DNA, 201 bp, Homo sapiens
tctgaggggccgaggagggtggatcacttgaggtcaggagtttgaagcaagcctggccaacatgatgaaaccctgtctctactaaaaatacaaaaacttarccgggtgtggtggtgggtgcctgtaatcccagctactcgggaggctgaggtaggagaatggcttgaacccaggaggcggaggttgcagtgagctgagatc

SEQ ID NO: 215270 - DNA, 201 bp, Homo sapiens
agccactgtcgcccactctggtcccacctcacccatctcttctcatgcactgggaagaccctgggtctgcccccaggcccaacaagtgaccaccaggatcwatcaggcctcatgctccactgtggtcagtccctagaggcctagggacacatgtaatcagaattaaggaaacagagacctttggtggggaacccctgccag

SEQ ID NO: 215271 - DNA, 201 bp, Homo sapiens
gtctttaaacacgtctctggaagcccctcctgattttcaccttgggctataagttgataaatggctgtcctgaggcctgttgttttcttccttcagcccaytgatgccactcgatcaattaactccactttctttataattaccactgcccatgtatttcatgggtcaggaatttgggcaatgctctgctaggagattttg

SEQ ID NO: 215272 - DNA, 201 bp, Homo sapiens
gcgaaggagtttctctgaccttctcttgccctcctgtctgtggcccctcattctgccctgaggctggccatagaaactagaatctctcttcctcagggtgrgtcatagaaaccagaacccctttcccccaaaccagccatacaacctaaaatatgactctaacttcccctctgccctatctgtgcaaaaactggccataaa

SEQ ID NO: 215273 - DNA, 201 bp, Homo sapiens
tcaggaggctgaggcaggaaaatcactggaacctgggaggcggaggttgtagtgagccgagatcgcgccactgcactccaacctgggcgacagagagagaytacgtctcaaaaaaataaataaatgactgtacgtttcacagtacacatatttgctaaccccctgtgtatgtttgtctttaaatctaatgttcttcacagt

SEQ ID NO: 215274 - DNA, 201 bp, Homo sapiens
tctgttccagggtccagtccagaataccacattgcatttagtgtcagtttttatttcaccgacgtagcttaggggccttgtcttgctgatgaaggaggaaytcctgggaaacctttgtctctcacaagtgtttatgtgaacacttcatacactcctgtgtctctggatgtggctaccatgttaacataaaaaaggggtgag

SEQ ID NO: 215275 - DNA, 201 bp, Homo sapiens
ggtgatccgcctgcctcggcctcccaaagtgctgggattacaggcatgagccaccgtgcctggccaaaatttatttttttaattaaagtaggccaggcacrgtgactcatgcctataatcacagagctttgggagggtgaggcaggaggactgcttgatgccaggagttggagaccagcctgggcaacgtagtcagacccc

SEQ ID NO: 215276 - DNA, 201 bp, Homo sapiens
atgtgaacacttcatacactcctgtgtctctggatgtggctaccatgttaacataaaaaaggggtgagaagataacatcttaagaattcccgccagaatcyatgccctccagaatccacgccctcccccacccccgcttgctgctgcttttgtgagcccttttagggagactgggagaggatgttcttagcagttctcagc

SEQ ID NO: 215277 - DNA, 201 bp, Homo sapiens
aataagaaagttacataagattccatttgagcatacataaggccatgatactttaatgtgaaccaccatttcttggaagaaagaagacatccaaatgtccrattcagagagaaagttcctggccagtcatccagtagactctctccactcttcaatgggaaggtgatgcttatatttttaaaaatctctacaaagctcaca

SEQ ID NO: 215278 - DNA, 201 bp, Homo sapiens
ggttttgttttctttcaagttttgaactgcttcattacctataaaaggtctgggtatagctgtagcatttcatttgctttctgagagaaatggacagtttccttggccactgaagatgtttctcacgtaattaaacaacagtttatacatcttgatcctattcttttttttacagtgtgtttctttggagttaaaatggct

SEQ ID NO: 215279 - DNA, 201 bp, Homo sapiens
tttgtatcctagctctctgatgtcaatcagtatttgataaatattgattaatgacatagctctatattaccatggaaacagaacctcttttcgactcatgkaggtcggatgggtagaatatgggcggaaggtggtatttgccttttaggcttttttagtctgtatcgaaggctgtgtatgtgacggtacaggacatgtgat

SEQ ID NO: 215280 - DNA, 201 bp, Homo sapiens
tttcttttgtagaaggcagcaaggggatatggttaaagagaatatggtagggtagctacccattatactgttggtcatctttgttgttgttttaatacttkaaagtcatcttcttgcctctaccttatttgccttaaaatctcagcaagaaaacaaatatttgaatttcccataatccagataggctttttcaacttctag

SEQ ID NO: 215281 - DNA, 201 bp, Homo sapiens
gctgcggtgcgtagcgaggtgggccgggtcatgcccgtggcacttctgcaggcgtcctgggggcacgccagggcctaaccggtgctggttccctctttgcytactctggttccttcattcattcagcaaacatttgagtttgggtcctgctcactgtattacatccacatctgctgctggcagctgcgattccgagggtgg

SEQ ID NO: 215282 - DNA, 201 bp, Homo sapiens
gggttttttttccctgtagagttgtttgagctctctatatagtctggttattaaccctttgttagatagatagattggaaatattttcttccattctgtgkgttgtctcttcactttcttgattgtttcttttgctgtacagaagctttttaacttgatgtgattccatttgtccatttatgctttggttgcctgtgcttg

SEQ ID NO: 215283 - DNA, 201 bp, Homo sapiens
agcctgtggtaatgcttgtttccaacatggccttccttgactaaacaattttcagatattagaatcaattttccagaatattcactgcagtagatattcayttggctattactaataatgtccacacttaacattattttctaccatgtataagctctgttaggtcatttactgcctatgattggaaaagctgaatgtatg

SEQ ID NO: 215284 - DNA, 201 bp, Homo sapiens
cactttcaccattttctagatgaagaacttagaaagctgacaggttaagtgatttgccccagttctgtagccaggaagtagtagagctgggattggaatcyagatcattagatggtgtagaagttagacgactccagtaattgaggatcagaaaacaggttcttgccctgtttttactacttagcggccaagtgatcttag

SEQ ID NO: 215285 - DNA, 201 bp, Homo sapiens
gaactgagtgaaatgaatgaaatcaaataataggttcttaagaaatgtttgttgaatggattaaaaaatgtcagggagcattttatatatcatactttcartccttactgcaatttgtctcagtatttcttcctagtttaggtgacagaccaaggagcacagtgcatagataactatggaggagggctggttttttcattt

SEQ ID NO: 215286 - DNA, 201 bp, Homo sapiens
tgatatttttccccccaaattggtaggctgttacttggtggaaggctgcccacaatgtttgattgatccttgccttgcattaattatggaattatgacttmttcagagcatattataatattgtgagcctatatagtcattgttttatgtcaccattgaaaataaatacgtgtgacagtctatctttaaaccttactcaat

SEQ ID NO: 215287 - DNA, 201 bp, Homo sapiens
  misc_feature (1)...(201): n = A,T,C or G
agagtaagtttgaaatttttaccctaaatttatattttaaaacattcatttaccaaactgtgtgctaattcttagcaactagagaaaaaccatgatgtgcntcattaatagatcaagtaaggacaccaacatcattagcagtgttattcttttttaaaaaaaacagcagaataacttaatttattaaatactcttgttacc

SEQ ID NO: 215288 - DNA, 201 bp, Homo sapiens
aactgtgtgctaattcttagcaactagagaaaaaccatgatgtgcatcattaatagatcaagtaaggacaccaacatcattagcagtgttattcttttttwaaaaaaacagcagaataacttaatttattaaatactcttgttacctagccttctagtatccaattgcatgttgagagaagggagagtagagaaactatac

SEQ ID NO: 215289 - DNA, 201 bp, Homo sapiens
tctgcctttgaaaagcattgggtgaattaaatgagagctattaggataaggcccaggttcgcctttctgcttttctcactagtgggcgcccctccgcccacgcgcgcgcgcgcgtgtgcgtgtgtgtgtatagtatttttttttctgagatatttctattttctggaatattctccataatgtaacatattgactgttact

SEQ ID NO: 215290 - DNA, 201 bp, Homo sapiens
ctgcctttgaaaagcattgggtgaattaaatgagagctattaggataaggcccaggttcgcctttctgcttttctcactagtgggcgcccctccgcccacgcgcgcgcgcgcgtgtgcgtgtgtgtgtatagtatttttttttctgagatatttctattttctggaatattctccataatgtaacatattgactgttactt

SEQ ID NO: 215291 - DNA, 201 bp, Homo sapiens
tgttaaccactagttgtagagaaccactacaactagtattcaatagtggttcaatagtggttcaatagtgtattgaaccactagttgtagagaaagttccagagagactattgagcagaaagctaactatctagaaatggattttgtttgtttgtttgtgtttgcagtgaaagtctcagcatggatcctagggtctttaac

SEQ ID NO: 215292 - DNA, 201 bp, Homo sapiens
cctaccaatagagtgtaggtttccctgactccccatcaggcctctttacctcttatcaatctaccagggctgctacctacagggatctgctaagggggcakactgtgcactatagtagcttcatctgatttctaagaggaggcgtaagccttggccatgaatttttaagtctcaattatagaaccaccatttattaaattt

SEQ ID NO: 215293 - DNA, 201 bp, Homo sapiens
ctgtgcatccccgtgcttgaattataagcatccagtcagctgttttaatgtttcattttgttgttgctgttgtttaaaaatagtgttattgagatataacygtataccatagaattcactcaaagtgtataattcagtggtttttagtataggcacagttgtacagccattgccacaatctaattttgggacatttcacca

SEQ ID NO: 215294 - DNA, 201 bp, Homo sapiens
ataggcacagttgtacagccattgccacaatctaattttgggacatttcaccacatcaaaaagaagctataactattagcagtcataccctattcccactsttctctccatggcccaggcaaccactacaggagtgtccaatctttgggcttctctgggccgcattggaaggaaagaattgtcttgagccacacatgcaat

SEQ ID NO: 215295 - DNA, 201 bp, Homo sapiens
tggagaaaaggggtctctggaagccggtattttgtttaacttacattctaggtgtgtatataagttgtcgctctataacttctgctgtggttccaacatcyatatctgaaaggtggaagcagctgctctgttacaattttcatgtaacacgcttggattctaggtctttcctctttaacacaacttaaagaaagtttcttg

SEQ ID NO: 215296 - DNA, 201 bp, Homo sapiens
taatatggctggagaaaaggggtctctggaagccggtattttgtttaacttacattctaggtgtgtatataagttgtcgctctataacttctgctgtggtyccaacatctatatctgaaaggtggaagcagctgctctgttacaattttcatgtaacacgcttggattctaggtctttcctctttaacacaacttaaagaa

SEQ ID NO: 215297 - DNA, 201 bp, Homo sapiens
aacattaattacttctagcctgatgtaatatggctggagaaaaggggtctctggaagccggtattttgtttaacttacattctaggtgtgtatataagttstcgctctataacttctgctgtggttccaacatctatatctgaaaggtggaagcagctgctctgttacaattttcatgtaacacgcttggattctaggtct

SEQ ID NO: 215298 - DNA, 201 bp, Homo sapiens
actatctagaaatggattttgtttgtttgtttgtgtttgcagtgaaagtctcagcatggatcctagggtctttaacacttctgaaatctatcattaaagcraaatacttgctagattgttttttaaagctacatgttggtggtaaaattatttatagtcatcattttggtggcattcatgttacctttcaaagtaaagcat

SEQ ID NO: 215299 - DNA, 201 bp, Homo sapiens
aatagaaagtattgataaataaagtactatgggacattagctttaatgagttggtaagatataataaacatatcattttgtatatgatgcaatacattagrgtgtaaaggtttgatatattacacataatttaagtcttttctgtttacaagacagtgcagtagtagaaactgaactaagaggaatgaatatatgtgcttt

SEQ ID NO: 215300 - DNA, 201 bp, Homo sapiens
ataaatcaacattaattacttctagcctgatgtaatatggctggagaaaaggggtctctggaagccggtattttgtttaacttacattctaggtgtgtatrtaagttgtcgctctataacttctgctgtggttccaacatctatatctgaaaggtggaagcagctgctctgttacaattttcatgtaacacgcttggattc

SEQ ID NO: 215301 - DNA, 201 bp, Homo sapiens
cactatcttgcccaggctggcctccagtgcttgggcccttgtcattttggtggcaaacacttgtgaatgacttcctttacatgaatgtctttgttctaagyttcctattttctttaaacaaaataattatataaagccatctcagattaccataatttggagaaatctttatagcagtgcagctgaattatgtatttaata

SEQ ID NO: 215302 - DNA, 201 bp, Homo sapiens
agcagagcctttcacttagggaccaactgcttgtagatgaaataaatcaacattaattacttctagcctgatgtaatatggctggagaaaaggggtctctsgaagccggtattttgtttaacttacattctaggtgtgtatataagttgtcgctctataacttctgctgtggttccaacatctatatctgaaaggtggaag

SEQ ID NO: 215303 - DNA, 201 bp, Homo sapiens
gtctgtgctctgtgttattgtgttatgctaagctgtgtgtggtttctgaagtattaggaggaatctttttttttttttttgagatggaacctcgctctgtygccaggctggagtgcagtggcatgatttcggctcactgcaacctccatctcccaggttcaagtgattctcctgcctcagcctcccaagtagctgggacta

SEQ ID NO: 215304 - DNA, 201 bp, Homo sapiens
ccttattaggaggattcttttgctgaggagcttatctgttcaagggacaaaaatgagcaaataacatcagattacaaatgtgtaaatccagcaataagtgstgtaggaactcaaagggacagagcatcagtaaagaatggagggggagatgggaatgatctatgatggacttaagtcaagagtatatgatttggtgagacc

SEQ ID NO: 215305 - DNA, 201 bp, Homo sapiens
atatctattatggtgatctgtggtctttgctgttactttttgtaattgttttggggcaccatggctcatacccatataagatgacgatcttaataaatgtygtacatcttctgactgcttcacctaccaacgtgttctctctgtctctctcccttccccaccctccctctctctcccgtccctgttccctgagatacaaaa

SEQ ID NO: 215306 - DNA, 201 bp, Homo sapiens
taagtgaaataagtttatatactagtttttaatgtatttatttgcatgtttgtagaaaacttatgttgaacacatgatagtcatgtgacgacagagaacamcaaagctttgagcttgtgaactgtataggaactacatcctacaagttaaggatcaattctgatactattgggattttatacataactaaaagacactatt

SEQ ID NO: 215307 - DNA, 201 bp, Homo sapiens
ggtttaatatcaaattttcatgataataaataatgttgttaggtatatctttgttccatataattttgtatacttgtgcaaaggtttttgtagactagatyacttgagtaacattcctagatcaaaggaagttaacagacactgtcaaactaaagttataatttgaagaatatgtatatacccccatacatattcctacca

SEQ ID NO: 215308 - DNA, 201 bp, Homo sapiens
gttctgtggcctgttccccccagagaaagattagaaatggctccagtgtaccaaataagcttcacagaagaacatgaaaattttcctccaacttttttttyttttttttttcaagcagagcctttcacttagggaccaactgcttgtagatgaaataaatcaacattaattacttctagcctgatgtaatatggctggaga

SEQ ID NO: 215309 - DNA, 201 bp, Homo sapiens
caatggaaaacatttacatcttcttaccaattaactattaatagttcatggtaaatatgtatatgtcattttgagattttcattttaaattagcaggaaayatatgtatactgataatgtgtgctagtgcttgttggattctccagcagctcatgtatataccaccaacgatgtaccaatttgtgtttcacagagttacat

SEQ ID NO: 215310 - DNA, 201 bp, Homo sapiens
gttaaccactagttgtagagaaccactacaactagtattcaatagtggttcaatagtggttcaatagtgtattgaaccactagttgtagagaaagttccagagagactattgagcagaaagctaactatctagaaatggattttgtttgtttgtttgtgtttgcagtgaaagtctcagcatggatcctagggtctttaaca

SEQ ID NO: 215311 - DNA, 201 bp, Homo sapiens
ggacagggcaggcagaactacaagcccctccctccacgttagcaagatcagctctccttttttctgtatggtagaattccacctagccttttgtttgtttaaaaaaaaaaagaagaagaagaaataaaaaaaaattctactattaaaagaaagccttgaaaaccatggttctgggataatttggcactgtgataagactgc

SEQ ID NO: 215312 - DNA, 201 bp, Homo sapiens
ttatcacccagcagcaagaacttcttgagcacttagtctgtgctctgtgttattgtgttatgctaagctgtgtgtggtttctgaagtattaggaggaatctttttttttttttttgagatggaacctcgctctgtcgccaggctggagtgcagtggcatgatttcggctcactgcaacctccatctcccaggttcaagtga

SEQ ID NO: 215313 - DNA, 201 bp, Homo sapiens
ttgtgccaaatagccaagttgtgaatgcaaaggaaaagttcttaaaggaaatttagtctactctagtaaacacatgagtgacaagaaagtggaacagcctwactgctgatggggagaaagttttatggtctggatgaaagatcaaaccaggtacaacattctaagccaaatcctaatccagagtaagcctctcactctctt

SEQ ID NO: 215314 - DNA, 201 bp, Homo sapiens
ttaacataatgacctccagttctgtccacattgttgcaaatggcaggaactcattctttttttaatggccaagtggtactccactgcatgtatgtatcactttttttttttaatccattagtctgttgatagacacttaggttgcttccaaatcttggctattgtgattagtgatgcaataaacatgggagtccagctatc

SEQ ID NO: 215315 - DNA, 201 bp, Homo sapiens
ctccactgcatgtatgtatcactttttttttttaatccattagtctgttgatagacacttaggttgcttccaaatcttggctattgtgattagtgatgcartaaacatgggagtccagctatctcttcaatatactgatttcctttcttttgggtatatacctagcaatgtgattgctggatcatatggtagatctgtttt

SEQ ID NO: 215316 - DNA, 201 bp, Homo sapiens
tccaaatcttggctattgtgattagtgatgcaataaacatgggagtccagctatctcttcaatatactgatttcctttcttttgggtatatacctagcaaygtgattgctggatcatatggtagatctgtttttgtttttttgagaactgatctccataatggttgtactgatttacattcccaccaacagtatgtgagag

SEQ ID NO: 215317 - DNA, 201 bp, Homo sapiens
tattgagcaccttttcatatacctgtttaccacttgtatgtctttttttgagaaatgtctattcagatcttttgcccatttgtaaattggattattagggkttttttttccctgtagagttgtttgagctctctatatagtctggttattaaccctttgttagatagatagattggaaatattttcttccattctgtgggt

SEQ ID NO: 215318 - DNA, 201 bp, Homo sapiens
ggagtgtccaatctttgggcttctctgggccgcattggaaggaaagaattgtcttgagccacacatgcaatacattaacactcacgatagctgatgagctaaaaaaaaaaaaaaaaaaaaaaaatctcataatgttttaagaaagtttatgaatttgtgttgggccacattcaaagccatcctgggccacatgtggcctat

SEQ ID NO: 215319 - DNA, 201 bp, Homo sapiens
tttcaataacttcaccttgcaatttaaacaattgaatatttggaccccacttagtgcattgcagtgggcttttacctgactgtaaccagactcctgttctrcatgatgaagtgttcaccctatgagggccaggctgaaactaacacctactaagagaatggcagaattaagtctttccacctttacactctcagatgtgca

SEQ ID NO: 215320 - DNA, 201 bp, Homo sapiens
gagacagaagaatggcttgaacccgggaggtggaggttgcagtgatccgagatcactctattacactccagcctgggcaacaacagcgaaactccgtctcaaaaaaaaaaaaaaatcctaactctgccctacttttccagccttatttctcgttcttccacgtggcctctagcaatctgacttgtgttctcttgtctgcag

SEQ ID NO: 215321 - DNA, 201 bp, Homo sapiens
aaaaatgtgatgagattgtttctctaaaatgcattaggttgttcacaatgaagctttgtctaacaccattatctgatgcatccattatctgatgcatggcrtatgcaataaggcagatccacagcagaccaaacaaggaagctgaattaggtaatagaactagtaattaagatggttcacctctaacacagttctgtggcc

SEQ ID NO: 215322 - DNA, 201 bp, Homo sapiens
gatcattctaaaagtttttagagaatgagagaaacatgatacctacagaggacgggaaaccagaatggcactgaacttctcaagtgggaatcagaaaacaytggagcagtgccttccaaattctgaggcagggccaggcgctgtggctcacgcctataatcccagcactttgggaggccgaggtgggcagatcatttgagg

SEQ ID NO: 215323 - DNA, 201 bp, Homo sapiens
gatcactctattacactccagcctgggcaacaacagcgaaactccgtctcaaaaaaaaaaaaaaatcctaactctgccctacttttccagccttatttctygttcttccacgtggcctctagcaatctgacttgtgttctcttgtctgcagtgcagctcttttctccagtcctccagtttaagacctgatgctacctattc

SEQ ID NO: 215324 - DNA, 201 bp, Homo sapiens
tgaggaaaccaaatcccagtcaagaaacaggtgacaccagtttgtgtagacaaattcctaatctgtttctgttagggcagggcaaattctagacttctaamtttgaattagtaaaccaagtgtgaagggtttcagagatatgaattggagccccctccccccaccaaaaaaaatcctcataaatccccaaaggcaagttgg

SEQ ID NO: 215325 - DNA, 201 bp, Homo sapiens
actccagcctggacacagagtgagactccgtctgaaaaaaaaaaaaaaaaagaaagactggttgaataaatgatgcaccatccatacaatggaatactgtyacagctgttaacaaggaaaaacaagcaaaacttggtttataacatgatgcatctgagttttgttttgaagaaatatacatatgtacatgtgtatttatgc

SEQ ID NO: 215326 - DNA, 201 bp, Homo sapiens
gcctttttttacttagcataatgttttcaaggtttatctatgttgtagcatgcttcagtacttcattcctttttgtggctgaataatattccattgtatgsatatatatcaaattttgtttacccatttatcagttgatggacatctaggttctttccacattttgcattttggttgttgtgaataagctgcatcaaacat

SEQ ID NO: 215327 - DNA, 201 bp, Homo sapiens
aattgaatgttcctcttgaaatttttagaagcagatagcaaggtaatttttgcagcagcggcctgtgttatcaagaaagctcacaaacatcagatttttcrtcttgtatcacaataagataaagctgatatgctaggtaaagcactgtgaggtaagtgctctttttatacccattttacagatgaggaaactgacacctag

SEQ ID NO: 215328 - DNA, 201 bp, Homo sapiens
taattaggttcacagagtaattactcccaaaaagaattatggtattaaaaaataaatgtgctttctttttccaacatgaagataatttttttctgatcacraagataatgtatatttatttagaaaattaaagcaatattagtaattctaaggaagaaagtaaaaattactttcctccccaaccacccagaggaaacctcc

SEQ ID NO: 215329 - DNA, 201 bp, Homo sapiens
aagatatttcacattttatttatataataaagattatgtatgtgtatgtttacctttaacacttttttaaaaagtaatctttttttttttctaggttggcrttggaaacatttttatttgcagttattttgtctacttttactactgtgccttgcttatgtttgttaggaccaaacctcaaagcatggctaagagtgttca

SEQ ID NO: 215330 - DNA, 201 bp, Homo sapiens
aaaaaatcctaactctgccctacttttccagccttatttctcgttcttccacgtggcctctagcaatctgacttgtgttctcttgtctgcagtgcagctcttttctccagtcctccagtttaagacctgatgctacctattctttccaatccagctgaacttcctcctgttccataaaatagaaaaagtgaattcttccca

SEQ ID NO: 215331 - DNA, 201 bp, Homo sapiens
gattattgccagtattttgtgataataaacactgctgtgataaaatctttgaatctatagcttcttgaatttttctaattaggttcacagagtaattactsccaaaaagaattatggtattaaaaaataaatgtgctttctttttccaacatgaagataatttttttctgatcacgaagataatgtatatttatttagaaa

SEQ ID NO: 215332 - DNA, 201 bp, Homo sapiens
atcgtctttgaaacaatttaaagttgttttaaaatatttgtacttattctcaacagacaccagataaatgaggcattgttgtatttaaaaattttttgggtttttttttttcagttttaccacgttagaaatctagtatttgtgaaatatgtatattcatttcctaaagtcacagatgccacagataattctttcataagt

SEQ ID NO: 215333 - DNA, 201 bp, Homo sapiens
tctgaatttctattgaagcctaagctttgaatgaagacatgcttctgaaaataaggcagtttttctctagtctgcttatcaatagaaaacaaatctttggtttttagttaaagtgacaggaaggatttttgcaaaaagaaaaactaaagaaccaaagcaattaaaaagctcttgataagcaatggggaactccaaacccat

SEQ ID NO: 215334 - DNA, 201 bp, Homo sapiens
atggctggagaaaaggggtctctggaagccggtattttgtttaacttacattctaggtgtgtatataagttgtcgctctataacttctgctgtggttccarcatctatatctgaaaggtggaagcagctgctctgttacaattttcatgtaacacgcttggattctaggtctttcctctttaacacaacttaaagaaagtt

SEQ ID NO: 215335 - DNA, 201 bp, Homo sapiens
tgacccaaaattttaatttgtaattttagcatgtgtctcatgcactttggggagcgtcaaactaaatctacaattgccagaagccttgttacagtttaatrcacattaactaaaatgtgtacatttttagtgttcatgataaatgcagttatgaccttattacacttttggcattctttaagaaagcacattaagctttaa

SEQ ID NO: 215336 - DNA, 201 bp, Homo sapiens
caaaattttaatttgtaattttagcatgtgtctcatgcactttggggagcgtcaaactaaatctacaattgccagaagccttgttacagtttaatgcacaytaactaaaatgtgtacatttttagtgttcatgataaatgcagttatgaccttattacacttttggcattctttaagaaagcacattaagctttaatatag

SEQ ID NO: 215337 - DNA, 201 bp, Homo sapiens
tagtacaaatttggatatatgtgattggctccagcccgttcttagccctgcttctcaatggaaacaagctaaggctcttatcttgtgtagttggggagtawgagatggaggatgatagagggattggtttgtgaactgacttgtcatcatttgggacttttaaaattcagtgtacattttgcgtgtaataattggcctgtt

SEQ ID NO: 215338 - DNA, 201 bp, Homo sapiens; identical to SEQ ID NO: 38337

SEQ ID NO: 215339 - DNA, 201 bp, Homo sapiens
ttcaataacttcaccttgcaatttaaacaattgaatatttggaccccacttagtgcattgcagtgggcttttacctgactgtaaccagactcctgttctasatgatgaagtgttcaccctatgagggccaggctgaaactaacacctactaagagaatggcagaattaagtctttccacctttacactctcagatgtgcac

SEQ ID NO: 215340 - DNA, 201 bp, Homo sapiens; identical to SEQ ID NO: 38340

SEQ ID NO: 215341 - DNA, 201 bp, Homo sapiens; identical to SEQ ID NO: 38338

SEQ ID NO: 215342 - DNA, 201 bp, Homo sapiens
gtttgaaatttttaccctaaatttatattttaaaacattcatttaccaaactgtgtgctaattcttagcaactagagaaaaaccatgatgtgcatcattartagatcaagtaaggacaccaacatcattagcagtgttattcttttttaaaaaaaacagcagaataacttaatttattaaatactcttgttacctagcctt

SEQ ID NO: 215343 - DNA, 201 bp, Homo sapiens; identical to SEQ ID NO: 38341

SEQ ID NO: 215344 - DNA, 201 bp, Homo sapiens
  misc_feature (1)...(201): n = A,T,C or G
aaaatcaaaggtagaatagaaagctaagtctgtatgtgcatctacacgtctgcatcttttgtgttttgaaacaaatacattgctcatagaaaattgacttnatgacctatttttaggggtcaaaacatttaagacaatggaaaaagtcgttattgcatatgctcttcttttcttgttttttgttagctagccatccaagaa

SEQ ID NO: 215345 - DNA, 201 bp, Homo sapiens
cttaatatttttcaaaaattatgtttcttctttattctttaagtatggatctctttcattatatatatgtctgtgtgtgtgtgtgtgtgtgtgtgtgtgtgtagagatatatgtatctctctatatacacataaatacatgaaacatctaccacgtgctgagtaatgaggaaacaatagtgaattgtttttattactaagc

SEQ ID NO: 215346 - DNA, 201 bp, Homo sapiens
acatgaaccgtgagttagaaaccataaaaagtaattggatattaccaagagaagtgttactaatataatttcagatacattacggggataatatttagacaggtgtagtagagccattattgttatatatcagctgagttattttaaaatagatatagtaatcattgaattaaagaaacccaatgaattttaaaaagagaa

SEQ ID NO: 215347 - DNA, 201 bp, Homo sapiens
aggcgtggggaagtaacttctttcccagttatacacaagttaagaagtgggatttgaatcttagtagtcttttttttttttttttttttttttttttttttaacagggtctcattatgtcacccgggcaagatcatagctcactgcagccttgagctcctgggctcatatgatcttcctgcctcagcctcctcttgagtag

SEQ ID NO: 215348 - DNA, 201 bp, Homo sapiens
cacatgaaccgtgagttagaaaccataaaaagtaattggatattaccaagagaagtgttactaatataatttcagatacattacggggataatatttagacaggtgtagtagagccattattgttatatatcagctgagttattttaaaatagatatagtaatcattgaattaaagaaacccaatgaattttaaaaagaga

SEQ ID NO: 215349 - DNA, 201 bp, Homo sapiens
ccacatgaaccgtgagttagaaaccataaaaagtaattggatattaccaagagaagtgttactaatataatttcagatacattacggggataatatttagacaggtgtagtagagccattattgttatatatcagctgagttattttaaaatagatatagtaatcattgaattaaagaaacccaatgaattttaaaaagag

SEQ ID NO: 215350 - DNA, 201 bp, Homo sapiens
gccttctggatcataaagtagatgtaatatagtaggagttttacaagtaaatatttaagtatattttaacatttgtaattatttaacaattggaacaactygaatttccaacaataggaagttgattaaatacaacggagtctacccatacaatggaagacttaagaagcatttgaaatgatgatgtagaatgtagacact

SEQ ID NO: 215351 - DNA, 201 bp, Homo sapiens
gaggtcatctggtctgtctgtctgtctgtctctctctttctctgtgtgtgtgtctgtctctctctgtctctctctctttcactctctctctctctctctcwcacacacacacacacacacacacacacacacacacacattagagacaaccaaagtcttctaagacttgaggcaaaggaaagtacacttgaaggcaatact

SEQ ID NO: 215352 - DNA, 201 bp, Homo sapiens
tgccccaggactctgtgtagtgctttacatatattaactcctttcatcttcacaacactcctgtaaggtataaatattattaaacccattttactcagatkaagaccctgagacagatttagaatcccagaggtctagctctgactcaaaagcccatggttttaaaccgtgacttcgtagtgccttctggatcataaagta

SEQ ID NO: 215353 - DNA, 201 bp, Homo sapiens
gagaggtcatctggtctgtctgtctgtctgtctctctctttctctgtgtgtgtgtctgtctctctctgtctctctctctttcactctctctctctctctcwctcacacacacacacacacacacacacacacacacacacattagagacaaccaaagtcttctaagacttgaggcaaaggaaagtacacttgaaggcaata

SEQ ID NO: 215354 - DNA, 201 bp, Homo sapiens
acttcaactacagggaagataaatgcaagttgtggtttgtaattttcatcattcctgaccaagacccaccactgagacccaacaataggagatatccagarccaaacaccatgataggaaagttacaaatctgtttttttcattgcacctactaaggaatggcccaaagcctccaaggcaatcttgacctgcatccctggc

SEQ ID NO: 215355 - DNA, 201 bp, Homo sapiens
caaggtgctgccttagaagcagagagaccgggcacaaacctgtcgtagccctgatcttggacttcgcagcctccagaactgtgagagaaattaaatttctyctctttataaattatccaatctcaggtattctgttatagcagcagaaaagagacacacccaggtgtcatcctgggggaaaaggagtgggaagggagcttt

SEQ ID NO: 215356 - DNA, 201 bp, Homo sapiens
ctgagaggtcatctggtctgtctgtctgtctgtctctctctttctctgtgtgtgtgtctgtctctctctgtctctctctctttcactctctctctctctcwctctcacacacacacacacacacacacacacacacacacacattagagacaaccaaagtcttctaagacttgaggcaaaggaaagtacacttgaaggcaa

SEQ ID NO: 215357 - DNA, 201 bp, Homo sapiens
cctcacccccgtgacaggcctgggtgtgtgatgttcccctccctgtgtcatgtgttctcattgttcagctcccgcttatgagtgagaacttgggatgtttrgttttctgttcctgtgttagtttgctgagaatgatggcttccagcttcatccatgtccctgcaaaggacatgaactcattcctttttatggctgtatagt

SEQ ID NO: 215358 - DNA, 201 bp, Homo sapiens
gttgcaattgcttttggagtctttgtcatgaaatctttgccagggcctacgtctagaatctcatttcccaggttttcttctagggtttttatagttatacrtttcacgtttaagtctttaatccatcttgtgttgcttttttatatggtgaaaggaaggagtccagtttcaatcttctgcatatggctagccagttatctc

SEQ ID NO: 215359 - DNA, 201 bp, Homo sapiens
tcaaatatataggggactggaggtcagtagccactggtgcttgttgagctgtcatcagtgtcaggatcgtgtctgtaggattctcttgtcctttccctcawggttataagatggctgtcccagcttcaagtgcacccacactcaaggctgggggaagggatggctctgggtcttttcctttttatctggaaagcaaactct

SEQ ID NO: 215360 - DNA, 201 bp, Homo sapiens
ctcagcctcctgaagtgctgggattacaggcatgagcgcccatgcctagccatctttgcccatttttttaatggggttgtttggtttttgcttgttaattygtttaagttccttatagattctggatattcgagctttgttggatgcataatttgcaaatattttcttccattccataggttgtctgtttactctgctgat

SEQ ID NO: 215361 - DNA, 201 bp, Homo sapiens
ccatttttcaccattgtgtgtaatgtttgctgtgggcttttcatatatggcctttattatgttgatatacatttcttctatactaatttattagtgaaagsatgttgaattttatcagatgccttttctgcatctaatgtggtgatcatatagtatttgtccttcattctgttaatatggtgttctccatttatagatttg

SEQ ID NO: 215362 - DNA, 201 bp, Homo sapiens
aattcctgacctggggtgatcggcccatctcggcctcccaaagtgctgggattgcgggtgtgagccacggcgcttggctagattctgcgtttctttctttyttttttttttttttgtgagacggagtcttgctctgtcgcccaggctagagggcagtggtgcaatcttggctgactgcaagctccgcctcccgggttcata

SEQ ID NO: 215363 - DNA, 201 bp, Homo sapiens
tacttatccagcacccagatcaagacacaaaacatcaccagcgcttcagaatctaccatctcttacttccttccaatcaataggtacttaccaccctaaaagtttattgggagacaattctcccatgtgtctcatgtttctgcatatcttgtgagcaaaggcactgactgcgtgtgttcagaatgtctttccaaggcagcc

SEQ ID NO: 215364 - DNA, 201 bp, Homo sapiens
ccgggcccaagcgatcctcctgcctcagcctcccaagtagctaagaccacaggggcatgccaccacacctggttatttttttatttttatttttttgtagygacaagatctccctggtcttgaactcctggactcaagcagttctaccacctcagcctcctgaagtgctgggattacaggcatgagcgcccatgcctagcc

SEQ ID NO: 215365 - DNA, 201 bp, Homo sapiens
tgctgggattacaaatgtggagccaccgcgcccggccaaaccaatgtgtttcttaaatgtatttgattaatgtctcatgccttcctaaaatacatgacaasaagctgtaccctgaccaccttgggcacacgttctcaggacctcctgagagctgtgtcacaggctgtggtcactcatatttggctcagaataaatctctta

SEQ ID NO: 215366 - DNA, 201 bp, Homo sapiens
tggcaaacggggtggggaacatagagaactaagagtcaggaaacttggggcctatatctagggcatctgttacctaacattctgacccagactatgttttycttgcttcagtggcttaggctgcaaaataaggtccctttcacctttgacacataatccagatcttgtactttactttagtaattttagaaagaagacatt

SEQ ID NO: 215367 - DNA, 201 bp, Homo sapiens
tcatcaatgttacctaaaatagcaaaatgaaatattaatatgtttgaagatatagctttcattagtttaaattaactatctcatttagtttaggcatatgktccacaaatttttaagaacatttaattttaatttaaaaaattaagcctaccaaataagatgcattattttccagtgacttaatatgtatattcaagactt

SEQ ID NO: 215368 - DNA, 201 bp, Homo sapiens
ctgcctgcctcggcctcccaaagtgctgggattacaaatgtggagccaccgcgcccggccaaaccaatgtgtttcttaaatgtatttgattaatgtctcakgccttcctaaaatacatgacaacaagctgtaccctgaccaccttgggcacacgttctcaggacctcctgagagctgtgtcacaggctgtggtcactcata

SEQ ID NO: 215369 - DNA, 201 bp, Homo sapiens
ataggaagagttctctacaggaagtaaagaaagtggagaaggcagaataacaaactaagtaagtcttttaatttgtatggtctatattttaatctttcgartgtaaagatagtatcattgatcatatttctgttcatcaatgttacctaaaatagcaaaatgaaatattaatatgtttgaagatatagctttcattagttt

SEQ ID NO: 215370 - DNA, 201 bp, Homo sapiens
ggcctgatagactagccccagagtgtttcagccaggggtgagcagagccacaggcttgtgactggacctgtgtcctggctagtgtcaagcatccccaccastgaatgcgatacaggagcaaaatgatgcaactgctgttacagtgtttatgttacacaaaaccaaaataccagtatttataccagactcttattttaaaag

SEQ ID NO: 215371 - DNA, 201 bp, Homo sapiens
tgcacatcacagaattgtaaagtgtttaaattctctgggaaacagaaaaacatgatgttttaaaagataaactcaatattagatgactgaaaagagcctgygaattgtatagtcttgttttccttggactcctcaaatattctttttcagttcttgttttgaaagggatccctctctcttgacttaaattctttaaacaac

SEQ ID NO: 215372 - DNA, 201 bp, Homo sapiens
tcttgggtcaaaaaggaaataaataaattacagaacaccttcaaaataacaataatggaaacctcatatactagaacttatggtctgcaactaaaggactwtttagtattacttgtgaatattgatacaaaaatactggataaaatatgagtaaacaagatccaccaacacactcaatcatttaccacaacccactggaca

SEQ ID NO: 215373 - DNA, 201 bp, Homo sapiens
ataaaataaaaaattaaccaggtatggtggtgcacacctgtggtcccagctagtgggaggatcacttgagcctgaaaggccaaggctgcagtgagccatgktcacaccactgccctcaggctgggtgacagagcaagactccatctcaaaaaaaaaaaaaaaaaaaaaaaaaaaaagttctctgaaactaaaataaaaatc

SEQ ID NO: 215374 - DNA, 201 bp, Homo sapiens
ggctgaggtgggaggattgcttgagcccagaggtttaagaccagcctgggcaacatagtgagcccatttctacaaaataaaataaaaaattaaccaggtayggtggtgcacacctgtggtcccagctagtgggaggatcacttgagcctgaaaggccaaggctgcagtgagccatgttcacaccactgccctcaggctggg

SEQ ID NO: 215375 - DNA, 201 bp, Homo sapiens
tgcagcagcacagtagccaaacacagttgataaattacgtttatttcattttgacaaaaagagtaaatatattcttgtacaaaaatattcaaaaagtttaatgtaaagaagtaaatttaaatcacctgtaatctcaccatctagaaatacactcatttaaatagaagctgccactttactttttttttttttttaaatgtc

SEQ ID NO: 215376 - DNA, 201 bp, Homo sapiens
tagttaagaaacttacttaaggtcatacgatctgtgctagctttcagattcagggaacttgacttcagaaaccatactcttaaccagtatgccaaaccaccttctatgaatttgaaaccacctcccatgaattgatgaattcataattcatcagttggtgttaatggaagtggtggaatatagccctgaggccaagttcta

SEQ ID NO: 215377 - DNA, 201 bp, Homo sapiens
attatcaaactaatacatactgtggtagaaactgccagttatttcccagcatgcatctgtccccttttttctttagtaatagaaaccctgaacttgcgctstacacatggtccctactatggtctgaatgtttgtatccctccaaaatcatatgttgaaatccgttccccagtgtgatggtattagggagtggggcctttt

SEQ ID NO: 215378 - DNA, 201 bp, Homo sapiens
ttgaacatattttcataaaagtaaattatagcaattgcaaaaatgtgaaatattaaattatatttttcaaaaatgtcatttatcttctaagatatctcaasttgtctattgtaagatgaactaccaattataatttatgaatgtatttaatctgaacatttaaactttaatctattgaaaatcttataatttaatcttata

SEQ ID NO: 215379 - DNA, 201 bp, Homo sapiens
atttgtcatgttctgtccactaaatagctttgttattattgaggtctaagctctgattttttatcttatccaaattcctaccttaggggtctagggagtcrtgtcctacaaaccataaattctcatgagatgggttttatttgaccctatatattgtgacttacttttcagtctgactctggcataacattatgagacaag

SEQ ID NO: 215380 - DNA, 201 bp, Homo sapiens
tgcacaagtattgtaagtacttatgagtattgtttattcaaaacagtattaataattttcagtctctaattggaaattaggctcattaagtctttttttttcagtaaaactctgccagtgaatagtcttggaatagcagattaaagatgtatcacttggtaactctttaaagctccattacttgagagtaaagttagcctg

SEQ ID NO: 215381 - DNA, 201 bp, Homo sapiens
ctcacaagtatggtccatggccagcaaccatgggagcgtgttagaaatgtggattctcaggccccaccccagacctcccaaatcagtgtcttcattttaayaagatccccaggattgtgtgcttgccagcagcactggcgtaggcttcacactcccgttcccagcctactgatgtccatacctgacgctctgctttctcct

SEQ ID NO: 215382 - DNA, 201 bp, Homo sapiens
tatctgtgttttttttccatccttctgtcaacggacattcagattgtttctctatcttggctattgtgaataacgctgcaatgagcatgagagtgcagatrtctttacaaggtggcaaattcatttcctctgggtgtatacccagaagagagattgctgggtcatatgacagtactacttttaacttatttagaagcctcc

SEQ ID NO: 215383 - DNA, 201 bp, Homo sapiens
cgctgcaatgagcatgagagtgcagatatctttacaaggtggcaaattcatttcctctgggtgtatacccagaagagagattgctgggtcatatgacagtwctacttttaacttatttagaagcctccctactgttttacataatggctgcaccaatcttcatccccaccaacagtgtacaagggttctcttttctccaca

SEQ ID NO: 215384 - DNA, 201 bp, Homo sapiens
gatattattctttgagttcattgtgaagtgttattttcttttggggttccattctgctttgttttaaggcatggactagaaacagttgaaaagaataatayacaatttcaactttggagcctgaaatattctggctataatttttttttcctaaaaaaagggagaacaaggagagctatataaaatctctgaaatgttttg

SEQ ID NO: 215385 - DNA, 201 bp, Homo sapiens
ggcaaattcatttcctctgggtgtatacccagaagagagattgctgggtcatatgacagtactacttttaacttatttagaagcctccctactgttttacrtaatggctgcaccaatcttcatccccaccaacagtgtacaagggttctcttttctccacatccttgccaatacttgttatctctttttaattatggccag

SEQ ID NO: 215386 - DNA, 201 bp, Homo sapiens
ttcaagaccagcctggccaacatggtgaaaccccatctctactaaaaatacaaaaattagccaggcgtggtggcacacacctataatcccagctactgagraggctgagaaaagagacatgtcaattactaagttgttaccaggacaagttatcaaaaaggacaatgaaagccataaatattttgtagtttatttacccat

SEQ ID NO: 215387 - DNA, 201 bp, Homo sapiens
tctctcctccctttctctctcactaatccaccgatactgctcttgttaaagtcactgatgacctccaagtgttaagtccagtggccaattatctgtcttcrtatctcacttttacctctcagcaacatcttttacctctctcttctccttggctgccaggatactctactgccatgatcttctgcctctcttactgacagc

SEQ ID NO: 215388 - DNA, 201 bp, Homo sapiens
ggtatgaacctgggaggcggagcttgcagtgagctgagatcgtgccactgcactccagcctgggcgactgagcgagactccgtctcaaaaaaaaaaaaaawatgccaatggtataattccaatttcacaaaacaatctcacaagcacttccactctttaggctgaggcaggtgaatcatgaggtcaggagttcaagaccag

SEQ ID NO: 215389 - DNA, 201 bp, Homo sapiens
aatgattaatagatagaagatataggaagagttctctacaggaagtaaagaaagtggagaaggcagaataacaaactaagtaagtcttttaatttgtatgrtctatattttaatctttcgaatgtaaagatagtatcattgatcatatttctgttcatcaatgttacctaaaatagcaaaatgaaatattaatatgtttga

SEQ ID NO: 215390 - DNA, 201 bp, Homo sapiens
caattatctgtcttcatatctcacttttacctctcagcaacatcttttacctctctcttctccttggctgccaggatactctactgccatgatcttctgcytctcttactgacagcccgcccctcccagtctccttccatggttcctcctcatctcctgtttctggataggctggagtcccagcgtatagtgcttttctcc

SEQ ID NO: 215391 - DNA, 201 bp, Homo sapiens
tttgaggggtgaggtgggtggattgcttgagctcaagaattcgtgaccagcctgggcaacatgatgaaaccccatcagtacaaaaaacacaaaaattagcygggcatgggccttactttcttatagctatttttaaaaagagaaaaattttttaaaatgcaatgacagtaagttgcagaaatctgaattaaattgccttta

SEQ ID NO: 215392 - DNA, 201 bp, Homo sapiens
gagaatgaatgaatgattaatagatagaagatataggaagagttctctacaggaagtaaagaaagtggagaaggcagaataacaaactaagtaagtctttyaatttgtatggtctatattttaatctttcgaatgtaaagatagtatcattgatcatatttctgttcatcaatgttacctaaaatagcaaaatgaaatatt

SEQ ID NO: 215393 - DNA, 201 bp, Homo sapiens
tcaagctgcttcacttgagtgtctaacaggcatattaaacttagtgtgttcaaaaccaaagtcttaattttctcccccaactcattccttacccagtactycctatatgagcaaatgcctatatgagcaaaagtccctttcttatagttgctcaagtcacaagcttggtataatccatgaattttgtttctttctcttcca

SEQ ID NO: 215394 - DNA, 201 bp, Homo sapiens
ggcaaaaaccgcaattacttttgcaccaacctaatagtgccagtccaggaacggtggctcacacctgtaatcccaacactttgaggggtgaggtgggtggmttgcttgagctcaagaattcgtgaccagcctgggcaacatgatgaaaccccatcagtacaaaaaacacaaaaattagctgggcatgggccttactttctt

SEQ ID NO: 215395 - DNA, 201 bp, Homo sapiens
acctttgctcatcactaatccacttttgctttgatgggccacctctacatcttggtagccattgctttgattgtgctttgtcttcatgatcatactggtamagccatgattcatctctttacaattctttgaagaaatgctttgggatcttgatcccacttgtttgcaacatccattgaatgctctgcttttgtctgcagc

SEQ ID NO: 215396 - DNA, 201 bp, Homo sapiens
ttcctgttctgttttcttgatttgtctattcctgtgtcaggaatacaccttcaactattgtagctttatattattttataataaatgctaggaattgtccmcctcattttattctcttttagagatttctttgaaatccttgttttatttttttctgtataattttcatttttgaattgacacataataattgtacatatt

SEQ ID NO: 215397 - DNA, 201 bp, Homo sapiens
agcgattctcttgcctcagcctcctgagtagctggacttaacggtgcacaccaccatgcccagctactttttttattttttggcagagatggggtttcacygtgttggccaggctggtcttgaactcctgacctcaactgatccacccacctcagcctcccaaagtgctgggattacaggtgtgagccactgcacccagcc

SEQ ID NO: 215398 - DNA, 201 bp, Homo sapiens
tgtcctaattgttcacctttactgcagaaatcccagactggcaccagtgtggccgaagttcacactgtgttactataaatttacatgatgtagtggatgtyttaagaggtggaggcaatcccatattcaaaattgaaaacaaaaaaaatatttaaatacccaagtgagtaaaaatggactctcctggataagtctggacca

SEQ ID NO: 215399 - DNA, 201 bp, Homo sapiens
aacaacagggatggagtgaggggagacattccagaagatgccaatagtataagttgctaacctaggattaataactcattgcagaaaattcaggagatgamggtctagtctggtactgaattaaattatctacggtatttaatgttttactctagtagatttgctggtttggtgtctaccttaacttaaatatttagagaa

SEQ ID NO: 215400 - DNA, 201 bp, Homo sapiens
tcacttattatttactgagcatctgccgtggggagcattgtgctaggcactttaggaaatttttttaaaaaggataaagtccttgaccttgaggagataayagtctagctgaggcaataaaacttatgcctgtgaaagttaattaccaaaatagggagtattctgtcaaatggtaaagaagcgtggtagaatttcggaaga

SEQ ID NO: 215401 - DNA, 201 bp, Homo sapiens
caacaacagggatggagtgaggggagacattccagaagatgccaatagtataagttgctaacctaggattaataactcattgcagaaaattcaggagatgrcggtctagtctggtactgaattaaattatctacggtatttaatgttttactctagtagatttgctggtttggtgtctaccttaacttaaatatttagaga

SEQ ID NO: 215402 - DNA, 201 bp, Homo sapiens
caagatactttcaaatagtagtaagtgccgtgaaggcaataaataaggtcttgcagaagagagtggtggttttccaattctagatggggtaatcagggaarggctttccatggaggtgacttctaagctaagagatgcatggtgaagaggaggctgtcagtgcagagggtctgggaagagctttctgtgcagaggcaacag

SEQ ID NO: 215403 - DNA, 201 bp, Homo sapiens
agtatatttgttacaattgatgagccaatattgatatattattaataactaagctgataggttacattagggttgactctttttttttttttttttttttkaggcagagttttgctctgttcccaggctgctgtgtaatggcatggtcatagctcactataaccttggactcctgggctcaagtgatactcctgcctcagc

SEQ ID NO: 215404 - DNA, 201 bp, Homo sapiens
ggcacctcatggttgccatgtggcccccgcagccccagctatcacatccgcagccacgttgcaagaatgaagactggccaaaggcaaaaaaaaaaaaacamaacactgtactaactgggtcaattgtctttaaagctttttcttaggagctgttattcagtgacatgtgcttcatttagttgcaagagaggatggttaaat

SEQ ID NO: 215405 - DNA, 201 bp, Homo sapiens
ttttttttttttttgagacagagttttgttccatcgcctaggctagagtgcaatggcgcgatcttggctcactgcaatttctgcctcctgggttccagcarttcttctgcctcagcctcctgagtagctgggattacaagcgcctgccaccacactcagctaatttttgtatttttagtagagacaaggtttcaacatgtt

SEQ ID NO: 215406 - DNA, 201 bp, Homo sapiens
caggttgccttttcactctgttgtttcttttgatgtgcggaagcttttcagttggatataatctgttcatttttgcttttgttgcctgtgcttttgaggtyttattcataaaatcttgccccagaccaatgtcctggaacttttctcctatgtttttctctaggagttttatagttttaggtattacatttaggtctttaa

SEQ ID NO: 215407 - DNA, 201 bp, Homo sapiens
tgaaaaggtggtctgatcaatgaattggaagattcagggtactgaaggtctcctggggtcgagtcctagggagaataagctagagggctgagagacagtgrtttgagaatgacctgcaagggattagtcagaatcccattcatgaatccaaggtggtctctaatgaggtagacagaggatagggtaaggtcattgcagggg

SEQ ID NO: 215408 - DNA, 201 bp, Homo sapiens
tcaacccctgcattctccacccttcttaagtaacctgtgttagcaagctagtgtgtattcttctgcttgtctccatgttcacattctctctctcacacacrcacacacacacacacttgcacacacacacttttatggattttgttcaatatttgctttttaaaaatgggatcacggtgtattcccttctctgcatcttac

SEQ ID NO: 215409 - DNA, 201 bp, Homo sapiens
agaggagtattgtcatggtggagaaggaccccctgttgaagctttcctgggcatttttgtgctaagcttttggctttctcaaaacactctcattgtaaacrgattttatcattctttggctctccagaaagtcaacaagcaaaatgctttgagcattctcaaaaactgttgccatgacctttgctcatcactaatccactt

SEQ ID NO: 215410 - DNA, 201 bp, Homo sapiens
gctgtgtcacagggtgctcacatgtcagttagtatgaggtctgagaattgaccgtcggattttacaacaaagagtcactggtgactcaaaaagagcacttycagtggagtggtgggggttgaaatatgtttgaaagggaaagggagaaaagaaatggagattgaatattgacaattcttttgaggaatttttctccaaaaa

SEQ ID NO: 215411 - DNA, 201 bp, Homo sapiens
cttccctcttggggtttacattttagcaggggagaaagataataacaagaaaccaatattgcacattagaaagttataagtgctatggaaaaaacaatagrgcaaggagattgaaagtcctgggggtagggagtggggaggagattgtagtatgaaatagggtggtcagaggaagcctcattgaaaatatgagattttggc

SEQ ID NO: 215412 - DNA, 201 bp, Homo sapiens; identical to SEQ ID NO: 38370

SEQ ID NO: 215413 - DNA, 201 bp, Homo sapiens
ggattgttggttcatatggcagttccatttgcagttttttgaggaatattgttctccatagtggttttgttggtttacattcccaccaacagtgtgtaagtgtttccttttctctgcatcgttgttttttgtctttttgataatagctatcctaactggggtaagatgatatctcactgtggttttgattggcatttcctt

SEQ ID NO: 215414 - DNA, 201 bp, Homo sapiens; identical to SEQ ID NO: 38372

SEQ ID NO: 215415 - DNA, 201 bp, Homo sapiens
gggattgttggttcatatggcagttccatttgcagttttttgaggaatattgttctccatagtggttttgttggtttacattcccaccaacagtgtgtaagtgtttccttttctctgcatcgttgttttttgtctttttgataatagctatcctaactggggtaagatgatatctcactgtggttttgattggcatttcct

SEQ ID NO: 215416 - DNA, 201 bp, Homo sapiens
tgggattgttggttcatatggcagttccatttgcagttttttgaggaatattgttctccatagtggttttgttggtttacattcccaccaacagtgtgtaagtgtttccttttctctgcatcgttgttttttgtctttttgataatagctatcctaactggggtaagatgatatctcactgtggttttgattggcatttcc

SEQ ID NO: 215417 - DNA, 201 bp, Homo sapiens
gtgggattgttggttcatatggcagttccatttgcagttttttgaggaatattgttctccatagtggttttgttggtttacattcccaccaacagtgtgtaagtgtttccttttctctgcatcgttgttttttgtctttttgataatagctatcctaactggggtaagatgatatctcactgtggttttgattggcatttc

SEQ ID NO: 215418 - DNA, 201 bp, Homo sapiens
ttcatttatctattgttggacatttaagttgattccttatcttagctactttgaatggtgcagcaataaacatgggggtgcagatacctcttcaatgtacygatttcctttcctttggataaatgctgagtagtgggattgttggttcatatggcagttccatttgcagttttttgaggaatattgttctccatagtggtt

SEQ ID NO: 215419 - DNA, 201 bp, Homo sapiens
tggttaagagcaagactctttggagccagactctctggggttcacttttcagctctgctcttcactagctgtgtgaccttgcacaagttaattaacctttytgagcctcagttttctcatctataaaatggggataataaatgtacctatatacagtccttaagagaatttaatgaatttatgagaagcagttggaatagt

SEQ ID NO: 215420 - DNA, 201 bp, Homo sapiens
ttctctgcacaacagccaccctaaccccctttcactcagaataaaacccaaagtccttgccatgcagcagttcaaggccccatgtaaactgccccctgctytccgccgtaccatcctctctctctgatctgatcttttatgcccatccaccttgctccctgtactccagccatgctggcctctccttgctatttcttgatc

SEQ ID NO: 215421 - DNA, 201 bp, Homo sapiens
ccctcctcagcctgagtcatcatcactctcttctgagactattgcagtagctgtaagactcagctccctgctttcccctgtgcccccaacagtcttttctytgcacaacagccaccctaaccccctttcactcagaataaaacccaaagtccttgccatgcagcagttcaaggccccatgtaaactgccccctgctctccg

SEQ ID NO: 215422 - DNA, 201 bp, Homo sapiens
gagcaaagcagttgattctaaggggtccaatacctaaaacagatatttgatattgttacatttgaggccctgagttatagaatagtgaagctctagaaatraaattttctgttaaacttattttttatattgccaaggaattctttgcttctgttatcattacagcatattttaaatattgtatcagcatattttatcata

SEQ ID NO: 215423 - DNA, 201 bp, Homo sapiens
cactcatattatagggcaatagaaaataagattggaaaataagttgagacaacataatggaggtctttgaatgccaccgtgaagagtttgggtttgaggtkgttcaaacaagcaaatctaatgcaggtttctgaaaagaggaataatatgagggagtggaatagaaatgacatatattaaagtttaaaagaatcattcaca

SEQ ID NO: 215424 - DNA, 201 bp, Homo sapiens
ttattttttgtagagatgggatctcgctatgtttcccgggctggtctcaaagtcctgggctcaagcagtcttctcacctcagcttcccaaagtgctgggaytactggcatgagccactgtgcctgtccagagttcacttgtgatgttgtacattctactggttttgataaatgtatgatggcatgtgtctaccattatagt

SEQ ID NO: 215425 - DNA, 201 bp, Homo sapiens
tagtatatttgttacaattgatgagccaatattgatatattattaataactaagctgataggttacattagggttgactcttttttttttttttttttttygaggcagagttttgctctgttcccaggctgctgtgtaatggcatggtcatagctcactataaccttggactcctgggctcaagtgatactcctgcctcag

SEQ ID NO: 215426 - DNA, 201 bp, Homo sapiens
ttggttaagtagcttaacatctcggcatcttggcctctaatcatggcagacagctgtgggtggtggcggaaagcagtgacccagaagcccgggatattgcraatgatgtcattcctctgctccaggtagtattcatgaatctgcccaaacctgcgctccacctgcaggagcgccctgtcagcctctgcattcacggagtcc

SEQ ID NO: 215427 - DNA, 201 bp, Homo sapiens
cagattaatgagaagttaagaaaaattaattcatatgaatggaaaccaggggtgtttgggaccacatttgtccttttgaggtgcctcttgtggcaaacagygtttttttgttttgttatgtttttgtttttagttctgggatacatgtgcagaacgtgcaggtttcttagataggtatacatgtgccatggtggtttgctg

SEQ ID NO: 215428 - DNA, 201 bp, Homo sapiens
tttttttttttttgaggcagagttttgctctgttcccaggctgctgtgtaatggcatggtcatagctcactataaccttggactcctgggctcaagtgatmctcctgcctcagcctcctgagtagctgggactaaaaacacgtacatgatgctcagctaatttttttattctttattttttgtagagatgggatctcgcta

SEQ ID NO: 215429 - DNA, 201 bp, Homo sapiens
ccccacaggtttctagagccttctccccacctaggccgtgcgtctcttcacccggaaagccatttttgaggctgccgtcagttgtcagcgaggcagaggcygcttctaggccctccgcgggtggtggagtcacttcctgccccgctttgatggctccatgactgcgacccgcatcgaccaagatgtggaaagtatggccac

SEQ ID NO: 215430 - DNA, 201 bp, Homo sapiens
gacaatataaactgaaaatataaacagattaatgagaagttaagaaaaattaattcatatgaatggaaaccaggggtgtttgggaccacatttgtcctttwgaggtgcctcttgtggcaaacagcgtttttttgttttgttatgtttttgtttttagttctgggatacatgtgcagaacgtgcaggtttcttagataggta

SEQ ID NO: 215431 - DNA, 201 bp, Homo sapiens
caaatacctatttgcacaagtattgtaagtacttatgagtattgtttattcaaaacagtattaataattttcagtctctaattggaaattaggctcattamgtctttttttttcagtaaaactctgccagtgaatagtcttggaatagcagattaaagatgtatcacttggtaactctttaaagctccattacttgagagt

SEQ ID NO: 215432 - DNA, 201 bp, Homo sapiens
ctgagaaattggcttggttttttgatgccctgaaaaaaaaattctcttggccaggaagaaggggatggggatgggtgtatactaggtagtcaatgaacaakctgttacatctttcatattttgatgctatcattttaatggggcttcaggtgaaagaagatagacatgccatgtgtaattgcatggtgaaaattaagcgag

SEQ ID NO: 215433 - DNA, 201 bp, Homo sapiens
tggccttttcctcatggtcaaaaaaggaaaagtgcagctgcacatgatatccacagttaaggcaggaacgagtaaaggattgtgttgcttttcctgacccrccccaaacagatatctacttgtgttccattggctcaaatagggtcatatggttactccttgctacaagggagactgagaaattggcttggttttttgatg

SEQ ID NO: 215434 - DNA, 201 bp, Homo sapiens
taggaatattttcagctataagttaacagaaaactggacttaaaaatggatataaaaaaagggttcatttttctcagtaataagaagtttggaggcagatrgttactggccttagttcagtagctcaataatgtctggaccaatgtctctgtggttgtcttggccttttcctcatggtcaaaaaaggaaaagtgcagctgc

SEQ ID NO: 215435 - DNA, 201 bp, Homo sapiens
gccagaagttcaagagcagtctggtcaacatagcaaaaccccgtctctactaaaaatacaaaaattagccagttgtggtggcacatgcctgtaaacccagstactcaggaggctgaggcatgagcattgcttcaacccaggaggcggaggttgcagtgagccaagattgggccactgcacaccagcctgggtgacagagcg

SEQ ID NO: 215436 - DNA, 201 bp, Homo sapiens
gtgactgggtggggaactggcatttttgttagtgaatctccaaatgtcagatctatgcgttctgtcttctgcagtggtgtctccaaatcctgagtcttctktgaggtccatgggggtaagctgacttgcttctcattatttctgtaggcacttagtctgtaacatcctttggtttactgtatagttactccttctccactt

SEQ ID NO: 215437 - DNA, 201 bp, Homo sapiens
tttgggtggaactaggagaaaaatagaattacaggccaggcgtggtggctcatgcctgtagtcctagcactttgggaggccgaggcaagtggatcacttgmggccagaagttcaagagcagtctggtcaacatagcaaaaccccgtctctactaaaaatacaaaaattagccagttgtggtggcacatgcctgtaaaccca

SEQ ID NO: 215438 - DNA, 201 bp, Homo sapiens
ggagaatgttttttctttgacaatttccttccctatctcttttggaccctcttcttttagaacttctgtatggacctgatcctctatttttttttttttttattacagactggattttaccctgttggccagtctggtcttgaacccctggcctcaagtgatccgcctgccatggcctcccaaagtgctgggattacaggt

SEQ ID NO: 215439 - DNA, 201 bp, Homo sapiens
tgctggttttaaatgcaaatataagacatttttagggataaaagacttataaaaaatgaacaaaaaccaataaatcaaagaaaacatttagctcatatccrgaatcactgatattaccgaacttacatttcatagttcatacatgcatatgtactttgttcttaccagaactgtggaaatgtggcacaaaacaagctcaac

SEQ ID NO: 215440 - DNA, 201 bp, Homo sapiens
aaaaattattttaggttcagcggtactcatataggtttgttatataggtaaactcgtgtcatgggggtttattatacagagtatttcatgacccaggtacwaagcctagtacccaaaagttatttttttctactcctctccctcctcccactctccaccctcaggtaggccccagtgtctgttgttcccctctctgtgtcc

SEQ ID NO: 215441 - DNA, 201 bp, Homo sapiens
aaacacagttttgtattgaaacctagttaacaaatattcctttaactcacaagcttctcttttgcatctcaattatatttgtttttatagaaaggatatcyttatacagctttgctcattcacatgaaaaggaaagtgtgttttcagttggaagatgtggagtcaaaaaatctgaagctgagtttggtatctctcaattgc

SEQ ID NO: 215442 - DNA, 201 bp, Homo sapiens
gagtttgagaccagcctggccaacatggtgaaaccccgtctctactaaaaatacaaaaattagccaggcgtggtggtacacacctgtaatcccagctactkgggaggctgaagcaggagaatcgcttgaacccaggagccagaggttgcagtgagccaagatcatgccactgcactctagcctgggctccagagcaagact

SEQ ID NO: 215443 - DNA, 201 bp, Homo sapiens
cattttcttttagactatgtattcttttgacttttgtctgccttattctagccattgctttgcacaaattatggcactttatgtcatcaaaccatattagytaggaggctgtgggatgcaaataacagagaaccagacttgatctgtcaaaaaataaagggaatttttttcatatacacaactggataattcttcaccggg

SEQ ID NO: 215444 - DNA, 201 bp, Homo sapiens
cgattggctatccagttgttccagtcacccaggctggtgcagatcgtgcagtggcacgatctcagctcactctccgcctcccaggttcaagcagttctccwgccttggcatcccaagtagctgggactacaggtgcgtgtcaccatgaccggctaatttttgtattttcagtagagacggagtttcaccatgctggccagg

SEQ ID NO: 215445 - DNA, 201 bp, Homo sapiens
agcttggagcatatcgggcgctgtactaagtgatctacatatgttatttcatttaataacagcaatcctttcaggaaattttggtttctgactttctaccrtgactttgacctatgtacattttcttttagactatgtattcttttgacttttgtctgccttattctagccattgctttgcacaaattatggcactttatg

SEQ ID NO: 215446 - DNA, 201 bp, Homo sapiens
gcctcagcctctcgagtgcctgggactacaggtgcctgccaccacacccggctaattttttgcattttttagtagagatgaggtttcactgagttagccaraatggtctcaatctcctgacctcgtgatctgcctgcctcggcctcccaaagtgctgggattataggcatgagccaccgcacctggcccgtagttggactt

SEQ ID NO: 215447 - DNA, 201 bp, Homo sapiens
gattaataataaaaggagagagaaaataagcaatatttggagagaaaattatagtcacattgatggtttaaataaatataagacaggatgttagacagctktatgccaatacattttcaaacttagatgaaatatatggcttcatagaaatgtataacttatcaacacggactgaaatgcaatagaaaatctaaatagacc

SEQ ID NO: 215448 - DNA, 201 bp, Homo sapiens
ccactgaagctacctgggcttgacttgagttttaggaaggacacttagatggtttaaggttaatttttcagaggtcaaacctttttttagacctctttgtmgctcttaaaagaatgaaattgttatctaatttttgtttcatcctaagtttaagtagttgccaagtttgtaatgtctggcttgttgaaaatattgatattt

SEQ ID NO: 215449 - DNA, 201 bp, Homo sapiens
cacaatttctttttttccatatgaatatctaattgacccagcactgtttattgaaaagacaattctttccccatgcataggtttttaaatgtttctgtcaraagtgacataaatcattggctacagctagtcagttggccttgtctaactttaataggacagggaggtgtaatcttctcttgagcctggaaggaggaaact

SEQ ID NO: 215450 - DNA, 201 bp, Homo sapiens
atcccagcactttgggaggccaaggcaggtggatcacctgaggtcaggagttcaggaccagcctggccaacgtggtgaaaccctgcctctactaaaaatayaaaaattagctgggcgtggtggcaggcacctataatcccatctactccagaggctaaggcagggagaattacttgaacccaggaggcagaggttgcagtg

SEQ ID NO: 215451 - DNA, 201 bp, Homo sapiens
ccctttaccttagtgtttttctgctctgtttaagaaatcttacctctcacctgggcacagtgcctcacacctgtaatcctagcactttgagaggcggagaygggaggatcagttgagcctaggagttggagaccagcctgggcaacacagcaagaccccatctctatttttaaaaagaagaaaaaaagaggaatcttatct

SEQ ID NO: 215452 - DNA, 201 bp, Homo sapiens
tgaagggataaacaaatgaagaatgaatgactggtatactagtagtggtgatggcgtggcagtgttagttttttagcagaggcaaattttggatttttttwaaaaatctgaagctggagagttttatctcactgatcttcatattgcccaagcttttatttattttgggggatgcaaagtcttttagaaaatttgctaatt

SEQ ID NO: 215453 - DNA, 201 bp, Homo sapiens
ttttcccctttaccttagtgtttttctgctctgtttaagaaatcttacctctcacctgggcacagtgcctcacacctgtaatcctagcactttgagaggcrgagacgggaggatcagttgagcctaggagttggagaccagcctgggcaacacagcaagaccccatctctatttttaaaaagaagaaaaaaagaggaatct

SEQ ID NO: 215454 - DNA, 201 bp, Homo sapiens
gtctggatgagggggatgtggcagtgcccaataacttggagatgccagcaaccacagagccccaaggtgtgttacagcttttgcttggggagtcctgaggyctgagcctccagaaagtgttacactgtcgttcatttctgctgtctgcagcttcagtgaatgggagcgtgtcacaactcattgggtcctgctgcctgcagc

SEQ ID NO: 215455 - DNA, 201 bp, Homo sapiens
aagagttgtttggtaattattttaaaatttttattcataaaagtcgtgttaagatgttttatttaggattgcattttgcttcatttggtggaaatccaatkaaagtaacataaccaaacaggaaggtttttgtgtttttttcctttcaaataacaagaagcctagaggtagtcagtctaggggtggtatagtggtactagg

SEQ ID NO: 215456 - DNA, 201 bp, Homo sapiens
caggtattctgttatagcagcagaaaagagacacacccaggtgtcatcctgggggaaaaggagtgggaagggagctttttggaagggagaaaatacagttytaatagagagtgtgaaccttaaatgatagcatatttacttaaaacacactctttaaaacctttaaaaatatccaggaactaatacatggagaaaagaatt

SEQ ID NO: 215457 - DNA, 201 bp, Homo sapiens
tcagtaaaactctgccagtgaatagtcttggaatagcagattaaagatgtatcacttggtaactctttaaagctccattacttgagagtaaagttagcctrattgacatcttcattaaataggcatctgatgcaattgctgctaggcccaggaatagaaaaaaaatttttttgcatacttatgaccatacttatttccaat

SEQ ID NO: 215458 - DNA, 201 bp, Homo sapiens
aggctgctcctggcagccattctatgcccatgaggagatctagctgcagggtgagcttgacacagtggatggcagagctggaagataggagatgaaaatayatgtgttattcagtggtattgagggccattgttttgggaaaccctgaaatttggttatcaatgccaacaaatctctattgtttaagcctcttggaattga

SEQ ID NO: 215459 - DNA, 201 bp, Homo sapiens
attttagtatgatgtagttaaaataattcaaaatcaaaatgttgctacttacatagcataactgaatttggagctagaaaaaggcaattttaaaagactaytaataataataggagagataaatctacccatagacaattataacatttctgtgccaagtccagagccaacagaaaacatcagaatcttttagtcttataa

SEQ ID NO: 215460 - DNA, 201 bp, Homo sapiens
tatatgggaagacaatttactagcccttgctgaaatacatgttagaaaagcagaaaacttgaataaatgggaaggggtgctatgttttagaagaaaagackccatgttataacaatatcaattcatttcaaattaactaatgcatttaagcaatttttttttttttttttggagacaagagtttcactctgtcacccaggc

SEQ ID NO: 215461 - DNA, 201 bp, Homo sapiens
aatgtttgctggcttctcagttagtaccacccagaaactgaaaaaaatctgttttcttaaaatatgacattggggggaagtagagaaacttttcatttttstgacctattggatttaaaaaaatatatttaaataatgcatttttaatattgctgtttaatgtactgcttatcttaattccatattgctttctgactcttg

SEQ ID NO: 215462 - DNA, 201 bp, Homo sapiens
ccagatgaatagccagttgtcctggcgccacttactaaataatcactctttcccccattgcattgaaatacatttttgtcatacgttaaaatctcatataractggattttatttctgaattctctattctgttccactgatctatttctctgttcctacatcagtataccatattgatttaattatactatctccacagt

SEQ ID NO: 215463 - DNA, 201 bp, Homo sapiens
aggaaatgacaaaaacaattctttgcttttactttttttttttggcaagctccacttttaaaactgtttatttttacagatgtatttcatcagttcttaaraatgaagctaggaatgtttgctggcttctcagttagtaccacccagaaactgaaaaaaatctgttttcttaaaatatgacattggggggaagtagagaaa

SEQ ID NO: 215464 - DNA, 201 bp, Homo sapiens
tgttttttgcaataagagcaatgctgcaataaaattttattggtgattttattttgattgcataggttcccaggagtgtgatttgttggttgaagtggctrtgtatttttaatgtaaaaatatttgtcagactgctttacaaaacagctgtaaacaatttacattgttttcctcctcatcctgtcagcaattggtattgta

SEQ ID NO: 215465 - DNA, 201 bp, Homo sapiens
gcctcttgcatatgttattgtcagtaagccaaattaaagataatggtagctagcatttttactaacttggattcaatatttagtgcaactctgcagtaatmaagatgtgaattatactgtagcactccaaaattgagtgaataggacatgaaacaaaagccatgaaccatgattcttatcagtttggattttttccagaac

SEQ ID NO: 215466 - DNA, 201 bp, Homo sapiens
tgtgaagaaattctcagagttgggagtagcatttctatgtttaggaatggacttcccacttgggctggcctcgagaagaattgtggcttccctctccaatytgtatgtcctgtggcatctcctccagcgttagggagatgtccagggcccaagtaattctcatttgaagtgttgtgacagatgcgtagtgccttaggatgg

SEQ ID NO: 215467 - DNA, 201 bp, Homo sapiens
ctcggctcactacaacctctgccttccaggctcagatctccccgactcagcctcccaagtagctgggactacaggtgtgagccaccgtgcctggccttatraggctactttaatgtttcattggacagtaagaatagtattgatggaccagattttgtttgtagattacaatcaaactaatatgtttgtaggcaggcctgt

SEQ ID NO: 215468 - DNA, 201 bp, Homo sapiens
gctgggattacaggtgtgcgccaccacacccagctaatttttatgtgtgtgtgtgtgtgtgtttgtgtatgtgtgtgtgtatatatatgtgtatgtgtgtrtatatagtgtgtgtgtgtgtgtgtgtgtgtgtgtatatatatatatatatatatatattttttttttttttttagtagagatgggtttttgccatgttgg

SEQ ID NO: 215469 - DNA, 201 bp, Homo sapiens
caagcaattctcctgcctcagtctcccaagtggctgggattacaggtgtgcgccaccacacccagctaatttttatgtgtgtgtgtgtgtgtgtttgtgtrtgtgtgtgtgtatatatatgtgtatgtgtgtgtatatagtgtgtgtgtgtgtgtgtgtgtgtgtgtatatatatatatatatatatatattttttttttt

SEQ ID NO: 215470 - DNA, 201 bp, Homo sapiens
catagtgaaaccccatctctactaaaaatacaaaaattagctgggcatggtggcagatgcctgtaatccgagctacttgggaggctgaggcaggagaatcrcttgaacttgggaggcagaggttgcagtgagccgagatggcgccactgcactccagcctggacgacaagagtgaaattccatctcagaagaaaaaaaaag

SEQ ID NO: 215471 - DNA, 201 bp, Homo sapiens
gtgtattgaatacaaagtatgggactttctacatgttctggatggaagaaatcctctaggcaacggtacatatgttgcactgcaaaacaaaacacgctaaygttgcataatgaagtggttcccaggatttagcagattaagcgccacgtcgtgttttaaaatttatttatttagtttggagacggagtcttattctgttgc

SEQ ID NO: 215472 - DNA, 201 bp, Homo sapiens
gaatttcaccatattggccaggctggtctcgaactcctgacctcatgttccgcccacctcggccaaagtgctgggattactggcatgagccactgcgcccrgccatgggatttttttttttttatgattttttttttcagctcatcagctgtcagtaatattagtgtattttatgtgtggcccaacgcaatttttcttctt

SEQ ID NO: 215473 - DNA, 201 bp, Homo sapiens
gaagggagggagggagagaaagaaaaagtccattccaacaggcactgggtattggatattatgggagtctcccataaagtataaggggcccataaccaggrgactgagacttcacagtaaggaacccagccagtagaaactgggatacagggcaaggaaactttccagtaacagtggactggaataaaatcagagcaaaat

SEQ ID NO: 215474 - DNA, 201 bp, Homo sapiens
tgtgcctggctcagacagtcttgattactgtagttttatagtaagttttcaaattgaaaagagtgagtcctccaactttagacttctttttagattgttayggctattcgtgttgccttgcaaatccatatgaattttaggatcagcttgtttatttctgcaaaaaaggctgttggaattttgataggtattttattgaca

SEQ ID NO: 215475 - DNA, 201 bp, Homo sapiens
aaagacttgttctttctagttggagtttaaaacttcaccataaaaatgtgaagaatgtgtcttttatttcccttataactgcctggcattcggtgagctcytttgatctaaaaaactcaattctttcttcacttcagggttttcctatttgattattgcttctgctcttttctctcttgctggaaatgctatttgcttatt

SEQ ID NO: 215476 - DNA, 201 bp, Homo sapiens
acttgggaggctgaggcagaggaatcgcttgaacctggaaggccgagactgcgccactgcactccaccctggcaacagagcaagactccatttcaaaaaamaaaaaaatatgcacactaattctggctctcctgcttttgaaggtatcacacatataatactctttgtgataaagccttaaattatcagagtggtaatact

SEQ ID NO: 215477 - DNA, 201 bp, Homo sapiens
tgcatgtgatttgctgttccttgatgtcaagcttgctgttcatctgaccctcaagatccagtcagagtcttcagtcacactcaccctctaatttttttgtrtgtgtgtcaccaagtttttgtcttctgtaattcagttcacactaaaaaaaaaaaaactttttatttcccccctatatccctaaagtggttcttcctcttt

SEQ ID NO: 215478 - DNA, 201 bp, Homo sapiens
tcggctcactgcaagctccgcctcccgggttcacaccattctcctgcctcagcctccagagtagctgggactataggcgcccaccaccatgcctggctaawtttttttgtatttttagtagaggcagggtttcaccatgttagccaggatggtctcgatctcctaacctcgtgatctgcctgccttggcctcccaaagtac

SEQ ID NO: 215479 - DNA, 201 bp, Homo sapiens
tatgcatacagtattacataatattctatgtcataaatcaaattttatgggagtaggcatttgttgcattgtgtcctcatacccaattgtgtgattgtgtrtgtgtgtgcatatatgttcattgaggcaatttgtaatagaaagtttattggattttactttgatttctcctttattaaagtattgaggaaatgacaaaaa

SEQ ID NO: 215480 - DNA, 201 bp, Homo sapiens
tatgttgcccacgctggccttgaacttttgggctcaagtgatccttccaaggagctaggattacaggtgaacaccactgtgcctggctcagacagtcttgrttactgtagttttatagtaagttttcaaattgaaaagagtgagtcctccaactttagacttctttttagattgttacggctattcgtgttgccttgcaaa

SEQ ID NO: 215481 - DNA, 201 bp, Homo sapiens
attctctggaagaatttatataagacaggtttttttttttaattaagttttggtttgaatcaaccagtgaaacctcctagactcacaagttttttttgttytgttttgttttgttttgagatggagtctcgctctgtcacccaggctggagtccagtggcgcaatctcggctcactgcaagctccgcctcccgggttcaca

SEQ ID NO: 215482 - DNA, 201 bp, Homo sapiens
ataaaagtgcctggcacaaagaggctcccaataaaaacattattatgtctgaaaggaaattcagaatttccatttgacttaataggaattcatcagctccrgaagctgggtgaagaaaagaaacaagatagggcaacagctagaggagaattcaggtgagaggtttctactttcaaatgagaagggcttatacatcctaaa

SEQ ID NO: 215483 - DNA, 201 bp, Homo sapiens
atcaacatgataatgatgaaatgctaaaggcaaatataactcaagctaggaacaacttacagatatttgccatcaccaccatttaacataaacggcccacratccttatttccaaatcttgagttttaagtcaagttaataagctgttaaaggaaatatgttctgtatgttctatatctccgccttgataactaaaccttt

SEQ ID NO: 215484 - DNA, 201 bp, Homo sapiens
ttaccagggagacctggccccatagctctggaaatacttcatatggaaaggataaaggatatctatgttaaaccaacatcaacatgataatgatgaaatgstaaaggcaaatataactcaagctaggaacaacttacagatatttgccatcaccaccatttaacataaacggcccacgatccttatttccaaatcttgagt

SEQ ID NO: 215485 - DNA, 201 bp, Homo sapiens
caccgtttggtgtctggacagccttgtctcttgggcctggaggggtaaagcagagtcagtcacgcaaagtcacataactggcagagactccttgaatttaraacagtttgtttaaccaagtggaagttgtttttttttctttttcttggcttattatttgcctatagcggcagtgcccatcttggggcagatccaggtttc

SEQ ID NO: 215486 - DNA, 201 bp, Homo sapiens
tgggcaagttggaatttgtagggaaggctggcaggctagaaattcaagtaagagttgatattgtagtcttgattctgaagcctggaaatggttagaacttstatgttgtagtctggaggcagaatttcctctctcagaagcctcagtctttgttctttaagttcttcaattggttgggtgacacccacccacattatggag

SEQ ID NO: 215487 - DNA, 201 bp, Homo sapiens
tgtgtataaagagaatgtgaggaaatggctcatgcaattatgatggtgggcaagttggaatttgtagggaaggctggcaggctagaaattcaagtaagagytgatattgtagtcttgattctgaagcctggaaatggttagaacttctatgttgtagtctggaggcagaatttcctctctcagaagcctcagtctttgttc

SEQ ID NO: 215488 - DNA, 201 bp, Homo sapiens
actgcattattttaatgtaagcttgctttttgatggggcatgcacactgcctcctcaccctcttatacctgaaactttccatatttttgttaattcccctrtccttgaagacatttggattttaagtttggggccttgggctcagtatatcgttgtaatttatttgtttgcaaataattttcttaaatattcataatgaat

SEQ ID NO: 215489 - DNA, 201 bp, Homo sapiens
ttatcaaactaatacatactgtggtagaaactgccagttatttcccagcatgcatctgtccccttttttctttagtaatagaaaccctgaacttgcgctgyacacatggtccctactatggtctgaatgtttgtatccctccaaaatcatatgttgaaatccgttccccagtgtgatggtattagggagtggggccttttg

SEQ ID NO: 215490 - DNA, 201 bp, Homo sapiens
gttttgcaggctgggtaagcaaagtataggataccatcatagttggccaatatagaacagcttatcatggtctagatagggaaaacataaccaagaccaaygatacttcccagcctacatggttcaaagtattaacataatgtaatctacactatagagattctaagaatcatttccatttcagttagtttccattagtac

SEQ ID NO: 215491 - DNA, 201 bp, Homo sapiens
tgcatgctattccgttgtgtggatctaccacagttgtttatctattcccaatgttttttaattgctatatcctctcctctaaatttaagcactttttttttctgtcatttggcttttgagtacgaaaaagtaaatttccaaatttaccatgtgttctaggtagaaataaaaactaagttgcaataggtactaataagctct

SEQ ID NO: 215492 - DNA, 201 bp, Homo sapiens
tcttacttagcataatgcatttgtgattcatacgtgttgttgcttgtatccctggttcattcctttttattgctgcagctgcatgctattccgttgtgtgsatctaccacagttgtttatctattcccaatgttttttaattgctatatcctctcctctaaatttaagcactttttttttctgtcatttggcttttgagta

SEQ ID NO: 215493 - DNA, 201 bp, Homo sapiens
aatttgtaatagaaagtttattggattttactttgatttctcctttattaaagtattgaggaaatgacaaaaacaattctttgcttttactttttttttttggcaagctccacttttaaaactgtttatttttacagatgtatttcatcagttcttaagaatgaagctaggaatgtttgctggcttctcagttagtaccac

SEQ ID NO: 215494 - DNA, 201 bp, Homo sapiens
agttttctgtccttatagtttgccttttccagaaagtggagttacacagtatgtgtgagtctggcctctcttacttagcataatgcatttgtgattcataygtgttgttgcttgtatccctggttcattcctttttattgctgcagctgcatgctattccgttgtgtggatctaccacagttgtttatctattcccaatgt

SEQ ID NO: 215495 - DNA, 201 bp, Homo sapiens
caatttgtaatagaaagtttattggattttactttgatttctcctttattaaagtattgaggaaatgacaaaaacaattctttgcttttactttttttttttggcaagctccacttttaaaactgtttatttttacagatgtatttcatcagttcttaagaatgaagctaggaatgtttgctggcttctcagttagtacca

SEQ ID NO: 215496 - DNA, 201 bp, Homo sapiens
gccttggcctcccaaagtgctgggattacaggtgtgagccaccacacccggcccaatgaatttttaacaaatgcatacagtcatgtaatcctcaccacaamtgagatatagaacagtcccatcaccccgaagttcttcaccccccattgtagcactctcccctctactcctggcccttggcaactgacaatcagttttctg

SEQ ID NO: 215497 - DNA, 201 bp, Homo sapiens
ggatcctggtttgctacttctattattgctctctttcacatcatcacctttttttttatcccatcattcccataggcacacaaatatgctcttgtatctasaattgttttttaaaagatgtcctctagagctacatcatctccagccctttatagcacatctccttgataaagctatgttgactgtttcttctttctcacc

SEQ ID NO: 215498 - DNA, 201 bp, Homo sapiens
atatatacaaacatataatttttgtgcttataactctatacaaataaaactaaaacaataaatataaatagaattacaaaaccattacattcaaatgagcrgtgttataattcacttccaatatgttttagtgggatgggtgactctgctttgttgaaatagttgttgatttaggggattatagtagaaagatgttgccac

SEQ ID NO: 215499 - DNA, 201 bp, Homo sapiens
ctcttttttaaaggccaaattacatattctatagtattctatagatcctatattctctctataattctattatatttaatatgtatatctgtgttttttttccatccttctgtcaacggacattcagattgtttctctatcttggctattgtgaataacgctgcaatgagcatgagagtgcagatatctttacaaggtggc

SEQ ID NO: 215500 - DNA, 201 bp, Homo sapiens
tgctgctgtttcatggactactctttaaataggaaagagatggactacgtgtttctaatttctgtttactgccattgcaagtgctttctcttttcataackctaatattctggcctgttagcggttgaggaactcagaggggaatatacacaatacaacctagaccaaaactttcagtctacttacttggtcagtgtctta

SEQ ID NO: 215501 - DNA, 201 bp, Homo sapiens
caaaagaacttaaaaatacattttatttattacccaagtaatacatgtttacttttagaaaaatcagaagatatagattaaatcaaaagaaaaatacttaytatgataccatgataccatcttgtagatagctgctattgtggtttgggcatatattcttccagacttgtaacttcacaataaattgtgtaaatttataac

SEQ ID NO: 215502 - DNA, 201 bp, Homo sapiens
caccaacttgaacagtgtgatggagcgtgcatcagatctgtggtaccctacgagattttaattttctccttttgatgcaattcttacctgaaatataaacycttttcaaatctctcccagacctttctttaagggggagtcagccattgcttctaaactttagtgggcataagaattgcctggaaagcatgtgaaaacaga

SEQ ID NO: 215503 - DNA, 201 bp, Homo sapiens
atgttcagaaaatcttttgtcaaagagtgagtaataagtttctatttttccaaaagcagtttaactaagtattaggtgttcagggaccagattcttattcragtcttatttttaagagtttgaagtcaataacttattttctttgtccctcatctcttttattccacttataaagtatgcacactgggctgaacaaagtgg

SEQ ID NO: 215504 - DNA, 201 bp, Homo sapiens
cctctttttctcaaagttttttggcttgtctaacagctgatcatcttccagatatgtctagaataatttgtcaaattatacaaatattttacaacttgacrttttattggaattatattaaatatgaagattaatttggggagagtgacatatttataatattgtcccatcaaataatataaaatatatctctattgatga

SEQ ID NO: 215505 - DNA, 201 bp, Homo sapiens
actgaggggcatgttgtcagtttccctctttgggcagctccagtatttctactagtaagtggtacagatggagggagaaatctacgtgacaggctgcctargctgtgccaatgtcaggtccctttagggtgcaggaggggagagttgcctttttatcatgcatggttttttccatgtaattcgtctgacttgtgaaaaaaa

SEQ ID NO: 215506 - DNA, 201 bp, Homo sapiens
gcttgggtcacaggatgaatttgagtaatcaatccttaagtgaaagcaaagagagaatactggaagatgtgacagaggtcagccctgggaatggaacatgkagtcttttccaatttgatgttcttgtcccaggtttagatttggcagcagctacctccctcctttaagtcctcaccaccattcccttacaacaaatcaaca

SEQ ID NO: 215507 - DNA, 201 bp, Homo sapiens
tcatcttccagatatgtctagaataatttgtcaaattatacaaatattttacaacttgacattttattggaattatattaaatatgaagattaatttgggragagtgacatatttataatattgtcccatcaaataatataaaatatatctctattgatgaatcttttttttttaactcctaatcacgtttacattttttt

SEQ ID NO: 215508 - DNA, 201 bp, Homo sapiens
tctgcctcccgggttcaagcaattctcctgccttagcctcccaagtagctgggattactggtgcccaccaatacgcctggctaatttttgtattttaagtrgagacagggttttgccatgttggccgggttggtttcgaactcctgacctcaggtgatccatctgcctcagtctcccaaagtgctgggattacaggtgtga

SEQ ID NO: 215509 - DNA, 201 bp, Homo sapiens
gtaggatatgaggtagaggaattagggggctgtggcaaccagaatacatttcatttccagtgtagtgggagcccctgtgggcttttaagctggggaaggaratgctttgatttttagttaagaaaaggaaaccatgttgggtgctttatggagaatacactgtaaggggggcagaattggaagcagggaggctagttaagg

SEQ ID NO: 215510 - DNA, 201 bp, Homo sapiens
ctagagccttctccccacctaggccgtgcgtctcttcacccggaaagccatttttgaggctgccgtcagttgtcagcgaggcagaggccgcttctaggccstccgcgggtggtggagtcacttcctgccccgctttgatggctccatgactgcgacccgcatcgaccaagatgtggaaagtatggccaccatctgcgggat

SEQ ID NO: 215511 - DNA, 201 bp, Homo sapiens
ttggatgtcatttttaacttcgtcttttgtattcaaaagttgaattgctagtgatctttattttggtagtttttaaaggaaataagtgtataatatattayccatactaaatgagaggacccactgacaaggattacttccaattaatggtaatcattttggggtctggaataccttaagtattttttttttacttgtttc

SEQ ID NO: 215512 - DNA, 201 bp, Homo sapiens
ggagttcagtggtgcaatcacagctcactgtggcctctacctcctgggctcaagcgactttcctaccttagcctcccgagtagctaggaccacaggtgcayaccactgtccctggctattttttttttgtatttttttggtatagatggggtttcaccgtgttgcccaggttggtcttgaattcctgagctcaagcgatcc

SEQ ID NO: 215513 - DNA, 201 bp, Homo sapiens
agaggtagatgagctccctgaaagatggagttgactagaaaatcttcagtgtaagaggtgggacttgagcagacccttaagagataggtcaaatattatasagaggcattgagtgcttgttttgcaagtgagaagcactttttttttgtttttgaatcattagaccagcttagcaaaaattaatgcactcatattataggg

SEQ ID NO: 215514 - DNA, 201 bp, Homo sapiens
ctcaggttggtcttgaactcctgagctcaaagtgatctgcccaccttggcctcccaaagtgctgggattacaggtgtgagccaacatgcctggccccaaamattttcttatccctcctgtaatccctgtctccagccccttccctcctacccctgctccacacctgatctactttctgtcactacagattagttgcattac

SEQ ID NO: 215515 - DNA, 201 bp, Homo sapiens
atttattgatttgtgtatgttgaaccagccagccttgcatcccagggatgaagcctacttgatcgtggtggataagatttttgatgtgctgctggattctstttgccagtattttattgaggattttcacatcggtgttcatcaaggatattggtctaaaattctctttttttgttgtgtctctgccaggctttggtatca

SEQ ID NO: 215516 - DNA, 201 bp, Homo sapiens
acaaatttagcttccacacctggagagggagcagtatgtggatgagtagaataaattgaactctactaatctcttttttcttttatttatttattattatrctttaagttctagggtacatgagcacaatgtgcaggtttgttacatatgtatacatgtgccatgttggttagctgcccaccacccactgacaggcccctg

SEQ ID NO: 215517 - DNA, 201 bp, Homo sapiens
actgaagtgttggccttggttgaatttccttcttttctccaaatcatcaaaactgatgaaatgtcaatcatgttgaccaatttttcacaacaatgtgtgtmacccatggcagtgaagggtgtgaagacaaatttagcttccacacctggagagggagcagtatgtggatgagtagaataaattgaactctactaatctctt

SEQ ID NO: 215518 - DNA, 201 bp, Homo sapiens
atttgataaggatcatttctatatcattgtccaaataattgaggacagctttgaacagcacagggcccagtagcacagtctagacaacactctcctctgawacatttataatcatatctgaaaagatataatggtggcaatcttttggacactgtattacaaaaaatctcaaatccagagaaaagacagagaatagcgtaa

SEQ ID NO: 215519 - DNA, 201 bp, Homo sapiens
tctgagatgatgcccggagagaagcagatagaccatctgcaaggaagagaaggcttggtttcttagagggtgacctactgttttctgttcttgtccttggkttctcacaaaacctttgcatatcctcttatgacatcagtatacattctcctctccccgcctactcctattatacatctacccttcacctctttgagatgg

SEQ ID NO: 215520 - DNA, 201 bp, Homo sapiens
tatctctctaaaagtcctagaaacccatgtaagcatattgaatcagagctattcagcctgacttgttgcagaaaacatactgccttaatccaccaaaacayacacatgtgacactgcattctaaaagtttgaagttttacattcagtttaaacaaccatccagcaatatcagaccctggtccattggcttagtggtgcctc

SEQ ID NO: 215521 - DNA, 201 bp, Homo sapiens
cctagagagggaaccaccagaaaaagcagtcagcatctgagatgatgcccggagagaagcagatagaccatctgcaaggaagagaaggcttggtttcttaragggtgacctactgttttctgttcttgtccttggtttctcacaaaacctttgcatatcctcttatgacatcagtatacattctcctctccccgcctactc

SEQ ID NO: 215522 - DNA, 201 bp, Homo sapiens
ttctccttgagttttcgtagttattctccttgtgtatccccttaaacattcttattacatttttattgtttcttccattaatttggcttttgtaaaagttrcctatctctccattctggtttccctcctttgaattgctaagtcccttaaatgtctacaaagtttctttgctttgttaggtcagggagtatgtattctcaa

SEQ ID NO: 215523 - DNA, 201 bp, Homo sapiens
ggtggttttccaattctagatggggtaatcagggaaaggctttccatggaggtgacttctaagctaagagatgcatggtgaagaggaggctgtcagtgcaragggtctgggaagagctttctgtgcagaggcaacagcaaacagccatgcaccagtgcaggtagtgggatcatctgcctggtgcaggcattatgggcacat

SEQ ID NO: 215524 - DNA, 201 bp, Homo sapiens
tctaattagttaatatttagtcaaagtgcaacattaagcgtatccctaattatatgtatgataggagtttacaaagcaattggtatgggttttatatttayatttatatgtcatatatctttttctgaaaaaaagttgaaactagaacttaaatagcttacatgtttatcctttctatccttgttaggaaaaattccttta

SEQ ID NO: 215525 - DNA, 201 bp, Homo sapiens
cctttctaaggaacatcaagcatagagaaatgattaagcatatttatataatctaacatattaagtgaattacatttaggtgaaattggaaagtcagcacrtattgctttataatgaacatccaagccctgcttgatttgcctaatggactatttgataagggcaaaatacattctgatttaatggaatttctaattagtt

SEQ ID NO: 215526 - DNA, 201 bp, Homo sapiens
ataattctgaacagatattccaataaccttcctgccctccacctcatcccagccaaagccgggagagagggaagacctatactaccaatagttacaaacarttatttttggaattaaaaacaggaatttgcaccatgaacaagtgtctcgttttgtcttctgagcttctcaaaaaccaccattatattgagactataaaat

SEQ ID NO: 215527 - DNA, 201 bp, Homo sapiens
atgagccgagatcacaccatgccactccactgcagcctgggcaacagagcgagactgtctcaaaaaaaaaaaaaaaaaaaaagcttctggaatttcatcasctggaaggaaagccaatgcagacaaatgacacatttttaaattgaagttttcatcattgccatatctcatggccaatcgactcatctaagttttccacta

SEQ ID NO: 215528 - DNA, 201 bp, Homo sapiens
ttatttatttatgtatttatttatgacggagtctcgctctgtcacccaggctggactccagtggctcactcggctcactgcaagctctgcctcccaggttsatgccattctcccgcctcagcctcctgagtagctgggactacaggcgcccgccaccatgccgagctaatttttttgtgtttttagtagagacagggtttc

SEQ ID NO: 215529 - DNA, 201 bp, Homo sapiens
ttggacatggctctttttggaaaatacatttacatccgtattctacatggcactgctctttttgaaattcttctatgatttgatatacactgacataatcrtcccctattaaggttttccatcttcagtgctatgcttctatgttttgcatacatggaaattcattctgcatgcactcatatacagactacaaatttagtg

SEQ ID NO: 215530 - DNA, 201 bp, Homo sapiens
catatctgccattacctctgtcgccttgctcttttctcgggacctctggccctggtgcgggtcttccagagcatagtcgagagtagcggggctgtgaggamtctccgggaggctcatgttggtagcggccagggcagcagtgggtagaggccaggccagaggtaggtagcgtcaacgttcctcacacaaaatggcgagtaa

SEQ ID NO: 215531 - DNA, 201 bp, Homo sapiens
ttttggacatggctctttttggaaaatacatttacatccgtattctacatggcactgctctttttgaaattcttctatgatttgatatacactgacataakcatcccctattaaggttttccatcttcagtgctatgcttctatgttttgcatacatggaaattcattctgcatgcactcatatacagactacaaatttag

SEQ ID NO: 215532 - DNA, 201 bp, Homo sapiens
tatgcttgatataatttcctacataattataaatgaacttctgaagtctgagttacctcatttagtatttggaatatcagaaattttcacttcagaacatyaaaattagtgccttgtgtctttagactctcctccttaattaccacaagatcttttctttcagggtcttattaatatgaatttgactctatgtaaaaatgt

SEQ ID NO: 215533 - DNA, 201 bp, Homo sapiens
tgtggcctctacctcctgggctcaagcgactttcctaccttagcctcccgagtagctaggaccacaggtgcacaccactgtccctggctattttttttttgtatttttttggtatagatggggtttcaccgtgttgcccaggttggtcttgaattcctgagctcaagcgatccccctgcctcggcttcccaaagtactgag

SEQ ID NO: 215534 - DNA, 201 bp, Homo sapiens
ctcctgccttagcctcccaagtatctgggattacaggcctgcgccactgcacatggctaattttttatttttacagcatggtttcaccatgttggccaggytggtctcaaactcctgacctcaggtgatccacctgcctcggcctcccaaagtgctgggattacacgtgtgtgtgccactgcgcctgggcaacttatgatt

SEQ ID NO: 215535 - DNA, 201 bp, Homo sapiens
cagcactttggggggccgaggtgggcaatcacttgaggtcaggcattcaagaccagcctgaccaacatggagaaacctggtttctactaaaaatacaaaamttagctgggcatggtggtgcacgcctataatcccagctactcgggaggttgaggcggaagaattgcttgaacctgggagaaggaggttgcagtgagcgga

SEQ ID NO: 215536 - DNA, 201 bp, Homo sapiens
gtctttagactctcctccttaattaccacaagatcttttctttcagggtcttattaatatgaatttgactctatgtaaaaatgtagatgtagaaataattyattgcagtttctcctaatcagttaaaattttagcattcattgttgggtactttttgattactgttcagccctatcccactgatgttgggtttggccatag

SEQ ID NO: 215537 - DNA, 201 bp, Homo sapiens
gaaatgaataatcttcaaatcctgagcagttgcaagataaggaaaggattaccattctgggggcacagcaatgacagggccctttaactggccacagtgawtgccagttccaaccatttcaggtaatattgtctacagtgtgctgagtgccatgttagttactagggatacacaccatgacaagaaacagtccttcgccct

SEQ ID NO: 215538 - DNA, 201 bp, Homo sapiens
taaaaatgtagatgtagaaataatttattgcagtttctcctaatcagttaaaattttagcattcattgttgggtactttttgattactgttcagccctatyccactgatgttgggtttggccataggatttgctttggtcagtggaatgaatgttagtgatgtgatataaagccttaaatatgcttgcatggtttggcttc

SEQ ID NO: 215539 - DNA, 201 bp, Homo sapiens
tggaggtggggtttcaccgggtaccagcccgtctgcctaggcatttggctgcctcctttctgtatcaatttgaccttcctaaacttcttattcgttatctkttaaataagtattatgtctgccctccctaccttaaaacgttgtaaggtttagatgaaagaaatatacatgaaagtactttgtaacgtacagtacctacag

SEQ ID NO: 215540 - DNA, 201 bp, Homo sapiens
aatagctgactgatatgaccattactatttcaaaaagcacatctatatattttcattaagaaaaagtaaaattatagatggctaacctatcagttctctaktaattgaaaagtagtaacacttaaaacacgaattataaaacaccaattatttgagagtttttcttggctagtggccattacaaattttattgaataaaat

SEQ ID NO: 215541 - DNA, 201 bp, Homo sapiens
cagacagcccccatttagctcaattttaatttttaaaatggaatttcattgaattttcaacattgacaattttgttcaactaaccttaaatggtgagaacygaaagcatctaatataagagctactcttttcttcttagattagaaataagatactttacataactaagaaaaagtctatctttagaattttagttacttc

SEQ ID NO: 215542 - DNA, 201 bp, Homo sapiens
aaaaaaaaaaaaacaaaacactgtactaactgggtcaattgtctttaaagctttttcttaggagctgttattcagtgacatgtgcttcatttagttgcaaragaggatggttaaataattttttagaggggtacattgtcatcgttttgttgtgggtttttttttttttttttttttgagacagagttttgttccatcgcc

SEQ ID NO: 215543 - DNA, 201 bp, Homo sapiens
gcccacttggcccagcagactgcgctcaggctgtgctactggtctggatcctgcgcttgccttggctctgtggtcagcccgcagctggtccaggggtgccrtgaccaacttctaccttggatgctggtgtctggatgagggggatgtggcagtgcccaataacttggagatgccagcaaccacagagccccaaggtgtgtt

SEQ ID NO: 215544 - DNA, 201 bp, Homo sapiens
ccatccattcaatatttattgagtaagctaaactaataggtaaaatatgctggaaccagagcagtgtattgtggttgtgttggctccttgggtgggtgaaacacttttcctgtttttttttttcattcttttgcacacttactgtagaaattttctgaaaggcaagtagtcaaactgactggatagcctaagaaatttgaa

SEQ ID NO: 215545 - DNA, 201 bp, Homo sapiens
ggacttgacccaagtccatctgactccaaaaatcatgctattatcatcactgtgttatttgtgtttgggtggaactaggagaaaaatagaattacaggccrggcgtggtggctcatgcctgtagtcctagcactttgggaggccgaggcaagtggatcacttgcggccagaagttcaagagcagtctggtcaacatagcaa

SEQ ID NO: 215546 - DNA, 201 bp, Homo sapiens
atttaatcccttaagtaagtgtcactggaagcccaagtaatactagctgaaacaaaagagagggtggtttttctcttacgtaagagaagtacagagatacmcagttcatggctcgcatggcagttccctgcttacaaggatcccaaactccatcctccagggcacctcatggttgccatgtggcccccgcagccccagcta

SEQ ID NO: 215547 - DNA, 201 bp, Homo sapiens
gcttgtgggaaactcatctttaatattccatgagtatagtaaaactgtgtttttaacgtaacaaatattgttttatttattaaataaaacatttatttggrggtatattcttacctaattaaagagaatgagtaaaagatgaggcagaccctgaatgtgagatgcgtttgaaaatggggtgtctcaagattctgtaccggg

SEQ ID NO: 215548 - DNA, 201 bp, Homo sapiens
tcccctgagcccaggaggttgaggccacagtgagtcatgatcacaccactgcatttcagcctgggtgacagagtaagatcctgtctcttaaaaaaaaaaaagagtaaaatatcctgagttaatacaataaatacaatagatgtttgcacatctttgagatactaagaaaacatgtctaaggggttttatactatatagttg

SEQ ID NO: 215549 - DNA, 201 bp, Homo sapiens
ttgcatagaataggaactgaatcatgtaaatcaatgctacatcatttgaagtcttgcaggaatggacaagaccagtactcaaagctaacaatattttggcytgattttacataactttcaaatcatcttctcagaaagctaaaccccagctgctcttcaagataagccatgatgacagagtagctataaaagtagtgtctc

SEQ ID NO: 215550 - DNA, 201 bp, Homo sapiens
tttttgacaaacagtgcacaggaaaggcccatgaaacttacggttttttttccatcgagaaaaatattgccttctatttctataagttaattttatttttyaataattctaataattaatgaaataatacctggatgctaagagtcaaacagtgctaaaaatatttaaaaaccagcaactactgcctcttcaacccatccc

SEQ ID NO: 215551 - DNA, 201 bp, Homo sapiens
ggtgcctcaatcttggaattcctggcacccagaattgtgagcaatatgtttctgttgtttatataaagtacccagtctaaggtattttgtttagtagcccraactgactaagacatccccctagcataaggaccgtatttcttagcctgtttgaagcttgtatggccaccaatgagatgtgaatgaaaataatgcatgcat

SEQ ID NO: 215552 - DNA, 201 bp, Homo sapiens
ctacataacccagaggtcacccagaatcactttagcattcagaaatctacatataaattagctcagacccaaattgctgttttttagcatgtgaaagtctsaagctgtccgtacaatttctactaattccccggccttacagtcatgtggtccccttcatatgtccttggaggccaccttgatttgccatgtcagtctgag

SEQ ID NO: 215553 - DNA, 201 bp, Homo sapiens
ctagagctcgatgtagaagtggccaaggtctctgttgcaactgcattacagttcacctctccctctgtcaatccagcttccctctcctttcacaggcactsttcccaagggcacttcacaacaaacccgcatgcaaatctcagaatctttgtgctagggaacctgacctatgacatatacagatttagagatttgggatta

SEQ ID NO: 215554 - DNA, 201 bp, Homo sapiens
taaaccatcagatctcatgagaactcatttactatcacaggaacagcaagggggaaatccgcccccaagatgcagtcacctcccaccaggcccctcccttsacatatagggattacaattcgagatgagatttgggtggggacacacagccaagccctatcagaatggttacaacatttcacttttaattatgacatgttg

SEQ ID NO: 215555 - DNA, 201 bp, Homo sapiens
gtgtttaatgagctggagggttaccaaactatgaatccttgaagtccaagagaggccagattcagtaatatggggaaaaatgtcctgtgtacacaatgacrttttcaaaagccttgtgttttcagcttcataatttccactgctctttgtagtcttttttcttttaaattaaaaaatagctaacatttattgagcatttac

SEQ ID NO: 215556 - DNA, 201 bp, Homo sapiens
attctcatttgaagtgttgtgacagatgcgtagtgccttaggatggttcgtgaagttcttagggtagcgttccaggcaaaaagattgccatctcctttttrcagttaagtgctttatttatctaattgtaattttatttttcctgccaatgagagtgtgtttaatgagctggagggttaccaaactatgaatccttgaagt

SEQ ID NO: 215557 - DNA, 201 bp, Homo sapiens
ccaatttgtatgtcctgtggcatctcctccagcgttagggagatgtccagggcccaagtaattctcatttgaagtgttgtgacagatgcgtagtgccttargatggttcgtgaagttcttagggtagcgttccaggcaaaaagattgccatctcctttttacagttaagtgctttatttatctaattgtaattttattttt

SEQ ID NO: 215558 - DNA, 201 bp, Homo sapiens
ggctggaggtagtggctcatgcttgtaatcccagtgctttgggaggctgaggcagttggattgagtgaagccagaagtttgagactagcctgagcagcatrgtcagactccatctctacaaaaattttaaaactatccagacgtggtggtgtgcacctgtagttctagctacttggaatgttgaggtgagagaattggtta

SEQ ID NO: 215559 - DNA, 201 bp, Homo sapiens
cagtgggacagtctcacctcactacaacctctgcctcctggattcaagcaattctcctgcctcagcctcccgattagctaagattacaggtgcccaccacyacgcccatctaattttttatatttttagtagagatggcatttcaccatgtttgccaggctggtcgtgaactcctgacctcaggtgattcacctgcctcga

SEQ ID NO: 215560 - DNA, 201 bp, Homo sapiens
ttcctacaagagagactttcaatgatagaatacaaactcatgtggtatctcctaaaaatctcaccatttcacatttcaaatgtggaagcttctataaagaytgtatttgtcatgagccttttcacaagaagatgtttagtaccaggtcagcttgttttcatcttgttttcaaagaattggggttaggaaagcaggaaacta

SEQ ID NO: 215561 - DNA, 201 bp, Homo sapiens
tatcatggtctagatagggaaaacataaccaagaccaatgatacttcccagcctacatggttcaaagtattaacataatgtaatctacactatagagattytaagaatcatttccatttcagttagtttccattagtacttaggcttcagagctagggacagtggctcatgcctggagtcctagctactcaggaggcgagg

SEQ ID NO: 215562 - DNA, 201 bp, Homo sapiens
actggcaggtttatctctacccaggagctgcattgaccatgaactttggccagtgatctatgaggaactagggagggatctcagagctgaatccgctcgcytgcatctgtgtcttgtgcatatgcttcacacttcctgtttctaggtcatagtaagtctatgtgaaagtaatcctgaaggtagtctatgttcttgttttca

SEQ ID NO: 215563 - DNA, 201 bp, Homo sapiens
tacagacacacccaaaataatgctttatcaggtttctaggtattccttaatccggtcaaattgacacctaaaattaagtccacaaatccagccctggtcartttggcacccatatgtgtctccttaaaccataattcacttccaaataaagacaataacaaggtaatagttctgtttaacatgatgcagctaacatgatgc

SEQ ID NO: 215564 - DNA, 201 bp, Homo sapiens
actctaaagttactcttttttttctctctctcttttcatcctgtactttaaaaaatcttcacattctcaaggagctccacgttttttccccatcaacttcycttgcatcaaggactttgggagagggttaagagagctggggactgagcccctgtgcttttagagtgtttgtaactgtggcctggtttataatgtttctat

SEQ ID NO: 215565 - DNA, 201 bp, Homo sapiens
ctccacgtactcccatcttccccaggggcatgaaccccctttccctttacctataagagtagtgagcagtatacacaaagatccagcttttgaggagcttmtagtcttgaggagaaagcaatacattagtaagcaacatagtatccaaaaccaatgcatgctctgagaagacagaacgaaggttgtgtgacaggagtgctt

SEQ ID NO: 215566 - DNA, 201 bp, Homo sapiens
gtcaatctgacttatcactgttgatgttaaccttgatcacctggctgtgatagtgtttgtctggtttctccactctaaagttactcttttttttctctctytcttttcatcctgtactttaaaaaatcttcacattctcaaggagctccacgttttttccccatcaacttcccttgcatcaaggactttgggagagggtta

SEQ ID NO: 215567 - DNA, 201 bp, Homo sapiens
ttatcctgctttgaaaactgccacaataagtcaccaaaacacgtaatgtaaaatacgaaagtggtggcaaagatcacctgacagaatggtccactagagasaaatggcagtagtgaaggagtctgtgtgtgtgtgtgaatgtgtgacatttattatgggtgttctttgtgctgagcatttcactgttgtttacttaatcat

SEQ ID NO: 215568 - DNA, 201 bp, Homo sapiens
aggcaggtagtgtctttattcccattttggagatgaagaaatcaaggtatacagtagttaagaaacttacttaaggtcatacgatctgtgctagctttcakattcagggaacttgacttcagaaaccatactcttaaccagtatgccaaaccaccttctatgaatttgaaaccacctcccatgaattgatgaattcataat

SEQ ID NO: 215569 - DNA, 201 bp, Homo sapiens
ttgtaatgtctggcttgttgaaaatattgatatttataaatgaaaatattaagtcactctgagatttatgcaatggaatataaatagggtagtgatttaayatccaccatcttcatttaaaataaaactcttcaacaatgggaaattttactcatttcttttcctctttgaatttgattttcatttcacttttcccaccga

SEQ ID NO: 215570 - DNA, 201 bp, Homo sapiens
gctccgccatgacacagcagcggcggcggggagggaggcgaaacgcgcatgcgcccgaggacttggacgggcggaagtacgggaatggggagggaagtggsggagcgggagaggaggggtcaggggactgctgaggaccagaagtgggcggctgctgggtgcgggagtaagcggcacgggggaatgttgaagttgggtagg

SEQ ID NO: 215571 - DNA, 201 bp, Homo sapiens
tattcttttgacttttgtctgccttattctagccattgctttgcacaaattatggcactttatgtcatcaaaccatattagttaggaggctgtgggatgcmaataacagagaaccagacttgatctgtcaaaaaataaagggaatttttttcatatacacaactggataattcttcaccgggttctatctctgtgattctt

SEQ ID NO: 215572 - DNA, 201 bp, Homo sapiens
tagttaggaggctgtgggatgcaaataacagagaaccagacttgatctgtcaaaaaataaagggaatttttttcatatacacaactggataattcttcacygggttctatctctgtgattcttttcactctgtcttcctccatggctctgcttgttgtatcagaaatggctgcagcagttcctgacatgacatctttgtac

SEQ ID NO: 215573 - DNA, 201 bp, Homo sapiens
cacaaattcacaaattcataaactgtcttaaaacattatgaggtttttgttgttgttgttgttattgttgtttttaagacggagtctcgctctgtcacccmggctggagtgcagtggcacgatctcggctcactgcgacctctgcctcccacgttgaagtgattcacctgtctcagcctcctgagtagctgggactacagg

SEQ ID NO: 215574 - DNA, 201 bp, Homo sapiens
attgaaaacttccaataaacacatttttaaaggactgttatattatggctggaccgtgaaccttgagttgtttatccagtagtgctaagagatttgttctratccacctgatttcttttgtgcagtgtttatagtgactaaagaaacgtattttcaagatgattgggctggctatactctgtagctgccacagaagaaagc

SEQ ID NO: 215575 - DNA, 201 bp, Homo sapiens
tggctctgcttgttgtatcagaaatggctgcagcagttcctgacatgacatctttgtactacactctccagaggaatggagagttgctgttttcccagaamgaagctcttggcttccttcgacaggaccagtgtaggtcttgtgctacctctgacaccatcacttagaccaggggcttggggtcattgactggcttatccc

SEQ ID NO: 215576 - DNA, 201 bp, Homo sapiens
taacttgagtaaaaatagcaccataattgaaaacactaagagtagggttttaaggaaagagagtaagattggaacaaagtaaccatgaacttttcagttckgagctgcgagttctgttcattattcagtgaccctttgtgagatcttgtcttagtccattcacgctactataacaaaataccatagactgggtgacttgta

SEQ ID NO: 215577 - DNA, 201 bp, Homo sapiens
tggttggggcttccttcttggttcatagacagctgtcttcttgctgtgtcctcacatggtgcaaagggtgagggagctctctagggtctatttaataagcrcattaagggaatgccttaatgcgcttattaaatgaagttttttgagaaaaaactcaaagtgctttctaaatttatctcactcaaccacaatcagtgcaga

SEQ ID NO: 215578 - DNA, 201 bp, Homo sapiens
gttcaacctgagatggtcctgaattaactagaccatgtttcaggcttctgaatattatttttaagttctgtgtaaggtaaggtataaaagaagaaaaaaaacctccttgcctcaataactttggttttaataaatgcaccaataaatttatttgaaccctgagttaaaatgattcagctctagtggatgaccaaattgagg

SEQ ID NO: 215579 - DNA, 201 bp, Homo sapiens
ttgcttctatgtttataaatgagattggggtgtaagttttctttctagtaatgcccttctcatactttagtatcaaggttatgctagccttgtaagatgarctgaggatggggagaatgtttcctattctctgttttattctctggaagaatttatataagacaggtttttttttttaattaagttttggtttgaatcaac

SEQ ID NO: 215580 - DNA, 201 bp, Homo sapiens
tgactggcttcaagtgggggttcccatgacccctccttgaattcaattaattttctagggtagctcatagaacttggaaacttacatttaccagtttattrtaaaggatattaccaaggatgcagatttagagatgcatagtgcatgcagcttccatgctgtcctgggcgtaccaccctccagaagtctccaggtgcttag

SEQ ID NO: 215581 - DNA, 201 bp, Homo sapiens
cctggaggttagcgggtggggctgaatatcttaaacctgttatcatgccttggtctttccagtgaccagcctccatcctgaagctaccacctgggggttgscaggcatcagtcaatcattagcatatgaaaagacatcacttcggagattctgaggattttaggagttctatgccagaaatctgtgatcaaagaccaaata

SEQ ID NO: 215582 - DNA, 201 bp, Homo sapiens
tgttggttttctttctttttgagacagagtcttgctgtgtcgcccaggctaaagtgtggtggcatgatcatggctcactgcagtttcaacctcctgggctsaaacaatcctcccacctcagcctcctgagtagctgggaccacaggcacacaccaccatgccaggctaatttttgtatttttttgtagagatgggattttg

SEQ ID NO: 215583 - DNA, 201 bp, Homo sapiens
tggtggagtcacttcctgccccgctttgatggctccatgactgcgacccgcatcgaccaagatgtggaaagtatggccaccatctgcgggatcctggggcrcgaccccctcctctggaagccggggcggtgggaacacgattggctccaagcggccatcaaacatatctgccattacctctgtcgccttgctcttttctcg

SEQ ID NO: 215584 - DNA, 201 bp, Homo sapiens
caggcgtgaaccactgcgcccagcccaaatatatatttgttaatatcacagacattcatcccattcatgaaggctcagccctcacaacctaatcacctttkaaaggacccacctccagatactctcacattgggcattggatttcaagataggaattttagagggacataaacattcagaccatagcagatctctttactt

SEQ ID NO: 215585 - DNA, 201 bp, Homo sapiens
caaatatatatttgttaatatcacagacattcatcccattcatgaaggctcagccctcacaacctaatcaccttttaaaggacccacctccagatactctyacattgggcattggatttcaagataggaattttagagggacataaacattcagaccatagcagatctctttacttaggttaaccttgttttagtattaca

SEQ ID NO: 215586 - DNA, 201 bp, Homo sapiens
gtgagtgaccattcctggtagaagataaaatctgtgaccaccgtttggtgtctggacagccttgtctcttgggcctggaggggtaaagcagagtcagtcaygcaaagtcacataactggcagagactccttgaatttagaacagtttgtttaaccaagtggaagttgtttttttttctttttcttggcttattatttgcct

SEQ ID NO: 215587 - DNA, 201 bp, Homo sapiens
gccaggatgttctcaatctcctgacctcgtgatccgcccgcctcagcctcccaaagtgctgggattacaggcatgagccaccgcacccggccgaggtgcaraaatgttaatttgcagatggacacataggaaatggcgaggcgaagaaatgaacccaggcaatctgagcctataaagctcttccttttaaactctacgggg

SEQ ID NO: 215588 - DNA, 201 bp, Homo sapiens
atatctcatggccaatcgactcatctaagttttccactaaatgcatcagactgaatggaaaaaataaactttgttagtgacatcttgaaattcactttcaraagctttgttgcacctaatctgtcattatgatttggggattcagttgaatccattttcttttgcaacatccaccaaatcttcaaataagtgttttataaa

SEQ ID NO: 215589 - DNA, 201 bp, Homo sapiens
tctacatcctcaccaacacttgttattttgtcttttttattataactattctagagtggtaagtggtatctcattatggttttgatttgtatttccctggyggctgatcatgttaaaatcctttcatgtgcttatcagccatttgtatacactctttagggaaatgtctatccagattctttgcccattaaaaaatttggg

SEQ ID NO: 215590 - DNA, 201 bp, Homo sapiens
gcatctcagaattagttctctctcccactccctacaggggttgcgggggaggaagctggaacttctccacgtactcccatcttccccaggggcatgaaccycctttccctttacctataagagtagtgagcagtatacacaaagatccagcttttgaggagcttatagtcttgaggagaaagcaatacattagtaagcaac

SEQ ID NO: 215591 - DNA, 201 bp, Homo sapiens
gccagccagaaatctccacggctagtggcacctctgcccaggctttgcttgggcccactgggcttactctgcccacttggcccagcagactgcgctcaggytgtgctactggtctggatcctgcgcttgccttggctctgtggtcagcccgcagctggtccaggggtgccgtgaccaacttctaccttggatgctggtgtc

SEQ ID NO: 215592 - DNA, 201 bp, Homo sapiens
atctgaggactctgaggaacagtgaacaatgcatctcagaattagttctctctcccactccctacaggggttgcgggggaggaagctggaacttctccacrtactcccatcttccccaggggcatgaaccccctttccctttacctataagagtagtgagcagtatacacaaagatccagcttttgaggagcttatagtct

SEQ ID NO: 215593 - DNA, 201 bp, Homo sapiens
tatcgaccatcttgcccaaggctgagaacaagcctaccaagtatacaattattaaatatcagtgttgaggaaactgaagtttagcagatgtaggctgcccrtgttaggccccaagaagcaataaaaaatggaacactgaggggcctaactatgggggtctgtgaatgaaaggctgtgagtctgtgtctctgggctcctgtg

SEQ ID NO: 215594 - DNA, 201 bp, Homo sapiens
aatttttttttgactgagtttttttagaataagagtagcttatttgactactgatgacacagaattctttcagtgccactttgccagccagaaatctccayggctagtggcacctctgcccaggctttgcttgggcccactgggcttactctgcccacttggcccagcagactgcgctcaggctgtgctactggtctggat

SEQ ID NO: 215595 - DNA, 201 bp, Homo sapiens
aaacacttcatatcgaccatcttgcccaaggctgagaacaagcctaccaagtatacaattattaaatatcagtgttgaggaaactgaagtttagcagatgyaggctgcccgtgttaggccccaagaagcaataaaaaatggaacactgaggggcctaactatgggggtctgtgaatgaaaggctgtgagtctgtgtctctg

SEQ ID NO: 215596 - DNA, 201 bp, Homo sapiens
tgtattttttcatcaagaaaatgttttttaggggcctataaaagtgcctggcacaaagaggctcccaataaaaacattattatgtctgaaaggaaattcaraatttccatttgacttaataggaattcatcagctccggaagctgggtgaagaaaagaaacaagatagggcaacagctagaggagaattcaggtgagaggt

SEQ ID NO: 215597 - DNA, 201 bp, Homo sapiens
caggggtcacccagggcactgtatatctgaggactctgaggaacagtgaacaatgcatctcagaattagttctctctcccactccctacaggggttgcggkggaggaagctggaacttctccacgtactcccatcttccccaggggcatgaaccccctttccctttacctataagagtagtgagcagtatacacaaagatc

SEQ ID NO: 215598 - DNA, 201 bp, Homo sapiens
aaaaaaaaaaacaaaacactgtactaactgggtcaattgtctttaaagctttttcttaggagctgttattcagtgacatgtgcttcatttagttgcaagaraggatggttaaataattttttagaggggtacattgtcatcgttttgttgtgggtttttttttttttttttttttgagacagagttttgttccatcgccta

SEQ ID NO: 215599 - DNA, 201 bp, Homo sapiens
gctttgaatattcaccattcccagagagcctaaatggatttcaaaagtacttgtttgttcccattttcagctaggtagggggaaactaaggcaagggcggsggggaccaaccatgccctctcctcacttcagcatactcagtaccaagctgggagagggaagacactttaatgttacatatccttctgactttttaatatt

SEQ ID NO: 215600 - DNA, 201 bp, Homo sapiens
acagggttttgccatgttggccgggttggtttcgaactcctgacctcaggtgatccatctgcctcagtctcccaaagtgctgggattacaggtgtgagccmcagcgcctggctttttttttttttttttttttttttttttttttttttgagatgagtcttgctatgttgcccacgctggccttgaacttttgggctcaag

SEQ ID NO: 215601 - DNA, 201 bp, Homo sapiens
gcccaccaatacgcctggctaatttttgtattttaagtagagacagggttttgccatgttggccgggttggtttcgaactcctgacctcaggtgatccatytgcctcagtctcccaaagtgctgggattacaggtgtgagccacagcgcctggctttttttttttttttttttttttttttttttttttttgagatgagtc

SEQ ID NO: 215602 - DNA, 201 bp, Homo sapiens
tttttttttctgagatggaatcttgctctgtctcccagtctggagtgcaatggctcgatctcacctcgctgcaacctctgcctcccgggttcaagcaattytcctgccttagcctcccaagtagctgggattactggtgcccaccaatacgcctggctaatttttgtattttaagtagagacagggttttgccatgttggc

SEQ ID NO: 215603 - DNA, 201 bp, Homo sapiens
attacaggcatgagccactgtgcctggcttttttttttttttttttctgagatggaatcttgctctgtctcccagtctggagtgcaatggctcgatctcasctcgctgcaacctctgcctcccgggttcaagcaattctcctgccttagcctcccaagtagctgggattactggtgcccaccaatacgcctggctaatttt

SEQ ID NO: 215604 - DNA, 201 bp, Homo sapiens
atagattctggatattcgagctttgttggatgcataatttgcaaatattttcttccattccataggttgtctgtttactctgctgatagtttattttgctstgcagaagctccttaatttaattaggtcctacttgtcaatttttgtttttgttgcaattgcttttggagtctttgtcatgaaatctttgccagggcctac

SEQ ID NO: 215605 - DNA, 201 bp, Homo sapiens
gcattacccagaaggaattgtgactccatggtccaggggattagagttagtcattaggggtgggaatttcttctcagaacgaagttagagctctgtaaccrtcttatgtgaccaagtagatgtttgagaaagatctggaattaacgtaatgaaggtgagtagcactgagaatgcccatagagtctgtagcttagatggggg

SEQ ID NO: 215606 - DNA, 201 bp, Homo sapiens
atatgggagaaattagccatgtatttataatacgcgtagtaaaagtgcagacgctatgactatattgcatgcttggtgaaagtaatggcaggtttgctatrttcaaaacatttgaattaatctgttcaaaccatgcacagcattacagaattgacattccagcacagtgactgcagtctgcagcagttgcagttttgtcat

SEQ ID NO: 215607 - DNA, 201 bp, Homo sapiens
ttgtttggtttttgcttgttaattcgtttaagttccttatagattctggatattcgagctttgttggatgcataatttgcaaatattttcttccattccayaggttgtctgtttactctgctgatagtttattttgctgtgcagaagctccttaatttaattaggtcctacttgtcaatttttgtttttgttgcaattgct

SEQ ID NO: 215608 - DNA, 201 bp, Homo sapiens
ttaggtaaaatatatacagtcatatgccacataatgacttgatgttttaggtaaaatatatacagtcatatgccacataattcaacattttgatcaacgaygaactgcatatataacagtggtcccacaagattaaaattaatatttttactataccttttttatgtttagatacacaaatgtcattgtgttacagttgcc

SEQ ID NO: 215609 - DNA, 201 bp, Homo sapiens
attaatttgcaaccctttggttacatcttttttcttaccattataagaatttgcttaatatgaatttgtggattaaagtgatttaaagtgctctctatatyagggagattagccctttgtctgtgatatgagatgacaatattttttcccaagtttgacatttttcgtttgaaaaattttttttgtcatgtagattgaaaa

SEQ ID NO: 215610 - DNA, 201 bp, Homo sapiens
acacttggtgatacttggttgccaataccaggtgatagaaaaactttacctccaaatcctgttgcagaaatttttcttaaaacagtttttttttttttttwaaatcacagaatagacacagtctcttaggcggttggaagtatattcacatctccagctagatgggaaaatcttgtgggcagggattgtaatatgactttg

SEQ ID NO: 215611 - DNA, 201 bp, Homo sapiens
atttgtgtacctaaacatagaaaaggcacagtgaaaatatggtattataatcctatgggaccattgtcatacatagtccatcttatttatttatttatttrttcattcattcatttattttttgagatggagtctcgctctgtcgcccaggctggagtgtagtggcgcaatctcagctcattgcggcctctgcctcccagg

SEQ ID NO: 215612 - DNA, 201 bp, Homo sapiens
cacactgtagattgtctgtctcctatgctagactgtaggctgcttgagaacagggactatgtcttactcatcaccgaagaaaagaagatgactaaaacatmatcttggcccttgaagaacttaaaattgagtgacaaatataaactacgaacatctgtaaacaactaagctcaaaatacatttttatgaattataaattct

SEQ ID NO: 215613 - DNA, 201 bp, Homo sapiens
cgatggtcaccctcctcccaccctccaccctcaagtggtcgctagtgtctgttgttcccttctttgtgtccatgtgtacccagtgtttagctcccattttkaagagagaacattggtatttggttttctgtttctgcattaattcgcttagcataatggcctccagttctatccatgttgctgcaaaggacatgatttcac

SEQ ID NO: 215614 - DNA, 201 bp, Homo sapiens
aacagggactatgtcttactcatcaccgaagaaaagaagatgactaaaacatcatcttggcccttgaagaacttaaaattgagtgacaaatataaactacraacatctgtaaacaactaagctcaaaatacatttttatgaattataaattctacagagtatatgctacaagaggtaggaggttttggaaagatgatttag

SEQ ID NO: 215615 - DNA, 201 bp, Homo sapiens
tctgtaaacaactaagctcaaaatacatttttatgaattataaattctacagagtatatgctacaagaggtaggaggttttggaaagatgatttagaagayacggcatttcagtttagaaggaatggtgtgatttccatggttgaggtgggcaaatgaatccaaggttaaggaacatcatgagcaaaggcacagaatcggg

SEQ ID NO: 215616 - DNA, 201 bp, Homo sapiens
cagatcacttgaggtcaggagttcaagaccagcctggccaacatggtgaaaccacgtctctactaaaaaaataaaaaaatcacccaggcgtggtggtacaygcctgtaatcccagctacttgggaggctgagggaggagaatcactgaaaccgggaagcagaggttgcagtgagcagagatcacgacattgcactccagcc

SEQ ID NO: 215617 - DNA, 201 bp, Homo sapiens
gtcattttttataaaaattgcttctatattttgatgtacatttctcaaaactgttttgtcaaaatattcactttttccattgtcttcagacaaaaccactrtgtcaaatctgctgtgtccaggccaggcacagtggctcacacctgtaatcccagcactttggtaggttgaggtgagcagatcacttgaggtcaggagttc

SEQ ID NO: 215618 - DNA, 201 bp, Homo sapiens
aggcagaggccgcttctaggccctccgcgggtggtggagtcacttcctgccccgctttgatggctccatgactgcgacccgcatcgaccaagatgtggaargtatggccaccatctgcgggatcctggggcgcgaccccctcctctggaagccggggcggtgggaacacgattggctccaagcggccatcaaacatatctg

SEQ ID NO: 215619 - DNA, 201 bp, Homo sapiens
tgggcaacatgatgaaaccccatcagtacaaaaaacacaaaaattagctgggcatgggccttactttcttatagctatttttaaaaagagaaaaatttttwaaaatgcaatgacagtaagttgcagaaatctgaattaaattgcctttaaaaaaaccacatttgtttcttcccaggccatgaaaatgtggaatacaacagg

SEQ ID NO: 215620 - DNA, 201 bp, Homo sapiens
tcacatccgcagccacgttgcaagaatgaagactggccaaaggcaaaaaaaaaaaaacaaaacactgtactaactgggtcaattgtctttaaagctttttyttaggagctgttattcagtgacatgtgcttcatttagttgcaagagaggatggttaaataattttttagaggggtacattgtcatcgttttgttgtgggt

SEQ ID NO: 215621 - DNA, 201 bp, Homo sapiens
tccctgcttacaaggatcccaaactccatcctccagggcacctcatggttgccatgtggcccccgcagccccagctatcacatccgcagccacgttgcaaraatgaagactggccaaaggcaaaaaaaaaaaaacaaaacactgtactaactgggtcaattgtctttaaagctttttcttaggagctgttattcagtgaca

SEQ ID NO: 215622 - DNA, 201 bp, Homo sapiens
ggccgattgttagattctatggtatagagggcattgccagtcacaaaccaatttacctagcttcatggacctccgcagatcttctcagatccttaaacttytttgttgctagtgataattaactgagagatgatattaatattttagatatatatcctttgacagtcagcttcctttcacgactatagttaatagatttaa

SEQ ID NO: 215623 - DNA, 201 bp, Homo sapiens
catctttattaatttcctcttctttctttgtttgttgctcctctaagtcttcaacatgagtcctagttgccgttgtttttagttttttaaagttaataatraaggtgattaggcattttctcctgaatacagtttttttcttttccattggttttggtagtaattgttccttccttgctttctggatagtttgtaatttca

SEQ ID NO: 215624 - DNA, 201 bp, Homo sapiens
tattgctgaattgccaagtattgcttgccaatattttatttagaacttttgtatatatataagtcacgtaaggtttttgttttgttttgttttgttttggkggagtctcgctttgttgcccacgctggagtgcaatggtacgatcttggcttacttcaacctctgcctcctgggttcaagcaattcttctgcctcagcctc

SEQ ID NO: 215625 - DNA, 201 bp, Homo sapiens
tccacccttcttaagtaacctgtgttagcaagctagtgtgtattcttctgcttgtctccatgttcacattctctctctcacacacacacacacacacacacttgcacacacacacttttatggattttgttcaatatttgctttttaaaaatgggatcacggtgtattcccttctctgcatcttactttatcactcaaaga

SEQ ID NO: 215626 - DNA, 201 bp, Homo sapiens
tctgtcgccttgctcttttctcgggacctctggccctggtgcgggtcttccagagcatagtcgagagtagcggggctgtgaggactctccgggaggctcaygttggtagcggccagggcagcagtgggtagaggccaggccagaggtaggtagcgtcaacgttcctcacacaaaatggcgagtaaacacctcgcccatttg

SEQ ID NO: 215627 - DNA, 201 bp, Homo sapiens
ctccacccttcttaagtaacctgtgttagcaagctagtgtgtattcttctgcttgtctccatgttcacattctctctctcacacacacacacacacacacacttgcacacacacacttttatggattttgttcaatatttgctttttaaaaatgggatcacggtgtattcccttctctgcatcttactttatcactcaaag

SEQ ID NO: 215628 - DNA, 201 bp, Homo sapiens
ttctcttctgttggcctcattagctcctttgggaatgtggtcactgctataaaagggccgattgttagattctatggtatagagggcattgccagtcacaraccaatttacctagcttcatggacctccgcagatcttctcagatccttaaacttctttgttgctagtgataattaactgagagatgatattaatatttta

SEQ ID NO: 215629 - DNA, 201 bp, Homo sapiens
tctccacccttcttaagtaacctgtgttagcaagctagtgtgtattcttctgcttgtctccatgttcacattctctctctcacacacacacacacacacacacttgcacacacacacttttatggattttgttcaatatttgctttttaaaaatgggatcacggtgtattcccttctctgcatcttactttatcactcaaa

SEQ ID NO: 215630 - DNA, 201 bp, Homo sapiens
aacttcatgtgcatctgcctacagggtgtttctcttctgttggcctcattagctcctttgggaatgtggtcactgctataaaagggccgattgttagattytatggtatagagggcattgccagtcacaaaccaatttacctagcttcatggacctccgcagatcttctcagatccttaaacttctttgttgctagtgata

SEQ ID NO: 215631 - DNA, 201 bp, Homo sapiens
ttctccacccttcttaagtaacctgtgttagcaagctagtgtgtattcttctgcttgtctccatgttcacattctctctctcacacacacacacacacacacacttgcacacacacacttttatggattttgttcaatatttgctttttaaaaatgggatcacggtgtattcccttctctgcatcttactttatcactcaa

SEQ ID NO: 215632 - DNA, 201 bp, Homo sapiens
ggaacagagagaagctaactgacccatgataagttaaacctcaaatcttaccacttttaatgccacagtaaaattttctaagctggtcaaccacaacaaargtatatttaaaaactaatatgaagtatatcaagaatttaagaactgctgtttcatgaacctatggaatggcagatctgaaagtcatcgtggagatcgttt

SEQ ID NO: 215633 - DNA, 201 bp, Homo sapiens
tattaagaaatggaaattaaataaaatcacccataaacctaccgtttgaaaacaaatttggacaatattttgatgcataatgcaagtttgtatttctcttyctcttttttggggcaagggtcagctaactaaacatttggtttgatattcttcagagttaggttgtaactctctatatatacatagttgtatatatactct

SEQ ID NO: 215634 - DNA, 201 bp, Homo sapiens
ttcacattggagaacccccaaagtacagtcattggacctatcttttctatctagattcattttcttgatgatcccagccaatcttataactttcgatactktctatctgctgacaaattccaaattttatatcctctaaccagactcataggtccaactgcctactcaccatctcgctttggatgtctaacagacatctca

SEQ ID NO: 215635 - DNA, 201 bp, Homo sapiens
tattcttgttttgctcataaggccaaattttcatttaataatatgtgaatttatactcatgatgaaaatcaatcttatatttttaatctataatataggtkggaatgtagcctggaatgactgacagctgttattatacaaatagcacatgctggcaaaatggcagcaatttttgtgatctgtaattaggatattactgtt

SEQ ID NO: 215636 - DNA, 201 bp, Homo sapiens
aattcatgggtgggacagcatgagatttcactatgctactcagaaaggcattcaatttaaaacttatgaattgtttatttctggaattttaaatttaataytgtaggaccacagttgatggaggattaagtgaaactgcagaaggtgaaaccaaggataaatggggaccacctagataaaagttaagtcaggaaacatata

SEQ ID NO: 215637 - DNA, 201 bp, Homo sapiens
ctttccacaaattgttaaatgtgacagcactccctaattaacttcctgcatgctaatcatctcagagcctgtatcccagggtaccctccttatgacagtaygtttgtaagacaaggacttttaataatttgttaggtagtaccaagttgccctttcaaaaagctgtacaattttgcactcccattaccaatgtagaaaagt

SEQ ID NO: 215638 - DNA, 201 bp, Homo sapiens
tattttttcccaatgtattatttttcaattgagatagaatataaattcagcaacattcaccttttatagtgtacaattgaatgattttttttttttttttttgagactgagtctcgctctgttgcccaggctggagtgcaatggcatgatcttggctcaccgaaacctccgcctcccaggctcaagtgattctcctgcctc

SEQ ID NO: 215639 - DNA, 201 bp, Homo sapiens
taaggaagtttcaacattttttacatacatacacaatactaagtcagcgttgtggtgacacactcatagagtcaaatttgcaaaaaaaaaaaaaaaaaaaagcataaaacaaattagaactctaaaactctttacaaagtttatgcttctggccgggtgcagtggctcacgcctgtaatcccagaactttgggaggcctag

SEQ ID NO: 215640 - DNA, 201 bp, Homo sapiens
tcacttgaacctggggaggtagaggttgcagtgagccgagattgtgccattgcactccagcagaactccgtctcagggcaggtgggtggggtggggggggygttgaaagtatcttctatctcatatgttgatagctaccaatagcaaagagaaaattgtgccactggaaaacagggcaagtcatctatatggatgccactt

SEQ ID NO: 215641 - DNA, 201 bp, Homo sapiens
ttaaggaagtttcaacattttttacatacatacacaatactaagtcagcgttgtggtgacacactcatagagtcaaatttgcaaaaaaaaaaaaaaaaaaaagcataaaacaaattagaactctaaaactctttacaaagtttatgcttctggccgggtgcagtggctcacgcctgtaatcccagaactttgggaggccta

SEQ ID NO: 215642 - DNA, 201 bp, Homo sapiens
ctgcctcctgggttccagcagttcttctgcctcagcctcctgagtagctgggattacaagcgcctgccaccacactcagctaatttttgtatttttagtaragacaaggtttcaacatgttggtcaggctggtctcaaactcctgacctcagatgatctacccaccttggcctcccaaagtgctgggattacgggcatgag

SEQ ID NO: 215643 - DNA, 201 bp, Homo sapiens
tacaggagttcctctcctgtaacacaatccactgtatgtacaggtgtcacttgactttctgttgccttgtgggaattagagctcagggaaccagtgcaaayactgacactctgactattgagttgtaaggtcctttgtctctgacctagcatgtaaggctaacttgttaagcttgcaaggagcgtaaatctcagacccgtc

SEQ ID NO: 215644 - DNA, 201 bp, Homo sapiens
ttttcttaggagctgttattcagtgacatgtgcttcatttagttgcaagagaggatggttaaataattttttagaggggtacattgtcatcgttttgttgkgggtttttttttttttttttttttgagacagagttttgttccatcgcctaggctagagtgcaatggcgcgatcttggctcactgcaatttctgcctcctg

SEQ ID NO: 215645 - DNA, 201 bp, Homo sapiens
tcagggaaccagtgcaaacactgacactctgactattgagttgtaaggtcctttgtctctgacctagcatgtaaggctaacttgttaagcttgcaaggagsgtaaatctcagacccgtcactgtccttggtagtaagcactattctgacttctaccaccatagattagttttacctgctgttacacttcatacataaaaga

SEQ ID NO: 215646 - DNA, 201 bp, Homo sapiens
tatgttatttgttctcttgagtgtattcctaggagtagaattgctgggttatttggcaactctatgttaactttttgaggaactgccaggctgttttccawaagtgtctgtttcattttgcattcccactggcagtgtatgagtgttctaatttctctacatcctcaccaacacttgttattttgtcttttttattataac

SEQ ID NO: 215647 - DNA, 201 bp, Homo sapiens
aggtgaatcatgaggtcaggagttcaagaccagcctggccaacatggtgaaaccccatctctactaaaaatacaaaaattagccaggcgtggtggcacacrcctataatcccagctactgaggaggctgagaaaagagacatgtcaattactaagttgttaccaggacaagttatcaaaaaggacaatgaaagccataaat

SEQ ID NO: 215648 - DNA, 201 bp, Homo sapiens
tgggctctttccactttttggctattacaaataatgctgctatgaacattcatgaacatacttttgtgtgtacatatgttatttgttctcttgagtgtatwcctaggagtagaattgctgggttatttggcaactctatgttaactttttgaggaactgccaggctgttttccaaaagtgtctgtttcattttgcattccc

SEQ ID NO: 215649 - DNA, 201 bp, Homo sapiens
cccagctactgaggaggctgagaaaagagacatgtcaattactaagttgttaccaggacaagttatcaaaaaggacaatgaaagccataaatattttgtartttatttacccatgaacacaatagtttccagtcttccgcatcagataagaccaagttattcaaattaaaatgttaaagatacggttttaacagaaacaag

SEQ ID NO: 215650 - DNA, 201 bp, Homo sapiens
tgccagtccaggaacggtggctcacacctgtaatcccaacactttgaggggtgaggtgggtggattgcttgagctcaagaattcgtgaccagcctgggcawcatgatgaaaccccatcagtacaaaaaacacaaaaattagctgggcatgggccttactttcttatagctatttttaaaaagagaaaaattttttaaaatg

SEQ ID NO: 215651 - DNA, 201 bp, Homo sapiens
attactaagttgttaccaggacaagttatcaaaaaggacaatgaaagccataaatattttgtagtttatttacccatgaacacaatagtttccagtcttcmgcatcagataagaccaagttattcaaattaaaatgttaaagatacggttttaacagaaacaagaacaggctgaaaactgccatgaatatccatatccaca

SEQ ID NO: 215652 - DNA, 201 bp, Homo sapiens
ttttcccctgaatcatttctgcctttttgttcagttttccctgcctagagcacccatcacaatctctttagttcttctatccactctgaactagaaatcayctttcattccatacagctctgtagtcctttaaaccctctaggaattgctaaagaggggtgaggggctgagaagaaaggagaatgggcaataagaggtctg

SEQ ID NO: 215653 - DNA, 201 bp, Homo sapiens
ctggttggcccttcgtctgtggcaggtacttttgactgggctgctaaagtcaagctccctgggctttaaaaaaaaaaaaatcctcaaaaatcagtcaataytgcctgagatcacctgttttaactccaataaggttctagagcaagcatctcattcggtcacgtgaaggtggcatacctgggtggtggtggaactcagttg

SEQ ID NO: 215654 - DNA, 201 bp, Homo sapiens
agcttattgaatgtgacccaggcagcaaggatgtggtacagaggagctaatatgcattcctcattagtcagctcacccatgtggtcagcagattccttttytaaagtagttgtgtaatctgcagcagcacagtagccaaacacagttgataaattacgtttatttcattttgacaaaaagagtaaatatattcttgtacaa

SEQ ID NO: 215655 - DNA, 201 bp, Homo sapiens
agctgcccaagtagcagtacttgggaatagccagtagcaggcagcaataggtgaccagtctcaggaaaagtaatggggtcccataattcacacagaccaasttgccccctgctgttctcccttgacttcattaatgcccagcaattgtccacaggccatgcacctgtactgtcagatgcagagcagggtgagctgaatagg

SEQ ID NO: 215656 - DNA, 201 bp, Homo sapiens
tgacctgttaggaactggaccacacagcaggaggtgagtggcagtaccacctgagctccacttcctgccagatcagtggcagcattagagtcttatagcasagcgaaccctattgtgaactgcgcatgcgagggatacaggttgttcactcttcatgagaatctaactaatgcctgatgatctgaggtggaacagtttcat

SEQ ID NO: 215657 - DNA, 201 bp, Homo sapiens
atcacttcagactccgacctccctgccccacaggtttctagagccttctccccacctaggccgtgcgtctcttcacccggaaagccatttttgaggctgcygtcagttgtcagcgaggcagaggccgcttctaggccctccgcgggtggtggagtcacttcctgccccgctttgatggctccatgactgcgacccgcatcg

SEQ ID NO: 215658 - DNA, 201 bp, Homo sapiens
taatgagctgagaaccttctcatgtgtttgttggccactaggatattctctcttgtgcagtatccgaggcttctccctatttctctactgggctgacgttmtttttcatatggatttgtaggaagcctttgtacatgctagatactagtcagtcattcttccagtataggtattacaaatatttctcttccagtataggta

SEQ ID NO: 215659 - DNA, 201 bp, Homo sapiens
atacttgcatgagaatcacagttctaacatttatactttagcagtcaattctgcagagttgctccaacaggcccaatctagatttgttattccagttcttscaattattttgtaagtacctaattccctgtattaaattccatcctaaaatggctaaggtggttttagttacctgctactgcaccctgactataccctgac

SEQ ID NO: 215660 - DNA, 201 bp, Homo sapiens
ttctgtattgttgagttgttataatgagcatgtattattcatgtattttttcatcaagaaaatgttttttaggggcctataaaagtgcctggcacaaagargctcccaataaaaacattattatgtctgaaaggaaattcagaatttccatttgacttaataggaattcatcagctccggaagctgggtgaagaaaagaaa

SEQ ID NO: 215661 - DNA, 201 bp, Homo sapiens
tttaaaatgcaatgacagtaagttgcagaaatctgaattaaattgcctttaaaaaaaccacatttgtttcttcccaggccatgaaaatgtggaatacaacrgggaccatcatttagagatggcctggctgtgattatagcagccctgctctgtctttactaacaagccagcagcatgtaagaacacactgtggatgtgtgt

SEQ ID NO: 215662 - DNA, 201 bp, Homo sapiens
gcctcccaaagtgctgggattacaggcatgagccaccgcacccggccgaggtgcagaaatgttaatttgcagatggacacataggaaatggcgaggcgaaraaatgaacccaggcaatctgagcctataaagctcttccttttaaactctacggggtactctctgagccattctcagctacaaaagagggttagtaattct

SEQ ID NO: 215663 - DNA, 201 bp, Homo sapiens
tatactgtcaatctgacttatcactgttgatgttaaccttgatcacctggctgtgatagtgtttgtctggtttctccactctaaagttactcttttttttytctctctcttttcatcctgtactttaaaaaatcttcacattctcaaggagctccacgttttttccccatcaacttcccttgcatcaaggactttgggaga

SEQ ID NO: 215664 - DNA, 201 bp, Homo sapiens
tactctagaggtttttacactttggtgcagtgtaccagggtaagattaagaatgggtaaaagtgtgccttttgtaaagagatctttttttaatttaatttwatttttatttcctataggtctttggagaacaggtggtgtttgattacatgaataagttcattactggtgatttctgagattttggtgcatccatcaccca

SEQ ID NO: 215665 - DNA, 201 bp, Homo sapiens
ggtgttcggaagagtgcagggtaggaggcccctctacggtgggagatcaaaaaggttatgggaggaaggggagaaagctgtgagaagcgcctcccacctawagtatgccttttcccgttgtggctgggacttccgctccgccatgacacagcagcggcggcggggagggaggcgaaacgcgcatgcgcccgaggacttgga

SEQ ID NO: 215666 - DNA, 201 bp, Homo sapiens
tcaaatccgtggactacgaggtgttcggaagagtgcagggtaggaggcccctctacggtgggagatcaaaaaggttatgggaggaaggggagaaagctgtragaagcgcctcccacctaaagtatgccttttcccgttgtggctgggacttccgctccgccatgacacagcagcggcggcggggagggaggcgaaacgcgc

SEQ ID NO: 215667 - DNA, 201 bp, Homo sapiens
cctcatctattgctctgttttcttccgccacgtccatttcttcgcctcctggcttctcatccactggggctgagaacatggcacactcctcaggcttcacrtcctcggccttcccctctgcaatcacttcagactccgacctccctgccccacaggtttctagagccttctccccacctaggccgtgcgtctcttcacccg

SEQ ID NO: 215668 - DNA, 201 bp, Homo sapiens
cccaaattgaaagagtggcttagtgattcacttaagtcattagacagcctgctgataagaattagtttagattttgaaaaaaaagggagacttttttttttcagggctaagtataggtctcagttatagagaaaagtaagaggaaaaattgtcatatgcatacagtattacataatattctatgtcataaatcaaatttta

SEQ ID NO: 215669 - DNA, 201 bp, Homo sapiens
atgacacatttttaaattgaagttttcatcattgccatatctcatggccaatcgactcatctaagttttccactaaatgcatcagactgaatggaaaaaayaaactttgttagtgacatcttgaaattcactttcagaagctttgttgcacctaatctgtcattatgatttggggattcagttgaatccattttcttttgc

SEQ ID NO: 215670 - DNA, 201 bp, Homo sapiens
gttggacccgggaggtggaggttgcagtgagccgagattgtgcaactgcactccagcctgggtgacaagagcgaaactccgtctcaaaaaaaaaaaaaaaattgacatgcaaaaaagtatattacagtgaaagattataggcagttgcatggaggtagtccataagaattggccaacttttcacaatcattatctatattt

SEQ ID NO: 215671 - DNA, 201 bp, Homo sapiens
aaatggaggtttgttgtgtgggtgtgggagccgggggtgcagggggtgggatgtttctttttaattgttagagcttgatctctacatgactttccattagmttggaatcatgtgactcccagggttgggcaggaaattagcttttgtccagaagagcaggatacaacaaaaattattttcttagctccaaaggcctctttg

SEQ ID NO: 215672 - DNA, 201 bp, Homo sapiens
ggaaacttccatctatgtttttcttttttcttttttaaatccttagcatagtaaatggaggtttgttgtgtgggtgtgggagccgggggtgcagggggtgkgatgtttctttttaattgttagagcttgatctctacatgactttccattagcttggaatcatgtgactcccagggttgggcaggaaattagcttttgtcc

SEQ ID NO: 215673 - DNA, 201 bp, Homo sapiens; identical to SEQ ID NO: 38369

SEQ ID NO: 215674 - DNA, 201 bp, Homo sapiens
ctggaattacaggcacccaccgccatgcctggctaatttttgtatttttagtagagacagagtttcaccatgttagccaggatggtctcgcattcctggcytcaagtgatctgccacttccacttcccaaagtgctcgaattacagcatgagccacagcacccagcctgatcctgccaccttcttagaatttgcattctgt

SEQ ID NO: 215675 - DNA, 201 bp, Homo sapiens
agagttttttctaattctgtgaaaaatgtcattggtagtttgataggaatggcatcaaatctgcaaattgcttaggacagtatggccatcttaacaatatygattcttcctatctgtgagcatggaatgtttttccatttgtttgtatcatatctgatgtttttcagcagtgttttgtaattcttgttgtagagatctttc

SEQ ID NO: 215676 - DNA, 201 bp, Homo sapiens
agtgaatgagggaggctagatcaagtagggtcttgtatgatagtgtaagaaatttggcttttattcttagtgaaatgggaaattactacaggattttgagyagaggacacaaaatctgacttaagttttgcgtgaatcactctggctcctgggtgaaaaataatctgtatggtggcaatggtagatttagggggatctttt

SEQ ID NO: 215677 - DNA, 201 bp, Homo sapiens
aagtttaatgtaaagaagtaaatttaaatcacctgtaatctcaccatctagaaatacactcatttaaatagaagctgccactttactttttttttttttttaaatgtcatggctgttttttctccaacttttattttaggttcaggggatacatgtgcagatttgttacatgggtaaattgcatgtcacagttgtttggtg

SEQ ID NO: 215678 - DNA, 201 bp, Homo sapiens
ggtgaaaaataatctgtatggtggcaatggtagatttagggggatcttttgggaggctactgcagtaacccaggtgaaagatgtttctcagaccaggtggyagcaatggaggtggatggtggacatagtatgatggtagagtcagcctgatttaatggtaaattggctatgggatctcttagttcattttctgttgctgta

SEQ ID NO: 215679 - DNA, 201 bp, Homo sapiens
gcagtacaactggagaagcaagagggctcggtgggatggtatctgcaggtagacatacacatgagtgcacacatatgcccccaaccattgccttgcttcaragaaaaacttcacttgtctaccgtaagtattaagcctttgtgcaagattatgttggaagaaaggtttcttctcttcacaaatcttgaggctgtgtatggt

SEQ ID NO: 215680 - DNA, 201 bp, Homo sapiens
gggagaataagctagagggctgagagacagtggtttgagaatgacctgcaagggattagtcagaatcccattcatgaatccaaggtggtctctaatgaggyagacagaggatagggtaaggtcattgcaggggaggaggtcaatgagccaacaggccaggatgggaaggatagtctatgtgtatattgaaatcactgagag

SEQ ID NO: 215681 - DNA, 201 bp, Homo sapiens
gagggaatgacatgacagtagcaacgttttagggcaataggtggtccaaaccattgacaggagactcaaagctggatatgtattctagggccaaggtatakcaccactacctttcgataaaatcagttagtgggaaggcagacacctttagaattttatatttcttaatgtcacagaccctggtattatacatctccccaa

SEQ ID NO: 215682 - DNA, 201 bp, Homo sapiens
tccaaaccattgacaggagactcaaagctggatatgtattctagggccaaggtatatcaccactacctttcgataaaatcagttagtgggaaggcagacamctttagaattttatatttcttaatgtcacagaccctggtattatacatctccccaagggtacacatacattaggaaacatgtattttttaaaattgaaag

SEQ ID NO: 215683 - DNA, 201 bp, Homo sapiens
ctgaaatattctggctataatttttttttcctaaaaaaagggagaacaaggagagctatataaaatctctgaaatgttttgtcaactagaggcagaaataragatgtggagaaagagggagagggagaaaaaggaaagaaaaatgaaaaatgagtaagggaaggaagaacgatatggcttcttgggaagagtacaatttag

SEQ ID NO: 215684 - DNA, 201 bp, Homo sapiens
gtaagggaaggaagaacgatatggcttcttgggaagagtacaatttagccactaatctgcacatcacagaattgtaaagtgtttaaattctctgggaaacmgaaaaacatgatgttttaaaagataaactcaatattagatgactgaaaagagcctgtgaattgtatagtcttgttttccttggactcctcaaatattctt

SEQ ID NO: 215685 - DNA, 201 bp, Homo sapiens
tccacctcaattttatttatagaaaagccattattccactattctatatcaataacaattttcatttgtttttctacgtgtataatatgaattatattaartaacaaattttccagttttcataataataattctaatgactatataacagtctgttgagttgatgcactgtaatttatactgggtattttgtttccagtt

SEQ ID NO: 215686 - DNA, 201 bp, Homo sapiens
tagaaaagccattattccactattctatatcaataacaattttcatttgtttttctacgtgtataatatgaattatattaaataacaaattttccagtttycataataataattctaatgactatataacagtctgttgagttgatgcactgtaatttatactgggtattttgtttccagttttttgctattataaatatc

SEQ ID NO: 215687 - DNA, 201 bp, Homo sapiens
gggaggctgaagtgggaagatcatttgagctcagtagacgaggctacagtgagccatgatcacacaactacactccagcctgggtgacaaagcgagatatrtctcaaaattttaaaaataaagataaaaaataaaaatgaatacaatgaataaaatgtaattactaacttattttttcctaattttatgatagtatatgtt

SEQ ID NO: 215688 - DNA, 201 bp, Homo sapiens
tctttatcattttctttataaatgtcatggtttgaaaccacgtttgcagagatgataaaagtgagagactgaggcaagatgcttcttgcctcacaggtggygctccttgctcattccagggcataggccaagctcactatggaagaaatttagtttatagtttgactttgaaccaaggatgataatagtccctccctaaga

SEQ ID NO: 215689 - DNA, 201 bp, Homo sapiens
agccatgttcacaccactgccctcaggctgggtgacagagcaagactccatctcaaaaaaaaaaaaaaaaaaaaaaaaaaaaagttctctgaaactaaaakaaaaatctagggaaattaaacattttttattgcaaatcacttaaccttagaatgtcaaagattttccctaagtttttatataaaaagaagcatgggagag

SEQ ID NO: 215690 - DNA, 201 bp, Homo sapiens
cattacatcagccatgcacggtttctccaacatggatacaaagcagaatgatgtaatagcagctgcagttttgtgctaccacattaaacagtggtgctttygatatcatttaactaaaccaaaatatgcagttcaacctcacatagctcaaaatactcagttcaacctgagatggtcctgaattaactagaccatgtttca

SEQ ID NO: 215691 - DNA, 201 bp, Homo sapiens
ttggtagcggccagggcagcagtgggtagaggccaggccagaggtaggtagcgtcaacgttcctcacacaaaatggcgagtaaacacctcgcccatttgcrccgcccactcttcagtctcgcgacacccacccctcagtctcgcgacactcactcctcagtctcgcgagtctgtggtggtgtctttacgtctttgttattt

SEQ ID NO: 215692 - DNA, 201 bp, Homo sapiens
ggtgatctacctgcctcggcctcccaaagtgctgggattacaggcatgagccactgtgcctggcttttttttttttttttttctgagatggaatcttgctytgtctcccagtctggagtgcaatggctcgatctcacctcgctgcaacctctgcctcccgggttcaagcaattctcctgccttagcctcccaagtagctgg

SEQ ID NO: 215693 - DNA, 201 bp, Homo sapiens
ggcatggtaatgccaatcaacttggcatcatttcctggctcagcgagttggaataattatgagaatccattcagagtctgtggggaaaactgctaggattkattagcaatgtctaccattggaaaagtagagaattgttggcttttatgacatagacagtttgccgattctgctttagcttacatgcataacagcatactt

SEQ ID NO: 215694 - DNA, 201 bp, Homo sapiens
ggtcaaactcctgatctcaggtgatctacctgcctcggcctcccaaagtgctgggattacaggcatgagccactgtgcctggcttttttttttttttttttctgagatggaatcttgctctgtctcccagtctggagtgcaatggctcgatctcacctcgctgcaacctctgcctcccgggttcaagcaattctcctgcct

SEQ ID NO: 215695 - DNA, 201 bp, Homo sapiens
cgcaaattgcatcaggctgtcagggcttcgctttatgaatttccctttgaggacttgcacattcctctcggcacagaggtcggagccggtgggtgcccggstgccgccgccccgcgatcaatggcacctgaagcttccccgggcgaggccgtggctgcctggcttggtcccggagtccacggccacagagactggtgcctt

SEQ ID NO: 215696 - DNA, 201 bp, Homo sapiens
tcctgcaccctgcatacttgttgaacctgtttactacttctaacaggtttttggtggagtcctcagaatcatctatatataagatcatgtcatatgcaaayagagatagttttacttcttcctttctaatatgaatgacttttatttctttttcttgcctaattgctctggctagagttccagtaattgatgaatagaagt

SEQ ID NO: 215697 - DNA, 201 bp, Homo sapiens
gcgcaaattgcatcaggctgtcagggcttcgctttatgaatttccctttgaggacttgcacattcctctcggcacagaggtcggagccggtgggtgcccgsctgccgccgccccgcgatcaatggcacctgaagcttccccgggcgaggccgtggctgcctggcttggtcccggagtccacggccacagagactggtgcct

SEQ ID NO: 215698 - DNA, 201 bp, Homo sapiens
tctttttaaatttcttccaacaatgttttgtagtttcagtttatagtcttgcacttcttttgttaaatttattcctaaatatttattcttcttgaagataytgtaaatggaattatttgcttaattttattttaagattgtttattgataatgtataggaaaacaatttatttttgtatttgatcctgcaccctgcatact

SEQ ID NO: 215699 - DNA, 201 bp, Homo sapiens
tatccaaggcttacaaataagtaatttgtccaaggtcacacactcagccaggagtgaaactgtgcccattattcaaattattaactgttttgatttttattattatttgtagagacaggggctcactatgttgcccaggctagtcttgaattcttggccttaagcgattattccaggtcagcctcccaaagtgctgggatt

SEQ ID NO: 215700 - DNA, 201 bp, Homo sapiens
aatatcagacctgttgccttccaaaatggaaacaaaatcacctgtttcaaagcaagctgccttaagatgtggtctgtaaagatactacaattaagtgatargctttcccttttctttaccctagaaacagaaacagactgtgtttcagcataatgcaggtgaccaaggcatatcctccatataggaacagagcaactaaaa

SEQ ID NO: 215701 - DNA, 201 bp, Homo sapiens
cccaggttcaagcagttctcctgccttggcatcccaagtagctgggactacaggtgcgtgtcaccatgaccggctaatttttgtattttcagtagagacggagtttcaccatgctggccaggctggtcaaactcctgatctcaggtgatctacctgcctcggcctcccaaagtgctgggattacaggcatgagccactgtg

SEQ ID NO: 215702 - DNA, 201 bp, Homo sapiens
ttattgatagtgttagctttctagtgctttaatttcacctctgtttcagacaaggatattagttaaatggaattttttatatcaccccaggagcttactayacaggaaatactgactgacttgaattattgaaaagacagtcctatgttgatttccatttctacataggatggattcttcatacattccactcccctatat

SEQ ID NO: 215703 - DNA, 201 bp, Homo sapiens
cacatgggaattatgggagcttacaagatgagatatgggtggggacacagagccaaaccatatcagcatcctactctccttttgacaatggatgaggcagytgaaaggaataccaaggagaaaggggaagaatgcagggtgtggcctattatgactttgggcaaacgcttaacctctttgagcctgagttttcttcctctg

SEQ ID NO: 215704 - DNA, 201 bp, Homo sapiens
gtcctcggccttcccctctgcaatcacttcagactccgacctccctgccccacaggtttctagagccttctccccacctaggccgtgcgtctcttcacccrgaaagccatttttgaggctgccgtcagttgtcagcgaggcagaggccgcttctaggccctccgcgggtggtggagtcacttcctgccccgctttgatggc

SEQ ID NO: 215705 - DNA, 201 bp, Homo sapiens
taaataatgtcagtatatagatgctgctgtactatcattaaggaagcatgtgctgaggttgtgttctcagaaacaaggaagaatgacatttgtccagtcayggagctctgtggctccatgcagggccatgaatttgttgatgtctgtgatgtacagtcatggaacagagagaagctaactgacccatgataagttaaacct

SEQ ID NO: 215706 - DNA, 201 bp, Homo sapiens
gtctgtgatgtacagtcatggaacagagagaagctaactgacccatgataagttaaacctcaaatcttaccacttttaatgccacagtaaaattttctaarctggtcaaccacaacaaaggtatatttaaaaactaatatgaagtatatcaagaatttaagaactgctgtttcatgaacctatggaatggcagatctgaaa

SEQ ID NO: 215707 - DNA, 201 bp, Homo sapiens
gaatggcccaaagcctccaaggcaatcttgacctgcatccctggcaaacagatgagaacctgatgtaagtcagggataataagagtgaagaagagagagakatgaaagattattaaaatcaagaggacatcatggttgattgactgtccagggggtggttgaaagtctgtgactgcccagattctgccaagtttcagaatg

SEQ ID NO: 215708 - DNA, 201 bp, Homo sapiens
attccactgagtgggtagcatcattgatttgtgaattctttgaagagaatctaccaggtgtcagaatcatagagggaaggtatataaaagccaggtgggaraggaaacatcaccaagaagaggaggaatttatctctatgaggctaggtcttttcacttataaatggaaataataatagcttcctcagagagaagttggag

SEQ ID NO: 215709 - DNA, 201 bp, Homo sapiens
ggacgatgggaaactaaaatcagctttaacattttcagacaatttccaacctctcatccactcctcttttgtgtcctcaccctgctccacattttgctttrctctgccctgctctaagcagatggcccttgtggtcatatgtcaagatcctaaaactatttctgacctggaacaaagttctgcctgatttgatcttagttc

SEQ ID NO: 215710 - DNA, 201 bp, Homo sapiens
taatcccagctactctggaggctgaggcaggagaatcacttgaacccaggaggcggaggtttcagtgagccgagatcgtgccactgcactccagccttagygacaactctctttatattaagtggaaaagattataacagttcttataatatgatttaaactttgtaaaaaaaaatcatataattaaaagccaaagccaga

SEQ ID NO: 215711 - DNA, 201 bp, Homo sapiens
gagcatttgctaccctcaattccactgctagaatctattcatctagtatttcctcttggtctcattcttatcccttatttcattctcctgtgtgtctccaygtgactcctttgtgtacacttttcttgtgactcagttttaccctggatcctggtttgctacttctattattgctctctttcacatcatcacctttttttt

SEQ ID NO: 215712 - DNA, 201 bp, Homo sapiens
gcttactgtgtccaaaacagaacactcaatttccaccctgtggctaagactgctagctgtcctccagtaatcatcctctccttctattgtaatacatgtgkttttactgggcacacagccactcagaataaagcctacattgacaacatctcagtctcttttgtagctgagttctggccaatgagatgtaatcagaagtat

SEQ ID NO: 215713 - DNA, 201 bp, Homo sapiens
ataaaactttttgtttcacagtccatcaacttgtcatggtgtgtttttgtttgttttgttgtttaatgtcattctaagtaaagaaaaattaaagcttaaaatattagtatgaattttaccattcatctgtatattgtgcaatgctggttttaaatgcaaatataagacatttttagggataaaagacttataaaaaatgaa

SEQ ID NO: 215714 - DNA, 201 bp, Homo sapiens
ctggaacacagatgtgatggttggaactttagcatccatcttgggttatgagaatggaggacaacatcctagaaatcatggagtggtgagttggaaaggtstctgaaggtatggagttgtcatacttgtcctggactgcccaccttcaggcttcctttatatgataaaggaatacagatgcttcttgacttatgatagggt

SEQ ID NO: 215715 - DNA, 201 bp, Homo sapiens
actttagcatccatcttgggttatgagaatggaggacaacatcctagaaatcatggagtggtgagttggaaaggtctctgaaggtatggagttgtcatacytgtcctggactgcccaccttcaggcttcctttatatgataaaggaatacagatgcttcttgacttatgatagggttatgtaccaataaacccattgtaag

SEQ ID NO: 215716 - DNA, 201 bp, Homo sapiens
gactgagttttcccagcatcatctgccagacttgtaagtgattccagttattccagtcctcagcctcagagctgctcttggcaagtactgcaaagatgagstttccctgttgagccctgaccaaattgcagacttgtaagctggctaaacagtgtttgttatttctaggtgtgagggtagtttgaacagcacccacagtat

SEQ ID NO: 215717 - DNA, 201 bp, Homo sapiens
tcaacgttcctcacacaaaatggcgagtaaacacctcgcccatttgcgccgcccactcttcagtctcgcgacacccacccctcagtctcgcgacactcacycctcagtctcgcgagtctgtggtggtgtctttacgtctttgttattttagccatcgtgctggatgagtaatgatattacatggtggttttaatttgcatt

SEQ ID NO: 215718 - DNA, 201 bp, Homo sapiens
tgggtatattcctagaactagatcagagggttcgcactggtgctgccaaacaactttctaaagtatctgtacaaagctgctctcccataaacagtatatgrgccttttggtatctctgttattttcaacctttgttattttccatcatctttgttttgttttttttcagtgacatgcttcaattttaccatcatccattca

SEQ ID NO: 215719 - DNA, 201 bp, Homo sapiens
agggcagctcccagtgtcagctattaaaattctgttgttagaaatactttatgcatgtctttgagtgaatatatgtatatatttccgttgggtatattccyagaactagatcagagggttcgcactggtgctgccaaacaactttctaaagtatctgtacaaagctgctctcccataaacagtatatgggccttttggtat

SEQ ID NO: 215720 - DNA, 201 bp, Homo sapiens
agtcaagtgttaaggtatttccaacttaccttcacaaagttcaactacaatgccaaaaacaaacttatggggagagagggaggaaagaaaatatagcaaaytttaactaggtggaattatgtagctatttgattgtactatgctttctatgtatgtaggaaaatttgtataataaaaagtagggggtcaaaagataagcat

SEQ ID NO: 215721 - DNA, 201 bp, Homo sapiens
acatgaattttcttaggtgtgataaatggcattaaagtatagaaaacagcattcttattctcaggaaaggaattttagtatttagaagtcaagtgttaagrtatttccaacttaccttcacaaagttcaactacaatgccaaaaacaaacttatggggagagagggaggaaagaaaatatagcaaactttaactaggtgga

SEQ ID NO: 215722 - DNA, 201 bp, Homo sapiens; identical to SEQ ID NO: 38371

SEQ ID NO: 215723 - DNA, 201 bp, Homo sapiens
ttggagctgctgaacacctcaaaatatacttcagtttttacagtgcctttagcaaggtgattttagccaacagtgaaagtatcataggcactactgtatcktatattcatttgtaggtggtattcagatttcaaaagaaattgtcataatatttattatatttaaatggaaaacataaacaattacatattagtgctatac

SEQ ID NO: 215724 - DNA, 201 bp, Homo sapiens
gatggctccatgactgcgacccgcatcgaccaagatgtggaaagtatggccaccatctgcgggatcctggggcgcgaccccctcctctggaagccggggcrgtgggaacacgattggctccaagcggccatcaaacatatctgccattacctctgtcgccttgctcttttctcgggacctctggccctggtgcgggtcttc

SEQ ID NO: 215725 - DNA, 201 bp, Homo sapiens
ggaaatcaggtgtttgttcccctaaacttgatcattccagagagcttttaggatcaattccttgaccagagaagagctttggcaactccaccgatgtaacrgtgccttgtaggatcccacagaaagctgctaactagtttttttctttctgtgatgtacatttagctgtagcaggaaatagtgtgtaattagaagaggctc

SEQ ID NO: 215726 - DNA, 201 bp, Homo sapiens
gtaacttctgcgaccccaagcttttaattctattcaaagcctcatcatctaaaagtcatttggaaaactaaagaatgacagctatcaactatatataagtrgctttcaattcaaaagagggaggtgtaatataatgaagttaaattacattttgattctggttgctagatattctttgatcattaatggtgtcagcaaaat

SEQ ID NO: 215727 - DNA, 201 bp, Homo sapiens
gctatgagtgggccacaatttggcactagattatctagtagttctctatcggctaatggcatcccccaaccccaactcaatttgtttatgagcatttttgrtgggagatggagagatcagggtgagggtgaaaacgcaggcgtgtctggccaactcatttttcatttggcttcatgtaggagtcgattttaacataactgg

SEQ ID NO: 215728 - DNA, 201 bp, Homo sapiens
agtagttctctatcggctaatggcatcccccaaccccaactcaatttgtttatgagcatttttgatgggagatggagagatcagggtgagggtgaaaacgsaggcgtgtctggccaactcatttttcatttggcttcatgtaggagtcgattttaacataactggaaaagagaacatcctggactgtgcatccttaaagca

SEQ ID NO: 215729 - DNA, 201 bp, Homo sapiens
ggagatggagagatcagggtgagggtgaaaacgcaggcgtgtctggccaactcatttttcatttggcttcatgtaggagtcgattttaacataactggaaragagaacatcctggactgtgcatccttaaagcaatcttcctcaaatattgctcttctgagacaaaggcgctcgtaaatattggaaggcattgaattcaaa

SEQ ID NO: 215730 - DNA, 201 bp, Homo sapiens
gcagtacagtttctgcctggctctactggacatacctttggatccctgtgacaacacacacataaaatgtctggctactttgaagccgccatgctgaagargtcatgtagggatagagggagacgactgaggagccagagctgttgcagaacccagctgactgagttttcccagcatcatctgccagacttgtaagtgatt

SEQ ID NO: 215731 - DNA, 201 bp, Homo sapiens
ctggactgtgcatccttaaagcaatcttcctcaaatattgctcttctgagacaaaggcgctcgtaaatattggaaggcattgaattcaaaatctaggcagscttgccttgccaagaacagaaccgtaaagatgtatacagctgctctctctcctctccttcacaggcagacagctagaaagatgatctattcttgctgtct

SEQ ID NO: 215732 - DNA, 201 bp, Homo sapiens
aatactgtcacactggcaattaaattttaccatatgaaatttgggggatacattcagaccacagtaggtgagatctaatttccttccccttgaacatgggycagccttagtgactgacttcaaactcatagaatgtgttagaggtgacactgagtgtcttccaagactaggttagagcaggcagtacagtttctgcctggc

SEQ ID NO: 215733 - DNA, 201 bp, Homo sapiens
cctcattttacagatgaggcactgagagtttaagaaacttctccaagacaaccaggaagtagtagctggactcacacctaagcatactgactctaaagtcyacttccatccattaccactgtgccagcacctattctgttccaccaaataaaacagaaagaagggcatatctgtcactagatatgtgttgacctagaagct

SEQ ID NO: 215734 - DNA, 201 bp, Homo sapiens
atgtcttggctattgtgaatactgctgtagtgaacatatgtgtgtatgtgtgtttatgatgaaacaatttatattcttttgggtatatacccaataatggrattgccgggtcacattgtagttctgtttttagctctttgaggaattgccacagtgctttccacagtggctggaccagtttgcactcccaccaacagtttg

SEQ ID NO: 215735 - DNA, 201 bp, Homo sapiens
agcacccagcctgatcctgccaccttcttagaatttgcattctgttgtggaggaggcatataataaacacatagacaatcacataaacatagcaattacaraatgtgatcgttgacatcatgcatgcaacagagtaggggtggggcccttttcacataggggcagtcaaagaggaggccctagaacagcagaaagctaagt

SEQ ID NO: 215736 - DNA, 201 bp, Homo sapiens
tgtgtcagtacaaacgtctaccattctgccactaaaaataacaaagaaaacagaaaaatagaagataattttttttttttttttttttttttttggttgaracggagttttgctttttcacccaggctggagtatggtggcacaatctcagctcactgtaacctcagccttcgggtttcaagtgattctcctgcctcagcc

SEQ ID NO: 215737 - DNA, 201 bp, Homo sapiens
ttggtgggttttggctggcttcttgactgcagcctgttttatcagcaaggtctttatgacctgtatcttgtgctgacctcctgtctcatcctgtgacttaraatgtcttaactgtcggggaatgcagcccagtagttttgaggcttattttacccagctcctattcaagatggaatttttctagttgaaatgcctctgaca

SEQ ID NO: 215738 - DNA, 201 bp, Homo sapiens
gcccccactcggcctcccagagtgctgggattacaggtgtgagccaccgtgtccggcctcctgtttcttttctttctttctttatttttttttttttttttgagatggagtctcgccctgttacccaggctagagtgcagtggcgccatctcggctcactgcaaactctacctcccagattcaagcaattctcctgcctta

SEQ ID NO: 215739 - DNA, 201 bp, Homo sapiens
cgcccccactcggcctcccagagtgctgggattacaggtgtgagccaccgtgtccggcctcctgtttcttttctttctttctttatttttttttttttttttgagatggagtctcgccctgttacccaggctagagtgcagtggcgccatctcggctcactgcaaactctacctcccagattcaagcaattctcctgcctt

SEQ ID NO: 215740 - DNA, 201 bp, Homo sapiens
tagataaatggattaatttctgggttctctattctgttctactgatctgtgtgttattttttaatgtatactttagaatttgtttgtctcattctcccccsacccctacccttctccaatttttggccttgttactgtagttataattaattgctaaattagcttagggagaacaactttatgaggttgagtcttcctatc

SEQ ID NO: 215741 - DNA, 201 bp, Homo sapiens
gtgctccttgctcattccagggcataggccaagctcactatggaagaaatttagtttatagtttgactttgaaccaaggatgataatagtccctccctaaractgatcccctccttgtccgggactgaagccacctttgtaaaactaatgaaaggccacaagattagtattatgggaggagcctcaattctgctcaaatgt

SEQ ID NO: 215742 - DNA, 201 bp, Homo sapiens
tgtagagtgagagatggaggtctagtttcattcttctgcatgtggctatttagttttcccagcaccatttattgaaaagattgttctttcccccaattaaygttcttggcatctttgtcaaaaatgggttgcctgtagataaatggattaatttctgggttctctattctgttctactgatctgtgtgttattttttaatg

SEQ ID NO: 215743 - DNA, 201 bp, Homo sapiens
cttgaggaataagttgttgaggtacttattattagttttaaaataaacctggctggcactacaagtaatcacaaaatgaaatgacataggaaccatggctrgcatttgttaagggcctggccacacaagtgtttggcattcttctcttctcctcacagcaaatctgtcaaatctgtcaggcagtcaacacatatttattga

SEQ ID NO: 215744 - DNA, 201 bp, Homo sapiens
gagactagagcagcatcataagtcacactttctttgttagtgtggaatttcaatatttaacaaacagtaaataacttcacttggtgaacattgtttttctrtataatatatatctaaatctgtttatcttgttttgtatagtccattaaagctttgtacttttctttacatatggcacatacaattctttatcattttctt

SEQ ID NO: 215745 - DNA, 201 bp, Homo sapiens
ggaacttgaggaataagttgttgaggtacttattattagttttaaaataaacctggctggcactacaagtaatcacaaaatgaaatgacataggaaccatkgctggcatttgttaagggcctggccacacaagtgtttggcattcttctcttctcctcacagcaaatctgtcaaatctgtcaggcagtcaacacatattta

SEQ ID NO: 215746 - DNA, 201 bp, Homo sapiens
cttaggagctgttattcagtgacatgtgcttcatttagttgcaagagaggatggttaaataattttttagaggggtacattgtcatcgttttgttgtgggkttttttttttttttttttttgagacagagttttgttccatcgcctaggctagagtgcaatggcgcgatcttggctcactgcaatttctgcctcctgggtt

SEQ ID NO: 215747 - DNA, 201 bp, Homo sapiens
gtatgaacctgggaggcggagcttgcagtgagctgagatcgtgccactgcactccagcctgggcgactgagcgagactccgtctcaaaaaaaaaaaaaatatgccaatggtataattccaatttcacaaaacaatctcacaagcacttccactctttaggctgaggcaggtgaatcatgaggtcaggagttcaagaccagc

SEQ ID NO: 215748 - DNA, 201 bp, Homo sapiens
ggtcactgctataaaagggccgattgttagattctatggtatagagggcattgccagtcacaaaccaatttacctagcttcatggacctccgcagatcttytcagatccttaaacttctttgttgctagtgataattaactgagagatgatattaatattttagatatatatcctttgacagtcagcttcctttcacgact

SEQ ID NO: 215749 - DNA, 201 bp, Homo sapiens
tgcaaactcacatgtaaaaaacaaggtgggaggaaagggagaaggtccaaggtaattgcccaaaaagggatgccggtctggagatgggtggatgcatattrtacagaaacaagtagaaatcttaatgccctttcaaaaatataagtataaatttaggtggtgagttgtttcaacaagatacatgatccttgtttggggtag

SEQ ID NO: 215750 - DNA, 201 bp, Homo sapiens
tcagcaccttttacagtactggataatcatagtaaaataaatataccagaatttcattattttaacatacaccatatactgaactgccagaatactgagaraagatattacaatcactagttgaaaccaggaagccagcttcagtcatcaaatccaaacaaacagtgagcacaggaagagcagtaagtgcctatttattga

SEQ ID NO: 215751 - DNA, 201 bp, Homo sapiens
ctgtacagctgtaattttgtgtcctttaacgtatctcaccatcttccccttcccccatctccctatcctctagtaacttcttttctactttttacttctawgagattggctttttttttagctcgtgcatatgaatgagaatatgaggtgtttaactttctgttcctggctattttcacttaacataatgttcttcagtcc

SEQ ID NO: 215752 - DNA, 201 bp, Homo sapiens
gggcttgattgggctccctgggcaccagtttttcctcatacctcactggatgcttccttctctgcctttcctggttcttcctctgcttcctgagcacttcacattggagaacccccaaagtacagtcattggacctatcttttctatctagattcattttcttgatgatcccagccaatcttataactttcgatactgtct

SEQ ID NO: 215753 - DNA, 201 bp, Homo sapiens
ctgcctactcaccatctcgctttggatgtctaacagacatctcaaatgtaacattccaaaactgagcctctgatcttccccttcccccaaaatctgctccyctcacagtctctccatttcagtaaatgacaaccctatccaactagttactcacaccaaaaactctggtgtcatccttcactcctctccttttctcacacc

SEQ ID NO: 215754 - DNA, 201 bp, Homo sapiens
ctatagttggtaattctgtgcaaccagttttgtaactggtcatctgacataccttgatggacaacctaagtcttttgatgagattgatcaaaaattgtgayggatcaccactgtatatgcagtcactcaaaaagccaggatgtcaagaaattttatctttcacaaatgtacgtatacaaaaaggacatctcttcattcatt

SEQ ID NO: 215755 - DNA, 201 bp, Homo sapiens
tcgcccccactcggcctcccagagtgctgggattacaggtgtgagccaccgtgtccggcctcctgtttcttttctttctttctttatttttttttttttttttgagatggagtctcgccctgttacccaggctagagtgcagtggcgccatctcggctcactgcaaactctacctcccagattcaagcaattctcctgcct

SEQ ID NO: 215756 - DNA, 201 bp, Homo sapiens
aatctaaccctaactaatagtcatctatgtctatcagagaacaatcctcctttcacataccaggcaactgaaaatataaaattggtagaaaagatgatccrtttttacactactttgctcaacagataacttttctagaatataattgtactgattaaggatttatacttccattttctcaggttttaaatgaattctaat

SEQ ID NO: 215757 - DNA, 201 bp, Homo sapiens
ggtggtactaggaggactacagaaaggcagtcagaaagagaggcaatttgaccttggcccagggccctgatccctgctctaatcagagcagctccaccccsatctcttccatacattaggattgtccataagacatctttggagaagaattctgcctcaaagaaataaaaaaaaaaaaaaacacaaagacactgaatttag

SEQ ID NO: 215758 - DNA, 201 bp, Homo sapiens
ttcgcccccactcggcctcccagagtgctgggattacaggtgtgagccaccgtgtccggcctcctgtttcttttctttctttctttatttttttttttttttttgagatggagtctcgccctgttacccaggctagagtgcagtggcgccatctcggctcactgcaaactctacctcccagattcaagcaattctcctgcc

SEQ ID NO: 215759 - DNA, 201 bp, Homo sapiens
agggcacctcatggttgccatgtggcccccgcagccccagctatcacatccgcagccacgttgcaagaatgaagactggccaaaggcaaaaaaaaaaaaamaaaacactgtactaactgggtcaattgtctttaaagctttttcttaggagctgttattcagtgacatgtgcttcatttagttgcaagagaggatggttaa

SEQ ID NO: 215760 - DNA, 201 bp, Homo sapiens
ctcagtctcttttgtagctgagttctggccaatgagatgtaatcagaagtattgtgtggcagctgctagaaaacctttttaacatactgcaaacatatatmatcttcctcctctttgccttcatctatcctgctgtctggaacacagatgtgatggttggaactttagcatccatcttgggttatgagaatggaggacaac

SEQ ID NO: 215761 - DNA, 201 bp, Homo sapiens
ctgacctcagatgattcgcccccactcggcctcccagagtgctgggattacaggtgtgagccaccgtgtccggcctcctgtttcttttctttctttctttatttttttttttttttttgagatggagtctcgccctgttacccaggctagagtgcagtggcgccatctcggctcactgcaaactctacctcccagattcaa

SEQ ID NO: 215762 - DNA, 201 bp, Homo sapiens
gttacttaaacattcagcaacccatgagactgttgagacccccttcttgaaataccttctttgctgagcatcttcgtttcttcaggctgctgtaacagaayaccatagactgggtaatttataaacaacataaatttactgctcacaggtctggaggctgggaagttcacgatcaaggcactagcagattcagcgtctggt

SEQ ID NO: 215763 - DNA, 201 bp, Homo sapiens
caagtgatgtttgtgtctcagcctcccaagtagctgggactacaggcacgcaccaccatgcccagataattttttgtatttttagtagagacagggttttmccatgttggccaggctggtctcgaactcctgacctcagatgattcgcccccactcggcctcccagagtgctgggattacaggtgtgagccaccgtgtccg

SEQ ID NO: 215764 - DNA, 201 bp, Homo sapiens
cctgtaatcccagctactcaggaggctgaggcaggagaattgcttgaacctgggaggtggaggttgcagtgagccgagatcgtgccattgcactccagcctggggaacaagaacgagactatgtctcaaaaaacaaaaacaaaactagtttttaaacatattaaaaaggggattcaggctgggcacagtggctcacgcctg

SEQ ID NO: 215765 - DNA, 201 bp, Homo sapiens
aattattgcttcaatttcagagcctgttactggtcttttcagagattcaacatcttcctggtttagtcttgggagggtgtatgtgtcgaggaatttatccrtttcttctatattttctagtttatttgcatagaggtgtttttagtattctctgatggtagtttgtatttctgtgggatcggtggtgatatcccctttatc

SEQ ID NO: 215766 - DNA, 201 bp, Homo sapiens
ctttgggaggccgaggcgagcagataaccagaggtcaggagtttgagaccagcctggccaacatggtgaaaccctgtctctactaaaaatacaaaacttasctggagatggtggcaggcgcctgtaatcccagctactcaggaggctgaggcaggagaattgcttgaacctgggaggtggaggttgcagtgagccgagatc

SEQ ID NO: 215767 - DNA, 201 bp, Homo sapiens
tccctctttttctattgattagaatagtttcagaaggaatggtaccagctcttctttgtacctctggtagaatttggctgtgaatccgtctggtcctggasttttttttggttggtaggctatgaattattgcttcaatttcagagcctgttactggtcttttcagagattcaacatcttcctggtttagtcttgggaggg

SEQ ID NO: 215768 - DNA, 201 bp, Homo sapiens
tgatgtgctgctggattctctttgccagtattttattgaggattttcacatcggtgttcatcaaggatattggtctaaaattctctttttttgttgtgtcyctgccaggctttggtatcaggatgatgctggcctcatgaaatgagttagggaggattccctctttttctattgattagaatagtttcagaaggaatggta

SEQ ID NO: 215769 - DNA, 201 bp, Homo sapiens
taagatttttgatgtgctgctggattctctttgccagtattttattgaggattttcacatcggtgttcatcaaggatattggtctaaaattctcttttttkgttgtgtctctgccaggctttggtatcaggatgatgctggcctcatgaaatgagttagggaggattccctctttttctattgattagaatagtttcagaa

SEQ ID NO: 215770 - DNA, 201 bp, Homo sapiens
gaaccgtgagttagaaaccataaaaagtaattggatattaccaagagaagtgttactaatataatttcagatacattacggggataatatttagacaggtrtagtagagccattattgttatatatcagctgagttattttaaaatagatatagtaatcattgaattaaagaaacccaatgaattttaaaaagagaaagag

SEQ ID NO: 215771 - DNA, 201 bp, Homo sapiens
tttgatggggttgtttttttcttgtaaatttgtttgagttctttgtagattctggatattagccctttgtcagatgggtagattgcaaaaattttctcccrttctgtaggttgccttttcactctgatggtagtttcttttgatgtgcagctctttagtttaattagatcccatttgtctatttcggcttttgttgccatt

SEQ ID NO: 215772 - DNA, 201 bp, Homo sapiens
catgaaccgtgagttagaaaccataaaaagtaattggatattaccaagagaagtgttactaatataatttcagatacattacggggataatatttagacaggtgtagtagagccattattgttatatatcagctgagttattttaaaatagatatagtaatcattgaattaaagaaacccaatgaattttaaaaagagaaa

SEQ ID NO: 215773 - DNA, 201 bp, Homo sapiens
agaaagccttccccactctgagttagtagagatagtttcctttgttttcttctagtattttaattatttcatttttaaaatttaaatctttactcctttaraatttacctggtatatagtatgaggcatgaattcaacttaattttattaaaaacacctctccagttttctcaagacaattggagttgttcgtcttttcct

SEQ ID NO: 215774 - DNA, 201 bp, Homo sapiens
ggacttacagttccacgtggctggggaggcctcacaatcttggtggaaggcaaggaggagcaagtcacatcttacatggatggcagcaggcaaagagagasagcttgtaaatggaaactcccatttttaaaaccatcagatcttatgagacttattcactatcacaagaatagcatgggaaagacccacccccatgattca

SEQ ID NO: 215775 - DNA, 201 bp, Homo sapiens
tttttagtagagatggggttttaccatgttggccaggcttgtctcgaactcctggcctcaagtgatctgcctgccttggccttccaaagtgctggaattastggcaggcccatagtccatcactgatggaaacactgttatgctgtgtgtgtgactatagttgttgctgttttttttttttaatccacagctgacctgaaa

SEQ ID NO: 215776 - DNA, 201 bp, Homo sapiens
tgaagagtgaaagaacaaagcttccacagcgtggaaggcgacccaagcaggttgccgctgctggctctggcggtcagcttttattcctttatttggccccrcccacatcctgctgattggtgtgtttacaatcctctagctaggcagaaaagttttccaactccccacccgacccagaagcccagctggcttcacctctca

SEQ ID NO: 215777 - DNA, 201 bp, Homo sapiens
attggttcagcaggctttacaggaagcatagtgtggcatctgctcatcttctggggagacttaaggaagcttacaatcatggcggaaggcaaaggggcaasaggcacatggcaagaggaggagagagagggaggtgccacacacttaagtgaccagatcttgtgagaactcactcactgtcaagaggacaacatcaagggg

SEQ ID NO: 215778 - DNA, 201 bp, Homo sapiens
tcagtggcttaggctgcaaaataaggtccctttcacctttgacacataatccagatcttgtactttactttagtaattttagaaagaagacatttaggccraggagatgaatgtctgttctcattgaggtaatgaggttttctaccactttatttttcttggtaaagtctttgcttataatctggcagcctttatttgtat

SEQ ID NO: 215779 - DNA, 201 bp, Homo sapiens
ttaactgtatcatctttaatttatcctgtttgaatatagattaggtacaactgtatcaacctaattaattactgtcccattcacattccactttattgaamggtctttgaagtaggagtaagatttatgtatgtgatagaaggtttagaagctgggtgtagtggctcatgcctgtgatgccagcactatggggggccaaag

SEQ ID NO: 215780 - DNA, 201 bp, Homo sapiens
caccttttgtgtgtcagggaggtgatagatgtttagtggtgaatgaaacaggcatggatctgtgtccagaattggttccatctggtgggttcttggtctcrctgacttcaagaatgaaacgacggaccctcgcgatgagtgttcttaaagatggtgtgtgcagagtttgttccttcagatgttcagaagggtccggagttt

SEQ ID NO: 215781 - DNA, 201 bp, Homo sapiens
aggataatctctctgtgattactttttttttttagaaataactttttatggatggcaaactgtagtttttgtttcaagtaaagcatttctggttttaactktatcatctttaatttatcctgtttgaatatagattaggtacaactgtatcaacctaattaattactgtcccattcacattccactttattgaacggtctt

SEQ ID NO: 215782 - DNA, 201 bp, Homo sapiens
tgaaaccccgtctctactaaaaatacaaaaattagccaggtgtggtggcatgcgcctgtaatcccagctactcaggaggctgaggcaggagaatctgttgwacttgggaggcggaggttgcagtgagccacagtcgtgctactgcaccccagcctgggcgatagagagagactccgtcttaaaaaaaaaaatgatttcaat

SEQ ID NO: 215783 - DNA, 201 bp, Homo sapiens
ttaatatttttcaaaaattatgtttcttctttattctttaagtatggatctctttcattatatatatgtctgtgtgtgtgtgtgtgtgtgtgtgtgtgtgkagagatatatgtatctctctatatacacataaatacatgaaacatctaccacgtgctgagtaatgaggaaacaatagtgaattgtttttattactaagct

SEQ ID NO: 215784 - DNA, 201 bp, Homo sapiens
gaggagctgctgggaagcctggatgtgaggagggtggggttttgtggcgggtggaagtgtcgtgcgtctctgccaggagaggttaaacacagccggcgggsagagtctgagctccgggggtaggtcgtgcaggttttctgctgggagtgtggaggaaggccgcggttggttgaagtggctggaggtaacaggaaagtgttg

SEQ ID NO: 215785 - DNA, 201 bp, Homo sapiens; identical to SEQ ID NO: 38431

SEQ ID NO: 215786 - DNA, 201 bp, Homo sapiens
ggttggcgtgggagccagcctagggcttcgggtcgcggcagcgctgaccgccatggacaagcccctgggtcgctgcgtgggccacgccctggaggtggagraggcgctgctctgcatggacggcgcaggcccgccagacttaagggacctggtcaccacgctcggtgagggggacggggtgtaggggagcggaggcggcgg

SEQ ID NO: 215787 - DNA, 201 bp, Homo sapiens
tgcactcctagccagggaaggtgaagggatgcacagaggtgggggaggggtactgtgcagggtactcagcatccctgaccaccaggtgccaatgatcagcrgacgtggtctggggcacacaggaggcaccttggataagctggagtctattcctggattcaatgtcatccagagcccagagcaggtacggggcgccacgga

SEQ ID NO: 215788 - DNA, 201 bp, Homo sapiens
ggcaacagaggaagactcttcacagaaaaaaaaaaaaaaaaaaaaaaagctgctaagtcatttaccataagtcactgagaacaggggatgtctgaccagakgcaagtgctgctggaccaggcgggctgctgtatcgtgggtcagagtgagcagctggttcctgcggacggaatcctatatgcagccagagatgtgacagcc

SEQ ID NO: 215789 - DNA, 201 bp, Homo sapiens
gaccccaaagtcggcatccccgaactctcccaagaagctccaggttctccattgtctccaacctcctctgcctcccccaaagcctccattctcagtaagaractcgtggaggggctgtccgctctggtggtggacgttaagttcggaggggccgccgtcttccccaaccaggagcaggcccgggagctggcaaagacgctg

SEQ ID NO: 215790 - DNA, 201 bp, Homo sapiens; identical to SEQ ID NO: 38409

SEQ ID NO: 215791 - DNA, 201 bp, Homo sapiens; identical to SEQ ID NO: 38412

SEQ ID NO: 215792 - DNA, 201 bp, Homo sapiens; identical to SEQ ID NO: 38387

SEQ ID NO: 215793 - DNA, 201 bp, Homo sapiens; identical to SEQ ID NO: 38388

SEQ ID NO: 215794 - DNA, 201 bp, Homo sapiens
tgccgctggcgctggtgctgcacgagctcggggccgggcgcagccgcgctggggagccgctccgcctgggggtgggcgcagagctgctggtcgacgtgggwcagaggctgcgccgtggtgagcgccgcccccgccctgctggccccgcacccccgcccagctccggccgcgcggcctctaacagcccctcgctctgcaggg

SEQ ID NO: 215795 - DNA, 201 bp, Homo sapiens
agcaggaaaaagatccactgatggaattcagacccctttccccttgggtccccagacagctcccccaagggaggagctgaggacttccctccctctgcccsaagccttgtttccccaaggacaggtaccaacctcctcccctactgacacttctcaaccaagaaaacttcctttccattccctcaccagctgggcacccct

SEQ ID NO: 215796 - DNA, 201 bp, Homo sapiens
gttggcgtgggagccagcctagggcttcgggtcgcggcagcgctgaccgccatggacaagcccctgggtcgctgcgtgggccacgccctggaggtggaggmggcgctgctctgcatggacggcgcaggcccgccagacttaagggacctggtcaccacgctcggtgagggggacggggtgtaggggagcggaggcggcggg

SEQ ID NO: 215797 - DNA, 201 bp, Homo sapiens; identical to SEQ ID NO: 38421

SEQ ID NO: 215798 - DNA, 201 bp, Homo sapiens
accaggccccttggagcaggaaaaagatccactgatggaattcagacccctttccccttgggtccccagacagctcccccaagggaggagctgaggacttycctccctctgccccaagccttgtttccccaaggacaggtaccaacctcctcccctactgacacttctcaaccaagaaaacttcctttccattccctcacc

SEQ ID NO: 215799 - DNA, 201 bp, Homo sapiens; identical to SEQ ID NO: 38422

SEQ ID NO: 215800 - DNA, 201 bp, Homo sapiens
agctcccggagctgatccgcatgaagcgagacggaggccgcctgagcgaagcggacatcaggggcttcgtggccgctgtggtgaatgggagcgcgcagggygcacagatcggtgcgtggggagggttgggcgttcctgaccccgactgggaggtcagcccgagagactttgggtccctgggggtgcgacggtgccccacta

SEQ ID NO: 215801 - DNA, 201 bp, Homo sapiens; identical to SEQ ID NO: 38378

SEQ ID NO: 215802 - DNA, 201 bp, Homo sapiens; identical to SEQ ID NO: 38379

SEQ ID NO: 215803 - DNA, 201 bp, Homo sapiens
cccccaggtgattcccttcaccaagtctgggtctagacttggcccccgcgagttcacgtccctgcctaatgcgcctggagtccgggtgatggccctggatmcgctcccggccccaagctccacacagccgggaaggaagctcgcgtttgttttgctggcgccagggatacggtccaggccccgccccgccccgcgctgatc

SEQ ID NO: 215804 - DNA, 201 bp, Homo sapiens; identical to SEQ ID NO: 38380

SEQ ID NO: 215805 - DNA, 201 bp, Homo sapiens
agggatgcacagaggtgggggaggggtactgtgcagggtactcagcatccctgaccaccaggtgccaatgatcagcggacgtggtctggggcacacaggargcaccttggataagctggagtctattcctggattcaatgtcatccagagcccagagcaggtacggggcgccacggatcagtcattaatccaggttgatga

SEQ ID NO: 215806 - DNA, 201 bp, Homo sapiens
aagggagccagggacttcccgacccttcgccagagcccaagcagctcccggagctgatccgcatgaagcgagacggaggccgcctgagcgaagcggacatsaggggcttcgtggccgctgtggtgaatgggagcgcgcagggcgcacagatcggtgcgtggggagggttgggcgttcctgaccccgactgggaggtcagcc

SEQ ID NO: 215807 - DNA, 201 bp, Homo sapiens
ctctgcagggaccccctggctccgcgtgcaccgggacggccccgcgctcagcggcccgcagagccgcgccctgcaggaggcgctcgtactctccgaccgcrcgccattcgccgccccctcgcccttcgcagagctcgttctgccgccgcagcaataaagctcctttgccgcgaaaccttgtcagtgcttgggcgggagcgg

SEQ ID NO: 215808 - DNA, 201 bp, Homo sapiens
tggggcacacaggaggcaccttggataagctggagtctattcctggattcaatgtcatccagagcccagagcaggtacggggcgccacggatcagtcattratccaggttgatgatggagaccctggccagaatcactaaaagatcactggtggatcattagggtcactaatgagaacactggtcaaggttactcatgagt

SEQ ID NO: 215809 - DNA, 201 bp, Homo sapiens
tggcggggcacggtggctcacacctgtagtcctagcacttggggaggccgaagagggcagatcccttgaacccaggagttcaaaaccagcctggataacamggcaaaaccccatctctacaaaatagttcgctgcgtgtggtggtgcacgcatgtggttccagctactcaggaggctgaggcaggaggatcacttgagcct

SEQ ID NO: 215810 - DNA, 201 bp, Homo sapiens
cagtgcacctcggggcaccgggtcccccacgcaggcccttcccggggcaccctttcccaacagcacgaaaatctcctgcccccaccccacccccaggtgaytcccttcaccaagtctgggtctagacttggcccccgcgagttcacgtccctgcctaatgcgcctggagtccgggtgatggccctggatccgctcccggcc

SEQ ID NO: 215811 - DNA, 201 bp, Homo sapiens
cctggataacacggcaaaaccccatctctacaaaatagttcgctgcgtgtggtggtgcacgcatgtggttccagctactcaggaggctgaggcaggaggaycacttgagcctgggaggtctaggctgcagtgagccgggacgatgccactgcactccagcctgggcaacagagtgagaccctgtcccagcactctgggagg

SEQ ID NO: 215812 - DNA, 201 bp, Homo sapiens; identical to SEQ ID NO: 38445

SEQ ID NO: 215813 - DNA, 201 bp, Homo sapiens; identical to SEQ ID NO: 38448

SEQ ID NO: 215814 - DNA, 201 bp, Homo sapiens; identical to SEQ ID NO: 38419

SEQ ID NO: 215815 - DNA, 201 bp, Homo sapiens; identical to SEQ ID NO: 38393

SEQ ID NO: 215816 - DNA, 201 bp, Homo sapiens
caccttggataagctggagtctattcctggattcaatgtcatccagagcccagagcaggtacggggcgccacggatcagtcattaatccaggttgatgatsgagaccctggccagaatcactaaaagatcactggtggatcattagggtcactaatgagaacactggtcaaggttactcatgagtcactgggcctgggccg

SEQ ID NO: 215817 - DNA, 201 bp, Homo sapiens
gctcggggctgaaccgtgcctgctagaggggagagggggtctgtgccgggggagggtccgtgttgcagatggggcttggggctgggcccggccagacgctractcggatgctcccaggctacgccctgcatgacccgtcgcggccgcgcgcccccgccttcaccttcggcgcgcgcttccccacgcagcagacgacgtgcg

SEQ ID NO: 215818 - DNA, 201 bp, Homo sapiens
accttggataagctggagtctattcctggattcaatgtcatccagagcccagagcaggtacggggcgccacggatcagtcattaatccaggttgatgatgsagaccctggccagaatcactaaaagatcactggtggatcattagggtcactaatgagaacactggtcaaggttactcatgagtcactgggcctgggccga

SEQ ID NO: 215819 - DNA, 201 bp, Homo sapiens; identical to SEQ ID NO: 38395

SEQ ID NO: 215820 - DNA, 201 bp, Homo sapiens
gcttcccgctggggccgccccgacccggccgcgcctaagacccgtccccgcccgcagggggcgccctgctctggctcagcggacacgcggggactcaggcycagggcgctgcccgggtggccgcggcgctggacgacggctcggcccttggccgcttcgagcggatgctggcggcgcagggcgtggatcccggtctggccc

SEQ ID NO: 215821 - DNA, 201 bp, Homo sapiens; identical to SEQ ID NO: 38397

SEQ ID NO: 215822 - DNA, 201 bp, Homo sapiens; identical to SEQ ID NO: 38398

SEQ ID NO: 215823 - DNA, 201 bp, Homo sapiens; identical to SEQ ID NO: 38459

SEQ ID NO: 215824 - DNA, 201 bp, Homo sapiens; identical to SEQ ID NO: 38461

SEQ ID NO: 215825 - DNA, 201 bp, Homo sapiens; identical to SEQ ID NO: 38400

SEQ ID NO: 215826 - DNA, 201 bp, Homo sapiens
ttcaaggaataagaaatatttcttagggttttgtaacctaataagtttgggaactactgggctaaacagagttacatctgtttcactttcgggcttctcasattgtgtaatatgctaatggatgttaccatccagaaggaacatgcagtgtttcctaaacttaaaaccacaattagccaggtgtggtggcatgcacctata

SEQ ID NO: 215827 - DNA, 201 bp, Homo sapiens
ggaggggctcctcacttcccagacggggtggccgggcagagaagctcctcacctcccagacggggtggcggtcgggcagagacactcctcagttcccagayggggtcgcggccgggcagaggcgctcctcacatcccagacggggcagcggggcagaggctctccccacatctcagacgatggacggccgggccgagacgc

SEQ ID NO: 215828 - DNA, 201 bp, Homo sapiens
tcagttcccagatggggtcgcggccgggcagaggcgctcctcacatcccagacggggcagcggggcagaggctctccccacatctcagacgatggacggcygggccgagacgctcctcacttcctagatgggatggcggccgggaagaggcgctcctcacttcccagactggacggccgggcagaggggctcctcacatcc

SEQ ID NO: 215829 - DNA, 201 bp, Homo sapiens
ttactacttggatggcttcacattgagtctcgtttctccctcacttcccactcatctcttcctgtatgaagcaaggtttgtggccactttgcctcttggtkctccactgctgaggtttcctcacgccctgggattttcttagtgtctggcttgactggaacctagcagccccatctccatctgtggagccagaactgccag

SEQ ID NO: 215830 - DNA, 201 bp, Homo sapiens
cctcagcctctcaaagtgctgggattacaggcgtgagccaccgcgcccggccccattttacttttttgttcctcttcagtggcttttctttcacatttttyccccaatattttaattcctttaatgatgtattcactaacttaactcgagtaagatatggaaatgttactcccacatggccctgttccttcttcctctttt

SEQ ID NO: 215831 - DNA, 201 bp, Homo sapiens
cactcatctctacttgctgtcaggtagcaggccttccaggggaagtctctgtgagatgggtggaacccatctctggggcctcgtctgcaccaggaactgcygtgcagtctctgagtagtcctgagctgtgggttacacagggccctggattttcacccagcccttaagcttttgagcccagcaaaaaggaaaacagcattt

SEQ ID NO: 215832 - DNA, 201 bp, Homo sapiens
gttattgtcattgaaggcttcttaaagtaaaggagtaacatgattcaatttttagcttgaaaatatttctttgccattgtatggggattggattggggcaragagtgcaggcagagagactagcatggaagaacctggagtgcatgctgagtttgagttaaatcttctggaaactccgtttttatctcacctgcacagcca

SEQ ID NO: 215833 - DNA, 201 bp, Homo sapiens
cccgcagtctcaggcgcagggcgcatttagctgcagcggaaccaccacaccccagggccttcagagtgtgtgagcggcaggtgctgagaaatccttccccratcccaacccctcttgttgtgtgcaggagcttttctgtgtgtgtggggccctcaagcgagctcgactggtccatcctggggtagcggaggtggtgtttgt

SEQ ID NO: 215834 - DNA, 201 bp, Homo sapiens
tggggggtggttatgtgtggatccacaggaacaggggccttgcagctggatacacctggcacttgccactgttgggttctgtttccctggccaggggagtyctgaactaggcagtttcctcacttggaatggtgattcctggttgagcgggattaaatgtgagaagggttttttttgtttgtttttttgagagggagtctc

SEQ ID NO: 215835 - DNA, 201 bp, Homo sapiens
ggccgaaggggcgggctcgcggggtctcgactgctttcggcttgctcggcggagcaagatggcggacatctccctggacgaactcatcaggaagcgcgggrcggcggcgaaaggacggtgagaggcctttcctttcttcggggtttagggtcctcggcctagtggagctcgaggcgggggaggtagcgatccgggagcgac

SEQ ID NO: 215836 - DNA, 201 bp, Homo sapiens
atgtgtgcaaagcactgccttaaaaattatctcagttgagctttccagtaaagctgggaagtaagctagtcctttttattttcagaggaggaaacaggctyagagaagttaagtaatttgctagacgtctcatagcagatagaaagcagagcctgggggatcaaactcaggtctgacttagagtgaccaactgtccctgtt

SEQ ID NO: 215837 - DNA, 201 bp, Homo sapiens
atgaagaagtgagaactttgcccaatagtttcccaacacacattaagtttaaatgtctttgtaaatagccaggatgtaaatatgttagatattgttttctsagacatttgttctctcagcagatgtttatttttatttttatgttttttttgagacggggtgttgctctgtcgcccaggctggagtgcagtggtgccatct

SEQ ID NO: 215838 - DNA, 201 bp, Homo sapiens
gaaggggcgggctcgcggggtctcgactgctttcggcttgctcggcggagcaagatggcggacatctccctggacgaactcatcaggaagcgcggggcggyggcgaaaggacggtgagaggcctttcctttcttcggggtttagggtcctcggcctagtggagctcgaggcgggggaggtagcgatccgggagcgacgcgg

SEQ ID NO: 215839 - DNA, 201 bp, Homo sapiens
  misc_feature (1)...(201): n = A,T,C or G
cagaagtgggggcagaggagggtggctctgtttccccaaggcaaagcttatgaccaatgggccatcggactggagacccctgattgtgggaagggttgccngggataaagagcttcctcactggatgggacccgcctttctgtgttgtgttctgccctgtgctcttctctctacgttaacgtttcctgtagtatgtttctt

SEQ ID NO: 215840 - DNA, 201 bp, Homo sapiens
cgaacccaggaggtggagcttgcagtgagccaagaggcgccactgcactccagcctgggcgacagagcgagactctgtctcaaaaaaaaaaaaaaaaaaaatatccggggtgtggtggcgggcacctgcagtcccagctactcgggaggctgaggcaggagaatggtgtgaacctgggaggcagagcttacagtgagccga

SEQ ID NO: 215841 - DNA, 201 bp, Homo sapiens
ctgccttcataaacccacccattgggacagtgacccctgctctgaagctcaccaaaaccatccaggtgagttgtggcttttgtcatgaattcccagaaagytagtaacaaaggtagatttagaggcaaggtgccaggagtgactgggcaaaaatactatcctctcaagtgttggcataatacagactttgctccttacaga

SEQ ID NO: 215842 - DNA, 201 bp, Homo sapiens
tggcactatctcagctcactgcaacctccgcagccagactcaagtaatcctcccacctcagcctcccaattagctgggactgcaggcgtgcatcaccatgyctggctaatttttgtagagatgaggtttcaccatgttgcacaagctggtcttgaaatcctgacctcaggtggtctgcctgcctcggcctcccaaagttgg

SEQ ID NO: 215843 - DNA, 201 bp, Homo sapiens
agatgaggtttcaccatgttggccaggctggtctcaaactcctgacctcaggtgatccgcacgcctcggcctcccaaggtgctgggattacaggcgtaagycactgcgcccggcgtgaatagagcctttcaatgcagaaatatttctttgtttgggccgtaagattttcagagctggaactagtccattcccttagtttta

SEQ ID NO: 215844 - DNA, 201 bp, Homo sapiens
tggtgctataggtgaccatctggtacattgaggggacctgtttgcctcctccactctataagcagtcatcttgggagaccgggaggagaaggtggtgggcyagtcctgtgtcctcctccacttcccatgcctctatgttacccatctgtgtctcctgtgcagaaggagaggaaggggcattaagagatgaagggtgattat

SEQ ID NO: 215845 - DNA, 201 bp, Homo sapiens
gcaaaatctatatagttggcattccagttttatttaaaccattttcctgtcattttcactgttagaaatccttctgctgtgaacatctttgtaaataaagytctttctagggtttggatttatttctgtaggtcatattaacaaggatggactttccaagccaaaggatataaagaaacattttagggactcttggtacat

SEQ ID NO: 215846 - DNA, 201 bp, Homo sapiens
acctaattcagagttgaccctcagtcatagttagaattaagctgttttctctctataaaaatgacctaaacacacacctaaacgaacaccccctaacccaraagctttttttgtttgtttttataagacggaatcttgctctgtcacccaggctggagtgcagtggtgcgatcttggctcatggcaacctctgcctcccat

SEQ ID NO: 215847 - DNA, 201 bp, Homo sapiens
tgaactgtggggtggcaggagccctcctgagatccgagttctcagatgccagccaagggccacccctggaatcggacctttcaaacaatagcagtcagccyagctgcttcactcttctgcacagcttctagccaaggccaggtgcctggcctgaatctcagagtcaggggatatctatgctataatgggtcctaaatggga

SEQ ID NO: 215848 - DNA, 201 bp, Homo sapiens
caaactcctgacctcaagtgatccgcccatctcagcctcccaaagtgcttgggattacaggcgtgagccacctcgcccagcaggggatagtattttagtgtcttgtttttctttgtgtctcttaaacacctaattcagagttgaccctcagtcatagttagaattaagctgttttctctctataaaaatgacctaaacaca

SEQ ID NO: 215849 - DNA, 201 bp, Homo sapiens
agtgaactgtggggtggcaggagccctcctgagatccgagttctcagatgccagccaagggccacccctggaatcggacctttcaaacaatagcagtcagyccagctgcttcactcttctgcacagcttctagccaaggccaggtgcctggcctgaatctcagagtcaggggatatctatgctataatgggtcctaaatgg

SEQ ID NO: 215850 - DNA, 201 bp, Homo sapiens
tcaaactcctgacctcaagtgatccgcccatctcagcctcccaaagtgcttgggattacaggcgtgagccacctcgcccagcaggggatagtattttagtgtcttgtttttctttgtgtctcttaaacacctaattcagagttgaccctcagtcatagttagaattaagctgttttctctctataaaaatgacctaaacac

SEQ ID NO: 215851 - DNA, 201 bp, Homo sapiens
cagtgaactgtggggtggcaggagccctcctgagatccgagttctcagatgccagccaagggccacccctggaatcggacctttcaaacaatagcagtcascccagctgcttcactcttctgcacagcttctagccaaggccaggtgcctggcctgaatctcagagtcaggggatatctatgctataatgggtcctaaatg

SEQ ID NO: 215852 - DNA, 201 bp, Homo sapiens
ctccgtctcctgggttcaagctattatcctgcctcagcctccctagtagctgggattacaggcgcctgccgccacgcccagctaatttttgtatttttagyagagatgaggtttcaccatgttggccaggctggtctcaaactcctgacctcaggtgatccgcacgcctcggcctcccaaggtgctgggattacaggcgta

SEQ ID NO: 215853 - DNA, 201 bp, Homo sapiens
catttcctgtgcctggaacattctctgggagccttgacaccacatttgaagttgcctattggggccagcatggtggctcacgcctgtaatcccagcacttyagaaggccgaggcaggcagatcgcatgaaatcaggagtttgagaccagcctaaccaacgtggtaaaaccctgtctctactaaaaattacaaaaattagag

SEQ ID NO: 215854 - DNA, 201 bp, Homo sapiens
cccagtggctccaggcctcactagtggcaagggcaggatgaggctgcaccgctgggaagagtctatctaagttcttggcttggagtcccgtgtcgtctccrcccagaggaagttctccagagttcacctttcccttttccttgagttgtgctgaatgccccaccccagctctctttcccttctgggtgtctttgctgggag

SEQ ID NO: 215855 - DNA, 201 bp, Homo sapiens
ccgggaggcggagcttgcggtgagccaagattgcgccactgcactccagcctggatgacagagcaagactccatctcaaacaaaacaaaacaaaactgaaraaaagaaacttccttgtcacagagagtctgggaagtccaggatcaggatgctggcagattccatgtctgatgagggcctgcctgcttcctggttgtagat

SEQ ID NO: 215856 - DNA, 201 bp, Homo sapiens
ggagcaggtctcaggcctcttgtcctctccccagtggctccaggcctcactagtggcaagggcaggatgaggctgcaccgctgggaagagtctatctaagytcttggcttggagtcccgtgtcgtctccacccagaggaagttctccagagttcacctttcccttttccttgagttgtgctgaatgccccaccccagctct

SEQ ID NO: 215857 - DNA, 201 bp, Homo sapiens
gtctcactatattgcccaggctggtcctgaactcctgggctcaagccatcctcctgcctcagctttccaaagtgctgagattacatggtgtgagccaccaygcccagggagtctcgctatgttgcccgtgctgttctcgatctcctgggctcaagccatcctgccatttggcctcccaaagtgctgagattacaggcatga

SEQ ID NO: 215858 - DNA, 201 bp, Homo sapiens
gcagcgtgggggctgtctgaaggaccctgctttttccaggggccgaggggctgcctttcctttgtgtgtattaagcttttcaaacaatggaggggatggaragccctggtgtcctgacgggagccaggtcggcctgagagctgtgccgctcctctgtcttgtcagtggaggtgcctgggtggggagcaggtctcaggcctc

SEQ ID NO: 215859 - DNA, 201 bp, Homo sapiens
ctacgttaacgtttcctgtagtatgtttcttcatctcatcgccaaggtaggcttgtgtttttcagtgtgtgcctccccgagcctcagccccaagctgattkcttatctggaaatggtacactgaattctctgggtggctttcttgtggccccatgggatgcagcgtgggggctgtctgaaggaccctgctttttccagggg

SEQ ID NO: 215860 - DNA, 201 bp, Homo sapiens
cgatgaagtgcaaccttcacatgaatgggaatgttatcacctcagaccagcccatcctgctgtgagttccaaaggcggggtgctggggagaggcagctccrtccatctctttttgttctaatgggtaaactgcctgcatcacagctccccttcatccccccattccgtttcctctgttctaatggcagctggccgtttcat

SEQ ID NO: 215861 - DNA, 201 bp, Homo sapiens
  misc_feature (1)...(201): n = A,T,C or G
tctctgctctccacaggcggctgagtgacagcccatcaatgaaaaaggagagcgagctgcctcgcagggtgaactctgcctcctcctccaacccccctgcngaagtggaccctgacaccatcctgaaggcactcttcaagtcctcaggggcctctgtgaccacgcagcccacagaattcaaaatcaagctttgagcagggg

SEQ ID NO: 215862 - DNA, 201 bp, Homo sapiens
aatcccagcactttcggaggccgaggtgggtggatcacgaagtcaggagatcgagaccatcctggcaaacatggtgaaaccccgtctctactaaaaatacmaaaaaattagccaggcgtggtggtgtgcgcctgtagtcccagctactctagaggctgaggcaggagaatggcacgaacccaggaggtggagcttgcagtg

SEQ ID NO: 215863 - DNA, 201 bp, Homo sapiens
gttttgctcttgctgcccaggctggagtgcaatggcgcgatctcagctcaccgaaacctccacctcctggattcaaacgattctcctgcctcagcctcctkagtagctgggactacaggcatgggccactacgcccggctaattttttgtatttttagtagagacagggtttcaccatgttggccaggctggtctcaaact

SEQ ID NO: 215864 - DNA, 201 bp, Homo sapiens
tggtcaggctggtcttgaattcctgacctcaaacgatccacccgtctcagcctcccaaagtgccaccgtgcctggccatacatgctattttacatactgcstagaagaatctgcgtacttggaactttggttttaatgttgcatggatattccaggaagaattttgttgtttaagaaagcttttttcctcttagtagaaat

SEQ ID NO: 215865 - DNA, 201 bp, Homo sapiens
tgttggtcaggctggtcttgaattcctgacctcaaacgatccacccgtctcagcctcccaaagtgccaccgtgcctggccatacatgctattttacatackgcctagaagaatctgcgtacttggaactttggttttaatgttgcatggatattccaggaagaattttgttgtttaagaaagcttttttcctcttagtaga

SEQ ID NO: 215866 - DNA, 201 bp, Homo sapiens
acaagcctccagaggcccctcccagcagagtcgcacaggatgctgggtgcaactcgcagcaagttgtgacaatacatgtgacaccagggaagctcattaargactcagtacccaaaggttttactgggggctggtcacttcggcattctctgtgtagcatgtactaaaattccagactcccagagggaaagcagctgttga

SEQ ID NO: 215867 - DNA, 201 bp, Homo sapiens
ccagacggggtggcagccgggcagaggctgcaatctcggcactttgggaggccaaggcaggcggctgggaggtggaggttgtagcgagccgagatcactcyactgcattccagcctgggcaacgagcactgattgagcgagactccgtctgcaatcccggcacctcgggaggccgaggcaggcagatcacttgcggtcggg

SEQ ID NO: 215868 - DNA, 201 bp, Homo sapiens
tgggaggatcgcttgagcctggaagatcgagactagtgagccatcatcatgccactgcacttcagcctgggtgacagagtgagattctgtctcaaaaaaaaccccacaaaaccctagaacatacagcactgcctgcgtctccattttctcatcagtaaataagaaaaacacagcctgggccacatagcaagacctggtctc

SEQ ID NO: 215869 - DNA, 201 bp, Homo sapiens
gcgcctgccgccacgcccagctaatttttgtatttttagtagagatgaggtttcaccatgttggccaggctggtctcaaactcctgacctcaggtgatccrcacgcctcggcctcccaaggtgctgggattacaggcgtaagccactgcgcccggcgtgaatagagcctttcaatgcagaaatatttctttgtttgggccg

SEQ ID NO: 215870 - DNA, 201 bp, Homo sapiens
aactccactgcatgattggctctgatggagacagtgccagatgctaccccttattttgttccccagtgaggttttttgtttgtttgtttgtttgtttgttttttgctttttcagttattttgagagtctcactgtgttgcccaggttggtttcaaactcctggggtcaagcaaccctctcccctcagcctcctgaggacct

SEQ ID NO: 215871 - DNA, 201 bp, Homo sapiens
gaactccactgcatgattggctctgatggagacagtgccagatgctaccccttattttgttccccagtgaggttttttgtttgtttgtttgtttgtttgttttttgctttttcagttattttgagagtctcactgtgttgcccaggttggtttcaaactcctggggtcaagcaaccctctcccctcagcctcctgaggacc

SEQ ID NO: 215872 - DNA, 201 bp, Homo sapiens
atggtggcgcgcaggacgaagctcgcggcgcgggacccggaggacggtatcccgagcccaccgtgctacgcaggtgaggggatccggaacgcgagaccggrggcggccagcatcgccgggaggtgtttgggggctggcggcggccgggggtccccaggagcggccgcacggttgggtgtgagccccggtggcccgtggccc

SEQ ID NO: 215873 - DNA, 201 bp, Homo sapiens
agaactccactgcatgattggctctgatggagacagtgccagatgctaccccttattttgttccccagtgaggttttttgtttgtttgtttgtttgtttgttttttgctttttcagttattttgagagtctcactgtgttgcccaggttggtttcaaactcctggggtcaagcaaccctctcccctcagcctcctgaggac

SEQ ID NO: 215874 - DNA, 201 bp, Homo sapiens; identical to SEQ ID NO: 38528

SEQ ID NO: 215875 - DNA, 201 bp, Homo sapiens
gagaactccactgcatgattggctctgatggagacagtgccagatgctaccccttattttgttccccagtgaggttttttgtttgtttgtttgtttgtttgttttttgctttttcagttattttgagagtctcactgtgttgcccaggttggtttcaaactcctggggtcaagcaaccctctcccctcagcctcctgagga

SEQ ID NO: 215876 - DNA, 201 bp, Homo sapiens
ttcttgcctgctttgagctggctgtcgcgagagttggtccgcggacgccggaagtagttcgtcgctccctagcggccgaaggggcgggctcgcggggtctsgactgctttcggcttgctcggcggagcaagatggcggacatctccctggacgaactcatcaggaagcgcggggcggcggcgaaaggacggtgagaggcct

SEQ ID NO: 215877 - DNA, 201 bp, Homo sapiens
ctgcagcctggacctcctgggcttagttgatcctcctgccttggccttctgagtagctgggactacagatgtgcatcatcacttgcagctaatttttttttgggggggggggtaaggttatagattaacagcatcccaaggcagaagaatttttcttagtacagaacaaaatgaagtctcccacgtctacttctttctaca

SEQ ID NO: 215878 - DNA, 201 bp, Homo sapiens
actgtggggtggcaggagccctcctgagatccgagttctcagatgccagccaagggccacccctggaatcggacctttcaaacaatagcagtcagcccagytgcttcactcttctgcacagcttctagccaaggccaggtgcctggcctgaatctcagagtcaggggatatctatgctataatgggtcctaaatgggatcc

SEQ ID NO: 215879 - DNA, 201 bp, Homo sapiens
ttcagaacattgcaggtctggcttctcagattcttttctgtctcttcgtttaggctgggctaagcagttccaagctttccatgtccaaggccctccctctyaccaaagtggttcagaatgatgcatacacagctcctgctctcccttcctctattcgaacaaaagccttgaccaacatgtcccggacactggtgaacaagg

SEQ ID NO: 215880 - DNA, 201 bp, Homo sapiens
aactgtggggtggcaggagccctcctgagatccgagttctcagatgccagccaagggccacccctggaatcggacctttcaaacaatagcagtcagcccasctgcttcactcttctgcacagcttctagccaaggccaggtgcctggcctgaatctcagagtcaggggatatctatgctataatgggtcctaaatgggatc

SEQ ID NO: 215881 - DNA, 201 bp, Homo sapiens
ggcatgcacctatagtcccagttacttggggggccgaggtgggaggatcgcttgagcctggaagatcgagactagtgagccatcatcatgccactgcactwcagcctgggtgacagagtgagattctgtctcaaaaaaaaccccacaaaaccctagaacatacagcactgcctgcgtctccattttctcatcagtaaataa

SEQ ID NO: 215882 - DNA, 201 bp, Homo sapiens
ttgtaaatagccaggatgtaaatatgttagatattgttttctcagacatttgttctctcagcagatgtttatttttatttttatgttttttttgagacggrgtgttgctctgtcgcccaggctggagtgcagtggtgccatctcggctcactgcaacctccgcctccccggttccagcgattctcctgcctcagcctccca

SEQ ID NO: 215883 - DNA, 201 bp, Homo sapiens
gaactgtggggtggcaggagccctcctgagatccgagttctcagatgccagccaagggccacccctggaatcggacctttcaaacaatagcagtcagcccwgctgcttcactcttctgcacagcttctagccaaggccaggtgcctggcctgaatctcagagtcaggggatatctatgctataatgggtcctaaatgggat

SEQ ID NO: 215884 - DNA, 201 bp, Homo sapiens
cagcctgggcaataagagcgaaactccatctcaaaaaaaaaaaaaaagaaagaaagaaaaatgtgtcacctatagagagtgtatagttagatcttactggktttttttttatttgaattcaatctgacaatctgtctttggattggattatttaatccattcatatttaatattgataattaggtttatttcttccatttt

SEQ ID NO: 215885 - DNA, 201 bp, Homo sapiens
cagtggtgtgatcttggctcactgcagcctggacctcctgggcttagttgatcctcctgccttggccttctgagtagctgggactacagatgtgcatcatyacttgcagctaatttttttttgggggggggggtaaggttatagattaacagcatcccaaggcagaagaatttttcttagtacagaacaaaatgaagtctc

SEQ ID NO: 215886 - DNA, 201 bp, Homo sapiens
tgctgaggtttcctcacgccctgggattttcttagtgtctggcttgactggaacctagcagccccatctccatctgtggagccagaactgccagtggtggktgctttgaccattgataatggaggtacagcccttgtcctcttgtgtgaggagccgaggtctcatagcagagcctttttctttctttggtttttcagggca

SEQ ID NO: 215887 - DNA, 201 bp, Homo sapiens
ggtgaggtgatggtggtgactgcagcagttggggtcaggagggctgtatgcttatatgtacctcattgtgttccccacaacgcctttgtgaggtgggcatygccacccccattctacagatgagcaaaccaagacctagggactcttaccctcaaagaccttgcaggctagtggggacggcagacctgctgagagattgcg

SEQ ID NO: 215888 - DNA, 201 bp, Homo sapiens
tgttcccacttatgtgagtgaccccatccatccatgaccagaggattattttcctgccttggcagaggaggaggagtcaagggagcagggcagctctaccrggcaaggtgtttccccagcataggcgcagacagttgggacgaaacttcagagcccaggcagtccctgaatgaccaggccagtgttgtcactgagtggtcc

SEQ ID NO: 215889 - DNA, 201 bp, Homo sapiens
agacacagtaacaatctgatctctcttttccccacatttcccccttttctattcgacaaaaccgccatcgtcttcatggcccgttctcaatgagctgttgsgtacacctcccagacggggtggcggccgggcagaggggctcctcacttcccagacggggtggtggctgggtggaggcgccccccacctcccgaacagggc

SEQ ID NO: 215890 - DNA, 201 bp, Homo sapiens; identical to SEQ ID NO: 38603

SEQ ID NO: 215891 - DNA, 201 bp, Homo sapiens; identical to SEQ ID NO: 38604

SEQ ID NO: 215892 - DNA, 201 bp, Homo sapiens
gggttttaccgtgttagccaggatggtctcgatctcctgacctcttgatgtgcatgccttggcctcccaaagtgctgggattacaggcatgagccatcgcrcctgacctttctttctttcttttttttttttttttgagactgagtctcgctctgtcaccaggctggagtgcagtggtgtgatcttggctcactgcaacct

SEQ ID NO: 215893 - DNA, 201 bp, Homo sapiens
gttgtcgatctgggtgttgcggaccacagcattctcatcaaaacgggggttcaggtggaaggcgatgtggttcccagagcacaggttgatgtggaacctgsggtgggcagcccacctgaacctttatccaccgaattctgagtcccatttcctccccatcatcagtagccttcctgaagccaggggaatggctggactgac

SEQ ID NO: 215894 - DNA, 201 bp, Homo sapiens
tggtcaggtggtggaggccagtgggaagccatcaggcctgctttccaggaggggtgaagggttggtgcacggtgcaaggtgagagtgaggttaaaggtcaragaggaggggctgaggaggccacctcccaccaggagcagacagctggtggcttgggactggggtggagctgcgtgggggatgggaggggactgagcatgg

SEQ ID NO: 215895 - DNA, 201 bp, Homo sapiens
tggagcccttggcttacctctgagcactgggcaggacagtgcctgacaggaggatggacttggatgggtacagccctcccagaatggtggtgatgaaaggmatcggctgtcggaagaagggggacaggtcagccaccacgcggaaggggaagattgtaccagttcccatgaatttgggctgtcagctgagaagaagcccat

SEQ ID NO: 215896 - DNA, 201 bp, Homo sapiens
gggtcttctcagagctgaccaggcacagagggaccctgggccagaggtttgccctcggagtgtgtcacgggtcaagccacagaaaccaagtccctctcacrggtctgcaggccaagcatggggtggtcatgggagttggtgacaaggctcaggggttgggaggactagaaggggctgcagctccatgctccagctggatgg

SEQ ID NO: 215897 - DNA, 201 bp, Homo sapiens
tctgctggcattagcagccatgccatcggtaggactggctcacctggtaacctgtggccacctgtgcttttacatctactcttggttaaccacgggccacktttccagcttggactctaagcgtctgttccacttcctctccttcctcattgaactctttcactaaaaggagagtgcaagagagacttaaactgtttgact

SEQ ID NO: 215898 - DNA, 201 bp, Homo sapiens
gagtcagggaagctgagctgtccacctgattccaccgcgacctgagtgaccttctccaagtcacttttccactccggaactcagtttctgcttgggcagaygggacaacctgcaacctctctaagtccctttcaacgttcctcagctccgcgcttacagagggtggatctcagaaccagaacaaacagctgctcattgagt

SEQ ID NO: 215899 - DNA, 201 bp, Homo sapiens
caccttcttcctgccttttgctcttagagccaggtctttagagcctcctttcccctgcagctggagaatagagggtgtctgcctgggggcctcgctacctrctgagaatcctgaatggggcctcttttccatcctgacaccttccttccccatccaggcagctactgggtcagtgacaagaggctgcccccctgctcactc

SEQ ID NO: 215900 - DNA, 201 bp, Homo sapiens
ggggctgtggccctaggagaatgggggagaagactggcagggccctattctgggcatctcacagagagccagggaggcagcagagcttgtggctaatgacyctgggtctggtgctgggaagggatctggggccaggtaagaggagcccagcccggagcccatccctcagggatcataggatggagagatggaggatcaccg

SEQ ID NO: 215901 - DNA, 201 bp, Homo sapiens
ggtcttcctcttcaccttttctttctcctcttcttcctggactctaagaaagtacaggaggcccatcggtcctcagggcaggcgctcaatgcgtgtgtacsgaacatgctgtgcaggagggggatgtgggcaagagcctcccacaagccccctcccactttccttggtggcccgctctccccctcacagggccctcaagcg

SEQ ID NO: 215902 - DNA, 201 bp, Homo sapiens
ccctctggagatgcccagggctggatgggagggggccaggctattctgggtctcccaccaggggacagggcccacacaagttgctacagtttagctggagkgagagacaagctaaaattctcacctgacaaccaggtccttggccaggtggccccatatgtaaaccaacttccattgtgggccaggagccatctcctgcca

SEQ ID NO: 215903 - DNA, 201 bp, Homo sapiens
tcttcctcttcaccttttctttctcctcttcttcctggactctaagaaagtacaggaggcccatcggtcctcagggcaggcgctcaatgcgtgtgtaccgracatgctgtgcaggagggggatgtgggcaagagcctcccacaagccccctcccactttccttggtggcccgctctccccctcacagggccctcaagcgca

SEQ ID NO: 215904 - DNA, 201 bp, Homo sapiens
ctgtgcacccatgggagcctctccaagctccagactgcggtgccttactgagaagctctggccacggacgaagggcatttttcggggcagacttcgctccycagacccccaggagttgtcgatctgggtgttgcggaccacagcattctcatcaaaacgggggttcaggtggaaggcgatgtggttcccagagcacaggtt

SEQ ID NO: 215905 - DNA, 201 bp, Homo sapiens
gcctgagaactctgtcatttcctctctttctagaaactgaagaaatccctcttcatgctgaaagagctcaccaacaaattcaggtaaagctttttccctcytcctgcaacttctaaccttgccctgaggacccaaagtctggctcaggggatggaactgggtgcgcatacggggtcttctcagagctgaccaggcacagag

SEQ ID NO: 215906 - DNA, 201 bp, Homo sapiens
catgccatcggtaggactggctcacctggtaacctgtggccacctgtgcttttacatctactcttggttaaccacgggccacttttccagcttggactctragcgtctgttccacttcctctccttcctcattgaactctttcactaaaaggagagtgcaagagagacttaaactgtttgactcattcttaagaactttca

SEQ ID NO: 215907 - DNA, 201 bp, Homo sapiens; identical to SEQ ID NO: 38607

SEQ ID NO: 215908 - DNA, 201 bp, Homo sapiens
ccgctggcccatgtctaggacacagttgtgttgagtgaactgaatttttccaagtgtctgcaggatgcaaccagagtgcactgccttgaacattagctagraaggggagccgcccttatccgtctttgctttccccaaaactggaataaacttgtcacttaagatgtattgggggatggatggtgtggatgaatggataaa

SEQ ID NO: 215909 - DNA, 201 bp, Homo sapiens
tccctcaggcccttagaagagctccaccttgtgcacacaactctgggggagaaggtggcacagatacccccctgcccttagggagcttctagtttaaggtktcccccactgactacctaggtcaccttttaactactgtgtctgtttcagtctcacagccatagagagcctagggacaggcaccacacagtggcagatcca

SEQ ID NO: 215910 - DNA, 201 bp, Homo sapiens
acagttgtgttgagtgaactgaatttttccaagtgtctgcaggatgcaaccagagtgcactgccttgaacattagctagaaaggggagccgcccttatccrtctttgctttccccaaaactggaataaacttgtcacttaagatgtattgggggatggatggtgtggatgaatggataaatgggcataatgggcagagtga

SEQ ID NO: 215911 - DNA, 201 bp, Homo sapiens
gcttagtggtgcacatctgtagtctcagctacttgggaggctgaggtgggaggattgcttaaacccagggaggctgaggcttcagtgagctatgatgacaycactgtactccagcctgggtgacagagcgataccctatctcaaaacaaaaacaaaggcaaaacaacattcaaaatagtagcaatagctactatgtgccaa

SEQ ID NO: 215912 - DNA, 201 bp, Homo sapiens
atctcccaagtttgcctccctgtgcgggcctttgtgggttagaatggccgccttcacgtctccggcaccggagccggggctccctctcctggtagtggggrtaatgggaaagtccttgcttttgagctccgatgggctgagggaatcccgcatctgcattttcagttgtgtgactatggatgagtgatctgaatgccctgg

SEQ ID NO: 215913 - DNA, 201 bp, Homo sapiens
gataccctatctcaaaacaaaaacaaaggcaaaacaacattcaaaatagtagcaatagctactatgtgccaagcccagacacctctttgagtccttgctgkcaccctatcaggtaagtgtgcttcgaagttacacgaagcagatggcttagtatctggcccatggtaagggcctaaaaagtggtagccccagtggtgggga

SEQ ID NO: 215914 - DNA, 201 bp, Homo sapiens
tctgcagcacatggctcaacaactgaagcctcaaaacccagtgccctgctttgtgcggaagtaagcaccccttccactctgtcccctgtgggaccgccgayccctgggggttccgggaggaaagggagggatctggggtttaggtgccactcgggggccccgtggcccataaagaagacactggggtcacactggtgtgcc

SEQ ID NO: 215915 - DNA, 201 bp, Homo sapiens
gcttgtttgtgttggggtctgagccctgagctcatggtcaaggagaaccccaggtccttctgaacagagacagctggcctcggggcctccctctcactgcrtgcaagagcctgttagggcacaagactcaaggcgctgagggaggctgtttcaggagggagccgcagaaggatggtggagagagaaggggacagcatccgc

SEQ ID NO: 215916 - DNA, 201 bp, Homo sapiens
gagcctgttagggcacaagactcaaggcgctgagggaggctgtttcaggagggagccgcagaaggatggtggagagagaaggggacagcatccgccgaggscctactgtgtgccaggcactgtccagggctcctggcccacatgggctaagtgaatctggacactcctcctgggagaaaggcacagatggagaaattgcag

SEQ ID NO: 215917 - DNA, 201 bp, Homo sapiens
ctgttagggcacaagactcaaggcgctgagggaggctgtttcaggagggagccgcagaaggatggtggagagagaaggggacagcatccgccgagggcctmctgtgtgccaggcactgtccagggctcctggcccacatgggctaagtgaatctggacactcctcctgggagaaaggcacagatggagaaattgcagttca

SEQ ID NO: 215918 - DNA, 201 bp, Homo sapiens
tgaactctattatgtacctatgaaatagctactgtgaaaagtactttggagagtatctaataaacaaattactcagtctgtacacttataactaaaaagtsaacacagaaagaaattagaaaaagagcaaactaaacccaagctaccagaaggaaataaagaatagagtggagataaatatagtatagaaaaacaaggctg

SEQ ID NO: 215919 - DNA, 201 bp, Homo sapiens
gagcgagactccgtctcaaaaaaaaaaaagaaaaagaaaaagcaggccaggtgcagtggttctcgcctgtaatcccagaactttgggaggctgaggcaggyggatcatgaggtcaggagttcgagaccagcctggccaacatggtgaaaccccatctctactaaaaatacaaaaattagccaggcatggtagtgggcacct

SEQ ID NO: 215920 - DNA, 201 bp, Homo sapiens
agatcacttgaggccaggagttcaagatcagcctggccaacatgacgaaaccccatctctactgaaaatacaaaaatgagcctggtggtgggtacttatamtgtaatcgcagatattcggaggctaaggcatgagaatcacttgaacctgaaaggcggaggctgcagtaagccaagacctcaccactgcactccaacctgg

SEQ ID NO: 215921 - DNA, 201 bp, Homo sapiens
accttcggaggccaaggcaggaggatcatttgatcccaggaattaaaccagcccggccaacatagcgagaacctgtctctacaaaaaaaaaaaaaaaaaaacctaaaaaaatcacccgtggtggcacacacctatagtcctggctacttgggaagctaagatgggagaatcgcttgagcccaagaggtcgcagctgcagtg

SEQ ID NO: 215922 - DNA, 201 bp, Homo sapiens
ttatataattgtgaggttgttggccgggcacagtggctcacgcctgtaatctcagcactttgggaggccgaggtaggcggatcacctgaggtcaggagttygagaccagcctggacaacatgatgaaatcccatctctactaaaaatacaaaaattagccaggtgtggtggcaggtaccagtagtcccagctactcaggag

SEQ ID NO: 215923 - DNA, 201 bp, Homo sapiens
taaatttttttgtagcaatgaggtctcactatattgctcagaactcctggcttcaagtgatcctcctgccacagcctctcaaaatgctaggattataagcrtgagccaccatgcttggcctattatttattttttaactcaggtatttataggcttatataaatatttgatgctaattatataattgtgaggttgttggcc

SEQ ID NO: 215924 - DNA, 201 bp, Homo sapiens
aaataactatttacctcattagcctcttgtgatagatatactattttagtgtcatagtgggaatatggctttggagtcagataaacctaggcttgaatccygtctctgccttctattatctctctggcctttgggcagcttaggtaaattctttgagcctcaatatctcatctataaaataaggatacaaatacctaccta

SEQ ID NO: 215925 - DNA, 201 bp, Homo sapiens
caccctccttggcctcccaaagtgctgggattacagacgtgagccaccacacctggccctgtccttatcattctttgggtaccttttctggggtaaaagtytccatgttcatctttctctgccccagccctgaagttatccttttcttgaaggagcaatttaagaaaaacattctccttaaacagtagaatatttagaaac

SEQ ID NO: 215926 - DNA, 201 bp, Homo sapiens
ccgcccgccttggcctcccaaagtgctaggattataggcgtgagccactgtgcccagccaataataacttataaaacatgaaacgatttagtgagaaaagyggccggttttttggggggaattactttctgtcataaagaagatagatgggttctcatgtcttctacattcagtctgttgtgcagtcacatatcatgtaga

SEQ ID NO: 215927 - DNA, 201 bp, Homo sapiens
tggcctgaagtgatccaactgcctcggcctcccaaagtgctgggagtacaggcatgagccaccatacctgacctcatcttttttattaaaaaaaaaaaaaatctgatcgtatagactcacatatttttgttttattcaatggagcagaatccactagtattgttatttttttagatgttcagtttaccagatttaccgaat

SEQ ID NO: 215928 - DNA, 201 bp, Homo sapiens
agacggggtttcaccatgttgaccaagctggtctcgaactcctggcctgaagtgatccccctgcctgggcctcccagagagctgggattacaggcatgagycactgtaccattttatttcttaaaaaagaaacaaatgagtcaagctgatctgaatggtcagggtgggtgtttatatttttctctttcctttgtgtatgtt

SEQ ID NO: 215929 - DNA, 201 bp, Homo sapiens
taggaggagactattactaagggtctaatatttcatctttatggtggaaatggatcttgagctgggacttaaaggatagttaggatttgaatgcctaggaygatgattacaatgtgaacaaagtagtagaatgaacatgttatgcttttgagataatgaagaccagatctaaactatggaaatattttattttatttttat

SEQ ID NO: 215930 - DNA, 201 bp, Homo sapiens
ggaggcggaggttgcagtaagctgagacctcaccactgcactctagcctgggcaacagagcaagactctgtctcaaaaaaaaaaaaattatttgtataaaygtgtggggtacaagtataattttgttacatggatatattgtacagtagtaaagtcagagcttttaatgtatccatcactggaataatttctcatcatccc

SEQ ID NO: 215931 - DNA, 201 bp, Homo sapiens
gtgagccaccgcacctggcctggtagatattttctttttttcttttttttttttttgagacagagtctcgctctgttgcccaggctggagtgcggtggcgygatctcagctcactgcaagctctgcctcccaggttcacgccattcttctgcctcagcctcccgagtagctgggactacaggcacctgccaccacacctgg

SEQ ID NO: 215932 - DNA, 201 bp, Homo sapiens
tttgtaacaaaagtggatttgtaaaaatgttttgttaaaaacaatggtccagggaaaaatgcaaagaaaactgccttttttttttttttttttttttttttggtgagatgaagtcttgctctgtcaccaggctggagcgcaatggcatgatctcggctcattgcaacctccgcctcccaggttcaagtgattctcctgcct

SEQ ID NO: 215933 - DNA, 201 bp, Homo sapiens
ctttgtaacaaaagtggatttgtaaaaatgttttgttaaaaacaatggtccagggaaaaatgcaaagaaaactgccttttttttttttttttttttttttttggtgagatgaagtcttgctctgtcaccaggctggagcgcaatggcatgatctcggctcattgcaacctccgcctcccaggttcaagtgattctcctgcc

SEQ ID NO: 215934 - DNA, 201 bp, Homo sapiens
tttaggaatactacgtttgaaggaagaaatcttatgagaaaacgttaatgggcatagagttatgatttcctgaagtttttttcctttttttttttttttttgagacagagtctcactctgtcacccaggctggagtgcagtggtatgatctcggctcactgcaacttctgcctcctgtgttcaagcaattctcctgcttca

SEQ ID NO: 215935 - DNA, 201 bp, Homo sapiens
tggctcaagtgatctcctgcctctcagcctcccaagtagctgggaatacaggagtgtgccactgtgcccagcttgcctacctttttttttttttttttttkgaaacagagtctagctttgtcgccagactggagtgcagtggtgcaatttcggctcactgcaacctccacctcccgggttcaggccattctcctgcctcag

SEQ ID NO: 215936 - DNA, 201 bp, Homo sapiens
aatgtcatatgaagctcttagttgtttttttttttttaacaaagtaatctttattgtggtcataatacatcttttcatagtcattagtttaaatgtggatwcacattgcttttcacagcttcaaatttatgatttggagagtaagaggcaagttatatttcataaggattcaaatctttgaaattactgctactcttagat

SEQ ID NO: 215937 - DNA, 201 bp, Homo sapiens
gttttgatgcgaatgcagaaaataatgtggtagtatgaagtctggccggttgcagtttgtttttaggggggaaactttaaaagttcatgttgtgtcttctktctaaatatgctgaaagtcggatttatttaaaaggcaattaaattcagtgaatacagagtatctttttataacactaatgttagtgctaggcactggcgg

SEQ ID NO: 215938 - DNA, 201 bp, Homo sapiens
gatatttgtcagatggctttttttattctctgcagtatagtacatgacttaggttcattcatgtcatatgactgtgatacatttgtagcagctcactcaaytgatataaataaattttagttggttcatttgcatgttactaaatttatgatagaaaatgactgcggtaatggtgactttgtggtgtctccatgttaaaat

SEQ ID NO: 215939 - DNA, 201 bp, Homo sapiens
ataaaagagtttattacttgtcagcaatgatgaatgttcgtgtggcatccagcgttgagttcctatgtacgtaatttgagataagtaaagataggaaactrctgatttgttttgatgcgaatgcagaaaataatgtggtagtatgaagtctggccggttgcagtttgtttttaggggggaaactttaaaagttcatgttgt

SEQ ID NO: 215940 - DNA, 201 bp, Homo sapiens
gcctttcctgttagtggacatgttccataaaactcagtcttctctgtctcctgattgatttcatcactgcactttttgggatagtatttgagaagatgttyggtaaactgtgatatgctatatcaatgtaagatgatggtgatagttggaagtagaccgaagaaaaatgaaggcagttcttttcatctgttcattcttgtg

SEQ ID NO: 215941 - DNA, 201 bp, Homo sapiens
ttttaaaataccacattcttagtagtccaaatctattttgactggcctttcctgttagtggacatgttccataaaactcagtcttctctgtctcctgattratttcatcactgcactttttgggatagtatttgagaagatgttcggtaaactgtgatatgctatatcaatgtaagatgatggtgatagttggaagtagac

SEQ ID NO: 215942 - DNA, 201 bp, Homo sapiens
gctaggattacaggagtgagccacctcgaccagcctggccaaacattttaataaatagttctctaaacataattatgtctagacagtttttttttttttttgaggcaaggtctcactctgtcacccaggctggagtagagtggcgcgagccaccgtgcccagctgataatgggtatttttaaacattgaatgaggtaggcc

SEQ ID NO: 215943 - DNA, 201 bp, Homo sapiens
aaaaaaacatttcaatcaaaataacatgtcaaagcagactgagagcggtaccaattatgagaccccagctgattttttgacgtgagacattttaaaaagtrtttgtgaaaaatcctttcactctgattcgctttttaaattaaaacttaatctattagttgtgaaaggcttatgttgaaaaaaggcttatgttaaaaagca

SEQ ID NO: 215944 - DNA, 201 bp, Homo sapiens
tttttgacaagggaagaatcctctcttcattaaatggtgctgggaccaaaaaatcggaagagctctcacagaatggtcaaagaaaagtctctttgcctaaygggatcaatttaactccttattgtgcttcaacagacacggtctcatgagcagtgagatttgaactcaccacaggctcccaaaatcactgaacaggagatg

SEQ ID NO: 215945 - DNA, 201 bp, Homo sapiens
tgtcacctttcccataggattttctcatttaaattactgttgtcactaccactttggtccttggagtatataagtagcccattaaaaatttctaggaaagracaaaaatatattttcttcattactatgattacagctaaaataagctgaaactttccaaaagatttcattttctatcacttagtatatagtaaaccagaa

SEQ ID NO: 215946 - DNA, 201 bp, Homo sapiens
aaaataaataattattgttggtaatgtttacacagcagtgttagagcctctctgtagtgaaacaaaaataatgttcttaccaaaaaaaaaaaaaaaaaaaagaggcaatgataaaatcaatgagcttatctttctgatatagaaaataacaggatgacagttaatacatgttcaggaatctaagaaaatgtttcatatagg

SEQ ID NO: 215947 - DNA, 201 bp, Homo sapiens; identical to SEQ ID NO: 38610

SEQ ID NO: 215948 - DNA, 201 bp, Homo sapiens
gaaaataaataattattgttggtaatgtttacacagcagtgttagagcctctctgtagtgaaacaaaaataatgttcttaccaaaaaaaaaaaaaaaaaaaagaggcaatgataaaatcaatgagcttatctttctgatatagaaaataacaggatgacagttaatacatgttcaggaatctaagaaaatgtttcatatag

SEQ ID NO: 215949 - DNA, 201 bp, Homo sapiens
tcaagtatttcatgactttagtactattttaggtactgctataaaactcatgctggttggggggcagtggttcacgcctataatcccagcactttgggagkctgagggaggaagattgcttgagcccaggagttcaagaccagcctggacaagaccctgtctctacagaaaatttaaaaaatatatgctttcacaataaaa

SEQ ID NO: 215950 - DNA, 201 bp, Homo sapiens
agaaaataaataattattgttggtaatgtttacacagcagtgttagagcctctctgtagtgaaacaaaaataatgttcttaccaaaaaaaaaaaaaaaaaaaagaggcaatgataaaatcaatgagcttatctttctgatatagaaaataacaggatgacagttaatacatgttcaggaatctaagaaaatgtttcatata

SEQ ID NO: 215951 - DNA, 201 bp, Homo sapiens
taagccgagatcgcgccactgcactccagcctgggggacagaacgagactccatctcaaaaaaaaaaaaaacaaaaaaaacttacagaaaatgttcaagarcaatataaagaacttttcttggccaggtgcagtggctcacgcctataatcccagcattttaggagaccgaggcaggcagatcacaaggtcaggagtttga

SEQ ID NO: 215952 - DNA, 201 bp, Homo sapiens; identical to SEQ ID NO: 38614

SEQ ID NO: 215953 - DNA, 201 bp, Homo sapiens
tcatttacatttgtcccattatgatgatgttaaatttgacactcgattaaagtggtgtctaccagagtcctttactgtaaagttactcattttccctttgyaattaatctgtatttagtgggaaggactttgaaataggatacttatgttgctcacaagacctcagattgattgattgattgatttgtgtctatacctact

SEQ ID NO: 215954 - DNA, 201 bp, Homo sapiens
cccgtctatactaaaaatacaaaaattagctgggtgtagtggtgtgcgcctgtagtcccagctactcaggaggctgaggcaggagaatcacctgagccccrgaggcagaggttgcagtgagccgagatcgtgccactgcactccagcctgggcaacagagcgagactccgtctcaaaaaaaagaaaaaaagaaatacatat

SEQ ID NO: 215955 - DNA, 201 bp, Homo sapiens
tgcagtggtgcgagcttggctcaccagaacctctgcctccaaggttcaagcgattctcctgcctcagcctctggagtacttgggattacaggcacctgccrccatgcccagctaatttttgtgtttttagtagagacggggtttcaccatgttgaccaagctggtctcgaactcctggcctgaagtgatccccctgcctgg

SEQ ID NO: 215956 - DNA, 201 bp, Homo sapiens
gttttgttttaattaaaaatagaaacatgtcatatatagcatatgtaatttttctttttttaaaaaaattttttttcaggaaatgtggtacagataaatamcaaatatagggagagagttaaaagaataagaataaaatacatatgtaccacctacctcaaaacatagattcttatcagtataccttatgtgtctttctgt

SEQ ID NO: 215957 - DNA, 201 bp, Homo sapiens
agttatttttaacaactttccatcattataattgatatacagtaagatggatatatatatatatatatatatatatatatatatatatatatatatatatwgttttgtttcattttgagacagttttgctcttgtcacccaggctgaagtgcagtggtgcgagcttggctcaccagaacctctgcctccaaggttcaagcg

SEQ ID NO: 215958 - DNA, 201 bp, Homo sapiens
tggcgtgaacctgggaggtggagcttgcattaagccgagatcgcgccactgcactccagcctgggggacagaacgagactccatctcaaaaaaaaaaaaaacaaaaaaaacttacagaaaatgttcaagaacaatataaagaacttttcttggccaggtgcagtggctcacgcctataatcccagcattttaggagaccga

SEQ ID NO: 215959 - DNA, 201 bp, Homo sapiens
gtgccccgtaatttttatatatacttaattgttcttggcaacatagagttttttgttattatgttttttgaggctggagtgcagtggcacgatcatagttmattgcagcttcaaactccccgtctcaagtggtcctcctacctccgcctcccaaatagctggaacgataggtgtatgtcaccatgcccagctaattttttt

SEQ ID NO: 215960 - DNA, 201 bp, Homo sapiens
atggcgtgaacctgggaggtggagcttgcattaagccgagatcgcgccactgcactccagcctgggggacagaacgagactccatctcaaaaaaaaaaaaaacaaaaaaaacttacagaaaatgttcaagaacaatataaagaacttttcttggccaggtgcagtggctcacgcctataatcccagcattttaggagaccg

SEQ ID NO: 215961 - DNA, 201 bp, Homo sapiens
aggcgggtggatcacgaggtcaggagttcaagaccagcctggccaacatagtgaaaccccgtctctactaaaaatacaaaaattagccacgcatcgtggcrcgtgcctgttagtcgcagctacttgggaggctgaggcaggagaattgcttgaacccaggacgcagaggctgtggtgagccaagatcacagcactgcaccc

SEQ ID NO: 215962 - DNA, 201 bp, Homo sapiens
tgaccaccaccacacctggctaatttttttttgtatttttagtggagacggagtttcaccctgttagtcaggatggtcttgatctcctgacctcgtgatcygcccgcctcagcctcccaaagtgctaggattacagacttgagccaccgtgcctggccaaaaaatgataaatttttatttaaccaacttttttttttttta

SEQ ID NO: 215963 - DNA, 201 bp, Homo sapiens
gtttatgaagccagttgtagtagtccatttttacgctgctgataaagacatacccgagactgggaagaaaggaaatttaatttgacttagttccacatggytggggaggtctcataatcatggcatcagcaggagaaaatgagcaagaagcaaaagtggaaactcctgataaacccaccagatctcgtgagacttattcac

SEQ ID NO: 215964 - DNA, 201 bp, Homo sapiens
ctgttcattggtgagagccaggccattaacacctacgcagtgttactgaaagaagagaggtgggagtggagcagaattagtctgtcccagctagagagagmtaaagaggactagttagttcttggagcagctgctttgaggagaaaatatatagcttttgacccaagaggaagatccagaaaattattgaatatattaaag

SEQ ID NO: 215965 - DNA, 201 bp, Homo sapiens
ggagtggttgtcctggttcttactgtgttatttgtagggctggcagctgtgtgaagaactgaggtgaccagcatcatcttcctacacattattgtattcayccatctttcagtttgtcagtcttatctccaccctgggaaaagttctccttatttgtttagattcttttgcgctttcagatccccttggaacagtacagta

SEQ ID NO: 215966 - DNA, 201 bp, Homo sapiens
agccaccgtacctggcctggtagatattttctttttttcttttttttttttctctgagacagagtctcgctgtgtcgcccaggctggagtgcagtggtgcsatctctgctcactgtaagctccgcctcccaggttcatgccattctcctgcctcagcctcccgagtagcccggactacaagcgcccgccaccacacctggc

SEQ ID NO: 215967 - DNA, 201 bp, Homo sapiens
aacttcagcagttgttgtgtggaaagcaaaagggtgctgtgataaagtaggttagggccaaagagatgatgcagggcttttttttttttttttttttttgktacagagtctcgctctgtcacccaggctggagtgcagcggcacgatcttggctcactgcaatctcttccggattcaagcgattctcctgcctcagcctcc

SEQ ID NO: 215968 - DNA, 201 bp, Homo sapiens
agggtttcatcatgttggtcaggctggtctcgaactcctgaccttgtgatctgcccacctcagcctcccaaagttctgggattacaagcgtgagccaccgyacctggcctggtagatattttctttttttcttttttttttttctctgagacagagtctcgctgtgtcgcccaggctggagtgcagtggtgccatctctgc

SEQ ID NO: 215969 - DNA, 201 bp, Homo sapiens
tgactcccaaaggagagaagaaaggctcaggcaaaggaaatagatggcgcggaggctagggaagatggtcatttcaggaacttcagcagttgttgtgtggraagcaaaagggtgctgtgataaagtaggttagggccaaagagatgatgcagggcttttttttttttttttttttttgttacagagtctcgctctgtcacc

SEQ ID NO: 215970 - DNA, 201 bp, Homo sapiens
ggttgtcgactaggggagctctactgctcttgctctggaatctatgatcctgagtattctctctcctgattactcaattctgtgcctcgcccaacatcgcytcccccttatattttaatgtttatgaagccagttgtagtagtccatttttacgctgctgataaagacatacccgagactgggaagaaaggaaatttaatt

SEQ ID NO: 215971 - DNA, 201 bp, Homo sapiens
ggcctgtaggtgaggatcaatctcaatctgagtccccgcactaaagacttacaaataaatcccgatttaggcaaaccgagactttattcggaaaggattaytgcaacaggggggaaaaggactattgcaataagggtggagaactattgcaataggaagaaggactgttgcaattgggagaatgctggactataaaataaa

SEQ ID NO: 215972 - DNA, 201 bp, Homo sapiens
actttgaaatatatttaaccaaagaggtacgagacttgtacgtggaaaactataaaacactgctgaaagaaatgaaagaaggtctaagtatggtcatgtaktgcttaaccatgggggcaccttctgagaaatgtgtcgtgtaagtgaattcgtcgttgtgtgaacatcacagagtatacttacacaaacctggatggtata

SEQ ID NO: 215973 - DNA, 201 bp, Homo sapiens
gtaatcccagcactttgggagcccaaggtgggcagatcacctgaggtcaagagttcaagaccagcctggccaacgtggtaaaaccccgtctctactaaaartacaaaaaattagctgggtgtggcggtgcatacctgtaatcccagctactcaggaggctgaggcaggagaatcacttgaacctgggaggcagaggttgca

SEQ ID NO: 215974 - DNA, 201 bp, Homo sapiens
gcagatcacctgaagtcaggagattgagaccagcctggccaacatggtgaaaccctgtctctactaaaaatacaaaaattagctgggtgtggtggtgcacrcctgtaatcccagctacttagaaggctgaggcaggataatcgcttgaatgcgggaggcggaggttgcagtgagatcgcaccactgcactccagcctgggc

SEQ ID NO: 215975 - DNA, 201 bp, Homo sapiens
gtacaggccaggtaggccaggtgtagtggttaatgcctgtaatctcaacaccttcggaggccaaggcaggaggatcatttgatcccaggaattaaaccagyccggccaacatagcgagaacctgtctctacaaaaaaaaaaaaaaaaaaacctaaaaaaatcacccgtggtggcacacacctatagtcctggctacttggg

SEQ ID NO: 215976 - DNA, 201 bp, Homo sapiens
ttgagccctttaaaaataacacatttttggccaggagcaatggctcacacccgtagtcccagcactttgggtggccaagacaggcacatcactggagcccrggagtttgaaaccagcctgggcaacacagtgaaatcccatctctacaaaaaattagctggacatggtggttggagcctgtagtcccagctacttgggggt

SEQ ID NO: 215977 - DNA, 201 bp, Homo sapiens
ttttaaatttttgtttatagattttaaaaaagaaatcagacagtctcccaagtcagaagagtctcagactcccaatttattaattttttttttttttttttgagacagggtctcactcttacccaggctgaaattcagtggcacaattatagttcactgcagccttaaactcctggactcaagcaactctcctgcctcagc

SEQ ID NO: 215978 - DNA, 201 bp, Homo sapiens
ttgatagcctttttgaggaagctcagaaggttagttccaaatgtgtgtctcccgctgaacagaagaaacaggtaaataaatgtctattacttttctttttytttcagtgtttctcaatatatggacctgttagagggtccctaaggtcaaaattgttttgtttgagacaaggtctttctctgtcacccagactggagtgca

SEQ ID NO: 215979 - DNA, 201 bp, Homo sapiens
tgctcactttttctttagacacttttaagtaatactttaggactacatggtaacttacatattaagctttttacttactttctttttacttactttctttktacttttacagtaaggcgaaagagaatgaaagacgtagataacctcaaaagtataaaagaagaatggtaagttaattcaaactgaattgctttgttaatg

SEQ ID NO: 215980 - DNA, 201 bp, Homo sapiens
acctggtttctgacaggccatgggcttaggggttggggatcccaatctccagtgcacaggacacctcatacagcaaagcattattcatttctaaatgttartagagctgaggttgagaaaaccatgctctggactaaaaaggggttaatgacttccccaaggttatattaacttaggagagggcctgaactacagacatgc

SEQ ID NO: 215981 - DNA, 201 bp, Homo sapiens
atgtgcatcctacttgttgtatctcatgggtaaaggccaaggatactgtttaacattctgcaacagtgatccccaacttttttggcaccagggactggttktgtggaagacagtttttccacggacctgtcaggagagaaggggagaaggggagatggttttgggatgattcaagcacattacatttatttgcactttatt

SEQ ID NO: 215982 - DNA, 201 bp, Homo sapiens
aataaatcactataaataatgttttcagtgggaaatattctgaagtgtgcaaaggaacaaaaatgcaattgttcctgatgcattatcccctttagttcaaragtgttttctgttaccaaaaaaacgcatagtaatcccttttaaagtcattttgagccctttaaaaataacacatttttggccaggagcaatggctcacac

SEQ ID NO: 215983 - DNA, 201 bp, Homo sapiens
tgaaggaatgaaatttcagctactctggatgctcagctttattggctttgtatttagtaattactaatggagcactaactaccatctgaacagaagaaacmgttaaataccagaaagcataaaatggttataatgatattactaatatttgagagtgtactgtgtgccagtatgtatactgatacttactatataccatgt

SEQ ID NO: 215984 - DNA, 201 bp, Homo sapiens
gtataataccttgatacaaatccataatctaaaaaaaagtggccagttttttgtttgtttttgcattttttctcctcaaattccttttgaccatgaaatayatgttttaaaaaataaaattgtaatgtgcaatttttaatttaatttttaattatgcatttaattctttttttttcttctctttttttttttttgagacag

SEQ ID NO: 215985 - DNA, 201 bp, Homo sapiens
tctctgtcacccagactggagtgcagtggctcgatcttagcccactgcaacctcaacctcctgggttcaagcagtcctcctgcctcagcattcgcaggtarcccggacctcagcacacaccaccatgcccagctaatttttttattcttttgtagagacggggtcttgctttgttgcccaggctggtctcaaattcctggg

SEQ ID NO: 215986 - DNA, 201 bp, Homo sapiens
atagggaggccatcaatgaagagatggtcctgatttggtgggtgtaggatgcaatccatgggactgcatctttaagagccatgaaacatttgagaaacackaaatcaagaggcaaaatcagaactattgacattaggccgggagtggtggctcatgcctgtaatcccagcactttgggaggccgagaggagcagatcacct

SEQ ID NO: 215987 - DNA, 201 bp, Homo sapiens
agcttctgtacttttattattataggaactcctgacattttaagatgtgtttactggctgagcgcagtggctcacgtctgtaatcctagcactgtgggagrccaaagcaggcacatttcttgaccccaggagttcaagactggcctggggcatatggtaaaccctcatgcctacaaaatacaaaaattagctattggagag

SEQ ID NO: 215988 - DNA, 201 bp, Homo sapiens
taaaaacagaaaatcacaaaagaatcatcatgacaaccaggcgcggtggctcacgcctgtaatcccagacttggggaggccgaggcaggtggatcacaagrtcaggaaatagagactatcctggctaacacagtgaaaccccgtctctactaaaaatataaaataattagctgggcatggtggcacacgcctgtagtccca

SEQ ID NO: 215989 - DNA, 201 bp, Homo sapiens
acaggtgtgagccactgcgcctggaggtaacaaatgttaattttaaatccaactgagcttgagcccaggagttcgaaaccagcctgggcaacatagtgagwccctgtctctagaaaatatataagtaaataaataaatccaactggtattaggtactctgctaggccaggaaatacacagatttttaaaaatcaagaacgt

SEQ ID NO: 215990 - DNA, 201 bp, Homo sapiens
caaaaaattagccaggtgtcgtggtgcatgcctgtaatcccagctacttgagaggctgaggcaggagaatcgcttgaacccgggaggcagagattgcagtragccaagatcgtgccactgcactccagcctgggtgacagaatgagactccatctcaaaaaaaaaaaaataaaattcacagtacattagacatagcctact

SEQ ID NO: 215991 - DNA, 201 bp, Homo sapiens; identical to SEQ ID NO: 38608

SEQ ID NO: 215992 - DNA, 201 bp, Homo sapiens
ttttgtagagacagggtttcaccacgttggccagaatggtctcaatctcttgacttcatgatcctcccgccttggcctctcaaagtgctgggattacaggyatgagccactgttcccagcctctccaaaacatttttaaaattcagccagctgtggcaatgtgtgcctgtagaaccagctacttgggggagaatcacttga

SEQ ID NO: 215993 - DNA, 201 bp, Homo sapiens
cccctctctactaaaaatacaaaaaattagccaggtgtcgtggtgcatgcctgtaatcccagctacttgagaggctgaggcaggagaatcgcttgaacccrggaggcagagattgcagtaagccaagatcgtgccactgcactccagcctgggtgacagaatgagactccatctcaaaaaaaaaaaaataaaattcacagt

SEQ ID NO: 215994 - DNA, 201 bp, Homo sapiens
ctgcgtttttaaacaaagcgaggcagggtcgttttctatccccttagccagatctaaggcggagccaaagaatgagtaccctgtaagagccgcctctatcrccgccccctgcccccggcccgctgaagaattaagaatacaaaaagctgaacccacagataaagcatttgcaatttaacttccaaagaaaaaaaaattaag

SEQ ID NO: 215995 - DNA, 201 bp, Homo sapiens
ttgagcctaggagttctaggctgcagtgaaccatgatcgtgtcactgcgcttctccattctgggtgacagagccagatcctgtctcaaaaaaaaaaaaaaatctcgaaaagagatgaatgggtaaagaatatataatacatacccaaaatggaatattatccaatcttttttttttttgagacagagtttcgctcttcttg

SEQ ID NO: 215996 - DNA, 201 bp, Homo sapiens; identical to SEQ ID NO: 38620

SEQ ID NO: 215997 - DNA, 201 bp, Homo sapiens
gaactcctctttttaaaactatcacgtctcgtgagacttatttattatcatgagaacagcatgggaaagacttgctcccatgattcaattacctcccaccrggtccctcccacaacacatgggaattcaggatgagatttgggtggggacacagccaaaccgtatcaataacccaattaaaaaatggaagaaaacgccggg

SEQ ID NO: 215998 - DNA, 201 bp, Homo sapiens; identical to SEQ ID NO: 38616

SEQ ID NO: 215999 - DNA, 201 bp, Homo sapiens
gtttcaccattttggccaggatggtctctatctcttgacgtcatgatctgcctgcctcggactcccatagtgctgggattacaggtgtgaaccaccgcacycggccttttttttttattttttgagacagagtcttgctctgtcacccaggctggagtgcagtggcgtgatctcagctcactgcaacctccgcctcccagg

SEQ ID NO: 216000 - DNA, 201 bp, Homo sapiens
tgattctcctgcctcagcctcccgagtagctgggactgtaggtgcacaccaccacgcccagctaatttttgtatttttagtagagatggggtttcaccatkttggccaggatggtctctatctcttgacgtcatgatctgcctgcctcggactcccatagtgctgggattacaggtgtgaaccaccgcacccggccttttt

SEQ ID NO: 216001 - DNA, 201 bp, Homo sapiens
acttagcttagcctgttcgttcagattcttcgtggcatctctgcatcttcaaggataaggttgttcctttcctctgggtatacgaacaatacctcggaaakgaaggttttatgacctacttcagaggaaggacagataatttcttttttggtctgctttgaggggagaagggcaaggggagaatgagactgatctacctgt

SEQ ID NO: 216002 - DNA, 201 bp, Homo sapiens
ttattaattttaaaaagttaaattatctgtgttcatacattacttctgttatttgataaattaaataactatttacctcattagcctcttgtgatagatayactattttagtgtcatagtgggaatatggctttggagtcagataaacctaggcttgaatcccgtctctgccttctattatctctctggcctttgggcagc

SEQ ID NO: 216003 - DNA, 201 bp, Homo sapiens
gttttttttttgttttgttttgttttgttttgtttttcagacagtctttgtcgtccaggctggagtgcagtggtgcaatctcagctcactgcattctccayctcccaggttcaagcaattttcatgcctcagccccccaagtaactgggattacaggcgcccaccaccacgcctggctaatttttgtatttttagtagaga

SEQ ID NO: 216004 - DNA, 201 bp, Homo sapiens
atagatgatgtctcagatatcagtgtctggtttttgtttttttggggttttttttttgttttgttttgttttgttttgtttttcagacagtctttgtcgtscaggctggagtgcagtggtgcaatctcagctcactgcattctccacctcccaggttcaagcaattttcatgcctcagccccccaagtaactgggattaca

SEQ ID NO: 216005 - DNA, 201 bp, Homo sapiens
catggtgaaaccccgtctctactaaaaatacaaaaattagccgcgcgtggtggcgggctcctgtaatcccagttactcgggaggctgaagtaggaaaatcrcttgaacaaaggatatgaaaagcaaataatatgaaaagaaagttcccagaaaaatttatcaaatgacatgtttaaaaatgttaggctgggtgaggtggct

SEQ ID NO: 216006 - DNA, 201 bp, Homo sapiens
actgcacgccatgctggggcaaggccctcacatccaccttcgcaaggtggccagaggcctggccactcacctgtggcagctcaaaccagatggtctggggrttgtcagctgagccatagttgacttccaggccagggggccccttctcctccagagggcttagcaggtggagccgctgcaggctcttcagggcaatgcggc

SEQ ID NO: 216007 - DNA, 201 bp, Homo sapiens
gccaccatgcccagctaattcttgtatttttagtagaaacagggtttcaccatgttggccaggatggtctcgatctcatgacctcgtgatccgcctgcctyggcctcccaaagtgttggggttacaagcatgagccactgtgcccacctttttttttttttttttttttaagagacaaggtctctcactgtcacccaggct

SEQ ID NO: 216008 - DNA, 201 bp, Homo sapiens
aagcgggagtggaacctcttctatcagaagcagatgcagctgcgcaaggtgaggggaggcactcagtggcctgtgtggggcccctggtggccccctgctcrcacctctcagccccttctctggtgctggatgggactgtcctgcggcagggcaggacgcctcatgggtccttcatgttgtcctccagggcaaagaccccaa

SEQ ID NO: 216009 - DNA, 201 bp, Homo sapiens
ttggctaagatgagcagccaccataccacctttccttttgaccctgagcggcgagtccggagtacgctgaagaaggtctttgggtttgactcttttaagaygcctttacaggagagtgcgaccatggctgtagtaaaaggtaacattaccaagctaccttcctttaaatttatgctggctataccataacgctgcggcaga

SEQ ID NO: 216010 - DNA, 201 bp, Homo sapiens
gcggtcagcacaggggaaacactcagggcagagaaggctggcagagccggagggatgggaagcattcctttatgtggcatctcctggcacacggagccttkcaacaggcaggcatcccgcaggccagacagctgccacttggtcccgaagcttccctgtttcctcctcgcagagctgatactccaaccccaggcgcctcac

SEQ ID NO: 216011 - DNA, 201 bp, Homo sapiens
gtcagccaggccctgcttccttaccggggtgttgcaatcagccttgcatccttgagcctgcgccttggggtcgcagcccctcaaagggcttcttgcagccrcagcagtgctcacactgggaggagttctagttagagcagttaatgccagctattcttgtccctgggatgtggcaccccagacagccctgcctgtgttcca

SEQ ID NO: 216012 - DNA, 201 bp, Homo sapiens
ttggagcgcagcagcagctggagcaagacctgcatcgggccctcccaggggaacggctttgaccccgagctgtacgagggaggccgcaagggctacggggrcttcagcaggtaaggggccgagaagccagggctccaacccgctggaattgcctggcattcccttggcgccagggccagaccagaggtggcacgatgccgc

SEQ ID NO: 216013 - DNA, 201 bp, Homo sapiens
gttccggaaccagccagcagcctttaattcttgggcggaccacggccggttctgatatcttagggtgaagagagggaggtgtcggccagccaagagagaarattgcggatcttgggctcaggaagacgggagaaggggttcggggtcccggggtggaagaacggtcgtcgtggttgcgcttatagaagtaggagcaggtgg

SEQ ID NO: 216014 - DNA, 201 bp, Homo sapiens
gccacagcctccctgcctatccctgcccaggtggccgatatccacagagcctccaaggatgggcagccctatgacatgggaggcagtgccaagagctgcartgcccaagctgagcccccggagcccaatgagtatgacattccaccagcctcccatgtgtactcggtgagctgtggcccagtggcctccagacctgtgacc

SEQ ID NO: 216015 - DNA, 201 bp, Homo sapiens
tgtgggagtcgggcagaaaggcataggccacagaggacaggctggtggcctccgagtcgtcactgtgtgcctggctccaagggtgggcagggcgctgggakcacaagaaacctggtgccacctgagtgtccagtgccctgtcccaggggtcctgccccagccccatccctccccagccagacaccaaaggagcaagaccag

SEQ ID NO: 216016 - DNA, 201 bp, Homo sapiens
caatgacagactgcatagactgagatcctgtaagattgtaatggagttgaaaaattcttatggcctagtgatttgcattacagttgcctacaatattcagygcagttaacactcgatacatgtttacagcctagctgtgcaggctgcagtaccatctagatttatgtaaagactatccaccgtaatgtttgcacaatgatg

SEQ ID NO: 216017 - DNA, 201 bp, Homo sapiens
agactccatctctataaaattaaaaattagccaggtatagtggcatgtgcctgtagtcctggatacttgggaagccgaggtggaaggattgcttgaggccrggggttgaggctgcaatgagctgtgattgtgccactgtactctagcgtgtgcaacagagcaagaccctgtcttgaaaaataaaaaacaaggccgggcaca

SEQ ID NO: 216018 - DNA, 201 bp, Homo sapiens
cagactgtgatgagggggagggaggctgggggacccagaactgatgcccaaggcctcctcccttggtggcccccaagctcactgtgaaagtctggatattygtcctataatccacaccccccggcaggtgaataagaagcaggcgaatcgcttgtcctttctgccaaggcaggttgcagggtcagtcggccagtggtctcc

SEQ ID NO: 216019 - DNA, 201 bp, Homo sapiens
ttcccttggcgccagggccagaccagaggtggcacgatgccgcaatccccccttgagctggtaggacatcagggacattgccgttctagcagcagcacacrtggggagggcagagcccaggccagggccactcacgcctggcctgtccctaggtatgacgaaggttctggaggcagcggggatgaaggcagagatgaggcc

SEQ ID NO: 216020 - DNA, 201 bp, Homo sapiens
tcaaggctgcagtgagttatgatcatgccactgcactccagactgggtgacagagcaagactctgtctccaaaaaaataaataaataaacaaataaaaatkcaatgctgtatgtggaaacttgaaggaaaaaaaagacatcttcagataacaaaggtttcaaaaactttcccctggtatgtcatgtctcagaagctattaa

SEQ ID NO: 216021 - DNA, 201 bp, Homo sapiens
ccccccccacagatgagaactgtcccctgaaagaggcttctagcaggaggatccccaggctgactgtgaaggtaagagacgggcagctcctcagccacccsccggggccctctcccagccgcgaggccatgcgaccagtctcactgtcctgtgccaggcacgggagcactgcctgcggcttctggaggaggcgctgagcag

SEQ ID NO: 216022 - DNA, 201 bp, Homo sapiens
aactacagtaataacttggtgaatgttcaccaggtcccaggcttcgtgctaagtgccttacatacattaatttctttctttcttttttttttttttttttttgagatggagtttcgctcttgttgcccgggcttgagtgcaatggcgtgttctcggctcaccgcaacctccgcctcccgggttcaagcagttctcctgcct

SEQ ID NO: 216023 - DNA, 201 bp, Homo sapiens
aacgccaaggtggccaacctctacaaggccagcgtgctgaagaaggtgggcctggtgcaggcggacccagggtcgttgcaggggcccctccatactctgasgcagaagctgtctgccagctctctgggctcaggcagcccagaactcaccctccccagcccaccccagagacagtttatgggggtagagctccattctcca

SEQ ID NO: 216024 - DNA, 201 bp, Homo sapiens
tgccctcaggggtgcacctcttgccaaggcctggctccccaccagggtcctgcctgcctcttccctcccacactcctgagagccccgtcccaatgtgagtkactgctccagccagcggtgccctcaagggggcctagtgggctgaacctcctctcctcctgctcacatttacagctcaaacccaagcgggtgggagctggt

SEQ ID NO: 216025 - DNA, 201 bp, Homo sapiens
tggtaggacatcagggacattgccgttctagcagcagcacacatggggagggcagagcccaggccagggccactcacgcctggcctgtccctaggtatgaygaaggttctggaggcagcggggatgaaggcagagatgaggcccacaagcgggagtggaacctcttctatcagaagcagatgcagctgcgcaaggtgaggg

SEQ ID NO: 216026 - DNA, 201 bp, Homo sapiens
tctcctcctgctcacatttacagctcaaacccaagcgggtgggagctggtttccccaaaggctcctgcccgttccagacggccacggaactgatggagacractcggatcagggagcaagccccccagcccgagcggggaggcgagcacgagcccccgagccggccctgtggcctcctggatgaggatgggagtgagcccc

SEQ ID NO: 216027 - DNA, 201 bp, Homo sapiens; identical to SEQ ID NO: 38637

SEQ ID NO: 216028 - DNA, 201 bp, Homo sapiens
ctgcagagtagtgcctcagcctggcagagctcattagcagctaatgcatgacaggaatttcatggcaccgtccactggtcccgtggtgttaaccgcctgtrtggcatgcttctctgcgtggttttccagctttcgtgggcacagggagagcagaggcctgggaaggacgggcaccagccataccccctcccaatgtacaga

SEQ ID NO: 216029 - DNA, 201 bp, Homo sapiens
acattcttcttccccgccatcttattcccacagcccgggcgtggctcactcctatgactcaagacgccgacttccgggcggaaaggcaggttctttcggawcccaggagacccccgcgccacactggaaaccaatcaaaacggcagtttcctgcgcctgtctccgccctcatgccctcgctcgcgctacgtcatcactgcg

SEQ ID NO: 216030 - DNA, 201 bp, Homo sapiens
ccctggggctgggactggcgtagggctcacttcctgtgttgtggggtgaatgattaactgcagccctggctggcgcctggtgcctcctggaactgtttctrggggaagtgttgctcccccctgaggcttcccattggtgcctttgtctgctccctgggcacggcctcagcaacattgtgtggttggtttctgcccactggc

SEQ ID NO: 216031 - DNA, 201 bp, Homo sapiens
ccctcctttacagggctgaaggcctctgaaagaacgctggtgcagaacgactggatggaggagaaggtccctgtaattgttgcaaccattagttttgggaygggagtggataaagccaatgtcaggtgagctttggttcttgccctgccctcctggtctgggcctggctcagggtggattgcctagtgctgtgcccaaagg

SEQ ID NO: 216032 - DNA, 201 bp, Homo sapiens
ttctagccctcgggtgcttatcccagctggtaaagatctaggagctttgagaaatgcccaggccccacctggtaccacttatatcagtctctggggttgcyaggatgtcgtattgtttacacatccccaggtgattctccccaggtgtggccagggttggatgacagatggaggcagatttagaacagtcgttcttaacta

SEQ ID NO: 216033 - DNA, 201 bp, Homo sapiens
atgagaactgtcccctgaaagaggcttctagcaggaggatccccaggctgactgtgaaggtaagagacgggcagctcctcagccaccccccggggccctcycccagccgcgaggccatgcgaccagtctcactgtcctgtgccaggcacgggagcactgcctgcggcttctggaggaggcgctgagcagcaaccgccagtc

SEQ ID NO: 216034 - DNA, 201 bp, Homo sapiens
tgtaaactcagaagtcgaatctgcagtgagccgagatggtgccactacagtgcagcctgggtgatgggagtgagaccccatctcaaaaaaaaaaaaaaaaaggccgggcgccgtggctcatgcgtgtaatcctagcactttggaggctgaggcgggtggatcacaaggtgaggagatcgagaccatcctggctaacacggt

SEQ ID NO: 216035 - DNA, 201 bp, Homo sapiens
tctcactgtcctgtgccaggcacgggagcactgcctgcggcttctggaggaggcgctgagcagcaaccgccagtcaacacgtaccgctgatgagtgagttycacgatcactgggctgaggagcactccaagctctcgttcccttggagactgcaggaccctgtcaaccctggcctgtttgggccacctctccccagattgt

SEQ ID NO: 216036 - DNA, 201 bp, Homo sapiens
aaccagtgcctattgtgggcaagactagacatccatacacatgaatgaggtgagggtcctgcaccagaggagctcggggtggggtggagaggacagatgtycacaggccccgctgctcctggccagtccatttagggccaggaagggtaccagtcaaatggccttgaccttagagaaggggaggggcttaggggcgggagg

SEQ ID NO: 216037 - DNA, 201 bp, Homo sapiens; identical to SEQ ID NO: 38660

SEQ ID NO: 216038 - DNA, 201 bp, Homo sapiens
gcctcccaaagtgctgggattacagccgtgagccaccgcactcggcctcctcattactttttgtggctctaaggtagtccaattctataagacttgctaartggtcattttttgtccccaggaaaagagaggaaacaaagcatctgataaagccactatcatggcctttgatgccctggtgaccttctgtgaagaactggg

SEQ ID NO: 216039 - DNA, 201 bp, Homo sapiens
caaggtgaggggaggcactcagtggcctgtgtggggcccctggtggccccctgctcgcacctctcagccccttctctggtgctggatgggactgtcctgcrgcagggcaggacgcctcatgggtccttcatgttgtcctccagggcaaagaccccaagatagaagaatttgtacccccaggtcagtacagaaatgttcctg

SEQ ID NO: 216040 - DNA, 201 bp, Homo sapiens; identical to SEQ ID NO: 38664

SEQ ID NO: 216041 - DNA, 201 bp, Homo sapiens
aaggggttcggggtcccggggtggaagaacggtcgtcgtggttgcgcttatagaagtaggagcaggtggtggatcttaggaaaacggttccccgttctccragctgttctgaagacatttatgtttcttctcttgatctgatttctagctctgtgctataccgtggcctggaatagttcaatgttttcattttcattgagc

SEQ ID NO: 216042 - DNA, 201 bp, Homo sapiens; identical to SEQ ID NO: 38627

SEQ ID NO: 216043 - DNA, 201 bp, Homo sapiens; identical to SEQ ID NO: 38666

SEQ ID NO: 216044 - DNA, 201 bp, Homo sapiens
ccagaggcagaaggtgcctgcccctcctgtgagggggttcagggacccccgatggccccagagaagtacacaggggaggaagatggagccgggggacattygcctgcccctccccagactgaggagtgcctcagggagaggccaaggtaagggtacaggtagtcatagaatcttctggaacctacacggcagcatcccctt

SEQ ID NO: 216045 - DNA, 201 bp, Homo sapiens
ggcaggaagcactgagatattgttgtcttgtattttttcaggtaacaaggacgtctttgtgtgcatgcccacaggggcaggaaaatccctatgctatcagstccctgctctgttggccaaaggcatcaccattgtagtctctcctctcattgctttgattcaggtgaggcttagggcaatgaagatggtagcccaaaaaga

SEQ ID NO: 216046 - DNA, 201 bp, Homo sapiens
cagcgagggtacagcattccgggcagacacccgattcccccttccagcttcgcacttgggccttaccagccgcgctgcccaccgcctcgattccagcctcrccatcagactcgggctctgaatcttccgcgtaaactgcgagagacgacagaacattcttcttccccgccatcttattcccacagcccgggcgtggctcac

SEQ ID NO: 216047 - DNA, 201 bp, Homo sapiens
gacctgtgaccaggaaaggcttcacttcccctctgccctcaggggtgcacctcttgccaaggcctggctccccaccagggtcctgcctgcctcttccctcycacactcctgagagccccgtcccaatgtgagtgactgctccagccagcggtgccctcaagggggcctagtgggctgaacctcctctcctcctgctcacat

SEQ ID NO: 216048 - DNA, 201 bp, Homo sapiens
accctcccatgtgccagacactctgctaggtgcttttcctacattctcatttaattttcaacaacttcaatgaaaaggcaggaagcactgagatattgttrtcttgtattttttcaggtaacaaggacgtctttgtgtgcatgcccacaggggcaggaaaatccctatgctatcagctccctgctctgttggccaaaggca

SEQ ID NO: 216049 - DNA, 201 bp, Homo sapiens; identical to SEQ ID NO: 38626

SEQ ID NO: 216050 - DNA, 201 bp, Homo sapiens; identical to SEQ ID NO: 38629

SEQ ID NO: 216051 - DNA, 201 bp, Homo sapiens
ttgggtcatggccgtgggttgctctgggggtcagggcagggtcctgctctcttttttttttttttttatctctgtcgcccaggctggagtgcagtggtgcratttcagctcactgcaacctccgcctcccgggttcacgccattctcctgcctcagcctcccgagtagctgggactacaggcacccgccaccacgcctggc

SEQ ID NO: 216052 - DNA, 201 bp, Homo sapiens
tacagatcctggttatcaggtgacccaccatcttattgcagatactcaggcagagctaaagtgatacacttaaatcccctaaaaggagtctagacatgaaygaggtctaaaatgagaattgtgactcctgagttcttcccactgtatgcctacccagcagcaggtgatacgtttttacaagccaaggtaatggtgttgtag

SEQ ID NO: 216053 - DNA, 201 bp, Homo sapiens
cagtcgttcttaactatcatgggcgtcactgacccgggttacctgatgttttctgtttccttgtgtgaaacttactgactaaggcccttggcatgctgaaygctcacagcagtgggccagtctctagctcaccctttgcgtgcagctccgtcagttaagtcagatgcttatcaagagtcaagtgttggttcccaaacctgt

SEQ ID NO: 216054 - DNA, 201 bp, Homo sapiens
tggcaagcccacactcaaccaaaactagaagatagcaatccaggagctctggttggcaagcccacactcagagaaaaggccaggaaggccggccaaggaawaggtgtatgtttccatttaatgtgagatatgtaaaaaagtaatagatgtgtagagaacttaggtgttctttaacaaaagttgctttgaccagctctttca

SEQ ID NO: 216055 - DNA, 201 bp, Homo sapiens
gggatcacaggcgtgtgccaccatgcccggttgggaggaaacttttatatactctctgccaagtttttctaatgagattcttgtatccgtggctttattgkcattttttatttttattttattttttttgagacagggtcttgctctgtcactcaggctggagtgcagtgccactgtcatgccccaggcagtcctcctgcc

SEQ ID NO: 216056 - DNA, 201 bp, Homo sapiens
gcatcagcctggtcgacggggggaagaagcctgtgagaaggctgaggaagctccagcctcgagtgcagtgttccctgcagggcagagcgctcgggcttcargctggccaggccacagtgcccagctgcccccagaagccaccccaccccaccggtccccactcacggccgggggtgtcccgtgacctgcttgataacctgg

SEQ ID NO: 216057 - DNA, 201 bp, Homo sapiens
caagacgccgacttccgggcggaaaggcaggttctttcggaacccaggagacccccgcgccacactggaaaccaatcaaaacggcagtttcctgcgcctgkctccgccctcatgccctcgctcgcgctacgtcatcactgcgcgacggatataagattgcgtgggttctgcctaaagctgaattcccagcgctttggcttc

SEQ ID NO: 216058 - DNA, 201 bp, Homo sapiens
gggcagagcgctcgggcttcaggctggccaggccacagtgcccagctgcccccagaagccaccccaccccaccggtccccactcacggccgggggtgtccygtgacctgcttgataacctggcagtaaatctcatccctcagcttctcctgctggcacagctgtggggacaggaagggcaggtggggtgagggatggcagc

SEQ ID NO: 216059 - DNA, 201 bp, Homo sapiens
gggcggaaaggcaggttctttcggaacccaggagacccccgcgccacactggaaaccaatcaaaacggcagtttcctgcgcctgtctccgccctcatgccmtcgctcgcgctacgtcatcactgcgcgacggatataagattgcgtgggttctgcctaaagctgaattcccagcgctttggcttctctgagttggggttgt

SEQ ID NO: 216060 - DNA, 201 bp, Homo sapiens; identical to SEQ ID NO: 38639

SEQ ID NO: 216061 - DNA, 201 bp, Homo sapiens
ggcggaaaggcaggttctttcggaacccaggagacccccgcgccacactggaaaccaatcaaaacggcagtttcctgcgcctgtctccgccctcatgccckcgctcgcgctacgtcatcactgcgcgacggatataagattgcgtgggttctgcctaaagctgaattcccagcgctttggcttctctgagttggggttgtg

SEQ ID NO: 216062 - DNA, 201 bp, Homo sapiens
gtgcggtggctcacgcctgtaatcccagcactttgggaggacgaggtgggcagatcacgaggtcaggagatcaagaccatcctggctaacatggtgaaacyccatctctattaaaaatacaaaaatattagctgggcgtcgtggcgggcgcctgtagtcccagctactcgggaggctgaggcaggagaatggcatgaaccc

SEQ ID NO: 216063 - DNA, 201 bp, Homo sapiens
ctcgatctcatgacctcgtgatccgcctgcctcggcctcccaaagtgttggggttacaagcatgagccactgtgcccacctttttttttttttttttttttaagagacaaggtctctcactgtcacccaggctaaagtgcagtagcatagtcatggttcacagcagcctctaactcctggccataaataatcttcccacct

SEQ ID NO: 216064 - DNA, 201 bp, Homo sapiens
aaaaaagctccccagttgctttgaatatatggccagggttgacaaccactgatttagatgaagaaaactaaaatctcaccaagagaaaacaagctctgggkccaggagcagtggctcttgcctgtaatcccagcactttgggaggccaaggcaggcagatcacctgaggttaggagttcaggaccatccggcccaacatag

SEQ ID NO: 216065 - DNA, 201 bp, Homo sapiens
ctgccagtgatccattctacccagtcctgttccttatccagatgaggtcagcctgacacaaaggatcacacacggtaaggcattctccaaagcgagcccgycattccactgaacgctaacgctgatgctatgaaggtcaaagatcaggagcagatgctggaccagctaccttattagctggctaaatccatgtcacctcca

SEQ ID NO: 216066 - DNA, 201 bp, Homo sapiens
aggccctgttcctgctcagctcctgctcaggaaggccaggcctgacagatgtttgggagaggaataaagttgtgttgttgtggggcatgcaggcgtgcacmcagcccttttctccagggagttttatttcctcagcagctgtttctcccatgcctgggcttgtgctaatgtggggcctgggcggagcctggggtcgggtgg

SEQ ID NO: 216067 - DNA, 201 bp, Homo sapiens
tgcattcttactctccagtgacctctcactcccagacacataagttatctcattgtaagcactgcagagacttagcctgttggcttcacagccacaccccsctgcacgcaatgggtgctcagtaaatactttggaatgatttgaaggacagtgaccaagagaaggggatctccttcaggcccagacaggaggacaggcaca

SEQ ID NO: 216068 - DNA, 201 bp, Homo sapiens
atagggtcaaggagccagaattggtctcagaccagcctccccatcttactagtctgaccaaccctaagccagatacagtattttactagactttttcctgrtgggaaaggaagacaccagggcttggcccctgagccagagggaaccgcgaaggggcccaccactggaatgggggcaggtcagctcgcctcccctgctgcc

SEQ ID NO: 216069 - DNA, 201 bp, Homo sapiens
cgctttggcttctctgagttggggttgtgtataggggtcttcgaacagttccggaaccagccagcagcctttaattcttgggcggaccacggccggttctratatcttagggtgaagagagggaggtgtcggccagccaagagagaaaattgcggatcttgggctcaggaagacgggagaaggggttcggggtcccggggt

SEQ ID NO: 216070 - DNA, 201 bp, Homo sapiens
cctgggtgtggtaagcagaggctctggagccagataggctggactcaagcaggccctgctccttttcagctggttgaatgtagacaagttacctaacatcrctgaggcccagcttcctcatctctaaaatgggggtaatagtggtatcttcaacatggaggtactgtgatgagtaattgagtttatctgcaccaaaatgct

SEQ ID NO: 216071 - DNA, 201 bp, Homo sapiens
gcctgtcagctgaggctcagtaaagttaagcgcctgatgttaaggtcagacagctgggaagtgaaagattcagggtttgtgaagtgcctagcacacagtgwcaaacccaaaataggcccccggtaaacccaagggaaatgtgagttcccttctccatcttcccctcctttacagggctgaaggcctctgaaagaacgctgg

SEQ ID NO: 216072 - DNA, 201 bp, Homo sapiens
ctagcagcacattgtagacagccataggggggtgcccggcacacgagaatgcccccccgggacgggtctcactggctttgggggctgtcacccccgtgcaycgtcactagcacccccaacaccttttgggtgtctgtcctagggtgtctgcggtgtgtgccctgaaggaaggtaggcaagctggaggtggggagctatgtt

SEQ ID NO: 216073 - DNA, 201 bp, Homo sapiens
agagacgacagaacattcttcttccccgccatcttattcccacagcccgggcgtggctcactcctatgactcaagacgccgacttccgggcggaaaggcasgttctttcggaacccaggagacccccgcgccacactggaaaccaatcaaaacggcagtttcctgcgcctgtctccgccctcatgccctcgctcgcgctac

SEQ ID NO: 216074 - DNA, 201 bp, Homo sapiens
ccactggccacagaaacccacttgtagtgcctagtagaaaaggagggctaggtggggcatgtcaggaggagctggcgggtgccacagcctccctgcctatycctgcccaggtggccgatatccacagagcctccaaggatgggcagccctatgacatgggaggcagtgccaagagctgcagtgcccaagctgagcccccgg

SEQ ID NO: 216075 - DNA, 201 bp, Homo sapiens
cctcagctggtcccatttgatgactcctggtgcctgcctccagccttctcccttgaaccccagactcctccactgggaagtctgggatttcagacctcacktgtccaaaacagatttcctccaccagccaagacctgctccttgaagacagtagttgtcctccttcccgtagcccacatgcaattggtcagcacactctgc

SEQ ID NO: 216076 - DNA, 201 bp, Homo sapiens
ctgtgaccaggaaaggcttcacttcccctctgccctcaggggtgcacctcttgccaaggcctggctccccaccagggtcctgcctgcctcttccctcccayactcctgagagccccgtcccaatgtgagtgactgctccagccagcggtgccctcaagggggcctagtgggctgaacctcctctcctcctgctcacattta

SEQ ID NO: 216077 - DNA, 201 bp, Homo sapiens
gcgtgagccactgcgcttgacccagactttttaaatcttgtttttaaccattactagaaatggtttgggcatgtatccaagtttcccaggatccttgcctytttcatagaaaggacaggaggggaattaggattacatcgagaccctcccatgtgccagacactctgctaggtgcttttcctacattctcatttaattttc

SEQ ID NO: 216078 - DNA, 201 bp, Homo sapiens
tcttcagagtagagtgcagcccttttgaggagccgagagcagcctgccctgtggcggaagcagagggcacagcttggggtgggcatgaagaggctggcgasatgattgtggggaccacttaggatgctgctgcagtgaccacaggtaagcattgatggtggcatggtccaggatggcacagtggcgggaacagagaggtgg

SEQ ID NO: 216079 - DNA, 201 bp, Homo sapiens
taaggctcttggacaggaggctgataaaggggtgaggcattgaggtggaggccaagcagctgttagagcagtggggtgcgatgtgatggagatggagattrgtctaagacctttggtttttctagctttctcagccaggcttcctaaaacttgtgcacaaaaagagttgtctctttggtttcctggcattgtcctccttac

SEQ ID NO: 216080 - DNA, 201 bp, Homo sapiens
ggacggtccccatgccagccgccagggccaacctcctccatgttgtgtcttctctttcactgcccaagcctggctcccgtcatccccgcgtttgggatccyggggtactgctgggcccagtccccagcaccgcccatcacccaagcagcatatcagaggatgagggaagtcccttggcttcccccaagggacaactggttt

SEQ ID NO: 216081 - DNA, 201 bp, Homo sapiens
tcccacctgcgaaccagggcaaccagtccctcccaaccccacgcttggtagtgcccacctgcgaaccagggcaaccagagtccctcccaaccccacgctcmgtagtgccttggttggaggcttctcagggtcctcaggggttcctgagtggctgccagagcaagtggtggctccctctggccttaagagggagtgtagccc

SEQ ID NO: 216082 - DNA, 201 bp, Homo sapiens
acaaggcctgggacctccggaagtaacgccgggcgaattcctgcatggtgtagctgtgggagtcgggcagaaaggcataggccacagaggacaggctggtrgcctccgagtcgtcactgtgtgcctggctccaagggtgggcagggcgctgggatcacaagaaacctggtgccacctgagtgtccagtgccctgtcccagg

SEQ ID NO: 216083 - DNA, 201 bp, Homo sapiens
cttctcttctccctctcccttccaggagttgtttaaaggctttgcccgccacctctcacacttgctgactcagaagacctctcctggaaggagcggtgagygctggcattgccagggccaggaggcacttgggagggtggtctacagggaggaggctaacgctcacctcctcatgcccccaccctgaatctgtagtgaaag

SEQ ID NO: 216084 - DNA, 201 bp, Homo sapiens
agcaagggatggagctaaccatgaaatggaacactgttggcacagttccaaaatctgacaaatgaaattgtgctttcagtagctctggatctgggagattyacctaccgactgtctactgttctcatcttcttcttcttcataaccatcttcatcaccccctagacgagaaaagtcatcctccccataggcatcagatacc

SEQ ID NO: 216085 - DNA, 201 bp, Homo sapiens
cgaccatggctgtagtaaaaggtaacattaccaagctaccttcctttaaatttatgctggctataccataacgctgcggcagaacaccctcctcctcaccyttcgtactgcctcacctttggtccataactggatttggaaatctttagagttgtcaaagcttgtagtttcgtttatttgttttaattagagatggggtct

SEQ ID NO: 216086 - DNA, 201 bp, Homo sapiens
ctgtgtgggtaagagccatccaccatgaaggaaggtagagagggaactacagtaataacttggtgaatgttcaccaggtcccaggcttcgtgctaagtgcyttacatacattaatttctttctttcttttttttttttttttttttgagatggagtttcgctcttgttgcccgggcttgagtgcaatggcgtgttctcggc

SEQ ID NO: 216087 - DNA, 201 bp, Homo sapiens
aagctattaaaggatgttctccattgtagagaggcagtaaacctagaaagcaaagatggaaacttacccaggagtaagtcttggcacaggacaatattggrgagtagtccggaaagacagctgtgtcccaggcctagggaaaactggtccagattgcactagggggcagaagactccaggaaggaaggttctaaacatcaa

SEQ ID NO: 216088 - DNA, 201 bp, Homo sapiens; identical to SEQ ID NO: 38642

SEQ ID NO: 216089 - DNA, 201 bp, Homo sapiens
ttgtgtgatccaagtggtgcacactggccccttgggtgccaactgaagggcttgggaatcttgctctcctggtgtagctggcagctgcccacccccacccyacatgggtttctgagtcggcaggtcaagcattattttattttattttattattttatttgagatggagtcttgctctgttgcccaggctggagtgcagtg

SEQ ID NO: 216090 - DNA, 201 bp, Homo sapiens; identical to SEQ ID NO: 38665

SEQ ID NO: 216091 - DNA, 201 bp, Homo sapiens
gggagagccaaacgatgcctggtgcagcttggatgagatgaggggtgtggggctcccggcatggtgccggacgcggcagtgctcgctcagctagcgattcrggctcgggtgaacagacgctggccgactgggctctccgcccctcacctctgcggtgctgcctgctccaggtgccgccatgccgccattgccaagtacttc

SEQ ID NO: 216092 - DNA, 201 bp, Homo sapiens
cggccgtgcggaggcggctggaggccttggagcgcagcagcagctggagcaagacctgcatcgggccctcccaggggaacggctttgaccccgagctgtaygagggaggccgcaagggctacggggacttcagcaggtaaggggccgagaagccagggctccaacccgctggaattgcctggcattcccttggcgccaggg

SEQ ID NO: 216093 - DNA, 201 bp, Homo sapiens
gacttcagcaggtaaggggccgagaagccagggctccaacccgctggaattgcctggcattcccttggcgccagggccagaccagaggtggcacgatgccrcaatccccccttgagctggtaggacatcagggacattgccgttctagcagcagcacacatggggagggcagagcccaggccagggccactcacgcctggc

SEQ ID NO: 216094 - DNA, 201 bp, Homo sapiens
gctgaatttactggtgcaggaaaagtggggtttgttgctgagaagctctggccagcctcctccaggggctgcaaagtgggagagctgcagactcatgccgkgtggaccccggcctccagcggggaaaagtgtcagttcccagcagcagcaggctgcggctgtggacagtgtcatagctttgcgcccagggcttccctaggg

SEQ ID NO: 216095 - DNA, 201 bp, Homo sapiens
tgtggggcccctggtggccccctgctcgcacctctcagccccttctctggtgctggatgggactgtcctgcggcagggcaggacgcctcatgggtccttcrtgttgtcctccagggcaaagaccccaagatagaagaatttgtacccccaggtcagtacagaaatgttcctggaggcttgtgggctcttcccggggcatgg

SEQ ID NO: 216096 - DNA, 201 bp, Homo sapiens
ctcttaatagttgtacctgccctcatagaaagtgtgtgcagattgaagcttggaggattacaaggtattgaaatggtcctacatattccggttaataagawttagaatgaataaaagacataaagctctggggtgatttaggtagatctgagcatgaccacataaccccacatccacacctgctaacaaacaaaaaacaac

SEQ ID NO: 216097 - DNA, 201 bp, Homo sapiens
ccattgtgtgatattatgatctttaggcgttggcctcccaggttcttgtagagaggaacagcagagaggagaagcggaaaggaggccaagaaatattattsgatgttgtacccaggacacggagaagaacaatgtttgttgatgacattagtgctgtctgctatagtatttttttccccaactgattagtaatttcgatag

SEQ ID NO: 216098 - DNA, 201 bp, Homo sapiens
cctatttttcagggcatttagtgctttcaaccatgactttctccctgtttttaatgtagaggtggaaaccctgagataagagattccgagacttaagccckggggggcaagttagtagtgaagttactatagagtttaaaaagtttttagcgaagatgatttctttgcctggagtaaattccggagtttgtgcttctagat

SEQ ID NO: 216099 - DNA, 201 bp, Homo sapiens
ctgccctatttttcagggcatttagtgctttcaaccatgactttctccctgtttttaatgtagaggtggaaaccctgagataagagattccgagacttaasccctggggggcaagttagtagtgaagttactatagagtttaaaaagtttttagcgaagatgatttctttgcctggagtaaattccggagtttgtgcttct

SEQ ID NO: 216100 - DNA, 201 bp, Homo sapiens
tttgaacacaagggtgtactgagttctttataagtgctagctgtcatccaccctcttcctcacctctttcctctgctgatcccaccctcctgtgtctcctrgtcacttctcccttcctgtttttcttcttcaccatccctcctagggtcccagcccagtgattttctaagttcacttagatttttgcctgagggctgccct

SEQ ID NO: 216101 - DNA, 201 bp, Homo sapiens
taattaaacctgaaattgctaggcatgtacatgctgggcaaattttcagattgattattttcaacttccctcagtccctcccctttatttaacacccccayccccaaccctgccccaccctgtattccccagtacttggtgaactttcctctgtctgggctcctctggcacttaacatctgtatgtctcatttggcatttc

SEQ ID NO: 216102 - DNA, 201 bp, Homo sapiens
ccttccacccactttctactacttaaagcaatttagctccaagatattcaactattcagtaataataataataccttacgcattaccactttactaaacawgtatattctcatttaatacagccacacacccacacgatgagacagcattttggtactattatctcagttttactggtgagcaaattgagattctgggatg

SEQ ID NO: 216103 - DNA, 201 bp, Homo sapiens
gtgtgtaacatatgccaagtactgtgataagagctttatgcatattaatgaactctatttttgtctcaactccatgaggtagttagatatatcagtactcyattttacatttagaaaattaaagcaccaggagattaatttgttcaaggtcacacaaaaagtggaggatatgaaacctaaaccagtgcccttgatcactat

SEQ ID NO: 216104 - DNA, 201 bp, Homo sapiens
agagccctgtccactcccatgccttccacccactttctactacttaaagcaatttagctccaagatattcaactattcagtaataataataataccttacrcattaccactttactaaacatgtatattctcatttaatacagccacacacccacacgatgagacagcattttggtactattatctcagttttactggtga

SEQ ID NO: 216105 - DNA, 201 bp, Homo sapiens
gcccttatggttgagaaggatttccatgggctgatatgaggaacaacaccccatgtaggaagaatagcagaaacaggcatggaggcattgacacagtctgyatggctggagcatggagtgcctgacctggcatcgggaggcaggacaggtgaaagagggtccacagtgtctggagcatagagtgcctggcctggcgtggag

SEQ ID NO: 216106 - DNA, 201 bp, Homo sapiens
cagatctccatgtatttacataagctgttttctcttcctggaataggataagaggattggctgtcacttcacttccccatcatttttttttttttttttttggccttgttaaagtgtgcttaatctttaagactcactcaggtggtacctgcttcccacagaaaataccctgagttgggtgttcctcctcccactataggc

SEQ ID NO: 216107 - DNA, 201 bp, Homo sapiens
cagtggcttccttctggtggtttattataacacagattccaaaacaaaagttttgaatatgagagaatatttttcatcctgccccagtttggtataggttwgaaatttgcaatttttggtatttttaaaataattttatccagaaataccgttcctctgcaaagcaattatattaatagaaatgagaggtaatctttctat

SEQ ID NO: 216108 - DNA, 201 bp, Homo sapiens
ctaaaattcatctccctgaggagatctgggttgggatttttaaggggaccatgaggagaaagaggatgggaattggggtcattgattggttgggttacggrggatgaaatcatcaggatgtggaaactgcattctttggtgagtcagcttctcgtgggatccttcaggcaagctgatgtcagtagtttcactggtacgtag

SEQ ID NO: 216109 - DNA, 201 bp, Homo sapiens
gaaactttattttttatcattactataagttaattttactatatttgtaagttaagtttacagttaaagcttgtgtaaccattgcagtattttaccagctwtaaaggaaaaatttgggggaatgtatggctgaggaggtgcttggagtcttgtttttaggcaattaataatacagttaatttcctaaaatgatttaagtga

SEQ ID NO: 216110 - DNA, 201 bp, Homo sapiens
aaatgggactatgggcagaaaagcctaaggctaggatatctgtccaaatgggactatgggcagaaaagcctaaggctaggatatctgtccgaatgggactrtaggcagaaaagcctaaggctaggatatctgtccaaatgggactataggcagaaaagaagccaagtttgaagccagaatggtcagagaacaaggggagct

SEQ ID NO: 216111 - DNA, 201 bp, Homo sapiens
tttttcttttgcctggggaaggagccaagaggagctctaggggattgggtctagaagcccaggacatcaagggcttagggagaggaagtataaagaaattmgatcataaagtttcaataccaagaaattctgattaagattaattttatttgccttcatcttgatggatcaagtgaaagtcatgctcctgttgcataaagg

SEQ ID NO: 216112 - DNA, 201 bp, Homo sapiens
atatctgtccaaatgggactatgggcagaaaagcctaaggctaggatatctgtccaaatgggactatgggcagaaaagcctaaggctaggatatctgtccraatgggactgtaggcagaaaagcctaaggctaggatatctgtccaaatgggactataggcagaaaagaagccaagtttgaagccagaatggtcagagaac

SEQ ID NO: 216113 - DNA, 201 bp, Homo sapiens
ggaaattagagatacaaaaataagtgctctgtacctgacaaacattctgttggaatgttttccttaaggtaaggtaccttttaccttaatgagcatttaaracattttttacccgtctcactccccactgtaactagcacttcctgtttcctggcaaaagaaaaaacaaaacagaagtctctgccttgtgcacggcatccc

SEQ ID NO: 216114 - DNA, 201 bp, Homo sapiens
ggactataggcagaaaagcctaaggctaggatatctgtccaaatgggactataggcagaaaagcctaaggctaggatatctgtccaaatgggactatggghagaaaagcctaaggctaggatatctgtccaaatgggactatgggcagaaaagcctaaggctaggatatctgtccgaatgggactgtaggcagaaaagcct

SEQ ID NO: 216115 - DNA, 201 bp, Homo sapiens
gggactataggcagaaaagcctaaggctaggatatctgtccaaatgggactataggcagaaaagcctaaggctaggatatctgtccaaatgggactatggrcagaaaagcctaaggctaggatatctgtccaaatgggactatgggcagaaaagcctaaggctaggatatctgtccgaatgggactgtaggcagaaaagcc

SEQ ID NO: 216116 - DNA, 201 bp, Homo sapiens
tcagatatgtgtggcagaaagttttacaaatcttggtggggaggaattcttggtcaagatggacttcataatttattttttcttagttgatcaccattaargaatagtaatagaaatattagtaatacattctaggacatcagcatgaagacgtcatatactaattaaagtatgcccctaaatgcaaacatgtcacttggg

SEQ ID NO: 216117 - DNA, 201 bp, Homo sapiens
aatcagaggcaagtcaaaaagtctaaggctaggatatctgtccaaacgggactataggcagaaaagcctaaggctaggatatctgtccaaatgggactatrggcagaaaagcctaaggctaggatatctgtccaaatgggactatgggcagaaaagcctaaggctaggatatctgtccaaatgggactatgggcagaaaag

SEQ ID NO: 216118 - DNA, 201 bp, Homo sapiens
caatttgaatggtattcaaatttcctaatattaaaaatgcaactttgacttagttcatgctattgtattagcaaaactgttttaattgcatgtgtccttawagcagcagcattgtgtattagtagccttttaagagaactgtgtagaagactataaaaagggctttataactgatcttttgacatactcactttgagtggc

SEQ ID NO: 216119 - DNA, 201 bp, Homo sapiens
agaaatattaataactgctggtggaaagactagctagatgtcagtgtggaaagattagatccactttacatgtgatattccaaatgaattaaaatgttaartataaaaagaaaaatactacaagtctcacaccaatagtggtataaaggaacttcatggcaattggcaaggtagatcaactaagagaaaaagttttaaatg

SEQ ID NO: 216120 - DNA, 201 bp, Homo sapiens
catttgaacaaacatttgaaatttagggaggggactgcaagtgtatgtaggctgtggtatggacgactatgggattacactccttatattaattgtaaaayacctatcaggcagtttcttcggcaatgctaagaaggttattcaagcccaagcctaaagtatcatcagtagtgttctccagggtagtcaacaggtgtttgt

SEQ ID NO: 216121 - DNA, 201 bp, Homo sapiens
attgatgggagaagggctgcatattttgcaaggaagatgtagattagatcatttcagttgggttaccctcgaagactaagtcagtctgactcatgctgccrctcagttatatgctcatgctatcagggaggacttgggaaatacaaggtttgctagatctgtactaacatgtcatggtacataacagctgaaatcaggcac

SEQ ID NO: 216122 - DNA, 201 bp, Homo sapiens
cacttagtttggaagattttactgtgtgctcattcacccagccaactctgaagaccacaagacaggtatttacagttgccccattttataggtagagaatytgaaacacagtccatccagatattgttcaaaatgatccagagaatctatgatgacataagttatcccctaatcatcttcacttccaaatttacttctctc

SEQ ID NO: 216123 - DNA, 201 bp, Homo sapiens
gaggtaagcctggcacgatttccaagctactgcacaggtgcccagcgtagcctaggaggagatgcttatggtgaaaaatgtccgtatgttttaacaactakggcaactatttgccccgtgtaccctattttttaaaaagtcactaaatttaatagaaaaaaaatgcaatgcatgtgaaataccagtgaaggatagcatgag

SEQ ID NO: 216124 - DNA, 201 bp, Homo sapiens
ttccctcctttctcttcctctttctttctcttccttccttccttccctcctttctctctttcttcctttttctttctttctttcttctttcttctttcttyctttttctttttcttccttccttccctcctttctctctttcttcctttctttctttcttttctttctttctttcttccttccttccttccttcttgctct

SEQ ID NO: 216125 - DNA, 201 bp, Homo sapiens
ctcatctctattattgggtaattcagcttaatgctctgtaaggccatcctacttgctttgcattttgatgacccctttgatatctgtaggttagaacgtgmctgatcttagcgcttattgattgtgtcttctgctcctactcctaccctgagccctgtctttctaagccaagaagcagcatgtactatggttacacctctt

SEQ ID NO: 216126 - DNA, 201 bp, Homo sapiens
tacacaatttttaaaaatctcatttctacatcttagcagtgacaaactgcaatttaaaaagtgtgtttggttattaatatatatgagacttttaaagaaasttatataactacatagagataaattaagaaagatgcctaaatagaagcaagtttaaagagctatatttttaaacatgaacaaactcccatgggagccatg

SEQ ID NO: 216127 - DNA, 201 bp, Homo sapiens
tggtcatgtgtatataacttttatcagcagcaaatacataataatcccttgtactattctcggtgccaaaatgatgtcaaaatacaaagacatacttaagyatgtcatacttaagtttacaatttaattggagaggtaagacataagtacacagaattgtaccaaaatatagtaagtaggaaatagcagccatgaagatag

SEQ ID NO: 216128 - DNA, 201 bp, Homo sapiens
tcttttgcctggggaaggagccaagaggagctctaggggattgggtctagaagcccaggacatcaagggcttagggagaggaagtataaagaaattagatyataaagtttcaataccaagaaattctgattaagattaattttatttgccttcatcttgatggatcaagtgaaagtcatgctcctgttgcataaaggtggc

SEQ ID NO: 216129 - DNA, 201 bp, Homo sapiens
tggatcagaagtcagcctgccaaggtgccattcagttctctttccatttaggtggggccaagaatggtgtctgaatatctgttataaaaacaacaaaagaracccttcttttgttttttaagccctttcctttctttctcctttctgcagcttcgttgtgtggaagatcttcagacaattcaagtgatcaagattttaaaa

SEQ ID NO: 216130 - DNA, 201 bp, Homo sapiens; identical to SEQ ID NO: 38681

SEQ ID NO: 216131 - DNA, 201 bp, Homo sapiens
gctttgtcaaatcagaggcaagtcaaaaagtctaaggctaggatatctgtccaaacgggactataggcagaaaagcctaaggctaggatatctgtccaaaygggactataggcagaaaagcctaaggctaggatatctgtccaaatgggactatgggcagaaaagcctaaggctaggatatctgtccaaatgggactatgg

SEQ ID NO: 216132 - DNA, 201 bp, Homo sapiens; identical to SEQ ID NO: 38675

SEQ ID NO: 216133 - DNA, 201 bp, Homo sapiens
atgaactaaacaaacatattttagagcatggatctcgaagcagaatttggctaaattttaacaaaatgttcttcagtaacacatctcatgatctgaagatwgtgttacaaaaaatattatcaggccaaaatttgttcggaatacactaatttttgctcctctatatgtgaggaaaatgagactagacagatttaagtaatt

SEQ ID NO: 216134 - DNA, 201 bp, Homo sapiens
gtttgtggagtttaagcaattactggggggaaacaaacgcctaaagctttgtcaaatcagaggcaagtcaaaaagtctaaggctaggatatctgtccaaaygggactataggcagaaaagcctaaggctaggatatctgtccaaatgggactataggcagaaaagcctaaggctaggatatctgtccaaatgggactatgg

SEQ ID NO: 216135 - DNA, 201 bp, Homo sapiens
ctgtaaaacaaaacaaaacaaaaaacaaacaaaaaagacagaaatcaatgtagctatttattatatttttaattggtatttcctaatctgagaaagtccayatattcaacatttatttcgctctaaataatgggataacaattacattaacttttgatttatgttttactggtcatgatggaccgactactataacaagca

SEQ ID NO: 216136 - DNA, 201 bp, Homo sapiens
ggttgattgcaaaggaaatttgaaagataagatttattcttatttaatacttcagaaaatttctgcagagccctgccctggcacttaaaatagcttccaayaagtaacttagaccaaaaggaaaaatgaagtgccccaggagaagatacttcagaagggctgttctgaaattcctaaggaggaattcttaggaattcctaa

SEQ ID NO: 216137 - DNA, 201 bp, Homo sapiens
aaaaagttctaatgaggtcctattccaagatagggctctccttttccttggttatggtttgtggagtttaagcaattactggggggaaacaaacgcctaaagctttgtcaaatcagaggcaagtcaaaaagtctaaggctaggatatctgtccaaacgggactataggcagaaaagcctaaggctaggatatctgtccaaa

SEQ ID NO: 216138 - DNA, 201 bp, Homo sapiens
caggaagagccttatctgtttttgatgcttatagtaaaaagtctctaattatagcacagtggctgtcacctagtagatgcccactgaatatttgtggactracttaatgttcaaaatctcttaatagttgtacctgccctcatagaaagtgtgtgcagattgaagcttggaggattacaaggtattgaaatggtcctacat

SEQ ID NO: 216139 - DNA, 201 bp, Homo sapiens
acaccggcctggtgactgtctgctgttaggctgtgatttgtcctggaacacttttatctgatttacttagaatatgccacaagtttcttgtacagccaggyttctgctttccataatgtgagagaattccctaagaagtaacatcagtctgtttcatgatgaaactgcccatgtctccccaacaagcttctcacttcgtga

SEQ ID NO: 216140 - DNA, 201 bp, Homo sapiens
attatgttatttcttctttatttttgtggaacattatgttcattctctattactatgttgcctgattcttgggagggctgttatatctctattgtccattytcaagaaattagaaaatatgtgagaaagcatttaagacatgctttagtagaggtttatgtccaaataagatgtcacactccaatggattgtcattgttgc

SEQ ID NO: 216141 - DNA, 201 bp, Homo sapiens
gaaaaagttctaatgaggtcctattccaagatagggctctccttttccttggttatggtttgtggagtttaagcaattactggggggaaacaaacgcctaaagctttgtcaaatcagaggcaagtcaaaaagtctaaggctaggatatctgtccaaacgggactataggcagaaaagcctaaggctaggatatctgtccaa

SEQ ID NO: 216142 - DNA, 201 bp, Homo sapiens
actggaggcttgaggcatatctctttattctctatttcttaaagatgtagaagaattcttagataagatgaaataagcaaaaataaataaatacaaaagtrggtgtgccaaaaaaaaaaaaagatacaatgagaaaagaagaaagccttaaacctggcatatacatgaaagtcttctcattgaacagaaccattccataga

SEQ ID NO: 216143 - DNA, 201 bp, Homo sapiens
tccacagtgtctggagcatagagtgcctggcctggcgtggagaggcaggacaggtggaagagggtccacagtgtctggagcatagagtgcctggcctggcrtggggaggcaggacaggtggaagagggtccacagtgcctggagcatagagtgcctggcctggcatggagaggcaggacaggtggaagagggtccacagtg

SEQ ID NO: 216144 - DNA, 201 bp, Homo sapiens
gtgaagcccatgcaagcccagaagaccccctgacccctgtcagcaatccttgtgtgtgaacagtttgtatgctgacatctgctggtagtacgcaggttacrgcagtcctctgcatcattctactgctacttcattcagcttgagcttttgcaaccccctttgactttacctctaatagctgagtcagagacagccaagaga

SEQ ID NO: 216145 - DNA, 201 bp, Homo sapiens
agtactggaacgctcaagccattgggcctgacattgatgcacaattaaccaccatattaatcaggctgtgatcatttctgcagtatataaacagagtagtyctgctagggaaatctaggaatgcttcaaaaaagaaaaggtgtttctgcttggcccttatggttgagaaggatttccatgggctgatatgaggaacaacac

SEQ ID NO: 216146 - DNA, 201 bp, Homo sapiens
ttaatgagaaatgaaatgctactgtttcgctttgcttgcatctcaagagtgatttattacatgtaagaatatgtaacacataaagcactatttaaaaagtgtggcttctggaactttagattggcttttcaacaaatagcgaaataatcctataaattacagtttttataattataataaaatgggccaactccgattgaa

SEQ ID NO: 216147 - DNA, 201 bp, Homo sapiens
taacattaggggttctttatttttcttctgttaaatattgatgtatgcaataaaaaataaaagattaattggtaaagtggtttactgaactggtgagaaamttactgatttcttagaagtttctaaaattctattttaaattaaaatatacatttctaggtgttaaagtcaaaaaagatcatcttcagatatgtgtggcag

SEQ ID NO: 216148 - DNA, 201 bp, Homo sapiens
cagaattattgtggggattaagttagataatgtgttttaaaatataaagctacatccaaagaaatgccaatatgtgacattagtatgaaatttactacagytccatttaacattccaactggttgctgtgtggaatatggcataattgtaataaattatttaggaaagcaagcaaagatgtaagtttttttaatttagggg

SEQ ID NO: 216149 - DNA, 201 bp, Homo sapiens
tgacacagtctgcatggctggagcatggagtgcctgacctggcatcgggaggcaggacaggtgaaagagggtccacagtgtctggagcatagagtgcctgrcctggcgtggagaggcaggacaggtgaaagagggtccacagtgtctggagcatagagtgcctggcctggcgtggagaggcaggacaggtggaagagggtc

SEQ ID NO: 216150 - DNA, 201 bp, Homo sapiens
atggaggcattgacacagtctgcatggctggagcatggagtgcctgacctggcatcgggaggcaggacaggtgaaagagggtccacagtgtctggagcatrgagtgcctggcctggcgtggagaggcaggacaggtgaaagagggtccacagtgtctggagcatagagtgcctggcctggcgtggagaggcaggacaggtg

SEQ ID NO: 216151 - DNA, 201 bp, Homo sapiens
tcatagatggctgacagcagtcatttacggaatatgaacctgcactagaatagtgggaatggtatgaggcacagaaatgaatttagaaatgtttcctaagraaggctttctgttggttttaaaagcaaatacgagataggggatagaggaatgggaaaactaagcaaaacaatgtgttcctaaagtggatcagagtctgat

SEQ ID NO: 216152 - DNA, 201 bp, Homo sapiens
gcttcaaattgtcttttgaggcagacatgttctcagtactaaaagacatttttagaaggattttattctcaacagatgcaaaatgcaaaataaaatattgrcaaacaatacagcaacaaataatttactatcactcaggattataaggctggtgttaagcagaacagccattaaatcagcatcaaaagaacaaatagtaaa

SEQ ID NO: 216153 - DNA, 201 bp, Homo sapiens
cataattgtaataaattatttaggaaagcaagcaaagatgtaagtttttttaatttagggggaaaaaatgggagccttgctctccaaatccttaaaacatsctattaagcaacctttctgaatattctgtggtgccaagtagaaagtttaactgaaattaataagccaatggaaagaaagaaatattaataactgctggtg

SEQ ID NO: 216154 - DNA, 201 bp, Homo sapiens
taggaattaaagggatctggaagaaatgtagaatatttccaaagaaaatcataacaattctaagaactacccatagggattcacacttgttaggtagaatkctagtaaaactaatatttaattcatcagaaaatagtttatgcctagtaataacagctacaatgttaataatacatttaaaattcctactgtaccaagcaa

SEQ ID NO: 216155 - DNA, 201 bp, Homo sapiens
tagtcgaaaataaaggttgatttagaaatgaagaaaatgaatatatttcttaatacaaaataagtgggaaatgagaagttataccaataaaaagcatttamaaatttaggggatattgtaacccagtataattttctgacaggttggactttgaccctaatggacttactggtgaactttttcaaatgtttaaataatgtc

SEQ ID NO: 216156 - DNA, 201 bp, Homo sapiens
ccctgcacatagtctctctaccctaaaaaaatcaatgatttaaatttttcctatttctctctattctttgctaatctgaatacatgattttgataagaatrtaatttcttaaatataattttggatatcagtaatttgagaattttaattaaaatatatttctaaataatctaagcacatgttctaaatgatttctttgga

SEQ ID NO: 216157 - DNA, 201 bp, Homo sapiens
agggcatactttaaacaggaagtctaaaagatacaaacaaaaacaaataaataaaaacaacggtccttgtcctcaaagagcttaccatttatatggaaaaacgttttttggcatacatactctatttaacctttacagtaatgtatctttaacacttaaccaaacaatggtttagtgaataaagtctcaaacaaatatttt

SEQ ID NO: 216158 - DNA, 201 bp, Homo sapiens
tcctaagggcatactttaaacaggaagtctaaaagatacaaacaaaaacaaataaataaaaacaacggtccttgtcctcaaagagcttaccatttatatggaaaaacgttttttggcatacatactctatttaacctttacagtaatgtatctttaacacttaaccaaacaatggtttagtgaataaagtctcaaacaaat

SEQ ID NO: 216159 - DNA, 201 bp, Homo sapiens
cagctgcaggcttaatcatgcagaacacctgacatgacatgggtgtgcagtctgatttgagaactggaggactaacactctatagagtttccaggatcacrgggaaattctttgcattttatcgtgactctctcaggctgtcttttagagacttgaagatctaggcaaaataatgttattcttattaagtaaataagagaa

SEQ ID NO: 216160 - DNA, 201 bp, Homo sapiens
cagcacttgggcatgctgaggcagaaggattgcttgagctaagagttcaagaccaacctgggcaacataatgagatgccccgctctctcaaaaaaaaaaaagaaaaaattagctgggcatggtggcatgtgccttagtcgcagctactcaggggcctgagatgaaaggatctcttgagcccaggaggtcaaggctgcagtg

SEQ ID NO: 216161 - DNA, 201 bp, Homo sapiens
ctaattcctccttccctcacaaggctaacagcacgattttcttgctctaacccaccctcagaaccagtttcccatcctgtgtactaccatatcctccctgkttacctccctcatggcttctacccgctcagtgtgcatcatcctcaccaaatagtgaattcctcaagagcagagactgggtcttatgtattttctcacctg

SEQ ID NO: 216162 - DNA, 201 bp, Homo sapiens
taaatggcgagaggggataaagactgacctgcccagaaaatggtacagataaaacgattggacctaaatactggaggtttgggaggcagataactgagatktggttatgttgcttgttaattgaaactctgaagagtcaataatgattccagatatcctatagtatcataaatgtacatatacatacaagtgtgttagtct

SEQ ID NO: 216163 - DNA, 201 bp, Homo sapiens
ctctggaacattctgtctctcctccttacttgactaattcctccttccctcacaaggctaacagcacgattttcttgctctaacccaccctcagaaccagyttcccatcctgtgtactaccatatcctccctgtttacctccctcatggcttctacccgctcagtgtgcatcatcctcaccaaatagtgaattcctcaaga

SEQ ID NO: 216164 - DNA, 201 bp, Homo sapiens
attctttgaaaatctacagatgtcttggattaaggagcactaggcaccagccatttatacagccagagaacaatctgatagagaattctgaagaatttgtyttagctggttcattctttaggacaaatttgtgcctgtgccaatcatttcaaaattgcttcatccatagcaattttgaaaactatcctcaaatgattgaat

SEQ ID NO: 216165 - DNA, 201 bp, Homo sapiens
ccttaccactggccctttccctttagcatattaccaggctattttgtttttaatcacaatctactctcagctccctctagctatcactttatttttctccwttttgtcactgctaactcaaagaaccattggtgactcttggtgccacaatgtcactcactaagcattcatttacctgatatttattgagcatatcaaata

SEQ ID NO: 216166 - DNA, 201 bp, Homo sapiens
ggactatagacactattactcttggctttgagagcactctatcgatctcagatactctgtaaggtatttccagtggagaatgtatcacgtctcttatgccyggtttccccctgcaccatgctatacttttccactttctcttcttgcagggattgtttccattgccaccctaaccgtgctggcctatgaacgttacattcg

SEQ ID NO: 216167 - DNA, 201 bp, Homo sapiens
ataggggcatctttggggtggggctgatttagggcttttaatttttgtctaatctttttttaatctgcatggcattttccattttattttatttttttttwttttttttttttgagataaggtctggctctgttgcccaggctggtgtgcagtggcgcaatctcagctcactgcaacctcgacctctctgggctcaagcaa

SEQ ID NO: 216168 - DNA, 201 bp, Homo sapiens
gttgcccaggctggtgtgcagtggcgcaatctcagctcactgcaacctcgacctctctgggctcaagcaaccctcctgcctcagcctcctgagtagctggraccacaggcgtatggcaccacatctggctaatttttgtatcttttgtaaagacagggcttgccatgttgtccaggctggtcttgaactcctaggctcaag

SEQ ID NO: 216169 - DNA, 201 bp, Homo sapiens
atacaataggggcatctttggggtggggctgatttagggcttttaatttttgtctaatctttttttaatctgcatggcattttccattttattttattttwtttttttttttttttttgagataaggtctggctctgttgcccaggctggtgtgcagtggcgcaatctcagctcactgcaacctcgacctctctgggctca

SEQ ID NO: 216170 - DNA, 201 bp, Homo sapiens
acccctgtcagcaatccttgtgtgtgaacagtttgtatgctgacatctgctggtagtacgcaggttacggcagtcctctgcatcattctactgctacttcrttcagcttgagcttttgcaaccccctttgactttacctctaatagctgagtcagagacagccaagagaaggtaaactaaaagagacacttgctctagtga

SEQ ID NO: 216171 - DNA, 201 bp, Homo sapiens
catgctctggtacatatttcttcactcttcctggaatgtgtttctgccttgtgtgcaaatgcttccctttctgtgtctccaatccattgtgtggcagtggkagcattcacacattgcatggtcattgtcagtgtttacacacgtacattcccttcagacatctagagttctgtctcttagtcaccatgggccatccactgc

SEQ ID NO: 216172 - DNA, 201 bp, Homo sapiens
tcagcatcaaaagaacaaatagtaaaatccaaagtattaattacagataacttttcaaaaattcatcattcacccttgatttaattatttctctggcaatkatttaatagacttctcggagtctgttaagtacttaaaccaagaactaccattattcctactgggaaaacataaacatttctcaagtggaaagtaaacagt

SEQ ID NO: 216173 - DNA, 201 bp, Homo sapiens
agaagaccccctgacccctgtcagcaatccttgtgtgtgaacagtttgtatgctgacatctgctggtagtacgcaggttacggcagtcctctgcatcattytactgctacttcattcagcttgagcttttgcaaccccctttgactttacctctaatagctgagtcagagacagccaagagaaggtaaactaaaagagaca

SEQ ID NO: 216174 - DNA, 201 bp, Homo sapiens
gggtttcgccatgttggccaggctggtcttaaacccctgacctcaggtgatccacccgcctcggcctctcaaagtgctgagattacaggtataagccaccrtgcccagccaaaaacctcaaagttacttttaactcctctcgcccctcacgcctcacattcgataagcagatagattctgttgataccagttgctaaatgt

SEQ ID NO: 216175 - DNA, 201 bp, Homo sapiens
cagatagattctgttgataccagttgctaaatgtttctggaatccagactttgttgttcatgccttttaatgtcatcctagctgaggtcccatcatgtctygcctgctgttgcaatagccttcaagttggtttccatggcctccaatcgtgttttacattctctactactgccagaatgagcattcactactgaagaaaaa

SEQ ID NO: 216176 - DNA, 201 bp, Homo sapiens
aagaacaaacctgtcatggtataaatgaatattaactatgttataccaattgctttctgagtccagcacctctgtatttcattcttattaattgcagaatygtgaaatgttaaaatatgaagggattttcaattttatgaaaacaaaaagagattgtttgatttgctgaaagttacagagctatttcgtggggagctggga

SEQ ID NO: 216177 - DNA, 201 bp, Homo sapiens
tttacttacacttacacacttttttcctttattacttatatgcatgtgtacattcatataatatttttaatacattttcctcctcagggctattatgagcytaaatatttttaaatggccagttgttttactgaattaatccttttgtaataatctgactagtaattgagtagaaatagtctcatgttgctaccatgagat

SEQ ID NO: 216178 - DNA, 201 bp, Homo sapiens
tctggccacacagggcatcacacagatgtcttccgcacatggaatgtaaccagcattatgctcaaagttaacaggagaaccttattattttttttttttttaaacttccccttcaaaaataagaacaaacagtgttagtcttggcagaggatgtttagatagaccttttgcttgggatgcagagattcagggttgcagaga

SEQ ID NO: 216179 - DNA, 201 bp, Homo sapiens
aaaaataagaacaaacagtgttagtcttggcagaggatgtttagatagaccttttgcttgggatgcagagattcagggttgcagagacagtggcgaaatgsaaacatcactgtattcaaatgttagaagtaggtattatttatgttaagatattttaatatgaaatcagaagttttccttttttacttacacttacacact

SEQ ID NO: 216180 - DNA, 201 bp, Homo sapiens
catttattggatgccatgtgtgtgagacactgggaataatattgctccccaccctccaactcccacagaagaacaaacctgtcatggtataaatgaatatkaactatgttataccaattgctttctgagtccagcacctctgtatttcattcttattaattgcagaatcgtgaaatgttaaaatatgaagggattttcaat

SEQ ID NO: 216181 - DNA, 201 bp, Homo sapiens
cagtattgttgctttagcctaaagactttcaggtgagtatgctcttcagcaccttggcctttctacctctggccacacagggcatcacacagatgtcttcygcacatggaatgtaaccagcattatgctcaaagttaacaggagaaccttattattttttttttttttaaacttccccttcaaaaataagaacaaacagtg

SEQ ID NO: 216182 - DNA, 201 bp, Homo sapiens
tcctgagttatccctgagcaagaactacctaacagtggagtattgaaggggaggaagttaaaaatgagggaagtagcttcttgatgcagaggcttttggasaggcttgccctatctgttggaaagaccattggtctgatggcacaagagtggatcctgttccttatcctgcgactcatgcattgtgcgggctttctcaagt

SEQ ID NO: 216183 - DNA, 201 bp, Homo sapiens; identical to SEQ ID NO: 38676

SEQ ID NO: 216184 - DNA, 201 bp, Homo sapiens
taagttcactcctgaaatcagaaaaacgatctctttattctgatatgtcgagcttaaaatctttatatataataccttcattggtccctgctgatgtcctrtgattcttggcatttgcttgttgctaaatatatatttaattctaatacactctggacaactatttaatattaaggcatacacatcagaggaatgactgga

SEQ ID NO: 216185 - DNA, 201 bp, Homo sapiens
ctctaccactttaattaatatcactataacataactgataggaatgaatcaaaggaggatttaccatgccctttcggttgtgtcccacttaacaaattgtraagtaacaattttctgtaatctctcttgcctcttagctgttatccagagtatagaaactttttttctcccagagccacccaacgtcataaaactggtagt

SEQ ID NO: 216186 - DNA, 201 bp, Homo sapiens
aaagattagctttgcatgatcctttatgcactgtgaaggtctgaagtttataatactcacttgacccttgtaactgatgaggcaatgatgccaccacagtrttctaatttacaaaaagaattggagttcaattagtggttgtaaagctcattttggggaggttgattgcaaaggaaatttgaaagataagatttattctta

SEQ ID NO: 216187 - DNA, 201 bp, Homo sapiens
aataatgtattgggtggaggagatgggatctgtcctatgcagtcatttaggaatctaggttccttccattgtgtgatattatgatctttaggcgttggccycccaggttcttgtagagaggaacagcagagaggagaagcggaaaggaggccaagaaatattattcgatgttgtacccaggacacggagaagaacaatgtt

SEQ ID NO: 216188 - DNA, 201 bp, Homo sapiens
ttcattcaggtcctcagaatgcaaattggcatgtgccctgtaagctgtttttactattttccgtcttatagatgggttccagcacaccagaatcttgggtragattacaaatggctcagccaataccatctcaggtgaacaaatactgtaattagctctgcaatcggtagatttcattaaagtagaacttcattgttgaag

SEQ ID NO: 216189 - DNA, 201 bp, Homo sapiens
aaaatgatttaagtgaagtattatggagaaatgagctgtacattgttctgttctcattttataaatacataacattggtaatgacccctgctgttgaaacrtaagtaccaaccagatactaaaagtaaaaagcaaaagatgagaattgcactggaaatagtttgtcaggagattgtaatctcctttcaaacaaagactatg

SEQ ID NO: 216190 - DNA, 201 bp, Homo sapiens; identical to SEQ ID NO: 38674

SEQ ID NO: 216191 - DNA, 201 bp, Homo sapiens
gaaattagatcataaagtttcaataccaagaaattctgattaagattaattttatttgccttcatcttgatggatcaagtgaaagtcatgctcctgttgcrtaaaggtggctgcttcctctgaaaattttcagatttttattttagtatttttaccttcattataaagaggtatttgtagtgtagttcatttccttttaac

SEQ ID NO: 216192 - DNA, 201 bp, Homo sapiens; identical to SEQ ID NO: 54567

SEQ ID NO: 216193 - DNA, 201 bp, Homo sapiens
ccccagagtccaaggcactcttgcaataattcaaggaggcttcagctagaaatgcccatttcattcctttctgttccttaacacctattccatcttttatracccaacttaagctttatctctgaatgaagccagtagtccactgggattttactttttctggtttgtttttgcaccataactttgacatatgatcacata

SEQ ID NO: 216194 - DNA, 201 bp, Homo sapiens; identical to SEQ ID NO: 54568

SEQ ID NO: 216195 - DNA, 201 bp, Homo sapiens
attgcatgtgtccttatagcagcagcattgtgtattagtagccttttaagagaactgtgtagaagactataaaaagggctttataactgatcttttgacayactcactttgagtggcatatgcccaggaaaatatttaaaagaaagaaaagctatttgtacaaagttttctagcagttccactcagataactttaaggggg

SEQ ID NO: 216196 - DNA, 201 bp, Homo sapiens
gcatggaggcattgacacagtctgcatggctggagcatggagtgcctgacctggcatcgggaggcaggacaggtgaaagagggtccacagtgtctggagcrtagagtgcctggcctggcgtggagaggcaggacaggtgaaagagggtccacagtgtctggagcatagagtgcctggcctggcgtggagaggcaggacagg

SEQ ID NO: 216197 - DNA, 201 bp, Homo sapiens
tttctcaccctactgtctcctctcattcttatcaagtaagtctgcttctgatttatcggaccaaacaaagccattatcaagggttcctttgactccttacytctctttacacaaaccactgattcttaggactctctcttcagttacagggcgacaggagaggtctcccaggaccaactcgattctgtattctgattgctc

SEQ ID NO: 216198 - DNA, 201 bp, Homo sapiens
tgattataattcagtcagaatgagatacatatttaggcattttatagtttaatccttgaggatactagtacagtgtgttttatgccatttctttttattayacatcatataattaaagcccttgagttctctattgctgctcatttgagactcttacttgttccgtattcatctctgacataaaagtaaatattacccagt

SEQ ID NO: 216199 - DNA, 201 bp, Homo sapiens
atatatatttaattctaatacactctggacaactatttaatattaaggcatacacatcagaggaatgactggattcagaggtgcagggttgacaaagtgtrgcaggaagatgaatacctgattataattcagtcagaatgagatacatatttaggcattttatagtttaatccttgaggatactagtacagtgtgttttat

SEQ ID NO: 216200 - DNA, 201 bp, Homo sapiens
cctttctcttcctctttctttctcttccttccttccttccctcctttctctctttcttcctttttctttctttctttcttctttcttctttctttcttttyctttttcttccttccttccctcctttctctctttcttcctttctttctttcttttctttctttctttcttccttccttccttccttcttgctctctgtct

SEQ ID NO: 216201 - DNA, 201 bp, Homo sapiens
cttccttcctttcttccttccttccctcctttctctttctttcttccttccttccttccctcctttctcttcctctttctttctcttccttccttccttccctcctttctctctttcttcctttttctttctttctttcttctttcttctttctttctttttctttttcttccttccttccctcctttctctctttcttcc

SEQ ID NO: 216202 - DNA, 201 bp, Homo sapiens
atcagggaggacttgggaaatacaaggtttgctagatctgtactaacatgtcatggtacataacagctgaaatcaggcacctgaaactcattgtgcttgcyaagacacaggcttgatcaaaaacgatattagtaaatgttaaagtctctttgaccaaaataaccagaaggaaagtgttactaacctcttgcaccctgactt

SEQ ID NO: 216203 - DNA, 201 bp, Homo sapiens
  misc_feature (1)...(201): n = A,T,C or G
ttgaagagattggtgctctgcagaaaaatccttctttgggggtgtctaataccttcactgaagttctggattctgcattacctgaagaaagccagttatcntattttaatagcgacgaaatgcctgcaaaacacactcagaaaagtgatacagagatttcactagaagtaactgatgtagaggaatcagtggagaaggaaa

SEQ ID NO: 216204 - DNA, 201 bp, Homo sapiens
agggctctccttttccttggttatggtttgtggagtttaagcaattactggggggaaacaaacgcctaaagctttgtcaaatcagaggcaagtcaaaaagyctaaggctaggatatctgtccaaacgggactataggcagaaaagcctaaggctaggatatctgtccaaatgggactataggcagaaaagcctaaggctag

SEQ ID NO: 216205 - DNA, 201 bp, Homo sapiens
ccttccttcctttcttccttccttccctcctttctctttctttcttccttccttccttccctcctttctcttcctctttctttctcttccttccttccttccctcctttctctctttcttcctttttctttctttctttcttctttcttctttctttctttttctttttcttccttccttccctcctttctctctttcttc

SEQ ID NO: 216206 - DNA, 201 bp, Homo sapiens
cagcactcatcattcccattgcttttcagtgttcacggaaatggatgcaccatttgaagtagaatttggttgtcttcctcatatctgctcatgtaccatgyagtttttatttgcgttaataaggctcaacatcagttaaaggtctaaagtagttgtaagacagtcctttcattcttatcctcctggtggagtgttgtggga

SEQ ID NO: 216207 - DNA, 201 bp, Homo sapiens
cccttccttcctttcttccttccttccctcctttctctttctttcttccttccttccttccctcctttctcttcctctttctttctcttccttccttccttccctcctttctctctttcttcctttttctttctttctttcttctttcttctttctttctttttctttttcttccttccttccctcctttctctctttctt

SEQ ID NO: 216208 - DNA, 201 bp, Homo sapiens
ccccttgtccttttttccttgattaattttataaagcttctagggatggtctcataaagaccactacttagtaaagtagtatctttattaagcaatcttcrtagagttttgtttccattactatctgtgaacaaaaatagttaaactgcatctttttaaatttctacaaattgatatatttttgagtgagcaaaattttca

SEQ ID NO: 216209 - DNA, 201 bp, Homo sapiens
gtttaagcaattactggggggaaacaaacgcctaaagctttgtcaaatcagaggcaagtcaaaaagtctaaggctaggatatctgtccaaacgggactatrggcagaaaagcctaaggctaggatatctgtccaaatgggactataggcagaaaagcctaaggctaggatatctgtccaaatgggactatgggcagaaaag

SEQ ID NO: 216210 - DNA, 201 bp, Homo sapiens
tcccttccttcctttcttccttccttccctcctttctctttctttcttccttccttccttccctcctttctcttcctctttctttctcttccttccttccttccctcctttctctctttcttcctttttctttctttctttcttctttcttctttctttctttttctttttcttccttccttccctcctttctctctttct

SEQ ID NO: 216211 - DNA, 201 bp, Homo sapiens
tgctattatatcattactttctttctttttctttccttttcccttccttcctttcttccttccttccctcctttctctttctttcttccttccttccttccctcctttctcttcctctttctttctcttccttccttccttccctcctttctctctttcttcctttttctttctttctttcttctttcttctttctttctt

SEQ ID NO: 216212 - DNA, 201 bp, Homo sapiens
aagtgttagtgggctgaaattactattgttaattaaataaaaaggaggaaggaaactttctcaacaaataagcaatataaacaagatttcaaagaagaatyggttacttgcttaaaagaacaaactttttcaagcatattaaatgtactggttttctttaatattgtttcatatgactagatattataggagcaacaggat

SEQ ID NO: 216213 - DNA, 201 bp, Homo sapiens; identical to SEQ ID NO: 54570

SEQ ID NO: 216214 - DNA, 201 bp, Homo sapiens
ttgctattatatcattactttctttctttttctttccttttcccttccttcctttcttccttccttccctcctttctctttctttcttccttccttccttccctcctttctcttcctctttctttctcttccttccttccttccctcctttctctctttcttcctttttctttctttctttcttctttcttctttctttct

SEQ ID NO: 216215 - DNA, 201 bp, Homo sapiens
ttataattcctacatgtctcacagagttgttatgaagattaagtgagataacacaggcaaactgcttagaacagtccctgactcatagtaagtactctctmtaagtgttagtgggctgaaattactattgttaattaaataaaaaggaggaaggaaactttctcaacaaataagcaatataaacaagatttcaaagaagaa

SEQ ID NO: 216216 - DNA, 201 bp, Homo sapiens; identical to SEQ ID NO: 38680

SEQ ID NO: 216217 - DNA, 201 bp, Homo sapiens
tttgctattatatcattactttctttctttttctttccttttcccttccttcctttcttccttccttccctcctttctctttctttcttccttccttccttccctcctttctcttcctctttctttctcttccttccttccttccctcctttctctctttcttcctttttctttctttctttcttctttcttctttctttc

SEQ ID NO: 216218 - DNA, 201 bp, Homo sapiens
attacaggcatgagccaccacaccggacctgaaatcttaattttttaacccacagaaagggttttaattttgatgttgtgctgggtttcctttgaaactgrgtcattgtgcacgaaatatgaagactactgaacatgaaaatttaatagaatgcagtttccacatcctgatgtggaaaacatgtataataaaaaccaacta

SEQ ID NO: 216219 - DNA, 201 bp, Homo sapiens
atttgctattatatcattactttctttctttttctttccttttcccttccttcctttcttccttccttccctcctttctctttctttcttccttccttccttccctcctttctcttcctctttctttctcttccttccttccttccctcctttctctctttcttcctttttctttctttctttcttctttcttctttcttt

SEQ ID NO: 216220 - DNA, 201 bp, Homo sapiens
aaagctggcatttggaaacagcattcttattaaaggaaagagacatgctgctctgatccagaaggtgttaaattgaacatcaaagagatgagttaaattcrtgttaaccccaatttgacagtgtggaagagaagcttgaaatagtagaatgtgaatgggtctgggaactagccttgttctaacacctactttgtggtcttg

SEQ ID NO: 216221 - DNA, 201 bp, Homo sapiens
gattttactttttctggtttgtttttgcaccataactttgacatatgatcacatatcatcttacattgttctgtaatgttgtgtgtgatataaaaatacartattgcagtcttcttgagggtaggaccacatgtctctggtttctccaaaagacctactcagcacagtgataggcacatacctgatccatctgcagctttg

SEQ ID NO: 216222 - DNA, 201 bp, Homo sapiens
taagatgaaataagcaaaaataaataaatacaaaagtgggtgtgccaaaaaaaaaaaaagatacaatgagaaaagaagaaagccttaaacctggcatatayatgaaagtcttctcattgaacagaaccattccatagaacattaaggtccttaaatatattcccaattctgtgctgctgcctgcacaaagagacacagaac

SEQ ID NO: 216223 - DNA, 201 bp, Homo sapiens
atgggactatgggcagaaaagcctaaggctaggatatctgtccgaatgggactgtaggcagaaaagcctaaggctaggatatctgtccaaatgggactatrggcagaaaagaagccaagtttgaagccagaatggtcagagaacaaggggagctgatattaaaagaaccaaagataacagaggggaggtaagcctggcacg

SEQ ID NO: 216224 - DNA, 201 bp, Homo sapiens
atttccaaattcctaatatgcagccactgagcagcagatggggacaaaggcaagcaagttttagagcccagtatgaaacaaccagaaggttttcctgaaarttctcaagttccaaaggatgaaggagtgttgatgtagaaagatccgtgaagaatgaagggtttcacacataaaaggcaccatagcactgaattgtaagta

SEQ ID NO: 216225 - DNA, 201 bp, Homo sapiens
caagtagctaggactataggcacatgccaccatgcccggctaattttttttttttttttttttttttttttttttctgatacaggttgcccaagctccatytgtctctttaaaagcactctaatccatggtgtctttccctcctggacttaaaactcccacaggcaaaattaagatctaattcatcttcctaatagatgct

SEQ ID NO: 216226 - DNA, 201 bp, Homo sapiens
tggtctgtcttaatcttaaagttttaggttgtttttccccttagattatggaaggagtgcattttcaataataaaatattagaaaaatatagaaaatcagraggaagagaaataatctgtaagagaccctcagtgttagtattttcatgtgtctccttctaggcttgcttttagaaagtgcagtggtgctgcctaatctgc

SEQ ID NO: 216227 - DNA, 201 bp, Homo sapiens
tgtggaataagttaaaatctcctggtagtcaaggccatccacaatgtgatccaagcccctatctacctttaaactttacttctcactcttcctcttcagayacatgctcaaccaaactacttatttcgtaagacagcacaggaatttgaagactcttagatgaatttctgacttctgaaattatttttcctccaaagcccc

SEQ ID NO: 216228 - DNA, 201 bp, Homo sapiens
tggtatggagtttctgtatatgctacactgtttccccctttcatgtttggtatacctgtgtacagttgatgaaccaatattgatacgttattaaagtccakactttatttagatttacttagtttttgccaaatgtccttttgctattccaggatcccatccaggataccacattacatttaatggtcatgacttcttcct

SEQ ID NO: 216229 - DNA, 201 bp, Homo sapiens
ctctgttgcccagcccatctcggcccactgaaacctccacctcccgggttcaagcgattctcctgcctcagcctcccgagtagctgagattacaggcgccygccaccacgcccaggtaatttttgtatttttggtagagacggggtttcaccatgttggccaggctggtctcaaactcctgacctcaggtgatctgtccac

SEQ ID NO: 216230 - DNA, 201 bp, Homo sapiens; identical to SEQ ID NO: 38686

SEQ ID NO: 216231 - DNA, 201 bp, Homo sapiens; identical to SEQ ID NO: 38691

SEQ ID NO: 216232 - DNA, 201 bp, Homo sapiens
gctggaactacaggcttgcaccaccacgcctggctaatttttgtattttgagtgcagacaggtttcactatgttggccaggctgttcttgaactcctgacstcaggtgatctgcctgcctcagcctcccagagtcctgagattacaggtgtgagccactgcacctggcctttactcctagatttcttatgagattggatgg

SEQ ID NO: 216233 - DNA, 201 bp, Homo sapiens; identical to SEQ ID NO: 38688

SEQ ID NO: 216234 - DNA, 201 bp, Homo sapiens
tgtcttccatgaaactggtccagtgtcagaaaggttggggactgcagttttaagagtattcttattagctttgtagtaatttaataataataaaagctacyatttattgagggcttcccacatgccaggtactgttttaggtgctttgtagaataactcatttgcaagacaggtattttctttcttttctgggggaaaaat

SEQ ID NO: 216235 - DNA, 201 bp, Homo sapiens
catataaatagtattttaagtcatgagaatgaataattttagacttttataattcatctaaagtttaaattttaaactattaaatattcagcatctgggtmcccttatatgtttgcggacttctccacctggtaggaggtagagcctacttccttctatggaaacaaaagtttactatactctttgctggccttccttgaa

SEQ ID NO: 216236 - DNA, 201 bp, Homo sapiens
ttattgcacattgtctagagcaagagttgataaactatggcctttaggccaaattcagcctcccacctatttttgtaaataacagttttattgaaaaatakccacacccggctgggcgcggtggctcacgcttgtaatcccagcacgttgggaggccaaggtggacggatcacgaggtcaggagatcgagaccatcctggc

SEQ ID NO: 216237 - DNA, 201 bp, Homo sapiens
tgcctcagcctcccaagtggctgggactacaggtgcgtgccaccatgcccggctaatttttgtattttcagtagagacggggtttcaccatgttggccagratggtctcgatctcttgacctcatgatccacctgcctcggcctcccaaaaaagtgctgggattacaggagtgagccaccgcgcccggccggtagagtttg

SEQ ID NO: 216238 - DNA, 201 bp, Homo sapiens
attgtctagagcaagagttgataaactatggcctttaggccaaattcagcctcccacctatttttgtaaataacagttttattgaaaaatatccacacccrgctgggcgcggtggctcacgcttgtaatcccagcacgttgggaggccaaggtggacggatcacgaggtcaggagatcgagaccatcctggctaacacggt

SEQ ID NO: 216239 - DNA, 201 bp, Homo sapiens
cttcaacataatgatttcatttcctttggatatatacccagtagtgggatcaatggatcatatggtagttctctttttaattttttgaggaatctccatastgttttctataatggctatacacacctcttattttgattccagcaggagctccttaattggtctgcttaacttcagtctctacaggttaatgtctacttt

SEQ ID NO: 216240 - DNA, 201 bp, Homo sapiens; identical to SEQ ID NO: 38683

SEQ ID NO: 216241 - DNA, 201 bp, Homo sapiens
tccacggaaatgttcatgaacacatcgttgataaccagaaaaactagaagccacctaaaattacagactaagagactgagtaaacttgttaacaatggaayattaaacagtcattaaagctgatgcaaaatagatttaatgggccaacgcggtggctcatgcctgtaatcccagcactttgggaggctgaggcgggcagat

SEQ ID NO: 216242 - DNA, 201 bp, Homo sapiens
cggatcaggccaacacttgttcaagtgttttcctgagaccctgaatttccatatgatacagcttagtaaattagtttgagtctaaaatttttcagattcartattatcagcacctgaacctgaaaagatttaaaaaaaaatcaggaactgttctggaagcccttcctggccttttatgccagctccatcttgtacctacca

SEQ ID NO: 216243 - DNA, 201 bp, Homo sapiens
cttgttcaagtgttttcctgagaccctgaatttccatatgatacagcttagtaaattagtttgagtctaaaatttttcagattcagtattatcagcacctraacctgaaaagatttaaaaaaaaatcaggaactgttctggaagcccttcctggccttttatgccagctccatcttgtacctaccagctgtcccacaaaag

SEQ ID NO: 216244 - DNA, 201 bp, Homo sapiens
gtgctgggtgttaaggaatatttgggtatttctcaacattgaataatacgaaaagtctcacttgtctcctccacaaccctgcgcatttctcacaccgaacytcatccgtttaagaaaaacttttcttcttctaccgctacataattttactttggcttgctttaaatgcaaatgtttaaacagaaaattaaaaataatcgt

SEQ ID NO: 216245 - DNA, 201 bp, Homo sapiens
gccgccgaggctggacagcttgggaaagggaacccaagcagcattttctgtgctgctgctttattcataacttagggttgccactgggtattaaggttgcttttttttttttttaatgaagacagaaaattgcctttatctttgtattgcttcattttataatgcaaacatccaagagttggcagttagaatatttgccat

SEQ ID NO: 216246 - DNA, 201 bp, Homo sapiens
ggtagttctctttttaattttttgaggaatctccatactgttttctataatggctatacacacctcttattttgattccagcaggagctccttaattggtstgcttaacttcagtctctacaggttaatgtctactttacatccttgccatattcagtcctttattcaagaaatatttattgagaactaacaacatgccca

SEQ ID NO: 216247 - DNA, 201 bp, Homo sapiens
tcagtctctatccccagttggttttattcttaggtaagagttttctttgcaaatctcatagaaacatggtcctattggttctaaccttcattaactctgtrtccccagcggtaatttctaaaggctcaacatagtcgcgcatagtttaacttcatcctctgcattacttttcgtgcttttttctatattagccaccctgaa

SEQ ID NO: 216248 - DNA, 201 bp, Homo sapiens
tactcagttcattaagtggggttttaaatatatatatatatatatatatatatataaatttttcattaattagctctgtaatacgtttagatttctttatrtggtgtcaacatcattacagaaaaatttctttatgcggagtaagacagaggccttaatgttattttttccaaccatttgttgagctctttctccactaac

SEQ ID NO: 216249 - DNA, 201 bp, Homo sapiens
ttcattaattagctctgtaatacgtttagatttctttatatggtgtcaacatcattacagaaaaatttctttatgcggagtaagacagaggccttaatgtkattttttccaaccatttgttgagctctttctccactaacttaaaatgtcacctttattacatattaaatactcattcatacacaatttctctctttcaaa

SEQ ID NO: 216250 - DNA, 201 bp, Homo sapiens
tattctatcccactgatttatttgcccatgcctatgcccatacatttttaagaaaattattgtagctatgtctttatagctggtcaagcaagtctcctggkgttactctcttttgtcatttaatttataaattaagttagagagaactgacattaagtcttcccattcaggaatacaatttgtctttctagttaccctaat

SEQ ID NO: 216251 - DNA, 201 bp, Homo sapiens; identical to SEQ ID NO: 38692

SEQ ID NO: 216252 - DNA, 201 bp, Homo sapiens
tctatcccactgatttatttgcccatgcctatgcccatacatttttaagaaaattattgtagctatgtctttatagctggtcaagcaagtctcctggtgtkactctcttttgtcatttaatttataaattaagttagagagaactgacattaagtcttcccattcaggaatacaatttgtctttctagttaccctaatttt

SEQ ID NO: 216253 - DNA, 201 bp, Homo sapiens
attgattatctcagactgggggtagggtgagtgattttatttttcaaggtgttcttgggacaaacatgattggcagtttagcaggtttaatgggcaggtcyttttgttatttaaaagcaatattaaataccaagtaaacacaactttgaagagattactcatgaacatttcacacttgttaccacctatgaaaattatttt

SEQ ID NO: 216254 - DNA, 201 bp, Homo sapiens
tcctataaaatctgtcctaggaaatttcacctctttgccaggccagaaatcagggcataatattaataaaatagttagcacatattgtgtactttcttcartgccaggcactcttctaaccactttatatgtattagctcatcagactcagcctgataatatgagatgagtcctgtcattatccacatattagataacaaa

SEQ ID NO: 216255 - DNA, 201 bp, Homo sapiens
tcaagaaatatttattgagaactaacaacatgcccagcactgttctaagtgctgtggatacagcagttcgtaaaacagacaaaattctcttctattgttcragtaggaagagaacaataaaaataaattggcaaaacatgtatattagattgaggtaagtgctattaaataaaataatgaaggaggacagggagtgctggg

SEQ ID NO: 216256 - DNA, 201 bp, Homo sapiens
atccatctccagaactcttttcatcttgcaaaactgaaactctatatccactaaataataactgccaacctaggcaacataaggagacccagtctctaccaaaaaaaaaaaaaaaattagatgggtgttgtggtacacacctgtagtcctagctactcaggaggctgagcggggaggattgctcaatctcaagaggttaag

SEQ ID NO: 216257 - DNA, 201 bp, Homo sapiens
atccgcctgcctcggcctcccagagtcctgggattacaggcatgagccactgcgcccggccagttcaccttcttaatgtcactcatatccatccccttctstctctctctctctcctaccgtactttaggccctcattatctctagcatggacaactgccttagtccattaactgttccccctgtccctagtccatccttt

SEQ ID NO: 216258 - DNA, 201 bp, Homo sapiens
ggtaggttggaacagacttctgttacctaaagattggtgggtatggatttctctactgacagaattctaaaaaacaaatgatttatatcatattttagacygtgacaaaaggtgtggagtctcttatttgtacagattggattcgtcacaaattcaccagatcaagaattccagaaaaagtaagaacaaagtttgattttt

SEQ ID NO: 216259 - DNA, 201 bp, Homo sapiens
tgaggcaggataatcggttgaacccaggaggcggaggttgcagtgagccaagattgggccactgcactccagcctgggtgacaaagcgagactctgtctcaaaaaaaaaaaaaaaattgattttcactgtgatcaaaatggacaagcattggaggttttaattttttcataaataaactttatttttgaatagttttagat

SEQ ID NO: 216260 - DNA, 201 bp, Homo sapiens
tacagatgctcaacaccatgcccagctccctctgtttatgagttattttcttttaatatatctcagtagttccaggccccatccttttatttatttttagraagagcaggcatggacacagggttttgcctacaattgattatctcagactgggggtagggtgagtgattttatttttcaaggtgttcttgggacaaacat

SEQ ID NO: 216261 - DNA, 201 bp, Homo sapiens
aaatgtaagaagaatggaggaagagagtgtgtttcatgaaagtcaagagtttcaagaagggagtagccaactgggtcaaatgcttctgaaaggtcacatadtacgagagtttaaaagtgcccattgaatatggtagtacagagatcactgttgaccttagcaaaaacgatttcagtggagtacctggggcagtcgccagac

SEQ ID NO: 216262 - DNA, 201 bp, Homo sapiens
cagacataatcagccatttctcaaaggagcactggttccttttattaaagaatgcagccaagatctgggcactgggtgtgctccttgccactgagtgctaktgctttaagtcctctcagctaacagagctagcccatgtatatatgcatatctgtaattacttctatatccctcaatagctatattaagctaaacatgagt

SEQ ID NO: 216263 - DNA, 201 bp, Homo sapiens
acagagatcactgttgaccttagcaaaaacgatttcagtggagtacctggggcagtcgccagactgaagtgagttaaagcaaataggtggtgaggaaatawgaaaaaaaaaaaaaaaaacatacagagaacactctttgaagaaatttttcatgaagaatgaaaaaatagggtggcatctggctcgagatgtgtgtactaa

SEQ ID NO: 216264 - DNA, 201 bp, Homo sapiens
tctaatttcccagactaaagacatctgaatcaagctcagcctccctcttcttcacccaacacaaatccatctatattactgcccagagttcccatatcagwcctttttctgttacagctactgtagttcaggctcttaaaccatggtcataagtgcctcctaactgggtttccttgtatcagtctctatccccagttggtt

SEQ ID NO: 216265 - DNA, 201 bp, Homo sapiens
agtttaacttcatcctctgcattacttttcgtgcttttttctatattagccaccctgaaccacttgcctttccaaaatattttgtgctccttcatactgtkcctttaaatattctcacctttctttagtgcacctaccccttcctctgatctccaccatccttctcatcctaatctcttcaaaatctctagaaaaatataa

SEQ ID NO: 216266 - DNA, 201 bp, Homo sapiens
tgaagcaagagaatcgcttgaaccttgggggcagaggttgcagtgagccaagatcgtgccattgcactccagcctgggcgatagagcaagactccatctcaaaaaaaaaaaaaaaagaatttgtgtatttgtatcattttacttagttttattattaatcattttatttagaatggatgcatcataatgtagttatcatgg

SEQ ID NO: 216267 - DNA, 201 bp, Homo sapiens
taataaagatgcttggattagaaaaagtatgcaattattttaatcatctttagtgttgtttacattgctttaaattttatacttttaaaactttgcggtayacatttattatttattttgtattacttagggtaatttatttataaatttggcttagaatgaaccttcaatttaacattttactgaaacatggaactatct

SEQ ID NO: 216268 - DNA, 201 bp, Homo sapiens; identical to SEQ ID NO: 38697

SEQ ID NO: 216269 - DNA, 201 bp, Homo sapiens
ctttgaagagattactcatgaacatttcacacttgttaccacctatgaaaattattttttgagaaaggttaaaaatcctgatatgatgtgctttggtgcastaataccatgtttctccagagagaggatatcatcaggcaaagggtgttaagggcttcgagttccaaattggaaatttgaccaagtaacccctgaaacata

SEQ ID NO: 216270 - DNA, 201 bp, Homo sapiens
tttgaagagattactcatgaacatttcacacttgttaccacctatgaaaattattttttgagaaaggttaaaaatcctgatatgatgtgctttggtgcagwaataccatgtttctccagagagaggatatcatcaggcaaagggtgttaagggcttcgagttccaaattggaaatttgaccaagtaacccctgaaacatat

SEQ ID NO: 216271 - DNA, 201 bp, Homo sapiens
cagttcattaagtggggttttaaatatatatatatatatatatatatatataaatttttcattaattagctctgtaatacgtttagatttctttatatggkgtcaacatcattacagaaaaatttctttatgcggagtaagacagaggccttaatgttattttttccaaccatttgttgagctctttctccactaacttaa

SEQ ID NO: 216272 - DNA, 201 bp, Homo sapiens
catatggtagttctctttttaattttttgaggaatctccatactgttttctataatggctatacacacctcttattttgattccagcaggagctccttaaktggtctgcttaacttcagtctctacaggttaatgtctactttacatccttgccatattcagtcctttattcaagaaatatttattgagaactaacaacat

SEQ ID NO: 216273 - DNA, 201 bp, Homo sapiens
attatctctagcatggacaactgccttagtccattaactgttccccctgtccctagtccatcctttatttaatccatactcaaccctgcagaggcagattsgtataacagctgagttaacacttcctgcttaacacttcagtggatcttagctgccttttaaaaagtccaaatattttggttcattacatgaatttatctc

SEQ ID NO: 216274 - DNA, 201 bp, Homo sapiens
tatgctttagaaatcagaattgttattttaacatgaaggtaaagaggcctaacacatgttcttaccttaattaagagccactccatttccacgtggcatckggtactgggcaagataagcaaagatactctgcagaaaggaacttcggatcaggccaacacttgttcaagtgttttcctgagaccctgaatttccatatga

SEQ ID NO: 216275 - DNA, 201 bp, Homo sapiens
ggggccaggtgtagtggcccatgcctataatcccagcactttgggaggctgaggcaggaggatcactgaagcccaggagttcaagatcaacctaggcaacrtagggagacccccatctctacaaaaaatttaaaaattagccaggcatggtggcgcatacctgtagtcccagctgcttcagaggctgagatgtggagattg

SEQ ID NO: 216276 - DNA, 201 bp, Homo sapiens
agtacctggggcagtcgccagactgaagtgagttaaagcaaataggtggtgaggaaataagaaaaaaaaaaaaaaaaacatacagagaacactctttgaaraaatttttcatgaagaatgaaaaaatagggtggcatctggctcgagatgtgtgtactaataggaatgatgcagtacagcaggagagattgctctaaggcc

SEQ ID NO: 216277 - DNA, 201 bp, Homo sapiens
cagaggccttaatgttattttttccaaccatttgttgagctctttctccactaacttaaaatgtcacctttattacatattaaatactcattcatacacamtttctctctttcaaatgtgtttctggactcttttattctatcccactgatttatttgcccatgcctatgcccatacatttttaagaaaattattgtagct

SEQ ID NO: 216278 - DNA, 201 bp, Homo sapiens
gtcttaatacagtttcaattagaaaataaaatgtctcatacttgcacattgtatgtcaaaaaaaaacctagtctcttttagtaacgtcaaaaaaaaaaaamaaaacacaacaacctagtctctttcagtaacttctccccatctgaaattctttatcacctatccctatctgtgtatttcttctgacctctaggatcctct

SEQ ID NO: 216279 - DNA, 201 bp, Homo sapiens
gttaaagcaaataggtggtgaggaaataagaaaaaaaaaaaaaaaaacatacagagaacactctttgaagaaatttttcatgaagaatgaaaaaatagggkggcatctggctcgagatgtgtgtactaataggaatgatgcagtacagcaggagagattgctctaaggcccaagtccttgtggaggctaaaggaggtcaga

SEQ ID NO: 216280 - DNA, 201 bp, Homo sapiens
atttattttgagacagagactcactctcacccaggctggagtgcagtggtgcgatcttggcccactgcaacctttacctcctgagttcaagtgatcctcaygcctcagcctcccgagtagtgggactacagggttttgtcaccatgcccagctaattttttctatttttagtagagacagggtttcactgtgttggccagg

SEQ ID NO: 216281 - DNA, 201 bp, Homo sapiens
cctttacctcctgagttcaagtgatcctcatgcctcagcctcccgagtagtgggactacagggttttgtcaccatgcccagctaattttttctatttttartagagacagggtttcactgtgttggccaggctggtctcaaactcttggcctcaagtgatccgccgacctcagcctcccaaagtgctgggattacaggtgt

SEQ ID NO: 216282 - DNA, 201 bp, Homo sapiens
ttcttttaatatatctcagtagttccaggccccatccttttatttatttttaggaagagcaggcatggacacagggttttgcctacaattgattatctcasactgggggtagggtgagtgattttatttttcaaggtgttcttgggacaaacatgattggcagtttagcaggtttaatgggcaggtccttttgttatttaa

SEQ ID NO: 216283 - DNA, 201 bp, Homo sapiens; identical to SEQ ID NO: 38690

SEQ ID NO: 216284 - DNA, 201 bp, Homo sapiens
gttttaaatatatatatatatatatatatatatataaatttttcattaattagctctgtaatacgtttagatttctttatatggtgtcaacatcattacasaaaaatttctttatgcggagtaagacagaggccttaatgttattttttccaaccatttgttgagctctttctccactaacttaaaatgtcacctttatta

SEQ ID NO: 216285 - DNA, 201 bp, Homo sapiens
ttccaaccatttgttgagctctttctccactaacttaaaatgtcacctttattacatattaaatactcattcatacacaatttctctctttcaaatgtgtktctggactcttttattctatcccactgatttatttgcccatgcctatgcccatacatttttaagaaaattattgtagctatgtctttatagctggtcaag

SEQ ID NO: 216286 - DNA, 201 bp, Homo sapiens
gtgtttctggactcttttattctatcccactgatttatttgcccatgcctatgcccatacatttttaagaaaattattgtagctatgtctttatagctggkcaagcaagtctcctggtgttactctcttttgtcatttaatttataaattaagttagagagaactgacattaagtcttcccattcaggaatacaatttgtc

SEQ ID NO: 216287 - DNA, 201 bp, Homo sapiens
taggagtgatgacattgttagaactaggagggaaactagaaactcattttggatttcttttgtattgtcttgttaaatgtgagttattgcacattgtctakagcaagagttgataaactatggcctttaggccaaattcagcctcccacctatttttgtaaataacagttttattgaaaaatatccacacccggctgggcg

SEQ ID NO: 216288 - DNA, 201 bp, Homo sapiens
ttttaatactagagaaggggaaacctgttcatttccaagacatagttgactgatgggtctacttcctacttcccacagcctctaaagagagcaatcactayacttatggctgggattttgcgcttagtagttcaatggcccccaggcagactacaggtaagtgtttcttttcaagaatttgtcttttctaccccttatgaa

SEQ ID NO: 216289 - DNA, 201 bp, Homo sapiens
aatgtcttaatacagtttcaattagaaaataaaatgtctcatacttgcacattgtatgtcaaaaaaaaacctagtctcttttagtaacgtcaaaaaaaaamaaaaaaacacaacaacctagtctctttcagtaacttctccccatctgaaattctttatcacctatccctatctgtgtatttcttctgacctctaggatcc

SEQ ID NO: 216290 - DNA, 201 bp, Homo sapiens
cccctcttggtaacacaccagagcctgcggataccgcgactccgaatctagttctactgcccgctttagcacagtggctgcagctgtgctctgcgggtcckgcctcagcccggacttcgccataattctggaagttctcctccgcctcaacccaggatgaagttgagcgggtctgctgcgcttccgggaagtggtcatgtg

SEQ ID NO: 216291 - DNA, 201 bp, Homo sapiens
tcttaccctcacccaggctggagtgcagtggcatgctcataggtcactacagccttgaactgggctcaagtgatcctgttgcctcaggttctggagtagcyggaactacagatgctcaacaccatgcccagctccctctgtttatgagttattttcttttaatatatctcagtagttccaggccccatccttttatttatt

SEQ ID NO: 216292 - DNA, 201 bp, Homo sapiens
agtagctggaactacagatgctcaacaccatgcccagctccctctgtttatgagttattttcttttaatatatctcagtagttccaggccccatccttttatttatttttaggaagagcaggcatggacacagggttttgcctacaattgattatctcagactgggggtagggtgagtgattttatttttcaaggtgttct

SEQ ID NO: 216293 - DNA, 201 bp, Homo sapiens
tgcgcttccgggaagtggtcatgtgatacccaggcgcctgcgctctctttctagggactttcctgagtgggagggatttcgccggaacaaaaatgcctcartttggaggtcgcgctcactgcgacggcaggctttgagtgtagcacttggtagttcttcctctgctctgcttcccttcggaggaaaatttcaggctgaagg

SEQ ID NO: 216294 - DNA, 201 bp, Homo sapiens
aatgtctgtcatgtaattgatgaaaactttgttgaattaatacctttgttgtgttttattcacactgtatatacaatacctggatgaagagagatattttkagcactattaaaatacatgcattggctcaatacatgaattggatcaattctggaaccctaacaagatcacatttttgaccaaagtcaatatcttggacta

SEQ ID NO: 216295 - DNA, 201 bp, Homo sapiens
tgggagggatttcgccggaacaaaaatgcctcagtttggaggtcgcgctcactgcgacggcaggctttgagtgtagcacttggtagttcttcctctgctcygcttcccttcggaggaaaatttcaggctgaaggtttagcgggtgccggtgagtggggaatgagtggcggagagtgcggcattcttcgcaaggtgtatccg

SEQ ID NO: 216296 - DNA, 201 bp, Homo sapiens
taactactttgccatcctgccacactctgcacatgcagacaagagtaagagccttaatcttgggaaaagatatttcacaagatctttgacaatttccatakccacagacaccatccagcttattagtgaccaccactcctatttgttactttctcctttaaggctgcccctacctgaactctggatcccagtaccatcact

SEQ ID NO: 216297 - DNA, 201 bp, Homo sapiens
ttatttatttttaggaagagcaggcatggacacagggttttgcctacaattgattatctcagactgggggtagggtgagtgattttatttttcaaggtgtkcttgggacaaacatgattggcagtttagcaggtttaatgggcaggtccttttgttatttaaaagcaatattaaataccaagtaaacacaactttgaagag

SEQ ID NO: 216298 - DNA, 201 bp, Homo sapiens
ttaggaagagcaggcatggacacagggttttgcctacaattgattatctcagactgggggtagggtgagtgattttatttttcaaggtgttcttgggacamacatgattggcagtttagcaggtttaatgggcaggtccttttgttatttaaaagcaatattaaataccaagtaaacacaactttgaagagattactcatg

SEQ ID NO: 216299 - DNA, 201 bp, Homo sapiens; identical to SEQ ID NO: 38685

SEQ ID NO: 216300 - DNA, 201 bp, Homo sapiens
ttccccagaactttctgaatgtttgcatatggggatgagagaggagtcaaaatggcatacacacacacacacacacacacacacacacacacacacacacwtatatatatagtcttatttttttgagacagagtctcattctgtcacctaggctggaatacagaggtatgatctcagctcactgcaactgctgcctagtgg

SEQ ID NO: 216301 - DNA, 201 bp, Homo sapiens
tttccttttactcaagttttgtatatttacatgaccaagtcttttgctcttaagagttctggggctttctgttatactcagttcattaagtggggttttaaatatatatatatatatatatatatatataaatttttcattaattagctctgtaatacgtttagatttctttatatggtgtcaacatcattacagaaaaat

SEQ ID NO: 216302 - DNA, 201 bp, Homo sapiens
ttccttttactcaagttttgtatatttacatgaccaagtcttttgctcttaagagttctggggctttctgttatactcagttcattaagtggggttttaaatatatatatatatatatatatatatataaatttttcattaattagctctgtaatacgtttagatttctttatatggtgtcaacatcattacagaaaaatt

SEQ ID NO: 216303 - DNA, 201 bp, Homo sapiens
tccttttactcaagttttgtatatttacatgaccaagtcttttgctcttaagagttctggggctttctgttatactcagttcattaagtggggttttaaatatatatatatatatatatatatatataaatttttcattaattagctctgtaatacgtttagatttctttatatggtgtcaacatcattacagaaaaattt

SEQ ID NO: 216304 - DNA, 201 bp, Homo sapiens
cttttactcaagttttgtatatttacatgaccaagtcttttgctcttaagagttctggggctttctgttatactcagttcattaagtggggttttaaatatatatatatatatatatatatatataaatttttcattaattagctctgtaatacgtttagatttctttatatggtgtcaacatcattacagaaaaatttct

SEQ ID NO: 216305 - DNA, 201 bp, Homo sapiens
gctaggactataggcacatgccaccatgcccggctaattttttttttttttttttttttttttttttttctgatacaggttgcccaagctccatctgtctytttaaaagcactctaatccatggtgtctttccctcctggacttaaaactcccacaggcaaaattaagatctaattcatcttcctaatagatgcttattat

SEQ ID NO: 216306 - DNA, 201 bp, Homo sapiens
gccatattttctttattcatctgctgatagacacttgggttgattccctatcttagctattatgaatagtgctgcagtaagcttgggagtacaaatatctyttcaacataatgatttcatttcctttggatatatacccagtagtgggatcaatggatcatatggtagttctctttttaattttttgaggaatctccatac

SEQ ID NO: 216307 - DNA, 201 bp, Homo sapiens
taagcttgggagtacaaatatctcttcaacataatgatttcatttcctttggatatatacccagtagtgggatcaatggatcatatggtagttctcttttyaattttttgaggaatctccatactgttttctataatggctatacacacctcttattttgattccagcaggagctccttaattggtctgcttaacttcagt

SEQ ID NO: 216308 - DNA, 201 bp, Homo sapiens
gtctcctggtgttactctcttttgtcatttaatttataaattaagttagagagaactgacattaagtcttcccattcaggaatacaatttgtctttctagwtaccctaattttcttttatgtccctccataaagcttatagttgttcatatagttcttaacacatttcttgatatatttaagctgtacctggtaggcttct

SEQ ID NO: 216309 - DNA, 201 bp, Homo sapiens
attttctgtctcagtgaagcaaataccatttccatctggtactccactgcacgctaattctatggtttctgaaaatgtgatacagtctacagcagtaacarccgtatcttctggtaccaaagaacagataaaaggaggaacaggagacgaaaagaaagcgaaagagaaaattgaaaagaaaggtatttttgacctttaagc

SEQ ID NO: 216310 - DNA, 201 bp, Homo sapiens
attgaaatcttggctcctccaaatgggtctgttcctggagacagaattacttttgatgctttcccaggtaggtatttattagtaattacttaatagtttcrgaatcagttctcaaagtgatgtttgtaatgcttaaaggttaaaatcagtcctgtgtaagaatcatgagtcttacattaatgaccattattaactattatt

SEQ ID NO: 216311 - DNA, 201 bp, Homo sapiens
caataagagactttgggcacacaaagacaaaggtacatccacaaaagtagaacatttgatacttagcatattaggtgtagcttaatgtagtctggatatgwttaggcttaatctgtgtacatctttacttaccagtttatatttcacacagatgcaaaatcggatggtgattttactttgtaacctgaaacctgcaaagat

SEQ ID NO: 216312 - DNA, 201 bp, Homo sapiens
gtggaagaagtagatgtcggagaaatagccccaaggacagttgtcagtggcctggtgaatcatgttcctcttgaacaggtaatctgtacaactgaaattcytgttgtgtacatacaacattttcattccctccttcttggtatctttccattataattttgtataccatacaacatgtgcccttgttaattagttcagtcg

SEQ ID NO: 216313 - DNA, 201 bp, Homo sapiens
aatcattgaatatcttaagcagcaagtttctctacttaaggagaaagcaagtaagaaaatttaaaattttttgaggagatacttaaaatgaattcatacaytgatggagaaaaaataatgtttaccgctttaagttatttaagttttacttagaagtttctgttatatgtagaaaaatatcaaacctgaatttctaccttc

SEQ ID NO: 216314 - DNA, 201 bp, Homo sapiens
attgaatagagagtttttttcccattgcttgttttgttgacttgctgaaaatcagatggttgtaggcatgcagctttatttctatgtcctttatcttgttscatttgtctgtgtgtctatttttgtaccagtacccttctgttttggttactgtagccttgtagtatagtttgaagttgggtagtgtgatgcctccagtta

SEQ ID NO: 216315 - DNA, 201 bp, Homo sapiens
ccttgcatcccagaaataaagcctacttgattgtggtatattgctttttgatgtgctgctgtatttgatttgccagtattttgttgatgacttttgtgttwgtgttcatcagagatattggcctaaagttttcttttttccttgtggtctctgacagtttttggtgtcaggctgatgctggcttcacaaggaaggagctcc

SEQ ID NO: 216316 - DNA, 201 bp, Homo sapiens
cttttttccttgtggtctctgacagtttttggtgtcaggctgatgctggcttcacaaggaaggagctcctcttgctcagttttttggaatagtctcagtakgattggtaccagttctttgtacatctggtagaattcagctgcgaatctatccgatccagggctttttttttttttttttgagacggggtctggttctgta

SEQ ID NO: 216317 - DNA, 201 bp, Homo sapiens
tggcaaacacaagttaaaatcatggctttgctatgtggtacttgaagggattcagataagtcatgtaattttcctggatctgtctataaaatggaaatcayatctgtcaagattgcaaaggttagggtatattataggtatttaatgacaaggtatgtaatgggtctagtctgcaaatcttaaccaggtaaaagatggcct

SEQ ID NO: 216318 - DNA, 201 bp, Homo sapiens
tctagtctgcaaatcttaaccaggtaaaagatggccttattgtgaggtaagagggtcatgggaggccaaggcatactcctttttaaattttatggactctktactggggaggaaagtttttgtgttaatgacgatggtatttagaaatgcatggactggcctctcatagctgtccaccctatagtcattccttatagccat

SEQ ID NO: 216319 - DNA, 201 bp, Homo sapiens
ttggcttctggcaccacactctcctggtggtcctccttcttcactggctgcccctgtcatttcctttgatgattcttccttacctccttagattcttactsttatagggcctcagaccttggatttggacctcttttttttccatgcttattcctttggcaattttacccagtcacttagataagctagatagctgccaaa

SEQ ID NO: 216320 - DNA, 201 bp, Homo sapiens; identical to SEQ ID NO: 38739

SEQ ID NO: 216321 - DNA, 201 bp, Homo sapiens; identical to SEQ ID NO: 38731

SEQ ID NO: 216322 - DNA, 201 bp, Homo sapiens; identical to SEQ ID NO: 38732

SEQ ID NO: 216323 - DNA, 201 bp, Homo sapiens
gaaggttaattttgtgctgcatcacagctttttatacttagggcttatgtctgcttgcagcaagaatttacccacacaatctatattctttataagaagcstgtatgtcagtctgcttcttaactaactcattatcagtttggcaacatccttttgggccaaggttgcaaaggttgcaaatctgagtcagtgcttaggtct

SEQ ID NO: 216324 - DNA, 201 bp, Homo sapiens
tgcctgattctcctgcctcagtctgccgagttcctgggattgcaggtgcgcgccgccactcctgactggtttttgtattttttggtggagacggggtttcrccgtgttggccgggctggtctccagctcctgaccgcgagtgatctgccagcctcggcgtcctgaggtgccgggattgcagacggagtctcgctcactcag

SEQ ID NO: 216325 - DNA, 201 bp, Homo sapiens
atttactctccagaaactttatcaatttttttctaattttaacataccactttgtttctttttttatagtgtttctcgagattttaaaattatttttcttaaaaattcttactctctttttattaaaaagatgaagagattggacatagtcattgctcatatgatataatatatgttgtaaaccaaattttgtcttctgta

SEQ ID NO: 216326 - DNA, 201 bp, Homo sapiens
atcataaatcagtgaagacagataatttgacttcttcttttcctatttggatgccttttctttctcttgcctgattgctctgtgtaggactcccagttctrtgttgaataggggtgatgaaagtgggcatccctgttttgttccagttttcaagggaaatggttccagcttttgcccattaggtattatgttggctatggg

SEQ ID NO: 216327 - DNA, 201 bp, Homo sapiens
caattatatttatagctgcaagtatttattaagcaccaagcacctaagtaaaggatacagcaacaaattaaaatacagagatagataaatttcttttttcttttttttttttttggagactcacccaggctggagtgcagtggggcagtctcggctcactgcaaccactgcctgcctcccggattcaagcaattctcctgc

SEQ ID NO: 216328 - DNA, 201 bp, Homo sapiens
aatttggagacatatttgtagaaatgactgaggatttgtgtgtgtgtgtgagcgaattattttgtaatggtgcaataaaattaaactaaggttttttgggkttttttttttccaacttgtattttaggctcaagggatacagatttcttatattggcaaattgtatgtccttgaagtttagtataggaatgatcccatcac

SEQ ID NO: 216329 - DNA, 201 bp, Homo sapiens
aatccatcttgagttaacttttgtatatggtgaaatgtaagggtcctatttcattcttctgcatatggctagccagttattccagcaccatttattgaatagagagtttttttcccattgcttgttttgttgacttgctgaaaatcagatggttgtaggcatgcagctttatttctatgtcctttatcttgttgcatttgt

SEQ ID NO: 216330 - DNA, 201 bp, Homo sapiens
tggccagtcacaccaacagtgaggaaagaagtaagaatctgtatctaggcaacttggacaacttcataacttctaaatgactcagatttatcaataaaatrggggcatggatagaacctacttcttagagtatgagaattacatgagttaatttgtataaagcattttgaaaagtgtttggggcatagtaagttcataata

SEQ ID NO: 216331 - DNA, 201 bp, Homo sapiens; identical to SEQ ID NO: 38734

SEQ ID NO: 216332 - DNA, 201 bp, Homo sapiens
tataaatttattcctttcacagtgtaatttatcacttttatttttcctataggattttctgccgtctcttggcaaaaatggcaaataatgatgctgttctsaagagactggagcagaagggtgcagaggcagatcaaatcattgaatatcttaagcagcaagtttctctacttaaggagaaagcaagtaagaaaatttaaa

SEQ ID NO: 216333 - DNA, 201 bp, Homo sapiens
attacagtagaaaatgtttttcctttcagactgctttttcatagtggcctatagtataaatttattcctttcacagtgtaatttatcacttttatttttcmtataggattttctgccgtctcttggcaaaaatggcaaataatgatgctgttctgaagagactggagcagaagggtgcagaggcagatcaaatcattgaat

SEQ ID NO: 216334 - DNA, 201 bp, Homo sapiens
tactccactgcacgctaattctatggtttctgaaaatgtgatacagtctacagcagtaacaaccgtatcttctggtaccaaagaacagataaaaggaggarcaggagacgaaaagaaagcgaaagagaaaattgaaaagaaaggtatttttgacctttaagcatatttagctcttgactggattatcagaaaatgtcaagt

SEQ ID NO: 216335 - DNA, 201 bp, Homo sapiens
caaactgatgagtgattgattagatagtattttgaataaaacaaggtacagtctactcttgatttatgtggtacttgattcatagaaaatttagggtatartaagcatgcttaaaaacactttgtgtttatatataaagaatagttaaaaatctagactcaaataattattaataggatttttacttatacaaatttatga

SEQ ID NO: 216336 - DNA, 201 bp, Homo sapiens
tcagaataaaatattcttatctgcttaaatagttactgtggataaccctaaaatcctaatatatcttcagagaaatctaagaaatggagaaattaattatrtacttactagtgtatataagtgaggaggaaaatatttaatgagtgaaattgcattctgctctagttcattctgtcatttgggtactggttgtggtgttct

SEQ ID NO: 216337 - DNA, 201 bp, Homo sapiens
ttgtaagggtcttattttaatagtaggaaattcttggtaagggaaatagttcatactgtgtcatcaggcaatagcagagaagtatgtacatgattgtgaawtcaggggcaagaaaataatctttaatgagggtgaattagaatagaacttccaaattatcaaggggaaatattgaattaatagcaatgttatcaaggtagc

SEQ ID NO: 216338 - DNA, 201 bp, Homo sapiens
aagagttcccatttgtggttcacaatttcatattttttgtcatatttattggtttaatatgaatgacattatttcattttctgtctcagtgaagcaaatascatttccatctggtactccactgcacgctaattctatggtttctgaaaatgtgatacagtctacagcagtaacaaccgtatcttctggtaccaaagaaca

SEQ ID NO: 216339 - DNA, 201 bp, Homo sapiens
tgctctagttcattctgtcatttgggtactggttgtggtgttctttctaaataaagtatttatcaccttccaaagagccatagtaaaagtttttagaggaktctctattatcctgtttcggggaaaggcaaactttttctgcctaaagcctttgtcacaactactcaactctgccctggtgcaaaagtatccatagatgat

SEQ ID NO: 216340 - DNA, 201 bp, Homo sapiens
aaagaagtaagaatctgtatctaggcaacttggacaacttcataacttctaaatgactcagatttatcaataaaatgggggcatggatagaacctacttcytagagtatgagaattacatgagttaatttgtataaagcattttgaaaagtgtttggggcatagtaagttcataataaatgttagctgttcttatttgcag

SEQ ID NO: 216341 - DNA, 201 bp, Homo sapiens; identical to SEQ ID NO: 38738

SEQ ID NO: 216342 - DNA, 201 bp, Homo sapiens
gtttatctttcatagtatttcataaaatacttacacatggaattttacatgaaaatcctgatgtcttgtttcttaaaaattcagaactaagccccaccccyacccttcccaaccccctgctattttcttaaggcagaaattggttaacacttagtaatggatagcccctttaggtggaagttagactctttaacacagttt

SEQ ID NO: 216343 - DNA, 201 bp, Homo sapiens
aattgaaatcttggctcctccaaatgggtctgttcctggagacagaattacttttgatgctttcccaggtaggtatttattagtaattacttaatagtttyggaatcagttctcaaagtgatgtttgtaatgcttaaaggttaaaatcagtcctgtgtaagaatcatgagtcttacattaatgaccattattaactattat

SEQ ID NO: 216344 - DNA, 201 bp, Homo sapiens
cctacgcatgctctcttgtctgctactatataagacatgcctttgctcctcctttgtcttctgccatgatcgtgaggcctctgcagccatgtggaactgtkggtcaattaaacctctttcttttataaattacccagcctcgagtatatctttattagcagcgtgagaatagactaatacagtaaattgatactgggtagt

SEQ ID NO: 216345 - DNA, 201 bp, Homo sapiens
agattgtctcatgctgcagcacagaaagacagagatgaaaagtttagatttataattataaattccatctaataatatacttgcatatgtttttactcaamttcaggatatagagaaaatatctaagttaaaatgtaatgattttaataatctaaaaggaagtttcattttgtattgcctgttttctctaataaaaatact

SEQ ID NO: 216346 - DNA, 201 bp, Homo sapiens
tattatagatgacagggttaattttatttaattaggctttggaggacacttgaaaaatgaattccagtgtgagtttcagagtggcaaacacaagttaaaaycatggctttgctatgtggtacttgaagggattcagataagtcatgtaattttcctggatctgtctataaaatggaaatcatatctgtcaagattgcaaag

SEQ ID NO: 216347 - DNA, 201 bp, Homo sapiens
ggcatcgtatgattaatggctttttaggtttgatgaagtatgataattaacattgagaaggacaaaattaatgtgaagggacagaatgatttagataatawgtttcaaaagcttttgtcctaaaaaatgcattattaccattttaatttagtaaaggaaaaagaaaaggtcttgatcctcaccaaacacaattaacatact

SEQ ID NO: 216348 - DNA, 201 bp, Homo sapiens
atccatcttgagttaacttttgtatatggtgaaatgtaagggtcctatttcattcttctgcatatggctagccagttattccagcaccatttattgaatagagagtttttttcccattgcttgttttgttgacttgctgaaaatcagatggttgtaggcatgcagctttatttctatgtcctttatcttgttgcatttgtc

SEQ ID NO: 216349 - DNA, 201 bp, Homo sapiens
tccatcttgagttaacttttgtatatggtgaaatgtaagggtcctatttcattcttctgcatatggctagccagttattccagcaccatttattgaatagagagtttttttcccattgcttgttttgttgacttgctgaaaatcagatggttgtaggcatgcagctttatttctatgtcctttatcttgttgcatttgtct

SEQ ID NO: 216350 - DNA, 201 bp, Homo sapiens
acagaaatataaaaggaatgaaatcagcaactctttactttggaacacagatgtaatactcattagcatagttacggttattgttattcttatctcttagygtacctgaagctttctttgaaagctttcaaccttaaatgtggctaaatagcctgttttctgcatttaagaacaaactatatttcctcttctaagtagatt

SEQ ID NO: 216351 - DNA, 201 bp, Homo sapiens
ccatcttgagttaacttttgtatatggtgaaatgtaagggtcctatttcattcttctgcatatggctagccagttattccagcaccatttattgaatagagagtttttttcccattgcttgttttgttgacttgctgaaaatcagatggttgtaggcatgcagctttatttctatgtcctttatcttgttgcatttgtctg

SEQ ID NO: 216352 - DNA, 201 bp, Homo sapiens
actgtcttccaatcctctaaaatactcaaagcactttcaaattaagctttagtagagatttttggtgtctggatgagaacagcatacagattaggcatctrgagggacatgagaaaatattgcaaataatagactctcataggaaaggtggcagggtacaaaagatgaacttgctggacatcgcttattttacttaaagta

SEQ ID NO: 216353 - DNA, 201 bp, Homo sapiens
gatccttgcatcacgtgacggggccgcatgggccgccgggatgtgtagtccgcaggagtccggcatgaccgccttgagcgcgaggatgctgacccggagcyggagcctgggacccggggctgggccgcgggggtgtagggaggagcccgggcctctccggagaagagaggctgcagcaggtagcgccgcgccgtggctgga

SEQ ID NO: 216354 - DNA, 201 bp, Homo sapiens
ggagggaggtgctggggggagaaagggggagggtggggagggaggctctgcggggacaggaggggaatggtagggagggaggcgctgggggaatgggggargagggtggggagggaggcgctgggaggatggggggagggtggagagggaggtgctgcggggagaagaggggagggttgagagggagaagaggggagggtg

SEQ ID NO: 216355 - DNA, 201 bp, Homo sapiens
gcagagcaccccaagtgtattagatgatggacagttgtggcatgaacgagtgaggggtgagctagcaggcgggatggcacccctaccctaccttcacctgyggccccaccagagggactgcgtggtgctttttgcagaagcgaggaaaagccacagccccgtgaagcgtccgcggaaagcacagagactgcgtgtggccta

SEQ ID NO: 216356 - DNA, 201 bp, Homo sapiens
tgagcactgctatgactccagtgcccccccaaaggtaggcaggggccccatctgcccagatgaccccccatcttagcaaggtccttgttttctttctaccyggtggcttttggctggcaccctcccctgcagacagcaccttgggaggatggacacccggtgccccagagcatcgcctgcatcactgtagccactcagcag

SEQ ID NO: 216357 - DNA, 201 bp, Homo sapiens
ggaggtggggcttgcagtgagctgagatcgcgccagtgtactccagcctgggcgacaaagcgtgactccgtctcaccaaaaaaaaaaaaattagccgggcrtggtggcaggagcctgtaattccagctcctcgggaggctgaggcaggagaatcgcttgaaacccagaggcgaaagttgcagtgagtggagatcgcaccat

SEQ ID NO: 216358 - DNA, 201 bp, Homo sapiens
tagatgatggacagttgtggcatgaacgagtgaggggtgagctagcaggcgggatggcacccctaccctaccttcacctgtggccccaccagagggactgygtggtgctttttgcagaagcgaggaaaagccacagccccgtgaagcgtccgcggaaagcacagagactgcgtgtggcctatgagggctcggacagtgaga

SEQ ID NO: 216359 - DNA, 201 bp, Homo sapiens
ggacagggcctctgcgctagtcccgctgggacttctgcagaattggccagagttggattcccataggcacccagggaccccaggggtagtccagactatgkcaggaggaactggtgcagctgggagcaggcaggtggtgatgccagccagggtggcaggagctttgatgccaggatagagtttggagtttattatgacagt

SEQ ID NO: 216360 - DNA, 201 bp, Homo sapiens
ggaggagtggctgcctaggtatgagtatgtggggggcttcctagggagaagagctcaccccgcccgccctctgtcagcactgacccagcccccacccccayagggagctgtggcacgagatcaatggactcttggtgggcttcggccagcagacctgtctgcctgtgcaccctcgctgccacgcctgcctcaaccaagccc

SEQ ID NO: 216361 - DNA, 201 bp, Homo sapiens
ttgaggacctgctgggggccaagcactgcagtgagcagtgagggacacggacagggcctctgcgctagtcccgctgggacttctgcagaattggccagagytggattcccataggcacccagggaccccaggggtagtccagactatggcaggaggaactggtgcagctgggagcaggcaggtggtgatgccagccagggt

SEQ ID NO: 216362 - DNA, 201 bp, Homo sapiens
ggccggtacctcaatgagccggtcctgggcgcggaggccagagcgggcggcaggtgagcccgggtccacagagcggatgtactggccgggccgggacttgwcactatgcaggttgaacccatagccctgaggtccctttcgcaggtggcagagccgagggcgcagctccctcaggggcccactgacatcctgcaggcccaa

SEQ ID NO: 216363 - DNA, 201 bp, Homo sapiens
gtccacacacacctgcaaacacgcacagcagcccacacatgcggccagccccacagtgctggcccggcagcccttcccacgcctgcacagcggcctgcggrgcagggtttctcagggcaccagacaggaagcaggatctggtgggtgtctggggccctgaggccaggccaaggacccctcagtgttctcagggtcattctg

SEQ ID NO: 216364 - DNA, 201 bp, Homo sapiens
gtggcagtggcctgagagagacctcagaaggctgaggggggtggcgacggtgcaggaagtgagggtcaagcatctcaggctcggggggtccccctgaagcyccccccaggccgtggggccctgaggcctgacgcccagtcccagcagctccttggccttcctgttcgcatcctcccttccttcctctgcttccccgcctcg

SEQ ID NO: 216365 - DNA, 201 bp, Homo sapiens
cctcctggggggcgggggctgagcttgcacacgtcctcagcaggtgcaggtagctctggccacctgtgggtctcctgggggctgcatcctcccaggttggsctgtgcccttgcctccaaggctgaacccacccctgtctttcagagcaaggtgaaatacatcaagcagaccagcgccatcctgcagcagcactacggtggg

SEQ ID NO: 216366 - DNA, 201 bp, Homo sapiens
cccgcttggcctcccagcagcagtggacacgcatgtgcacagaatcgccaacaggctgaggtggaccaagaaggcaaccaagtccccagaggagacccgcrccgccctggaggagtggctgcctaggtatgagtatgtggggggcttcctagggagaagagctcaccccgcccgccctctgtcagcactgacccagccccc

SEQ ID NO: 216367 - DNA, 201 bp, Homo sapiens
ccgttgaggacctgctgggggccaagcactgcagtgagcagtgagggacacggacagggcctctgcgctagtcccgctgggacttctgcagaattggccaragttggattcccataggcacccagggaccccaggggtagtccagactatggcaggaggaactggtgcagctgggagcaggcaggtggtgatgccagccag

SEQ ID NO: 216368 - DNA, 201 bp, Homo sapiens
gggacacggacagggcctctgcgctagtcccgctgggacttctgcagaattggccagagttggattcccataggcacccagggaccccaggggtagtccaractatggcaggaggaactggtgcagctgggagcaggcaggtggtgatgccagccagggtggcaggagctttgatgccaggatagagtttggagtttatta

SEQ ID NO: 216369 - DNA, 201 bp, Homo sapiens
catgaggaacaaaaaggatgcacctgtggaccatctggggactgagcactgctatgactccagtgcccccccaaaggtaggcaggggccccatctgcccaratgaccccccatcttagcaaggtccttgttttctttctacccggtggcttttggctggcaccctcccctgcagacagcaccttgggaggatggacacccg

SEQ ID NO: 216370 - DNA, 201 bp, Homo sapiens; identical to SEQ ID NO: 38759

SEQ ID NO: 216371 - DNA, 201 bp, Homo sapiens
ctggaatgagatgagggcagagtggggaggtaaggactgaggagggaggaggaagagtatcccctcagcaggtggggtggggagggaggtgctggggggakaaagggggagggtggggagggaggctctgcggggacaggaggggaatggtagggagggaggcgctgggggaatgggggaggagggtggggagggaggcgc

SEQ ID NO: 216372 - DNA, 201 bp, Homo sapiens
gtggggagggaggcgctgggaggatggggggagggtggagagggaggtgctgcggggagaagaggggagggttgagagggagaagaggggagggtggggakggaggcactggggggagggccctccttgaatccttttcccaggtcctggtgtctcttcctagcaccggaggcttcttggcagttgggtgcagacagaccc

SEQ ID NO: 216373 - DNA, 201 bp, Homo sapiens
ctggtgcccagagccagtgcttatgccgagaggagcctcaggccacaggagacagacagagggaagcctggatggacccttccggggacagggccacgttyctggggaggctgagggctgagaggtgcttcggagtcgggatcctgccgggcctcggtttcagcatccgtaggacctcatgaggactcactgagctggcca

SEQ ID NO: 216374 - DNA, 201 bp, Homo sapiens
gggtttcaccacgttgatcaggctggtctcaaactcctgacttcaggtgatccgcctgccttggcctcccgaagtgctgggatgacgggtgcgagccaccrcgcccggccacatacgattctaagcactgagataattcatttaagcttcacattactccagtgagtcaggtactattattgtcctggtgttgtagatgac

SEQ ID NO: 216375 - DNA, 201 bp, Homo sapiens
tatgccgagaggagcctcaggccacaggagacagacagagggaagcctggatggacccttccggggacagggccacgttcctggggaggctgagggctgaraggtgcttcggagtcgggatcctgccgggcctcggtttcagcatccgtaggacctcatgaggactcactgagctggccaatctctctggcagggtctggc

SEQ ID NO: 216376 - DNA, 201 bp, Homo sapiens
gggatgtgtagtccgcaggagtccggcatgaccgccttgagcgcgaggatgctgacccggagccggagcctgggacccggggctgggccgcgggggtgtarggaggagcccgggcctctccggagaagagaggctgcagcaggtagcgccgcgccgtggctggagcgtgggaggaggcgggataggggctgcaggctggag

SEQ ID NO: 216377 - DNA, 201 bp, Homo sapiens
caagtgtggcccagggcaacaaaccagggtgtgtcgagggcggggggcggagcctggccagggaatcacccaggacccgccgccaccccggtccctgtcastgcacaagcaggtacgcaggtaccaggtgctgctgtcactgatgctctccagccaaaccaaagaccaggtgacggcgggcgccatgcagcgactgcgggc

SEQ ID NO: 216378 - DNA, 201 bp, Homo sapiens
accccacagggggaggctgatgcctcaagtgtggcccagggcaacaaaccagggtgtgtcgagggcggggggcggagcctggccagggaatcacccaggayccgccgccaccccggtccctgtcactgcacaagcaggtacgcaggtaccaggtgctgctgtcactgatgctctccagccaaaccaaagaccaggtgacgg

SEQ ID NO: 216379 - DNA, 201 bp, Homo sapiens
aggagcttagtgtggacagggcacagagggcctcctggtgcccggaaggaccccccgctaccatcccaggccctgccccatgttacctctggcatcctgcrgtagggctctgggccaggggaccatgcaggcaaggccaggcccaatgaccacctcccagccagggggtgggccagggtgcggcggcggtggccagcggct

SEQ ID NO: 216380 - DNA, 201 bp, Homo sapiens
cacgggggtggtggcagactcgcctctgggcggggaggggcacgggctaggctggtggagtgtgcccctgttcaccccgcttggcctcccagcagcagtgkacacgcatgtgcacagaatcgccaacaggctgaggtggaccaagaaggcaaccaagtccccagaggagacccgcgccgccctggaggagtggctgcctag

SEQ ID NO: 216381 - DNA, 201 bp, Homo sapiens
gccgccttcccgggttgctgggagaattcctttggctcgaggccagcgtggcgcacaggcagggtgggaggaagcaccaggtgggatgaactgtcgccgtyggcctcctggggcggttgtccctgagggctctgcctgtgcgtccccctgccccgggctctcctccagagcgtggggcaggcgctcctaggccagcagttt

SEQ ID NO: 216382 - DNA, 201 bp, Homo sapiens
aaagaccaggtgacggcgggcgccatgcagcgactgcgggcgcggggcctgacggtggacagcatcctgcagacagatgatgccacgctgggcaagctcayctaccccgtcggtttctggagggtgagccctgcctgtggcaacgggggccgggtggcagtggcctgagagagacctcagaaggctgaggggggtggcgac

SEQ ID NO: 216383 - DNA, 201 bp, Homo sapiens
cagcagcagtggacacgcatgtgcacagaatcgccaacaggctgaggtggaccaagaaggcaaccaagtccccagaggagacccgcgccgccctggaggartggctgcctaggtatgagtatgtggggggcttcctagggagaagagctcaccccgcccgccctctgtcagcactgacccagcccccacccccacagggag

SEQ ID NO: 216384 - DNA, 201 bp, Homo sapiens
aaaaaaaaattagccgggcgtggtggcaggagcctgtaattccagctcctcgggaggctgaggcaggagaatcgcttgaaacccagaggcgaaagttgcastgagtggagatcgcaccattgtctgtatccagcctgggtgacagagcaagactccgtttaaaaaaaaaaaaaaatgccacagccatagattgctggctcc

SEQ ID NO: 216385 - DNA, 201 bp, Homo sapiens
gacaggtgcggggcactcggcaccccgcagccctggtgggccggtacctcaatgagccggtcctgggcgcggaggccagagcgggcggcaggtgagcccgsgtccacagagcggatgtactggccgggccgggacttgtcactatgcaggttgaacccatagccctgaggtccctttcgcaggtggcagagccgagggcgc

SEQ ID NO: 216386 - DNA, 201 bp, Homo sapiens
gctaggtctgcaggcagtgacctcatgccggcctgccaggcagagctgttgccacccagcctggtgcccagagccagtgcttatgccgagaggagcctcakgccacaggagacagacagagggaagcctggatggacccttccggggacagggccacgttcctggggaggctgagggctgagaggtgcttcggagtcggga

SEQ ID NO: 216387 - DNA, 201 bp, Homo sapiens
gcgaaagttgcagtgagtggagatcgcaccattgtctgtatccagcctgggtgacagagcaagactccgtttaaaaaaaaaaaaaaatgccacagccatarattgctggctccggtcccagctctgcacctcctggctgggtgactctgggccaggcccttggcttctctaagctctggccacaaagtgggtgaggcagtc

SEQ ID NO: 216388 - DNA, 201 bp, Homo sapiens
tcaggccacaggagacagacagagggaagcctggatggacccttccggggacagggccacgttcctggggaggctgagggctgagaggtgcttcggagtcrggatcctgccgggcctcggtttcagcatccgtaggacctcatgaggactcactgagctggccaatctctctggcagggtctggcccccagcaagcgtttg

SEQ ID NO: 216389 - DNA, 201 bp, Homo sapiens
atggacccttccggggacagggccacgttcctggggaggctgagggctgagaggtgcttcggagtcgggatcctgccgggcctcggtttcagcatccgtargacctcatgaggactcactgagctggccaatctctctggcagggtctggcccccagcaagcgtttgtccaagcgagctgtcgctgttattgtggggaata

SEQ ID NO: 216390 - DNA, 201 bp, Homo sapiens
gctgtgtccctgaccgctgcagtggcaggtgctaggtctgcaggcagtgacctcatgccggcctgccaggcagagctgttgccacccagcctggtgcccakagccagtgcttatgccgagaggagcctcaggccacaggagacagacagagggaagcctggatggacccttccggggacagggccacgttcctggggaggc

SEQ ID NO: 216391 - DNA, 201 bp, Homo sapiens
ccttccggggacagggccacgttcctggggaggctgagggctgagaggtgcttcggagtcgggatcctgccgggcctcggtttcagcatccgtaggacctyatgaggactcactgagctggccaatctctctggcagggtctggcccccagcaagcgtttgtccaagcgagctgtcgctgttattgtggggaatagagctc

SEQ ID NO: 216392 - DNA, 201 bp, Homo sapiens
cctggggaggctgctccccaaccccgccgagcactggatggtggtgggcggatctgttgaaagcagcttggtgggtggggccgcttccccttggcacccgygtgggccgcagtttctcagatgggttttaaatagccctctccactcaggcacaggatgggaaccacccggcaggcctggcagctggtggggaagccccag

SEQ ID NO: 216393 - DNA, 201 bp, Homo sapiens
gggagtgggcagcccagaacagagccccccaggctggctcaggtgatgggagagaggcctgcaccccaacagagggctcagcccctgccccagcacctcakgggcagccaagatggtcacatgtaggcttgcagccagggctttgcggttccaatgtctaactggagggccacgggggtggtggcagactcgcctctgggc

SEQ ID NO: 216394 - DNA, 201 bp, Homo sapiens
gtgcctctgcagtggtggccggaggggcgccatgcctggggggctctcccacatcagaggcaggcctccagacttgtccttggaaatgccaagatgtaaamataaacccagcacttcatcctgagttctcttccctccgctcaatagggtggcatgaaatggatgcagagaacccattacatcagcccagcccatccttaa

SEQ ID NO: 216395 - DNA, 201 bp, Homo sapiens; identical to SEQ ID NO: 38766

SEQ ID NO: 216396 - DNA, 201 bp, Homo sapiens
tcttctttgccaacaaagtgaagtagtgtaacgtaagcttcttttaatcattggcttaagaaagtgtcttccaagatagaattttggagttggaaagacaycagaaatcctgaggtccaatagcctcattagcagaaagcttaagggatgtgcccaaagtcactagatattttgtcacatagcctagactagaactaggtt

SEQ ID NO: 216397 - DNA, 201 bp, Homo sapiens
cttctttgccaacaaagtgaagtagtgtaacgtaagcttcttttaatcattggcttaagaaagtgtcttccaagatagaattttggagttggaaagacatyagaaatcctgaggtccaatagcctcattagcagaaagcttaagggatgtgcccaaagtcactagatattttgtcacatagcctagactagaactaggttt

SEQ ID NO: 216398 - DNA, 201 bp, Homo sapiens
ttcttttaatcattggcttaagaaagtgtcttccaagatagaattttggagttggaaagacatcagaaatcctgaggtccaatagcctcattagcagaaascttaagggatgtgcccaaagtcactagatattttgtcacatagcctagactagaactaggttttgataaaattaagtacaaaatagcccatttgaaaatc

SEQ ID NO: 216399 - DNA, 201 bp, Homo sapiens
tcttttaatcattggcttaagaaagtgtcttccaagatagaattttggagttggaaagacatcagaaatcctgaggtccaatagcctcattagcagaaagsttaagggatgtgcccaaagtcactagatattttgtcacatagcctagactagaactaggttttgataaaattaagtacaaaatagcccatttgaaaatct

SEQ ID NO: 216400 - DNA, 201 bp, Homo sapiens; identical to SEQ ID NO: 38776

SEQ ID NO: 216401 - DNA, 201 bp, Homo sapiens
aagttagtctacctgctggtcgtctacatcagggtgctgtgctgccatccttctgcccatggtagactcaaactcacctgccaagatctaattcattattwcccctccagctttttccagagagcttgcccctcctgttgctgcagttgttcttccagccacatgtactctgaagatgggatcacaatcagtgtctccata

SEQ ID NO: 216402 - DNA, 201 bp, Homo sapiens
ttatttcccctccagctttttccagagagcttgcccctcctgttgctgcagttgttcttccagccacatgtactctgaagatgggatcacaatcagtgtckccataccagaaaaggctctgtaactttttggtcatgggagagctctttcctctgccctctcctttgcagttcctagaccaggtgtgttaacctgaattgt

SEQ ID NO: 216403 - DNA, 201 bp, Homo sapiens
atgagttctcaatggattgatttaaattgtggtcactcaaactgccaggaagagtcctcctcatttgttgtaaaaataacagatgtctatgaaaggagaaraagaaggcctttctttttttgcagttcatttctccactgccttctccatcccagaaagttggcggtaacttgggtgttactgaattactcaggagaatga

SEQ ID NO: 216404 - DNA, 201 bp, Homo sapiens
gtagctaggactatagatgtgagccaccacacccagctaattaaaaaaaaaatttttttttagagacagagttgtactgtgttgcccaggctgctctcaarctcctggcctcaagtgatcctcccaccttggccactcaaagtgctgggattacaagcataagccaccgagtcctgctatcattgtggttttgatatgcat

SEQ ID NO: 216405 - DNA, 201 bp, Homo sapiens
ttaaaatttttttgaaccatgttggtgttcttgttttcattttaattcccattcaattgaaaaataaagcttttcacttcagggaaaatatcttaattcaygtttattatcatatgtttctgattgaggatttatgtgttcatttagaattttgttgcttttaggtgtctttctttcattattttttgatcactgagtttc

SEQ ID NO: 216406 - DNA, 201 bp, Homo sapiens
gcttggtgccgtcccctacagatgccagtagggcagcccttgtgcccttgcctgtacctcacagaggtcaggagggctgctggagcaggtggcaggccccrcttgctgtaaatgaaagccttccccagaaggatgagtctgttctgaagccaaggggccactggcctctagagcatctgtgtggcagagggtggagtcatg

SEQ ID NO: 216407 - DNA, 201 bp, Homo sapiens
atgcttgttctttggtgctgtaaagaaatagcacttgaaataaatttaatttcctcagcaagaccatttttactttctgcagaaagggtacactcgccagsatttttgccacaagagtacaccgaacaaaggagacagggtcatttataacctgacacgtccatcttactgctgtgtccggtttctattggctgggacggg

SEQ ID NO: 216408 - DNA, 201 bp, Homo sapiens
cacacacgtacacacatatacttgtattttaagccgtgattttgtacattctacagtacactgttgtcttttttttttttttttgagacggtgtcttgctytgtcacccaggctggagtgcagtggcatgatctcggctcactgcaacctccacctcccaggttcaagcaattcttctgcctgggcctcccaagtagctgg

SEQ ID NO: 216409 - DNA, 201 bp, Homo sapiens
ataaacccagcacttcatcctgagttctcttccctccgctcaatagggtggcatgaaatggatgcagagaacccattacatcagcccagcccatccttaartaagctggtagcagagaacaagttcggcaagaagactggagaaggattttacaaatacaagtgatgtgcagcttctccggctctgagaagaacacctgag

SEQ ID NO: 216410 - DNA, 201 bp, Homo sapiens
aatactccttacttgtaaaacccaaaaaactgggggaaagaatacatacaataactatacatacaaaagcagaaagcttagttttctttttaagaaagttwatttataaatcaaaaatatgctgtagcattaaattatactttaataaatgattccagagttggaaaatcccaatgtatttgaaagtagctgaagtttcag

SEQ ID NO: 216411 - DNA, 201 bp, Homo sapiens
cattaaaacaccaatgaccagccagaagacatttgaatctttggtagactttagcaaagccctaggaaagcatcctgtttcttgcaaggtaagagtatggrtagcttgggaaggaggtagttcttttcttcttggaccctgacttgttcctggtagaattcttctcatagaatgatgtgaaagaaggagtattgtatactg

SEQ ID NO: 216412 - DNA, 201 bp, Homo sapiens
tttcagggacctctgaaaggagggagaacactttttagttaccccccattttattgttaaactttagtaaagccataaaagtacaatcacaaactagtatygaggttatgttactgattttcattagcttaattttcttgaactttctgacgtggttttaatgttagtcaaggtgcagttctgcttataattttaatagtt

SEQ ID NO: 216413 - DNA, 201 bp, Homo sapiens
acttctgacttggttttgattgctaatttatcttcactggatacttaggccaataaagaagcttataggattaaatgagccttgagtgggggacaggttgtttttttgctttataaagaggaaaacaagaaaggaagaaagctggtagctgtgtgcatttctccagtattgaatcctttctaggctttgcttcatacattg

SEQ ID NO: 216414 - DNA, 201 bp, Homo sapiens
tttctcttagattgtcttcactgtcggaagagttttgatatagggagttccagcaattctaaagatgttaagacttatttatgtgggttgttgagaaagahagtgtaccatttactggtttttgtagagctaaaaccactctacaaaatatgacactttattctgttcaaagaattttgatttatttaatttcatgtgacc

SEQ ID NO: 216415 - DNA, 201 bp, Homo sapiens
gtggaatgtttctgctgatgggctggtttcctgcttgcctctgtccttgtatcaagataattcattgcacgttgccccggttgcccagtcctggttgtcaractttttggtcctgggagcgttttcatgccttggttcccagacggtgctgatgcagcctgcaggtccacaggctcagacatgagcccactgtgtgctgct

SEQ ID NO: 216416 - DNA, 201 bp, Homo sapiens
ccttttagaaatactttttgaaatgtaaaattcgaagtctaataaaggagtctgtccaattaatttaactgtttgaagaaaaaaaccagtccaggcatggkggcttacgcctgtaatcccatcactttgggaggctgaggcgagcagatcacttgaagtcaggagttcgagactagcctggccaacaaagttaaaccctgt

SEQ ID NO: 216417 - DNA, 201 bp, Homo sapiens
gttgggccttctttcccagtatcccagctccgtcctcactcttcctattgctcttgttcgttcacactgtgactgaggcctgatgcatgccccagtcactstcactcctgtgagtcagagggacagaggctggataggctgtgtctgacagtggactgctgcccttgccaggcacccactcctaatggccagtgtgggcag

SEQ ID NO: 216418 - DNA, 201 bp, Homo sapiens
aggatcacttgaggttgggagtttgagcccagactggccaaatggtgaaaccctatctctactaaaaatataaatattagccttgtgtgggggcgcacacstgtagtctcagccactagggaggctgaggcaggagaatcacttgaacccaggaggcggaggttgcagcgagccaagatcgtgccattgcacttcagcttg

SEQ ID NO: 216419 - DNA, 201 bp, Homo sapiens
gagctggcattgcaggcgtgcaccaccatgcctggctaatttttgtatttttagtagagacagggtttcaccatgttggtcaggctggtctctaactcccracctcatgatctgcccgccttagcctcccaaagtcctgggattacaagtgtgagccaccgtgcccggctgatttttaggcttagttaataggtgaagttg

SEQ ID NO: 216420 - DNA, 201 bp, Homo sapiens; identical to SEQ ID NO: 38769

SEQ ID NO: 216421 - DNA, 201 bp, Homo sapiens
cagttgtttctaatctgtgccagatcagagcacagatcttagagcagtggttctgaaaccttggtgagcatcagagtcacttggaaggcttgctaaaccayagctcactgagccctacccagagtttgattcattgggtctggagtggagtctgagaatttgtatttctaacaagtccccaggtgattgttgctgctggtc

SEQ ID NO: 216422 - DNA, 201 bp, Homo sapiens
ttcctgctcggctcaaacgggagtttgctgccaaagacatgaactgcgatcagttttaattctatcagttatttttgatttttattctgtaattgtgcagyctttgtcaaagtagttttctctcctaaacggcctcccggctctccccggtctttccttcgcttgctaggttgtaaagaatagtagtagtcatgacttttg

SEQ ID NO: 216423 - DNA, 201 bp, Homo sapiens
ttgttgggtgggatttgaggttgagaagaaagcttgtacatacaggtggtgaactcattctagaagaacatgagaatttggaattgaagaacacttgtttygctaaaaggatggaagaagaagaaacaggaagataatttttatactacaagttaagaagagaatgatataataaatatggtatttatagaaactaagagt

SEQ ID NO: 216424 - DNA, 201 bp, Homo sapiens
gggagtttgctgccaaagacatgaactgcgatcagttttaattctatcagttatttttgatttttattctgtaattgtgcagtctttgtcaaagtagtttyctctcctaaacggcctcccggctctccccggtctttccttcgcttgctaggttgtaaagaatagtagtagtcatgacttttgtagcactttgtaaagtca

SEQ ID NO: 216425 - DNA, 201 bp, Homo sapiens
gctctgctacccaggctggagagcagtggcatgatcatagttcactatagccttgaactcctaggctcaagccattctctcacctcagcctcccgagtagytaggactatagatgtgagccaccacacccagctaattaaaaaaaaaatttttttttagagacagagttgtactgtgttgcccaggctgctctcaagctcc

SEQ ID NO: 216426 - DNA, 201 bp, Homo sapiens
tttttgtatttttagtagagacagggtttcaccatgttggtcaggctggtctctaactcccgacctcatgatctgcccgccttagcctcccaaagtcctgkgattacaagtgtgagccaccgtgcccggctgatttttaggcttagttaataggtgaagttggggagaaggtgaggccaagagaagggctggagttgagag

SEQ ID NO: 216427 - DNA, 201 bp, Homo sapiens
tagatgatggtggagataattttaccttctctaggatgaaattcaaataataaatatcacaggcagattaatgttagaaatgcttgttctttggtgctgtraagaaatagcacttgaaataaatttaatttcctcagcaagaccatttttactttctgcagaaagggtacactcgccaggatttttgccacaagagtacac

SEQ ID NO: 216428 - DNA, 201 bp, Homo sapiens
gatttcatgaatctccttcatggttcccgaaaggttggtaaagattccttctctgacctttgttgtacatattggtcttcaatatgcattcttatggaaaraggtgttcatggctaaaacatttgagagccaccacactgaatgatctctgggttgtcttcctcctctcaaaattgatgatcctgattatctgtagctaat

SEQ ID NO: 216429 - DNA, 201 bp, Homo sapiens
attgtttctggcttgagattcctacttctatgctgaaactcaaactatttttgttgcctatatggagccttttgatcaatcattccttgaaccattctacygaagttgcttgctgacactctggtcataattctctgctttgcatttccaggtcattaaaacaccaatgaccagccagaagacatttgaatctttggtaga

SEQ ID NO: 216430 - DNA, 201 bp, Homo sapiens
cattgatggacacttaggttgatttcgtgtctttgctattgtgaatagtgctgcaataaacatatgagtgcaggtatctttttgatagaatgagttttttwcctttgaatatatacccaatagtggggctgctggatcgcatggtagttctgtttttagttttttgagaaatctccatactgttttccttaaaggttgtac

SEQ ID NO: 216431 - DNA, 201 bp, Homo sapiens
ggagagatggtgtccatgttagattatgaagggtaagttgaagtccatgaagcagcaatgagggagccggacatgtatggcagaggaaaccacatgaacargggcacagagccatgagatagcacagaggagggagacgtgtggtgtggctggggaagactacagaatcgggttactaccgtccaaagcatttgttattta

SEQ ID NO: 216432 - DNA, 201 bp, Homo sapiens
gtaaagattccttctctgacctttgttgtacatattggtcttcaatatgcattcttatggaaaaaggtgttcatggctaaaacatttgagagccaccacastgaatgatctctgggttgtcttcctcctctcaaaattgatgatcctgattatctgtagctaataagcctgaacaataaatgctttcgccaatctcttaaa

SEQ ID NO: 216433 - DNA, 201 bp, Homo sapiens
ctgcctcagcctccctagtagctgggattacaggcatgcgctaccatgcccagctaatttttgtatttttagtagagacggggcatgttggccaggctcgyctcgaactcctgacttcaagtgatccacctgcctcggcctcctaaagtgctggtattacaagtgtgagccaccgtgcccagcccagagtacattttgttt

SEQ ID NO: 216434 - DNA, 201 bp, Homo sapiens
taagagtatgggtagcttgggaaggaggtagttcttttcttcttggaccctgacttgttcctggtagaattcttctcatagaatgatgtgaaagaaggagyattgtatactgcaagcttgtccacgtgctgtaaagagcaatccgtgcctcctgttctagtttgtagacagggaaactggactcctaagccatgcctaagg

SEQ ID NO: 216435 - DNA, 201 bp, Homo sapiens
ctttagcaaagccctaggaaagcatcctgtttcttgcaaggtaagagtatgggtagcttgggaaggaggtagttcttttcttcttggaccctgacttgttmctggtagaattcttctcatagaatgatgtgaaagaaggagtattgtatactgcaagcttgtccacgtgctgtaaagagcaatccgtgcctcctgttctag

SEQ ID NO: 216436 - DNA, 201 bp, Homo sapiens
cgctaccatgcccagctaatttttgtatttttagtagagacggggcatgttggccaggctcgtctcgaactcctgacttcaagtgatccacctgcctcggyctcctaaagtgctggtattacaagtgtgagccaccgtgcccagcccagagtacattttgtttgtggatgaaaagactgtcctatgtgtttagtattctct

SEQ ID NO: 216437 - DNA, 201 bp, Homo sapiens
aagtggatgatgcaacagcacttttgaaaggtctctccgtactatcttgatttcatcatctaaagttggtgttggcaaagagaagataagtgtttagggtrttggatatcccagttaccctgatttgatcattacacattttaggcaggtatcaaaatgtcacatgtaccccaaaagtatgtacagctattacatatcagt

SEQ ID NO: 216438 - DNA, 201 bp, Homo sapiens
cagcttcaacaaaaaaatcacctgcttttctctacaagtccccggaagagatcagtagataaaatccaaatcccacacctgtcctccagagagatgattawtgttagttactgagaagggaaatggatgaaaggcatatgtggcacaggggtcaccgcaggatgcagaggtcttagggggtgtgccgtgaaaggccagctc

SEQ ID NO: 216439 - DNA, 201 bp, Homo sapiens
gactggtgatacctggaactgggctctgatgtcactttattttaccaaatgtgcccaagtttcccctttttgcaggtgaatggcccttcaaacattctacmaaaaggggtattacgattgtaatactaatctttaaaataacactttcttttcttaaggggagtgtggagccacagctggcacagccttgggcccaggctg

SEQ ID NO: 216440 - DNA, 201 bp, Homo sapiens
atattactagagtttaggaatttaatggctcaggagaaagtagaagcaccaagtgtagtgaataaaatagcagctaacaagctttgtgcaccttcacatgmctggcactggtctaagcatgttaaacacattaacttctttaatcctcacaacagttttatgaggtgggtacctttgttactaacctttatgacagatcag

SEQ ID NO: 216441 - DNA, 201 bp, Homo sapiens
cccatgaagggtctaaagtaaaccctttgactccgattgaagttctttactggcctttacattttacatatatatgtgtgtgtgtgtgtgtgtgtgtgtatgtgtgtgtgtgtgtgtgtgtgtgtgtgtatagttgaatgaatgcgtgaataaacacgcatctctcctgtttaaaaatatatatatatacttcatctggtt

SEQ ID NO: 216442 - DNA, 201 bp, Homo sapiens
aagaaagctagacgaactttctccgtcaagtccttttataaaaacctttaatcccattcatgagggaggagccctcatggcctaatctcctcttaaaggcygcacctctcaatactatcatattggcagtgcctgacttttgaagaggacacattcaaatcatagccaggttttaaacccaggaactccaactataggctt

SEQ ID NO: 216443 - DNA, 201 bp, Homo sapiens
ccatgaagggtctaaagtaaaccctttgactccgattgaagttctttactggcctttacattttacatatatatgtgtgtgtgtgtgtgtgtgtgtgtatgtgtgtgtgtgtgtgtgtgtgtgtgtgtatagttgaatgaatgcgtgaataaacacgcatctctcctgtttaaaaatatatatatatacttcatctggttc

SEQ ID NO: 216444 - DNA, 201 bp, Homo sapiens
cattctagaagaacatgagaatttggaattgaagaacacttgttttgctaaaaggatggaagaagaagaaacaggaagataatttttatactacaagttamgaagagaatgatataataaatatggtatttatagaaactaagagtgaatcattctacttgccaggagcagaagagatagaagaatttgaggaactctgtg

SEQ ID NO: 216445 - DNA, 201 bp, Homo sapiens
gaaactaagagtgaatcattctacttgccaggagcagaagagatagaagaatttgaggaactctgtggaggctgggaatacaacagcatggtgggatgagwaggagttggtgactaagggccatgctgttttttcagcgcactttcacttaggagtttgcatttaattagaaatacagcacaaatcagccaaacaaatttt

SEQ ID NO: 216446 - DNA, 201 bp, Homo sapiens
atggtgggatgagaaggagttggtgactaagggccatgctgttttttcagcgcactttcacttaggagtttgcatttaattagaaatacagcacaaatcasccaaacaaattttaatttaccttttgtcatcttgttaaagttgcttaagattgatttccttggggcttggatagaatttctcgctgtatgcagccagaga

SEQ ID NO: 216447 - DNA, 201 bp, Homo sapiens
ctggttagttacatatgtatacatgtgacatcctggtgcgctgcacccactaactcgtcatctagcattaggtatatctcccagtgctatccctccccccwccccccaccccacaacagtccccagagtgtgatgttccccttcttgtgtccctgtgttctcattgttcaattcccacctatgagtgagaatatgcggtgc

SEQ ID NO: 216448 - DNA, 201 bp, Homo sapiens
ggacattagagatttcatgaatctccttcatggttcccgaaaggttggtaaagattccttctctgacctttgttgtacatattggtcttcaatatgcattsttatggaaaaaggtgttcatggctaaaacatttgagagccaccacactgaatgatctctgggttgtcttcctcctctcaaaattgatgatcctgattatc

SEQ ID NO: 216449 - DNA, 201 bp, Homo sapiens
cccaggaggcggaggatgcagtgagccaagatcacaccactacactgcagcctggccaacagagcaagactccttctcaaaaaaaaaaaaaaaaagaacaraccagctggttgtggtggtggtggttgacatcctcaacagaacagcttttgctaattgttgaagtcagggaagacaacttgtgctgatggcagagttcaa

SEQ ID NO: 216450 - DNA, 201 bp, Homo sapiens
gaccatggtttgggactatttctgtcatctccttgttcttctctgggcaagttcattccagataacttgcccctctcctgcacactgttggtgtcatcgargttccaaagcaatggttttgcagggggcttctcagatcctgagggatatctcagttctgctgtcctcttgcatcatttatgattatattaggtcatgcct

SEQ ID NO: 216451 - DNA, 201 bp, Homo sapiens
cctgccaagagaaaaaaaagactgtgtcttttcacattccaccaatatactgatagcatctgtctctctgcattctcaatagcatcaaatattattacagkgggggaaaaacctttgataatcttgttggcaaaaatgcgtatttttttgattactagtgagtttatttatttatttttttatttttcgagatggagtctt

SEQ ID NO: 216452 - DNA, 201 bp, Homo sapiens
cctatcctgcctttaggaaccttgggcaaatcacttaactcctctctgcctctttacttacctgggaataatgagactcacctgacagctgtgaaagttaratgaactaatatacaagctcctagaatagcattagtgtgtttgatagtaactgtctgataaatattagctgctttcacatagacccatcagacctgatct

SEQ ID NO: 216453 - DNA, 201 bp, Homo sapiens
gtttgctaactggagcagagctaagaacttgaaagataatttccagtgagcccggtgaatgttctcttcttcctcccactgcattaggccggcgatgaatktgtggagaagaccctgagcaccatagcgaccagcacggatgcagcctccgttgtccacagcacagacttggtggtggaagccatcgtggagaatctgaag

SEQ ID NO: 216454 - DNA, 201 bp, Homo sapiens
gagagatggtgtccatgttagattatgaagggtaagttgaagtccatgaagcagcaatgagggagccggacatgtatggcagaggaaaccacatgaacaarggcacagagccatgagatagcacagaggagggagacgtgtggtgtggctggggaagactacagaatcgggttactaccgtccaaagcatttgttatttag

SEQ ID NO: 216455 - DNA, 201 bp, Homo sapiens
ctttgagaacagatagggtaggccaatacaggtgctctgaacacccagtttgctaactggagcagagctaagaacttgaaagataatttccagtgagcccrgtgaatgttctcttcttcctcccactgcattaggccggcgatgaatttgtggagaagaccctgagcaccatagcgaccagcacggatgcagcctccgttg

SEQ ID NO: 216456 - DNA, 201 bp, Homo sapiens
ctatggaaggataaattacaggcttcgtggacactttgagaacagatagggtaggccaatacaggtgctctgaacacccagtttgctaactggagcagagstaagaacttgaaagataatttccagtgagcccggtgaatgttctcttcttcctcccactgcattaggccggcgatgaatttgtggagaagaccctgagca

SEQ ID NO: 216457 - DNA, 201 bp, Homo sapiens
gataatcgtcaagcacgtgacggtcatcggcggcgggctgatgggcgccggcattgcccaggtgagcggccctccctgcagcgtgcccacgcgcttggccscccaccctgaggtggaagctctggcgcgaccggccgcgaggggcctgcacccgcccgacaccagggagttttcaccccgcgcctcccgggtgtagttgaa

SEQ ID NO: 216458 - DNA, 201 bp, Homo sapiens
tcctaccccacagctatttcaagaaaagccaatatggtttccgttgttctccatcttcccactcccagtttgcttctgaagcttgggctgctgtgatctgwtccttgtcccagatgcgtgtagaattacccatggtaacatggaggggtccatccagggacaggcctatgtttcttgaagtgtgtaggtcatggatactcc

SEQ ID NO: 216459 - DNA, 201 bp, Homo sapiens
aaagactgtgtcttttcacattccaccaatatactgatagcatctgtctctctgcattctcaatagcatcaaatattattacagtgggggaaaaacctttsataatcttgttggcaaaaatgcgtatttttttgattactagtgagtttatttatttatttttttatttttcgagatggagtcttgcagtgtctcccaggt

SEQ ID NO: 216460 - DNA, 201 bp, Homo sapiens
cctaccccacagctatttcaagaaaagccaatatggtttccgttgttctccatcttcccactcccagtttgcttctgaagcttgggctgctgtgatctgawccttgtcccagatgcgtgtagaattacccatggtaacatggaggggtccatccagggacaggcctatgtttcttgaagtgtgtaggtcatggatactcct

SEQ ID NO: 216461 - DNA, 201 bp, Homo sapiens
gtttccgttgttctccatcttcccactcccagtttgcttctgaagcttgggctgctgtgatctgatccttgtcccagatgcgtgtagaattacccatggtracatggaggggtccatccagggacaggcctatgtttcttgaagtgtgtaggtcatggatactcctatgccagaagctgctctgacgttccttggttcatt

SEQ ID NO: 216462 - DNA, 201 bp, Homo sapiens
tctgaagcttgggctgctgtgatctgatccttgtcccagatgcgtgtagaattacccatggtaacatggaggggtccatccagggacaggcctatgtttcwtgaagtgtgtaggtcatggatactcctatgccagaagctgctctgacgttccttggttcatttcacaccggcatctagaggctgcagagacatctgacag

SEQ ID NO: 216463 - DNA, 201 bp, Homo sapiens
gacgttgttttactttgctgcctgcccgcagcctgtggaatgtttctgctgatgggctggtttcctgcttgcctctgtccttgtatcaagataattcattscacgttgccccggttgcccagtcctggttgtcagactttttggtcctgggagcgttttcatgccttggttcccagacggtgctgatgcagcctgcaggtc

SEQ ID NO: 216464 - DNA, 201 bp, Homo sapiens
agagagacacttgcataccagcttgtcggaatgttaaccttcagagatgggtggccttgtggccagagaggccctgcccctgacaaagagaagagacttgsctttctgtcatctgtccatcactgccaatcagtgtcctcgtgcatttcacactggcatctagaggctacagagacatctgacaaaaacagaatatacttg

SEQ ID NO: 216465 - DNA, 201 bp, Homo sapiens
aggggtccatccagggacaggcctatgtttcttgaagtgtgtaggtcatggatactcctatgccagaagctgctctgacgttccttggttcatttcacacyggcatctagaggctgcagagacatctgacagcagacagttaaggacatgtagggtacttctgtgctccactctcgggcataggagtaccctacgtgtcct

SEQ ID NO: 216466 - DNA, 201 bp, Homo sapiens
gaacaagctcagagctcccactaattctgtattgtggtgagatgtataattatttcattatatattacaatgtaataataatagaaataaagtgcacaatmaatgtaatgcacttgaatcatccctaaaccatcccctcttccctgcaagacggtagaaaaattgtcttccgtgaaattgtctcccatgtcttcctggtgc

SEQ ID NO: 216467 - DNA, 201 bp, Homo sapiens
aaacagccatagacagtatatgcaatatgagtgtggctgtgctccagtaaaacttgacttacaaaaacaggctgtgggctacagtattgtactttaccaayacttgacatagaagaggggcattaatgtgcctggaatgtgccttcctagtgagacttcatgaggggattgtggtatataggttaagggtatgaactagcc

SEQ ID NO: 216468 - DNA, 201 bp, Homo sapiens
gtccatgtctggtacagaagaaggatcactggagaaagtcaggaggcctgggcctggtgctgaccccctcaccacctccagccttggaaaggtcctcagtytcgtcatctgtaatgcaagttgaggtgattggggtaaataatttcctagacctttctggctctaactctctaagactagcttcccccatttgtaaaatag

SEQ ID NO: 216469 - DNA, 201 bp, Homo sapiens
acattagagatttcatgaatctccttcatggttcccgaaaggttggtaaagattccttctctgacctttgttgtacatattggtcttcaatatgcattctkatggaaaaaggtgttcatggctaaaacatttgagagccaccacactgaatgatctctgggttgtcttcctcctctcaaaattgatgatcctgattatctg

SEQ ID NO: 216470 - DNA, 201 bp, Homo sapiens
tggtgctgaccccctcaccacctccagccttggaaaggtcctcagtttcgtcatctgtaatgcaagttgaggtgattggggtaaataatttcctagacctytctggctctaactctctaagactagcttcccccatttgtaaaataggagcagcagcactggtacctattgtacagagttgtttaggaaactcatttcatt

SEQ ID NO: 216471 - DNA, 201 bp, Homo sapiens
gaattgcttgaacccaggaggcggaggatgcagtgagccaagatcacaccactacactgcagcctggccaacagagcaagactccttctcaaaaaaaaaawaaaaaagaacaaaccagctggttgtggtggtggtggttgacatcctcaacagaacagcttttgctaattgttgaagtcagggaagacaacttgtgctgat

SEQ ID NO: 216472 - DNA, 201 bp, Homo sapiens
ctcagtttcgtcatctgtaatgcaagttgaggtgattggggtaaataatttcctagacctttctggctctaactctctaagactagcttcccccatttgtwaaataggagcagcagcactggtacctattgtacagagttgtttaggaaactcatttcatttagctcacatttcctgagtgcctgctgtgtatcaggcact

SEQ ID NO: 216473 - DNA, 201 bp, Homo sapiens
tatttgtactcccagttgttaccttcctgctgaaggacatgagatgtgtctgtttgttatgaagttttccccctacttcccgagttgttgcttatctttgktgggctgttctctgctcttggttgaggtactgggatgtagaaccaccctctattagcatattagttattggactctgggtgaggttggagatactgtcat

SEQ ID NO: 216474 - DNA, 201 bp, Homo sapiens
aggtagttcttttcttcttggaccctgacttgttcctggtagaattcttctcatagaatgatgtgaaagaaggagtattgtatactgcaagcttgtccacrtgctgtaaagagcaatccgtgcctcctgttctagtttgtagacagggaaactggactcctaagccatgcctaaggccattatgtggatagtctgagacct

SEQ ID NO: 216475 - DNA, 201 bp, Homo sapiens
aatgcagattttttaacgtgtattctgaaagttaactgtgccagtgatgaatccaaccagcaaattaatggcttctgtcagtgtacttgggcctttggccktagtgatttctgagaagacactggataagtaggaggaccatagtagggccaggcttcaggcagcacaggtgggtggcagtgcagcagctttggggctgat

SEQ ID NO: 216476 - DNA, 201 bp, Homo sapiens
aggtggtggtgacccagtgctgccgttttctccttaggtgacgcatccaaagaagacattgacactgctatgaaattaggagccggttaccccatgggccyatttgagcttctagattatgtcggactggatactacgaagttcatcgtggatggtaggaattggaattttttgttgtctttaattgaggtagtttttctg

SEQ ID NO: 216477 - DNA, 201 bp, Homo sapiens
ctattgccagacagtgatgaaatagggattgatttgtcactcactgtgactaagctaagctggctgtgtgtgagcttgggcagtttcactaaacattcccyttaccctaggattcctccctcagccagggtggcatggtgaaggcagggaattgcccatcctaaattagctgatcccaaagacttcattttcttgggagtc

SEQ ID NO: 216478 - DNA, 201 bp, Homo sapiens
gtaaaataggagcagcagcactggtacctattgtacagagttgtttaggaaactcatttcatttagctcacatttcctgagtgcctgctgtgtatcaggcmctacactaggctctttaacctgaattgatgcaaaacagatatgaggtgtgaaaagaaggcatgacccatagtcataccaaagatgtgactttgctgctga

SEQ ID NO: 216479 - DNA, 201 bp, Homo sapiens
taaaataggagcagcagcactggtacctattgtacagagttgtttaggaaactcatttcatttagctcacatttcctgagtgcctgctgtgtatcaggcamtacactaggctctttaacctgaattgatgcaaaacagatatgaggtgtgaaaagaaggcatgacccatagtcataccaaagatgtgactttgctgctgac

SEQ ID NO: 216480 - DNA, 201 bp, Homo sapiens
gttaactgtgccagtgatgaatccaaccagcaaattaatggcttctgtcagtgtacttgggcctttggccttagtgatttctgagaagacactggataagyaggaggaccatagtagggccaggcttcaggcagcacaggtgggtggcagtgcagcagctttggggctgatgtggctgcaccagcacagccttccttggtg

SEQ ID NO: 216481 - DNA, 201 bp, Homo sapiens
aactgaaattttaagaccttaaaacaatgtcattttttttttaaaaaggaaaccctggcatttaaatggcctaccttggaagctgttggagaaggtggatktgctcatacctggaaagagaaggctctccgctgcctacccacactagtctcgccttttacctcttttccctcctttccaaataactggtttcttctccct

SEQ ID NO: 216482 - DNA, 201 bp, Homo sapiens
ttaaaaaggaaaccctggcatttaaatggcctaccttggaagctgttggagaaggtggatgtgctcatacctggaaagagaaggctctccgctgcctaccmacactagtctcgccttttacctcttttccctcctttccaaataactggtttcttctcccttctcttcctcctctcctcccacccgcccctgatttgagca

SEQ ID NO: 216483 - DNA, 201 bp, Homo sapiens
gttaactttgtggaatgtcatttacttatttgtgccagagctgatgggcagtgctgagaggcatcagaatgggaaggcagcactagaaaccgtgggctggwtgggaccacacagagggcagctacatgtgttcatattatctcatcgaggtcagcttgcccatgctgtaaatgcagttctcattagatacactatactagc

SEQ ID NO: 216484 - DNA, 201 bp, Homo sapiens
ttaactttgtggaatgtcatttacttatttgtgccagagctgatgggcagtgctgagaggcatcagaatgggaaggcagcactagaaaccgtgggctggawgggaccacacagagggcagctacatgtgttcatattatctcatcgaggtcagcttgcccatgctgtaaatgcagttctcattagatacactatactagct

SEQ ID NO: 216485 - DNA, 201 bp, Homo sapiens
aagaccctgccaagagaaaaaaaagactgtgtcttttcacattccaccaatatactgatagcatctgtctctctgcattctcaatagcatcaaatattatyacagtgggggaaaaacctttgataatcttgttggcaaaaatgcgtatttttttgattactagtgagtttatttatttatttttttatttttcgagatgga

SEQ ID NO: 216486 - DNA, 201 bp, Homo sapiens
gcctcggcctcggccaagaagataatcgtcaagcacgtgacggtcatcggcggcgggctgatgggcgccggcattgcccaggtgagcggccctccctgcascgtgcccacgcgcttggccgcccaccctgaggtggaagctctggcgcgaccggccgcgaggggcctgcacccgcccgacaccagggagttttcaccccgc

SEQ ID NO: 216487 - DNA, 201 bp, Homo sapiens
cctcggcctcggccaagaagataatcgtcaagcacgtgacggtcatcggcggcgggctgatgggcgccggcattgcccaggtgagcggccctccctgcagsgtgcccacgcgcttggccgcccaccctgaggtggaagctctggcgcgaccggccgcgaggggcctgcacccgcccgacaccagggagttttcaccccgcg

SEQ ID NO: 216488 - DNA, 201 bp, Homo sapiens
gtagtgttggtagaccagacagaggacatcctggcaaaatccaaaaagggaattgaggaaagccttaggaaagtggcaaagaagaagtttgcagaaaaccytaaggtaatttcttattatcgatgtcttcaagacaagtcctctgactgctttacatttgcagggcaatgggggatttctggctttctttctttctttttt

SEQ ID NO: 216489 - DNA, 201 bp, Homo sapiens
ataatcgtcaagcacgtgacggtcatcggcggcgggctgatgggcgccggcattgcccaggtgagcggccctccctgcagcgtgcccacgcgcttggccgsccaccctgaggtggaagctctggcgcgaccggccgcgaggggcctgcacccgcccgacaccagggagttttcaccccgcgcctcccgggtgtagttgaaa

SEQ ID NO: 216490 - DNA, 201 bp, Homo sapiens; identical to SEQ ID NO: 38772

SEQ ID NO: 216491 - DNA, 201 bp, Homo sapiens
agagtcatgctgttttgaaagaagagattcactctgatactcccactatattttctcttcacagacatacaatctttgccagcaacacttcctccttgcakattacaagcatagctaatgccaccaccagacaagaccgattcgctggcctccatttcttcaacccagtgcctgtcatgaaacttgtggaggtcagtgggt

SEQ ID NO: 216492 - DNA, 201 bp, Homo sapiens
cctcattccctcaccactactcagcataagcatttttaataagtcataataatgaccattttttttagcattttctctcaagtgacaactttgaccatctwgcaatgggactttttctgtcttactaacattgcttctcagcttcctcctattttctcctatcccctaaggctgattttttgaagaaattgaagaatgaag

SEQ ID NO: 216493 - DNA, 201 bp, Homo sapiens
taaggctgattttttgaagaaattgaagaatgaaggggagggatttggggaacagaagaaacagcatttaacagctcttatctcatgcagattaagagcamagaagtggcatgcatttccaacatttcagtacttagggactagttgatttctttagttattatattgtatatataagtgttttggagataggcacattct

SEQ ID NO: 216494 - DNA, 201 bp, Homo sapiens
cagtacttagggactagttgatttctttagttattatattgtatatataagtgttttggagataggcacattctgtagatttactttaataatgttttcamctgcatttatctggtaatgtatgcttttgtctttggaaatgtagtgtgttggttgttaacagctgatgtttagcaaatgctactattttttagaaagtat

SEQ ID NO: 216495 - DNA, 201 bp, Homo sapiens
ttttggagataggcacattctgtagatttactttaataatgttttcaactgcatttatctggtaatgtatgcttttgtctttggaaatgtagtgtgttggktgttaacagctgatgtttagcaaatgctactattttttagaaagtattttgtaaaagtgttcttctctattcagtttttattgtttaactttagctcttc

SEQ ID NO: 216496 - DNA, 201 bp, Homo sapiens
agatttactttaataatgttttcaactgcatttatctggtaatgtatgcttttgtctttggaaatgtagtgtgttggttgttaacagctgatgtttagcamatgctactattttttagaaagtattttgtaaaagtgttcttctctattcagtttttattgtttaactttagctcttccttgtgttgctggtggtgtacac

SEQ ID NO: 216497 - DNA, 201 bp, Homo sapiens
atcgtgcttggtgccgtcccctacagatgccagtagggcagcccttgtgcccttgcctgtacctcacagaggtcaggagggctgctggagcaggtggcagsccccgcttgctgtaaatgaaagccttccccagaaggatgagtctgttctgaagccaaggggccactggcctctagagcatctgtgtggcagagggtggag

SEQ ID NO: 216498 - DNA, 201 bp, Homo sapiens
gagtagaagacacgggactgctctctgtcctggcttttgtctcctgatgaatggctgcattttcataaatgattttaggtacagcttggtaaacacatacmtccctaacagaaaatgagggctttacttttgcaggaaatactacagatggtgaaataaatgataagacagtgagagagcaacctgccaaaatagcaataa

SEQ ID NO: 216499 - DNA, 201 bp, Homo sapiens
attctatcagttatttttgatttttattctgtaattgtgcagtctttgtcaaagtagttttctctcctaaacggcctcccggctctccccggtctttcctycgcttgctaggttgtaaagaatagtagtagtcatgacttttgtagcactttgtaaagtcacctaatggaagattgctgaggtcctggttttgacctttga

SEQ ID NO: 216500 - DNA, 201 bp, Homo sapiens
ttttgtctcctgatgaatggctgcattttcataaatgattttaggtacagcttggtaaacacatacatccctaacagaaaatgagggctttacttttgcargaaatactacagatggtgaaataaatgataagacagtgagagagcaacctgccaaaatagcaataaggaacctgtttctcaccgggaagttgcattatgt

SEQ ID NO: 216501 - DNA, 201 bp, Homo sapiens
agttcctctttagttcccccaaaactcggggactatacttatgcatgactttgcagtttttcttaaggggtagttgtgtcacaaaatgctacaccattacraagatttacatataagtcatctactttttttttaactgtaatcctttgtatcattatagttctcatagcaaacttttgctttctaaaatattctcgagtt

SEQ ID NO: 216502 - DNA, 201 bp, Homo sapiens
tttaattctatcagttatttttgatttttattctgtaattgtgcagtctttgtcaaagtagttttctctcctaaacggcctcccggctctccccggtcttyccttcgcttgctaggttgtaaagaatagtagtagtcatgacttttgtagcactttgtaaagtcacctaatggaagattgctgaggtcctggttttgacct

SEQ ID NO: 216503 - DNA, 201 bp, Homo sapiens; identical to SEQ ID NO: 38774

SEQ ID NO: 216504 - DNA, 201 bp, Homo sapiens
actgaaattttaagaccttaaaacaatgtcattttttttttaaaaaggaaaccctggcatttaaatggcctaccttggaagctgttggagaaggtggatgkgctcatacctggaaagagaaggctctccgctgcctacccacactagtctcgccttttacctcttttccctcctttccaaataactggtttcttctccctt

SEQ ID NO: 216505 - DNA, 201 bp, Homo sapiens
acagatggtgaaataaatgataagacagtgagagagcaacctgccaaaatagcaataaggaacctgtttctcaccgggaagttgcattatgtttttattgkttgttgttttgtttttcaagaagcagcatggtttagtgggaagcctgcttgacctccatcttttttttcccctttcttaagctgcccagttattgtatat

SEQ ID NO: 216506 - DNA, 201 bp, Homo sapiens; identical to SEQ ID NO: 38775

SEQ ID NO: 216507 - DNA, 201 bp, Homo sapiens
tagatttctaaactcatattaataattggatgttatgattgtactttcttacgcagttatgctttgttagtggaagaaagtagtaatggtattgaaaagamcatctgtgcaagacaaaaagatatggaaacagaagtacagggaaaagctaatgattatcttcagcagcataataattaatctacaaagtaatgattcagt

SEQ ID NO: 216508 - DNA, 201 bp, Homo sapiens
ctttgttagtggaagaaagtagtaatggtattgaaaagaacatctgtgcaagacaaaaagatatggaaacagaagtacagggaaaagctaatgattatctycagcagcataataattaatctacaaagtaatgattcagtcttccatcagagtggccacggcagctgcagagatgggaactctttgttctcattaaattat

SEQ ID NO: 216509 - DNA, 201 bp, Homo sapiens
cctcaggaagatcacagccttttgacaaaagaggaggcaccatttgcctagtggaaatcagcttcaacaaaaaaatcacctgcttttctctacaagtcccyggaagagatcagtagataaaatccaaatcccacacctgtcctccagagagatgattaatgttagttactgagaagggaaatggatgaaaggcatatgtgg

SEQ ID NO: 216510 - DNA, 201 bp, Homo sapiens
tgttttcaattacttcattcataaatgctcactcctgagagtgtcattttttaaacaaaacatttacaccagctcttccagagagatgaaagcacatttgsttcctcaaaatctgctttaaatattaaaacttttctctatggtttatggaagcaattgcctcacttttgctccaagatcaaaccaacagttctggtttat

SEQ ID NO: 216511 - DNA, 201 bp, Homo sapiens
ctccaagatcaaaccaacagttctggtttatctatcaacaaatatgcctaattacacctcaaagaaagcacagagcattttaccctaccttgaaaggcagktgtatgtcttttttttttttttaacaaaatgtaatgttttagaatgtagcatgtgagagatccaccttttaatggtgttttcctcactgtccatttgatg

SEQ ID NO: 216512 - DNA, 201 bp, Homo sapiens
ctatattttcatgcttcttggttggaattgaatggcagaataagattatatgacaaaagcaattctcagggcacttccggtgggcagtggctaaagagagwcacttgcataccagcttgtcggaatgttaaccttcagagatgggtggccttgtggccagagaggccctgcccctgacaaagagaagagacttgcctttct

SEQ ID NO: 216513 - DNA, 201 bp, Homo sapiens
atctcggttcactgcaacctccgcctcccgggttcaagcgattctcctgcctcagcctcccgagtagctgggattacaggcgccccgcccggctaattttrtatttttagtagagacagggtttcaccttgtgggtcaggctgatctcgaactcctgaccaaaggtgatccgcccgcctggcctcccgaagtgctgggatt

SEQ ID NO: 216514 - DNA, 201 bp, Homo sapiens
taatcctttgtatcattatagttctcatagcaaacttttgctttctaaaatattctcgagtttgaacttacagtactgtactaacccatgaaaaatcatgytgttcatgaatcacctgaagaagccatctgttgaggtggactccagcagccaaagagagcaggcttgtgtgtcctgctcctccccgtccatgggtaaagt

SEQ ID NO: 216515 - DNA, 201 bp, Homo sapiens
ttctgaagttgctgggtgtcctgcctggggtgggtgctgcttccctactgcacactacagtcacaccctaggcctcttaccatgtccccccgcccaccacstgctccctcctctcagccaacacagaggagtgctcagagcatgcccaccgtgccatctccgttcatacagttccaccttgaagcttcaagcatctggagg

SEQ ID NO: 216516 - DNA, 201 bp, Homo sapiens
cagttaagtttttatttctctgttctgttcacatcctggggactgggctgccattacataactgagcagccattggtggttcacaccagcgccacacccarttattttctttcagtatttgaattcctgcacaaaagatctgctgtatctgcaaatcactagaggcacaaaagaagtgattacctctactaagggttggga

SEQ ID NO: 216517 - DNA, 201 bp, Homo sapiens
tcatgaatcttcaggtcttattatgttgaagtttttggcttacacatctgagttctcccattatgtcatgagtaccttgagtgcttgtctggtttatcttkgtctcattctacatctctggtgcctgctacataatgaatagaagttgaatgaatgaatgaatgaatgacgctgcctatatgattatttttgtttctttgc

SEQ ID NO: 216518 - DNA, 201 bp, Homo sapiens
tcaggtcttattatgttgaagtttttggcttacacatctgagttctcccattatgtcatgagtaccttgagtgcttgtctggtttatctttgtctcattcwacatctctggtgcctgctacataatgaatagaagttgaatgaatgaatgaatgaatgacgctgcctatatgattatttttgtttctttgctttcttatgg

SEQ ID NO: 216519 - DNA, 201 bp, Homo sapiens
aggcataatggtaactgtgaatgaattttcctcttccaaatatcaaatacagtcatatgctcatttaatccagattttaatatcataattatcttgtttcraaagaacaaactgcataactaaagtgatgcttcattaaaattgacatttgaccttggagaactgattaaataaaattaaatgagataggataggcctggt

SEQ ID NO: 216520 - DNA, 201 bp, Homo sapiens
ggtggcgctgcaggaaagcctggaagtcaacctgtttaaagcttttcctctcatgcttttggcacgccactttactgtggccttaaagaactaaatttggkttaagtcagtatggattttttttaatgaataagttaatgtcttatatatgcatatgcctatatcctcttttccccatatctacccatgtaaccttaaaat

SEQ ID NO: 216521 - DNA, 201 bp, Homo sapiens
aaaagactgtgtcttttcacattccaccaatatactgatagcatctgtctctctgcattctcaatagcatcaaatattattacagtgggggaaaaaccttygataatcttgttggcaaaaatgcgtatttttttgattactagtgagtttatttatttatttttttatttttcgagatggagtcttgcagtgtctcccagg

SEQ ID NO: 216522 - DNA, 201 bp, Homo sapiens
atatactgatagcatctgtctctctgcattctcaatagcatcaaatattattacagtgggggaaaaacctttgataatcttgttggcaaaaatgcgtattyttttgattactagtgagtttatttatttatttttttatttttcgagatggagtcttgcagtgtctcccaggttggattgcagtggcgcaatctcagctca

SEQ ID NO: 216523 - DNA, 201 bp, Homo sapiens
ctggtttatctatcaacaaatatgcctaattacacctcaaagaaagcacagagcattttaccctaccttgaaaggcagttgtatgtctttttttttttttkaacaaaatgtaatgttttagaatgtagcatgtgagagatccaccttttaatggtgttttcctcactgtccatttgatgcattctccaatgcaccaagtat

SEQ ID NO: 216524 - DNA, 201 bp, Homo sapiens
atgcctgtcctcttgcttctggcctgaactaattcacttacacgtgcctataaggtgatcgaggtgacccaatgatcttcttttagccacaatacctattscatgatccttgctgaagctattgccagacagtgatgaaatagggattgatttgtcactcactgtgactaagctaagctggctgtgtgtgagcttgggcag

SEQ ID NO: 216525 - DNA, 201 bp, Homo sapiens
gcccgcgctcactcgggctccggctgctgacagctgcgagcccgcgcgtgtatacccgctcaacgctgggacgttacagccagggccaatgggcagagcgsgactcgaggccccgcccccgccttgtggcgtcacggggacgccgggggcgcgcgggctgcagggccgcgtaggtccccgcccccagagtctggctttccg

SEQ ID NO: 216526 - DNA, 201 bp, Homo sapiens
ccaggtcccgctgctcagcaggtctcaagcccgcgctcactcgggctccggctgctgacagctgcgagcccgcgcgtgtatacccgctcaacgctgggacrttacagccagggccaatgggcagagcgggactcgaggccccgcccccgccttgtggcgtcacggggacgccgggggcgcgcgggctgcagggccgcgtag

SEQ ID NO: 216527 - DNA, 201 bp, Homo sapiens
gcaaagacgggaaccacacttaactagcagcaaatatgccagggaagaaattagaccagcactggtcaggagactgggccctctggcaggcagggtcaccrtcatgctgaggcgctgctcgtctctggaggatggctccctgggagtgaaggtgaccctgccgtggagacagcgccattgtcctctgaacccacagtgtgg

SEQ ID NO: 216528 - DNA, 201 bp, Homo sapiens
aagaaatgtcctatatttctatgagccagagattaagataaaaaaagattttcaggagtaaccagtcaatgaaaagtcaaaataaatagttttggcagccrggcgtggtggctcatgcctgtaattccaacactttgggaggccgaggtgggcaaatcacttgaggtcaggagttcaagaccagcctcaccaacatggtga

SEQ ID NO: 216529 - DNA, 201 bp, Homo sapiens
agtggctgggtgggaagcttgtagtcatgctgatacagttaagttccagctgaacggaggagccctgcccaacacccacactccccttggctctcagcccygctcctgtgaggagcacatccccatctttgccccttcgccactgctgagctcagtctgccgtccttcggacaagtacttccacttcctgcgcgtaccacc

SEQ ID NO: 216530 - DNA, 201 bp, Homo sapiens
cttttcccacaggagacttcgtcgtcgtctacactgatggctgctgctccagtaatgggcgtagaaggccgcgagcaggaatcggcgtttactgggggccrggccatcctttgtaagttaaacgaagctgagttttactgaatcatgttccacaacttgtgaaaagatgaggcgggatctgctcattgtttgattattggg

SEQ ID NO: 216531 - DNA, 201 bp, Homo sapiens
cagaattaaacttttggatgttcttaggaaaacccttacatgtaaatgaacaactgtaatcttttgaaatactagtattccctgtgcatgcagtacttaaygttaagatgaaatgcgaagactccagctttttcaaataacacctcacacgcagctgcttgttataattgattagcaccagcattttaacctttcatattc

SEQ ID NO: 216532 - DNA, 201 bp, Homo sapiens
ccctgaataggagcatgtaggggatgcttacgaggctggggaaggctcctgggagaaatgacatcttaagctgacagctgtaggtagaatacaagttaggkgaaagggaagagaggagggtatttcaggctgtgccaaaggccaaagcaactaaggccagctaaggaagtgaagagtcaaggatggtgactcagaatacaa

SEQ ID NO: 216533 - DNA, 201 bp, Homo sapiens
gcaaagcacatgaagccgagcgtggagccggcgcctccagttagcagagacacgttttcctacatgggtacatcttccttgggttttcagattttaatacmacagtcaggaaaatgttatgtgtaaaaggtgtttcccacttgatggggggagtttgagctggtgtttatcatcttcattcttatgtgtaaagattattta

SEQ ID NO: 216534 - DNA, 201 bp, Homo sapiens
ctaggccattctctaggaacagctgcgactcataaagaccaagaagcataaataaactttcaaaaatttatttggctctttcgttaaaaactgtgcaaattaaaaaaaaaaaaaaaaaagtaagacaccggctgggcacagtggctcacttctgtaatcctagcactttgggaggccaaggcgggcagatcacttgaggtc

SEQ ID NO: 216535 - DNA, 201 bp, Homo sapiens; identical to SEQ ID NO: 38798

SEQ ID NO: 216536 - DNA, 201 bp, Homo sapiens; identical to SEQ ID NO: 38797

SEQ ID NO: 216537 - DNA, 201 bp, Homo sapiens
ggccggcggggttccaggaggctcatggcctgggactggaacgcaccgaagacttgtttgaaatatcagaaacgtcgcgtaaaggttaggggtggcctaayaaaccctgtgtttaatcctccatctttgttgcagttaaagtgcaacaaaaagtgacacgtaatcagaacgaacccccgttaccagaagactttccgtacc

SEQ ID NO: 216538 - DNA, 201 bp, Homo sapiens
aaggcagcctgcaaagccattgaacaagcaaagactcaaaacatcaataaactggttctgtatacagacagtatgtttacgataaatggtaagctttcacrtttgatttcttctgtttttccagtaactgtgaagggaaattggtaggaggtgttgtaacagggcaggacccaaatgggaacggggggatgacattggttt

SEQ ID NO: 216539 - DNA, 201 bp, Homo sapiens; identical to SEQ ID NO: 38801

SEQ ID NO: 216540 - DNA, 201 bp, Homo sapiens
gcccggaagtttcagaaggtagtcacctctcatatcagtgtgacattttaacctattcaaaggctttcatatgccagatggcatttgatctatatagctascctctaggcatgtagggaacctcgtgtgattgttttcattttacaaattagggaacagactgaaagcagttacaaatagtggttcatattacttacagta

SEQ ID NO: 216541 - DNA, 201 bp, Homo sapiens
ggtcagcccagcagcatgtacttccttttcccacaggagacttcgtcgtcgtctacactgatggctgctgctccagtaatgggcgtagaaggccgcgagcrggaatcggcgtttactgggggccaggccatcctttgtaagttaaacgaagctgagttttactgaatcatgttccacaacttgtgaaaagatgaggcggga

SEQ ID NO: 216542 - DNA, 201 bp, Homo sapiens
caggatggtctcgatcttctgacctcgtgatccgcccacctcggcctcccaagaggagtccttttttcagtagagatgaagtctcactatgttgcccaggytgggctcaaatttctgggctcatgcgatcctcccaccttgtcctcccaaagtgccgagatcacaggtgtgagccaccacccctggcccaaaaattgctca

SEQ ID NO: 216543 - DNA, 201 bp, Homo sapiens; identical to SEQ ID NO: 38799

SEQ ID NO: 216544 - DNA, 201 bp, Homo sapiens
ctgagacggagtctcactctatcgcccaggctagagtgcagtggcgcgatctcggctcactgcaagctccacttcccaggttcacgccattctccttcctmaccctcccgagtagctgggactacaggcacctgccaccaggcccagctaattttttgtatttttagtagagacggggtttcaccgtgttagccaggatgg

SEQ ID NO: 216545 - DNA, 201 bp, Homo sapiens
gcataaaaagacaatacaactatatagattgtattaggtattataaactagagatgatttaaagcatgcaagaagatgtgtgtgggttatttgcaaatacrccattttatgcaaaggacttaagcatcctctgatgttggtatctgtgatggggtggaggacttcctggaatcagtctccctcagataccaagggacaact

SEQ ID NO: 216546 - DNA, 201 bp, Homo sapiens; identical to SEQ ID NO: 38800

SEQ ID NO: 216547 - DNA, 201 bp, Homo sapiens
gactggattagggcccacctatatgacctcactttatcttaatgattacattaaaggccctaaatagtgccatgttctgaggttctgggtgttagaacttyagcagaagaattttgaagggagccaattcaacccataacaaccagcctttggggctcacccctcccatggagctgtgacattttgacctgtcctcagcgc

SEQ ID NO: 216548 - DNA, 201 bp, Homo sapiens; identical to SEQ ID NO: 38813

SEQ ID NO: 216549 - DNA, 201 bp, Homo sapiens
ctggatgatcaaagtttttggcgaaacatatgggcatatgggatatagccagaagtctttaaaggaggtgacatttattttaaggcccagttgttacttayattgctcatttctgtctagtgtgatgtcttagtttaggctgctttaacaaaactaccgtagactgggtggtttaaacaacagaaatttattcctcacagt

SEQ ID NO: 216550 - DNA, 201 bp, Homo sapiens
gatctggaaggactagctggaacattgctcattggttgtttttaactatattttaactgaattatatatatgtatatattaatatgtatatacacacatayatatatacacatactatattttactaaattatatatgcatgtgtgtatttatgcatacacacaaacatggattcagagtacataaatactaggaatctca

SEQ ID NO: 216551 - DNA, 201 bp, Homo sapiens
tggatgatcaaagtttttggcgaaacatatgggcatatgggatatagccagaagtctttaaaggaggtgacatttattttaaggcccagttgttacttacrttgctcatttctgtctagtgtgatgtcttagtttaggctgctttaacaaaactaccgtagactgggtggtttaaacaacagaaatttattcctcacagtt

SEQ ID NO: 216552 - DNA, 201 bp, Homo sapiens
aataatttggaggacaaaagattccaagtgaagctgatttttatcaattaattctataaaattgtgctgtctcagtggcagatagcacctgatgttggccrttatgacagaaattaaatggtcttggtgttgcagagagatgattcggttatgagacgcacccattgctaagtttgagtatctggtaacagagtgcaaata

SEQ ID NO: 216553 - DNA, 201 bp, Homo sapiens
cagcaaataaatcttatctgaagggccacaagtatctgaaatgtctttccaacttgctgagcaggaccctggtcaatatggagacccccatgagccccacrgtggtctgatgaacttctgaagtataaagatggtgtttataaaaggtttagactgagttctagtacaggttcctgcgccttgccaagtgtatgcctggaa

SEQ ID NO: 216554 - DNA, 201 bp, Homo sapiens
tccctcacataaggagaagtttagcacaacgcctctcccctcctgtgtctgtcaaatgagaagatgcagactggatgctgtcctgactgctttgatgtccygtgacagacaccctgtgttgctgctgagctgtcacaattcttcattggtgaaaactggcagatttgcagtttgacactatctatcaaaattaaaactgca

SEQ ID NO: 216555 - DNA, 201 bp, Homo sapiens
gtaccactgctagcaatttttcctaaagatatacaagcacatgtgcttgatgaaaaataggaagggctgttattgcagcactatttgtactaggaaaaaaytagacatgacctatcattggagaatgaatggaatgcactatgacacgtccttacaaaggaataccatacagccattacaaagaataaggcaggtatttct

SEQ ID NO: 216556 - DNA, 201 bp, Homo sapiens
ccatttgtatgtcttctgagaaatgtctattcaggttctgtgcacatttttaaattgagttgttttcttgctgttgggctctttcaattccttatttattytggatattaacctcttgtgagatgtatagtttgcaaatattttctcccattttgtaggttttctcttcactctgttgattgtttccttcgctatgtagaa

SEQ ID NO: 216557 - DNA, 201 bp, Homo sapiens
ctactttcttttttttttttttcttttttgaaatgaagtctcacactgtcacccaggctggagtgcaatggcgagatctcagctcactgcaacctctgtckcctgggttcacacgattctcatgcctcagcctcctgagtagctgagattacaggtgcacaccaccacatctggctaattttttgtatttttagtagagaa

SEQ ID NO: 216558 - DNA, 201 bp, Homo sapiens
ttgctttccagagggccaataagtagccaacagaacgctgaaggtgaaggaggttaccatgagcaatagagaaactaccgagctggttattttttttttttcctctggtacttcgggaggatgtgaataaaagatggaagataattttaatgtgaaaagaaaaggaagtggttcagcaatcccaagagaggcagatccatc

SEQ ID NO: 216559 - DNA, 201 bp, Homo sapiens
ccaagaaatggatgtcagcatggagtgggagttatcagcacagactggggctatgaatgctggagttcggatttcagctccacatttgcttgctatgtcaygtgggcaagttaatctctctgttcctccattgtcgtatgtctttaaaagtgctaattgagttattatttgtaaagaacttaaaagaatacttggtgctta

SEQ ID NO: 216560 - DNA, 201 bp, Homo sapiens
tgtcgtatgtctttaaaagtgctaattgagttattatttgtaaagaacttaaaagaatacttggtgcttattaagcattatgtgaatgtttgttaaataartaaatagatcatgttgatcaaagtcagatcccttaaaaatccatttgtacgagcatacatataaaacagttaagcatcaaataggaactgaaagaactgg

SEQ ID NO: 216561 - DNA, 201 bp, Homo sapiens
tgggaggcggaggtttcagtagctgagatcatgccactgcactccagcctgggtgacagagcaagagtctgtctcaaaaaaaaaaaaaaaaaaaaaaaaaagcaagtgcagagcccttctaaatgtagggccttgtgcagctgcatgggcgacatgcccatggagctgggtgggcctggacagtgggcttgtgatttgaat

SEQ ID NO: 216562 - DNA, 201 bp, Homo sapiens
aaactttaaatggtttggatgggggcttcctacctcccagattcagggcagcactgagagagctcagagggcctcctagaatgtaactaccgtcattcacrgctgcttagtgggtacctttgtgtaggagccttttcagaaagctgggtgctcaggaagacttgctggttaaagagcaggagttgagcctgttgctctcag

SEQ ID NO: 216563 - DNA, 201 bp, Homo sapiens; identical to SEQ ID NO: 38816

SEQ ID NO: 216564 - DNA, 201 bp, Homo sapiens
gatggaggagacatcaaacatacaaattagccaggcacaagggctcatgtctgtaatcccaacatttgggaggctgaggtgggtggatggcttgaacccargaatttaagaccagcctgggcaacatggtgaaactccgtctctactaaaaatacaaaaaaaattagctgggcatagtggtgcatgcctgtagtcccagct

SEQ ID NO: 216565 - DNA, 201 bp, Homo sapiens
atgtgccctggacagctagtccctgcctagacacctgtccacacctgctttctgctctgctcacctatgctgccactcgtttgttgttgttgttgttgttragacagggtctcactctgttgcccaggctggagtgcagtggcatgatcatggctcactgcagcctcgacctcccaggctcaagtgatcctcctgcctcag

SEQ ID NO: 216566 - DNA, 201 bp, Homo sapiens
ttttctcccttcttcctctttttcttttcttaaattaagcttgtatcttttttaatatttcaagaaatatttgaatatggccttttctcaattggaaatakctgttctcccaaacctcacagaggttacctttgaagttgccatatttgtgttgaaaataagggacatatcttggttcatttacaggtagaaatttgcgta

SEQ ID NO: 216567 - DNA, 201 bp, Homo sapiens
ctgggaagccacctttaaaaaaaaaaggtataattaatgtttgataagctgcacattttaaagtatacagtttgatacattttgacatatacatacatcawgaagccatcacaatataataaacatatccaccattcctgaaagtttctttgtgttcctgtaattttcccccagctctcaccccaggttaccactatttta

SEQ ID NO: 216568 - DNA, 201 bp, Homo sapiens
ctaagattttcccctatgttttcttttagaagtttgtaattttagcttttacagttcagtctatgatctgttttaagttaatttttatacatggtatgtgktatctatgttcagtttttttttttttttttttgcaaatggctatccaattgttccagagccatttgttgaaaagattatcccttgtcaaaaatcaattga

SEQ ID NO: 216569 - DNA, 201 bp, Homo sapiens
ccaaagtgctgagattacaggcatgagccactgcacccagcctcatatttactctgttatgtctgctccttcccctcaactattgtttgcaagatgctgtwtatggctgtagtcagttcatactaattttcagcttaaaagagaagaaagtagttttatattctcattcaatttctaccctgaatctaggtttcatcaggt

SEQ ID NO: 216570 - DNA, 201 bp, Homo sapiens
agctctcctctcagtctcctctgatcacctccatctttagccacccctctcctgaatgaatgggaagaaggtccctccagcctaatagatgagaatatgagccctcagtttcctcatctgaacaatgaggataataatggcccctatttgggggagaattaaactgggcacaggaagtgtttgatgatgttaattattagc

SEQ ID NO: 216571 - DNA, 201 bp, Homo sapiens
cagtttttttttttttttttttgcaaatggctatccaattgttccagagccatttgttgaaaagattatcccttgtcaaaaatcaattgaccatacatgtrccagcctatttgtggactcttctcttcttttgatctgtttgtctatttttacaccaataccacagtctcttaattattgtaactttacagtaagtcttga

SEQ ID NO: 216572 - DNA, 201 bp, Homo sapiens
ccaaatccaggtctgtcaggctccagagttcaggcttctcccaccattgccctgcctccatggaccatcggagaattgaactgcatttctaacaaaccgartaatgcaaatgtcgctctgagctccaaaccaaactcagcatgccctgggaccccttcccattctgtggctgtgctggacttctgcctggacccctttgtc

SEQ ID NO: 216573 - DNA, 201 bp, Homo sapiens
cttcgtgtctcaccataaaaaccatgcatgcttttacatttctctcaccagtgggtgttcatgtatttctagttccaaaatgtaaaaaaaaaaaaaaaaaagtgttagagctgatatatatactaacttatcagtgttctattttaagtacaccctctgggagaccctgaagccagggagggatcgcccaggctgggaggt

SEQ ID NO: 216574 - DNA, 201 bp, Homo sapiens
ccttctataagggagcgcccccttgctgctttgaagccctccaggggtgagaattgcagacctcggaaccatctttccctggggggtcctctagtctttcyaggcattgctggggcagccctggagccagtgcccctttgtacttaggaatttgtgacagaagggaaggaggggcaggggcttttgcacagcctcctgacc

SEQ ID NO: 216575 - DNA, 201 bp, Homo sapiens
tccaaagatagccaccatcttgctgtggaaggcatcattacttccctgaataaactgtaaacatcataagatccctgtgcttgcagtgtgacaccttcccwttagtcctgggctggttcccttcagttcaaggtcactgttgacaaagtccagggattggagtgaaaattggaagtaaacttaatagtctatgcagctcta

SEQ ID NO: 216576 - DNA, 201 bp, Homo sapiens
cttttacccatgttttagtaagttgttggcttttaaaaatctgaatataagagttgttttctttttttctttcttcttcttctttttttttttttttttttagtagagacagggtttcaccagttggccaggctggtcctgaatgattgacctcagttgatctgcccgccccagcctcccaaagtgctgggattacaggtg

SEQ ID NO: 216577 - DNA, 201 bp, Homo sapiens
ccaagccctgttactgcctctctggttgactctgcggtgcattttccaaatggttttcctaagcctcaccttggctcagaccaacactcctgatttccccmaaaaccttccatctgggattttggttttatttcctgttctgctaagaagtctgggacaaaggacctgtgcttcctcagctctcctctcagtctcctctga

SEQ ID NO: 216578 - DNA, 201 bp, Homo sapiens
agaagacgaacactgcagaagtgagaaaagaagcaagcctattgaaacaggcggtgtctagcatatttcactgtcccttgggttcagtattttcttacacrgtgtctctgtgattctctccattttctttctcttgctgttatccagggtgctaaggaggcactggatttggggatcacaggcccagaaggaatcgagatc

SEQ ID NO: 216579 - DNA, 201 bp, Homo sapiens
gcccagctaatttttgtattcttagtagagatgaggtttcaccatgttggccaggatggtctctatctcttgacctcgtgatctgcctgcctcggcctccmaaagggctgggattacaggcgttagccaccgtgcctggccaacccatacctttatgagctcacctgattagcccagacccactgaggataatctcctgcc

SEQ ID NO: 216580 - DNA, 201 bp, Homo sapiens
aagccagcaacagactcacctcaagtctctctcctgtttcaaatctctgactagaatctctttcaccaagaaaaaaacccatatcttttttttttttttttgagacagagtcttgctctgtcaccaggctggactgcagtggcacgatctcagctcactgcaacctccacttcccaggttcaagagattctcctgcctcag

SEQ ID NO: 216581 - DNA, 201 bp, Homo sapiens
tcagcctcccaaagtgctgggattacaggcatgagctactgcgcccagcccacatttacatttttaaaataaaaaatcaccttggccccccttcatctcayggctctctctatgcctgatgtcgtgtccctgcaatggctccctgttgtctaagacatcaagtttggatgtatggatcttccccctgggcaacccctgatc

SEQ ID NO: 216582 - DNA, 201 bp, Homo sapiens
gaggtccagcagagtggggcagctgtattgactaagttggtgggaagggaggctgggacggagctgtgcagaggaatttactagaagcagttgcaggagtkatcagcaccccattacatggccattttcaatgtgtacagcctattccagaagctgtttctgcctgcccctggtgtttttgttgggttttgttcaggtgga

SEQ ID NO: 216583 - DNA, 201 bp, Homo sapiens
ttgcattgcccctggcccaccccttcctccaatgttcagctgtgtggagccatactagccctggcactcttggccacagctctgacatgggccccaggccrttggcatcctccccctttaagctggctcagtttcagctgctgaccaggagtgtgggacagtcttgacctgccccccaggcatgtacctattttcttgact

SEQ ID NO: 216584 - DNA, 201 bp, Homo sapiens
tccacacttactaataatctgtgtgatatcaagcaaattacctaacgcttctgaaccccactggcctcattcactgcagtgttgctgtgaggataagaaakgaaatacataaaacatctagtcctgtgcatgacacataatagaggctcagtaaatttgactgggtgagtatagttttcccctgattttattaacaataca

SEQ ID NO: 216585 - DNA, 201 bp, Homo sapiens
aatcttgtgggcagggttgctggggagcaattgctacaggaaattcagcaaaacatattggagcggcagggcagtcctgtagaagatggtaagagagtgamtcttcaaaggtctttgtcctgataaagctggaagtgaccaacgcattgttctctccaatgccgtgatgtcagcaaataaatcttatctgaagggccacaa

SEQ ID NO: 216586 - DNA, 201 bp, Homo sapiens
ctaattttagaaaatgtccatcaccccacacagacactttgaggccatttgcagacactccccattcccacccccagccctaggcagccactgctcaaaayagatcaaaatagagaaaatactctatatatagatattccctttctgcgtcattcttagtgttttattctttacaatgtttttcactgttgtgaatagaac

SEQ ID NO: 216587 - DNA, 201 bp, Homo sapiens
aggtagcccgggtttgtggtcctttcatggttaagaaaatacatcctttcctcctgttttccccagcccacacctgaggtctccagctgagaagagccccygccccgtttcctggcagtgggtgtgagccctcttccagcatttggcccttgttctaggaagcagccactccaggagctgctggagacccttgagctgcag

SEQ ID NO: 216588 - DNA, 201 bp, Homo sapiens
ccgagggtcccgctttctagacctgggggatggggattcgcctcttctaagatggtgcaggagcagtggagggaagcgactggccccaccgaagatggctstcttagataataaggtgcttgtctcatccatgtccttagctttcagttctggttgccaaccactggaaaactcccactcccatcccgttatgttcacaac

SEQ ID NO: 216589 - DNA, 201 bp, Homo sapiens
ggtgactggggacaggggagttggttttggacaggttgagtgtgtgctgcctgtggaacccagtagaatggtccagtgggcattcggatggtattaaaatsctcccgctccctcattagctagactttcagtttcctgtttgcttcagaaagtagagaactgggggttgtgaaaagctcagtcactgagcaggtaaagttt

SEQ ID NO: 216590 - DNA, 201 bp, Homo sapiens
ctgtgctcttaaaagccctgtgagcttgggcaggtcccttcctgtctctgacctcagctccttcacctgtaaaatgagaggcacacaccagcgatcactcrggttcggtggcttcctggttatggttctgacctttcttcttccagggaaggttgtgctggcggagaccaccactgcacatgccacgctgacaggcttaca

SEQ ID NO: 216591 - DNA, 201 bp, Homo sapiens
atcacgtttatgaacaggaaattaaaataggaaaaagagttccccccttttaaattacagtcatggttgtcagatgggagaaaatgtgaggttcagacttracggtcttgaacttcacaggctgggcttcccggtgggctctggtgctggaggctgttctctgcctccccgtatcatgcagttcctgcaaccttgccctga

SEQ ID NO: 216592 - DNA, 201 bp, Homo sapiens
tgtgtatctgaatatctctatgtctttagatcttcttcatgctgcctctgttgtcctgtctccctctcccaaagtctgtttgtctgtcttgttgccccccyggccccgtgctttttaaatttggctcctgctttgtggcactgtcttgaatacacaggtttgactgctggttgacatttatttatttgtttgtttgtttat

SEQ ID NO: 216593 - DNA, 201 bp, Homo sapiens
ctccatcttcacacagtctttcttccgtgtcacacatgtctggtgtgtctgtctcctcttcttataaggacaccgataagactggattagggcccacctayatgacctcactttatcttaatgattacattaaaggccctaaatagtgccatgttctgaggttctgggtgttagaacttcagcagaagaattttgaaggga

SEQ ID NO: 216594 - DNA, 201 bp, Homo sapiens
cacgtggcttacagcagagatcaagtgcatcccagctcccccgacagcctcccatcctgggccagacatgtccagggatggcagtgtggcctgactcctcyctgcaaatgtgctcctaaacttcacactccctaaactccctcactaccaccacctccacccacacaagttgacaaactttgccgatgtgatggaatcaga

SEQ ID NO: 216595 - DNA, 201 bp, Homo sapiens
ttgctgccttgtagtctcatagtattttgaagtcatttctgttaaaactgaacttttctcctttcctgtttcccagctggactctaagctccttaagatgmttacatttcttcttctggagcatctgatacacataatagagggcacatagtctgcgcattagtgctacctacaaattatgcttcttgttcctcatgaata

SEQ ID NO: 216596 - DNA, 201 bp, Homo sapiens
gggcacatagtctgcgcattagtgctacctacaaattatgcttcttgttcctcatgaatatttactgggctcctactatgtgcaggcactgggctaggtgycttatatgctgtatgtcatttaattctcatagtaactccatgagggaggtattactatctccgttttacaaatggagaaacggagctcaaggagattaag

SEQ ID NO: 216597 - DNA, 201 bp, Homo sapiens
aactccatgagggaggtattactatctccgttttacaaatggagaaacggagctcaaggagattaagtaacttgctgaagatcttacaactaataagtgayggagctggaatttaaacgtagatctgcctgcctgaatgtctgattcttgtcaggatactatagtgagagcaaagtaaggtcaggaagtgggaccatgccc

SEQ ID NO: 216598 - DNA, 201 bp, Homo sapiens
gctttcgattctagcatcaaagctcagacaagaattctcagtaagctattatcacagtgctctttcaggttctccaacctccaagcatgtgttacgagcaygtaagcaaacccatcttgtcatttataacattgacataacgattatgcagcaatttttccagcataagtattcctagttttcctcttaccttaaagctgc

SEQ ID NO: 216599 - DNA, 201 bp, Homo sapiens
gctgtttctaatttttgcacttacaaataatgctgaggagaacctctttgttcaggagtgtgtgtcagcatttctgattattattattattattattatttattttttttttttttgtgatagaatctccctctgttgcccgggctggagtacaatggcgctgtctcggctcactgcaacctccgcctcccgggttcaagc

SEQ ID NO: 216600 - DNA, 201 bp, Homo sapiens
aagatcttacaactaataagtgacggagctggaatttaaacgtagatctgcctgcctgaatgtctgattcttgtcaggatactatagtgagagcaaagtamggtcaggaagtgggaccatgccctggatgatgtggtaaaggctgtagacccagaaggtaggagtggaaagtaaaaggaagtttaggagtgcaatcaatta

SEQ ID NO: 216601 - DNA, 201 bp, Homo sapiens
agaccctgaggttgaagatgcgtgcaaaatgtttgaacaaaattgcttcatgaaatttgagagcataaaacaaaacaatatatccaaattaacattttctrtatcgtggttcaaatatacgtgtgtaactaagtaaatgatataaacagacatttgattatgccatcaatattatgttattatatgatacaacactatatt

SEQ ID NO: 216602 - DNA, 201 bp, Homo sapiens
aactgaatcaagagacaaaagacagactgaaaaggccttcaggtgttagaagaaatttcaaactataaactctgcctttgggggatgacattcctttgagyatctgaggaatactttggaccaggggtcaccaacccccaggtcatgaaccggtacaggaccgcagagcaggaggtgagcagcgggccagctgagagcccc

SEQ ID NO: 216603 - DNA, 201 bp, Homo sapiens
ccagctgtgctcttaaaagccctgtgagcttgggcaggtcccttcctgtctctgacctcagctccttcacctgtaaaatgagaggcacacaccagcgatcrctcgggttcggtggcttcctggttatggttctgacctttcttcttccagggaaggttgtgctggcggagaccaccactgcacatgccacgctgacaggct

SEQ ID NO: 216604 - DNA, 201 bp, Homo sapiens
ttgggggatgacattcctttgagcatctgaggaatactttggaccaggggtcaccaacccccaggtcatgaaccggtacaggaccgcagagcaggaggtgrgcagcgggccagctgagagccccctgggctccacctcctgtctgatcagtggtggccttagattctcatagaagtgtgaagcctattgtgaactgcacat

SEQ ID NO: 216605 - DNA, 201 bp, Homo sapiens
tgcacacttgggctgggaggtgcacgtgaacacacatcaacgcacagctaagcttgtcctatctcacacacacacacacacacacacacacacacacacamtcagctctggcttctgacaactgccccttagctcttctgtgcctttgaactaatctcactgaacaagtggtcagcagctcccatttcttaccaccctctc

SEQ ID NO: 216606 - DNA, 201 bp, Homo sapiens
gacctggcacaaacatcctcagagtgtagtccggtgtaactaccccattcaccagtgctgttactgattccacagccacttttttttttttttttttttttgagaacgaagtctcgctcttgtcccctggctggagtgcaatggcgtgatcttggctccctgcaacctccgcctcccaggttcaagcgattctcttgcctc

SEQ ID NO: 216607 - DNA, 201 bp, Homo sapiens; identical to SEQ ID NO: 38817

SEQ ID NO: 216608 - DNA, 201 bp, Homo sapiens
ctaactctaggtcatcacgtttatgaacaggaaattaaaataggaaaaagagttccccccttttaaattacagtcatggttgtcagatgggagaaaatgtkaggttcagacttgacggtcttgaacttcacaggctgggcttcccggtgggctctggtgctggaggctgttctctgcctccccgtatcatgcagttcctgc

SEQ ID NO: 216609 - DNA, 201 bp, Homo sapiens
ctggggacaggggagttggttttggacaggttgagtgtgtgctgcctgtggaacccagtagaatggtccagtgggcattcggatggtattaaaatgctccygctccctcattagctagactttcagtttcctgtttgcttcagaaagtagagaactgggggttgtgaaaagctcagtcactgagcaggtaaagtttgattg

SEQ ID NO: 216610 - DNA, 201 bp, Homo sapiens
gtgactggggacaggggagttggttttggacaggttgagtgtgtgctgcctgtggaacccagtagaatggtccagtgggcattcggatggtattaaaatgstcccgctccctcattagctagactttcagtttcctgtttgcttcagaaagtagagaactgggggttgtgaaaagctcagtcactgagcaggtaaagtttg

SEQ ID NO: 216611 - DNA, 201 bp, Homo sapiens
ccgcagactgagtttcttaagagcagggcctgtggttttttcagagttgtctccagtggaaaggagtgaagttatagaacactttagtgcacacaaatgtyctaaacttttaagattttaaaaatttaaaaaagatattctccaaaagcaccctgggtagggagcatgttaggcaactgtgctacgatattatccaaacaa

SEQ ID NO: 216612 - DNA, 201 bp, Homo sapiens
tgttaggcaactgtgctacgatattatccaaacaagccagtgcgggcttagaggtcccaagaccttgggaaccctgaggctgaagccctgcaggctgctcygacagcagcccacgtggaaagctggaattcagcacaattgggcctggaggctgggccatcactcacactgcggtgtctctactgagctgctttagatctg

SEQ ID NO: 216613 - DNA, 201 bp, Homo sapiens
ttatttactgagagctcttacttctattgaagatgatgtccttggctttcgattctagcatcaaagctcagacaagaattctcagtaagctattatcacastgctctttcaggttctccaacctccaagcatgtgttacgagcatgtaagcaaacccatcttgtcatttataacattgacataacgattatgcagcaattt

SEQ ID NO: 216614 - DNA, 201 bp, Homo sapiens
ctgctccagactagactcatgtgagccaggtgctcccagtgtattgctggcaggagaagggtgtgtcagggccactgtggcaactacaatagggatttccrgcttaacgtcacagatttccatgattatagaaaaggaggcgtttaggctggttttgctaatcagatcatttacccaagtacccaggctgagaactgattt

SEQ ID NO: 216615 - DNA, 201 bp, Homo sapiens
ccgactgtgccaaggcaaggatgctccctggcttaaccctctggcatcagggctacacctgctcactctagccaagtccagggaagagaggtggtaggccractctccttgctttctcctctgagaattctcccgggccctgcaactgatgttttgattatgaaatggggagccccatcctcataaattcaggatcctctt

SEQ ID NO: 216616 - DNA, 201 bp, Homo sapiens
attttcccccagctctcaccccaggttaccactattttatgtcactatagattagtttgcattttctactatttctatataaatggagcaatgcgatatgyattcctttttttgtctggtttctttcgctcagtagtattaagtttttggctgttaaagataaagctactgtgaacattcatatacatatatttgtgtgga

SEQ ID NO: 216617 - DNA, 201 bp, Homo sapiens
tgccattacccagaaaccaagttggcccacgagtgggtccgctgaggagtgccccctcactgccctgatcagtgcctgtgtttcagagcccttgaatatakgtcctgtttggcacttctgaattggtagagaaacacacaccagattcgactgaaacacagagggtatgcctgtgagaacaggagagagcaaggggtggac

SEQ ID NO: 216618 - DNA, 201 bp, Homo sapiens
cttgaatataggtcctgtttggcacttctgaattggtagagaaacacacaccagattcgactgaaacacagagggtatgcctgtgagaacaggagagagcaaggggtggacacacacactagactttctttgttacttaatacaagggaaagagcaaggctttggctgtggtcgtaataccaataattatcaccgccatta

SEQ ID NO: 216619 - DNA, 201 bp, Homo sapiens
agcccttgaatataggtcctgtttggcacttctgaattggtagagaaacacacaccagattcgactgaaacacagagggtatgcctgtgagaacaggagagagcaaggggtggacacacacactagactttctttgttacttaatacaagggaaagagcaaggctttggctgtggtcgtaataccaataattatcaccgcc

SEQ ID NO: 216620 - DNA, 201 bp, Homo sapiens
caggaggatcacctgagcccaggaggttgaggctgcagtgagccgtgatgatgccactgcaatccagccaaggtgatagagtatatatatatatatatacwcacacacacatacatatatatacgcacacacacgcacacacatacgtgtgtgcgtgtgtgtgtgtgtgtatagcatcattttctccacgggtgaaatttc

SEQ ID NO: 216621 - DNA, 201 bp, Homo sapiens
gcaggaggatcacctgagcccaggaggttgaggctgcagtgagccgtgatgatgccactgcaatccagccaaggtgatagagtatatatatatatatatayacacacacacatacatatatatacgcacacacacgcacacacatacgtgtgtgcgtgtgtgtgtgtgtgtatagcatcattttctccacgggtgaaattt

SEQ ID NO: 216622 - DNA, 201 bp, Homo sapiens
ggcaggaggatcacctgagcccaggaggttgaggctgcagtgagccgtgatgatgccactgcaatccagccaaggtgatagagtatatatatatatatatacacacacacacatacatatatatacgcacacacacgcacacacatacgtgtgtgcgtgtgtgtgtgtgtgtatagcatcattttctccacgggtgaaatt

SEQ ID NO: 216623 - DNA, 201 bp, Homo sapiens
aggcaggaggatcacctgagcccaggaggttgaggctgcagtgagccgtgatgatgccactgcaatccagccaaggtgatagagtatatatatatatatatacacacacacacatacatatatatacgcacacacacgcacacacatacgtgtgtgcgtgtgtgtgtgtgtgtatagcatcattttctccacgggtgaaat

SEQ ID NO: 216624 - DNA, 201 bp, Homo sapiens
cctctggctttatccctgtgcacagttttgcatggcattgacacaaatcccctacagtccccctgctaaagaattctgctctagagggaccacattagacraataacgcattcctgccctattaccctgtttacacattctctactgttttagaagagggggagaaacttctcatttcttcaaagcctaaaaatgcagatg

SEQ ID NO: 216625 - DNA, 201 bp, Homo sapiens
gaggcaggaggatcacctgagcccaggaggttgaggctgcagtgagccgtgatgatgccactgcaatccagccaaggtgatagagtatatatatatatatatacacacacacacatacatatatatacgcacacacacgcacacacatacgtgtgtgcgtgtgtgtgtgtgtgtatagcatcattttctccacgggtgaaa

SEQ ID NO: 216626 - DNA, 201 bp, Homo sapiens
ctctactgttttagaagagggggagaaacttctcatttcttcaaagcctaaaaatgcagatgggtggttggttatccatgagggattgagggggaggcctygagggacaaggagcaggacacaggatgtggtggcactgccattacccagaaaccaagttggcccacgagtgggtccgctgaggagtgccccctcactgcc

SEQ ID NO: 216627 - DNA, 201 bp, Homo sapiens
tgaggcaggaggatcacctgagcccaggaggttgaggctgcagtgagccgtgatgatgccactgcaatccagccaaggtgatagagtatatatatatatatatacacacacacacatacatatatatacgcacacacacgcacacacatacgtgtgtgcgtgtgtgtgtgtgtgtatagcatcattttctccacgggtgaa

SEQ ID NO: 216628 - DNA, 201 bp, Homo sapiens
ctacttgggaggctgaggcaggaggatcacctgagcccaggaggttgaggctgcagtgagccgtgatgatgccactgcaatccagccaaggtgatagagtrtatatatatatatatacacacacacacatacatatatatacgcacacacacgcacacacatacgtgtgtgcgtgtgtgtgtgtgtgtatagcatcatttt

SEQ ID NO: 216629 - DNA, 201 bp, Homo sapiens
ccaggcttcagcttgaacgcccaagactggtgctgtgcacacttgggctgggaggtgcacgtgaacacacatcaacgcacagctaagcttgtcctatctcwcacacacacacacacacacacacacacacacacactcagctctggcttctgacaactgccccttagctcttctgtgcctttgaactaatctcactgaaca

SEQ ID NO: 216630 - DNA, 201 bp, Homo sapiens
aacatagatgagaggaatgtatgccatcttcagggaagagagggatgggaataggatggagggctttagttgtatcagaaatatttcatttcttttttttwaaaaaaagcatctgaggtaaacatggcaaaaatgttaacatctgttaagtttgagtagtggaaatatgggtatatgttttattattttctgtattttact

SEQ ID NO: 216631 - DNA, 201 bp, Homo sapiens
aaaaaaattaataatattttcccagcttttattgatgtttactctatattaaaaatggcgtgagccaagatcatgcaactgcactccagcctgggcaacarcgagactctgtctcaaaaaaataaaaaaacaaaaaacggccgttggaaaaatatttccgtaccttctgcaaaactgcagtcaaatatatatttattttcc

SEQ ID NO: 216632 - DNA, 201 bp, Homo sapiens
ggcttctaggagctgagggtgtcctctagctgagagcctgcaaccatgtggaaatgaattctgccaacaatgtgactgagtgtggaaataagttctcccccaggcaggtctccagatgaaaacatagctcatccagcatcttgattgcagccttgtgaggctctaagcagaggacccagggctcctgacccacagagtgtg

SEQ ID NO: 216633 - DNA, 201 bp, Homo sapiens
tatatacctaggagtgaaattactgggtcagggatacacacatgttctgttttagtaaattgtgccaaatgctaagattaatggagaaattaaaaaaaaaatcctctgaagtatacaatgcagctgtttaaaccaaaatcctaaagactggcacaatattatggctggatcagaggttgacttccaactcttattcttcag

SEQ ID NO: 216634 - DNA, 201 bp, Homo sapiens
gttagatgacaagttaaaggtgaatctttagcataaagttatcattttaaattgccattcattaaaaaaaaaggcaggaatgtttttgttcccagactgggcgatacttggcattgtagaactcattgatgccacttacatttgccactaagttaactgagaacctgttggttctcttaacccagccttgaaatctcagga

SEQ ID NO: 216635 - DNA, 201 bp, Homo sapiens
gaagtggttcagcaatcccaagagaggcagatccatccgaacaaatgatagcttttccagcagcattaagagctgcagacatgtttgcactgtgcttaccmgtttacagagcacatccactcgtcatttgattcttagtgcagtattgttccctctataaagattcagttggccttaatctatatacataccagtaatagt

SEQ ID NO: 216636 - DNA, 201 bp, Homo sapiens
gaaaagaaaaggaagtggttcagcaatcccaagagaggcagatccatccgaacaaatgatagcttttccagcagcattaagagctgcagacatgtttgcaytgtgcttaccagtttacagagcacatccactcgtcatttgattcttagtgcagtattgttccctctataaagattcagttggccttaatctatatacata

SEQ ID NO: 216637 - DNA, 201 bp, Homo sapiens
tagccaacagaacgctgaaggtgaaggaggttaccatgagcaatagagaaactaccgagctggttattttttttttttcctctggtacttcgggaggatgkgaataaaagatggaagataattttaatgtgaaaagaaaaggaagtggttcagcaatcccaagagaggcagatccatccgaacaaatgatagcttttccag

SEQ ID NO: 216638 - DNA, 201 bp, Homo sapiens
cagagggccaataagtagccaacagaacgctgaaggtgaaggaggttaccatgagcaatagagaaactaccgagctggttattttttttttttcctctggwacttcgggaggatgtgaataaaagatggaagataattttaatgtgaaaagaaaaggaagtggttcagcaatcccaagagaggcagatccatccgaacaaa

SEQ ID NO: 216639 - DNA, 201 bp, Homo sapiens
gagagcaaggggtggacacacacactagactttctttgttacttaatacaagggaaagagcaaggctttggctgtggtcgtaataccaataattatcaccrccattatctattggttaaaggtgggagggccctgggtctatgccaggggagatgttgctccccaggggaaatttgacaatatctagagatatttttgctt

SEQ ID NO: 216640 - DNA, 201 bp, Homo sapiens
tgtttcatttcctcacagggctgctgtaagattgctaggaaatcgtgtgtgagctcttgagatgatgtggtgctgatggtgttgacacctacttgacagckgggaaaacgggcctgggaggacgtgcccatagtcgcatggcacagccaaggtcactgccctcacctgtgctcaccctgcggcccaccccatttcctcctc

SEQ ID NO: 216641 - DNA, 201 bp, Homo sapiens
ctgcggcccaccccatttcctcctcacctcccctctgtgcccgtctcatcctcactcactcccattcatttccctctaaaacagggccctgaaatccagaygcgatcagcctagtggtatcactgccccagaagaagggaagttggtcattttcacccccagacgtttctgtaagcctcctgagagtgcccactggcctgc

SEQ ID NO: 216642 - DNA, 201 bp, Homo sapiens
actaactctaggtcatcacgtttatgaacaggaaattaaaataggaaaaagagttccccccttttaaattacagtcatggttgtcagatgggagaaaatgygaggttcagacttgacggtcttgaacttcacaggctgggcttcccggtgggctctggtgctggaggctgttctctgcctccccgtatcatgcagttcctg

SEQ ID NO: 216643 - DNA, 201 bp, Homo sapiens
gtgcacacttgggctgggaggtgcacgtgaacacacatcaacgcacagctaagcttgtcctatctcacacacacacacacacacacacacacacacacacactcagctctggcttctgacaactgccccttagctcttctgtgcctttgaactaatctcactgaacaagtggtcagcagctcccatttcttaccaccctct

SEQ ID NO: 216644 - DNA, 201 bp, Homo sapiens
aaacatagatgagaggaatgtatgccatcttcagggaagagagggatgggaataggatggagggctttagttgtatcagaaatatttcatttctttttttwaaaaaaaagcatctgaggtaaacatggcaaaaatgttaacatctgttaagtttgagtagtggaaatatgggtatatgttttattattttctgtattttac

SEQ ID NO: 216645 - DNA, 201 bp, Homo sapiens
gagctgcagacatgtttgcactgtgcttaccagtttacagagcacatccactcgtcatttgattcttagtgcagtattgttccctctataaagattcagtwggccttaatctatatacataccagtaatagtagatcctgcttttctgattccagtcacctcctcaaacatacaccccttttccatgcatattttcgtatg

SEQ ID NO: 216646 - DNA, 201 bp, Homo sapiens
tgctttccagagggccaataagtagccaacagaacgctgaaggtgaaggaggttaccatgagcaatagagaaactaccgagctggttattttttttttttcctctggtacttcgggaggatgtgaataaaagatggaagataattttaatgtgaaaagaaaaggaagtggttcagcaatcccaagagaggcagatccatcc

SEQ ID NO: 216647 - DNA, 201 bp, Homo sapiens
cttgctttccagagggccaataagtagccaacagaacgctgaaggtgaaggaggttaccatgagcaatagagaaactaccgagctggttattttttttttttcctctggtacttcgggaggatgtgaataaaagatggaagataattttaatgtgaaaagaaaaggaagtggttcagcaatcccaagagaggcagatccat

SEQ ID NO: 216648 - DNA, 201 bp, Homo sapiens
tttgtaattttagcttttacagttcagtctatgatctgttttaagttaatttttatacatggtatgtggtatctatgttcagtttttttttttttttttttgcaaatggctatccaattgttccagagccatttgttgaaaagattatcccttgtcaaaaatcaattgaccatacatgtgccagcctatttgtggactctt

SEQ ID NO: 216649 - DNA, 201 bp, Homo sapiens
gtttgatttcattgtgcccataggatcattgtgcttttcttaccttctctgagcccatcagataattgccatcctattgggattttatgaccgcttgatayggagtgagatcttctgaagtataagagtgaagagcacatatagaactgtgaaccgtggttattcggaatttcaaaggacattgatctcttactctaaagc

SEQ ID NO: 216650 - DNA, 201 bp, Homo sapiens
tttatttatttatttatttattttatttttttgagatggagtcttgctctgtcacccaggctggagtgcagtggtgcaatcttggctcactgcaacctccrcctcctgggttcaagcaattcccctgtctcagcctcccaagtaactgggaatacaggcgcccgccaccatgcccagctaattttgtatttttagtagaga

SEQ ID NO: 216651 - DNA, 201 bp, Homo sapiens
tcccaaagtgttaggattacaggcgtcagccatcatgctcagcttacttaaacctttttaaaactccacatttacatttttatttatttatttatttattwtatttttttgagatggagtcttgctctgtcacccaggctggagtgcagtggtgcaatcttggctcactgcaacctccgcctcctgggttcaagcaattcc

SEQ ID NO: 216652 - DNA, 201 bp, Homo sapiens
ttatttattttagagatagaatctggccctgtcacccaggctggagcgtagtggcatgatcatagctcactgtggcgtcaaccacctgggctcaagccatmctcccacctcagcctcctgagtagctgggactgcaggcacatgccactgtgcccagctaagttttttatttttattttttgtagagaccggatcttgcta

SEQ ID NO: 216653 - DNA, 201 bp, Homo sapiens
aaactcccactcccatcccgttatgttcacaacctaaacagagttggggggtgcagggcttagccaatgcgagtggagtgccatcgataggggcgtgggcraaggtggcctctgtggagggcagtacgcaccacggcatggggatggtcattgtattctgtcccatagccttggtgggtgccaggcggcagcagctcttac

SEQ ID NO: 216654 - DNA, 201 bp, Homo sapiens
actgcaacctctgcctccccggtttaagcaattctctacctcagcctcccgagtagctgggattacaagcacccaccaccacgcccggctagttcttgtayttttagtagagacggggtttcactatcttgggcaggctggtcttgaactcctgacctcatgactcacccacctcggcctcccaaagtgctgggattacaa

SEQ ID NO: 216655 - DNA, 201 bp, Homo sapiens
cctcgagggcctgcctgtgccttagccacccacagccttggatggaggatggctttttttttcatcttttcagacagagtctccctctgttccccaggctsgagtgcattggggctatcttggctcactgcagcctccgcctcctggattcaagcaattctctcacctcggcctccagagtagctgggattacaggcgccc

SEQ ID NO: 216656 - DNA, 201 bp, Homo sapiens
ggcatgcactaccacgcccagctaatttttgtaattttagtagagatggagttttatcatgttggccaagctggtctcgaactcctgacctcaagtgatcygccggcctcagcctcccaaagtgctgggattacaggcatgagccactgagcctggcctaaaaaaaggcttttgaacatatattttcagattatatgttcc

SEQ ID NO: 216657 - DNA, 201 bp, Homo sapiens
aaagcagaaagctatgggcaaggaagacttcaccaagatcccacatggagtgagtggcgtgcaggaccgcatgagcgtcatctgggagagaggagtggtaygtttcctagagccccgccccgatctgatccctgctctaatccccgtttcatccccgttctaatcccaataagagtattcactcctcagatcctgtcaaag

SEQ ID NO: 216658 - DNA, 201 bp, Homo sapiens
atcctgtttgtccgcttggcaggttgcttttgctacttttgtcttcaaaatgcgctctcgtggaatgaagcctataaatgtggctcacttcctttcttctytttcttcaactccagtattctgtttctggtaaattctggccaaaatttctttcccgtctttaagctctgcaatgacacttcctgctcatggggatccaga

SEQ ID NO: 216659 - DNA, 201 bp, Homo sapiens
tgctcgttcttcctgctgccctaccacccctccggcctagctgtgggggctgggattggcatagctgggctcctctctccactttcttctgtgactcaccygtaggctgtaaagagccctgtgaaggcttcatgaagtgacttcccctcccctgccacctggaggacatccctctaccccctccatcggtacttagtctgc

SEQ ID NO: 216660 - DNA, 201 bp, Homo sapiens
cacagcatgactaggtcttcggctcagagcctcgcaagccgccatccaggtgtcaatgggctgcattctcatctggagtccagggttctctgccaagctcrtgtagttgtggcagaattccatttcttggagttcaaggactgaggtccctgtttccttgttggctgtcagcctggggcggatctcagtgcctggaggctg

SEQ ID NO: 216661 - DNA, 201 bp, Homo sapiens
taatacgatgtaggaccataaatgacctctgcagtaataactgctcgtacttctgtgttgcctctcatgtgccagagcagttggaacagctttacacataktaattcgtctgctctcctgcaactctctgatgtaggtatagtattatgggcacagaaaagtaacttgcacaaagccacacagtttacaagtgacagagtt

SEQ ID NO: 216662 - DNA, 201 bp, Homo sapiens
ggagatgatggaattatttctggggcctggagacagctggcaagagcacgggaagcacagcagggctgagttatctgccaggagtcggtgccgggtgggcsaggtgctggtggtggtgtggtgcctcctctggtcacagacgcttgtccttccccagctaaagccccaatcgggagtcaggagtccttgtctcccatgtgt

SEQ ID NO: 216663 - DNA, 201 bp, Homo sapiens; identical to SEQ ID NO: 38812

SEQ ID NO: 216664 - DNA, 201 bp, Homo sapiens
aatgtcggctctgaatcaggaaaacctgggtccaagtccaggctctgccacttacacactgcaacatggggcaagtcacttaacttccctgagcctctgtctcctcatctataagatgggatggagtggctgtgaggattcactcaggccatgcacacagtgagcctccaggagagggtgtctgtggtttgttagcaggca

SEQ ID NO: 216665 - DNA, 201 bp, Homo sapiens
aacaaagcttaacactgaacttgtgaatgcttgttgccagcaggttggggttggagagctgatgagagggaattggtatacaattccatgagagtagaacyacctccaccatctcacttcagctagactctaagttcggcttttctctgctatcttcactcttaaacattgctatcccaaggctctcactgaagtctcctg

SEQ ID NO: 216666 - DNA, 201 bp, Homo sapiens
ccttgaatataggtcctgtttggcacttctgaattggtagagaaacacacaccagattcgactgaaacacagagggtatgcctgtgagaacaggagagagsaaggggtggacacacacactagactttctttgttacttaatacaagggaaagagcaaggctttggctgtggtcgtaataccaataattatcaccgccatt

SEQ ID NO: 216667 - DNA, 201 bp, Homo sapiens
cccttgaatataggtcctgtttggcacttctgaattggtagagaaacacacaccagattcgactgaaacacagagggtatgcctgtgagaacaggagagarcaaggggtggacacacacactagactttctttgttacttaatacaagggaaagagcaaggctttggctgtggtcgtaataccaataattatcaccgccat

SEQ ID NO: 216668 - DNA, 201 bp, Homo sapiens
tttcttgtcctcattattattctttctaatactcgaattttatttgttaagggagaaaaaaggcttaaaacaaagcctcattatcctcatctggataatgwtggcattgtgagactatgcaatttcttgctttgtttggcttaaagaacctctatatgtgcgtgaaataaatgccaatttaacgttttagatttctgctac

SEQ ID NO: 216669 - DNA, 201 bp, Homo sapiens
gatttccagagagggaattctgagtttgaaatcagtaaagagtgcttgtctttggtgtcccaggcctgttgctagttataatacttaactgtatttttaaragaacaagatatgttcagtcattatgaagtgagaatcaggagagccccactgcatgggcggcctgtgcatgctctgccttctttagaagacgaacactgc

SEQ ID NO: 216670 - DNA, 201 bp, Homo sapiens
caggcgggtggaggccgcctgggtttgaggagggaggacgggagcgaggagaagacccgcgctgtgcgggggaggggggcctcctgggaaggggagcctcycgaggagggaggggcaagcagctgagaggcggtctcgggcccgaggatcctcagctccaggcgcggggccccgcggcccaggtggccggctgggcgtggc

SEQ ID NO: 216671 - DNA, 201 bp, Homo sapiens
caggatttgctttcttaacaagattagtgtgtaaggtgaaggactgtgctgtggctgttggcttttgcccaggacagatgatagctgtcaaagtgaaggcytcttgtctgagtgtcctttctggccatagggagtcagcagtaggctatgtcttgctggttttaaaggatggtgttttgaggaggtgcctcacagaattta

SEQ ID NO: 216672 - DNA, 201 bp, Homo sapiens
gcttccatcagtgttgagggggagccagtatctctcccatacacatgcatgcacacacacatgtgcactcacatacatgcacgcatgcacacatgtacacrtatgcacatgctctttaggaggtatgagaaaactccagcccctggactcaatgtttaagaagccttggtcacttgcagtgatttgggtcttgggcagagt

SEQ ID NO: 216673 - DNA, 201 bp, Homo sapiens
  misc_feature (1)...(201): n = A,T,C or G
gcctctctggtaagagtcagggggccacgggaggaggatgggggtctgggagaagtggcccacctaggcagtgggacttacgcctgcttttcttttgtgtnctctcctccctcccgttgcctatttccagggatgagtgctggtttggatattagactcacatagacattagtggggacaggagggctgtcctggtccctg

SEQ ID NO: 216674 - DNA, 201 bp, Homo sapiens
ccacccacagcctggagtttactgggggagacaagccccatacacaaaccatcctgctgtgagaacagagggctaaaccagagggatgccaatgggtcagygcctgcctgcccaggctcctgtgtgccctgctttgggccaggcgcagcttgtggcagaagagatgaggtccctgttggaggtgctggtagcccatgggga

SEQ ID NO: 216675 - DNA, 201 bp, Homo sapiens
atggcataccctcatttttctctctcgcttactcactgaggcatatgtacaaaggcccatgtgccaacaggctggccaatgacctgcatgtacgagagacygtatgcctaggcatggggcagtgaagttggcacagtgggcagttaataatgtcggctctgaatcaggaaaacctgggtccaagtccaggctctgccactt

SEQ ID NO: 216676 - DNA, 201 bp, Homo sapiens
aaaggcccatgtgccaacaggctggccaatgacctgcatgtacgagagactgtatgcctaggcatggggcagtgaagttggcacagtgggcagttaataakgtcggctctgaatcaggaaaacctgggtccaagtccaggctctgccacttacacactgcaacatggggcaagtcacttaacttccctgagcctctgtctc

SEQ ID NO: 216677 - DNA, 201 bp, Homo sapiens
gggtcttgctgtcttgcccaggccgaagtgtagtagcgcagtcacagctcactgcagcctcaacctcctgggctcaagcgatcctcctacctcagcctcckgagtagctgggactatgggtgcacgccaccatgcctagctaatttttgtattttttgaagagacagggtttcaccatgttgcccaggtggatttcgagct

SEQ ID NO: 216678 - DNA, 201 bp, Homo sapiens
agcccttccctttcatctgccaccgtcttcctcagagctgccctgtgctatgctggctttagtctgctagaacatgagctttttcttctgcaaatttgtakgcataacagctttacggaagtgtctgtcacttctcctgggtctggtaacattttccaagttttaaacccactcattaattagtgtctttttggcctcata

SEQ ID NO: 216679 - DNA, 201 bp, Homo sapiens
gagcccgtctcaccctctgtgcttccttccctgcaggctctcagatcgatgaccatgttccaaagcgagcttcagctcggatcctcgctcctcccggaggmaggtcgagtggcatttggtaaaggcattgccaagccccccgagtgaggacgcaccgccgccaccagcccgcaactctccagccgaagctgcaggggcagg

SEQ ID NO: 216680 - DNA, 201 bp, Homo sapiens
aatagttaatacatttccttaattattggctagagctgctctacacattgacttaaccactagccacatgtctgtttaaattaaaatgaaataaaatttamaattcagttcctcagtcatacgaaccacctttcaggtgcccagtagccacatgtagctagtagctgccacgctaaacaacaaatcaggggtcagcagacc

SEQ ID NO: 216681 - DNA, 201 bp, Homo sapiens
gtctggaatgaaaggaatgtggtatgcttttttcctactgggggcccagcttctgctctgagaagcatcgaggctgtcctggtctgtgactgaggctggcrccccctgagcctttctcagttcagcctctgtgcctcctttgtgtctgtgcccctggcctctggctttcctgtcctccccctgcccaggccccagggtcag

SEQ ID NO: 216682 - DNA, 201 bp, Homo sapiens
gccataaatagataactagaaaaataaatacaatgaaagccaacagtattattaaattccaattacaaactagaccttggtctttcctttgctaaaaagasagattagtaagtatgaagtattagaagatacacacccaccagctgagatattttccttgatgtaatcagacatgtagaaagagaactggaaagggaactg

SEQ ID NO: 216683 - DNA, 201 bp, Homo sapiens; identical to SEQ ID NO: 38819

SEQ ID NO: 216684 - DNA, 201 bp, Homo sapiens
cactgtcctgaccacctaagccctaagtccatgggccagcatcaaaggtgaccaagggtttgagacccacccccagagcctggttgacttgacactttctrcaacatttcaggttggaggaaagatggatgagaaccgttttgtggccgttaccagttccaacgcagctaagcttctgaacctgtatccccgcaagggccg

SEQ ID NO: 216685 - DNA, 201 bp, Homo sapiens
tgcacttacaaataatgctgaggagaacctctttgttcaggagtgtgtgtcagcatttctgattattattattattattattatttattttttttttttttgtgatagaatctccctctgttgcccgggctggagtacaatggcgctgtctcggctcactgcaacctccgcctcccgggttcaagcggttctcctgcctca

SEQ ID NO: 216686 - DNA, 201 bp, Homo sapiens
tcattttcttaacaggatcttatgaagaacacaagttttaaatttcgataaaagtttcatttaacaattttatcttttagggttcatgctttttatgtccwaacccaagatcctaaagactttctcctatattttttcctaggagttcataggttagcatctatgattaggtctatgatccatttaagtccacttttttcc

SEQ ID NO: 216687 - DNA, 201 bp, Homo sapiens
agccaggcttcagcttgaacgcccaagactggtgctgtgcacacttgggctgggaggtgcacgtgaacacacatcaacgcacagctaagcttgtcctatcycacacacacacacacacacacacacacacacacacactcagctctggcttctgacaactgccccttagctcttctgtgcctttgaactaatctcactgaa

SEQ ID NO: 216688 - DNA, 201 bp, Homo sapiens
aacaccatctgtatgactgtttacctaatatttttctttaaatagatttacttaaatttttgaaagaaacattatatcagcatcataaatagaaatatttacttacttttttaacttaaatttttgaaagaaagattacattattattattattattgtttgagatggagtcttgctctgtcgcccaggttggagtgcagt

SEQ ID NO: 216689 - DNA, 201 bp, Homo sapiens
cccaaatggatatccatttgttctagcatcatttgttgaaagactactctttcccgcattgaattaccttggtacgtttgtcaaaaatcaaatgatcatayatatatgtaggtctatttctagaatctctattctgtatcatccacatattcatctatcttacagcaataccacactgtcttgataactgtagctttacag

SEQ ID NO: 216690 - DNA, 201 bp, Homo sapiens
acgtggggatcacctggtgggcacccaaggtaacagtgctggtgggatcccagaagaaggcacaagtggtcttgtaggcagaggggctggttggggtgcaktgcctcctgcttgtgtggggcacccctcccactaccatcctagctccccacaatgccaaaagaaaacacacttgggattccataaggggagcggatgggc

SEQ ID NO: 216691 - DNA, 201 bp, Homo sapiens
gaacaccatctgtatgactgtttacctaatatttttctttaaatagatttacttaaatttttgaaagaaacattatatcagcatcataaatagaaatatttacttacttttttaacttaaatttttgaaagaaagattacattattattattattattgtttgagatggagtcttgctctgtcgcccaggttggagtgcag

SEQ ID NO: 216692 - DNA, 201 bp, Homo sapiens
cattcctccagttctcagaaaagcaacggatcacttgattaactgcaacagaataaggcagattgggaaggaactaggactggagtgggtggagggtggtraagggacagctcatcacagacactggagaacctgcattccagtgggcgaaatacccatgacggcagagacagcagccattgggtaacccaagtgggcatg

SEQ ID NO: 216693 - DNA, 201 bp, Homo sapiens
ggaacaccatctgtatgactgtttacctaatatttttctttaaatagatttacttaaatttttgaaagaaacattatatcagcatcataaatagaaatatttacttacttttttaacttaaatttttgaaagaaagattacattattattattattattgtttgagatggagtcttgctctgtcgcccaggttggagtgca

SEQ ID NO: 216694 - DNA, 201 bp, Homo sapiens
aataatttgggtgtctgtcatcagttccaattccacctctcctagcaagagcaggtaaacatgaaaaagaggaaatgctggcattccagatgaattagacrggcaggcaacccaaattctattactcccatttacttgctttcaagagatgtagacgtattcatctcttttatcggtaggtatgcagcaggtgctccacag

SEQ ID NO: 216695 - DNA, 201 bp, Homo sapiens
ggccacgggaggaggatgggggtctgggagaagtggcccacctaggcagtgggacttacgcctgcttttcttttgtgtcctctcctccctcccgttgcctrtttccagggatgagtgctggtttggatattagactcacatagacattagtggggacaggagggctgtcctggtccctgggcacagacgctctaataggcc

SEQ ID NO: 216696 - DNA, 201 bp, Homo sapiens
tcccagcagcacagaagccaggccaaccctccctaatttcctggagcttatggtgactttcatgcatcaggaatttaaaattctgttttataataatcaawtaaatgtttctaattatagatgtgaaaaatagaaaagaaaggaagtacataatccagtaacccccagcaccatccctgctgttaaacttctttctttccc

SEQ ID NO: 216697 - DNA, 201 bp, Homo sapiens
tggaacaccatctgtatgactgtttacctaatatttttctttaaatagatttacttaaatttttgaaagaaacattatatcagcatcataaatagaaatatttacttacttttttaacttaaatttttgaaagaaagattacattattattattattattgtttgagatggagtcttgctctgtcgcccaggttggagtgc

SEQ ID NO: 216698 - DNA, 201 bp, Homo sapiens
ttgatggacattcggtttgttcccaattgtttgtttttttttttgtttgttttttttttttttgagacggagtctcgctctgtcgcccaggctggagtgcrgtggcgggatctcggctcactgcaagctccgcctcccgggttcacgccattctcctgcctcagcctcccaagtagctgggactacaggcgcccgccacta

SEQ ID NO: 216699 - DNA, 201 bp, Homo sapiens
cccctatttgggggagaattaaactgggcacaggaagtgtttgatgatgttaattattagcaattttcatcaacacttgaatgtctcttaatcagctctayctccatgtgtctaaaaattcccttccccctaaatttgattttctctctcctgatgccattttttcagtcacccaagcataaaacctcccccgttatttat

SEQ ID NO: 216700 - DNA, 201 bp, Homo sapiens
ggcatggataatgctacaatttagtctgccattctctattgatggacattcggtttgttcccaattgtttgtttttttttttgtttgttttttttttttttgagacggagtctcgctctgtcgcccaggctggagtgcggtggcgggatctcggctcactgcaagctccgcctcccgggttcacgccattctcctgcctca

SEQ ID NO: 216701 - DNA, 201 bp, Homo sapiens
gccaaggtgggtggatcattagagcccaggagtttgagaccagcctggacaacatgacaaaaccctatctctttcaaaaaaatacaaaaattagccaagtgtagtggtgcgcgcctgtagtcccagctacttgggaagctaaggtggaaggatcacttgaggcctggaggcggaggtttcagtgggcccagatcgctccac

SEQ ID NO: 216702 - DNA, 201 bp, Homo sapiens
gtgaaactccatctctactaaaaatacaaaaaaattagcctgacgtggtggcgcacacctgtagtcccagctacttgggaggaggctgaggtggagaatcrcttgaacctgggaggccgaggttgcagtgagctgagatcgtgccactgcactccagcctgggcaacagagtgagactctatctcaaaaaaaaaaatgtga

SEQ ID NO: 216703 - DNA, 201 bp, Homo sapiens
gcccttgaatataggtcctgtttggcacttctgaattggtagagaaacacacaccagattcgactgaaacacagagggtatgcctgtgagaacaggagagrgcaaggggtggacacacacactagactttctttgttacttaatacaagggaaagagcaaggctttggctgtggtcgtaataccaataattatcaccgcca

SEQ ID NO: 216704 - DNA, 201 bp, Homo sapiens
gccatagctatctgagaatttccccttaatagcttctctgacccaggattctgtatgatcctgcattagctccacgggactataagccaaaggacagcatractataggcaggtctctggggtaaaagtaaattgtggccaggcacagtggatcacgcctgtaatcccaacactttgggaggctgagacaggaggatcact

SEQ ID NO: 216705 - DNA, 201 bp, Homo sapiens
catagaaaaatattgagagccagagaagttggacaagagtatctgagacccagtctatcttcctggtgtgaaaatttaccagtttctgatagaatctgatyttgtgtatcttttttgttttctgaggtataaaaacatattccagaaaagtcttctaagacttaattcacaggaatcctgtagaacaagatatctttgtca

SEQ ID NO: 216706 - DNA, 201 bp, Homo sapiens
gaaatgtctattcaggttctgtgcacatttttaaattgagttgttttcttgctgttgggctctttcaattccttatttattttggatattaacctcttgtsagatgtatagtttgcaaatattttctcccattttgtaggttttctcttcactctgttgattgtttccttcgctatgtagaaactttttagtttgacgcaa

SEQ ID NO: 216707 - DNA, 201 bp, Homo sapiens
gctggtctcgaactcctgacctcaggtgatccgcccacctcggcctcccaaagcgctggtattacaggcgtgagccaccgcgcccggccatgatgtccagrttaatggttgttaaagaaatatacaagagatgttagcttgctagtggctttgcctgacctggcacaaacatcctcagagtgtagtccggtgtaactaccc

SEQ ID NO: 216708 - DNA, 201 bp, Homo sapiens
aaaatgtaatctcattgttttcatttgcatttatttaattattaataaaggtgaacatcttttcatttgcctattagctatttatgtccctcctccccttrtgggttacctattcttatcctttgcctatttttttattgtagtatttttttgtcttttaggatttagaagcgctattacatataaatattaatccttggt

SEQ ID NO: 216709 - DNA, 201 bp, Homo sapiens; identical to SEQ ID NO: 38820

SEQ ID NO: 216710 - DNA, 201 bp, Homo sapiens
ctggagtgcagtgatgcgattacagctcactgtggcctcgacctccaggctcaggtaatcctaccacctcagcctctagagtacctgggatcacaggtgtrcaccactgcacctggctaatttttgtattttttgtagagactgggtttccctatgttgcccaggctggtctcaaactcctgggctcaggctatccaccag

SEQ ID NO: 216711 - DNA, 201 bp, Homo sapiens
ttactctgtttgaaatatttcataactttaaaatattttaaacacattaagaatggctaaaattttaaatactgcagttttaacttcctccaaatttattytgaagtgtacattataaaactcatatattctgttaaattttggagaagtagaaaaaataaattcctcagaatctcatcactcaaaaataaccattgttgg

SEQ ID NO: 216712 - DNA, 201 bp, Homo sapiens
atttcccactcatctcaaactcccctttggtttttgtgttctgttgaacctttgatttggcatgtttcaactcaaagagaatcccttccctgagtgacccmagggtgccttatgtgccagcatcctccacaactccattttaagaatggctctcccattgagaaggctgcaaaatgccagcctactctttctctctccttt

SEQ ID NO: 216713 - DNA, 201 bp, Homo sapiens; identical to SEQ ID NO: 38814

SEQ ID NO: 216714 - DNA, 201 bp, Homo sapiens; identical to SEQ ID NO: 38815

SEQ ID NO: 216715 - DNA, 201 bp, Homo sapiens
cccgagcttgccaagcactcccatcaatcacagccctgttctgtacttgttccctcgcctccctcctccctcgtcacaatccaggctcagcggtagcgtgyacaggagggagagccagaaagcctgggttcagatttcaccttggccactttctgtttatctgtgcaatgaggatggttgtattaggttggtgcagaagta

SEQ ID NO: 216716 - DNA, 201 bp, Homo sapiens
aaacagaaaatcagttctccagaaaaacaaaaccaataggattggtttatgcaattggagaggctggcaagtcccatatctgtagggaaggctggcagacyggaaactaggcaggagctcatggtgcactctttacttagaatttcttctttctcagggaaaactcagtttttctcttaaggccttttaactaatcatatg

SEQ ID NO: 216717 - DNA, 201 bp, Homo sapiens; identical to SEQ ID NO: 38840

SEQ ID NO: 216718 - DNA, 201 bp, Homo sapiens; identical to SEQ ID NO: 38843

SEQ ID NO: 216719 - DNA, 201 bp, Homo sapiens
ggtggattgtagaaagcttagtaacaataatgtgtttacccaacaatgtctgttatttgccttcactttctttgaaactgtttttttttcccaccctcttkcattttttgttatagtttagcctctgtggcaataaaagagaatttatattttataagaaatccagtcctaggtattgattcattgatgtatttaggggcc

SEQ ID NO: 216720 - DNA, 201 bp, Homo sapiens
agggataaagaagaaaggagaaatatttatttccaaagtggctctcatttggagtagactgagtcagaatagagtatttaattaaagtctaatatttgagrtcatggtgcttatttctctctaacaaaagaggaggggaaatgtacctatggcaaaggtctttagaaagaaccaccaaagacaaatagacgcaatttgtag

SEQ ID NO: 216721 - DNA, 201 bp, Homo sapiens
ggtcatggtgcttatttctctctaacaaaagaggaggggaaatgtacctatggcaaaggtctttagaaagaaccaccaaagacaaatagacgcaatttgtrgattatatctggtctacgatgaagtcatttttcactcacctcccttattctcagtgcaaataataacagaaaattacttgttcctaattctgtgcttatc

SEQ ID NO: 216722 - DNA, 201 bp, Homo sapiens
gcccaatcccaatcctttcaaaaacattctaaaaacaaaggatgaaaattatttatattggtagagatagatactttaattgaaatcagtttataaatatrtaacatttgataaacaaatctgaacacataaaccatttttaactattataaaattattgatttctgcctccaaaattccagcgaaattgtccctaagcca

SEQ ID NO: 216723 - DNA, 201 bp, Homo sapiens
gttctccagtgtcttcaaaatctaatagcccaatcccaatcctttcaaaaacattctaaaaacaaaggatgaaaattatttatattggtagagatagataytttaattgaaatcagtttataaatatgtaacatttgataaacaaatctgaacacataaaccatttttaactattataaaattattgatttctgcctccaa

SEQ ID NO: 216724 - DNA, 201 bp, Homo sapiens
cacatttttgtttggggtctttatgcatctctgtggctaaaaattctgaaagaaaaaaaacccatgcctcttattttactttattttattttatttatttwtttttttttttgagacatggtctttctgtgttgctcaggctggtctcaaaagtctggcctcaagtaatgctcccacctcagcccctaagtgctgggttta

SEQ ID NO: 216725 - DNA, 201 bp, Homo sapiens
gactggaaacttataaatgattagtgacaaaaatgtggctcaattttgtataatatttatcaatttatctcatacataggctgtatctactgtattacttwaaaaaaaaagtatgtttgtgtgtggtctactacgatgtcatgtaatgcatgcccctgacgtgtactgaatgctccctaatgacttcatgatgactagttt

SEQ ID NO: 216726 - DNA, 201 bp, Homo sapiens
cacacacacacacacacacacacacacacacaatctgatttttgtttattttgaaccccttttacaatgtctacctctttaaccatctgatttgctttgcrtgacataggggcatggagtgagctaggtaggtttctgaaccctgtgctttgactatacttagttaatcttttacctgaatgaaagccttaggtttctcat

SEQ ID NO: 216727 - DNA, 201 bp, Homo sapiens
gagaagggattaacgacatttatttgcctggtgttaggaccctaaattataagcagccccattccaacacacacacacacacacacacacacacacacacaatctgatttttgtttattttgaaccccttttacaatgtctacctctttaaccatctgatttgctttgcatgacataggggcatggagtgagctaggtagg

SEQ ID NO: 216728 - DNA, 201 bp, Homo sapiens
ggagaagggattaacgacatttatttgcctggtgttaggaccctaaattataagcagccccattccaacacacacacacacacacacacacacacacacacaatctgatttttgtttattttgaaccccttttacaatgtctacctctttaaccatctgatttgctttgcatgacataggggcatggagtgagctaggtag

SEQ ID NO: 216729 - DNA, 201 bp, Homo sapiens
caggtgatccacacgcctcagcctcccaaagtgctgggattatgggtgtgagccaccatgccctgcctatgaactctttttgacaaccatgatagctattyaagatatgtttgcttggtattctttgtatttatgataatctgattaaaggatgttccaaatataggaacattaggtatagatttccttacagctttataa

SEQ ID NO: 216730 - DNA, 201 bp, Homo sapiens
aggagaagggattaacgacatttatttgcctggtgttaggaccctaaattataagcagccccattccaacacacacacacacacacacacacacacacacacaatctgatttttgtttattttgaaccccttttacaatgtctacctctttaaccatctgatttgctttgcatgacataggggcatggagtgagctaggta

SEQ ID NO: 216731 - DNA, 201 bp, Homo sapiens
agaatttattaatataatgataaaaataaaatgtttttaaaagacatgcttttgaagttctgtgtttattttctgtttatgtatatatgaacctttctttwcttttcttttttttttttttttttttttttttgagattaagttatgctcttcttgcccaggatggagtgtaatggcaggatctcggctcactgcaacctc

SEQ ID NO: 216732 - DNA, 201 bp, Homo sapiens
caggagaagggattaacgacatttatttgcctggtgttaggaccctaaattataagcagccccattccaacacacacacacacacacacacacacacacacacaatctgatttttgtttattttgaaccccttttacaatgtctacctctttaaccatctgatttgctttgcatgacataggggcatggagtgagctaggt

SEQ ID NO: 216733 - DNA, 201 bp, Homo sapiens
attttcttaaaaaacagtttgagcctgctgagaaagtagatcatctggtttgacattttgctgcaaaagaagtagcattaatatatcttttttttttttttgcttaacaaataaaacatcaaattattttggccttttcctcataatcaaatagacaataagatgctaattaaataactgataggcaaaaatatgtgagac

SEQ ID NO: 216734 - DNA, 201 bp, Homo sapiens
acaggagaagggattaacgacatttatttgcctggtgttaggaccctaaattataagcagccccattccaacacacacacacacacacacacacacacacmcacaatctgatttttgtttattttgaaccccttttacaatgtctacctctttaaccatctgatttgctttgcatgacataggggcatggagtgagctagg

SEQ ID NO: 216735 - DNA, 201 bp, Homo sapiens
ttaaagtagggatgattctggcattgtccttttgtcagatgtggtattttgtaatatttatcttttgccataaaatcatgttttgattgccataaaatcaygttattacttagtaggattcatttaatgtattgtattattttataagactttgtcacagccgggtattaaaaacaaagaaacaaacagaaagcaaaacaa

SEQ ID NO: 216736 - DNA, 201 bp, Homo sapiens
agggtgggtacccagatacttaggatttcctgaggcacactggatctgtagtttaggacagcactccacttctaaatgcacctaacaagtagacttgactytcttgataactgtctgttacttaatgttactgtttgttacttaataactgtcatgttactacatgccatttgctaaaatatagacctcctttttgaagat

SEQ ID NO: 216737 - DNA, 201 bp, Homo sapiens
tttttcatgtttgttagctgttgtatgtcttctttttagaaatgtctactcatgtcctttgtccactttttgatgggattatttgtttgttttttttttttgctgatttgttttaattctttgtagattctggaaactagtcctttgtcagatgcaaagtttgagaatataagcaaatatttttaagcaactcaaagttaa

SEQ ID NO: 216738 - DNA, 201 bp, Homo sapiens
atttccctgattattagtgatgttgaccattttttcatgtttgttagctgttgtatgtcttctttttagaaatgtctactcatgtcctttgtccacttttkgatgggattatttgtttgttttttttttttgctgatttgttttaattctttgtagattctggaaactagtcctttgtcagatgcaaagtttgagaatata

SEQ ID NO: 216739 - DNA, 201 bp, Homo sapiens
gctgggattacaggcatgcagcaccacacctggctaattttgtatgttttttagtagagacggggcttctccatgttggtcaggctggtctcgaactcctracctcaggcaattaaactactaaaattaagtatttgggagcatgaaagtttaaaaagcatgtactgtaagcccaccaaaaacagataatcttggaaataa

SEQ ID NO: 216740 - DNA, 201 bp, Homo sapiens
aataataagaaaaacaattgggatttttcccccagaaatctgggggcaagtgttgcaatgagaaaacataaagttactgattattgtattttattatcaamtatcatcttaagtcatattgaaaatgtggccatctgttctccagtgtcttcaaaatctaatagcccaatcccaatcctttcaaaaacattctaaaaacaa

SEQ ID NO: 216741 - DNA, 201 bp, Homo sapiens
aatagaaaacatgagaatagattataagaaataataagaaaaacaattgggatttttcccccagaaatctgggggcaagtgttgcaatgagaaaacataamgttactgattattgtattttattatcaaatatcatcttaagtcatattgaaaatgtggccatctgttctccagtgtcttcaaaatctaatagcccaatcc

SEQ ID NO: 216742 - DNA, 201 bp, Homo sapiens
aattacaaattataatcatgtgggatcctcacaccagaatagaaaacatgagaatagattataagaaataataagaaaaacaattgggatttttcccccaraaatctgggggcaagtgttgcaatgagaaaacataaagttactgattattgtattttattatcaaatatcatcttaagtcatattgaaaatgtggccatc

SEQ ID NO: 216743 - DNA, 201 bp, Homo sapiens
ttatcttatgtgccatattaagtactttaggctgaaggcagtaggaataaatcagctgatttttaaacaggagagagagatatgggcaggttacttatatyggcatcagtgggtgggatagattggataaaaggggcggggaggagaagaaggggcagagaagggaagggagaagagaggataaaccatagttttattatc

SEQ ID NO: 216744 - DNA, 201 bp, Homo sapiens
acaatgagttagcatttactacaaaattggcattacatgttctttgctatgaacataactttatttgaatcaaaaaagtcaagcaacaaaagtttaaactmatttctttgaattttgacaagagtgtaaaattgggataattttcattaaatgtgttatacatttagcagagtaaaagcaaataagtatttaatcactact

SEQ ID NO: 216745 - DNA, 201 bp, Homo sapiens
aaaatagctatgtttagcctaaaatgattacttttctctgccattgacaatgagttagcatttactacaaaattggcattacatgttctttgctatgaacrtaactttatttgaatcaaaaaagtcaagcaacaaaagtttaaactaatttctttgaattttgacaagagtgtaaaattgggataattttcattaaatgtg

SEQ ID NO: 216746 - DNA, 201 bp, Homo sapiens
cactattttaggcagtagaaaaatagcagtggagcaggataaacccttgactttaagaagtgcacattctagtggagtctacagaagttagagaactgcartaaattttaaaatatacaatttggttttattttttgaattaaactctttttctttgtacttgaagaaaaataaaaataactgtcagaatcaagatatatt

SEQ ID NO: 216747 - DNA, 201 bp, Homo sapiens
aaaaatgaacacaatcattaatatttccatcactttggaataggaaacaatttcagtctaaagtgcatgatttctggaatttatttctcgatgcttctgtkataatatttcttgaaagcctggttaaacaaataaaaatagctatgtttagcctaaaatgattacttttctctgccattgacaatgagttagcatttacta

SEQ ID NO: 216748 - DNA, 201 bp, Homo sapiens
ttttctttaatatgattattataataaagctatggacatgtttttgcagtcaagcttcctcagagatgtttataatgattcaatcacaaactaaatctctrtgtttcctgctttgttgttgttgttgttgttgttgttagggaattaggggattccctggtatagcagtgtctttgttatatccacttcctatcttacctc

SEQ ID NO: 216749 - DNA, 201 bp, Homo sapiens
aaaagctaaccgtgtatgcttggattccaagagagagactccagatagagctaggaatagaaagatttcctagcattagggatttcctagtaattgggagyaaggtagatgaacatttaccgtttctcataatttctgtagtcaggcttcaggtacaaaattaggctaatatattgtctgttaattatatgtatttcttaa

SEQ ID NO: 216750 - DNA, 201 bp, Homo sapiens
acctccttccctcatccctcaccatgtcattataacttggcaagactctctgtttaccattcactaatgtctttttcccttcttgttttttgctttaaaawtatttagcatttatttatgaaagctacaacaatacatacaagaatgctgtcttttttattcctacatgatttgctatattaaaacaaattatgtgtttat

SEQ ID NO: 216751 - DNA, 201 bp, Homo sapiens
atgtcattataacttggcaagactctctgtttaccattcactaatgtctttttcccttcttgttttttgctttaaaattatttagcatttatttatgaaakctacaacaatacatacaagaatgctgtcttttttattcctacatgatttgctatattaaaacaaattatgtgtttattatattgttgggagatacttaag

SEQ ID NO: 216752 - DNA, 201 bp, Homo sapiens
tcttatgtgccatattaagtactttaggctgaaggcagtaggaataaatcagctgatttttaaacaggagagagagatatgggcaggttacttatattggmatcagtgggtgggatagattggataaaaggggcggggaggagaagaaggggcagagaagggaagggagaagagaggataaaccatagttttattatctaa

SEQ ID NO: 216753 - DNA, 201 bp, Homo sapiens
ggtgatatgttttggctgtgtccccacccaaatctcatattgaattgtaatccccactggctgggggagggacctcatgggaggtgattagatcatgggartggtttccccatgctgttcttgtgatagtgagtgagttctcatgagatctgatggttttataagaggcttcccccttcactctgcactcattctctctcc

SEQ ID NO: 216754 - DNA, 201 bp, Homo sapiens
agagagatatgggcaggttacttatattggcatcagtgggtgggatagattggataaaaggggcggggaggagaagaaggggcagagaagggaagggagargagaggataaaccatagttttattatctaacaaaaagcttccagggaatttaggcagacgatagtttttcttaaggctccttttttttcattgactcctt

SEQ ID NO: 216755 - DNA, 201 bp, Homo sapiens
taaaaaaggaagtgagcataagcaaagagggaagaaaggaaagtgatcaggacgaggagatggcgaatacaaccagagactggcctggtcattgctttccyaaccttcatatatggatctcttagtatcattatacagtttttgtttaaaaatattatttttgtaaaagcatcatagccgttatttatttatttttgagat

SEQ ID NO: 216756 - DNA, 201 bp, Homo sapiens
gagtacaagctttggtagggtgggtacccagatacttaggatttcctgaggcacactggatctgtagtttaggacagcactccacttctaaatgcacctarcaagtagacttgactttcttgataactgtctgttacttaatgttactgtttgttacttaataactgtcatgttactacatgccatttgctaaaatataga

SEQ ID NO: 216757 - DNA, 201 bp, Homo sapiens
gccctcaagatgagttacattttacatttttcatttaactcatcaagtctttaacccatcctgacttttgtttatagtaaagagaaggggtccaggttcaraaagttttacatttaagtctttagccctcaagatgagttacattttacatttttcatttaactcattaagtctttaacccatcctgacttttgtttatag

SEQ ID NO: 216758 - DNA, 201 bp, Homo sapiens
gggaacttttttatattagccagtgtttacagctggtattataagatgagaaagttgggggaaaggagaaggaaaaaggactgtatttatttaagaaacawtttcagtatagtactgtttttctgaaacatgaaataaatattttatcctccactgtcattttagtgaagcatgaaagctgaggaaatactgagaagtaat

SEQ ID NO: 216759 - DNA, 201 bp, Homo sapiens
ttgcatttctctaatgatcagtgatgttgagcattttttcgtatgcttgttggctgagtgtatgtcttttcttgagaaacgtctattcatatcctttgccyattttttaaatagggttattttggttttgtttgtttaagttccttatagattctggatattagacctctgtcagatgcatagtttgcaaatattttttct

SEQ ID NO: 216760 - DNA, 201 bp, Homo sapiens
ttaaatagcaactgttgttactattataaatattgttactattcagctaccatgtattactctgtattaccatgcattattattgagttaccatggtaatraaggacattcgcttgatttaaacaaactttttagtagggagatgtatgctccatatctttctagttggtatggatgtactctaagtttgccctttaattc

SEQ ID NO: 216761 - DNA, 201 bp, Homo sapiens
cttctcctccataatatttacatattttcaatatgttaataaatacaatgtcctatataactatgatctttaagatataaagttttttttacctttatatyttttgtttgccaacttccaattttgtttgccaacttccaattttttattcattggatttttaaattttatgtaaaaagtagtatttctctatagtaatta

SEQ ID NO: 216762 - DNA, 201 bp, Homo sapiens
atcaactttttaataagctattctaactggtatgagatagtatctcattgtggttctgatttgcatttctctaatgatcagtgatgttgagcattttttcrtatgcttgttggctgagtgtatgtcttttcttgagaaacgtctattcatatcctttgcccattttttaaatagggttattttggttttgtttgtttaagt

SEQ ID NO: 216763 - DNA, 201 bp, Homo sapiens
tctcatgtttatctgaaaccaatagtttaaatagcaactgttgttactattataaatattgttactattcagctaccatgtattactctgtattaccatgyattattattgagttaccatggtaataaaggacattcgcttgatttaaacaaactttttagtagggagatgtatgctccatatctttctagttggtatgga

SEQ ID NO: 216764 - DNA, 201 bp, Homo sapiens
gtgttgctcaggctggtctcaaaagtctggcctcaagtaatgctcccacctcagcccctaagtgctgggtttacaggcatgatccagcatgctcagacccrgctctcctgaattgttttatttcactttttagttcttcaatttttcacttaaatatatggggtgaaaaatactattgaataattagatctctcttatatg

SEQ ID NO: 216765 - DNA, 201 bp, Homo sapiens
ttttccccttaatctcatcagcatcaactttttaataagctattctaactggtatgagatagtatctcattgtggttctgatttgcatttctctaatgatyagtgatgttgagcattttttcgtatgcttgttggctgagtgtatgtcttttcttgagaaacgtctattcatatcctttgcccattttttaaatagggtta

SEQ ID NO: 216766 - DNA, 201 bp, Homo sapiens
tttgagagcctctcatgtttatctgaaaccaatagtttaaatagcaactgttgttactattataaatattgttactattcagctaccatgtattactctgyattaccatgcattattattgagttaccatggtaataaaggacattcgcttgatttaaacaaactttttagtagggagatgtatgctccatatctttctag

SEQ ID NO: 216767 - DNA, 201 bp, Homo sapiens
atggcaaggcttgctggggcttaggttttgactgctggaatgggcaattcctttttcgctaggactgggtctaaatgctccctctgtgggctctggctgarttcttcctggtgttgcttttcgttgtaacagggcaacactgagttctcttctccctaacctccttatgtatctgtgagttccaaccctaaaaagaaaaat

SEQ ID NO: 216768 - DNA, 201 bp, Homo sapiens
gtttggttttcttttcttgcattaactaatttaggataatggcctccaattccacatgtgttgctgcaaaggacatgacttcattcttttttatgactgcrtaatattccatggtacatatctaccacatttcctttatccggttcagcactgatgagtgtctaccttgattccacatctttgctattgtgctttaataaa

SEQ ID NO: 216769 - DNA, 201 bp, Homo sapiens
gatttgtctacatatgtaatatatataggcaaatatatatgtgtgtgtatatatgtatgtgtgtatgtaaacatatatatatatatatatatacacacacmtagagagagaaagagagagagagacagggtctcactctgtcacctaggctggtgtgcattagcataatcatagctcactgcagcctcaaaatcctgggct

SEQ ID NO: 216770 - DNA, 201 bp, Homo sapiens
tgcctttcaagtttatttacaatcccagagcactttagcccaaaatggcaaggcttgctggggcttaggttttgactgctggaatgggcaattcctttttsgctaggactgggtctaaatgctccctctgtgggctctggctgagttcttcctggtgttgcttttcgttgtaacagggcaacactgagttctcttctccct

SEQ ID NO: 216771 - DNA, 201 bp, Homo sapiens
tttttaggttcgaggggtacatatacaggtttgttacatgggtaaattgcatgttgcaggggtttcttatacagattatttcatcacccaggtaataaacmgtacctgagaggtggtttttcacaccttactctccttcaaccctccaccctcaagtaggccctagtgtccattatttataaccatgtatactcaatattt

SEQ ID NO: 216772 - DNA, 201 bp, Homo sapiens
tgagacaagatttgtctacatatgtaatatatataggcaaatatatatgtgtgtgtatatatgtatgtgtgtatgtaaacatatatatatatatatatatacacacacatagagagagaaagagagagagagacagggtctcactctgtcacctaggctggtgtgcattagcataatcatagctcactgcagcctcaaaat

SEQ ID NO: 216773 - DNA, 201 bp, Homo sapiens
aggaagaggtctctcccagaactgtgagctgtgttgcctgggcttggtagagaggtggtgcaagcactctcttggctgctctggctagtgtctcactgggrtgtgtgccccccatgtcactggctgtgagccctgtacagcaccaggacttgcaaggaatttcagtcctttaaacctagactgcctttcaagtttatttac

SEQ ID NO: 216774 - DNA, 201 bp, Homo sapiens
atgagacaagatttgtctacatatgtaatatatataggcaaatatatatgtgtgtgtatatatgtatgtgtgtatgtaaacatatatatatatatatatayacacacacatagagagagaaagagagagagagacagggtctcactctgtcacctaggctggtgtgcattagcataatcatagctcactgcagcctcaaaa

SEQ ID NO: 216775 - DNA, 201 bp, Homo sapiens
aggactgggtccttttcttcaaggcagcaagtttcttgcttgcccagggtgtgtctagaaatgtcattcgacagttagtgcctagaatcagggcctcaggyctctgcccagggccctatcctactgtggctgagctggcatcccagaggcaggacaaagtcctctttattcatccctctcctctcttcaagcagaaggaag

SEQ ID NO: 216776 - DNA, 201 bp, Homo sapiens
cccctggaaataaaaggatccattaaataatcttcctttgtgtaatactgcattgtctaccttcagaccttacagtatttaaaagtaccaggtgttgaggygtgcagatggcatatgaccctgctaagctttctcttatcctgtaatccttaggccagaagaaagtaaaaggtgggaggggagaaaagggagtactgtata

SEQ ID NO: 216777 - DNA, 201 bp, Homo sapiens
aggagtccctctccataacaaccacagatgggaatttgctgggtcacacctaaagccagaacatctctccatctcacccaaggcccatggcgagtactgcstgggtaccactgctggttattcaagggccaatggctctttagtcagaagatgattaatcttgccaggactgggtccttttcttcaaggcagcaagtttct

SEQ ID NO: 216778 - DNA, 201 bp, Homo sapiens
gtgactacaggagtgatctactgtgcctggccaaaatgtaactttttagttttgaaaataaacaaatcatacaattactggacctggaagtagagttattrtggtgaagcagtttctttttatggattgttatatttttattagaattgttctgttcctaaaagttgcttagagtctctgttatccagtattttccacttg

SEQ ID NO: 216779 - DNA, 201 bp, Homo sapiens
aaggaagaagactaggctggaggcaaatacatcacattaaatattttttagtgtcaagcaaatggaagactttatcttttgagttttgagaaaggagtgawctatggttgctgcaaaaagccaataaataaataaataaataaataggactgagcaatatcactgttagcctcataaaaatcatgtcattaggaagatgca

SEQ ID NO: 216780 - DNA, 201 bp, Homo sapiens
atatttatacacttatttgaatgatgagaatgaagtggagagaggaagttttatattgctggagagatttaggatatagttccaggagcaaatggaagacrtacaagttgctgggaagaaaacttgggaggctttctgggtcaaactgagtgttagagatatatagaacttgcctagagtgggggattattccagggagaa

SEQ ID NO: 216781 - DNA, 201 bp, Homo sapiens; identical to SEQ ID NO: 38849

SEQ ID NO: 216782 - DNA, 201 bp, Homo sapiens
gaaaacaatccttggatcagcccaaactaaaagggtagagaaagaaattccacttctcaaggaaggaatgacaagttttgggccctttttaatcaacatcyaagtaagctgcttgtgatgaaagtgaaggtggggaacggaaaaagtgggaaggtaaagatcaaaagcaaaatgctcccgagagtccttaaaaagctaacc

SEQ ID NO: 216783 - DNA, 201 bp, Homo sapiens
tgtatatgtaatgtgaaaggaagtgaagtcaaggctgaccccagagtttttgatccgagcaactggaatttcattaactgagatagggaaggatggggttkgagaggaggttctgatggaaatttgtgcaactccacttaggaagtgttattttgagatggcacttagagtgctttcatgaaatatttattgagcaaatga

SEQ ID NO: 216784 - DNA, 201 bp, Homo sapiens
aatgtaagcaaatctcttaatattcagcctgagtattacatagggcttctactgccatattctctggttgaaaacaatccttggatcagcccaaactaaargggtagagaaagaaattccacttctcaaggaaggaatgacaagttttgggccctttttaatcaacatccaagtaagctgcttgtgatgaaagtgaaggtg

SEQ ID NO: 216785 - DNA, 201 bp, Homo sapiens
ctctccacatggcttgaacttctcacagcatgcctgctggattcgaagagatggcattcaagtgcttaaaaatgtaagcaaatctcttaatattcagcctkagtattacatagggcttctactgccatattctctggttgaaaacaatccttggatcagcccaaactaaaagggtagagaaagaaattccacttctcaagg

SEQ ID NO: 216786 - DNA, 201 bp, Homo sapiens
caagaaaagagattataaagtataagactacataagacaaatagaaaatgtagagcaagattgtagatttaaagccaaatattaaaaatatttaatgtaartaaagacagttgttatctgcctagacaaaaaacgaaacttgattttacactatttaagagatatatgtaaaaacaaaatatagaaaggttggaaagaaaa

SEQ ID NO: 216787 - DNA, 201 bp, Homo sapiens
cttaaggctccttttttttcattgactcctttctaattcccccaagtctcaattctgttttctcatttttaatttcggtgtctcatgtgaacttacatctrcattgatatgattttcattagatattataaagaagaatatttataattaatctaatgttaggaatatttagcatgcagcaagtgaatataggtgcttact

SEQ ID NO: 216788 - DNA, 201 bp, Homo sapiens
gggctactccataggctaggcagcagcataggctgctcagctgcttatacttactgttactttttgacatatgctaaactagcagtggattatttatgagwtttccaggaaaggggtgggcaattcccagaactgagggttccacacctttttagaccatatagggtgacttcctcatgttgccatggcatttgaaaactg

SEQ ID NO: 216789 - DNA, 201 bp, Homo sapiens
aacaactttttctttttttttcctttttttcttgaaatgaggtcttattttgtctcccaggctggagtgcagtggcactattaccagaaagtggtcctgakccagaccccaagagagggttcttggatctcacacactctatgactccatagagtaaagtgaaagcaagtttattaggaaagtaaaggaagagagaggggc

SEQ ID NO: 216790 - DNA, 201 bp, Homo sapiens
acgagatagatgttaaccacttcttgacaagaaaggcaggacacagaaagttgaatggtttgtcttggtttctcacaaaataagaaataatcagaatgagrtttttatggtgtgggctctcctacctgatttattattttgaactttttatgtggttctgtctatggagaaattgaaaagtaaacagatttagggactgat

SEQ ID NO: 216791 - DNA, 201 bp, Homo sapiens
aagtaggaaatagtgatgtcaaatgtctctattggaagagaagaaagagaagtcaaaagctagaatgaatttgtagatgactttggaatagtgtattagtsatgtgtttattattattaataataatcctctagatccctactagtctctataattttcagaacttttctgagtttcacataatattcacaaatattagac

SEQ ID NO: 216792 - DNA, 201 bp, Homo sapiens
aagtgttgggattagtcataagccacagtatttggccttttaaaaatacatacatatattttgaaaatcacttttttttctttccaactatttttaggttygaggggtacatatacaggtttgttacatgggtaaattgcatgttgcaggggtttcttatacagattatttcatcacccaggtaataaacagtacctgaga

SEQ ID NO: 216793 - DNA, 201 bp, Homo sapiens
gccttgaactctgggctcaagtgatcctttcaccttagcctctcaaagtgttgggattagtcataagccacagtatttggccttttaaaaatacatacatmtattttgaaaatcacttttttttctttccaactatttttaggttcgaggggtacatatacaggtttgttacatgggtaaattgcatgttgcaggggtttc

SEQ ID NO: 216794 - DNA, 201 bp, Homo sapiens
agaaagagaagtcaaaagctagaatgaatttgtagatgactttggaatagtgtattagtcatgtgtttattattattaataataatcctctagatccctaytagtctctataattttcagaacttttctgagtttcacataatattcacaaatattagacagggcaggtatggtgactcccgttttgctcatgtgggacct

SEQ ID NO: 216795 - DNA, 201 bp, Homo sapiens
aataaatcagactattttaaaatgtagaactactgtttatcaaaaatatgccatcaagagagtaaaaatgccgccaataaagtgggaaaatatccaattayttagatcaagagcacgtaagaaatgatgcttaacatccttagtcactgtggaaatgtaaattaaagccactatgccagaatggctaaactgaatactctt

SEQ ID NO: 216796 - DNA, 201 bp, Homo sapiens
agagaagtcaaaagctagaatgaatttgtagatgactttggaatagtgtattagtcatgtgtttattattattaataataatcctctagatccctactagyctctataattttcagaacttttctgagtttcacataatattcacaaatattagacagggcaggtatggtgactcccgttttgctcatgtgggacctgaca

SEQ ID NO: 216797 - DNA, 201 bp, Homo sapiens
tcactcttccctttccttttctcatgcagaaggagtccctctccataacaaccacagatgggaatttgctgggtcacacctaaagccagaacatctctccrtctcacccaaggcccatggcgagtactgcctgggtaccactgctggttattcaagggccaatggctctttagtcagaagatgattaatcttgccaggact

SEQ ID NO: 216798 - DNA, 201 bp, Homo sapiens
cattgccttaggtacagtaaatcaggacaacttgaagaggggggcggaggcaaaagactgcattcttttgagtccttgatcagccttccactgaatacacsaatacacaatttggtctggctcagtgaatctacatttttacataaacaatacagtggagaaagcaatcagatatgcatttgtctcaggtgagcctcagag

SEQ ID NO: 216799 - DNA, 201 bp, Homo sapiens
ttcactcttccctttccttttctcatgcagaaggagtccctctccataacaaccacagatgggaatttgctgggtcacacctaaagccagaacatctctcmatctcacccaaggcccatggcgagtactgcctgggtaccactgctggttattcaagggccaatggctctttagtcagaagatgattaatcttgccaggac

SEQ ID NO: 216800 - DNA, 201 bp, Homo sapiens
agggttcaagtgtgcttttatacattttagggagacatgagacatcaattaatatgtgtaacattgccttaggtacagtaaatcaggacaacttgaagagsggggcggaggcaaaagactgcattcttttgagtccttgatcagccttccactgaatacacgaatacacaatttggtctggctcagtgaatctacattttt

SEQ ID NO: 216801 - DNA, 201 bp, Homo sapiens
ctggaatcagggaaccttgcttggtgctctaccccactgtggctgaattggtatgtaatctgcaagacaaagtcccattcactcttccctttccttttctyatgcagaaggagtccctctccataacaaccacagatgggaatttgctgggtcacacctaaagccagaacatctctccatctcacccaaggcccatggcga

SEQ ID NO: 216802 - DNA, 201 bp, Homo sapiens
ccaaggtggtcagggttcaagtgtgcttttatacattttagggagacatgagacatcaattaatatgtgtaacattgccttaggtacagtaaatcaggacwacttgaagaggggggcggaggcaaaagactgcattcttttgagtccttgatcagccttccactgaatacacgaatacacaatttggtctggctcagtgaa

SEQ ID NO: 216803 - DNA, 201 bp, Homo sapiens
tatatttatacacttatttgaatgatgagaatgaagtggagagaggaagttttatattgctggagagatttaggatatagttccaggagcaaatggaagayatacaagttgctgggaagaaaacttgggaggctttctgggtcaaactgagtgttagagatatatagaacttgcctagagtgggggattattccagggaga

SEQ ID NO: 216804 - DNA, 201 bp, Homo sapiens
tgatattaagtatagcttctcctcttcctttttggtttccattggcatggaatatgtttttccatctgtttattttcagtctatgtgtatcttcataggtraagtgtgtttcttgtaaccagcagatcgttgggtctttttgtttctgcattcaaccactgtatgtcttttgattggatggtttatttcattgacattcta

SEQ ID NO: 216805 - DNA, 201 bp, Homo sapiens
caaaaaaaaaaccatataattctgcagaatgcacatcatttttattgtctcaaggagaacttaatagcaattagccaaacactagtcataatgcatattcrtaaaattcaaaggactgaaatcatacagaatgtttcttgaccacaatttagttgagctagaggtcgatagcaaaaacgagccaaaataagaaaaaataaa

SEQ ID NO: 216806 - DNA, 201 bp, Homo sapiens
ataagtcagcaggtgaaaggaggaaataaggacgaagaagatataagttaaagatatatgattattttataataattataacaatatactaattatgctawaatatatttatacacttatttgaatgatgagaatgaagtggagagaggaagttttatattgctggagagatttaggatatagttccaggagcaaatggaa

SEQ ID NO: 216807 - DNA, 201 bp, Homo sapiens
caaaaatttcatcattgactcactggttatcaggaatatatagtaaaatttctgtgtatttgtatagtttccaaaattcctcttattgatttctagttgtrttccattgtggtcaggaaaggtgcttgatattatttcaagtttttgaatgttttgagacttttttgttacctaacatatgatccttgagaatgacccatg

SEQ ID NO: 216808 - DNA, 201 bp, Homo sapiens
aaacaaacaaaaaaaaaaccatataattctgcagaatgcacatcatttttattgtctcaaggagaacttaatagcaattagccaaacactagtcataatgyatattcgtaaaattcaaaggactgaaatcatacagaatgtttcttgaccacaatttagttgagctagaggtcgatagcaaaaacgagccaaaataagaaa

SEQ ID NO: 216809 - DNA, 201 bp, Homo sapiens
cttgtatagcctgcagaactgcaagccaatcaaacctcttttctttataaattacccagtctcaggtagttctttatagcattgtgagaatggactaatasagttcaggatttgcaatttaaggaaacatgcggtgcattctatcatactctgtattattagtagatcttttataatacggtacatttcaaatgtgttcct

SEQ ID NO: 216810 - DNA, 201 bp, Homo sapiens
gaaataagtcagcaggtgaaaggaggaaataaggacgaagaagatataagttaaagatatatgattattttataataattataacaatatactaattatgytaaaatatatttatacacttatttgaatgatgagaatgaagtggagagaggaagttttatattgctggagagatttaggatatagttccaggagcaaatg

SEQ ID NO: 216811 - DNA, 201 bp, Homo sapiens
agcttgcagtgagcctagatcatgccactaaactccagcctgggcgacagagtgagactctttctcaaaaaaacagaaaaaccaaacaaacaaaaaaaaaaccatataattctgcagaatgcacatcatttttattgtctcaaggagaacttaatagcaattagccaaacactagtcataatgcatattcgtaaaattcaa

SEQ ID NO: 216812 - DNA, 201 bp, Homo sapiens
ataataattatactattcataataattccctagttttagataatgttgaatatgtgacagggactattcttagcactttacacacacacacacacacacamtttttttgtttgtttttaatatgcacagtactataagttcttctatcatttctattttacagatggggaattgaagcatgaaagattaaatcaagtaact

SEQ ID NO: 216813 - DNA, 201 bp, Homo sapiens
taagacaaatagaaaatgtagagcaagattgtagatttaaagccaaatattaaaaatatttaatgtaagtaaagacagttgttatctgcctagacaaaaaacgaaacttgattttacactatttaagagatatatgtaaaaacaaaatatagaaaggttggaaagaaaaaagatgggaaagaagacgggaaaaaagatgct

SEQ ID NO: 216814 - DNA, 201 bp, Homo sapiens
tgtttctgcctggatctgcactgttacacaaggttagaaaagctctctgaacagagccccgaataaagaggagaaatatataggggaattgcatttgcagygtacaagaactaaagaacaggtttaaaatagctccataaatgagatattttaaaaatatatatcttaaaaaagtttaagagataataagagtaagagagt

SEQ ID NO: 216815 - DNA, 201 bp, Homo sapiens
tacctattcctaggcagtggggaaagttttaagagaggctaatgcactgtttgagctagagccacaaaaggagtccttaccttgaataggggctctgcgtrtgtatttgagaaacagaaccttcaaataatacacactgtaggtttgcctagctttgtctcactttagagattgtaattagatgtccactaccatggtcat

SEQ ID NO: 216816 - DNA, 201 bp, Homo sapiens
ttggctaataatcaaatgtatgttaaacagctactgtgttccagactgtttattagtcactggagatacagcattgaacaaaagtgacaaagtctccgctsttatagagattgtgttttggtccatggggagtttatcatttttttggagatgttttggtgtgactctatctcctgccatttagccatggtttatagattg

SEQ ID NO: 216817 - DNA, 201 bp, Homo sapiens
cctgaattattcttttaagcagagctctttgccatttggtactacctgttagcaagagttaatcatagagcatgatttatcttctacttgaatcatttttkttttaggaaatctaaatggagtatttttatgtgcatgtttttaaaaacatttattctttatgccaggggaacacagtgggcaagcttttcaacagtgaca

SEQ ID NO: 216818 - DNA, 201 bp, Homo sapiens
gataactctcttatttgtttctatatcactgtaggagccagtcgtgttataggctttattcagatttttcatgaaaagatttaaacagaacatgtgttacktgtttaaagtatttttcttttcatttttggaaactcctttaaagtcagattataaccacactaatttatattaatgttattactttattatgacaacata

SEQ ID NO: 216819 - DNA, 201 bp, Homo sapiens
ctattggtgtgctgcgttaaagatattcaattcctaagatacctggttaaaacaaaacaaaacaaaaccatttcctctttccaaacatgtatagaactggrtatctctttcctcattttcttttgaaaaactcaggagatgcatactgctattctcacttactgataaaaaggatattggagggaaaataaattaagaatg

SEQ ID NO: 216820 - DNA, 201 bp, Homo sapiens
agtcgataactctcttatttgtttctatatcactgtaggagccagtcgtgttataggctttattcagatttttcatgaaaagatttaaacagaacatgtgytacgtgtttaaagtatttttcttttcatttttggaaactcctttaaagtcagattataaccacactaatttatattaatgttattactttattatgacaa

SEQ ID NO: 216821 - DNA, 201 bp, Homo sapiens
tttaatcatctctattaggaacacttaatagtgttaattttattctccctttttaatgtactatgccactgagagaaacaagatcattctattcagagagytcagttccagtcagatgcgttccaattaatagaccttctttgttgttgacttgaaatatttgttgacttggaaaaaaatataagcagtcatgcggagaac

SEQ ID NO: 216822 - DNA, 201 bp, Homo sapiens
gagatagggaaggatggggttggagaggaggttctgatggaaatttgtgcaactccacttaggaagtgttattttgagatggcacttagagtgctttcatkaaatatttattgagcaaatgactggcatctcagccctgccttccacgaccagttatttctatacatagagcctttgtgtttcacctgtccttgtctttgg

SEQ ID NO: 216823 - DNA, 201 bp, Homo sapiens
tgtctcatgtgaacttacatctacattgatatgattttcattagatattataaagaagaatatttataattaatctaatgttaggaatatttagcatgcarcaagtgaatataggtgcttactaattaatgccttggattacagtgtcctaatgcctggaggtttttggaagtaactctgatctcagtaacactcacccta

SEQ ID NO: 216824 - DNA, 201 bp, Homo sapiens
catgcagcaagtgaatataggtgcttactaattaatgccttggattacagtgtcctaatgcctggaggtttttggaagtaactctgatctcagtaacactyaccctattgctgtttatctaacaaaacaggcattgcctcagctcacagcatttgtacttgctgttccctttccctgggatgtactttcctcaaacatcta

SEQ ID NO: 216825 - DNA, 201 bp, Homo sapiens
attcacctacaatgtggatgtggtaaatgagaaggaaattgatatgtttaagtacctaatgtcagccagaaactgtactaatttttttttttacacattgmttcacttaatccccataacaactataagaagtagatgttacttaaagagggggagctaaaatttaagggatttttttttttttttagttatacttcaaat

SEQ ID NO: 216826 - DNA, 201 bp, Homo sapiens
tattaataataatcctctagatccctactagtctctataattttcagaacttttctgagtttcacataatattcacaaatattagacagggcaggtatggygactcccgttttgctcatgtgggacctgacactcaaagagtaagtgattatctcaaaggtgcaaggctgctacattgcagaccttgtcttgcaatgctac

SEQ ID NO: 216827 - DNA, 201 bp, Homo sapiens
gcatttgtacttgctgttccctttccctgggatgtactttcctcaaacatctacagggcatattcatgtatgatctctgaaatcaccttgcttctgactgyggtatataacatagcaaaggccgctgctcaatttcccaccacctccaattctgtttttccaatcctgttccccttttttccacagcatttattgccatct

SEQ ID NO: 216828 - DNA, 201 bp, Homo sapiens
agaagacagggccatatattattgtggatttgcctcagtcacataatatattgacttctcacagtgcaagtaatcttaaatatagggttagttaaggactrggccacaaaagagtcgataactctcttatttgtttctatatcactgtaggagccagtcgtgttataggctttattcagatttttcatgaaaagatttaaa

SEQ ID NO: 216829 - DNA, 201 bp, Homo sapiens
ataatcctctagatccctactagtctctataattttcagaacttttctgagtttcacataatattcacaaatattagacagggcaggtatggtgactcccrttttgctcatgtgggacctgacactcaaagagtaagtgattatctcaaaggtgcaaggctgctacattgcagaccttgtcttgcaatgctactcataaca

SEQ ID NO: 216830 - DNA, 201 bp, Homo sapiens
gccttaggtacagtaaatcaggacaacttgaagaggggggcggaggcaaaagactgcattcttttgagtccttgatcagccttccactgaatacacgaatrcacaatttggtctggctcagtgaatctacatttttacataaacaatacagtggagaaagcaatcagatatgcatttgtctcaggtgagcctcagagggat

SEQ ID NO: 216831 - DNA, 201 bp, Homo sapiens
ttttctgagtttcacataatattcacaaatattagacagggcaggtatggtgactcccgttttgctcatgtgggacctgacactcaaagagtaagtgattrtctcaaaggtgcaaggctgctacattgcagaccttgtcttgcaatgctactcataacacagtgtggggctaaatgttattatatgcagaagaggcatgat

SEQ ID NO: 216832 - DNA, 201 bp, Homo sapiens
agactacataagacaaatagaaaatgtagagcaagattgtagatttaaagccaaatattaaaaatatttaatgtaagtaaagacagttgttatctgcctakacaaaaaacgaaacttgattttacactatttaagagatatatgtaaaaacaaaatatagaaaggttggaaagaaaaaagatgggaaagaagacgggaaaa

SEQ ID NO: 216833 - DNA, 201 bp, Homo sapiens
taagactacataagacaaatagaaaatgtagagcaagattgtagatttaaagccaaatattaaaaatatttaatgtaagtaaagacagttgttatctgcctagacaaaaaacgaaacttgattttacactatttaagagatatatgtaaaaacaaaatatagaaaggttggaaagaaaaaagatgggaaagaagacgggaa

SEQ ID NO: 216834 - DNA, 201 bp, Homo sapiens
tgccaccagtaacaggtctaagagtgcatcagaagcaaaacagctattaaaagtttgagtcatgtgggtgaccaaaaaaaaaaaaaaaaagtcagtgtttktttgtttgtttgtttgtttgtttttgagacagagtctcggtctgtcgcccaggctgcagtggcgcgatctcgactcactgcaagctccgccttccgggtt

SEQ ID NO: 216835 - DNA, 201 bp, Homo sapiens
tatattttctccaggatattaaaatacatatttctctagatctgttgttatggtcaaattgtcactttttatttttcttatccttagaattaagtgaatgwgtattccagaatttatattaaggtcgacatgatccaaactttatttttatgtcaaagaaactggatagattcagcaacattttaatgttcacaggtaaat

SEQ ID NO: 216836 - DNA, 201 bp, Homo sapiens
gtttctttttagtgttaaaatacatctttaaaataccttaattttcttctccaagatgttagtatagcacagaaattaaaagatacatcacttaatacccrtatgagcttggcagataatttatccttgctttttgttagcaattaaatgggattcataaaatcacttatatcatagtgttgtcttgggtttaaagtaatg

SEQ ID NO: 216837 - DNA, 201 bp, Homo sapiens
aaatcccttgtgaatgggttggaatcagacaagtgtactctaggtctgttacaggtagttagacaggcaagagcatggcaggagagggctgttcacccctrcccactagcaatgtcaagtgatggtttgacaattatcacactgcctctctaaaaatgataatttggcagcctgtgccagggcatcagggagagacaacct

SEQ ID NO: 216838 - DNA, 201 bp, Homo sapiens
tttttttcagtttttgttctctgtgggcttcaatttggatagattctaatgctttttcttcaagtttactttttcttcagcaatgcctattcttttattamctcatctagtatatttatcatttcaaatattgcattccatctctagaatttatgtttgggccttaaaaatattccatttatcatctcatcatgattatgc

SEQ ID NO: 216839 - DNA, 201 bp, Homo sapiens
atcactttctcaggtttaacacttttagttattgaaaagttgctattttggaatcatttttaatttttattaaaaggcacttctttacaaacaaaaaaatkcagcttgtaattttttatattgaataaattcatatttattcaaaaataatgtgcagttacatcatttttacatttaattcccaaacatatgacaagttac

SEQ ID NO: 216840 - DNA, 201 bp, Homo sapiens
ttcagctgagagagtaggagcagtgagagataagttgctgagggccatggctagtaagtagatttccactttgaacccaggtatcaggtaccaaaattaayattcttaaccactaagttatgctggcccccatttggcaacacttctctgtatcccttttaaaacttacaccaaactaaatgttcttggagtatgtgatct

SEQ ID NO: 216841 - DNA, 201 bp, Homo sapiens
cccaaagtgctgggattatgggcatgagccactgcacctggcctcactagcaatatctttaatgacgccttggtatactacgtaattactaattacataaattattaaaacacagccataggaaaatgtgtctgtcttcatccagattcatctctaaatgtatggatgtttgagatagcactattgatgtatttattgtag

SEQ ID NO: 216842 - DNA, 201 bp, Homo sapiens
atattaacaattagtattaattgaatgcttctcttttactaacatttgttctcattaaatcctcctaacaatcctgaaaatttattattattattattatwgttattattattctcaatgttcagctgagagagtaggagcagtgagagataagttgctgagggccatggctagtaagtagatttccactttgaacccagg

SEQ ID NO: 216843 - DNA, 201 bp, Homo sapiens
tcccaaagtgctgggattatgggcatgagccactgcacctggcctcactagcaatatctttaatgacgccttggtatactacgtaattactaattacataaattattaaaacacagccataggaaaatgtgtctgtcttcatccagattcatctctaaatgtatggatgtttgagatagcactattgatgtatttattgta

SEQ ID NO: 216844 - DNA, 201 bp, Homo sapiens
tctcattctcttaaatcaaccatcttttgcccacagcacactactaaaaatgtccaggttcagcagtgaccatgttattgttcacttctcactcttcattkggtttgaccaatgagcagctcttaatacagctgatcattcactttactgaaacatttttttccacttatctgtttttctccacattttctggctattttt

SEQ ID NO: 216845 - DNA, 201 bp, Homo sapiens
taaggtctttttttttcatagaatcttaaattttaaaggaagctgaaaagatatcttgatcaagcctcttttaagctcctctacaatttatctactaagtyaatgcctaattttgaagatgtctattgtgtcttaggggaagttctaattctcacaatgttctttcttttttggttggaattattttactgtaatttctgt

SEQ ID NO: 216846 - DNA, 201 bp, Homo sapiens
acttactacaatgtacctccatttcttaataggcactatgcttcattagaaatgtaaattgagcttttacaagcaatatctttttttttttttttttttttagatggagttccactcttgctgctcagttgggagtgcaaaggcacaatcttggctcactgcaacctccgcctcctgggttcaagcaattctcctgcctca

SEQ ID NO: 216847 - DNA, 201 bp, Homo sapiens
tcgtcttctgatagatatacactggtggagtatgaacatatgaataatcacaatatgcccaatataagttgatactgtcacagtgttgtttttttttttttctactgttttggaaataaagaataaggaaagttcttttctggtgagaatcccaatatagtaggaattaaattcagtcatgaatggtaaattgatagaatt

SEQ ID NO: 216848 - DNA, 201 bp, Homo sapiens
tcaatgtggtaagtaccataaggtaaagaagagcaatatattgcatgatctctagtcatccagcattgatcattgatttggaattttgaaaaatcaatagraaaagctagacgtattataaaactgcatatttttaaaatgtaaacactcatgtgttatttacatgaatgctagcaattcagagaattatcagtgtgggct

SEQ ID NO: 216849 - DNA, 201 bp, Homo sapiens
cacaaaaaaatacttatttggttctgcctagtttaaaataccagtgtaaaattaaacacttactacaatgtacctccatttcttaataggcactatgcttmattagaaatgtaaattgagcttttacaagcaatatctttttttttttttttttttttagatggagttccactcttgctgctcagttgggagtgcaaaggc

SEQ ID NO: 216850 - DNA, 201 bp, Homo sapiens
atgaaaatggtattaattaagttgctagttggacagattaaaatcaaaggaagacttgaaggtacttaaaggcagaggggaaggaggcagaggaggggtgrgggtggaaattggaagtaatggatttgtgaacacaagttaagaaggtagcattagaaggaagaatctaatttctgtaaaaaccagggaaggataagatgt

SEQ ID NO: 216851 - DNA, 201 bp, Homo sapiens
taacattttaccattttctcaaaattaaaaaaaaactatattgatgaaggattggcttgtaattaagtctatttatttgtgcaaatgttggaaacagacatattttaacttctgaaatacctagataactttgttcttcaacttttggttatacaaatgaagtacaattgttcaaagtaaatttcttggatttatattgaa

SEQ ID NO: 216852 - DNA, 201 bp, Homo sapiens
tttggaaggattctaggtcatgttatggaaaccaaaccagaaaaaagagagggctatatttgtaccccagggacactagatctagtgataggtagtgaacrctagaactcacatgacatcaaggacttgggctttcatctctgctgcttcttgaatgctcacattgtttttcccttccttttcaaactttctcaacttagc

SEQ ID NO: 216853 - DNA, 201 bp, Homo sapiens
ataacattttaccattttctcaaaattaaaaaaaaactatattgatgaaggattggcttgtaattaagtctatttatttgtgcaaatgttggaaacagacatattttaacttctgaaatacctagataactttgttcttcaacttttggttatacaaatgaagtacaattgttcaaagtaaatttcttggatttatattga

SEQ ID NO: 216854 - DNA, 201 bp, Homo sapiens
attcttatacttaggtgctaaacaacgagttggtaagtaaaatctgtagggaaccagaaaaatgtagattaaatgtggtctagggctgtaagagaagctcyacagaaaagacagaatttgaactgaagcttagaagtcaggcaaatgaagaaagatggaggtaatttaagtgaaagtcacagtgttgccaaaaatctggaa

SEQ ID NO: 216855 - DNA, 201 bp, Homo sapiens
aggacgcaaatcaatgtgcaaaaatcacaagcattcttatacaccaatgatagagagccaaatcatgtgtcagaagtgggaacactgatgtttagaaagaytaagtagcttgttgaagtttacttaactgatggatcctagattcaaacctaggcattctgattcagaaactcctaagtttttactacaaggctttatttt

SEQ ID NO: 216856 - DNA, 201 bp, Homo sapiens
aatagatacttttaacagcaggcctgttggtaaatactttttattacctgagagatgcattgtagtaagagctttgagtaaataaaagaaacattattcaytcttatattaatatttccttgacccgccagaataactgacaagtgagtactcagtaaatgttggcttgttagttggttggttatgttgttaggaaagaat

SEQ ID NO: 216857 - DNA, 201 bp, Homo sapiens
tctatgagaactgaattaaagtcccagatctgacattggaattcaacagttacatgattcttctcagtttcagttttcttttgtgtaaaatagaacaaacmgtacttccttcagaaatgtattataaagttagtgtttttaaaactacaggttatgcctttttcttgagaaattaactttacagtttaatgaggaacagat

SEQ ID NO: 216858 - DNA, 201 bp, Homo sapiens
tgaaaatagtggaatgtaataatttgaatgtgttttaatataactaccagtatgtatagagatgtgtatgtgtttcaagctgttctggtttttttttttttgcttgtacagttttgacatctatgttttctcttttaagttgcatttttgcaatcagaatacctttgatatcagtaattattaataatatattgttcagtg

SEQ ID NO: 216859 - DNA, 201 bp, Homo sapiens
ttctagattaattcttattcaataatgatttttttttgtttctctactacttttataggaaacatttctaggttgagagattattttatcaccaatattgytaatacagattttctctgctgtaaatagcctttgtattagtttgttttcacactgctataaagaatacgtgaaactgggtaatttataaagaaaagaggc

SEQ ID NO: 216860 - DNA, 201 bp, Homo sapiens
gtagaagactggacaggtatgtagaacatacagttttaagatacattctttgaaaatagtggaatgtaataatttgaatgtgttttaatataactaccagyatgtatagagatgtgtatgtgtttcaagctgttctggtttttttttttttgcttgtacagttttgacatctatgttttctcttttaagttgcatttttgc

SEQ ID NO: 216861 - DNA, 201 bp, Homo sapiens
tgagctctgaagtcttggacttgctttatgtaaaccaatcactaatcacagggcccttccactgccgttttctttcacctgtgccataacttcaggccccscctccatttcattttaattaatattgtggcataccaattctactaatgatcaacacatgccttttttcctcctatttcatttgatttcttatgcaactct

SEQ ID NO: 216862 - DNA, 201 bp, Homo sapiens
ctttatatttagtgtttccactgatttttcaggctacctttcctttttgcctaatgagttgttaacataagatatggtacctttatcttcatttatttctstccttatagcattcctacaagacctacattaactagtcaacacagtgagctctgaagtcttggacttgctttatgtaaaccaatcactaatcacagggcc

SEQ ID NO: 216863 - DNA, 201 bp, Homo sapiens
catttgtacttgctgttccctttccctgggatgtactttcctcaaacatctacagggcatattcatgtatgatctctgaaatcaccttgcttctgactgtrgtatataacatagcaaaggccgctgctcaatttcccaccacctccaattctgtttttccaatcctgttccccttttttccacagcatttattgccatctg

SEQ ID NO: 216864 - DNA, 201 bp, Homo sapiens
tatatatatatacacatatatatatatagagagagagagatgagatgagatgggatttttttaggggaattagctcccatgacaggctttctgcaacctgraaacactgaaatgctgatagcatcgcttagtccaactctgaaaacctcagaaccaggtaaacaaatggtgtaactcaatctgaggctaaaggcctgagaa

SEQ ID NO: 216865 - DNA, 201 bp, Homo sapiens
ctgaaaacctcagaaccaggtaaacaaatggtgtaactcaatctgaggctaaaggcctgagaactcagggagttgctggtgtaagttctggagtccaaagrccagagagcttagagttctgatgtccaaaggcaggagaagaagggtgtcccagctccagaagagagagagaaagagggagagcaaatttgcctttcttct

SEQ ID NO: 216866 - DNA, 201 bp, Homo sapiens
ggttcattgcagcctcaacatcccgggttcaagtgatcttcctgccttggcctgccaataactgagactataggtgttcactaccacacctgtctaatttktgtgtgtgtgtggagatggggtcttgctatgttgcctaggctggtcctcaaatttctaggctcaagcaatcctcctgccttggccttccaaagtgttagg

SEQ ID NO: 216867 - DNA, 201 bp, Homo sapiens
attatttatcttgataatatgtgtgtaatgggctgtatctgcttggctatataaaatttctttctgtctttgcaatctctttgtggattgcctgtgatatkctcacattctagattaattcttattcaataatgatttttttttgtttctctactacttttataggaaacatttctaggttgagagattattttatcacca

SEQ ID NO: 216868 - DNA, 201 bp, Homo sapiens
aaatcaataacaggataaataaagaataagaaagcacactaaaaactctttttttttttttttgaaacaaattcttactctgttgtccaggctagagtgtwgtggtgcaatcatggttcattgcagcctcaacatcccgggttcaagtgatcttcctgccttggcctgccaataactgagactataggtgttcactaccac

SEQ ID NO: 216869 - DNA, 201 bp, Homo sapiens
gccaggcttgtcttgaactcctgacttcaggtaatccactcgccttgtgctagaattttttttctccttatgccttcttcccagaacctccattatgtttyctttggtttagggctgtgattatacttatttgcccatatgatcatttatttattcaattaataaatatttattatggtttactatgttgtagggtagatg

SEQ ID NO: 216870 - DNA, 201 bp, Homo sapiens
caactctcaacaacaacaacaacaacaacaacaaaagttacaatgtaaataaaacaattaagtacagaatcacacttataaataaaataaaataattttartaatacaaatgtttaaacaatgttatttaaaaatatttcatttttaatattttatactactgttagcagtaataatcctataagaaacactgattgtaaa

SEQ ID NO: 216871 - DNA, 201 bp, Homo sapiens
ttattcaagttcatgctgcaaaatcatcttcacttaataattctagcattcaccacccaaaaactcataaacaaggcttttgtattgccacacagtttggrattttttttctctcagaattaggaagcaaatgtagccagcaattattttagatattgctttcagaaatgaatttttcccatatctgtcagatttggctca

SEQ ID NO: 216872 - DNA, 201 bp, Homo sapiens
gggctgggtgtggtagctcatgcctgcaatctcagcagtttgggagggtgaggtggatggatcatatgaggccaagagtttgagaccagcctgggcaacaytgtgaaacccaaactctactaaaaacacaagaaaaatagctgggcatggtggcacacgcctgtaatcccagctgcttgggaagctgaagcaggagaatcg

SEQ ID NO: 216873 - DNA, 201 bp, Homo sapiens
gtgccagtgatgtggcatgaattaaaaacaagaagtcttccaggagaaaagatttctttagagatgtaattaattgacctggtttgggtctctcctttccyggagaagtagttgtcagtgaagtgtttcaaatactgccctggttgtaattattattcaagttcatgctgcaaaatcatcttcacttaataattctagcat

SEQ ID NO: 216874 - DNA, 201 bp, Homo sapiens
actgaaacatttttttccacttatctgtttttctccacattttctggctatttttactcagtctatttttgttgttccttatcatccccacaagctctaartattacaacataccagtgttcatttcttcaacctctcttcctctctagctgtacacatttctctggtagtctctctcatcttattgatgcatccatatgc

SEQ ID NO: 216875 - DNA, 201 bp, Homo sapiens
actcagcaatgtgccagtgatgtggcatgaattaaaaacaagaagtcttccaggagaaaagatttctttagagatgtaattaattgacctggtttgggtcyctcctttcccggagaagtagttgtcagtgaagtgtttcaaatactgccctggttgtaattattattcaagttcatgctgcaaaatcatcttcacttaata

SEQ ID NO: 216876 - DNA, 201 bp, Homo sapiens
taaatcaaccatcttttgcccacagcacactactaaaaatgtccaggttcagcagtgaccatgttattgttcacttctcactcttcattgggtttgaccartgagcagctcttaatacagctgatcattcactttactgaaacatttttttccacttatctgtttttctccacattttctggctatttttactcagtctat

SEQ ID NO: 216877 - DNA, 201 bp, Homo sapiens
gatttactactcagcaatgtgccagtgatgtggcatgaattaaaaacaagaagtcttccaggagaaaagatttctttagagatgtaattaattgacctggyttgggtctctcctttcccggagaagtagttgtcagtgaagtgtttcaaatactgccctggttgtaattattattcaagttcatgctgcaaaatcatcttc

SEQ ID NO: 216878 - DNA, 201 bp, Homo sapiens
aatgttatcttaaccatagatgaagcaaagtggtgaaaatttcctgagaagatgattaatgttcatgaaaagttaataggacatctgagtttcttgagatrtaaacatcatctaactgctctagtttggcttctttccaagggaaacaaaaatattcccttagtgtctaatgaaagtctgcatgataagtatgaactttag

SEQ ID NO: 216879 - DNA, 201 bp, Homo sapiens
ttagggagcatgaaatactgctacctttctccatgtgccaataaacctgctcagtctcagctgtaaaaaacacaaacaagtaaaacctgtttttctcttgycccttaaattatgtcagtacctggcagtcgtttatgttttaaaagtcaacagatggcactcaagggaccaggaacatgataagtgtttaaagggtgtgat

SEQ ID NO: 216880 - DNA, 201 bp, Homo sapiens
tagtagaatagcagatggaacactaagaattgatttccgtgaggatagatttccatgatggaaaggaaatgagaggttttaagaggcgggctaccagcttrtaacctacatggaagaggttatgaaatgacgacagaatagattgggcctatgacgctggaaggagatccttggtccaagaaccatttgccttgtttggga

SEQ ID NO: 216881 - DNA, 201 bp, Homo sapiens
tccctgtgaagagaccaccaaacaggctttgtgtgagcaataaagctttttaatcacctaggtacagacaggctgagtctaaaaagagagtcagtgaaggsagacagggttggggccgttttataggatttgggtaggtaatggaaaattacagtcaaaggtggttgttctctggtggacaggggtgggggtcacaaggtg

SEQ ID NO: 216882 - DNA, 201 bp, Homo sapiens
cgtccctgtgaagagaccaccaaacaggctttgtgtgagcaataaagctttttaatcacctaggtacagacaggctgagtctaaaaagagagtcagtgaarggagacagggttggggccgttttataggatttgggtaggtaatggaaaattacagtcaaaggtggttgttctctggtggacaggggtgggggtcacaagg

SEQ ID NO: 216883 - DNA, 201 bp, Homo sapiens
tacacaagaaggatatcctgatttgatgggttttccaaggaaattgtgattgtttcttgctgtggtacacctatattttctcatggtaaaacctcacacaygtttgctgacaagattgatggaaattataggaccttgtgtagtagcagatcgtggattttggactactacagcttgggatggagacctgtatgctctact

SEQ ID NO: 216884 - DNA, 201 bp, Homo sapiens
tttcttttttggttggaattattttactgtaatttctgtctagctatttaaaagtctgtgattctggaggccatggaagttaagttgcccacttttctaarttctattcatctgtttctcacgttgtgatatttcagatctcaattttctgaactgtctctttgaatatattaacaattagtattaattgaatgcttctct

SEQ ID NO: 216885 - DNA, 201 bp, Homo sapiens
tctctaaaattctattgatttttagcaataaaggtttatctttgcaaaacaagccttcttcctgaggaattttttgttttgatttttaatatacctttttrggaggttgctattggtgtgctgcgttaaagatattcaattcctaagatacctggttaaaacaaaacaaaacaaaaccatttcctctttccaaacatgtat

SEQ ID NO: 216886 - DNA, 201 bp, Homo sapiens
tcagatgcatgggacaattgaagtaaagagagatgtgtatggcatatacccagtgagaggttcctagaacgtagtaaatttgttctaataaaagaatctgwcaattgaagaaaggaatgcaaactggcctatggcatagttaccgacttaccatttgtgccaacgaatccttgggtgacctcactgtaaggagctacatga

SEQ ID NO: 216887 - DNA, 201 bp, Homo sapiens
gtaaacattaataatctaatcagatgcatgggacaattgaagtaaagagagatgtgtatggcatatacccagtgagaggttcctagaacgtagtaaatttrttctaataaaagaatctgacaattgaagaaaggaatgcaaactggcctatggcatagttaccgacttaccatttgtgccaacgaatccttgggtgacctc

SEQ ID NO: 216888 - DNA, 201 bp, Homo sapiens
aaaatactggtattaatatgtctccataaatccatattcagtgacctcaccttgatagtttgaaattggccacagagtggatatatttataatacagaaaycagctaccagtacaaatcaggtctttttttatccttggaaaagcagctgttaaatatttaccagatatactggttaattctcgtacttcctttaggcctc

SEQ ID NO: 216889 - DNA, 201 bp, Homo sapiens
actgggtatctctttcctcattttcttttgaaaaactcaggagatgcatactgctattctcacttactgataaaaaggatattggagggaaaataaattamgaatgtcgcagagcctctgcttaagagcctaacccagctcctttcgaagaaatgtggagggagtgcattgtaaatgagatttggcaccttagcttctgca

SEQ ID NO: 216890 - DNA, 201 bp, Homo sapiens
tttctagctattttgctacatttgattattatctatctatactctttagattatttgcatctattatatttacatagcagaaatataaaatactggtattmatatgtctccataaatccatattcagtgacctcaccttgatagtttgaaattggccacagagtggatatatttataatacagaaaccagctaccagtaca

SEQ ID NO: 216891 - DNA, 201 bp, Homo sapiens
tatccatttctagctattttgctacatttgattattatctatctatactctttagattatttgcatctattatatttacatagcagaaatataaaatactkgtattaatatgtctccataaatccatattcagtgacctcaccttgatagtttgaaattggccacagagtggatatatttataatacagaaaccagctacc

SEQ ID NO: 216892 - DNA, 201 bp, Homo sapiens
aattttcagaagccagttgccaaacacagcaattattaaaaattaaatatataaacataattaattacatttaaagcaatggtaatacattctaaaaactyatccatttctagctattttgctacatttgattattatctatctatactctttagattatttgcatctattatatttacatagcagaaatataaaatactg

SEQ ID NO: 216893 - DNA, 201 bp, Homo sapiens
tgtattgtctcctctgtctgcattacttttctgcccactctttgctcaagttctggtgttgtactggagccatctcacaccagctcttgaggttcaattgytaaattttcagaagccagttgccaaacacagcaattattaaaaattaaatatataaacataattaattacatttaaagcaatggtaatacattctaaaaa

SEQ ID NO: 216894 - DNA, 201 bp, Homo sapiens
gggtttaatgtatcaagctatttctcaattcagagacttcccatgtattgtctcctctgtctgcattacttttctgcccactctttgctcaagttctggtrttgtactggagccatctcacaccagctcttgaggttcaattgttaaattttcagaagccagttgccaaacacagcaattattaaaaattaaatatataaa

SEQ ID NO: 216895 - DNA, 201 bp, Homo sapiens
gcatgctcagacccagctctcctgaattgttttatttcactttttagttcttcaatttttcacttaaatatatggggtgaaaaatactattgaataattasatctctcttatatggaatccaaattcttctcctccataatatttacatattttcaatatgttaataaatacaatgtcctatataactatgatctttaaga

SEQ ID NO: 216896 - DNA, 201 bp, Homo sapiens
aaaatactattactgtaatgtatgcaatgagcaattgggcagggtgtagatttctacaatacgagtatttcttgaagtatattttcaaaaatttgtcttaracttggctttggatttctggacctttgtgcctgtactgtgctgaaagactttacaggtatatgcggagcaataagccagtcaccatcattttggtcacaa

SEQ ID NO: 216897 - DNA, 201 bp, Homo sapiens
tccttgggtgacctcactgtaaggagctacatgagataaagatgggctcaatgtagaaatgaaaataataaatgccttcaatgggaggataggtcaacatrtttgaagtattctggggtactactaagcctgggaaataatctagggacagaagaggtaggcactagtcttggcttccaggctttaattaaacacctatat

SEQ ID NO: 216898 - DNA, 201 bp, Homo sapiens
aactggaatttcattaactgagatagggaaggatggggttggagaggaggttctgatggaaatttgtgcaactccacttaggaagtgttattttgagatgrcacttagagtgctttcatgaaatatttattgagcaaatgactggcatctcagccctgccttccacgaccagttatttctatacatagagcctttgtgttt

SEQ ID NO: 216899 - DNA, 201 bp, Homo sapiens
ttggaagtaaagcggccttgagaagtgtttttattaaagaggcattaatgatggaggacccttgcatagtgaggaaacttatttctgcccatataacagcwtggtggtgcaggatatggaaggcataccctttagagtcagtataaatattgacgcatagtcgctttgcaagagtgagggctccagttaaggtaatgagtt

SEQ ID NO: 216900 - DNA, 201 bp, Homo sapiens
ggacttcaacatatatttctgcaggacacaaggcaacccatagcagatggagagcatcagcatgatgggattgctaataatgggtttaatgtatcaagctwtttctcaattcagagacttcccatgtattgtctcctctgtctgcattacttttctgcccactctttgctcaagttctggtgttgtactggagccatctca

SEQ ID NO: 216901 - DNA, 201 bp, Homo sapiens
ggttacaaatgcatcgctccaatctctgtctctgtcatcacatggcattctccctgtgtgtttctatcttcatgtgttcatcttttatgtgtgtgtgtgtgtctgtgtccaaatttctcttttcttatgaagacaacagtcatactggatttgagcaatccctaactgacctcatcttaactcgattatacctgcaaagac

SEQ ID NO: 216902 - DNA, 201 bp, Homo sapiens
ccagagagcttagagttctgatgtccaaaggcaggagaagaagggtgtcccagctccagaagagagagagaaagagggagagcaaatttgcctttcttctsgctttttgttctacctgggtccacagccgtttggatgttaaccacacacattgagggtagatctttccccattcagtcaaccaactcacaattcatgaac

SEQ ID NO: 216903 - DNA, 201 bp, Homo sapiens
tggtgtaagttctggagtccaaagaccagagagcttagagttctgatgtccaaaggcaggagaagaagggtgtcccagctccagaagagagagagaaagarggagagcaaatttgcctttcttctggctttttgttctacctgggtccacagccgtttggatgttaaccacacacattgagggtagatctttccccattca

SEQ ID NO: 216904 - DNA, 201 bp, Homo sapiens
tttatggaattaccataagagatgctatggataggctagaacaaactttgaaagagaggtggtgtcttcgtttcctagagctgctgtgttagggttcttcwgggagagagaactgataggatatatatatatataatctattatatgtgtatgtgtgtatatatatatgatctattatatgtgtatgtatatatatatata

SEQ ID NO: 216905 - DNA, 201 bp, Homo sapiens
gtggtgaaaagaattccacatgaggaaattaaagtctggagaaattcaacaactggctgaatataacttaacattagcaattattatcactgtcattttaktactatttttacaaacctatgctttgacatataaattagctccagtcatcacagcagtgctgtaagattgcagacagttgtatagattgttcaaggtcag

SEQ ID NO: 216906 - DNA, 201 bp, Homo sapiens
agtctcaattctgttttctcatttttaatttcggtgtctcatgtgaacttacatctacattgatatgattttcattagatattataaagaagaatatttayaattaatctaatgttaggaatatttagcatgcagcaagtgaatataggtgcttactaattaatgccttggattacagtgtcctaatgcctggaggttttt

SEQ ID NO: 216907 - DNA, 201 bp, Homo sapiens
cccaagtctcaattctgttttctcatttttaatttcggtgtctcatgtgaacttacatctacattgatatgattttcattagatattataaagaagaatayttataattaatctaatgttaggaatatttagcatgcagcaagtgaatataggtgcttactaattaatgccttggattacagtgtcctaatgcctggaggt

SEQ ID NO: 216908 - DNA, 201 bp, Homo sapiens
gaatttaggcagacgatagtttttcttaaggctccttttttttcattgactcctttctaattcccccaagtctcaattctgttttctcatttttaatttckgtgtctcatgtgaacttacatctacattgatatgattttcattagatattataaagaagaatatttataattaatctaatgttaggaatatttagcatgc

SEQ ID NO: 216909 - DNA, 201 bp, Homo sapiens
ttttattatctaacaaaaagcttccagggaatttaggcagacgatagtttttcttaaggctccttttttttcattgactcctttctaattcccccaagtcycaattctgttttctcatttttaatttcggtgtctcatgtgaacttacatctacattgatatgattttcattagatattataaagaagaatatttataatt

SEQ ID NO: 216910 - DNA, 201 bp, Homo sapiens
agatttgaaacaactagagtgaggctttaaaaagtgaccattaagacaagttttagttggaggcctcaaagggatgtgaaagataaagtgtgtaattttargagaacagtaagccacataggcttctgcacgtcccaaagtttgcatgtgtcctgggatcagggctaaccatgcaacacatattcaaaattgtcaggtttc

SEQ ID NO: 216911 - DNA, 201 bp, Homo sapiens
ggcagcaggagagagagaaagagcgtgagcggaggggaagtgccacactttcaaaccatcagatctcatgagaactcactcactatcaggagaacagcatrggggaaaatccccccaataatccaattacctcccaccaggtccctccctcaacatgtggggattacaattcaagataagatctggttggggacacagagc

SEQ ID NO: 216912 - DNA, 201 bp, Homo sapiens
tgtcaaaggcaaggctactgttcagtaaactcctctaaatcagaatgtcattagaagaaatttaaattatatgtaaaggaataaaagctgaaaatcgaagrcttttgttttgaaaagttgagcttacaaatttgcaagtgtcattttctgtatttccgaaatactgtaaaatttatttattataaagtttaatattagaaa

SEQ ID NO: 216913 - DNA, 201 bp, Homo sapiens
gccttttatttacctaaacggtcttgccatgtcaaaggcaaggctactgttcagtaaactcctctaaatcagaatgtcattagaagaaatttaaattatatgtaaaggaataaaagctgaaaatcgaaggcttttgttttgaaaagttgagcttacaaatttgcaagtgtcattttctgtatttccgaaatactgtaaaat

SEQ ID NO: 216914 - DNA, 201 bp, Homo sapiens
atccataccaacatctattgtttttagattttttaattatagccattcttgcagtagtaaggtagcatctcattgtgattttaatttgcatttccctgatkattagtgatgttgaccattttttcatgtttgttagctgttgtatgtcttctttttagaaatgtctactcatgtcctttgtccactttttgatgggattat

SEQ ID NO: 216915 - DNA, 201 bp, Homo sapiens
agccttttatttacctaaacggtcttgccatgtcaaaggcaaggctactgttcagtaaactcctctaaatcagaatgtcattagaagaaatttaaattatatgtaaaggaataaaagctgaaaatcgaaggcttttgttttgaaaagttgagcttacaaatttgcaagtgtcattttctgtatttccgaaatactgtaaaa

SEQ ID NO: 216916 - DNA, 201 bp, Homo sapiens
aaaaacttgtagcaaatgttattatgaattgttaaaatattatccaatgagattagaaattagaaaaaagttcctaatattatttccctttcaaattataytatacattcttgtcaaaacaggaaggcaagaggaaaaaagttataaaggttgaaagaaagcaataaaatgctcattagctgcaaaatatatgattatgta

SEQ ID NO: 216917 - DNA, 201 bp, Homo sapiens
ccgagggggtggaacacaaggtcaggagatcgagaccatcctggctaacacggtgaaacccagtctctactaaaaaatacaaaaaattagctgggcgttgyggtgggcgcctgtagtcccagctactcgggaggctgaggcaggagaatggcgtgaacccgggagacggagcttgcagtgagccgagattgtgccactgca

SEQ ID NO: 216918 - DNA, 201 bp, Homo sapiens
aaaaacttagaaatattttcaatttattttataagggcagcataaacataatgctaaaagcaaacaggtatattaataggctgggcatggtggctcacacytgtaatcccagcactttgggaggccgagggggtggaacacaaggtcaggagatcgagaccatcctggctaacacggtgaaacccagtctctactaaaaaa

SEQ ID NO: 216919 - DNA, 201 bp, Homo sapiens
atgttttggctgtgtccccacccaaatctcatattgaattgtaatccccactggctgggggagggacctcatgggaggtgattagatcatgggaatggttyccccatgctgttcttgtgatagtgagtgagttctcatgagatctgatggttttataagaggcttcccccttcactctgcactcattctctctcctgccac

SEQ ID NO: 216920 - DNA, 201 bp, Homo sapiens
ctacctctttaaccatctgatttgctttgcatgacataggggcatggagtgagctaggtaggtttctgaaccctgtgctttgactatacttagttaatctyttacctgaatgaaagccttaggtttctcatctgtgtaatagaaataaaaatacttaccttgtatgattattttgttttgaagtttaaatgagaaatagat

SEQ ID NO: 216921 - DNA, 201 bp, Homo sapiens
ctacatggctggagaggcctcaggaaacttacaatcatggcagaaggtgaaggggaagcaggcacctttttcacaaggcagcaggagagagagaaagagcrtgagcggaggggaagtgccacactttcaaaccatcagatctcatgagaactcactcactatcaggagaacagcatgggggaaaatccccccaataatcca

SEQ ID NO: 216922 - DNA, 201 bp, Homo sapiens
tagacttggctttggatttctggacctttgtgcctgtactgtgctgaaagactttacaggtatatgcggagcaataagccagtcaccatcattttggtcayaagtcatccctcagatgtcatggaaatccgaatggtcaaagaaaattttaaagcaagacctggtcaggtgagtcagtggtcagcaactttttaaatagcc

SEQ ID NO: 216923 - DNA, 201 bp, Homo sapiens
acttgtaattatacatacttgatactatttctaaaaaaaaaaaatacatccttttgaaacctaggcaagattttttcagcttaatcatccaggaatgtctytctcaaggacctggaagctgtctctttgaaatgtaaacatcattaaaaaaaaaagatgtttgtttctcttctaagtaaagccaattccaattagctaaaa

SEQ ID NO: 216924 - DNA, 201 bp, Homo sapiens
tgattgggctggcctgaagaactttactgtatagtaacaacattcactactctaaggacctagagcatggtacagttatgtccacttgaatgttatgacargagaagggattaacgacatttatttgcctggtgttaggaccctaaattataagcagccccattccaacacacacacacacacacacacacacacacacac

SEQ ID NO: 216925 - DNA, 201 bp, Homo sapiens
tgagaatggactaatacagttcaggatttgcaatttaaggaaacatgcggtgcattctatcatactctgtattattagtagatcttttataatacggtacmtttcaaatgtgttcctccccaaccacaaagccttttatttacctaaacggtcttgccatgtcaaaggcaaggctactgttcagtaaactcctctaaatca

SEQ ID NO: 216926 - DNA, 201 bp, Homo sapiens
atctgcaaaactgctacaaagggaagaatgagcccactatgcacattgggatgggaaactataaaaaaaacagaaaacaaaaaacaacaacaacaaactcmtccaaaattagaaaaccaaaattcccatttccctgaagaaatgtaatggtgatcttctggcaagtgtgtcaagttctgagttgcaaacaaacaagttcca

SEQ ID NO: 216927 - DNA, 201 bp, Homo sapiens
gcctgtactgtgctgaaagactttacaggtatatgcggagcaataagccagtcaccatcattttggtcacaagtcatccctcagatgtcatggaaatccgratggtcaaagaaaattttaaagcaagacctggtcaggtgagtcagtggtcagcaactttttaaatagcctttatccttatgtaatttttggaatttagca

SEQ ID NO: 216928 - DNA, 201 bp, Homo sapiens
cttcaggctaatcaaactcctgggctcaagtgatcagcccacctcggcctcccaaagtgctgtgactacaggagtgatctactgtgcctggccaaaatgtwactttttagttttgaaaataaacaaatcatacaattactggacctggaagtagagttattatggtgaagcagtttctttttatggattgttatattttta

SEQ ID NO: 216929 - DNA, 201 bp, Homo sapiens
gggagagagaatgggaagtaaaattagaaaaatcaaatggagtaaataatggcatgggagggcatctagctaaataatggacaccatcaaatatgattagmtagtcagcatatcatttaatattattataaaaatagcatgagttcattataaacatttagacaattcacagatataaaataaaatagaaacttaaaaaaa

SEQ ID NO: 216930 - DNA, 201 bp, Homo sapiens
gcatttccaaatcttactttgtcatgcaatacttgcttatgcagcagtgaccttgttgatgctgtgtacaatctgtcattttatgcattatccctacgagrtagatgttaaccacttcttgacaagaaaggcaggacacagaaagttgaatggtttgtcttggtttctcacaaaataagaaataatcagaatgagattttt

SEQ ID NO: 216931 - DNA, 201 bp, Homo sapiens
tgggagattagctagacatgatcagctgggagagcatgtgtgttttcatgaagaattatgctgagataggtaatggatgaggaggaaatttgggcttgackgaagtaatgggggctgtccgtgaagccttgtggcagtacagcccaggtaatttgctgagcctgatgggtgtcagggtcagtccaagtgaaaacaaagaga

SEQ ID NO: 216932 - DNA, 201 bp, Homo sapiens
gataattttcattaaatgtgttatacatttagcagagtaaaagcaaataagtatttaatcactactgagaaaattacaaattataatcatgtgggatcctmacaccagaatagaaaacatgagaatagattataagaaataataagaaaaacaattgggatttttcccccagaaatctgggggcaagtgttgcaatgagaa

SEQ ID NO: 216933 - DNA, 201 bp, Homo sapiens
ttaaaaaaaattttccccactttccaatccttttctctactgtttgacatatatctttccagatattttcccataagcttctgcatacatgagtttctaayatttatttgctggatcatattgttttgtaactggctcctttcactcaactacatgtgatggacatctttccatattactgtatgtgcctcattcatgtta

SEQ ID NO: 216934 - DNA, 201 bp, Homo sapiens
ttgctggatcatattgttttgtaactggctcctttcactcaactacatgtgatggacatctttccatattactgtatgtgcctcattcatgttaatgaccrtataatatttcacagtaggaaagtactgtaatttatttaatattctcactaatgttggatatttggactttattcattttctaagaaagataattgagag

SEQ ID NO: 216935 - DNA, 201 bp, Homo sapiens
tagagattaattctccttcccattgggtgtggcatgttgacaagagaaagtattgagccacacacaataaatcatactttttgtttgtttaattttgagayagggtcttgctgtctttcccaggctggagtgcaatggcataatcatggctcactgaaggaccaacctcctaggctccagtgatcctccactttagcctcc

SEQ ID NO: 216936 - DNA, 201 bp, Homo sapiens
gagcactcttgagcttcatgctctaaccataaggtgcagtgtccaagcccataacttcgttttctgtccccttgaggttaagcagctgctgtgctggaggwgctagagatgttcccagtccacaagcaccaatactctgataaggggtgctggaaaaagcacttcatcaggatagtggcatcagggtccacacatgcacac

SEQ ID NO: 216937 - DNA, 201 bp, Homo sapiens
gtgcatgtcagccaggcctgtctgctaaagctctccgatggttaggtagggtccacaccaagtagctatggtggcagctgctgcaaaatgcctctgttggkgatctcaggctgcggtgcaaatgggtgtggccagggaggtgccccagagaaggaccagcaaacgggggtgtgttcagatcagactggccccgtcccatgg

SEQ ID NO: 216938 - DNA, 201 bp, Homo sapiens
tgcctctgttggtgatctcaggctgcggtgcaaatgggtgtggccagggaggtgccccagagaaggaccagcaaacgggggtgtgttcagatcagactggycccgtcccatggacaagatagctctgctctgttcaggtctgacagtcaacaaaggccaaagccacctaggggagtgtggtaagccttggaggatgtgcat

SEQ ID NO: 216939 - DNA, 201 bp, Homo sapiens
caccccccagttccccaaaggctggagtcttgtccctgacacttctccaagcagctctccatgccagctcggatgtatatggcggtcatggggattcctayggttaatattctagaggtccgtggtaagtccatgggccacttctcacctatttaactcactccttccaaggagtcactgggggctaggaacaagtcctgg

SEQ ID NO: 216940 - DNA, 201 bp, Homo sapiens
gtataatatttcacagtaggaaagtactgtaatttatttaatattctcactaatgttggatatttggactttattcattttctaagaaagataattgagarcagagaccacatgtttaaatgtatatttaagaaagatagcaaaactattttatatatatggtatgtatacatgcatacagatggaaacatgttgtaaagc

SEQ ID NO: 216941 - DNA, 201 bp, Homo sapiens
ttgtcatgttctgcctaattttgcacctgattttccattttctccgctcttgttctaggaaaacagttggtgttttctgttgtggacccaattcactatcyaagactcttcataaactgagaaaccagaacaactcatatgggacgagatttgaatacaataaagagtctttcagctgaaaacttttgccatgaagcagga

SEQ ID NO: 216942 - DNA, 201 bp, Homo sapiens
agaatgaaaagtatgaggtaaataaaatattttcctggttgacatttatatttggaaataattagaaaattgttttcaatatgtaaaatagcaagaaatcractttgttaatactttaaaccatgctcataaagcatacttcttgtcatgttctgcctaattttgcacctgattttccattttctccgctcttgttctagg

SEQ ID NO: 216943 - DNA, 201 bp, Homo sapiens
agatctctctccttgacttgcagatggctatgttcttgatgcctcttcaggtggctttttctctgtgcatgcacttccctggtgtctctttttgtgttcamattacttcttgtaagtacaccattcagactggattagggcctaccctagtaccttcattttaacttaaattgcctccttaaaagccttatctccagatgc

SEQ ID NO: 216944 - DNA, 201 bp, Homo sapiens
tctttttttttttttttttcagtttttgttctctgtgggcttcaatttggatagattctaatgctttttcttcaagtttactttttcttcagcaatgcctrttcttttattacctcatctagtatatttatcatttcaaatattgcattccatctctagaatttatgtttgggccttaaaaatattccatttatcatctca

SEQ ID NO: 216945 - DNA, 201 bp, Homo sapiens
atgttggactgcggttacatgtatttttgactagttggtattgtcccacaggccacttatgctctgttcttcttctttttttttttttttttcagtttttsttctctgtgggcttcaatttggatagattctaatgctttttcttcaagtttactttttcttcagcaatgcctattcttttattacctcatctagtatatt

SEQ ID NO: 216946 - DNA, 201 bp, Homo sapiens
ttgttttattttctttttttaccttgatttgggttgagtattttttataattccacttttttctctaaagttagacatgcctctgtattttttttttcttyttagtaattgctttaggttgttggttcctgaactggattccttagaccagcatcaattggaatcttgttagaaaagcaaattcttgagccctatccaaga

SEQ ID NO: 216947 - DNA, 201 bp, Homo sapiens
gctttttagtttcggtgtttaaatcatttacatttaatttaatgaaaatacagttggctttaaatctagcagttcaccattgctttgtacttatctatttsttctttctttgttttattttctttttttaccttgatttgggttgagtattttttataattccacttttttctctaaagttagacatgcctctgtattttt

SEQ ID NO: 216948 - DNA, 201 bp, Homo sapiens
ttgatttgttttcattttcatctcgttcaaatatgttttattttttatgttttttctttgacccatgggttatttaaaaatgttgtttaatttccaaaaaygcagaaattttccagatatctttttgttcttaatttctagttcaattgggatttgatctaaaaatgaactccttgtgattctaatcccttaaaatgtatt

SEQ ID NO: 216949 - DNA, 201 bp, Homo sapiens
ttgggtttaattagcttttcttaatttttactagtttcttaaaatggaaacataggtcattgatttcagactgtttttcttaataaaagtgtttaatgctrtacattttcctctaaacaccacttttgctaaatcttatacattttgatttgttttcattttcatctcgttcaaatatgttttattttttatgttttttct

SEQ ID NO: 216950 - DNA, 201 bp, Homo sapiens
ctcacatttactcctgtgaccctgagtcaagtgactcagttctcctggatctgtaatacaacgagtgaataagctctccggagtgattaagttctcattaygtaagattctgcgtttacaagtctacatgaaaaagcaagtatgaacatttatagaactagtttctaatgtctaccccaaaccacattttctacttagtac

SEQ ID NO: 216951 - DNA, 201 bp, Homo sapiens
aaaagcaaacaggtatattaataggctgggcatggtggctcacacctgtaatcccagcactttgggaggccgagggggtggaacacaaggtcaggagatcragaccatcctggctaacacggtgaaacccagtctctactaaaaaatacaaaaaattagctgggcgttgcggtgggcgcctgtagtcccagctactcggga

SEQ ID NO: 216952 - DNA, 201 bp, Homo sapiens
cttcttttcttaagcctcatgaaccaacctcttctagcttcagacttttcttctgcagcttccacatctctgtcagccttcatggaatagaacagagttarggccttgttctggattagtctttggcttaagagaatgttgtgttgtggctggtttaatcatccagaccactaaaactttctccatatcagcaataaggct

SEQ ID NO: 216953 - DNA, 201 bp, Homo sapiens
ataaacctgctcagtctcagctgtaaaaaacacaaacaagtaaaacctgtttttctcttgccccttaaattatgtcagtacctggcagtcgtttatgtttwaaaagtcaacagatggcactcaagggaccaggaacatgataagtgtttaaagggtgtgatttactactcagcaatgtgccagtgatgtggcatgaattaa

SEQ ID NO: 216954 - DNA, 201 bp, Homo sapiens
tggccaaatggtaagagtaagagtcttgaaagtagacatactgagatattaaaattaactcttagtttattaaatgactttcagtaatgtacttaatctgwctgcagttggtttctttatgtcttaaattggggtaacagtacaaacctgttggagaaaggagaccgccactaacatttcaggaagttttgcatgaattag

SEQ ID NO: 216955 - DNA, 201 bp, Homo sapiens
tcagtacctggcagtcgtttatgttttaaaagtcaacagatggcactcaagggaccaggaacatgataagtgtttaaagggtgtgatttactactcagcartgtgccagtgatgtggcatgaattaaaaacaagaagtcttccaggagaaaagatttctttagagatgtaattaattgacctggtttgggtctctcctttc

SEQ ID NO: 216956 - DNA, 201 bp, Homo sapiens
atgattaaaatatagcttttttattgtatgatttttaagatttctcaagtttaaagacacagaaatacaatttaaatgatctcagggaaaaaagtaatttwttggaaggattctaggtcatgttatggaaaccaaaccagaaaaaagagagggctatatttgtaccccagggacactagatctagtgataggtagtgaaca

SEQ ID NO: 216957 - DNA, 201 bp, Homo sapiens
ctacctagaaatgaatttgagtagggcaaatatttctaagctagattttacattatgctattatgctaatttacagtctcttcctgccatttccttctcgstccaattacttctgtttggcacttagaaatgtaaaatgcgtgctttcaaacattttcactgcatagttgtcttaagagttcccttgaagtaaaacaaagc

SEQ ID NO: 216958 - DNA, 201 bp, Homo sapiens
aataaagtataaatcagagaagaaaaaataataaatcagactattttaaaatgtagaactactgtttatcaaaaatatgccatcaagagagtaaaaatgcygccaataaagtgggaaaatatccaattatttagatcaagagcacgtaagaaatgatgcttaacatccttagtcactgtggaaatgtaaattaaagccact

SEQ ID NO: 216959 - DNA, 201 bp, Homo sapiens
gaggtaatgattggtaactcttcgttatgtattcttacagaagcttttgtaagtttgtgtgagagtgtgtgtgtgtgtacttatgaaagtatatgtaaacrtatgtttgtatgtgtgtgtgtgatatatatttaaaatcaaaaccttagttttttaacaaaaattgaatctatgccaagtaattcttcagcttactttgtt

SEQ ID NO: 216960 - DNA, 201 bp, Homo sapiens
ttgcattaaacactcctggcccagaggtaatgattggtaactcttcgttatgtattcttacagaagcttttgtaagtttgtgtgagagtgtgtgtgtgtgtacttatgaaagtatatgtaaacatatgtttgtatgtgtgtgtgtgatatatatttaaaatcaaaaccttagttttttaacaaaaattgaatctatgccaa

SEQ ID NO: 216961 - DNA, 201 bp, Homo sapiens
attgcattaaacactcctggcccagaggtaatgattggtaactcttcgttatgtattcttacagaagcttttgtaagtttgtgtgagagtgtgtgtgtgtgtacttatgaaagtatatgtaaacatatgtttgtatgtgtgtgtgtgatatatatttaaaatcaaaaccttagttttttaacaaaaattgaatctatgcca

SEQ ID NO: 216962 - DNA, 201 bp, Homo sapiens
attaacctcatgcacacaaattgctgaaaacatatggagataacagtagggaagacaggcatataagttaagattttaaaatatcatgtgttgggcaacaytttttaactttcagaaaatgattacatatttttaccagtaggcattcagaaaatgattaccagtaggcattaggttagtatactatgtagaatacaaatt

SEQ ID NO: 216963 - DNA, 201 bp, Homo sapiens
atgaattcatagcacagtatgtggtgcataatcaatgcatatctgttgaaagagtaaaaaccacctaatatatagagttcaggacctagcttgagaaatgstttgtagacagagcctccccccatctctttatagcacagtcttccttagagggtgcaactacagaaaaggaaatgttggagggataaagaagaaaggaga

SEQ ID NO: 216964 - DNA, 201 bp, Homo sapiens
aatttgtagtattttacttacataatgagccaaatatgacaactgtatctgtggtgccaaaatacttcaattgaaatccatgtgctgagcctttttgagaytgaccaattagaattcattctttgtcttacattgcagttctttaaagatgaaacgactaactgaaatctaagaaaattagccatttgtcagaatggcatt

SEQ ID NO: 216965 - DNA, 201 bp, Homo sapiens
ctctgactcttcacattgatttagatctaatgctctcttaattgcaaacagaagcccgttcacagccatttgttgatagacccaattttggagttctgctrttgtgagctgtcttgtctaggatcatttccccaaatttacgatgacaatttgtagtattttacttacataatgagccaaatatgacaactgtatctgtgg

SEQ ID NO: 216966 - DNA, 201 bp, Homo sapiens
ataaaatttgaatgttttcagttacctcaaaactaatctaactctaattttcccagtcatatttctaccctacttggtatgtaaaaagtatttcattttascagtctcatgaagtaagtcaatatcacttttcctcctggtattgcgataattaaggtatgaagcataatttgtatctggttctcagtttgcctgcctggg

SEQ ID NO: 216967 - DNA, 201 bp, Homo sapiens
acattttcacaatactttgaatataaaatttgaatgttttcagttacctcaaaactaatctaactctaattttcccagtcatatttctaccctacttggtrtgtaaaaagtatttcattttaccagtctcatgaagtaagtcaatatcacttttcctcctggtattgcgataattaaggtatgaagcataatttgtatctg

SEQ ID NO: 216968 - DNA, 201 bp, Homo sapiens
tttattgagggcacgttttatgtggagtgagaagatgagttcatatacaattaagcttatttctagacaaagaaaactaaaaaataatgatagccatcatrcattatttatttactgttttaggaactgtgctaataatttcacatatattagtttatgtaattaaaacagagttaagcagttaatgttattcccattttg

SEQ ID NO: 216969 - DNA, 201 bp, Homo sapiens
ctaaatgaaatatgccagacacgaaagcacaaatatattatgctgtcacttataggaggtccctagagtagtttaatttgcagaggcaggaagtagaatartctctacatatgcatccttgctaaaaatatttcaaacaattcagatacagtaaaatcctctcaggttgccaaagccttcggggagcgggaaatgaggggg

SEQ ID NO: 216970 - DNA, 201 bp, Homo sapiens
ttcatgaacataactgagcaaaagaagttacattaaaaagtatacatattctatgattaaattgcataaagtataaaattaagtgaacctaatctatggtwttggaggtcaagatagagattaattctccttcccattgggtgtggcatgttgacaagagaaagtattgagccacacacaataaatcatactttttgtttg

SEQ ID NO: 216971 - DNA, 201 bp, Homo sapiens
aagtatacatattctatgattaaattgcataaagtataaaattaagtgaacctaatctatggtattggaggtcaagatagagattaattctccttcccatwgggtgtggcatgttgacaagagaaagtattgagccacacacaataaatcatactttttgtttgtttaattttgagacagggtcttgctgtctttcccagg

SEQ ID NO: 216972 - DNA, 201 bp, Homo sapiens
aaaaatagtcctgcaagaatcttaacagagaaaactgtaaatcattattgagaaatcttttatatatgttcatagttaaggaagagttaaataaagagaasagaatatatgttcatgaataggaagactcaatattttaagatgtaaattctcctcaaattgagctatatgttcactggctaaatcccagtcaaaatccca

SEQ ID NO: 216973 - DNA, 201 bp, Homo sapiens
tttattaaatgactttcagtaatgtacttaatctgtctgcagttggtttctttatgtcttaaattggggtaacagtacaaacctgttggagaaaggagacygccactaacatttcaggaagttttgcatgaattagtaaagggcatcgactctgagctaatgcagtccctctagctaatggcttggcaagaaaatgactct

SEQ ID NO: 216974 - DNA, 201 bp, Homo sapiens
tatacccagtgagaggttcctagaacgtagtaaatttgttctaataaaagaatctgacaattgaagaaaggaatgcaaactggcctatggcatagttaccracttaccatttgtgccaacgaatccttgggtgacctcactgtaaggagctacatgagataaagatgggctcaatgtagaaatgaaaataataaatgcctt

SEQ ID NO: 216975 - DNA, 201 bp, Homo sapiens
taagggggcaagatagacaacaaccaataaatacattgagcatcaggttctgagattcgggttaggacaaagaaggaagggaaagtaggagtaaagcagcrtaaacagtagagagtgtgttactttatattgcacgttcaggaacaaccatcaaacaaaatgctataatgccatttgagcagacttgactgaagtgaatga

SEQ ID NO: 216976 - DNA, 201 bp, Homo sapiens
gattgtaagcaaaagttaattgattgatattcttatgaaaacacaaagcaaaataaaaagtagaaagttattctcatatctattccatttacttttttttytgcagaaccaaaaaagcaataataaatttaagtgatgtggttgaatgatattttatttcagttttaaatactagatgtaaatttggtactttctggtggt

SEQ ID NO: 216977 - DNA, 201 bp, Homo sapiens
tcttgtagaaagatgtcatatcacagttatgcactcctctgtccttttcctttgttaaaagccattcgcctccatccttcattttctgtgtcctcatcagyggcaagtggttctactcattcattcagtcaacaaatatttttgagcacccatgtgccaataggtcttacaggtattgggaagacagcaatgaatgaaaac

SEQ ID NO: 216978 - DNA, 201 bp, Homo sapiens
gactagaacgctgagttctagtcgtcctgtccaaagttatttcaaaacaccaaagagtagctttgtggggagtggggtgtgtgtgtgtgtgtgtgtgtgtkgggtgtgtagctcagaaagcagaccagtaggaaggagggggcagtggccaaaatatagtcacacaaccaaaacagatgtagggagtctgagaaatgtagt

SEQ ID NO: 216979 - DNA, 201 bp, Homo sapiens
ctagatgtcatgaagtaatcaaatactaataattttatcttcttattttttccaagaaaagcaaaattttctctctcctggtacaaaaaaaaaaacaaaamcatttcaaatgaaaactgattctctaagggccttgaaaccaaattcccacctacatttcccagctcatactggacttagcccatttcttgcatcaatact

SEQ ID NO: 216980 - DNA, 201 bp, Homo sapiens
tgtgagccactgcaccagacccttgaaattttttattaattaaaagaactgtttaaagtgacacatgatcagagaagattttaaaaggcaaatatttttcraaaatttacacttatatgaacattaaatgttgtaaattacaaacctttacttttaataatagtataatatttattatattattcttaaatatctaatatt

SEQ ID NO: 216981 - DNA, 201 bp, Homo sapiens
ctcaagggaaacacatccaccttttgccaattcaggatcgtgttggttgtgggtttgtcatagatggctcttattattttgaggtatattccttatatgcscagtttattgagggtttttaccataaagggatgttggattttatcaaaaactttttctgcatctattgagatgaaaataggttatttgtttttatttatg

SEQ ID NO: 216982 - DNA, 201 bp, Homo sapiens
tctcaagggaaacacatccaccttttgccaattcaggatcgtgttggttgtgggtttgtcatagatggctcttattattttgaggtatattccttatatgyccagtttattgagggtttttaccataaagggatgttggattttatcaaaaactttttctgcatctattgagatgaaaataggttatttgtttttatttat

SEQ ID NO: 216983 - DNA, 201 bp, Homo sapiens
ctctctaacaaaagaggaggggaaatgtacctatggcaaaggtctttagaaagaaccaccaaagacaaatagacgcaatttgtagattatatctggtctaygatgaagtcatttttcactcacctcccttattctcagtgcaaataataacagaaaattacttgttcctaattctgtgcttatctgacaaatgcgtcaata

SEQ ID NO: 216984 - DNA, 201 bp, Homo sapiens
gttatttttccagtgttccttttaacatgagattgcattagataataattacaaattattgtaagtgggcttgagttcttgatttggctctcagcttgaayattactggtatatggaaatgctgctgatttttgtgcactgactttgtatactgaaactactgaagtcatttatcagttctcttggcagagtaggtttttc

SEQ ID NO: 216985 - DNA, 201 bp, Homo sapiens
gactcagataagaattggttgaaggacagggccaagctgagtctatagctggaggttaggtggctaaaatttcagaacaagttggggatgtagccactttytggagatagattaagcacaggtaattctccgtctagtgcctttgagagacattttctttctttgttaccccatcctgcattcagctgccatacatctttt

SEQ ID NO: 216986 - DNA, 201 bp, Homo sapiens
ggctaaatcccagtcaaaatcccagcaggtatttttagatatcagtaagcagacttttaagttatcctgcttttatttcagaatatggccaagaaaactgrgggaaaatttttcatttcacacaactgagccaagttacaggatatttccatgactggatcttccaagttccagaacagaaatattaagctgcaattgaaa

SEQ ID NO: 216987 - DNA, 201 bp, Homo sapiens
cccagtcaaaatcccagcaggtatttttagatatcagtaagcagacttttaagttatcctgcttttatttcagaatatggccaagaaaactgggggaaaawttttcatttcacacaactgagccaagttacaggatatttccatgactggatcttccaagttccagaacagaaatattaagctgcaattgaaagatctggt

SEQ ID NO: 216988 - DNA, 201 bp, Homo sapiens
aaaatcccagcaggtatttttagatatcagtaagcagacttttaagttatcctgcttttatttcagaatatggccaagaaaactgggggaaaatttttcayttcacacaactgagccaagttacaggatatttccatgactggatcttccaagttccagaacagaaatattaagctgcaattgaaagatctggttctagat

SEQ ID NO: 216989 - DNA, 201 bp, Homo sapiens
cacatttagttgaggtagaggtgagatacaaacacagacctgtctggctgaaggcatgttattaactgttctgcactgtctctctcctgccacactatccrtccatgctgagggctttcatattgctaacactgctcttacttttggacatctatgtagctggagtcagaaaacaaaaataagtctaaaattaccatttag

SEQ ID NO: 216990 - DNA, 201 bp, Homo sapiens
aaccactctatctcatagatattttaaattgttacaatagttggctttaaataaaattttaaggcaaagaaattatttttatcagaccatctgtttatcaygtaggcttaagaaatggtttatagctttcccagatttggggggttacaagctcgctcatttgtactatcccccaagggagtttttgttttcataagtgga

SEQ ID NO: 216991 - DNA, 201 bp, Homo sapiens
tcagcctcccaagtagctgggattacaggcgtgtgctaccttgcccagctactttttgtatttttagtagagacaaggtttcaccatattggccaggctcrtcttgaactcctgattctggtgatccgcctgccttgacctcccgaagtgctgggattacaggcataagccaccacacctggccagagacataggtcttat

SEQ ID NO: 216992 - DNA, 201 bp, Homo sapiens
tatggcaaaggtctttagaaagaaccaccaaagacaaatagacgcaatttgtagattatatctggtctacgatgaagtcatttttcactcacctcccttaytctcagtgcaaataataacagaaaattacttgttcctaattctgtgcttatctgacaaatgcgtcaatatttcttagattcacctagcaccttgtaggct

SEQ ID NO: 216993 - DNA, 201 bp, Homo sapiens
agcctcaacatcttgggcttaagcgaacctcatgccttggcctccagtgtagctgggaccacaggtgtgtgccaccaggcctggcatacatatatatacartttttttttttagatacatagttttttttttttttttttttttttttgagatggagtcttactctgttacccaggttggagtgcaatggtacgatctctg

SEQ ID NO: 216994 - DNA, 201 bp, Homo sapiens
ccaccacattagatcgttggttgtccaacatagcttccagtgctaaagggcttcagcactttagaggccactgtgagaaaggagaatttaagcacaatagrgaatttgagggatgggagtgcttatcttgtgttctggggacaccaatcatgtcagtgagaacagctcacttccaaatagtctctgttatgaggattctgc

SEQ ID NO: 216995 - DNA, 201 bp, Homo sapiens
agggtttacaggtgcgtgccaccacgccgggctaatttttgtatttttaatagagacaaagtttcaccatagtggccaggctggtctcgaactcctgaccyggtgatctacctgtcttggtctcccaaaacgctgggattacaggtgtgagccactgtgcctggcccaagttatttttgtttgtaatagtaacacataatg

SEQ ID NO: 216996 - DNA, 201 bp, Homo sapiens
gtgtgatttcggctcactgcaagctccgcctcccgggttcaagcaattcttctgcctcagcctcccgagtagaagggtttacaggtgcgtgccaccacgccgggctaatttttgtatttttaatagagacaaagtttcaccatagtggccaggctggtctcgaactcctgacctggtgatctacctgtcttggtctcccaa

SEQ ID NO: 216997 - DNA, 201 bp, Homo sapiens
agacatttctaacaatgagaccagtctagaaattacaaagagctatctcacagaagtgtttgcaaggattatcgcaatagatcaggatttttcaatcacgrcagcattgacatattagatcaggtaattcttcgataggatgtgttgttctgtgtattataggatgttttgcagcatctttagccttgacccactagaagg

SEQ ID NO: 216998 - DNA, 201 bp, Homo sapiens
ccatgaaaattctcagagcacgaataggtgtgataattgtcagaaagagatagatgagtggaaaggaataaaaaaagaatgtgtatctaatacaaaatgcmtattgttgacttataggttggaggaaacaaatggagataaagaaacaagttttattgctaataaactctgaaggatttaggttcataacatatgtagact

SEQ ID NO: 216999 - DNA, 201 bp, Homo sapiens
tagaaagctgaaactggatcccttccttacaccttatacaacaattaattcaagatgtattgaagacttaaatgttagatctaaaaccataaaaaccctaraagaaaacctaggcaataccattcaggacataggcatgggcaaggacttcataactaaaacaccaaaaccaaaagcaaaaaaaaaaaagctaaaataggc

SEQ ID NO: 217000 - DNA, 201 bp, Homo sapiens
acctcttctagcttcagacttttcttctgcagcttccacatctctgtcagccttcatggaatagaacagagttagggccttgttctggattagtctttggyttaagagaatgttgtgttgtggctggtttaatcatccagaccactaaaactttctccatatcagcaataaggctgttttgctttcttattattcatatgt

SEQ ID NO: 217001 - DNA, 201 bp, Homo sapiens
ggaaaactggctagttgtatgtagaaagctgaaactggatcccttccttacaccttatacaacaattaattcaagatgtattgaagacttaaatgttagayctaaaaccataaaaaccctaaaagaaaacctaggcaataccattcaggacataggcatgggcaaggacttcataactaaaacaccaaaaccaaaagcaaa

SEQ ID NO: 217002 - DNA, 201 bp, Homo sapiens
ctacattagtccatagacaagagtcagtctatcctttgaagctttgaaaccaggcattgactgctcctttccagctgtgaatgccgtagatggcatctacyacttgatggctgtcttgtctacattgaaaatctgttgtttagtatagtcaccttcatctattatgtcagctagatcttctggataatatactgcaacttc

SEQ ID NO: 217003 - DNA, 201 bp, Homo sapiens
agttcctatggaaccataaaagagcccgtattgccaagacaatcctaagccaaaagaacaaagctggaggcctcatgctagctgacttcaaactatactamaaggctacagtaaccaaaacagcatggtactgctaccaaaacagagatatagaccaatggaacagaacagagccctcagaaataacaccacacatctaca

SEQ ID NO: 217004 - DNA, 201 bp, Homo sapiens
atctaccagaggcatcactgtctatggtagctatagccttatgaaaagtatttcttaaataataacaattgaaagtcagaatttctctttgatccatggaytgcaaaacggatgtaatgttagcaggcctgcaaacaacattcatctccttgtacatctacatcatagctcttggttgactaggtgcattgtcaatgagca

SEQ ID NO: 217005 - DNA, 201 bp, Homo sapiens
actttgctttctggggaaattattttccctctaatacttacctttgataatactcacttaattatgatcacaaaaataaatgcagaatcctaattatattkcttgtgcattgtttcaaattttaatccaggcttcatttttagcaataaacttgcaatcccctgataacacacacagagacatacatgtgcctatacagcc

SEQ ID NO: 217006 - DNA, 201 bp, Homo sapiens
cacttatttgaatgatgagaatgaagtggagagaggaagttttatattgctggagagatttaggatatagttccaggagcaaatggaagacatacaagttkctgggaagaaaacttgggaggctttctgggtcaaactgagtgttagagatatatagaacttgcctagagtgggggattattccagggagaaaaaatagct

SEQ ID NO: 217007 - DNA, 201 bp, Homo sapiens
agacattattttcttttaccgtgtcccctgatctcaaatcttttcatttctctgtttgttttttttttaatttaattttagagggctgctgaagtatcaarctaatttagataccaaccctcccggctgtatcagtcttaactgaaccagctctcagaatatttccttaccagagtatatctcagaacattttcatgaacc

SEQ ID NO: 217008 - DNA, 201 bp, Homo sapiens
agatccatgctttatgaaaataagagattcccctcccccccttttattttgagcatttactttagaaaacttgtaattatacatacttgatactatttctraaaaaaaaaaatacatccttttgaaacctaggcaagattttttcagcttaatcatccaggaatgtctctctcaaggacctggaagctgtctctttgaaat

SEQ ID NO: 217009 - DNA, 201 bp, Homo sapiens
ggaatcagggaaccttgcttggtgctctaccccactgtggctgaattggtatgtaatctgcaagacaaagtcccattcactcttccctttccttttctcaygcagaaggagtccctctccataacaaccacagatgggaatttgctgggtcacacctaaagccagaacatctctccatctcacccaaggcccatggcgagt

SEQ ID NO: 217010 - DNA, 201 bp, Homo sapiens
tgggggaaaatttttcatttcacacaactgagccaagttacaggatatttccatgactggatcttccaagttccagaacagaaatattaagctgcaattgwaagatctggttctagatgagtggctattaatgctggttgaagaatctgcaaaactgctacaaagggaagaatgagcccactatgcacattgggatgggaa

SEQ ID NO: 217011 - DNA, 201 bp, Homo sapiens
gacaaatacatagtctcatatggttaactcttgagccttatgaggatgaaaaaccagtatcagaaataaagaccaagttttgatttatcttatgtgccatrttaagtactttaggctgaaggcagtaggaataaatcagctgatttttaaacaggagagagagatatgggcaggttacttatattggcatcagtgggtggg

SEQ ID NO: 217012 - DNA, 201 bp, Homo sapiens
gaataataaaaactgcttggaatttgttaccattattgcagtgcataaataaaaaagaactagatgaatatgtttttcgttttactgtgaatataaattarccacttaaaattattatttcaaattggtaatatcttttttctttccttccttattcatcactgcttttgcaaatccatgtaggaattttagataactatg

SEQ ID NO: 217013 - DNA, 201 bp, Homo sapiens
taaagaccaagttttgatttatcttatgtgccatattaagtactttaggctgaaggcagtaggaataaatcagctgatttttaaacaggagagagagataygggcaggttacttatattggcatcagtgggtgggatagattggataaaaggggcggggaggagaagaaggggcagagaagggaagggagaagagaggata

SEQ ID NO: 217014 - DNA, 201 bp, Homo sapiens
gatatatatatatataatctattatatgtgtatgtgtgtatatatatatgatctattatatgtgtatgtatatatatatatatacacatatatatatatakagagagagagatgagatgagatgggatttttttaggggaattagctcccatgacaggctttctgcaacctggaaacactgaaatgctgatagcatcgctt

SEQ ID NO: 217015 - DNA, 201 bp, Homo sapiens
aaatatttaccagatatactggttaattctcgtacttcctttaggcctcatcttcatctcctcagaccagctttccatagcatccatttaaaatagactcyttcctctcattctctttctgaattcctttttctattcttcttgaaattcttttttgtaattgtgcagttatatatgcatttatttcatatctgtttctct

SEQ ID NO: 217016 - DNA, 201 bp, Homo sapiens
tatgatctctgaaatcaccttgcttctgactgtggtatataacatagcaaaggccgctgctcaatttcccaccacctccaattctgtttttccaatcctgytccccttttttccacagcatttattgccatctgacattctatggatttgcttgtttgtggccagcctccccaacaagaaaggaagctcctcaagagcaag

SEQ ID NO: 217017 - DNA, 201 bp, Homo sapiens
ggatacaaaatcgatgtgcaaaaatcacaagcactcctatacaccaataacagacaaacagagaggcaaagcatgagtgaactcccattcacaattgcttygaagagaataaaatacctaggaatccaacttacaaggaatctgaaggacctcttcaaggagaactacaaagcaccactcaacaaaatgaaagagtacaca

SEQ ID NO: 217018 - DNA, 201 bp, Homo sapiens
gctgtaaaaaacacaaacaagtaaaacctgtttttctcttgccccttaaattatgtcagtacctggcagtcgtttatgttttaaaagtcaacagatggcastcaagggaccaggaacatgataagtgtttaaagggtgtgatttactactcagcaatgtgccagtgatgtggcatgaattaaaaacaagaagtcttccagg

SEQ ID NO: 217019 - DNA, 201 bp, Homo sapiens
taaaaatagcatgagttcattataaacatttagacaattcacagatataaaataaaatagaaacttaaaaaaaattttccccactttccaatccttttctmtactgtttgacatatatctttccagatattttcccataagcttctgcatacatgagtttctaatatttatttgctggatcatattgttttgtaactggct

SEQ ID NO: 217020 - DNA, 201 bp, Homo sapiens
acctgtagtcccagctactaggaaggctgaggcaggaggattgcttgagccccagtgtttgaggtttcattgagccttgatcccaccagtgctctccagcmtgggcaagagagtgagaccttgtctcaaaaaagaaattttatatatatatataatttcttgaatatttacttttctccttttatggagtattttaatgta

SEQ ID NO: 217021 - DNA, 201 bp, Homo sapiens
tactgcctccatctagtcaagactccgaaattctgcccttcattcaatctagaaattatcccaagtaagcaaaaggagttcactgggttttgatgaggcartgggcatagtgcagggagagatttgggcgggcaaaaacaaaatgtaatctttcttaagatttctgaaaatcctgaataacttaccctaactaactaagac

SEQ ID NO: 217022 - DNA, 201 bp, Homo sapiens
cgaatggtcaaagaaaattttaaagcaagacctggtcaggtgagtcagtggtcagcaactttttaaatagcctttatccttatgtaatttttggaatttarcaaacatagcatcgttgaaatagttgcaattcttaattggtcatttaaaacttatccgttttttgctttttagtatattactctacattgtcccagtata

SEQ ID NO: 217023 - DNA, 201 bp, Homo sapiens
tagaaatgtatatatatgtatatttataggataaatataactatttcaaatattaatccaggcttaattttatgtatttaaaataaatatatacacgaatrtatattatttatatatttatacctattcttaatggctacatatatatttatgattaaattattataatccatctatatacatatacacacacacacatac

SEQ ID NO: 217024 - DNA, 201 bp, Homo sapiens
agacttggctttggatttctggacctttgtgcctgtactgtgctgaaagactttacaggtatatgcggagcaataagccagtcaccatcattttggtcacragtcatccctcagatgtcatggaaatccgaatggtcaaagaaaattttaaagcaagacctggtcaggtgagtcagtggtcagcaactttttaaatagcct

SEQ ID NO: 217025 - DNA, 201 bp, Homo sapiens
tacttgctgtctaagacacatgttaaagtttctgagggtgtatccctgagaatggaaatattgggccacagactttgcaaaagtaaaacataaatgataawgccaaattgtcttcaaaagctattgtaccaatttggactcccaccagcagtgtataagagcttaggttgatcaacatcctctccaacacttggtcttggg

SEQ ID NO: 217026 - DNA, 201 bp, Homo sapiens
acttgtttgttcatggatagttacacccagagcatgagaatgagggcagggtcttgatattactttgtgttttattttatacttttgtttgtttgaatgayagtgagcatctattgttttttactcatttattatattttcttatttaaaatacaaattaaaatactattactgtaatgtatgcaatgagcaattgggcag

SEQ ID NO: 217027 - DNA, 201 bp, Homo sapiens
ttgtctatttttgctttgattgtttttgcttgtgggatattactcaagaaatctttgcccagtccaatgtcctggagagtttctccagtgttttcttttaraggtttcatagtttcaggtcttagatgaagtcttcaatcaattttgatttttttaatttaggaagagatagagatctagtttcattcttctggtatgttg

SEQ ID NO: 217028 - DNA, 201 bp, Homo sapiens
aattggtttgctttatttcatatatatcatacttaaataatacattgcttagtttttttaactcaataaaaattatgttctgttatatgtaatctgctgasattttatttcactcaacattatattaatatgattcattaggtttttatttgtaactaaaatcattcagtttcacttcagttagtacttcattttgtgaat

SEQ ID NO: 217029 - DNA, 201 bp, Homo sapiens
attaaatatgttgtgtatatacattacatatctgtaggcatagaaaggtgtatgaaagaatatacacttgtttgttcatggatagttacacccagagcatragaatgagggcagggtcttgatattactttgtgttttattttatacttttgtttgtttgaatgatagtgagcatctattgttttttactcatttattata

SEQ ID NO: 217030 - DNA, 201 bp, Homo sapiens
tcatcaagtgtatattttcatcattttgtggaaatgctcaccttcagttagtgaaggatttactgcagctgcggagtgttagctttgcatactatctaatmctgactgtgcgactgtgtcaagacgggagtatgggtccacttgctattcatggttgatatatgaccgtttggtctctgctgggagttattatgattaacc

SEQ ID NO: 217031 - DNA, 201 bp, Homo sapiens
caacacatattcaaaattgtcaggtttccaaattataaatattattttatgttcttattatattatataaaagtaagtggtaaacaacatgcctagcatawtgcatttttaaacatatgtgctatacatatttaacatatatacacatatgtatgtatattatgcatatacattatgtacattaaaaatctagggttttct

SEQ ID NO: 217032 - DNA, 201 bp, Homo sapiens
tctctgattcagtacgttttagtaaatatgaagataaaatatacattctgcttctcaggaagcactggccactttgtgactgccgtattccaaataattarcatctagctattcataaactaggaaatggcaattgtcatcaagtgtatattttcatcattttgtggaaatgctcaccttcagttagtgaaggatttactg

SEQ ID NO: 217033 - DNA, 201 bp, Homo sapiens
gaatttcttaacattttttaagatttttcaatttctcctaaacataatacataaggaacactttttagataaatgttgtgtaaagttagcaaaaaaaaaaacaaaaacaaagacattattttcttttaccgtgtcccctgatctcaaatcttttcatttctctgtttgttttttttttaatttaattttagagggctgctg

SEQ ID NO: 217034 - DNA, 201 bp, Homo sapiens
gtcacttgattgaaagaaatgttaattttataaattaaaaagagtaatagcacaaatatcagccaataatataatatttaaaaatgtgaactaatattaawgagtataattagagaaaaacacagagtgtttttttggatttctagactaaagagtgtaagcacatctgtgtttggatctcattagttcctcctcacctat

SEQ ID NO: 217035 - DNA, 201 bp, Homo sapiens
agtcacttgattgaaagaaatgttaattttataaattaaaaagagtaatagcacaaatatcagccaataatataatatttaaaaatgtgaactaatattawagagtataattagagaaaaacacagagtgtttttttggatttctagactaaagagtgtaagcacatctgtgtttggatctcattagttcctcctcaccta

SEQ ID NO: 217036 - DNA, 201 bp, Homo sapiens
tagtcacttgattgaaagaaatgttaattttataaattaaaaagagtaatagcacaaatatcagccaataatataatatttaaaaatgtgaactaatattaaagagtataattagagaaaaacacagagtgtttttttggatttctagactaaagagtgtaagcacatctgtgtttggatctcattagttcctcctcacct

SEQ ID NO: 217037 - DNA, 201 bp, Homo sapiens
gtttttagtcctgtcaatatatcatctgcagagattcttttctccagaattattgtcatatgtcctttatggttgtataaaaagagaaaaacttattgctrtgaaaaggatgtattatattatagttgtgtgcactaagaattctgatttttgtttgcttttaacaagtttgggagaaattcactaaactttaatttatac

SEQ ID NO: 217038 - DNA, 201 bp, Homo sapiens
ccatggattgtatatgtaatgtgaaaggaagtgaagtcaaggctgaccccagagtttttgatccgagcaactggaatttcattaactgagatagggaaggwtggggttggagaggaggttctgatggaaatttgtgcaactccacttaggaagtgttattttgagatggcacttagagtgctttcatgaaatatttattga

SEQ ID NO: 217039 - DNA, 201 bp, Homo sapiens
caaacttgggaagaaggtcaatttgaaatattatttatttcctgggatttatttagtctatttgttagagatacgtattatttaactactaaaattttatrttagagaataataaaaactgcttggaatttgttaccattattgcagtgcataaataaaaaagaactagatgaatatgtttttcgttttactgtgaatata

SEQ ID NO: 217040 - DNA, 201 bp, Homo sapiens
gaatatattttaaagttagagttaacaaaatgtattccatggattgtatatgtaatgtgaaaggaagtgaagtcaaggctgaccccagagtttttgatccragcaactggaatttcattaactgagatagggaaggatggggttggagaggaggttctgatggaaatttgtgcaactccacttaggaagtgttattttgag

SEQ ID NO: 217041 - DNA, 201 bp, Homo sapiens
tctttaggatatatccctaaggatggaattgctttgtcatatcatatacatatcttcaacatgactagatattgccaaaacgattgtgccattgtgccatycatcagtggtgggccacagtactcactgctccctttatttccagcatgtgattgtgtgtttttacatttttaacaagctgcttgaagtcagatcagattt

SEQ ID NO: 217042 - DNA, 201 bp, Homo sapiens
gtgtttattcctataattccaaaacttagtactgcttttgctgcatcccatatgttttggtatttttttttatttccatttgtcaagatatttttaatttycattttaatgtctttttaaaaatttcttctttggcccattggttggttaggaacatgttgtttaatttccatatatttgtgagttttctgaaatttgtct

SEQ ID NO: 217043 - DNA, 201 bp, Homo sapiens
gtaaatttcccctgttaaatattttatgatgagtgaaaataaaacctcattgaaatgtaggtgctaggtggcctgttcccacgtttttaacttaaatcaamattcagtaataccccatattaattttgcataaagtataattttaaattattttgcaatttttaatattgcatttatggtctttctgggtcattagaatcc

SEQ ID NO: 217044 - DNA, 201 bp, Homo sapiens
agatagaaaacagttactaaccagattttaatttgatcatactagaaatgttatagattcctatttttaggacttgaagtcagataatgtcaagattctakttcaagattctaatgcttatagtgtagagaatgtcttcttcgtgggcacaaaatgtgttctagaggcttccaagaattgagttacccacagatcttttta

SEQ ID NO: 217045 - DNA, 201 bp, Homo sapiens
tgctttgatataggtgtttattcctataattccaaaacttagtactgcttttgctgcatcccatatgttttggtatttttttttatttccatttgtcaagwtatttttaattttcattttaatgtctttttaaaaatttcttctttggcccattggttggttaggaacatgttgtttaatttccatatatttgtgagtttt

SEQ ID NO: 217046 - DNA, 201 bp, Homo sapiens
acttctggtcttgtttttttgagtcttcttttttcttaattagtctagctaaaggtttgtcaaatttgcttatccttttaaaaacccaactctttgtttgrtttgtcttttctattgttttcctaatctctatttcatttatttctgcacttatctttgtcattttctttcttttactaaatttgggcttagtctgctgtc

SEQ ID NO: 217047 - DNA, 201 bp, Homo sapiens
ctttcacttctggtcttgtttttttgagtcttcttttttcttaattagtctagctaaaggtttgtcaaatttgcttatccttttaaaaacccaactctttktttggtttgtcttttctattgttttcctaatctctatttcatttatttctgcacttatctttgtcattttctttcttttactaaatttgggcttagtctg

SEQ ID NO: 217048 - DNA, 201 bp, Homo sapiens
aaggattggtatttattctttaaataaattcagtagtgaacccattaggtcctggagttttctttggtgagagatttttattcctgattgaatgcccttastcatttttagtctgttcagattttcagtttcttcatgattcagtcttgataggttgtatgtttctgggaatttattcatttctcctaggttatccaattt

SEQ ID NO: 217049 - DNA, 201 bp, Homo sapiens
cctgaaaagaaagtcttttagccattaagcagcttccttccctccagtctctggcaaccacctatctgtgttctgtctctttctagatatttcatatcaayggaatcatacaatatgtaactttttgtgtcgggcttctttcacttagtatatttttgaggttcatccacatggtggatgtgtcagtgcttccttttttat

SEQ ID NO: 217050 - DNA, 201 bp, Homo sapiens
gatacaccacagtttgtttctccattcatccattgatgggcatttgggctgtttccctcttttggctgttgtcaacagtactgctgtgaccatgcacatayatacatttgtttgaattcttttgggcatgttcctaggaatagaattgctgggtcttatggtaattccaggtttaattttttgaggagctgccaagctctt

SEQ ID NO: 217051 - DNA, 201 bp, Homo sapiens
gtgagagagacttgatatgaattcagcacattctcagacatcaatacaataaaattggaaatatattgggattgaggagaagtgaactaatgttagttttytgccgaaaatcaaaaggataaaaagactgtgaccagctgtagaacaaaggacacttgcttttagattagtagctgtatttatggcagagtttgctttggc

SEQ ID NO: 217052 - DNA, 201 bp, Homo sapiens
taagaaagtaccatcagctgggtagcttagacaacaaaaattattctctctcagttttggaggccagaaatctgaaatcaagttgttggcaggattgctcrcctctgagagctgtaaagaaattaggctctgttccagacgtctctccttggcttatagatggccgtcttctccctataactcttaacgtcatcttccctt

SEQ ID NO: 217053 - DNA, 201 bp, Homo sapiens
cctgtgcctggtggactatttccactcaaaatacagcctgaaaaccaacagcactgacagcccctgggagcttgctagccatgcagaatctcaggcccctrcccaaatctccttaatcagaatctgcagtcagcaagaaccccagttgagactgatgcatggtaaaatttggtatccaaatattggtttggtagggctgct

SEQ ID NO: 217054 - DNA, 201 bp, Homo sapiens
gaagtgccagataccaggagtaaaatgtatgttgtctctctctttctctcattctctagatagatagatagatagatagatagatagatagatagatagawagaaaacagttactaaccagattttaatttgatcatactagaaatgttatagattcctatttttaggacttgaagtcagataatgtcaagattctatttc

SEQ ID NO: 217055 - DNA, 201 bp, Homo sapiens
tctgagttttataattttagctcttaccttaggtctatgacccatttgatttgatttttagtatgatatgaggtaggggtctaacttcattcttttgcatktggatattccgttgcctcagcacaatttattgaaaagactatactttctccattgaattgtcttggcccttgtcaaaaatcaattgaccatagacacatg

SEQ ID NO: 217056 - DNA, 201 bp, Homo sapiens
gtgggaagcactcaaatccgtcccctgcagcaggttcttgtgaagggacatccgagcagcacactcccagggctgccccaagagccattcagagggatccsagttccaggtaaggggaccaggcatggaccagtcattggatatgaacactgccctcccctgggggcaggtatgaccttggtagccatggctggccaaggg

SEQ ID NO: 217057 - DNA, 201 bp, Homo sapiens
gcacaaactctctctttgcctgctgccatccatggtgtggcttgctcctccttgccttccagcctgattgtgaggcctccccagccacgtggaactgtaartccattaaaccccttttcctgtataaattacccagcctcgggtatcttcatcagtgtcgtgaaaacagactaatactgattccaatcccaaagtgagatg

SEQ ID NO: 217058 - DNA, 201 bp, Homo sapiens
agttttaggaatttgtgctaatagaaataaggacacactttatgtatatgataagggccatcaacgtgattgtttttaaaacactaaaaatggaatttaarccaagtaggtgatctacaaaccattggaatatctaatgctgctcctcttaaatcattctgatttaggaaattgaaaaatggacctttgaaaatgctagat

SEQ ID NO: 217059 - DNA, 201 bp, Homo sapiens
taatttgattttaacccttctagccatattttattatttttaactgttttgtttatagctgggtacgaacttatgagcacaaggagattctgagctcatargttcacatatttaagaaacattaaagtaacaattcatctctggaggttaagaccttattttctcttcaaaaaaagtctatgtatgattcaagtttttaaa

SEQ ID NO: 217060 - DNA, 201 bp, Homo sapiens
agtagaaaataagttataagtggtgatgtcatttcaacaaaacccaacctgaaattaaaattaatttattaatttgattttaacccttctagccatatttyattatttttaactgttttgtttatagctgggtacgaacttatgagcacaaggagattctgagctcataggttcacatatttaagaaacattaaagtaaca

SEQ ID NO: 217061 - DNA, 201 bp, Homo sapiens
ccttgccttccagcctgattgtgaggcctccccagccacgtggaactgtaagtccattaaaccccttttcctgtataaattacccagcctcgggtatcttyatcagtgtcgtgaaaacagactaatactgattccaatcccaaagtgagatgccaaccagctgattggaatagctgagtgttgggccaaccttggccacag

SEQ ID NO: 217062 - DNA, 201 bp, Homo sapiens
ttttaccatcagctgtgtcatccacctaaacttctccatcccacatactcttcctctcaacggggttgcattcaatgtcctgggtccatgtctgggttttktttgtttgtttgttggtttaatagacagagtcttgctctgtctcccagactggagtgcagtggcatgatctcagctcactgcaacctccacctcccgggt

SEQ ID NO: 217063 - DNA, 201 bp, Homo sapiens
gcccagttcctgcccagcccccagttcaactccctcttacaatcacttttgactcttcaatctgtttcttatgatagttaccttctttttttttttttttttaatggagtctctcgctctgttgcccaggctggagtgcagtggtgtgatctcggctcactgcaacctccaactcccaggttgaagcgattctcctgcctc

SEQ ID NO: 217064 - DNA, 201 bp, Homo sapiens
attaatcccttgggaggccaaggcaggcagattgcttgagctcaggagttcgaaaaccagcctgggtaacatggcaaaacgccaactctacaaaaaaaaaatacaaaaactagccgggtgtggtggtgggcacccgtagtcccaactacctgggagcctgaggtgggaggatcacttgagccagggaggtaggtcaaggct

SEQ ID NO: 217065 - DNA, 201 bp, Homo sapiens
tcatcattctactttgtgtgtctatgaatttctattactttaagtacctcatataagtggaatcatatagtatttgtctttttttgtgactggcttattttgcttagcatgatgccctcaaggttcatctatgttgtagtgtgtatgtgctaatgcgtttttagcatctttaagttctgatggtttccagacaaaaagggc

SEQ ID NO: 217066 - DNA, 201 bp, Homo sapiens
aaagctgtgcacagtggctcacacctgtaatcccagcactttgggattaatcccttgggaggccaaggcaggcagattgcttgagctcaggagttcgaaaaccagcctgggtaacatggcaaaacgccaactctacaaaaaaaaaatacaaaaactagccgggtgtggtggtgggcacccgtagtcccaactacctgggag

SEQ ID NO: 217067 - DNA, 201 bp, Homo sapiens
gtcatcattctactttgtgtgtctatgaatttctattactttaagtacctcatataagtggaatcatatagtatttgtctttttttgtgactggcttattttgcttagcatgatgccctcaaggttcatctatgttgtagtgtgtatgtgctaatgcgtttttagcatctttaagttctgatggtttccagacaaaaaggg

SEQ ID NO: 217068 - DNA, 201 bp, Homo sapiens
agtcatcattctactttgtgtgtctatgaatttctattactttaagtacctcatataagtggaatcatatagtatttgtctttttttgtgactggcttattttgcttagcatgatgccctcaaggttcatctatgttgtagtgtgtatgtgctaatgcgtttttagcatctttaagttctgatggtttccagacaaaaagg

SEQ ID NO: 217069 - DNA, 201 bp, Homo sapiens
gtttcaccatgttagccaggctggtcttgaactcctgacctctggtgatccgcccaccttggcctcccaaagtgctgggattacaggcatgagccactgcmcctggccaggaaagtttttatagacataccacagcaacatttgttgatctatttttgagaaacccacacacaccaggttctcttgggggtctaaagagtc

SEQ ID NO: 217070 - DNA, 201 bp, Homo sapiens
gtgttgaatatttttccagatgatttgaaagaaaaactagactatcacctggaaacttttcggggaaaggttaaaataataagaaacaaaaagagagaggsgctgattcgagcaaggctgattggagcttctcatgcttcaggtaggaacattcctggggacaagagccagtgacggcgtcacagagatcttcccttctga

SEQ ID NO: 217071 - DNA, 201 bp, Homo sapiens
gcagtcatcattctactttgtgtgtctatgaatttctattactttaagtacctcatataagtggaatcatatagtatttgtctttttttgtgactggcttattttgcttagcatgatgccctcaaggttcatctatgttgtagtgtgtatgtgctaatgcgtttttagcatctttaagttctgatggtttccagacaaaaa

SEQ ID NO: 217072 - DNA, 201 bp, Homo sapiens
caggcacccgccaccacggctaattttttggatttttagtagaaatggggtttcaccatgttagccaggctggtcttgaactcctgacctctggtgatccrcccaccttggcctcccaaagtgctgggattacaggcatgagccactgcacctggccaggaaagtttttatagacataccacagcaacatttgttgatcta

SEQ ID NO: 217073 - DNA, 201 bp, Homo sapiens
ctggcagtcatcattctactttgtgtgtctatgaatttctattactttaagtacctcatataagtggaatcatatagtatttgtctttttttgtgactggcttattttgcttagcatgatgccctcaaggttcatctatgttgtagtgtgtatgtgctaatgcgtttttagcatctttaagttctgatggtttccagacaa

SEQ ID NO: 217074 - DNA, 201 bp, Homo sapiens
tatgtatgtattttcagaagtctgcaaattcttaatgagattctccatgagaattctaaaatttcatcttcccacttttatatatatatattttttgagayggaatctcgctctgtcgcctgggctggagtgtagtggcacgatctcagctcactgcaacctttgcctccaggttcaagcaattctcctgcctcagcctcc

SEQ ID NO: 217075 - DNA, 201 bp, Homo sapiens
cttccctttccccactgatacaatcagaatatttatccctccatgtctcatgttgaaatttgtcccacaatgttgaaggtggagcctggcaggatgtgttkgggttacgtggccagatccctcatgaatggcttggtgcctgcctacagtaatgagctctccttctattagctcatgggaaagctggttgtttcaagagcc

SEQ ID NO: 217076 - DNA, 201 bp, Homo sapiens
cctggcagtcatcattctactttgtgtgtctatgaatttctattactttaagtacctcatataagtggaatcatatagtatttgtctttttttgtgactggcttattttgcttagcatgatgccctcaaggttcatctatgttgtagtgtgtatgtgctaatgcgtttttagcatctttaagttctgatggtttccagaca

SEQ ID NO: 217077 - DNA, 201 bp, Homo sapiens
tcctggcagtcatcattctactttgtgtgtctatgaatttctattactttaagtacctcatataagtggaatcatatagtatttgtctttttttgtgactggcttattttgcttagcatgatgccctcaaggttcatctatgttgtagtgtgtatgtgctaatgcgtttttagcatctttaagttctgatggtttccagac

SEQ ID NO: 217078 - DNA, 201 bp, Homo sapiens
cttcctggcagtcatcattctactttgtgtgtctatgaatttctattactttaagtacctcatataagtggaatcatatagtatttgtctttttttgtgactggcttattttgcttagcatgatgccctcaaggttcatctatgttgtagtgtgtatgtgctaatgcgtttttagcatctttaagttctgatggtttccag

SEQ ID NO: 217079 - DNA, 201 bp, Homo sapiens
tggaattttcattttagctttcccttactttttttaaaaaatgtaatttggtctcataaaatgagtttggaagtgtttcttcctccttaattttttggaasagtttgaaaaggattggtatttattctttaaataaattcagtagtgaacccattaggtcctggagttttctttggtgagagatttttattcctgattgaa

SEQ ID NO: 217080 - DNA, 201 bp, Homo sapiens
cccaaccccagcacttcctggcagtcatcattctactttgtgtgtctatgaatttctattactttaagtacctcatataagtggaatcatatagtatttgtctttttttgtgactggcttattttgcttagcatgatgccctcaaggttcatctatgttgtagtgtgtatgtgctaatgcgtttttagcatctttaagttc

SEQ ID NO: 217081 - DNA, 201 bp, Homo sapiens
acaaagtttagagagatttgtccagaaagaaaagtggacttggcagttttaatatttaaaatataacttatttaataggaaattcaattctgtacaaagarcccactactatgtttaaaaattaacttctaagagcaactaccactatctggagtccaaccagatttttagccattattgtaatagccatattatttcatt

SEQ ID NO: 217082 - DNA, 201 bp, Homo sapiens
tctccatttcccaaccccagcacttcctggcagtcatcattctactttgtgtgtctatgaatttctattactttaagtacctcatataagtggaatcatatagtatttgtctttttttgtgactggcttattttgcttagcatgatgccctcaaggttcatctatgttgtagtgtgtatgtgctaatgcgtttttagcatc

SEQ ID NO: 217083 - DNA, 201 bp, Homo sapiens
aatagcatggattttaggaatacgtcataatgatgatacactgtttcaatttctatagttgccgtttatacattctcatgtgttgaatatttttccagatkatttgaaagaaaaactagactatcacctggaaacttttcggggaaaggttaaaataataagaaacaaaaagagagaggggctgattcgagcaaggctgat

SEQ ID NO: 217084 - DNA, 201 bp, Homo sapiens
agacccgcgtttttatgcatttatagatatatacatatatatgcacgtgtatatacacagggttaaggatttttatttattttacttttttttttttttttgagacagtttccctctgtcacccaggctggagtgcaatggcacaatctgtaacctcctcccactgggctcaagcaattctcctgcctcagcctctcaagt

SEQ ID NO: 217085 - DNA, 201 bp, Homo sapiens
gtgagaatgctggattcaatggtagttctacttttagttcgttgagaaatctctgtattgttttccacagcggttgtactaatttacattcctaccaacaytgtgcaagcgttcccttttctcctcatcctcgccagcatctgttacatattagtcatggtattaattagcattcatatctgaagatacatttttccctta

SEQ ID NO: 217086 - DNA, 201 bp, Homo sapiens
aataataaaatcatgtcctttgcagcaaagtgggtggagctggaggtcattatcctaagcaaattaacacaggaacggaagactaaatactgcatgttctyatttacaagtgagagctaaacattgtacatggacacaaagcagggaacaacagatactggggccttcctgagggtggactgtgggaggagggtgaggata

SEQ ID NO: 217087 - DNA, 201 bp, Homo sapiens
agactaaatactgcatgttcttatttacaagtgagagctaaacattgtacatggacacaaagcagggaacaacagatactggggccttcctgagggtggaytgtgggaggagggtgaggataaaaaactacctattgagtgcgatgctcattacctgggtgatgaaatgacctgtgctcaaaacccccagacatgcatttt

SEQ ID NO: 217088 - DNA, 201 bp, Homo sapiens
cacctcagacatgacacttagtatgtgccaaccatgctcgcccaggggctttgcatgtccctattagactgttcaaccctcacaagcacttcgcaaggggragacttgcctagggtcacacagaccctgaatggcagggccagactttgaatccaggctgtactcctgcaggatctattctccctttactacatcatcccc

SEQ ID NO: 217089 - DNA, 201 bp, Homo sapiens
ttggaagcttcctgaggcccccaccaggagcagatgctggctcaatgcttcctgcagaactgtgagccaaataaatctcttttctttataaattacccagyctcaggtattcctttatagcaatgcaaaatgtactaaaacacccacctttgccaagaattatttgaccatttttgcacagatcgatttccgaattctatt

SEQ ID NO: 217090 - DNA, 201 bp, Homo sapiens
atgcttatagtgtagagaatgtcttcttcgtgggcacaaaatgtgttctagaggcttccaagaattgagttacccacagatctttttattaaatcaccaayaagggcttctggccaaaggggcattcattcctgatagaaaatgctctggacagctactttttattccccaaaatttacttttttcaaaaaaattgttctt

SEQ ID NO: 217091 - DNA, 201 bp, Homo sapiens
taagcaaacacacactacatagtaggaaagtctagtcaaattaagaaataaactttcctataacaagtagaaaataagttataagtggtgatgtcatttcracaaaacccaacctgaaattaaaattaatttattaatttgattttaacccttctagccatattttattatttttaactgttttgtttatagctgggtacg

SEQ ID NO: 217092 - DNA, 201 bp, Homo sapiens
tttcccggctggcagcacccgtccttgggcctcacttggctctaggctcacctctgggcttgctctccccactggacgcagcaggctgcactcggctggcrctaccgacctagattctgcacacacacaccactctgtgcttagcccatggctggtctgagtgtgccacaaccatcttccaccttgggcaccagcatctgg

SEQ ID NO: 217093 - DNA, 201 bp, Homo sapiens
taccacttaaatttatcattttaaatatcatttggctatatttgcttcagagagctttctgtttttccaagaaataagttgtaatagtacagtaaaaactscacctccctcccgtccccacgccaccctcagaggttgtctgacctgaattgatgggtgtctttctcatgtatgtctttccacttcctctgtatattatcc

SEQ ID NO: 217094 - DNA, 201 bp, Homo sapiens
ctctccatttcccaaccccagcacttcctggcagtcatcattctactttgtgtgtctatgaatttctattactttaagtacctcatataagtggaatcatatagtatttgtctttttttgtgactggcttattttgcttagcatgatgccctcaaggttcatctatgttgtagtgtgtatgtgctaatgcgtttttagcat

SEQ ID NO: 217095 - DNA, 201 bp, Homo sapiens
aactctccatttcccaaccccagcacttcctggcagtcatcattctactttgtgtgtctatgaatttctattactttaagtacctcatataagtggaatcatatagtatttgtctttttttgtgactggcttattttgcttagcatgatgccctcaaggttcatctatgttgtagtgtgtatgtgctaatgcgtttttagc

SEQ ID NO: 217096 - DNA, 201 bp, Homo sapiens
acaactctccatttcccaaccccagcacttcctggcagtcatcattctactttgtgtgtctatgaatttctattactttaagtacctcatataagtggaatcatatagtatttgtctttttttgtgactggcttattttgcttagcatgatgccctcaaggttcatctatgttgtagtgtgtatgtgctaatgcgttttta

SEQ ID NO: 217097 - DNA, 201 bp, Homo sapiens
aacaactctccatttcccaaccccagcacttcctggcagtcatcattctactttgtgtgtctatgaatttctattactttaagtacctcatataagtggaatcatatagtatttgtctttttttgtgactggcttattttgcttagcatgatgccctcaaggttcatctatgttgtagtgtgtatgtgctaatgcgttttt

SEQ ID NO: 217098 - DNA, 201 bp, Homo sapiens
cagacccgcgtttttatgcatttatagatatatacatatatatgcacgtgtatatacacagggttaaggatttttatttattttacttttttttttttttttgagacagtttccctctgtcacccaggctggagtgcaatggcacaatctgtaacctcctcccactgggctcaagcaattctcctgcctcagcctctcaag

SEQ ID NO: 217099 - DNA, 201 bp, Homo sapiens
acaacaactctccatttcccaaccccagcacttcctggcagtcatcattctactttgtgtgtctatgaatttctattactttaagtacctcatataagtggaatcatatagtatttgtctttttttgtgactggcttattttgcttagcatgatgccctcaaggttcatctatgttgtagtgtgtatgtgctaatgcgttt

SEQ ID NO: 217100 - DNA, 201 bp, Homo sapiens
tcagacccgcgtttttatgcatttatagatatatacatatatatgcacgtgtatatacacagggttaaggatttttatttattttacttttttttttttttttgagacagtttccctctgtcacccaggctggagtgcaatggcacaatctgtaacctcctcccactgggctcaagcaattctcctgcctcagcctctcaa

SEQ ID NO: 217101 - DNA, 201 bp, Homo sapiens
aacaacaactctccatttcccaaccccagcacttcctggcagtcatcattctactttgtgtgtctatgaatttctattactttaagtacctcatataagtggaatcatatagtatttgtctttttttgtgactggcttattttgcttagcatgatgccctcaaggttcatctatgttgtagtgtgtatgtgctaatgcgtt

SEQ ID NO: 217102 - DNA, 201 bp, Homo sapiens
gagtaaaatgtatgttgtctctctctttctctcattctctagatagatagatagatagatagatagatagatagatagatagatagaaaacagttactaaycagattttaatttgatcatactagaaatgttatagattcctatttttaggacttgaagtcagataatgtcaagattctatttcaagattctaatgcttat

SEQ ID NO: 217103 - DNA, 201 bp, Homo sapiens
cacccacctcagcttcccaaagtgctgggattacagacctgagccacagagcccagcccaccttcatattttaaacggagttcttagacttctattttttwaattaattttatacatcaacttcatttttattacatgacctccatttcttctagtttatttttccttaaaaaagtctgtgtgatttttttttcttttttt

SEQ ID NO: 217104 - DNA, 201 bp, Homo sapiens
aaacaacaactctccatttcccaaccccagcacttcctggcagtcatcattctactttgtgtgtctatgaatttctattactttaagtacctcatataagtggaatcatatagtatttgtctttttttgtgactggcttattttgcttagcatgatgccctcaaggttcatctatgttgtagtgtgtatgtgctaatgcgt

SEQ ID NO: 217105 - DNA, 201 bp, Homo sapiens
agtgagggcctggcttccctgctgcccctgtgacccacgctgcctcttctgctcaaaagactgagcagcatgtttggtgacttgctgggcaagaagtcacygggaaagccaccagcaggggacagggtgggataacctgatggattgtggaattctaacttctcacccagaagtacaagaatgctgccatggagacacagt

SEQ ID NO: 217106 - DNA, 201 bp, Homo sapiens
ttaccttctttttttttttttttttaatggagtctctcgctctgttgcccaggctggagtgcagtggtgtgatctcggctcactgcaacctccaactcccrggttgaagcgattctcctgcctcagcctcctgagtagctgagataacaggcgcatgccaccacacacagctaatttttgtattttcagtagagacagggt

SEQ ID NO: 217107 - DNA, 201 bp, Homo sapiens
atacagtacccaataaacaacaactctccatttcccaaccccagcacttcctggcagtcatcattctactttgtgtgtctatgaatttctattactttaagtacctcatataagtggaatcatatagtatttgtctttttttgtgactggcttattttgcttagcatgatgccctcaaggttcatctatgttgtagtgtgt

SEQ ID NO: 217108 - DNA, 201 bp, Homo sapiens
tctcagaaaggctcagtgggctagggggagccccattgcaaaggctgcccgttagggagacctgcaatgggaccgggtggcgcatctccacttcctcccamccaccaccctcacactgtgcttggtcattgggtggcagcaccctgggaacggcatgaccttgacatgagcttcagtagatccgaaaactttggcagtggg

SEQ ID NO: 217109 - DNA, 201 bp, Homo sapiens
taatacagtacccaataaacaacaactctccatttcccaaccccagcacttcctggcagtcatcattctactttgtgtgtctatgaatttctattactttaagtacctcatataagtggaatcatatagtatttgtctttttttgtgactggcttattttgcttagcatgatgccctcaaggttcatctatgttgtagtgt

SEQ ID NO: 217110 - DNA, 201 bp, Homo sapiens
tgatagttaccttctttttttttttttttttaatggagtctctcgctctgttgcccaggctggagtgcagtggtgtgatctcggctcactgcaacctccamctcccaggttgaagcgattctcctgcctcagcctcctgagtagctgagataacaggcgcatgccaccacacacagctaatttttgtattttcagtagaga

SEQ ID NO: 217111 - DNA, 201 bp, Homo sapiens
aatataatacagtacccaataaacaacaactctccatttcccaaccccagcacttcctggcagtcatcattctactttgtgtgtctatgaatttctattactttaagtacctcatataagtggaatcatatagtatttgtctttttttgtgactggcttattttgcttagcatgatgccctcaaggttcatctatgttgta

SEQ ID NO: 217112 - DNA, 201 bp, Homo sapiens
acaaaaactagccgggtgtggtggtgggcacccgtagtcccaactacctgggagcctgaggtgggaggatcacttgagccagggaggtaggtcaaggctgyagtgagccaagattgcaccactgcactccggcctgggtgacagagctagaccctttctcaaaacaaaactgtagaagccaaattctgttctcaagttaga

SEQ ID NO: 217113 - DNA, 201 bp, Homo sapiens
gcaaaacgccaactctacaaaaaaaaaatacaaaaactagccgggtgtggtggtgggcacccgtagtcccaactacctgggagcctgaggtgggaggatcrcttgagccagggaggtaggtcaaggctgtagtgagccaagattgcaccactgcactccggcctgggtgacagagctagaccctttctcaaaacaaaactg

SEQ ID NO: 217114 - DNA, 201 bp, Homo sapiens
tttaattttgtaattggcagagataacagcatgactggattctgataggaatgttcctatctggtgcactcggcaatgtgtgtcacatctggtgcagtagrcaccccacacccgacccataagcaaatctgttagctccatctccaaaatatgccaggaattcaaccgcatcttactacatacattgctgcattcttatcc

SEQ ID NO: 217115 - DNA, 201 bp, Homo sapiens
tgaaaatcatagctgtaatattccaaagtgagttgttagactgaccacgataaagatatttcaaaatagagatctgagaaccaatgagatggctcagccarattgagtcatgttgttagagattaaaggagatttttggagaaagctactgctcaaagcctggtgagagagacttgatatgaattcagcacattctcagac

SEQ ID NO: 217116 - DNA, 201 bp, Homo sapiens
gcctgtggtgcacagaagacaagagttgagctttgggagcctccacctagaattcagaggatatatggaaacacctggatgtccaggcagaagcctgctgygggggcagagccctcgtggagaacctctactagggtaatgcagaggtgaaatgtggggatagagacaccaaacctagtccccactggggcaatacctagt

SEQ ID NO: 217117 - DNA, 201 bp, Homo sapiens
ctgcccaaggccttgggagcccaccccttgcatcactgtgacctggatgtgagacttggagtcaaaggagatcatttcagaactttaagatttaggggccrggcactgtggctcaagcctataatcccagcactttgggaggctaaggcaggtggatcacgaggtcaggagttcaagaccagcctggccaggatggtgaaa

SEQ ID NO: 217118 - DNA, 201 bp, Homo sapiens
aacagaacagctcttgacacaagaggggatccaaagtgggtagccctctgtgtgagagggggctcaaagatggatagtcccaacatggggctgagtctggrgttttcatgggctcagaatggggaagtacatgctggaaagagcaccagtccttccaggtgggcctggaaataacaccatttgattggctacaaggcattg

SEQ ID NO: 217119 - DNA, 201 bp, Homo sapiens
atatggtttggctgtgtgtccccacccaaatctcatgttgaattgtaatcctcaggtgtcgagggaggggccaggtgggaggtgattggatcatgggagtrgtttcccccatgctgttctcatggtagtgagggagttctcatgagacctgatggtttttaaagtggaagtttcccccgtgctcgctctctgtcctgctgc

SEQ ID NO: 217120 - DNA, 201 bp, Homo sapiens
tgactattagctgcattcttttctctacaggattcttttgatcatctgctaagtctctttaatgcacttaaaattttatttgctgtacatatgaatcctcrttgaaatatattttacaaattctgtgcttttctagcattgaattctgcatcttttagtgaagaaaataactgaacatggttttcttctgaagacacaaag

SEQ ID NO: 217121 - DNA, 201 bp, Homo sapiens
gaccttggaactcctggattccacctgctggttggagcttacaggcaggggcccctgtggggctgtgacgccctgtgtgatgtcatcaggctttgtgaggsggactgtactgccctttgagtactactgtgtggccccgcaacccagcacaaccaggtatctgcttggaacccagccaccataaagcctgctagctaaaaa

SEQ ID NO: 217122 - DNA, 201 bp, Homo sapiens
catttgcttctataatgaagaatgtaatgccttgtttcagaccatgtccagtgtcacgaacctcacgccacactattttcttgaagaaattattttggtasatgacatgagcaaagttggtaagatagaacactcattatctcatctactttgttgttgttgttgttgagatttccctctgtcacccaggctggagtgcag

SEQ ID NO: 217123 - DNA, 201 bp, Homo sapiens
gggccaggtgggaggtgattggatcatgggagtagtttcccccatgctgttctcatggtagtgagggagttctcatgagacctgatggtttttaaagtggmagtttcccccgtgctcgctctctgtcctgctgccgtgtaaaatgtaccttgcttccccttcaccttctgccatgattataagtttcctgaggcctcccca

SEQ ID NO: 217124 - DNA, 201 bp, Homo sapiens
cttacaggcaggggcccctgtggggctgtgacgccctgtgtgatgtcatcaggctttgtgagggggactgtactgccctttgagtactactgtgtggcccsgcaacccagcacaaccaggtatctgcttggaacccagccaccataaagcctgctagctaaaaaaaattttacatctctcagttcattcggcacagacccc

SEQ ID NO: 217125 - DNA, 201 bp, Homo sapiens
tttcccccatgctgttctcatggtagtgagggagttctcatgagacctgatggtttttaaagtggaagtttcccccgtgctcgctctctgtcctgctgccrtgtaaaatgtaccttgcttccccttcaccttctgccatgattataagtttcctgaggcctccccaaccatgtggaactgtggtcaattaaacctcttttg

SEQ ID NO: 217126 - DNA, 201 bp, Homo sapiens
aggtgaagtgagccccatgtgctagaagtgggaacaaagatggggggaaacgtctttcactttgaatcagcggaagcagtacatcaaatcactgcgtcttraaggaggtgctagctctggggattaggtttaagaagatttattttattttttaaagaaggagtagcctcctagctggttacaccaccctaaacgtggact

SEQ ID NO: 217127 - DNA, 201 bp, Homo sapiens
ggaagcagtacatcaaatcactgcgtcttgaaggaggtgctagctctggggattaggtttaagaagatttattttattttttaaagaaggagtagcctccwagctggttacaccaccctaaacgtggactgggcattgtaatggctttagttcatgaaaaatagggaaacttttcattacatgtgtctttatgctggtaat

SEQ ID NO: 217128 - DNA, 201 bp, Homo sapiens
gcctggtggactatttccactcaaaatacagcctgaaaaccaacagcactgacagcccctgggagcttgctagccatgcagaatctcaggcccctacccaratctccttaatcagaatctgcagtcagcaagaaccccagttgagactgatgcatggtaaaatttggtatccaaatattggtttggtagggctgctataag

SEQ ID NO: 217129 - DNA, 201 bp, Homo sapiens
taatataatacagtacccaataaacaacaactctccatttcccaaccccagcacttcctggcagtcatcattctactttgtgtgtctatgaatttctattactttaagtacctcatataagtggaatcatatagtatttgtctttttttgtgactggcttattttgcttagcatgatgccctcaaggttcatctatgttgt

SEQ ID NO: 217130 - DNA, 201 bp, Homo sapiens
aagtaatataatacagtacccaataaacaacaactctccatttcccaaccccagcacttcctggcagtcatcattctactttgtgtgtctatgaatttctattactttaagtacctcatataagtggaatcatatagtatttgtctttttttgtgactggcttattttgcttagcatgatgccctcaaggttcatctatgt

SEQ ID NO: 217131 - DNA, 201 bp, Homo sapiens
cagatgagactttggacttggatttttgggttaatgctggaatgagttaatacttcgggtgactgttgggaaggcgtgattggttttgaaatgtgaaatgwgatttgggaggggccaggggcagaatgatatggtttggctgtgtgtccccacccaaatctcatgttgaattgtaatcctcaggtgtcgagggaggggcca

SEQ ID NO: 217132 - DNA, 201 bp, Homo sapiens
gactccacccaccccacaggcagcttgcactctccagagtccccccagatagacaagggagctgcacccattgaccagtctttgaatgcgagatccccagrgagggggacacttgggcaaagcggcttgcctcggtcatgagctgtgagcctgtggcagctacttctcatggcagctgggagaatgggtgtctctgccctg

SEQ ID NO: 217133 - DNA, 201 bp, Homo sapiens
acactgcaaggcagggacacaagtaggttcaatcagaggaagaggctagatggcagtgcagcttccagaagagactccacccaccccacaggcagcttgcrctctccagagtccccccagatagacaagggagctgcacccattgaccagtctttgaatgcgagatccccagagagggggacacttgggcaaagcggcttg

SEQ ID NO: 217134 - DNA, 201 bp, Homo sapiens
gactattcgactaagatttgcatggaaaactttattcggagcagatctggggacaaacactgcaaggcagggacacaagtaggttcaatcagaggaagagsctagatggcagtgcagcttccagaagagactccacccaccccacaggcagcttgcactctccagagtccccccagatagacaagggagctgcacccattg

SEQ ID NO: 217135 - DNA, 201 bp, Homo sapiens
tggatagaagaccagccaggcttgagaattcaaccttccctggagttctgctgcccagataatcaggccctgggcatgatcctcagctctccccgcccttsggttgtaggaaatgagatccttcatatgctaacaagggcctctgactctgttaatttgctttaaattggtgattaccaccctcagccttccttgcctttt

SEQ ID NO: 217136 - DNA, 201 bp, Homo sapiens
cgaaacaaaaagaaaaatatttacagttgattttgataatgaatcacttgtgtttctctcccttaaatgggataaaaattctatcttttttttttttttttgagatagggttttgttcttgttgcccaggctagagtgcaatggggccatctcggctcactgcaacctctgcctcccgggttcaagcgattctcttgcctc

SEQ ID NO: 217137 - DNA, 201 bp, Homo sapiens
acccagacatccccatcccacgtgtcagagccttcctccttccctggatagaagaccagccaggcttgagaattcaaccttccctggagttctgctgcccmgataatcaggccctgggcatgatcctcagctctccccgcccttcggttgtaggaaatgagatccttcatatgctaacaagggcctctgactctgttaatt

SEQ ID NO: 217138 - DNA, 201 bp, Homo sapiens
actcagtcccatatatacaccctgcgtgcctgctggttcaagatggctgattctgcagctcctttgggaacactctccttcttcccttagcagggtagcastttcccacacaggctaagttgtaatgtgaccctacttattgatctggtggccaggagggtactggggggaaggtcctgaggcagggcacgtgttgccttg

SEQ ID NO: 217139 - DNA, 201 bp, Homo sapiens
aaatgtctccagggcatttcagagaccatggcaactcctcccatcacaggcccagaggcctagaaggaaaaatgattttgttggccaggcccagggccctkctgttctgtgcagcgttgggacaaggtgccctgtgtcccagccactccagctccagccatggccaaaagggaccaaagtacaactaaggctgtggtttca

SEQ ID NO: 217140 - DNA, 201 bp, Homo sapiens
cctctggactcagtcccatatatacaccctgcgtgcctgctggttcaagatggctgattctgcagctcctttgggaacactctccttcttcccttagcagrgtagcagtttcccacacaggctaagttgtaatgtgaccctacttattgatctggtggccaggagggtactggggggaaggtcctgaggcagggcacgtgt

SEQ ID NO: 217141 - DNA, 201 bp, Homo sapiens
tcctctggactcagtcccatatatacaccctgcgtgcctgctggttcaagatggctgattctgcagctcctttgggaacactctccttcttcccttagcakggtagcagtttcccacacaggctaagttgtaatgtgaccctacttattgatctggtggccaggagggtactggggggaaggtcctgaggcagggcacgtg

SEQ ID NO: 217142 - DNA, 201 bp, Homo sapiens
acctcccccagcctttcagaaccacaccatgaatttggagacgtaactggtgtcttatcagcttggctgctgtaacaaaatgccacaaactgggtggcttmaacaacaaacatttatttcttagagtcctggaggttggaagtccgagatgagggtgccagcaggatcgagttcttagagtgggccctcttcctgggtgat

SEQ ID NO: 217143 - DNA, 201 bp, Homo sapiens
cccaacatggggctgagtctggggttttcatgggctcagaatggggaagtacatgctggaaagagcaccagtccttccaggtgggcctggaaataacaccrtttgattggctacaaggcattgaggaagttctcactccggtcgtggactctggcaactcagttttcaggctttaagctgtctttggcttgaaggttggat

SEQ ID NO: 217144 - DNA, 201 bp, Homo sapiens
tactttgaattttggtggggacacaaacataccggccgtaagatctgtcaacgttctcatacattcatcacacattgtggtcccctttatgagagactagrgggtcgctgctgccaacatgtgggtgtgcttcccaaccagacacctctgcttctcctcctctatctgagcctttgacccacacagagccttaaacacagg

SEQ ID NO: 217145 - DNA, 201 bp, Homo sapiens
caccctccacttcatgtcagtgactgctgctgccttaactgcctttatctcctccagggcctggctcatggcgtcccacttttccctcctcttgctgcctyctacatcctggatgtgagtgaggtgtctggagatctttgagctgagatgctgcccaggcctgcaagtgcagctatgcagcctgtatccctgcctctttct

SEQ ID NO: 217146 - DNA, 201 bp, Homo sapiens
tgcctacttttgttgtggtttttagtaattttatatacttaaatgtataataggataattttagtattaatgttttctcttttttttttttttttttttttgagacagagtctggctctgtcgtcccaggctggagtgctgtggcacgatctcagctcactgcaacctctgcctcccaggtacaagcgattctcctgcctc

SEQ ID NO: 217147 - DNA, 201 bp, Homo sapiens
aaaaacaaaaactggtgttaggaggaaaatgctccttcatgtatcagctagcttttgctgtataacaaactatcccaaaacacagtactttaaagcaacargcaatggttatttctcataatccattgtatcgctaaagtggttcttctaggcttagccagaatagctgagttgtgttggtgtgagagctactcacagagt

SEQ ID NO: 217148 - DNA, 201 bp, Homo sapiens
ttcccatgatgtggggtggccatctggcactggcagaaggtgggaaggttacagtgttacagctccttttgcacccatcattcggtgggtcccaggtcctkgtcctgcgtccaagaagaatgaggttacacagacactggagagtcagcaaggcagagaagggttttattgagcaacagaacagctcttgacacaagaggg

SEQ ID NO: 217149 - DNA, 201 bp, Homo sapiens
gctcactgcaacctccacctcccgggttcaagagattctcctgcctcagcctcccaagtggctgggattacaggcacccgccaccacggctaattttttgkatttttagtagaaatggggtttcaccatgttagccaggctggtcttgaactcctgacctctggtgatccgcccaccttggcctcccaaagtgctgggatt

SEQ ID NO: 217150 - DNA, 201 bp, Homo sapiens
aaagagaatctgatgaatgtctgataggtcatctagcacatgaatgataggccatctctaaaaccaataaatagcacggtccttcccgaaactctcgaagrcagcagaagtagagcaaccgtcctttcctagcaccaaactttaggtttccacaaaatattcctgtgaaggagagaaatcagctgaagagggaccctcact

SEQ ID NO: 217151 - DNA, 201 bp, Homo sapiens
aagtcaaggctgcagtgagctgtaattgggccactgcaccccaacctgggcagcagagcgagaccctgtctcaaaaaaaaaaaagaaaagaaaaaaaaaaagaaagaaactcaatgactgtaaatgcagatttaggctagggttttggcgtgttggtgggggcatgttggtgactattagctgcattcttttctctacagg

SEQ ID NO: 217152 - DNA, 201 bp, Homo sapiens
tgggaagtcaaggctgcagtgagctgtaattgggccactgcaccccaacctgggcagcagagcgagaccctgtctcaaaaaaaaaaaagaaaagaaaaaawaaaagaaagaaactcaatgactgtaaatgcagatttaggctagggttttggcgtgttggtgggggcatgttggtgactattagctgcattcttttctcta

SEQ ID NO: 217153 - DNA, 201 bp, Homo sapiens
tttgtatttttagtacagaaggggtttcaccatattggccaggctagtctcgaactcttggcctcaagtggtctacctgcctcggcctcctgaagtgttgrgattacagccatgagccattgtgcctggctagaaatttttaagtctttaagttcaccagaaagcccacttcactggctaacacagtgaaaccccttctct

SEQ ID NO: 217154 - DNA, 201 bp, Homo sapiens
gatcatttgagcctgggaagtcaaggctgcagtgagctgtaattgggccactgcaccccaacctgggcagcagagcgagaccctgtctcaaaaaaaaaaaagaaaagaaaaaaaaaaagaaagaaactcaatgactgtaaatgcagatttaggctagggttttggcgtgttggtgggggcatgttggtgactattagctgc

SEQ ID NO: 217155 - DNA, 201 bp, Homo sapiens
ttagtacagaaggggtttcaccatattggccaggctagtctcgaactcttggcctcaagtggtctacctgcctcggcctcctgaagtgttgagattacagscatgagccattgtgcctggctagaaatttttaagtctttaagttcaccagaaagcccacttcactggctaacacagtgaaaccccttctctactaaaaat

SEQ ID NO: 217156 - DNA, 201 bp, Homo sapiens
ttttgggggccaaggcagaaggatcacttgagctcaggagtttgagaccagcctgggcaacatagcaagacctcatctctatttaaaaaaaaaaaaaaaaacaggcgtggtggcactcaccagcctgtagtaccagctacttgggaggctgaaagaggaggatcatttgagcctgggaagtcaaggctgcagtgagctgta

SEQ ID NO: 217157 - DNA, 201 bp, Homo sapiens
caaagtgctgggattacaggcatgagacaccacacctggccccaaaattctcttttaaagttagaacttctgtggaatagcatggattttaggaatacgtyataatgatgatacactgtttcaatttctatagttgccgtttatacattctcatgtgttgaatatttttccagatgatttgaaagaaaaactagactatca

SEQ ID NO: 217158 - DNA, 201 bp, Homo sapiens
agaagggttttattgagcaacagaacagctcttgacacaagaggggatccaaagtgggtagccctctgtgtgagagggggctcaaagatggatagtcccarcatggggctgagtctggggttttcatgggctcagaatggggaagtacatgctggaaagagcaccagtccttccaggtgggcctggaaataacaccatttg

SEQ ID NO: 217159 - DNA, 201 bp, Homo sapiens
gaaggatcacttgagctcaggagtttgagaccagcctgggcaacatagcaagacctcatctctatttaaaaaaaaaaaaaaaaacaggcgtggtggcactmaccagcctgtagtaccagctacttgggaggctgaaagaggaggatcatttgagcctgggaagtcaaggctgcagtgagctgtaattgggccactgcaccc

SEQ ID NO: 217160 - DNA, 201 bp, Homo sapiens
atgtggggtggccatctggcactggcagaaggtgggaaggttacagtgttacagctccttttgcacccatcattcggtgggtcccaggtccttgtcctgcrtccaagaagaatgaggttacacagacactggagagtcagcaaggcagagaagggttttattgagcaacagaacagctcttgacacaagaggggatccaaa

SEQ ID NO: 217161 - DNA, 201 bp, Homo sapiens
gtaccagctacttgggaggctgaaagaggaggatcatttgagcctgggaagtcaaggctgcagtgagctgtaattgggccactgcaccccaacctgggcarcagagcgagaccctgtctcaaaaaaaaaaaagaaaagaaaaaaaaaaagaaagaaactcaatgactgtaaatgcagatttaggctagggttttggcgtgt

SEQ ID NO: 217162 - DNA, 201 bp, Homo sapiens
tgtgttgcagctcatttgtgctacagctcattctgtcccaccatcctgctccagcccactggtgctcctaggctggcccagccctaccaccacttcccatkatgtggggtggccatctggcactggcagaaggtgggaaggttacagtgttacagctccttttgcacccatcattcggtgggtcccaggtccttgtcctgc

SEQ ID NO: 217163 - DNA, 201 bp, Homo sapiens
gggtgtgttgcagctcatttgtgctacagctcattctgtcccaccatcctgctccagcccactggtgctcctaggctggcccagccctaccaccacttccyatgatgtggggtggccatctggcactggcagaaggtgggaaggttacagtgttacagctccttttgcacccatcattcggtgggtcccaggtccttgtcc

SEQ ID NO: 217164 - DNA, 201 bp, Homo sapiens
agcccccaaggactgttacagctctctctctccttcctgccacctgcagcatagtgaaacggggttggggaggggggtgtgttatggcttgtttggttgcrgcaaacagtgcaaggggtgtgttgcagctcatttgtgctacagctcattctgtcccaccatcctgctccagcccactggtgctcctaggctggcccagcc

SEQ ID NO: 217165 - DNA, 201 bp, Homo sapiens
gggtggtttccctcatgctgttctcatgatagtgagggagttctcatgagacctgatgattttaaaagtagcagtttcccctgcattctctctctctctcycttctgccaccatgtaagacatgccttgctttcccttcaccttctaccatgattgtcagtttcctgaggcttcccagccatgtggaactgagtcaattac

SEQ ID NO: 217166 - DNA, 201 bp, Homo sapiens
ctggatgagggggaacatggtggtgcctgaaaactcagagatgccaaccgccacagagccccaaggggtgttacagctctcacctggggagtcccaaggtstgagcccccaaggactgttacagctctctctctccttcctgccacctgcagcatagtgaaacggggttggggaggggggtgtgttatggcttgtttggtt

SEQ ID NO: 217167 - DNA, 201 bp, Homo sapiens
ccagataccaggagtaaaatgtatgttgtctctctctttctctcattctctagatagatagatagatagatagatagatagatagatagatagatagaaaacagttactaaccagattttaatttgatcatactagaaatgttatagattcctatttttaggacttgaagtcagataatgtcaagattctatttcaagatt

SEQ ID NO: 217168 - DNA, 201 bp, Homo sapiens
tcccttttacctcctgccaagattggaagcttcctgaggcccccaccaggagcagatgctggctcaatgcttcctgcagaactgtgagccaaataaatctmttttctttataaattacccagcctcaggtattcctttatagcaatgcaaaatgtactaaaacacccacctttgccaagaattatttgaccatttttgcac

SEQ ID NO: 217169 - DNA, 201 bp, Homo sapiens
tctttcctttcctgcatcactgctagtaagcctttacttatatgattctaattacattttcttgcaggtacagattttaaccatacaaacccagaacttcrtaaagaacttttaaaatatggatttaatgtgattatcagtagaagcttgggcatcgaaagagaagtgccagataccaggagtaaaatgtatgttgtctct

SEQ ID NO: 217170 - DNA, 201 bp, Homo sapiens
ttgcctacttttgttgtggtttttagtaattttatatacttaaatgtataataggataattttagtattaatgttttctcttttttttttttttttttttttgagacagagtctggctctgtcgtcccaggctggagtgctgtggcacgatctcagctcactgcaacctctgcctcccaggtacaagcgattctcctgcct

SEQ ID NO: 217171 - DNA, 201 bp, Homo sapiens
attgcctacttttgttgtggtttttagtaattttatatacttaaatgtataataggataattttagtattaatgttttctcttttttttttttttttttttttgagacagagtctggctctgtcgtcccaggctggagtgctgtggcacgatctcagctcactgcaacctctgcctcccaggtacaagcgattctcctgcc

SEQ ID NO: 217172 - DNA, 201 bp, Homo sapiens
cccaagttttcctttgtagaggctcagcctctaccagtctacttctccaaagaagaaaccactctgactcctgcctgggttttgctgtgcagggctgggcraagagagctgactattctgaatactaacacgtggctttccccaagcccaaagccatgtgtccactgactcaccaggggcatccaagccccaagctgctcc

SEQ ID NO: 217173 - DNA, 201 bp, Homo sapiens
taccggccgtaagatctgtcaacgttctcatacattcatcacacattgtggtcccctttatgagagactagggggtcgctgctgccaacatgtgggtgtgyttcccaaccagacacctctgcttctcctcctctatctgagcctttgacccacacagagccttaaacacaggactagggtgttctaggctctgatggagct

SEQ ID NO: 217174 - DNA, 201 bp, Homo sapiens
attgtccaaaacccaagagaaaccaaacacaatatggagagcatcttttcagacccgcgtttttatgcatttatagatatatacatatatatgcacgtgtrtatacacagggttaaggatttttatttattttacttttttttttttttttgagacagtttccctctgtcacccaggctggagtgcaatggcacaatctgt

SEQ ID NO: 217175 - DNA, 201 bp, Homo sapiens
cctgcccagcccccagttcaactccctcttacaatcacttttgactcttcaatctgtttcttatgatagttaccttctttttttttttttttttaatggartctctcgctctgttgcccaggctggagtgcagtggtgtgatctcggctcactgcaacctccaactcccaggttgaagcgattctcctgcctcagcctcct

SEQ ID NO: 217176 - DNA, 201 bp, Homo sapiens
cagcactttgggaggccaaggtgggcagatccctcgagctcaggagctccagagcagcctgggcaacatggcaaaaccccatcacttaaaaaaagcggggyacggggggtaactgctcataaagcgcattatttgaattttatcttgaagctatgaggagctattaagggcttaatgcaggaaaatgagatgatctaggaa

SEQ ID NO: 217177 - DNA, 201 bp, Homo sapiens
atcccagcactttgggaggccaaggtgggcagatccctcgagctcaggagctccagagcagcctgggcaacatggcaaaaccccatcacttaaaaaaagcrgggtacggggggtaactgctcataaagcgcattatttgaattttatcttgaagctatgaggagctattaagggcttaatgcaggaaaatgagatgatcta

SEQ ID NO: 217178 - DNA, 201 bp, Homo sapiens
acaggcataagccaccgcaccagccatttttttttttcattttctcgattgtgtcttttaagcacaaaagtttttgcttttgatgaattccaacgtatatrttttttcttatgtcccctgtatttttggtgtcatatctaagaaaccattgcctcacctaaggtcataaatatatgcttatgtttccttctgagttttata

SEQ ID NO: 217179 - DNA, 201 bp, Homo sapiens
cttgtgcatgggaagagtgtggagtgagggcctggcttccctgctgcccctgtgacccacgctgcctcttctgctcaaaagactgagcagcatgtttggtracttgctgggcaagaagtcaccgggaaagccaccagcaggggacagggtgggataacctgatggattgtggaattctaacttctcacccagaagtacaag

SEQ ID NO: 217180 - DNA, 201 bp, Homo sapiens; identical to SEQ ID NO: 38878

SEQ ID NO: 217181 - DNA, 201 bp, Homo sapiens
gagtgcaagaccagcctgggcaatgtagcaagaccctattgctacaaaatatttaaaaattagccaggtgttgtggtgcacacctgtagtcccagctactsaggacgttgaggcacgaggattgcttgatcctgggaggtcaaggctgcagtgagctatgatcatgccactgcactccaacgttggtaacagaatgaggcc

SEQ ID NO: 217182 - DNA, 201 bp, Homo sapiens
tcccaaagtgctgggattacaggcatgagacaccacacctggccccaaaattctcttttaaagttagaacttctgtggaatagcatggattttaggaatamgtcataatgatgatacactgtttcaatttctatagttgccgtttatacattctcatgtgttgaatatttttccagatgatttgaaagaaaaactagacta

SEQ ID NO: 217183 - DNA, 201 bp, Homo sapiens
tgcaagctccgcctccggggttcacgccattctcctgcctcagcctcccgagtagctgggactacaggcaccagccgccacgcctggctatttttttttttgtatttttaggagagacggggtttcaccgtgttagccaggatggtgttgatctcctgacctcgtgatccacccacctcagcctcccaaagtgctgggact

SEQ ID NO: 217184 - DNA, 201 bp, Homo sapiens
agcgagaccctgtctcaaaaaaaaaaaagaaaagaaaaaaaaaaagaaagaaactcaatgactgtaaatgcagatttaggctagggttttggcgtgttggygggggcatgttggtgactattagctgcattcttttctctacaggattcttttgatcatctgctaagtctctttaatgcacttaaaattttatttgctgta

SEQ ID NO: 217185 - DNA, 201 bp, Homo sapiens
aagtgccagataccaggagtaaaatgtatgttgtctctctctttctctcattctctagatagatagatagatagatagatagatagatagatagatagatwgaaaacagttactaaccagattttaatttgatcatactagaaatgttatagattcctatttttaggacttgaagtcagataatgtcaagattctatttca

SEQ ID NO: 217186 - DNA, 201 bp, Homo sapiens
ctttatttgctttttcctttattgccatttgcaatccacaggtagtttcccaaaaaaaagaatacatggagagtaatttttgtgagccctttacatagctraaaatatttttattccactcccaagcttgattaaattttgactagatcaagaattgatgcataaaatttcaagctgttttatagtttcacaatccagtgt

SEQ ID NO: 217187 - DNA, 201 bp, Homo sapiens
actaaagaagtggaaaaagcccaggtgcagaggaagaatcataatcatgtaatgcgccttctatctgaatacttactgcgtgccaggcactgctctaagtrttgtaggcatgttaattcattgcatcttcacagcccttggaggtaggttgatatcgctattattatttttcccaaatgtaaacacaaaagcagagataga

SEQ ID NO: 217188 - DNA, 201 bp, Homo sapiens
cctcctacgatcacgcctcctgccgcatgtaggggaatgttggcagaacgctgagctggaaccacgggaggcgaatcatttgtaagggcattcctcaggcygcattgcaagctgatgaaatgtccctgctccttagcaggaaacacctccttaaggaatggaaggacaaaagaaaaaaaacaaaattggactctctttttc

SEQ ID NO: 217189 - DNA, 201 bp, Homo sapiens
tcttctgccaccatgtaagacatgccttgctttcccttcaccttctaccatgattgtcagtttcctgaggcttcccagccatgtggaactgagtcaattamacctcttttgtttagcaattacccagtctcaggtagaatctttatagcagtgtgaaaatggattaatacagaaaataggtaccaggagtggggcactgct

SEQ ID NO: 217190 - DNA, 201 bp, Homo sapiens
attttagtattaatgttttctcttttttttttttttttttttttgagacagagtctggctctgtcgtcccaggctggagtgctgtggcacgatctcagctyactgcaacctctgcctcccaggtacaagcgattctcctgcctcagcctcccgagtagctgggactacaggcgcatgccaccttgcctggctaattttttg

SEQ ID NO: 217191 - DNA, 201 bp, Homo sapiens
tcagttttgtgtattatacaggcagagttggagagtcagtatattcctttttctggccctacattccctatagatagcaaatgacaactaatttattattyaaacattaattattcctactccaatatttcaatggcgcctttcctgatggcctgtcatatcttttaaatatacttgggtgtctttttataaagaagtatg

SEQ ID NO: 217192 - DNA, 201 bp, Homo sapiens
aggcctcctacgatcacgcctcctgccgcatgtaggggaatgttggcagaacgctgagctggaaccacgggaggcgaatcatttgtaagggcattcctcargctgcattgcaagctgatgaaatgtccctgctccttagcaggaaacacctccttaaggaatggaaggacaaaagaaaaaaaacaaaattggactctcttt

SEQ ID NO: 217193 - DNA, 201 bp, Homo sapiens
cttcaaaaacattacccagcccgcctcccgactgccagcattgtcatttgcttctataatgaagaatgtaatgccttgtttcagaccatgtccagtgtcaygaacctcacgccacactattttcttgaagaaattattttggtagatgacatgagcaaagttggtaagatagaacactcattatctcatctactttgttgt

SEQ ID NO: 217194 - DNA, 201 bp, Homo sapiens
attagcattcatatctgaagatacatttttcccttagttctaatgacgaccaaaaaagctaggtgcaatgagttttggaaaacttaacacacacacacacaaaaagcaaaatcatgcctagggcttaagccaatgataactcaagacctccccagctccctgacatgcaggcatcaccatgaccaaggatcatgccctttt

SEQ ID NO: 217195 - DNA, 201 bp, Homo sapiens
aattagcattcatatctgaagatacatttttcccttagttctaatgacgaccaaaaaagctaggtgcaatgagttttggaaaacttaacacacacacacacaaaaagcaaaatcatgcctagggcttaagccaatgataactcaagacctccccagctccctgacatgcaggcatcaccatgaccaaggatcatgcccttt

SEQ ID NO: 217196 - DNA, 201 bp, Homo sapiens
gaacatccagtaccattccagcagcacatgcaataaacaatttatggggctccttgtaaaaatggaaaacatttaataaaatattagattcttggcctggkgtggtggctcatgcctgtaatctcagcactttgggaggctgaggcaagtggattgtttgagcccgggaatttcaagaccagcctcagcaacatagcaaga

SEQ ID NO: 217197 - DNA, 201 bp, Homo sapiens
catttagcattaggtatgtctcctaatgctatccctccccactccccccaccccacaacagtccccagagtgtgatgttccccttgcacaccacattcttraacatcaataccaaaaaattggaaagatacagcaataacaggctgggtgccgtggctcacgcctgtaatcccagtgctttgggaggctgaggcgggagga

SEQ ID NO: 217198 - DNA, 201 bp, Homo sapiens
attttaggaatacgtcataatgatgatacactgtttcaatttctatagttgccgtttatacattctcatgtgttgaatatttttccagatgatttgaaagraaaactagactatcacctggaaacttttcggggaaaggttaaaataataagaaacaaaaagagagaggggctgattcgagcaaggctgattggagcttct

SEQ ID NO: 217199 - DNA, 201 bp, Homo sapiens
tagtcatggtattaattagcattcatatctgaagatacatttttcccttagttctaatgacgaccaaaaaagctaggtgcaatgagttttggaaaacttaacacacacacacacaaaaagcaaaatcatgcctagggcttaagccaatgataactcaagacctccccagctccctgacatgcaggcatcaccatgaccaag

SEQ ID NO: 217200 - DNA, 201 bp, Homo sapiens
aggccatctctaaaaccaataaatagcacggtccttcccgaaactctcgaaggcagcagaagtagagcaaccgtcctttcctagcaccaaactttaggttyccacaaaatattcctgtgaaggagagaaatcagctgaagagggaccctcactactactttgctctccttacaggatgtaaatttcccctgttaaatattt

SEQ ID NO: 217201 - DNA, 201 bp, Homo sapiens
tgtaaatttcccctgttaaatattttatgatgagtgaaaataaaacctcattgaaatgtaggtgctaggtggcctgttcccacgtttttaacttaaatcaraattcagtaataccccatattaattttgcataaagtataattttaaattattttgcaatttttaatattgcatttatggtctttctgggtcattagaatc

SEQ ID NO: 217202 - DNA, 201 bp, Homo sapiens
ccttcacaatgttgtacagccatgacctctaactccaaaacattttcattacctgaaaagaaagtcttttagccattaagcagcttccttccctccagtcyctggcaaccacctatctgtgttctgtctctttctagatatttcatatcaacggaatcatacaatatgtaactttttgtgtcgggcttctttcacttagta

SEQ ID NO: 217203 - DNA, 201 bp, Homo sapiens
acaatgttgtacagccatgacctctaactccaaaacattttcattacctgaaaagaaagtcttttagccattaagcagcttccttccctccagtctctggmaaccacctatctgtgttctgtctctttctagatatttcatatcaacggaatcatacaatatgtaactttttgtgtcgggcttctttcacttagtatattt

SEQ ID NO: 217204 - DNA, 201 bp, Homo sapiens
cctcaagtgatccgcccacctcggcctctgaaagtgctgggattacaggcatgagccactgcgcctggccatttattctaatttttaaatgtgaacaatcrtgttttaaattgcagcttcccctttttattctctcaatgctcctttttgatagcctgttcctctggttgtatgactgtagcaccttctttgatctctctg

SEQ ID NO: 217205 - DNA, 201 bp, Homo sapiens
cagctaatctttgtatttttagtagagatggggtctcaccatgttggccaggctggtctccaactcctcacctcaagtgatccgcccacctcggcctctgraagtgctgggattacaggcatgagccactgcgcctggccatttattctaatttttaaatgtgaacaatcgtgttttaaattgcagcttcccctttttatt

SEQ ID NO: 217206 - DNA, 201 bp, Homo sapiens
gtcttgctctgtctcccagactggagtgcagtggcatgatctcagctcactgcaacctccacctcccgggttcacacaattctcttcctccagcctcccargtagctgggattacaggagcccaccaccatgcccagctaatttttctatttttagtagagacaagctttcaccatgttggccagtctggtctcgaactcc

SEQ ID NO: 217207 - DNA, 201 bp, Homo sapiens
catccacctaaacttctccatcccacatactcttcctctcaacggggttgcattcaatgtcctgggtccatgtctgggttttttttgtttgtttgttggtttaatagacagagtcttgctctgtctcccagactggagtgcagtggcatgatctcagctcactgcaacctccacctcccgggttcacacaattctcttcct

SEQ ID NO: 217208 - DNA, 201 bp, Homo sapiens
tcatccacctaaacttctccatcccacatactcttcctctcaacggggttgcattcaatgtcctgggtccatgtctgggttttttttgtttgtttgttggtttaatagacagagtcttgctctgtctcccagactggagtgcagtggcatgatctcagctcactgcaacctccacctcccgggttcacacaattctcttcc

SEQ ID NO: 217209 - DNA, 201 bp, Homo sapiens
gtcatccacctaaacttctccatcccacatactcttcctctcaacggggttgcattcaatgtcctgggtccatgtctgggttttttttgtttgtttgttggtttaatagacagagtcttgctctgtctcccagactggagtgcagtggcatgatctcagctcactgcaacctccacctcccgggttcacacaattctcttc

SEQ ID NO: 217210 - DNA, 201 bp, Homo sapiens
tgtcatccacctaaacttctccatcccacatactcttcctctcaacggggttgcattcaatgtcctgggtccatgtctgggttttttttgtttgtttgttggtttaatagacagagtcttgctctgtctcccagactggagtgcagtggcatgatctcagctcactgcaacctccacctcccgggttcacacaattctctt

SEQ ID NO: 217211 - DNA, 201 bp, Homo sapiens; identical to SEQ ID NO: 38879

SEQ ID NO: 217212 - DNA, 201 bp, Homo sapiens
aaactcagagatgccaaccgccacagagccccaaggggtgttacagctctcacctggggagtcccaaggtctgagcccccaaggactgttacagctctctstctccttcctgccacctgcagcatagtgaaacggggttggggaggggggtgtgttatggcttgtttggttgcggcaaacagtgcaaggggtgtgttgcag

SEQ ID NO: 217213 - DNA, 201 bp, Homo sapiens; identical to SEQ ID NO: 38891

SEQ ID NO: 217214 - DNA, 201 bp, Homo sapiens
ggctttcagacttggatattaaaggcctgggtaattgcctttagaagggatagcaaacagtatgaaacacaaagattttgttgtgtagatactagattcawcattcattattagtgtagattaaagttttagcttttgatttttgtttggatgtttttagtttcttaagcaggtgagaaatttattgaataatagacatct

SEQ ID NO: 217215 - DNA, 201 bp, Homo sapiens
tataacttcttattttatatattttatactggaacagctcgtgccctcagtctcttgcctcggcacctgggtggcttgccgcccacaatagggtacactgktttttctttactacttctatctctctttctctttgatgacttctttgtctctctgagtccctctttgtctgtctcttcctctctctctttgcctttctat

SEQ ID NO: 217216 - DNA, 201 bp, Homo sapiens
cccaggctcaagtgatccttccacctcagcctcccaagtagctgggaccacaggtgtgtgccagcatgcccagctattttttttttttttttttttttggkgttctttgtagcgacagggttttgcgatgttgcccaggccagtcttgaattcctgggctcaagctgtgtgcctgctgggcctctcaaagtactgggatta

SEQ ID NO: 217217 - DNA, 201 bp, Homo sapiens
gtagtacttcatccctcactcctctcccatcttttagagtctccagtatctgttattccactctgtgtgtgtgtgtatatatatatatatatttttttaaattataaaagtattgttgtaatgaatggttggatataaatttaaaatgtcttaatgtgctaatttaaaggtttgttctttttttgttggtttattttattg

SEQ ID NO: 217218 - DNA, 201 bp, Homo sapiens
gcttgaacctgggaggcggaggtcacgatgagccgagatagcgccactgcactccagcctgggcaacaagagcgagactccgtctcaaaaaaaaaaaaaaaggcagggggtgggggaagagggtgaacaaggggacagtaaatctgtaggtgaataataatctaaaccattcgagccttttaaaatgtcagaatttcctca

SEQ ID NO: 217219 - DNA, 201 bp, Homo sapiens
gaggcagggctcagatgctggagggctgtgtgtgccctgggaaagaattcagggttctcaatgtgttctctaagttcatggcttttttttgggggggggggatggagtctttctctgttgcccaggctggagtgtggtggcatgatgtcggctcactataacctccacctcccaagttcaagtgattctcctgcctcggcc

SEQ ID NO: 217220 - DNA, 201 bp, Homo sapiens
gaacctgggaggcggaggtcacgatgagccgagatagcgccactgcactccagcctgggcaacaagagcgagactccgtctcaaaaaaaaaaaaaaaggcrgggggtgggggaagagggtgaacaaggggacagtaaatctgtaggtgaataataatctaaaccattcgagccttttaaaatgtcagaatttcctcatctt

SEQ ID NO: 217221 - DNA, 201 bp, Homo sapiens
cccaaatttgggccgtgaaattttttccgtggcttactttaaaaaacacacctctttttatttgaaataactgtaggttcacaggaagttacaaagacggyctatgtacctttatccagttgctccatcataaaattcccctgtcagaaccaggaatccacattggtacagtgtgtgtggtccagggtcattctgtcacac

SEQ ID NO: 217222 - DNA, 201 bp, Homo sapiens
taattggttaatggacgtaagattgacttacaaaactataaatggcattttctttaaaattccctcttaatccttctgattccatcaaggagcaagtctcygttgttactagtatatttccatcatacactgctctccccctttaaaaagaaataaccgatctcaaattcagtcttctgcagaaaatatatctggttagtc

SEQ ID NO: 217223 - DNA, 201 bp, Homo sapiens
ggaacttcacttttagtatctgtcttctcttatttctctgaagcccacagtgacctgaagcaattaacaaaaaaaaaagagaagcagctcctctacatccyatctgcagtggatgcagactgaattcaaggcttgtgagactttttttctaggtttctagtcatgtaaaaacttactgaattggctgtgtggagttattta

SEQ ID NO: 217224 - DNA, 201 bp, Homo sapiens
ttactgtgaactgacttttttttagatagcaatagctatttaggtttttttcccttatgatctcttcaggtcctcattgagatatagtttaggatctgtcmgaagcaagccagtttgcatggaagtcattgtttcaggttcactgtgaccagatgtggtcttcctttaaattggtgttaattggaaaaagtaacactttta

SEQ ID NO: 217225 - DNA, 201 bp, Homo sapiens
ccactgatgtgcatgtggaaggttctgcctttctgcattaagtgacagcggagagctgcctacatcccccacccttcaggctgtttacagacactgagctrtgggactgattcacgggcatcattgaaaactgtctgagatactgcttttatcactagttgaagttggatagataacatttggtgctttaagtagttcatg

SEQ ID NO: 217226 - DNA, 201 bp, Homo sapiens
agcgattccatttcaagaaaccatttatttgcacatccatatcttccgtctctatttctaattctggttctcttgctatttccaccctatctgcagtgacktactccactgaagtcttgaacctgtcggtcaaggttggaaccaacttcttctaaactcccgttaatattgacattttgtagttctggcaaatgtggaata

SEQ ID NO: 217227 - DNA, 201 bp, Homo sapiens
ggcagccatcatccatagttacagtgcatgtcctagtcaccagtgagaaggcagctgtgttctctgtactctgtttactgaggcagagagatgtcttctamgtgtgtgccaaacttcaaaatattttgattaaaataattgtaataaaaatacctacatacaactggccaccgtcatggcaccaaaacatcttggaatact

SEQ ID NO: 217228 - DNA, 201 bp, Homo sapiens
gacatcctagtgatcagtcctctgtttttccgaaaatgtccttatgtttcaccattgttttgaagaacatgtttactcagtatccagttctaggttggcartagcagacatatatgttctttcagcctttgaaggcatcattcaagaaccttctggcattcaccgtttcagacaggaagtcagcgttgttagtcttacttt

SEQ ID NO: 217229 - DNA, 201 bp, Homo sapiens
ttccagaaaattctgacttctcatttcataataagttacgaggtatttggtatatataaagcgtgtgtgtgtgtgtgtgtgtgtgtgtgtgtgtgtgtgtrtatatatatacatatatatatatacacacaaagtaccaggtatttggtactttttgttaagaggatactttttaaattaaatatttctcaaaaactagaa

SEQ ID NO: 217230 - DNA, 201 bp, Homo sapiens
cttgacctcctgagctcaagcgatcctcttgcctcagcctcctgattagctgggactacaggcatgtgcctgtaatttttctattttttgtagagatgggsgtctcactatgttgcccaggctggtgtcgaactcttgggctcaagtgatcctcctgcctcggcctcccagagtgctccatgactatctttattgacaaat

SEQ ID NO: 217231 - DNA, 201 bp, Homo sapiens
tctaccttgggggtggtcttctcagtctgcagtacagtggtccccccagaaaccacaggtagtacaaaccctgtatatactgtatttctttctagagatayacctgtgataaatttatcaattaggcacagtaagaggttcacaacaataactgaaatgaaacggaacagttagaacagcatactgtggttgcgcagtggc

SEQ ID NO: 217232 - DNA, 201 bp, Homo sapiens
tttaactactatactttgaatgtaagtatttagaaaaactttcctagtttttgttagaaaatagtatcttgtttttatttgcttgtttttgctaattatattgagactgaagacttttccaatgtatttccttgtatgtttctctagtgaatagtctttttaatatacttgttccattaatctaatactttattcatttat

SEQ ID NO: 217233 - DNA, 201 bp, Homo sapiens
atttaactactatactttgaatgtaagtatttagaaaaactttcctagtttttgttagaaaatagtatcttgtttttatttgcttgtttttgctaattatattgagactgaagacttttccaatgtatttccttgtatgtttctctagtgaatagtctttttaatatacttgttccattaatctaatactttattcattta

SEQ ID NO: 217234 - DNA, 201 bp, Homo sapiens
gagtctcacccaaaggtccatgatgagtatggcctggttaccactgctgatgatttggggcccaagcgctctttattcagcaggtgataaatcctgccagwactaggtccttccgttcaaggtagcaggttcccttgtagcccaggctgtgtctagaaatgttatctgggacatttggtgtccagggtctggaatgggagc

SEQ ID NO: 217235 - DNA, 201 bp, Homo sapiens
cccaaactgctgggattacaggcgtgagccactgtgcctggccaagttcttaaaataagacggaagtaaagtctgactcatcgattgactttccattcatsaaagatttttctgtagctgtttgatagcaatttacccacagtagaacttctttcaaaattagagtcaatcctctaaaaccctgctgctactttatcaact

SEQ ID NO: 217236 - DNA, 201 bp, Homo sapiens
cttcagtcaaaggtcctggaagagatgtataagccctaatgtgagtgatgtaaaaagggtgcattctactcctaactgctgcttgcaattgggtaaataaagtaatcagttgttcatctgtatgaaatcataactgagcattttcaattaactgtgtggaatgaaccatgtataaagaatcaaatcacattaataggcata

SEQ ID NO: 217237 - DNA, 201 bp, Homo sapiens
cctttaggcaggctcaaaaaatttaaagttaagaatgctagattcaattgtatgcgggctgtcctgtaatccatttccccctttctgtttttgcaactgcygtttcagggagagattcattctttccactatggcttgtccttgagaattatatgggataccagtaatgtgtttaatattccatatagagaaaaatgtagc

SEQ ID NO: 217238 - DNA, 201 bp, Homo sapiens
tttttctaaggacttctggtccttttttattggagaatgatattaaaaaccaagaactgggtgtgtgttaagccattcttgcattactataaagaaatacyagagactgggtaattcataaagaaaagaggtttaattggctcagggttctgcaggctttacgggaagcatggtgctggcatctgcttggcttctaggaag

SEQ ID NO: 217239 - DNA, 201 bp, Homo sapiens
actgcagacctctttggtatactgatttcctttcttttgggtatatactatgagtgggattgctgagtcacgtggtagctctatttttagtttttggggawcctccaaactggtctccatagtgcttgtactaatttacattcccaccaatggtgtatgaggattcccttttctccacatcctcaccatcattcattattg

SEQ ID NO: 217240 - DNA, 201 bp, Homo sapiens
tttgatctaacagtagcatgacatctctccaagtgacatcgaaggtttgccctagaccatgtaggacatctgtgtacctatcaggatcatctgaaaacttmcccaggtctgccttgatctgctttaaatcagagagggagaaagggacatgtaccctagttgggtcaaattccctctccctacaacttgaaggggacataa

SEQ ID NO: 217241 - DNA, 201 bp, Homo sapiens
ctcattgcttttttctttcttttttcttttttctttttctttttttttttttttttttgagacagagtctccctctgttgcccaggctggagagcagtggygtgatcttggctcactgcaagctccgcctcccgggttcacaccattttcctgcctcagcctcccaagtagctgggactataggtgcccgccaccacgccc

SEQ ID NO: 217242 - DNA, 201 bp, Homo sapiens
cagcttatggctctggcagtttctgctccaggtaagcggatctcctctgtgtctttccaggtttccagcacagtttgccctgttagctcagttctctgatsgtcccaaaagagccattgattttgaattttcccagctttttctcattacatgttgcagctgaaagcgaagtcaccaccttgtttttaacttgtattttgt

SEQ ID NO: 217243 - DNA, 201 bp, Homo sapiens
tatatctggcaaattgtttaacataccttgtggcaacactttccagtgaaaacgtttagcaggcttaagctgcagattgtttactgcaagaattgtaaatrcaaaccattcacagtcctgctcagctaaggggatagtaaagaaacagtattttaaatctatgactattaaaggccaattttttggaatcatagcaggaga

SEQ ID NO: 217244 - DNA, 201 bp, Homo sapiens
agtaggttcaattgcttgccctacatatatctggcaaattgtttaacataccttgtggcaacactttccagtgaaaacgtttagcaggcttaagctgcagrttgtttactgcaagaattgtaaatacaaaccattcacagtcctgctcagctaaggggatagtaaagaaacagtattttaaatctatgactattaaaggcc

SEQ ID NO: 217245 - DNA, 201 bp, Homo sapiens
ttactcatggcataggtaggaatgcctagagcaggtcatatccaattaatgtcccctagtaatttttgaaagtcatttaatgttttcatttgatccctacktatggctactttctgtggcacaatggtagtgtcatttactaaggtccccaagtaggaataaggagtagtagtctgaattttgtcaggagctgtaattaag

SEQ ID NO: 217246 - DNA, 201 bp, Homo sapiens
ccactgcactccatcctgggtgacagagcgagactccatctcaaaaaaatttatttttaatttttgtgggtacatagtaggcatatgtatttataggtacrtgagatatttgatatggcatagaatgcataatcacatcaggataagcagggtatccatcttctcaagcatttatcctttgttagtgctacaaacaacctg

SEQ ID NO: 217247 - DNA, 201 bp, Homo sapiens
taaattttagcaagtactagatacaactttagaatagctgtaaagtgtctttatatatgtctcatacagtttgaataattgtgggactttattttcagatkatttgaaaggagaactagatgaatatgtccaaaaatacctccctggaaaaattaaagtcataagaaatacaaagcgtgaggggttgattcgagggagaat

SEQ ID NO: 217248 - DNA, 201 bp, Homo sapiens
ggcgagcggatcacgaggtcaggagatcaagaccatcctggctaacacggtgaaatcccgtctctactaaaaatacaaaaaataagccgggcgtggtggcrggcgcctgtaatcccagctacttgggaggctgaggcaggagaatggcgtgaatcgaggaggcagagcttgcagtgagccgagatcacgccactgcactcc

SEQ ID NO: 217249 - DNA, 201 bp, Homo sapiens
gcatgtgcctgtaatttttctattttttgtagagatgggcgtctcactatgttgcccaggctggtgtcgaactcttgggctcaagtgatcctcctgcctcrgcctcccagagtgctccatgactatctttattgacaaattgtccttaatgaatgctactttgtcagaatctgtgatatggataatatctgttcgaaatgt

SEQ ID NO: 217250 - DNA, 201 bp, Homo sapiens
atggataatatctgttcgaaatgtcaagagtatacatgttgatccattggctaggaaaacaacaacaaaatgaaaaagcatgtaagaagccatgtatttaytggtatttatttttttgagacagggtcttgctccgctgcccaggttggagtagagtgggatgaatacagtggctcactgcagccttgaactcctgggctc

SEQ ID NO: 217251 - DNA, 201 bp, Homo sapiens
gcttgcagtgagccgagatcgtgccactgcactccagcctgggcgacagagcgagactccgtctcaaaaaaaaaaaaaaaaaaaaaaaaaaagaagaagagagaaaagttcatcgcttttttaatgttctgttcctgcaagtatgaagatatgttactgcttttcagaaaaagcagtgtgcttttttctgtgcattatttt

SEQ ID NO: 217252 - DNA, 201 bp, Homo sapiens
tttgtaaaccacactgataacaagccctaccgggtgattggcctgctccattttctgtcctttctgaaccaccaaaggtttgtttgtctgagggccatgastaaggctgcagcctttctctgatctcgcttttccttttgggcctgttcctcttggtccctattatagaacaccaaggttgccaggtttaataatgcctcc

SEQ ID NO: 217253 - DNA, 201 bp, Homo sapiens
gccacacctggctaattttctactttttgtagagatgcgagtctcactatgttgcccaggctggtcttgaactcctggactcaagcaatcctcctgccttrgcttcccaaggtgttaggattacaggcgtgagccactgtgcctagtctgtttttatggatttagaggtacaagtgcatagtgtgtggtggtaaagtctgg

SEQ ID NO: 217254 - DNA, 201 bp, Homo sapiens
agcttgcagtgagccgagatcgtgccactgcactccagcctgggcgacagagcgagactccgtctcaaaaaaaaaaaaaaaaaaaaaaaaaaagaagaagagagaaaagttcatcgcttttttaatgttctgttcctgcaagtatgaagatatgttactgcttttcagaaaaagcagtgtgcttttttctgtgcattattt

SEQ ID NO: 217255 - DNA, 201 bp, Homo sapiens
ccaggaggaagtcaatttcctggccttcaatggttaaatgtacccggggctcagtgagggtgatgacatgagctggcgcttgcccgaggcaccctcaagtsctgttgttggatcatctggttgggggcttctgacccagagaacctttgtcctccggggcagtgcgccttccagtgattgcctcggcatagcggacatgga

SEQ ID NO: 217256 - DNA, 201 bp, Homo sapiens
gagcttgcagtgagccgagatcgtgccactgcactccagcctgggcgacagagcgagactccgtctcaaaaaaaaaaaaaaaaaaaaaaaaaaagaagaagagagaaaagttcatcgcttttttaatgttctgttcctgcaagtatgaagatatgttactgcttttcagaaaaagcagtgtgcttttttctgtgcattatt

SEQ ID NO: 217257 - DNA, 201 bp, Homo sapiens
ttttcccctggagcaaatgactttgtggcagagaaaactctgggcttattactcttcccctcccctgccagagggatctctctgggatcttttaccttagygcctggtggagttcctggaggtaaagcccacagaagtgtgggtctcgcacctcctgagactgcttccccgagtttctcactctcactagtccacaccgag

SEQ ID NO: 217258 - DNA, 201 bp, Homo sapiens
atttgtcttcttttgagagatggctattcagatcatttgcccatttttaaatctgatttttttttcctgctgagatgttttagtttctggtttattctggrtattaatccccttttggatgaatagtttgcttatattttctcccattctataggttgtcttttcactctgctgattgtttcctttgctgtatagaagttt

SEQ ID NO: 217259 - DNA, 201 bp, Homo sapiens
ctttcaggcgtgacaagaaaggtgtgtgaaaagagcaaagtctcccaattacaactgagaaggtgggagaaatacctggttacaggctgtcccaggattcytcggatggtaatggaccttgaggacagtcgtccgggacaggagattaacactgagaaggccacgccagtgtccaggaggaagtcaatttcctggccttca

SEQ ID NO: 217260 - DNA, 201 bp, Homo sapiens
tgcaacctccacctcccaggttcaagtgattctgcagcctcggcccccaaggagcatgcgccaccactcccaactaatttttgtattttttcgtagagacwcggtttcaccatgtttggccaggcgggtctcaaactcctgaccttaagtgatccgcctgccttggcctcccaaagtgctgggattacaagtgtgagccac

SEQ ID NO: 217261 - DNA, 201 bp, Homo sapiens
gtgacaggattccactcaaattatggctgaatagtatttcattgtgtttatattccacattttctttatctgtttatctgttggacacccagattcattcygtatcttggctattgtgaataatgctgcagttaacatggggatgtagatgtctcttcgatataccaatttcctttcctttggataaatgcccagtagtgg

SEQ ID NO: 217262 - DNA, 201 bp, Homo sapiens
tctccaagtctgctacccagttagctagtcacagagcactgattggtgcatttacaatcctttagctagactgaaaagttctccaagtcccctacccgatyagctagacacagagcactgattggtgtgtttacaaacctttagctagacacagagccctgattggtgcatttacaatcctttagacagagtagttctcca

SEQ ID NO: 217263 - DNA, 201 bp, Homo sapiens
gggctcaagtgatcctactgcttcagcctcccaagtagctgggactataggcatgtgctaccatgcctggataattttttttaaaaagtgtttttttttttgtttgtttgtttttttagagatgggatctcactgtgttgcccaggctggtcttgagctcttgggctcaaaagatcctcctgccttggcctcccgaagtgc

SEQ ID NO: 217264 - DNA, 201 bp, Homo sapiens
atggtgaaaccccgtctctactaaaaatacaaaaaaattagctgggcgtggtggcgggtgcctgtaatccctgctactcgggaggctgaggcaggagaatygcttgaacctgggaggcagaggttgcagtgagccaagcgccactgcactctagccggggggacaagagcgagactgtgtctcaacaaaaaaaaaaaaaga

SEQ ID NO: 217265 - DNA, 201 bp, Homo sapiens
tacccaacaggtagtacttcatccctcactcctctcccatcttttagagtctccagtatctgttattccactctgtgtgtgtgtgtatatatatatatatwtttttttaaattataaaagtattgttgtaatgaatggttggatataaatttaaaatgtcttaatgtgctaatttaaaggtttgttctttttttgttggtt

SEQ ID NO: 217266 - DNA, 201 bp, Homo sapiens
cccaaatccaagtgattcttctgcctcagcctcctgagtatctgggattacaggcgtatgccaccatgcccagcaaattttgtatttttaatagagacagkgtttctccatgttggtcaggctggtcttgaacccccgacctcagatgatccacccgcctcggcctcccaaagtgctgggatgataggcatgagccactgc

SEQ ID NO: 217267 - DNA, 201 bp, Homo sapiens
atgttggtcaggctggtcttgaacccccgacctcagatgatccacccgcctcggcctcccaaagtgctgggatgataggcatgagccactgcgcccggccrgaaggaatatttgaataaataatggcaaagatttttgaaaccccatgaaagatgacaatccacagaattaagagattcttaatatagcataaggtgattc

SEQ ID NO: 217268 - DNA, 201 bp, Homo sapiens
aatggcatagctgacacaggaaagagtatgtgtaggatgcaagcgaaaaccctttaactaatactactattaataattatgtataacagctggacacagtrgcatgtgcccatagtcattttatttcaatttatattatttgttttccttactgttcttttctacctcatagaattaggaggtagaaactactgacctcat

SEQ ID NO: 217269 - DNA, 201 bp, Homo sapiens
tatgttgtcatcacctggtaatttcacaggggtatgtgggtactgtactgttgtaaattaatatttgtactcacatgactacagctgagttaaaatatgartgtgcctcttttatggaaaaagctaataaatatttgctgtttgacaatttgtaatgcaagagtatcttacaagaaaatagctggaaactactgaaaggta

SEQ ID NO: 217270 - DNA, 201 bp, Homo sapiens
tgtgtacttacatgtagcatcctatatatacttttctcatcttttttcacctgacaacataatttacagattaatctgtaattagcaactaataaaaataytttcctttgtatagctgtgtattgctctattgtgtggatagttcatagtttgttcaaccagccccttattaatggacaatgggatttattttagcctttt

SEQ ID NO: 217271 - DNA, 201 bp, Homo sapiens
agaaggagtgaccatagctttagcagtgcaggaaaacagaagagggagctctgcgaggctgggaaagccgtctgagccaggctgcccgtgtgggaaagccrtctgggccacgctccccggtgtgggaaagccgtctggaccaggctccccagcgtgggaaagccgtctgggccacgctccccggtgtgggaaagccgtctg

SEQ ID NO: 217272 - DNA, 201 bp, Homo sapiens
attattttgatagcctctgacactaggatgggtactgctgcaactacccttaaacagtgaggccagccttttgctactacatcaatttccttacctaggtrtgccaccagttgtcagacacgagtctgagtaaggactccaagagctatccctgctctctctgtgatgtataaagagaagttttgtcctgtgggaaggctt

SEQ ID NO: 217273 - DNA, 201 bp, Homo sapiens
agcagaaaactttttcattttgcccttaggtgctggcaggtagccaagagtgaacctaaggaaagtagtttcccgggttttttgtttatttgttgttgtcmgtgaattctgtaagattagtctgcctgtttttatcacaaagaccattatttaagttttgaaatgagacaataaattcctgagttgtttcttgtacctttt

SEQ ID NO: 217274 - DNA, 201 bp, Homo sapiens
aggaatttcctcttcctaataagcctgggagcgctatgggagactggggtctatttcagccctgtattctcaaccataagagacgggcacacctgggggtgctgtttataagcgtatacctccaggcacgtattctctttcccagggatgttccttgctgagaaaaagaattcagcgatatttctcccatttgcttttgaa

SEQ ID NO: 217275 - DNA, 201 bp, Homo sapiens
gagccatgctctcgtgactttggctgagctgcagcaagctcctttcttcctgccagggtagattctggtaacgacaccttactcagctgcatacctgaacrtctggcgtccagtccacctgcctgggtgtctggtcagctctccaggccagcttccccatctgttcctgccagcccttctgtcatctgaagatactccgtc

SEQ ID NO: 217276 - DNA, 201 bp, Homo sapiens
tgctgcaactacccttaaacagtgaggccagccttttgctactacatcaatttccttacctaggtatgccaccagttgtcagacacgagtctgagtaaggrctccaagagctatccctgctctctctgtgatgtataaagagaagttttgtcctgtgggaaggcttaaagctggagcttgtactagggcctgctttaaggt

SEQ ID NO: 217277 - DNA, 201 bp, Homo sapiens
caggaatttcctcttcctaataagcctgggagcgctatgggagactggggtctatttcagccctgtattctcaaccataagagacgggcacacctgggggkgctgtttataagcgtatacctccaggcacgtattctctttcccagggatgttccttgctgagaaaaagaattcagcgatatttctcccatttgcttttga

SEQ ID NO: 217278 - DNA, 201 bp, Homo sapiens
ggtgcggtggctcacgcctgtaatcccagcactttggaaggccaaggcgagcggatcacgaggtcaggagatcaagaccatcctggctaacacggtgaaaycccgtctctactaaaaatacaaaaaataagccgggcgtggtggcaggcgcctgtaatcccagctacttgggaggctgaggcaggagaatggcgtgaatcg

SEQ ID NO: 217279 - DNA, 201 bp, Homo sapiens
acacagttctggaagtcagaagtctgaaaagcatctcaggggactaaactcaaggtgttggcagggctgtttcacttttttgaggttctgggagagcatctgtttccttgccctattgagaagccacctgcagtccttggcttgtggcccttttcttccatcttcaaagctagcagtaggtcaagttcttctcacattgta

SEQ ID NO: 217280 - DNA, 201 bp, Homo sapiens
agatctggtcggacctttgtatggtagttagttaagatttagatcccctgttaggaaacctgctgggttaaggatttttgataggaaggctatgggttgtyagtggcctcagtgcttttgggctacgcccttgtttacactgacaacaaggtggtattggagtgttacagagttacagagaaggccttcaattatcagtta

SEQ ID NO: 217281 - DNA, 201 bp, Homo sapiens
ctgaaagacaaaaccgcccgcagttttggtttgtttgtttctccccctgcccaagaacccacaatggtccctgaaccctgctgatcggaatagttgcactmaccgatgcagcagcagaaacacctcttgcccaagaacccacaacggtcggtccctggaccctgcggatgggaatagttgcactcactgacgcagcagcag

SEQ ID NO: 217282 - DNA, 201 bp, Homo sapiens
cacacagttctggaagtcagaagtctgaaaagcatctcaggggactaaactcaaggtgttggcagggctgtttcacttttttgaggttctgggagagcatctgtttccttgccctattgagaagccacctgcagtccttggcttgtggcccttttcttccatcttcaaagctagcagtaggtcaagttcttctcacattgt

SEQ ID NO: 217283 - DNA, 201 bp, Homo sapiens
gtccagccccacagggtcggtgggttttttccccgtgtgcggagacgagagagtgtagaaataaagacacaagacagagataaaagaaaagacaagaggtrgaggagtagagtcttctgtaaactcccacggggaaagggagactccctttcctggtctgctaagtagcgggtgtttttccttgacactgatgctaccgct

SEQ ID NO: 217284 - DNA, 201 bp, Homo sapiens
cctgaaccctgctgatcggaatagttgcactcaccgatgcagcagcagaaacacctcttgcccaagaacccacaacggtcggtccctggaccctgcggatsggaatagttgcactcactgacgcagcagcagaaacactagttttcctcctagaccacaaggaggaccgaggaaggtcggatttagtggcccttaccaatg

SEQ ID NO: 217285 - DNA, 201 bp, Homo sapiens
ccggagctgaatggctttcctctctgtcgaccctcggctcagcccggaagtacaggaaaagcggaaagctggttccaggcaaaccaacactcccaactccsaagagtcaggggttgttagagagccctatcccggaaagcctgacacccgtgtctttagtccagcggctgtgctagtcagttttaactggccgctagtcac

SEQ ID NO: 217286 - DNA, 201 bp, Homo sapiens
gggttttacagtcctctataagcaggaattgtcccagtctgatgtggctgctgcgtagtgcccgctggcctccctcttgatcttcagggggtgtcttctgsccagctctcttcttgcttctgctaacttgctgatgcatgctgctggcgcaactgtccttgcgcatttggactgggcttgaagagggaggaagtattcatt

SEQ ID NO: 217287 - DNA, 201 bp, Homo sapiens
tagtcatgctgttgtgctatcaaatactagatcttatgcattctatttaactatatttttgtatacattaactgtctctcccctcactcccttctcagccyctggtaaccattatctagtctctctctccgtgagttcaattgttttaatttttagcttccacaaataagtgacaacaggcaaagtttgtcattctgtgta

SEQ ID NO: 217288 - DNA, 201 bp, Homo sapiens
cgcatgattctcctgcctcagcctcctgaggagctgggattacagttgcccaccaccacacccggctaatttttgtaattttagtagagatgggggtctckccatgttggtcaggctggtctcgaactcctgacctcaggtgagctgcctgcctcagcctcccaaagtgcttggattacaggtctgagccactgtgcccag

SEQ ID NO: 217289 - DNA, 201 bp, Homo sapiens
agtagggtgctaattaaataacctgagtataagtttgttctaaatgtttattgattggattcatggcaaataggaattaacatcagtgaagaattttactctcatttcacttttctctttcattgttttttttccatcaaaggcttttcgtgcatgtggtcagtcattccacagacagacatttgttgagcaccttctgtt

SEQ ID NO: 217290 - DNA, 201 bp, Homo sapiens
tgccgagaccagctgggtcatggagacccttacccagcggcgctagaggaattaaagacacacacacagaaatatagagtgtggaatgggaaatcaggggyctcacagccttcagagctgagagccatgaacagagatttacccacatatttattgacagcaagccagtcataagatttactataagtattccttatggga

SEQ ID NO: 217291 - DNA, 201 bp, Homo sapiens
catgtaattgaggcctgtcaagggccactggggttctaaaatctattgctttaatggaaaattataaaaatttttttcctggttgcaggtaaatttttctyttgaatataataaactattcttaagattatggtttgtggccgggcgtggtgtctcacgcctgtaatcccagcactttgggaggccgaggtgggcagatca

SEQ ID NO: 217292 - DNA, 201 bp, Homo sapiens
tattcataaaacattcactgtattaaaggaacagagttctactattttttaaaaatggacttttatttatttatttatttatttatttatttatttatttwttttgagacaaagtcttgctctgcaggctggagtgcagtggcgcgatcttggctcactgcaacctctgccttccgggtttaagagattctcctgccttag

SEQ ID NO: 217293 - DNA, 201 bp, Homo sapiens
cggactttgcctgtcatgagactgaagacataggggtagatgcagctgaggagtcagggttgtggttggagagggagtttttgttgttgttgttgttgttkttttcatgtggagtctcactctgtcgcccaagctggaatgcagtggtgcgatctcggctcactgcaacctctgcctcccgggttcaagcaatttctcctg

SEQ ID NO: 217294 - DNA, 201 bp, Homo sapiens
agtattaaggtattgcttagcccaaacaagatagtaacagatttgtttagaaatttgcaagcatgttgctaaccatattacagtaatttttttcatttattaacaaatatttattaaattgttgctatattctacgcattattataatctccagggatagacaaaagctctttccctattggagcttacttcctggtatgg

SEQ ID NO: 217295 - DNA, 201 bp, Homo sapiens
ttgacccacaaggagacctgtgtctaggacaaaatgaatgcagagagaaggtggtgggaaaagtgctcagagaggtaatgccagattacgtagggacttgyaggtctttgtagggagcagatgggtggtcatgtctaccattgatattatatgttaagtctagatctaatgacaaaaaattaatatttgttcagtttttac

SEQ ID NO: 217296 - DNA, 201 bp, Homo sapiens
agcagtccagaacaaaggtgaagaagtatccattaacatgggcaaatgaatcagtcagctatttcactgccgttggttctctgagcattaacccacaggcmtgaggttttcattgttgaaccctttttaaaaactcagtactatccatacatcttcttgtatttgaatatccgttaactgtacgcatagtggtcctacttg

SEQ ID NO: 217297 - DNA, 201 bp, Homo sapiens
cgttctttttaaaataaacttttagttttagcgtagccttagatttacagaatattgtgaagatagtagagaattcccacatatcccatatccaatttccygttattaacatcttacattaatatggtacgtgtatttcagttaatgctaatgtccatactgtattcagattttcttagtttttacctaatgtgcttttgc

SEQ ID NO: 217298 - DNA, 201 bp, Homo sapiens
ctgagcattaacccacaggcctgaggttttcattgttgaaccctttttaaaaactcagtactatccatacatcttcttgtatttgaatatccgttaactgkacgcatagtggtcctacttggtggtttggaaaacagtgattctgtatttggtggatggtttaaagtatactgaagtgtctaacatatttattcttctttt

SEQ ID NO: 217299 - DNA, 201 bp, Homo sapiens
atttatttatttatttatttatttatttattttgagacaaagtcttgctctgcaggctggagtgcagtggcgcgatcttggctcactgcaacctctgcctyccgggtttaagagattctcctgccttagcctcccaagtagctgggactacgggaatgcaccaccactcccgcctagtttttttttttttttttttttttt

SEQ ID NO: 217300 - DNA, 201 bp, Homo sapiens
ccctcctgtaaagatgttatgccccaaaaatgaagtggagggccatatcctgagggaggggagggatctccagagttggaagagtgatgcctttttgtcckcacttatatgaatacaagaatgtcatttctgaagctccccgtatcctagcttctggaatagcttttgttaggcctgctagtctgaggagggatcctaaaa

SEQ ID NO: 217301 - DNA, 201 bp, Homo sapiens
ttctctttcattgttttttttccatcaaaggcttttcgtgcatgtggtcagtcattccacagacagacatttgttgagcaccttctgtttgctacacgccrtcttgagccctggaagaaacaaacagatgtagtagttcctcagttctcagggctagagtctagcaggggaggcaaataagtcaacaagtccttacatgag

SEQ ID NO: 217302 - DNA, 201 bp, Homo sapiens
aggaggttgaggcaggagaatcgcttgaaccagggagtcggaggttgcagtgagccgagatcgcgccacagcactccagcctagtgacagagcaagacacygtctcaaaaaaagaaaaaatttatccaaaagtaaacaagatagcaggtataggagggagacattattagcaaaatgtaaaactcttgaagaagaaaccgt

SEQ ID NO: 217303 - DNA, 201 bp, Homo sapiens
acagggacatttaagtctgcagaggtttctgctgccttttgtttggctacgccctgcccccagaggtggagtctacagaggcaggcaggccttgagctgcrgtgggctccacccagtttgagcttcctggctgctttgtttacctactcaagcctcagcaatggcgggcacccctcccccagcctcgctgctgccttgcag

SEQ ID NO: 217304 - DNA, 201 bp, Homo sapiens
tcaggtgttccttgccctcattccggtaaaccgacaaccttccagcattgcgtcaaggccatcacgagcatgtcacagtgctgcagagattttgtttatgkccagttttggggccagtttatggccagattttggggcctgttcccaacatgtccccctttgttttgcaaagtgataaaagcaaaggcaggtttgtcatgg

SEQ ID NO: 217305 - DNA, 201 bp, Homo sapiens
gttactagctgctaatctgtctgcagctccttcgagcactctagttcctggcattaaggtcaagtgtggctgtgatgctttaaatatttgttcttttaatwttgcaatatccaaagacaagtttgtagagtggccttctagatgcttttttattctttcctaaattttgattttattaagagctattaataatttccacaa

SEQ ID NO: 217306 - DNA, 201 bp, Homo sapiens
ccgcttttatatttaaactagacctgcctagaagtaatcctgtcatccccgctggcaagggtccaccggctcctgttgggaccttttgcggggattccccmggcagaaggctcacagcttttgtgcagcataaatctactgcagcactaccggctgtggcgggggacagacattgtacaggggtgagggaatggcctgagc

SEQ ID NO: 217307 - DNA, 201 bp, Homo sapiens
tggtagtttgtatttctgtgggatcggtggtgatatcccctttatcattttttattgcgtctatttgattcttctcttttttcttcattagtcttgctagyggtctatcaattttgctgatcttttcaaaaaaccagctcctggattcattgatttttttgaagggttttttgtgtctctatctccttcagttctgctctg

SEQ ID NO: 217308 - DNA, 201 bp, Homo sapiens
tggcctgtcttcaagttcactaattccttcttctgcttgatctgttcagctgttaagagactgatgtattcttcagtatgttagttgcattttatagctcyagaatttctacttgattcttaattatttcaatctcttgttaaatttatctgatagaattctgaattccttctctgtgttatctttagttttgttgagttt

SEQ ID NO: 217309 - DNA, 201 bp, Homo sapiens
atgttttccttttccccagaaatactatattttgagatctactctgcctaagcaaaaataggaaatagaaaaacctctctttatgctcagtgtgtatcacycgaacttttcaagttaaatgttatcaagcagtaagtgtctgttcttcactctgacaatttctttgctgttccttgtaaaaagttctactgcgctttttgt

SEQ ID NO: 217310 - DNA, 201 bp, Homo sapiens
tctgcatctattgagataatcgtgtggtttttgtctttgttccgtttatatggtagattacgtttattgattttcatatgttgaaccagccttgcatcccrgggatgaagcccacttgatcatggtggataagctttttgatgtgctgctggatttggtatgcaagtattttattgaggatttttgcatcggtgttcatca

SEQ ID NO: 217311 - DNA, 201 bp, Homo sapiens
cccagtgcatggtgagagtggggagcagggattgtttgttcagaggtctcatctggtatgtttctgaggtgtttgccggctgaatggtagacgtgtcgttkgtgtgtatgaggttctgtgtctgtgtgtggctcggtttgagtgtacgcatgtccagcacatgccctgcccgtctctcacctgtgtcttcccgccccaggt

SEQ ID NO: 217312 - DNA, 201 bp, Homo sapiens
aggtatggagtccggatgatgcaggtccggggtgaggttgccaggccctgctgtgagctggatgtgctgtatccggatggtgcaggtccggggtgaggtcrccaggccctgctgtgagctggatgtgctgtatccggatggtgcaggtctggggtgaggtcaccaggccctgcggtgagctggttgtgcggtgtccggttg

SEQ ID NO: 217313 - DNA, 201 bp, Homo sapiens
tttctgtggtggaggtacttccatgatttacacatctgtgatatgcgtgtgtggcacgtgtgtgtcgtggtgcatgtatctgtggcgtgcatatttgtggkgtgtgtgtgtgtggcacgtgtgtgtccatggtgtgtgtgcctgtggtgtgcatgtgtgtgtgtctgtgacacgtgcatgttcatgctgtgtgctgcatgt

SEQ ID NO: 217314 - DNA, 201 bp, Homo sapiens
gtgtccctctcaggtgtagggtgagtgaggcgccatccccgggtgtccctgtcacgtgtagggtgagtgaggcgccgtccccgggtgtccctgtcacgtgyagggtgagtgagttgcggcccccgggtgtccctctcaggtgcagggtgagtgaggcgctgtccctgggtgtccctgtctcgtgtagggtgagtgaggctc

SEQ ID NO: 217315 - DNA, 201 bp, Homo sapiens
gtgcaggtctggggtgaggtcaccaggccctgcggtgagctgggtgtgcggtgtctggatggtgcaggtctggagtgaggtcgccagacggtgccagaccrtgcggtgagctggatatgcggtgtccggatggtgcaggtctggggtgaggttgccaggccctgctgtgagttggatgtggggtgtccggatgctgcaggt

SEQ ID NO: 217316 - DNA, 201 bp, Homo sapiens
ctgagtatggctgcgtggtgaacttgcggaagacagtggtgaacttccctgtagaagacgaggccctgggtggcacggcttttgttcagatgccggcccayggcctattcccctggtgcggcctgctgctggatacccggaccctggaggtgcagagcgactactccaggtgagcgcacctggccggaagtggagcctgtg

SEQ ID NO: 217317 - DNA, 201 bp, Homo sapiens
ggcccttggtgggctggatgtgccgtgtccggatggtgcaggtctggggtgaggtcgccaggcctttggtgagctggatgtgcggtgtctgcatggtgcakgtctggggtgaggtcgccaggcccttggtgggctggatgtgtggtgtccggatggtgcaggtccggcgtgaggtcgccaggccctgctgtgagctggatg

SEQ ID NO: 217318 - DNA, 201 bp, Homo sapiens
gatgtgctgtatccggatggtgcaggtctggcgtgaggtcgccaggccctgcggttagctggatatgcggtgtcggatggtgcaggtccggggtgaggtcrccaggccctgcggttagctggatgtgcggtgtccggatggtgcaggtctggggtgaggtcgccaggccctgctgtgagctggatgtgctgtatccggatg

SEQ ID NO: 217319 - DNA, 201 bp, Homo sapiens
gctgtatccggatggtgcaggtctggcgtgaggtcgccaggccctgcggttagctggatatgcggtgtcggatggtgcaggtccggggtgaggtcaccagrccctgcggttagctggatgtgcggtgtccggatggtgcaggtctggggtgaggtcgccaggccctgctgtgagctggatgtgctgtatccggatggtgca

SEQ ID NO: 217320 - DNA, 201 bp, Homo sapiens
tctcgaagtcctggaacaccagcccggcctcagcatgcgcctgtctccacttgcctgtgcttccctggctgtgcagctctgggctgggagccaggggcccygtcacaggcctggtccaagtggattctgtgcaaggctctgactgcctggagctcacgttctcttacttgtaaaatcaggagtttgtgccaagtggtctct

SEQ ID NO: 217321 - DNA, 201 bp, Homo sapiens; identical to SEQ ID NO: 38894

SEQ ID NO: 217322 - DNA, 201 bp, Homo sapiens
gggggctcaggcagtgggtgagatgaggtacacggggggctcaggcagtgggtgaggccaggtacatggggggctcaggcactgggtgagatgaggtacayggggggctcaggcagagggtcagaccaggtacacgggggctctgatcacacgcacatatgagcacatgtgcacatgtgctgtttcatggtagccaggtct

SEQ ID NO: 217323 - DNA, 201 bp, Homo sapiens
tgggtgtgcagtgtgagtagcatgtgtgcacataacatgtattgaggggtcctcgtgttcaccccgctaggtcctcagcaccagtgccactccttacaggrtgagacggggtcccaggccttggtgggctgaggctctgaagctgcagccctgagggcattgtcccatctgggcatccgcgtccactccctctcctgtggg

SEQ ID NO: 217324 - DNA, 201 bp, Homo sapiens
gtgtctgtgatgcgtttctgtggtggaggtacttccatgatttacacatctgtgatatgcgtgtgtggcacgtgtgtgtcgtggtgcatgtatctgtggcrtgcatatttgtggtgtgtgtgtgtgtggcacgtgtgtgtccatggtgtgtgtgcctgtggtgtgcatgtgtgtgtgtctgtgacacgtgcatgttcatgc

SEQ ID NO: 217325 - DNA, 201 bp, Homo sapiens
gccgaggcgagaggatcccttgagcccaggagtttaagaccagcctgagcaacatagtagaaccccatctctatgaaaaataaaaacaaaaattagctgarcatggtggtgtgcgcctgtagttccaatacttgggaggctgaagtgggaggatcacttgagcccaggaggtggaagctgcagtgagctgagattgcacca

SEQ ID NO: 217326 - DNA, 201 bp, Homo sapiens
tctgtccttcgataatatttactggtgctgtgctagaggccggaactgggggtgccttcctctgaaaggcacaccttcatgggaagagaaataagtggtgratggttgttaaaccagaggtttaaactggggtcctgtcgttctgagttaacagtccagatctggactttgcctctttccagaatgctccctggggtttgc

SEQ ID NO: 217327 - DNA, 201 bp, Homo sapiens
gcagacgcccccgggcctgaccctgggggcctggagccacgctggcagccctatgtgattaaacgctggtgtccccaggccacggagcctggcagggtccmcaacttcttgaacccctgcttcccatctcaggggcgatggctccccacgcttgggagccttctgacccctgacctgtgtcctctcacagcctcttccctg

SEQ ID NO: 217328 - DNA, 201 bp, Homo sapiens
agcgcggcccagacccccgggtccgcccggagcagctgcgctgtcggggccaggccgggctcccagtggattcgcgggcacagacgcccaggaccgcgctycccacgtggcggagggactggggacccgggcacccgtcctgccccttcaccttccagctccgcctcctccgcgcggaccccgccccgtcccgacccctcc

SEQ ID NO: 217329 - DNA, 201 bp, Homo sapiens
tccagtcgccccctcacatggattgacgtccagccacaggttggagtgtctctgtctgtctcctgctctgagacccacgtggagggccggtgtctccgccrgccttcgtcagacttccctcttgggtcttagttttgaatttcactgatttacctctgacgtttctatctctccattgtatgctttttcttggtttattct

SEQ ID NO: 217330 - DNA, 201 bp, Homo sapiens
aaagaatttttgaagaatgtttaatggcacaaaacgtttatttcaatgtagcagtgttcaaagctggatgtaaaagaacacaccccaggagcctgccgtgratgtcatgtgtgttcatctttggacatggacatacatgggcagtgagtggtggtgaggccctggaggacatcggtgggatgcctccatcctgcccctctg

SEQ ID NO: 217331 - DNA, 201 bp, Homo sapiens
gtgtagggtgagtgaggcgccatccccgggtgtccctgtcacgtgtagggtgagtgaggcgccgtccccgggtgtccctgtcacgtgtagggtgagtgagktgcggcccccgggtgtccctctcaggtgcagggtgagtgaggcgctgtccctgggtgtccctgtctcgtgtagggtgagtgaggctctgtccccaggtgt

SEQ ID NO: 217332 - DNA, 201 bp, Homo sapiens
tgtagggtgagtgaggcgccatccccgggtgtccctgtcacgtgtagggtgagtgaggcgccgtccccgggtgtccctgtcacgtgtagggtgagtgagtygcggcccccgggtgtccctctcaggtgcagggtgagtgaggcgctgtccctgggtgtccctgtctcgtgtagggtgagtgaggctctgtccccaggtgtc

SEQ ID NO: 217333 - DNA, 201 bp, Homo sapiens
gtcttgctgtgttgcccaggctggtctcaaactcttggactcaagggatccatctacctcggcttcccaaagtgctgaattacaggcatgagccaccatgyctggcctaattttcaacacttttatattcttatagtgtgggtatgtcctgttaacagcatgtaggtgaatttccaatccagtctgacagtcgttgtttaa

SEQ ID NO: 217334 - DNA, 201 bp, Homo sapiens
actgtggatggcagtcggtcacgggggtctgatgtgtggtgactgtggatggcggtcggtcacgggggtctgatgtgtggtgactgtggatggcggtcgtrgggtctgatgtgtggtgactgtggatggcgatcggtcacaggggtctgatgtgtggtgactgtggatggtggtcgtggggcctgatgtggtgactgtgga

SEQ ID NO: 217335 - DNA, 201 bp, Homo sapiens
tgatgtgtggtgactgtggatggcggtcgtggggtctgatgtgtggtgactgtggatggcgatcggtcacaggggtctgatgtgtggtgactgtggatggyggtcgtggggcctgatgtggtgactgtggatggcggtcgtagggtctgatgtgtggtgactgtggatggcggttgtggggtctgatgtgtggtgactgtg

SEQ ID NO: 217336 - DNA, 201 bp, Homo sapiens
gtcacagcctgtttctggatttgcaggtgagcaggctgatggtcagcacagagttcagagttcaggaggtgtgtgcgcaagtatgtgtgtgtgtgtgtgcrcgcgtgcctgcaaggctgatggtgactggctgcacgtaagagtgcacatgtacgcatatacacgtgagcacatacatgtgtgcatgtgtgtacatgaagg

SEQ ID NO: 217337 - DNA, 201 bp, Homo sapiens
tgactgtggatggcggtcgtggggtctgatgtgtggtgactgtggatggcgatcggtcacaggggtctgatgtgtggtgactgtggatggtggtcgtgggrcctgatgtggtgactgtggatggcggtcgtagggtctgatgtgtggtgactgtggatggcggttgtggggtctgatgtgtggtgactgtggatggcggtt

SEQ ID NO: 217338 - DNA, 201 bp, Homo sapiens
gcacgcacacaggcaccggtgggcccatgcccacacccacgagcaccgtctgattaggaggcctttcctctgacgctgtccgccatcctctcaggtttcaygcatgtgtgctgcagctcccatttcatcagcaagtttggaagaaccccacatttttcctgcgcgtcatctctgacacggcctccctctgctactccatcc

SEQ ID NO: 217339 - DNA, 201 bp, Homo sapiens
cagtaatgggatggctgggtcaaatggtatttctagttctagatccttgaggaatcaccacactgtcttccacaatggttgaactagtttacactcccacyaacagtgtaaaagtgttctggtgctggagaggatgtggacagcagttatttttttatgaaaatagtatcactgaacaagcagacagttagtgaaggatgc

SEQ ID NO: 217340 - DNA, 201 bp, Homo sapiens
ttccatccctgagattcaaacacagtgagattccccacgcccaactcagtgttctcccacaaaaaacctgagtcacacctgtgttcactcgagggacgccygggagccagggctccacagtttattatgtgtttttggctgagttatgtgcagatctcatcagggcagatgatgagtgcacaaacacggccgtgcgaggtt

SEQ ID NO: 217341 - DNA, 201 bp, Homo sapiens
actccgcttcatccccaagcctgacgggctgcggccgattgtgaacatggactacgtcgtgggagccagaacgttccgcagagaaaagagggtggctgtgytttggtttaacttcctttttaaacagaagtgcgtttgagccccacatttggtatcagcttagatgaagggcccggaggaggggccacgggacacagccag

SEQ ID NO: 217342 - DNA, 201 bp, Homo sapiens
ctgcagccctgagggcattgtcccatctgggcatccgcgtccactccctctcctgtgggcttctgtgtccactccccctctcctgtgggcgtccacacccyctctcctgtgggcatccgcatccactccctctcctgtgggcatctgtgtccactccctctctcctgtggttgtccgtgtccactcccccctcctgtgggc

SEQ ID NO: 217343 - DNA, 201 bp, Homo sapiens
ctttttttaaattgctcttagtactgccacactgggcttcttttgattagtattttcctgctgtgtctgttttctgcctttaatttatatatatatatatwtatttttttttttgagacagagtcttggtctgtcgcccagggtgagtgcagtggtgtgatcacaggtcagtgtaacttttaccttctggcctgagccgtc

SEQ ID NO: 217344 - DNA, 201 bp, Homo sapiens
ttttttaaattgctcttagtactgccacactgggcttcttttgattagtattttcctgctgtgtctgttttctgcctttaatttatatatatatatatatwtttttttttttgagacagagtcttggtctgtcgcccagggtgagtgcagtggtgtgatcacaggtcagtgtaacttttaccttctggcctgagccgtcct

SEQ ID NO: 217345 - DNA, 201 bp, Homo sapiens
ggggtgaggtcgccaggccctgctgtgagctggatgtgctgtatccggatggtgcaggtctggggtgaggtcaccaggccctgcggtgagctggttgtgcrgtgtccggttgctgcaggtccggggtgagttcgccaggccctcggtgagctggatgtgcggtgtccccgtgtccggatggtgcaggtccagggtgaggtc

SEQ ID NO: 217346 - DNA, 201 bp, Homo sapiens
gcttccccctagtctgttgtctggctgagcaagcttcctgaggggctctctattgcagacagcacttgaagagggtgcagctgcgggagctgtcggaagcrgaggtcaggcagcatcgggaagccaggcccgccctgctgacgtccagactccgcttcatccccaagcctgacgggctgcggccgattgtgaacatggact

SEQ ID NO: 217347 - DNA, 201 bp, Homo sapiens
cagcgtgtgctgccgtgggtgccctgagccctcactgagtcggtgggggcttgtggcttcccgtgagcttccccctagtctgttgtctggctgagcaagcytcctgaggggctctctattgcagacagcacttgaagagggtgcagctgcgggagctgtcggaagcagaggtcaggcagcatcgggaagccaggcccgccc

SEQ ID NO: 217348 - DNA, 201 bp, Homo sapiens
tggacagaggtgtggcatgaggatcccgtgtgcaacacacatgcggccaggaacccgtttcaaacagggtctgaggaagctgggaggggttctaggtcccrggtctgggtggctggggacactggggaggggctgcttctcccctgggtccctatggtggggtgggcacttggccggatccactttcctgactgtctccca

SEQ ID NO: 217349 - DNA, 201 bp, Homo sapiens
ccctgtgctaaagacctgcttcagcagcctctcgtcagtgttgatatattggcttttctgtgttgagtccagaataattacggatttctgtgatgctttcygccgacctcagacccatgggctatttgtgggcgtgttgcctgctcctgggttgggaagggtgcaggccccatgtaccttcctgttactgccttccaggtt

SEQ ID NO: 217350 - DNA, 201 bp, Homo sapiens
caaagacttaattccatgagtaaattcaacctttccacatccgaatggatttggattttatcttaatattttcttaaatttcatcaaataacattcaggastgcagaaatccaaaggcgtaaaacaggaactgagctatgtttgccaaggtccaaggacttaataaccatgttcagagggatttttcgccctaagtacttt

SEQ ID NO: 217351 - DNA, 201 bp, Homo sapiens
gactgtggatggcggtcgtggggtctgatgtgtggtgactgtggatggcggtcgtggggtctgatgtgtggtgactgtggatggcggtcgtggggtctgakgtggtgactgtggatggcggtcgtggggtctgatgtggtgactgtggatggtgatcggtcacaggggtctgatgtgtggtagctgcaggtggagtcccag

SEQ ID NO: 217352 - DNA, 201 bp, Homo sapiens
ggtgaggtggccgaggtgccggtgcctccagaaaagcagcgtgggggtgtagggggagctcctggggcagggacaggctctgaggaccacaagaagcagcygggccagggcctggatgcagcacggcccgaggtcctggatccgtgtcctgctgtggtgcgcaggctccgtgcgcttccgcttacggggcccggggaccag

SEQ ID NO: 217353 - DNA, 201 bp, Homo sapiens
tgcctgttagcacttgctcggctctaggggacagtcgtgtccaccgcatgaggctcagagacctctgggcgaatttccttggctcccagggtgggggtggrggtggcctgggctgctgggacccagaccctgtgcccggcagctgggcagcaactcctggatcacatatgccatccgggccacggtgggctgtgtgggtgt

SEQ ID NO: 217354 - DNA, 201 bp, Homo sapiens
ggctgcaggctcccgaggccccggaaacatggctcggcttgcggcagccggagcggagcaggtgccacacgaggcctggaaatggcaagcggggtgtggasttgctcctgcgtggaggacgaggggcggggggtgtgtctgggtcaggtgtgcgccgagcgtttgagcctgcagcttgtcagctccaagttactactgacg

SEQ ID NO: 217355 - DNA, 201 bp, Homo sapiens
cagattctagggcctggttgctgcttcccgagggcgccatctgccctggagactcagcctggggtgccacactgaggccagccctgtctccacaccctccrcctccaggcctcagcttctccagcagcttcctaaaccctgggtgggccgtgttccagcgctactgtctcacctgtcccactgtgtcttgtctcagcgacg

SEQ ID NO: 217356 - DNA, 201 bp, Homo sapiens
ctccccgtctcctgtcatctgccggggcctgccggtgtgttcttctgtttctgtgctcctttccacgtccagctgcgtgtgtctctgcccgctagggtctsggggtttttataggcataggacgggggcgtggtgggccagggcgctcttgggaaatgcaacatttgggtgtgaaagtaggagtgcctgtcctcacctagg

SEQ ID NO: 217357 - DNA, 201 bp, Homo sapiens
aaaactgccacctccatgggatacgtacgcaacatgctcaaaaagaaagaatttcaccccatggcaggggagtggttggggggttaaggacggtgggggcrgcagctgggggctactgcacgcaccttttactaaagccagtttcctggttctgatggtattggctcagttatgggagactaaccataggggagtggggat

SEQ ID NO: 217358 - DNA, 201 bp, Homo sapiens
ctcatgcaggcatgaaagaaccgagtcttgccggagggggcctggctggctttctcctctgacacagcacgaagccccgggctcgccacctggagtggtawgtccccagcccccagtgtggacgggagactcatgctccctggccgtggcagcggggtcctctctgtcaggtccaggcccacccttgctggaaggggctgc

SEQ ID NO: 217359 - DNA, 201 bp, Homo sapiens
ggtcaccaggccctgcggttagctggatgtgcggtgtctggatggtgcaggtccggggtgaggtcgccaggccctgctgtgagctggatgtgctgtatccrgatggtgcaggtccggggtgaggtcgccaggccctgcagtgagctggatgtgctgtatccggatggtgcaggtctggcgtgaggtcgccaggccctgcgg

SEQ ID NO: 217360 - DNA, 201 bp, Homo sapiens
ctggcgtgaggtcgccaggccctgcggttagctggatatgcggtgtcggatggtgcaggtccggggtgaggtcaccaggccctgcggttagctggatgtgyggtgtccggatggtgcaggtctggggtgaggtcgccaggccctgctgtgagctggatgtgctgtatccggatggtgcaggtccggggtgaggtcgccagg

SEQ ID NO: 217361 - DNA, 201 bp, Homo sapiens
ttgagccccacatttggtatcagcttagatgaagggcccggaggaggggccacgggacacagccagggccatggcacggcgccaacccatttgtgcgcacrgtgaggtggccgaggtgccggtgcctccagaaaagcagcgtgggggtgtagggggagctcctggggcagggacaggctctgaggaccacaagaagcagcc

SEQ ID NO: 217362 - DNA, 201 bp, Homo sapiens
gggcagggacaggctctgaggaccacaagaagcagccgggccagggcctggatgcagcacggcccgaggtcctggatccgtgtcctgctgtggtgcgcagsctccgtgcgcttccgcttacggggcccggggaccaggccacgactgccaggagcccaccgggctctgaggatcctggaccttgccccacggctcctgcac

SEQ ID NO: 217363 - DNA, 201 bp, Homo sapiens
aacagggtctgaggaagctgggaggggttctaggtcccgggtctgggtggctggggacactggggaggggctgcttctcccctgggtccctatggtggggygggcacttggccggatccactttcctgactgtctcccatgctgtccccgccaggccgagcgtctcacctcgagggtgaaggcactgttcagcgtgctcaa

SEQ ID NO: 217364 - DNA, 201 bp, Homo sapiens
ggaagctgggaggggttctaggtcccgggtctgggtggctggggacactggggaggggctgcttctcccctgggtccctatggtggggtgggcacttggcyggatccactttcctgactgtctcccatgctgtccccgccaggccgagcgtctcacctcgagggtgaaggcactgttcagcgtgctcaactacgagcgggc

SEQ ID NO: 217365 - DNA, 201 bp, Homo sapiens
tcccatgctgtccccgccaggccgagcgtctcacctcgagggtgaaggcactgttcagcgtgctcaactacgagcgggcgcggcgccccggcctcctgggygcctctgtgctgggcctggacgatatccacagggcctggcgcaccttcgtgctgcgtgtgcgggcccaggacccgccgcctgagctgtactttgtcaagg

SEQ ID NO: 217366 - DNA, 201 bp, Homo sapiens
ggggcgcaggggcaccttcgggagggagtgggtaccgtgcaggccctggtcctgcagagacgcacccaggttacacacgtggtgagtgcaggcggtgaccyggctcctgctgctctttggaaagtcaagagtggcggctcctggggccccagtgagacccccaggagctgtgcacagggcctgcagggccgaggcggcagc

SEQ ID NO: 217367 - DNA, 201 bp, Homo sapiens
acagtggatcaaggttcttcttcattaaggttcaagttctagattgaaataagtttatgtaacagaaacaaaaatttcttgtacacacaacttgctctggsatttggaggaaagtgtcctcgagctggcggcacactggtcagccctctgggacaggatacctctggcccatggtcatggggcgctgggcttgggcctgag

SEQ ID NO: 217368 - DNA, 201 bp, Homo sapiens
acacgcagctactcgcacacacaagcacacacacagacatgcatgcatgcatccgtgtgtgtgcacctgtgcccatgaggaaacccatgcatgtgcattcrtgcacgcacacaggcaccggtgggcccatgcccacacccacgagcaccgtctgattaggaggcctttcctctgacgctgtccgccatcctctcaggtttc

SEQ ID NO: 217369 - DNA, 201 bp, Homo sapiens
agtgcaggcggtgacccggctcctgctgctctttggaaagtcaagagtggcggctcctggggccccagtgagacccccaggagctgtgcacagggcctgcrgggccgaggcggcagcctcctccccagggtgcacctgagcctgcggagagcaggagctgctgagtgagctggcccacagcgttcgctgcggtcacgttcc

SEQ ID NO: 217370 - DNA, 201 bp, Homo sapiens
agttgatttttgtgaatcaaactaaaatcaggcacaggggacctggcctcagcacaggggattgtccaatgtggtccccctcaagggcgccccacagagcyggtgggcttgttttaaagtgcgatttgacgagggacgagaaaccttgaaagctgtaaagggaaccctcagaaaatgtggccgccaggggtggtttcaggt

SEQ ID NO: 217371 - DNA, 201 bp, Homo sapiens
aaggggtggccacagggagctgggaatgcaccaggggagctgcgcagctggccgaggtcccagggccaggccacaggaagggcagggggacgcccggggcyacagcagaggccgcaggaagggaaggggatgcccaggccagagcagaggctaccgggcacaggggggctccctgagctgggtgagcgaggctcatgactc

SEQ ID NO: 217372 - DNA, 201 bp, Homo sapiens
gaaagtcatggaagcacccttctcaagggaaaaccagacgcccgctctgcggtcatttacctctttcctctctccctctcttgccctcgcggtttctgatmgggacagagtgacccccgtggagcttctccgagcccgtgctgaggaccctcttgcaaagggctccacagacccccgccctggagagaggagtctgagcct

SEQ ID NO: 217373 - DNA, 201 bp, Homo sapiens
tccctgagctgggtgagcgaggctcatgactcggcgagggaacctccttgacgtgaagctgacgactggtgttgcccagctcacagcccagccaggtcccrcgcctgagcaggaactcagaaccctcccctttgtctaaagcacagcagatgccttcagggcatctaggagaaaacaggcaaagtcgttgagaaacgtctt

SEQ ID NO: 217374 - DNA, 201 bp, Homo sapiens
cagaaagcagtctggatccgaacccaagacgcccgggccctgctgggcgtgagtctctccaaacccgaaacacaggggccctgctgggcatgagtccctcygaacccgagaccctggggccctgctgggcgtgagtctctccgaacccagagacttcagggcccttttgggcgtgagtctctccactgtgagccccacact

SEQ ID NO: 217375 - DNA, 201 bp, Homo sapiens
tgggcatgagtccctctgaacccgagaccctggggccctgctgggcgtgagtctctccgaacccagagacttcagggcccttttgggcgtgagtctctccrctgtgagccccacactccaaggctcatccacagtctacaggatgccatgagttcatgatcacgtgtgacccatcaggggacagggccatggtgtgggggg

SEQ ID NO: 217376 - DNA, 201 bp, Homo sapiens
ggcaaagggcatgcatgattgcagcctggcctcctgctccggggcccttgctctgcccgaggaccccacacaagtcagacccataggctcagggtgagccrgagcccaaggtcgtgttggggatggctgtgaaagaagaaatggacgtctgatgcacacttgggaaggtcctaccagcagcgtcaaagaaatgcatgtgaa

SEQ ID NO: 217377 - DNA, 201 bp, Homo sapiens
ccagctccagaggcttgggaccaggctgtctcagttccagggtgcgtccggctcagaccgccctcctctctgccttctctctctgcctcaaatcttccctygtttgcatctccctgacgcgtgcctgggccctcgtgcaagctgcttgactcctttccggaaacccttggggtgtgctggatacaggtgccactgaggact

SEQ ID NO: 217378 - DNA, 201 bp, Homo sapiens
taagagtccaggagagatgaggctgctttcagccaccaggctggggtgacaacagcggctgaacagtctgttcctctagactagtagaccctggcaggcastcccccagattctagggcctggttgctgcttcccgagggcgccatctgccctggagactcagcctggggtgccacactgaggccagccctgtctccacac

SEQ ID NO: 217379 - DNA, 201 bp, Homo sapiens
gagtccaggagagatgaggctgctttcagccaccaggctggggtgacaacagcggctgaacagtctgttcctctagactagtagaccctggcaggcactcscccagattctagggcctggttgctgcttcccgagggcgccatctgccctggagactcagcctggggtgccacactgaggccagccctgtctccacaccct

SEQ ID NO: 217380 - DNA, 201 bp, Homo sapiens
gccccttcaccttccagctccgcctcctccgcgcggaccccgccccgtcccgacccctcccgggtccccggcccagccccctccgggccctcccagccccyccccttcctttccgcggccccgccctctcctcgcggcgcgagtttcaggcagcgctgcgtcctgctgcgcacgtgggaagccctggccccggccaccccc

SEQ ID NO: 217381 - DNA, 201 bp, Homo sapiens
cttcaccttccagctccgcctcctccgcgcggaccccgccccgtcccgacccctcccgggtccccggcccagccccctccgggccctcccagcccctcccyttcctttccgcggccccgccctctcctcgcggcgcgagtttcaggcagcgctgcgtcctgctgcgcacgtgggaagccctggccccggccacccccgcga

SEQ ID NO: 217382 - DNA, 201 bp, Homo sapiens; identical to SEQ ID NO: 38896

SEQ ID NO: 217383 - DNA, 201 bp, Homo sapiens
gagctgaatgcagtaggggctcagaaaagggggcaggcagagccctggtcctcctgtctccatcgtcacgtgggcacacgtggcttttcgctcaggacgtmgagtggacacggtgatctctgcctctgctctccctcctgtccagtttgcataaacttacgaggttcaccttcacgttttgatggacacgcggtttccagg

SEQ ID NO: 217384 - DNA, 201 bp, Homo sapiens
tgcaggttacctataatcctcttcgcaatttcaagggtgggaatgagaggtggggacgagaaccccctcttcctgggggtgggaggtaagggttttgcagktgcacgtggtcagccaatatgcaggtttgtgtttaagatttaattgtgtgttgacggccaggtgcggtggctcacgccggtaatcccagcactttgggaa

SEQ ID NO: 217385 - DNA, 201 bp, Homo sapiens
gcctgtctgctcgccccggtggaggggtgtctgtcccttcactgaggttcccaccagccagggccacgaggtgcaggccctgcctgcccggccacccacaygtcctaggagggttggaggatgccacctctggcctcttctggaacggagtctgattttggccccgcagcccagacgcagctgagtcggaagctcccgggg

SEQ ID NO: 217386 - DNA, 201 bp, Homo sapiens
agcagttatttttttatgaaaatagtatcactgaacaagcagacagttagtgaaggatgcgtcaggaagcctgcaggccacacagccatttctctcgaagwctccgggtttttcctgtgcatcttttgaaactctagctccaattatagcatgtacagtggatcaaggttcttcttcattaaggttcaagttctagattga

SEQ ID NO: 217387 - DNA, 201 bp, Homo sapiens
gtgagctggatgtgtggtgtctggatggtgcaggtctggggtgaggtcgccaggccctgctgtgagctggatgtgtggtgtctggatggtgcaggtctggmgtgaggtcgccaggccctcggtgagctggatgtgcagtgtccagatggtgcaggtccggggtgaggtcgccagaccctgcggtgagctggatgtgcggtg

SEQ ID NO: 217388 - DNA, 201 bp, Homo sapiens
tcctgttaacagcatgtaggtgaatttccaatccagtctgacagtcgttgtttaactggataacctgatttattttcatttttttgtcactagagacccgyctggtgcactctgattctccacttgcctgttgcatgtcctcgttcccttgtttctcaccacctcttgggttgccatgtgcgtttcctgccgagtgtgtgt

SEQ ID NO: 217389 - DNA, 201 bp, Homo sapiens; identical to SEQ ID NO: 38906

SEQ ID NO: 217390 - DNA, 201 bp, Homo sapiens
gtcccaggtgtgtctgtagctactttgcgtcctcggccccccggcccccgtttcccaaacagaagcttcccaggcgctctctgggcttcatcccgccatcrggcttggccgcaggtccacacgtcctgatcggaagaaacaagtgcccagctctggccggggcaggccacatttgtggctcatgccctctcctctgccggc

SEQ ID NO: 217391 - DNA, 201 bp, Homo sapiens
ctgtgtgctgttttccctgctgacttagttctatctcaggcatcttgacacccccacaagctaagcattattaatattgttttccgtgttgagtgtttctktagctttgcccccgccctgcttttcctcctttgttccccgtctgtcttctgtctcaggcccgccgtctggggtccccttccttgtcctttgcgtggttct

SEQ ID NO: 217392 - DNA, 201 bp, Homo sapiens
ttcctggtgctctggagaccatgactgctctgtcttgaggaaccagacaaggttgcagccccttcttggtatgaagccgcacgggaggggttgcacagccygaggactgcgggctccacgcaggctctgtccagcggccatgtccagaggcctcagggctcagcaggcgggagggccgctgccctgcatgatgagcatgtg

SEQ ID NO: 217393 - DNA, 201 bp, Homo sapiens
acggcgacatggagaacaagctgtttgcggggattcggcgggacgggtgaggcctcctcttccccaggggggcttgggtgggggttgatttgcttttgatrcattcagtgttaatattcctggtgctctggagaccatgactgctctgtcttgaggaaccagacaaggttgcagccccttcttggtatgaagccgcacggg

SEQ ID NO: 217394 - DNA, 201 bp, Homo sapiens
ctgtgtttgtgaaaacccatttggacccgccctccaagtccaccctccaggtccaccctccagggccgccctgggctgggggtatgcctggcgttccttgwgccgcagcccggagcacagcaggctgtgcacatttaaatccactaagattcactcggggggagcccaggtcccaagcaactgagggctcaggagtcctga

SEQ ID NO: 217395 - DNA, 201 bp, Homo sapiens
gaagcgggaggaaggcaggaggctctttggagcaagctttgcaggagggggctgggtgtggggcaggcacctgtgtctgacattcccccctgtgtctcagmtatgcccggacctccatcagagccagtctcaccttcaaccgcggcttcaaggctgggaggaacatgcgtcgcaaactctttggggtcttgcggctgaagt

SEQ ID NO: 217396 - DNA, 201 bp, Homo sapiens
aattcacaaacacagccctttaaaaaggcttagggatcactaaggggatttctagaagagcgacctgtaatcctaagtatttacaagacgaggctaacctycagcgagcgtgacagcccagggagggtgcgaggcctgttcaaatgctagctccataaataaagcaatttcctccggcagtttctgaaagtaggaaaggtt

SEQ ID NO: 217397 - DNA, 201 bp, Homo sapiens
gacttctgctacgttggggagcagtactgtgtagccaggatgctggtgagtgctcgtaggggcacgccgccccctgctggtggagccagtagccgcagccyttccgggaacgtgggattgagcccgctccctggcacccctgctgtgggccgccccaggatggtgaggggtgcaggggctttgtccggatgccaggactgg

SEQ ID NO: 217398 - DNA, 201 bp, Homo sapiens
ccgaagggaggttctgacattttggtggtcactgccatgtttcacagataaatttccgctgtaagccgtccttccgtgaatcaggctccaggaatgtccgsgaggtaagtgcccagggtggtcagggatggggccaccctaagattcctgcatgggcctctgcgcagtgcctctggagtgccaccagggggctcggctccc

SEQ ID NO: 217399 - DNA, 201 bp, Homo sapiens
aaaagagtttaaagaggtcttgggatcaggcagttggacagctgccactccagaccctagggtaccatgtcaggactgggagttgggggggtggcattccrgtcaggatacatataacacagactggtgtcttctgggcgttccttagcttggcagagccagaagacccagaagctggagtcccagctcaaccaaatcgga

SEQ ID NO: 217400 - DNA, 201 bp, Homo sapiens
ggcccagtggaggcgctggggacggaagaaggggagcggccggggtcactgaggcagatgtggcgctaccgctcctgggacgtgccacagatcccatcagrggcaccccagacacagtaggtacaaggggtggcctgggagtgggcatgggacctctgtccctctatgagccttttatctgagatgggggtgacagaagta

SEQ ID NO: 217401 - DNA, 201 bp, Homo sapiens
ggctttgacgcccacgtcaccctggagttccacgagtctcgaggttggcagcctcccactgaggccagggcagggtgggcacaggagtgtccccgggaggktcagaccctgctcccgccagtgaaggcatccatcccagccctcccccaaccccacctgggcaggctggggtgactcactggcccccactgcttgtctcca

SEQ ID NO: 217402 - DNA, 201 bp, Homo sapiens
catgcggaggcctaactagcgctgcctgcggagtgggtgggacagcttgtgcctcctggtgcttcccagccttctctgtccctctgagtctgagcctcccycaggccatgaagagagtctttagcccctcctccactcatgcgcaggactgcagagcgcttcctgcagccccgtgtgttgagccgtgtgggcagtcctcag

SEQ ID NO: 217403 - DNA, 201 bp, Homo sapiens
gcagtttacacccagctctgcaggatgtagcctccagtattcacaggctccgcagggggagggaggggcgccaccagaggcttcctgttgctgcccacagrgtatcaagtgttgggttcttctgacctgtggctgtgccccttctgaagggcacaggtttgtgggtatagggatgagcacattcgggaggaagaacaagaa

SEQ ID NO: 217404 - DNA, 201 bp, Homo sapiens
acctgcactctgtctctgagcacatgcacagatctgaattcttacactggcagatggagctccgtgggctcctgtgttaccacgcaggcttcaatgtcatrtaaaacagagcagggagtgaaacttccagtagctctgttttgtcacccacagccctgcaagatggagcagtttacacccagctctgcaggatgtagcctc

SEQ ID NO: 217405 - DNA, 201 bp, Homo sapiens
cagggttgatggtgctgttgacgtagcagagccagtagccaatggaccacaccgtgtcagggatgcagctctggcagaaggtgttcaccaggaccatgacrttgtagggcgtccaggtgaggatgaaggctagcagaatggcaaagatcgttcgtgtcactttgcgctcccgggccgccatctgccgcttcttgcgcacct

SEQ ID NO: 217406 - DNA, 201 bp, Homo sapiens
cccctcggagaagcagggatccggagcccttccacccactttaaggcaggagagaattgggaggtgtggaagcagcccctggaggctgccctgcagtgcckctggagcgacacaagggggcgacagctgccgttgtgggaggccggtgggcgaggagcttctccttccgccagtccacaggcccacggggacccacaggca

SEQ ID NO: 217407 - DNA, 201 bp, Homo sapiens
aacatccccaggtgaggagggggctaccggagctggggggagccctgctgtccttgtcctgcagagactgtgttttgaggcccatgtcatcgcccgccttygcaggtactgtgcgggcaccatgccctggggccaccctggggagcaccacgactttgagccccagcggcatgacgacggctacctcgaggtcattggctt

SEQ ID NO: 217408 - DNA, 201 bp, Homo sapiens
cctttctccacccctcaccccttattggccctggttcccacagtcacacccctctccctctgctgctcccacttcgtcccaccactgcctgactgtctctyggctccccatcccatccagggtgcaaagatcatccagtctttcctctggtatctcaatccccgacaagtcttcgacctgagccagggagggcccaaggag

SEQ ID NO: 217409 - DNA, 201 bp, Homo sapiens
catgttggtcaagctggtctcgagctcctgacctcaggtgatctgcccgcctcagcctcccaaagtgctgggattacaggcatgagccacccgcccggccrgggtgttaatattgaatgaggggtgagggggaaatgcttctcccagcagatggggaatgggagccctctgcagacacaggagaagacaaggatgggacgg

SEQ ID NO: 217410 - DNA, 201 bp, Homo sapiens
gctgggggtccacgcagccgtggtcatcccgcccacctggatcctccgcgcccggaggccccaggtgagtactgcctgcacccttgatgccccgtacgcayttggggtctgccagctaccccagcctgcccacctcgtcaccaacacccctgcttcccttgcagaatactctgaaagcaagcaagaagaagaagagggcat

SEQ ID NO: 217411 - DNA, 201 bp, Homo sapiens
atcactcccaggaccccctctgcaggggtgccacatcacctgttctgaattcttaagagcacccctgctctcagaactccttatttatttgacttgtttgyatccctgaactagaatgtaagctccatgagggcaaggccttcctctgtctcgtttccctgctgtatccccagtgcctggaatagtgcttggtgtgtagca

SEQ ID NO: 217412 - DNA, 201 bp, Homo sapiens
gatggcagcgggagtctggcttggagggaggcactaaaggaatgggttggtcatttgttgcgcaaacatctctttgaggcctagcaggggctgagtcaggkactcggatgtgaaagaagagactgggggtatttcaccaaggagctcaggccagcttaggatccccgcctagcccccaagcctctgagacagcccctcctc

SEQ ID NO: 217413 - DNA, 201 bp, Homo sapiens
cctgggcaggctggggtgactcactggcccccactgcttgtctccacccagaggccaacccagagaaattcaacagccgctttcggaataagatgttctaygccggggtgagtggggtctgcacccccgcctgtgcccacctcttctaccacccgtgcccgtgcccacctgtgtccaccaggccccaggagccctgccggg

SEQ ID NO: 217414 - DNA, 201 bp, Homo sapiens
agcccaggtgagcgattgcaggcctgctccagccacagctgcttccgggccccagggtcgcctctcctgggacgccttccctgttagctcccccgatgggytcacctctgtcctcatgcctctgagagcttttactattgcctgtgtgcatggacagcgtgcggccctgccctccacactggagagtatagggcggtgcca

SEQ ID NO: 217415 - DNA, 201 bp, Homo sapiens
cctctggtatctcaatccccgacaagtcttcgacctgagccagggagggcccaaggaggcgtaagtacttgccaaggttttgtgggggacatgggggggarcttgcctcactcctggggtacagcacacatcccctgaccccactgccatcttcccatgagcccaggctggagatgtaccgcaaagtgcacaacctgcgga

SEQ ID NO: 217416 - DNA, 201 bp, Homo sapiens
gcctcccccaaagcaatgtgagtcccagagcccgcttttgttcttccccacaattccattactaagaaacacatcaaataaactgactttttccccccaawaaaagctcttcttttttaatatataaaagccccttcccaaggagtttgctgtggaaatgtgtttgggagtgggaaggtggggagaaagaccaggctgtag

SEQ ID NO: 217417 - DNA, 201 bp, Homo sapiens
ggggtcactctcacctttgttctctggctagagtttctgcttcggaaggagcagagtctgggacccccctgcccccagccctggtgccatctgacccaagmttcctgtgcccacaggccgcgctgcaggtgggcggacacggcgagcggctgacgcagtgtcgcgaggtggtgctcaccacatccaaggccatcccggtgc

SEQ ID NO: 217418 - DNA, 201 bp, Homo sapiens
cttgttttacagccaagaaagggaagggaaaggactagacgccaagcctggatgccaaggagcccctggtgtcacatggggcctggcccacgccctccctytcccaggcccgagatgtgacccaccagtgccttctgtctgctcgttagctttaatcaatcatgccctgccttgtccctctcactccccagccccacccct

SEQ ID NO: 217419 - DNA, 201 bp, Homo sapiens
tcatcgtctggccctctgtgggatctccagtgatcgtcccattccacttcactgtatctctgtctaggccacaatagatggctcctagtaggggcttcctrgctcagtccacctgtccctggtgcttagaaaggagcaggtcagaggaagcactgctccagggcttggtcaccagtgctgccagagagcccacaggctgtg

SEQ ID NO: 217420 - DNA, 201 bp, Homo sapiens
cagcccttccgggaacgtgggattgagcccgctccctggcacccctgctgtgggccgccccaggatggtgaggggtgcaggggctttgtccggatgccagsactggggcttcccagtgcacacaaagggcagctgtgctggggcaggcagcctccgagatagacttacctggtgcctcaggggccctctcttcctgtcctg

SEQ ID NO: 217421 - DNA, 201 bp, Homo sapiens; identical to SEQ ID NO: 38913

SEQ ID NO: 217422 - DNA, 201 bp, Homo sapiens
actgtccagcaagggtgcacggccagacaccaatggtcttgtctcctgacttcctctgtcctttcccaggccctgtccttgtcaggccccagagccggccragggttgatggggtcccctgagtcctttcccatcctgtccccattggtgtaacaggctccccacccggagaccgagggacagccattttgctgtgctctt

SEQ ID NO: 217423 - DNA, 201 bp, Homo sapiens
cagtttctgctctgtggcctggtaagatctggcccagagatggtacgtgagggtacaaagagggaacaaagtcacccagggggcctgctaaggatgatggyagggtgtcctggacgggaaggagcttacagcctctcaccttgtctcccaggagggccgctggagacccttcatcatcaggcccaccccctccccgctcat

SEQ ID NO: 217424 - DNA, 201 bp, Homo sapiens
acggcaccactgggtacacagacgacgccaggacggcaagtgtcggcactgtgggaaggtgagaggccctgcccgaggacatcgccacctgcacctgcggkcctgagcccaggccatgtggccggtgtggcctgccgatcactgaccacaccctggtgtgcagagtccggggctgaccctcagcctggctgcagtgccttc

SEQ ID NO: 217425 - DNA, 201 bp, Homo sapiens; identical to SEQ ID NO: 38915

SEQ ID NO: 217426 - DNA, 201 bp, Homo sapiens
gtgcccaacagccaaccgcctgccatggagactttctttaggagacatttccgggggaaggtgccaggccctggagaggggcagcagcggcccagcagcgyggggctgcccacaggcaaggcccggcgtcgctcccccgctgggcaggcctcctcctcactggcacagcggcgccgctccagcgcccagctccagggctgc

SEQ ID NO: 217427 - DNA, 201 bp, Homo sapiens
atgctcccggtctctgtgcccaacagccaaccgcctgccatggagactttctttaggagacatttccgggggaaggtgccaggccctggagaggggcagcrgcggcccagcagcgtggggctgcccacaggcaaggcccggcgtcgctcccccgctgggcaggcctcctcctcactggcacagcggcgccgctccagcgcc

SEQ ID NO: 217428 - DNA, 201 bp, Homo sapiens
ggtgttccgttggctgtgagcaggcagctgcttatcaggtagagagggaggccagtattcggggcagaaggtgtgccaggtgcggcggcacagcagtaagycaggcacagccagattggggcacagagaataggctggcttggttagaactaaggcttcgtgtcacagtacaggaggcttagtgccacaccgcaggagcca

SEQ ID NO: 217429 - DNA, 201 bp, Homo sapiens; identical to SEQ ID NO: 38918

SEQ ID NO: 217430 - DNA, 201 bp, Homo sapiens
tctcctgggacgccttccctgttagctcccccgatgggctcacctctgtcctcatgcctctgagagcttttactattgcctgtgtgcatggacagcgtgcrgccctgccctccacactggagagtatagggcggtgccagccagaaaggcagtggggtacctaccaaaggcttgctgggtgggtaggagggcctggaagcc

SEQ ID NO: 217431 - DNA, 201 bp, Homo sapiens
gggaggaagtagggtcagcaagtgctcagccccctcctcagctgtcttctcctctctaggaaagccatcaccaagtcgggcctccagcacctggccccccytccgcccacccctggggccccgtgcagcgagtcagagcggcagatccggagtacagtggactggagcgtgagtgcctgaacacccctgggtcccagaccc

SEQ ID NO: 217432 - DNA, 201 bp, Homo sapiens
gctgagtccagaccatgcgctgttccctccactcactcttcaaaccacacccagcacttctacactctggggatgccattagaagcaatgtgaggccctgrggctcacagcctgtccggggatgcagatttgcacattagtgctgattgcccagggtctgagaggaaaaccatgagggagaattcactgagtagagagggg

SEQ ID NO: 217433 - DNA, 201 bp, Homo sapiens
cacaggagaagacaaggatgggacggtcaccagagaagagtgggggcccgcgaggggtttataacaaaggggcccctttgggaggctaagggagatatatyggcattcccatcagggatcggtttcagtgttgcctctgagacaccagagctcagcccagaccagacttgtccacccagtgcagcaggaagttctcgggag

SEQ ID NO: 217434 - DNA, 201 bp, Homo sapiens
caccccctccccgctcatgaagcccctgctggtgtttgtgaaccccaagagtgggggcaaccaggtgaacgcggccttgcctctcagctaagggctcgggygggggttggggtccagcccgtctgccagcagctgttcccagagcccgtttctggcttctaccccaatccctctttcccagggatcctgagaaaatcctgt

SEQ ID NO: 217435 - DNA, 201 bp, Homo sapiens
gcagagggcaggcaggacctttccatttaagcttctgttgaccctaaggattgggcagccaggagtgggagagaagtggactctctctcctcctccaggamccaccgggaaggaggacccgcttatcctctggcctggtctcagcagcctgatcctggcaggtcacagggcttctggattagctggttttacaccccaggg

SEQ ID NO: 217436 - DNA, 201 bp, Homo sapiens
agagccacctcagactgaactctgaccacttggagtctgcccaaggcctccctctcacttttctgcagctgcctagacttggtggcattcacccccaccccgccccttagctttgctctgccccttccctgggtagactttacccaccaataacatgggcggttttctcctgtcgtgtgggctagcatacccgtgatgctg

SEQ ID NO: 217437 - DNA, 201 bp, Homo sapiens
aggagtgtccccgggagggtcagaccctgctcccgccagtgaaggcatccatcccagccctcccccaaccccacctgggcaggctggggtgactcactggyccccactgcttgtctccacccagaggccaacccagagaaattcaacagccgctttcggaataagatgttctacgccggggtgagtggggtctgcaccccc

SEQ ID NO: 217438 - DNA, 201 bp, Homo sapiens
agaccccagcccatccctctgctaggcaggcagcatgtctccctctaccctcttccagcccatgctgggaaagggatggggtgggctggagtctggaatcygctggctgttcaagcttcatcttgccccctcccccagcactccaaatgtcaccatcttgtgcctgtgacagagctttgaccaggactctagcggggaacc

SEQ ID NO: 217439 - DNA, 201 bp, Homo sapiens
ttttttgtgacagagtctcactgtcacccaggctggagtacagtggcacagtcttggctcactgcaacctctgcctcccgggctcaagctattctcctccrtcagcctcctgagtagctgggactacaggcacccgccaccacacccggctaatttttgtatttttagtagagatggggtctcaccatgttggtcagcctg

SEQ ID NO: 217440 - DNA, 201 bp, Homo sapiens
accctgccctctctgggccttgatttccccatctgtaaaaggggctgactgtccctctgccccaggggtgttgggagtggagcgggaccttctctcggcamgtggtttggtgccaggccgagggtggcaccaaggcagggcccttgctgagcccccgcttgccggccctgcccgacagccagcagccggtgccagagcagt

SEQ ID NO: 217441 - DNA, 201 bp, Homo sapiens
tgccccagtcctgaactctgttcctcgcgcgttgtagataaggtgaagaagggcggcccggggagcgagtgcgctgagtgggcctgggggccctgcacccycagcagcaaggattgcggcgtgggtttccgcgagggcacctgcggggcccagacccagcgcatccggtgcagggtgccctgcaactggaagaaggagttt

SEQ ID NO: 217442 - DNA, 201 bp, Homo sapiens
gcccttcacggtgctcaaagtcacaagctcccagagggcaggaggcacacctgcagaaccagtgtgagacaatgggtcccatttagaggcactgccacacrgccccagcgagcatggccctgaagtcagggctgcagagggtgcccagcgggtgcctgagcagaagcagcccctgtttgagttggttctgcaatgaatagg

SEQ ID NO: 217443 - DNA, 201 bp, Homo sapiens
gcggcccccggtggggaaggggacgggccagggattcagactcgggctctcccctcaggatgcagcaccgaggcttcctcctcctcaccctcctcgccctrctggcgctcacctccgcggtcgccaaaaagaaaggtgatgggggatgatcgaaggagggctggggacgggcaggcgaggcccctccacttctgggctggg

SEQ ID NO: 217444 - DNA, 201 bp, Homo sapiens
cctacctggcagtgccgatgttccgatactggcacagcagcaggtgccggaaggtctttttaaaggtggcgttgcacagagcatagcaggcagggttgatrgtgctgttgacgtagcagagccagtagccaatggaccacaccgtgtcagggatgcagctctggcagaaggtgttcaccaggaccatgacgttgtagggcg

SEQ ID NO: 217445 - DNA, 201 bp, Homo sapiens
ccagctcccacctgcgccctgccttccagatcaggtcaaaaggggcccccagcccctccttgctttctgcttcctccctctgtatctggctgggtgggtgyggggagggttggatccgggcggacccgggccccaccatccctaggcaaggagcctgccctgccaggttcctgaagctgatggaaaagggtccccccgagc

SEQ ID NO: 217446 - DNA, 201 bp, Homo sapiens
aggtaaactttcatttttttaatgttgaaattgaggtaccagtgtaatacttgctcttaacagatggccaaataacagcttgcatgctgtgtcaggcatgyccctttgtagtgtggccttctcttctttattctttattttattttgctgcttcagttaacttcctggaaggactttgtgctctcatgctagatttttgtg

SEQ ID NO: 217447 - DNA, 201 bp, Homo sapiens
tttattatgctcatggattctgtggctcaggaattggacagggtacaatgggaggtggcttgtctttgttccatgatggctgggggttgggatcatttggrggctcctttactccacatctgatgtctgggctggggtgccttgaaggctagtggaatcagctgggaccaatgaccagaacacctacatgtagactctcca

SEQ ID NO: 217448 - DNA, 201 bp, Homo sapiens
gcagggaaaatactccgcctgaaacaatgcaggttaacaaagatcagaacaagtagaatacatgtcatcttagttagctgttaattcatactccataatcrttacagttaacacagtccactgagtgggagtttgcccccaaaagagagaaagatcaagtagtcaagaaggtgagtgaattcagagagtgaggggatcatt

SEQ ID NO: 217449 - DNA, 201 bp, Homo sapiens
gcttttgtggtcaccaagaatgtaatataactatgctcttcacatcctaaggccaccataagtcctggatcagacctgtttttttgaagtcacctgaattytgacttgaggctcccccaacccttactcccactacccctttgaactggatcactttgcttttaaggggcactcccttgaagccagttccctgaagtgacc

SEQ ID NO: 217450 - DNA, 201 bp, Homo sapiens
ttggaagaagagaccaacggcttctttcatgtaagcacaaagcagggaaaatactccgcctgaaacaatgcaggttaacaaagatcagaacaagtagaatrcatgtcatcttagttagctgttaattcatactccataatcattacagttaacacagtccactgagtgggagtttgcccccaaaagagagaaagatcaagt

SEQ ID NO: 217451 - DNA, 201 bp, Homo sapiens
gtgtataagtttttgtgtggacataatggggctgtttcccaaaaaggggctgcacttttttacattcccaccagcagtgtaggagggttcctcactaatamatgttatcgactgtcttttttattattcaagtgggtgtgatatagtgttccacttatttttgttaatgtttattttctaatttttttcaataaacattgt

SEQ ID NO: 217452 - DNA, 201 bp, Homo sapiens
tggtgggaaggccagggaggtaggagaacagagagtgggacaagagggttggactttgtttggagacgtggtttatgactccatggtggtctatacagaaytggggaggtgggattggagagagggtaaaagagtgaatgtcttgagaaggtcagagaattattggaggaggaattaggttcaagattgctgcagcatagg

SEQ ID NO: 217453 - DNA, 201 bp, Homo sapiens
gggagtttccctgaaaaggtagacctaggtaatggggttagctcttggcaagagaacggacactcaggaggaagttggaaggaatgaagggaagggaacaktactgtttttcaggttatgagtaggcaaacatttgaaggagttgttccctaattgcctcattttgctttgtgaaataggagtgagattatgtcctaagag

SEQ ID NO: 217454 - DNA, 201 bp, Homo sapiens
tcatttatctactatttactttatttgcctctagaatagaaattttgctttcatttttggcactgtttagagagagaaaaagttaagcttctctttctccrttgtcttttcatttttaagccaatctctttcttacaggtagcagtagctgatgtgcagtttggccccatgagatttcatcaagatcaacttcaggtaata

SEQ ID NO: 217455 - DNA, 201 bp, Homo sapiens
agtttttttaattttgaaataattttagacttagagaaaatttaccaaaaaaagtacaaagaattcctgcgtagtctctacccagattgcccaaatgttaytaatattttaccatgggcttctatttattgcctgtatgtatccatattattattattttcttaatcatttaaagtaagttgcatacccgatgccccttta

SEQ ID NO: 217456 - DNA, 201 bp, Homo sapiens
tttcatttttaagccaatctctttcttacaggtagcagtagctgatgtgcagtttggccccatgagatttcatcaagatcaacttcaggtaataatgaackatgctgtatttttcacatgctgattttctttaaaaagggtggaggtggagctaaatttacacatttaaaatagtctttcatttagataatagtgtttgga

SEQ ID NO: 217457 - DNA, 201 bp, Homo sapiens
tggcagccaaattatgatgtccattatacagggagatataaaaatataaagggaaaggaaatgtgaggctagagaattgggagaaatagagtcttgttctktcagatactaaaatgcactaaaaagctgtaacaagcaggggtgttactgctagattggtaaactagaatataaaaaccagaaacaggccgggcacggtgg

SEQ ID NO: 217458 - DNA, 201 bp, Homo sapiens
ttttagtgtttaccaaagaagataaccaatgtaatggattctgcagggcatgtgaaaaagcagggtttaagtgtacagttaccaaggaggctcaggctgtycttgcctgtttcctggacaaacatcatgacattatcatcatagaccacagaaatcctcgacagctggatgcagaggcactgtgcaggtaagcccaagact

SEQ ID NO: 217459 - DNA, 201 bp, Homo sapiens
cttaggcacaagattactaatcttctcaattctctgtctgtgtttattttttatgtgatctgtctgccaaagaaggagagtagtgttttgaagtccttcartcacagttgtggttttggcgagtttttcctcatacttctcacagctctgggcattaagaaaacaacaagggcccggcgcagtggctcatgcctgtaatcc

SEQ ID NO: 217460 - DNA, 201 bp, Homo sapiens
aatggagccaccagtaaagtcagaaatgagtcaaagaaggaggtttatggttgcccctttatttaaatgatcatggtcattggcaaataataggtattctytcttaggcacaagattactaatcttctcaattctctgtctgtgtttattttttatgtgatctgtctgccaaagaaggagagtagtgttttgaagtccttc

SEQ ID NO: 217461 - DNA, 201 bp, Homo sapiens
tcatgcctgtaatcccaccactttgggagactgaggcgggcggatcacaaggtcaggagttcgagacaagcctggccaacatggcgaaaccctgtctctaytaaaaatactaaaattagccgggcatggtggtgagcacctgtaatcccagctactcaggaggctgagacaggagaggttgcagtgagctgagatcgtgcc

SEQ ID NO: 217462 - DNA, 201 bp, Homo sapiens
aagtgatctgcccaccttggcctcacaaagtgctggaattacaggcatatgagccactatgcgtggccagtgtgtatgtttcgaaaaggctcttgggtctytggagaactttgggggagtttttttttggtttttttttttttttttttttttttggcttcctgtgactaggattctcttcttagtctctcttctggcact

SEQ ID NO: 217463 - DNA, 201 bp, Homo sapiens
attgtatttggttcagaccccttcagatctgttttgtcctcacgggtctttttttttttttttaatgactttatttaaacttggagcatcagtcacaaatwtgcagagacaatgctattttctactgaaggcttttgtctgagcttattacctctcttatgtttgccttatatccatcttcttcccaaatatacattttac

SEQ ID NO: 217464 - DNA, 201 bp, Homo sapiens
tgtaaagaaaagaaatgttcgtcaagctgaagaccatgtgaagctactttggagagggcatttagtatttcatttaggaattcttatttgcctgtagtaaraaaagaaaggcctctccttttttttgaaccatttttatttatagctaatacttccattaggcagcccagccctgaaattcttgtttaataatagccgatg

SEQ ID NO: 217465 - DNA, 201 bp, Homo sapiens
gcatgcagcatatttcattgcatatgtttaagactcagtaaatattgagttaaattgcagtccaacaaaaaggattgatggcagcacaaagtaatctgtcragagagagaaatgtaaagaaaagaaatgttcgtcaagctgaagaccatgtgaagctactttggagagggcatttagtatttcatttaggaattcttattt

SEQ ID NO: 217466 - DNA, 201 bp, Homo sapiens
gggtgatttatttgcattttaacttctttagcattttacctctgaaaatcttgcctgttttttaatcctcatctcaaatacctcccacccgacccctccckagcacctcccagcacaatgaagacttcccatctgctctgtcttgtggatttttcttgtcctttccaatcacctgtggtttacttgagagcattaagcact

SEQ ID NO: 217467 - DNA, 201 bp, Homo sapiens
tatggggcaaaacactctgtaatctgctttaccccactacacccatcccatccatccctagttgcaaaaatttcaacttgtatgaatatgcacagattcartagtggaaactcagcactgttgagtgccaggcttcaaatatggaattagtgacctctgaacccgtgtttgtcaaactgcctgctaatgggtcatgacatc

SEQ ID NO: 217468 - DNA, 201 bp, Homo sapiens
ttagactgctaatccttaacagattaatctgagtttatatttagatgaaagttattcattaatagaaaaacctgaaactgtagtgagggctgacagtgttkaagtggatagaggtacataggccacctttagaccaaaaagtctttgtaaggcactggagtctttaagtgtctgctttggcacaaggacatcaggttatcc

SEQ ID NO: 217469 - DNA, 201 bp, Homo sapiens
ttggagcttattttatccaatcaagaatcagaaactgagacccaaggaagttaactgacttacacccaagatcttgtaagcagcaaatggcaaaaatagtsctttaaactgaaatctgcattttcgaaactgcattcattctttcttccatctctaaatctgactgtaacctcaaaccttttcctcctgtgtaccttagct

SEQ ID NO: 217470 - DNA, 201 bp, Homo sapiens
gttttttcctgggagtcctgtcctattcatgaatttcctgttttttccaggggggtgggtagggggtgtgggggcaggcagtactatgttattatcgtaaytagtgacatttaaagaaagaaacccaaagcccagttaaccaattacacttaaattctctgggcccaggcctgctggatgctctccatctaccagaaatgc

SEQ ID NO: 217471 - DNA, 201 bp, Homo sapiens
ctggatcactttgcttttaaggggcactcccttgaagccagttccctgaagtgacctactttcttgaggtgcttgaagagcttccctttcatttgggaggyttcctcagtgcccccattcccaggcgttttttcctgggagtcctgtcctattcatgaatttcctgttttttccaggggggtgggtagggggtgtgggggc

SEQ ID NO: 217472 - DNA, 201 bp, Homo sapiens
tgacttgaggctcccccaacccttactcccactacccctttgaactggatcactttgcttttaaggggcactcccttgaagccagttccctgaagtgacckactttcttgaggtgcttgaagagcttccctttcatttgggaggtttcctcagtgcccccattcccaggcgttttttcctgggagtcctgtcctattcatg

SEQ ID NO: 217473 - DNA, 201 bp, Homo sapiens
atcgaggctccggggacccggcacctgaacctgtgctgcagtcccagcgcgacagcagggaatccagcccgcagcacgcctccgggtctttgcagtagcckggccaaggcgggagcggctgcctctcagggtcgctccagggccgcgctaggaaaggtgtggacggtcggagaggacaggaaggagccggctgcaccgcgc

SEQ ID NO: 217474 - DNA, 201 bp, Homo sapiens
catgatgctcaaaggaagtgctcaatggagcatttcagagtttggattttcagattagggatgctgaactggtaaatataatgcagatattccaaaagccaaaaaaaaaaaatccaaaacacttctggtctcaagcatttgggataagagatatgcggcctatactggctcagactaagttcaacagagttcttttatgta

SEQ ID NO: 217475 - DNA, 201 bp, Homo sapiens
taactgggactacaggtgcgcaccatgcatggccagttttttaaactttttttttgtcgagacgagatcttgctgtgctgcccaggctaggctcaaactcytgggctcctgtgattcccccagcctcagcctaccaaagtgctgggattacaggtgtgggttactgtgcccaactgattactcaaaattttacatttggct

SEQ ID NO: 217476 - DNA, 201 bp, Homo sapiens
gtcctgtaaaaagaaaaaagaaggaagtgtccttcacacaacttctgacctttttcttcacttcctggtgtgttagtgtgtgagagagagagagagagagwgtgtgtgtgtgtgtgtgtgtgtgtgtgtgtgtgtgatgtttagggtctgaggatattcaaagtggaaaagggtataagagctaggtaatttttattttgt

SEQ ID NO: 217477 - DNA, 201 bp, Homo sapiens
ttaggtgtgaaaatggaattgtggttgagtagaaaaatctgcatacacacatagatgtatttaggggtgaaaaatgtgagggattttcttgaaaatactayagtcaaaaagatagacatagcaaatgtatcaacatttaaaaaatttttgatttgagtgatgggtttatgagtgttcttaacacttttaaaattttatttt

SEQ ID NO: 217478 - DNA, 201 bp, Homo sapiens
ctttctttaggataattcctggaaatagagtaaggattttggaacataatgacaaattgttctccattttacacacttgcagagccacatttttaccagtrtgaattcttttttcaaaaaaatctttgctaatttggatgacaaatagcaagttgttatatgaatatgtacttatttgattactagtaagaatattttaaa

SEQ ID NO: 217479 - DNA, 201 bp, Homo sapiens
tttacccatgtactcaatggttttatttttcacatttaaatcttcaatccatttggaatttatcttggtgtatgatatgaggaataaattcagtttaattytttttttccatatggctatggaattattcccagcaccacttattttgttcattcccccacactaatttgagataaattccattcataattgagttcattt

SEQ ID NO: 217480 - DNA, 201 bp, Homo sapiens
agtgctccaccagcttgatctgtctataccttagctaaccagctcatgttggtgaacatttgaacatttgagttgtttccctacattattatatgaccttstgcataagtcttttttttttttggacagggttgcccaggctagagagcagtggtgcaatcacagctcaccggagcctcgacctcccgggctcaggtgatc

SEQ ID NO: 217481 - DNA, 201 bp, Homo sapiens
ggtttctttcagttagcataatgttttcaaggttcatccatgttttattaatagtttgaatcagttcctccttccttttttagcagcacagtgctccaccrgcttgatctgtctataccttagctaaccagctcatgttggtgaacatttgaacatttgagttgtttccctacattattatatgaccttctgcataagtct

SEQ ID NO: 217482 - DNA, 201 bp, Homo sapiens
ttagtggtgatatggcggcaaatggtgatattctaattctctcattactttttcatttaatactgaatacctctataaagagaagctcctctcattaactrtgtgataaagtttgaatagcataggcaggataaatgcttgtttcttgttctccatttattataccagttttcagaataatggtttgacttcctaatatcc

SEQ ID NO: 217483 - DNA, 201 bp, Homo sapiens
tgtaattactcaacttagtattttgaaatattttattgtggagaatttataacatgtacaaaagtagaattatgttgtatttgttgcataacaaattaccscaaagtttactggcttaaaacagtaataagcatttatttctcactgtttctttggttcaggaatttgagagaagcggggctcaatagttctggctcatag

SEQ ID NO: 217484 - DNA, 201 bp, Homo sapiens
tagagaaattacaaggttaaaagggctttgagatgtggtggaaagaacagagacttcctataccctgcctctaccactgtgcacttttaacaagttattawcttctctgagcatcacttttcttatctgcaaaatgggaataatgaattctatcttttagagtttttgagattaactgagataatgtgataaatgatactt

SEQ ID NO: 217485 - DNA, 201 bp, Homo sapiens
aagaacagccccatccacagttaaacagaaatctggggatattaaatggagctttgtactcttgtcacttttttctttcttcatcaatttctagttgcttrgaattaagggctacactaaatgaccctgcatttgttggtgagaacaggggaagcagagagatgttttgtaagggatggaaggtagtatttacatacaaaa

SEQ ID NO: 217486 - DNA, 201 bp, Homo sapiens
cctccattttacctagtaactcttcatcctttgtgctccttagaatgcagtggagccagcccttgggctcctttatccccgttgtaagcatagccatcatyttgtggtaatagacataaacttgcattttcctttggaagaagagaccaacggcttctttcatgtaagcacaaagcagggaaaatactccgcctgaaacaa

SEQ ID NO: 217487 - DNA, 201 bp, Homo sapiens
agtcagtaggagagattaacgatcaagacagaggggactgttaagggagtttccctgaaaaggtagacctaggtaatggggttagctcttggcaagagaayggacactcaggaggaagttggaaggaatgaagggaagggaacattactgtttttcaggttatgagtaggcaaacatttgaaggagttgttccctaattgc

SEQ ID NO: 217488 - DNA, 201 bp, Homo sapiens
ttctgtcacccctgtcgcccaggctggggtgcagtggcgtgatctcagctcactgcaacctctgcctcccgggttgaagcaattctcctgccccagcctcyggagtagctgggattacaggtgcatgccaccacacctggctattttttttttgtatttttggtagagacagggtttcaccatgttggccaggctagtttc

SEQ ID NO: 217489 - DNA, 201 bp, Homo sapiens
aagctttcaccaactagttttaacattcattggtcatttttgtctgaaatagctaataccacggatagttgccaaatggtgaattttaactcatgggtagcatgttttgacagcttgttattcagccatttggggtttgtcttagttcttttcagctgagatgtacagcagctttgtagaaaagggcagctagatctcagc

SEQ ID NO: 217490 - DNA, 201 bp, Homo sapiens
aggtattttgttatagcagctcaaactgactaagacaacagcagaagaaaaaaaaatactgttactttctgatctcatatccaatccaggatcacacattraattatcatgtctctctagtcttcagcctgaggcaattcttaagtacctgtccattgagatctagatgtttttgaagagtacggaacagttattttgtag

SEQ ID NO: 217491 - DNA, 201 bp, Homo sapiens
agaattctctgtagtgacctaaacctaaaaaatgccttttaaagaaagttatttgttgctgatggaagcaaggcaaatataaaattttatgacatattaaytttaaggacatttaaaatcttgacttttaagagagagaaaagatataagctaagtagattaaaaacccatgggttaaaaaccgaggtgacaagcaaatga

SEQ ID NO: 217492 - DNA, 201 bp, Homo sapiens
gtggctcacacctgtagtctcagcaatttgggaagctgaggtgggaggattgcttgaagccaggagttcaagaccagcctaggtgacataatgtgaccccrtctctaaagacaaattaaaaatttagctgggcatggtggcctttgcccgtagtcctagctactggggttgggggtggtggtagtgcagaggtgggaggat

SEQ ID NO: 217493 - DNA, 201 bp, Homo sapiens
tgctctggctcatgctccatgggctgcacttactgtccgacaagccccagtgagatgaagccggtacctcagttggaaatgcagaaatcacccgtcttccrtgtcgcgcacgctgggagctgtagactggagctgttcctattcggccatcttggaacctcctgtgctcgtacatggctttttaaatgttgaggtagttcc

SEQ ID NO: 217494 - DNA, 201 bp, Homo sapiens
atagccttaaagtatgacctgtaggaaaactcagctgaaggaggggagcagttattggctaatcagtgtcccttaacctagttctgtgtttccccctagtsgtgttcctgagagtgaagtttatatatgatgacttcatttgttctggcttttctcatgacaatcctaaggtcaagtctattttaagtctgagaaatatgt

SEQ ID NO: 217495 - DNA, 201 bp, Homo sapiens
gttgttgtcgttgttttgtttttgagatagagtctcactttgttacctaggctggaatgcagtggcatgattgttttgttttaagggatagggtcttgctstgttgcccaagttggaatgtagtggcacagtcttgtctcactgcagcctcgacttcctgggctcaaatgatcctcttcccttagcctcctgagtagctac

SEQ ID NO: 217496 - DNA, 201 bp, Homo sapiens
ttagtttttttggtttgttttattttgtttttgtttttgtttttgtttttcattctggagatgtcttaattcctccctcacttttgaatgaagttttgccraatataggatctttgattgacgattagctgacctccaaagtttctgatgagagatctattgataatcttattgaggatttcttgtgtgtgaccagttgct

SEQ ID NO: 217497 - DNA, 201 bp, Homo sapiens
aaggtttgtcaattttgttgatcatttcaaagaaccagcttttggtttccttgatttttctgtattatctattctctattgtattaatctttgctctaatygttatttccatctgctagctttgggtttagttttctctttttctagttccctaaattataaagttatgttgttgatttgagatcttattttctagtgtat

SEQ ID NO: 217498 - DNA, 201 bp, Homo sapiens
gcaggaccctgtccctaaaaataaataaataattactgataaaggtggacttaacttctgtcattttgctatttgtttttctgtatgtcacatagcttttytgtcttccatttctttaattactgtcttcttttgtgttcagttgattttttgtaatgcaatatttaaattcctttctcatttccctttgtgtatattctg

SEQ ID NO: 217499 - DNA, 201 bp, Homo sapiens
tttgtaatgtctgacatagatcatattaactagaataaaccaggcaaggcggcatttttcagaaggggctatggcatggtagtgtcatatatatgcaaaattttttttttttttgagatggagtcttgttctgtcacccctgtcgcccaggctggggtgcagtggcgtgatctcagctcactgcaacctctgcctcccggg

SEQ ID NO: 217500 - DNA, 201 bp, Homo sapiens
taaatccatcttttaagactctcctgtggacctcttggaccatcttccctcataaaaattctggctttggcatccagttacaccagtatgagactggcccrtagttacacaactcaagagaataggtaataaccatgcactgtctgttctgactctttcaccctactgaagaatcttcctcctcagtctttggtctagaat

SEQ ID NO: 217501 - DNA, 201 bp, Homo sapiens
gagagataaaattattgcagagcaatgcagaaactgagccagtggcccataattactagacatcagcttctcatggttaaaaatatatgtggatttttctsccatcactaagcaaacttcgtaatgtgtttactagaataggtcactgtttgaggggagagattggaggagggcagtcagttgggaaacattttgtaggaa

SEQ ID NO: 217502 - DNA, 201 bp, Homo sapiens
ctgaacctgtgctgcagtcccagcgcgacagcagggaatccagcccgcagcacgcctccgggtctttgcagtagccgggccaaggcgggagcggctgcctytcagggtcgctccagggccgcgctaggaaaggtgtggacggtcggagaggacaggaaggagccggctgcaccgcgccagggtctccgcaaaccgggagcc

SEQ ID NO: 217503 - DNA, 201 bp, Homo sapiens
ctgagccagtggcccataattactagacatcagcttctcatggttaaaaatatatgtggatttttctcccatcactaagcaaacttcgtaatgtgtttacyagaataggtcactgtttgaggggagagattggaggagggcagtcagttgggaaacattttgtaggaagtcttatggatctagttcttctgttgctgtgac

SEQ ID NO: 217504 - DNA, 201 bp, Homo sapiens
aatgttgttagaagacaggtttggagccagagagtactggtccaaaactcaaccctgtctctccctgctttttgacctttggcaagtttcataacctttcrgggccctagctttttcttatttgtaaagtggtggtagttgtccagttttaattaaattttgaatgtaaaatggtctgtcaatgtgtaaaaaattataaaa

SEQ ID NO: 217505 - DNA, 201 bp, Homo sapiens
gatttgatttaccaatgtcataggacacagctcaatatacaaaagtgagttgtattttatgtactagcaaccaacaattggaaaatgaaaccaaaagcccrgtcccatttacagtaggaaataaaatttaaaaattaaaattaggaaaaaatttaataagagatgaccagaactttacagtgaaaaccataaaacattgct

SEQ ID NO: 217506 - DNA, 201 bp, Homo sapiens
tggaaaactgttggcaatatttactgaagttgaaaatatgcatgttctctcaccaccagttctacttccagttatatagccagcagaaatgtgtagatatrttcaccaaaagtcactactagaatgtccattgtagtattagtcgtactagctaaaaactagaaataaccccatagttcatcagaagaataagctgtaata

SEQ ID NO: 217507 - DNA, 201 bp, Homo sapiens
aaagggaagggtgaggtggttgtgttgccatatgaaccttgaccttgcccagggtgatggtagtacttggagtgagcttgaagcactgaggtccttaatgwatgtgagtgacttagaggtcaagagaaggtggcaggggtggcattgctgtgtgttatgagcctcagggtatctaggagtgacagtgggagagtcagaagc

SEQ ID NO: 217508 - DNA, 201 bp, Homo sapiens
cctcagtgccacagtgcttggtacatactagagcgagaccctgtctcaaaataataataacatgtacagtggtttttagtatattcatagtggttttagtrtattcatagagttgtgcaactcatagtatattcaattttagaatattaccccttcgatagaacctcaaatttatgagcagttcctttccattccccctca

SEQ ID NO: 217509 - DNA, 201 bp, Homo sapiens
ttccttgatttttctgagatgattatttgaaatttagaattagacataattagtagtaaaattccaaaaagaaactttaaagaaaccaatttttttttttwaataaaaaatagtataggccagttgctagttgctgagatacttgtatagccctcttaaaagaagactcagaggtttgttttttgtttttttgttttttgt

SEQ ID NO: 217510 - DNA, 201 bp, Homo sapiens
ttggaattgatacatccacctttgccatttttaatgctcttggatcatttttactttggggtgtaagtaccatttacattaaggttatttactctttgtayaatgaaaatatttttcctctgttttaaaaatggattttggtatttttgcatcatgtagaaattgtccttttttatagactctcctagcagtatagttact

SEQ ID NO: 217511 - DNA, 201 bp, Homo sapiens
ccatcttagaggcaaaccatgatctatttaaccagtctcttactattgggtagatggttaaccctcacatcatcttttttttagtattaggaataagtaayattgccatgaaatgcttgtttctataattatgtgtatatatcttatgctttctttaggataattcctggaaatagagtaaggattttggaacataatgac

SEQ ID NO: 217512 - DNA, 201 bp, Homo sapiens
tggaaataggcacagagggaatcagcgtttatttagtatctattattggggggctctctatattgtcatctcatttggcctttaacaaatgagaagttgargctgaggaagattaattcacttaaagtcacatgtagctagtaaaaggcaaagccagaatcacattcattttatttgttcattttatttctcctttcctgc

SEQ ID NO: 217513 - DNA, 201 bp, Homo sapiens
atctgcattctgtcttaaactctttatttcattgtggattattaacagttggtccacgggccacactttaagcaacgtcaatctctagtatccatcttagrggcaaaccatgatctatttaaccagtctcttactattgggtagatggttaaccctcacatcatcttttttttagtattaggaataagtaacattgccatg

SEQ ID NO: 217514 - DNA, 201 bp, Homo sapiens
gtttgagaccagcctgggcaacgtagggagaccctgtctctacaaaaggaaaaaaaaaattagccaggctcggtggttgtgtctgtagtcccagctactcrggaggctaaggtgggaggattgcttgagcccaggaggctgaggctgcggctgcagtgaaccgtgatcacaccactgcactccagcttgagcaacagagcc

SEQ ID NO: 217515 - DNA, 201 bp, Homo sapiens
ggaagagagaagagagaccagatgtgatgatggtgtgggactagagagagaaaagcaagaaagtccttgaaaaggttgtttctgagcctggagattcaggsagtagcagtagggctggggaggatgaatgtggagagctctacctgtgaggtcctggtgggcagtcaggtgggtttgtttgttcacccctttgcccattta

SEQ ID NO: 217516 - DNA, 201 bp, Homo sapiens
ttatcttgcaaggctattcctctctcttttctttcccttttcagggtcttctggctgttcttgcttgtttgtttttacagatgaactttataatcagcttstctagctgtgggaagaaaactcaaaggttttttctttttattgaggttgtattatatttacaaattagtatagggagaactgacatcattgtgatgttgt

SEQ ID NO: 217517 - DNA, 201 bp, Homo sapiens
gttcttgttcaggtggtatggaatggaacccaggcctcatactttgcaggtgttctcatgggctaccagggttggggccattgttagaggcctcatagatsattgaaaagagttgggagatttggtctgtgcctggagaaagtgagctttcttgggaggaagaggtagttaccagaggcccatgtgcagagagtcctgtgg

SEQ ID NO: 217518 - DNA, 201 bp, Homo sapiens
gtttttagttatcattttacttctcatatcgtgattgagattgagcatcttttcacatgtttaaactctgcattcctttttttgttaactatctgtccatrtcactctagactctctccaaagggtcgtttgtattttccttccatttttggcatctctttctatattgcaaatattctttccatttctttatttctcctt

SEQ ID NO: 217519 - DNA, 201 bp, Homo sapiens
tgcaacctccacctccagggttcaagggattctcctgcctcagcctcccaagtagctgggattacaggcgcacaccaccatgcctggctaattttgtattkttaatagagacggtgtttgaccatattggccaggctggtcttgaactcctgaccccaagtgatccatctgcctcagcctcccaaagtgctgggattacag

SEQ ID NO: 217520 - DNA, 201 bp, Homo sapiens
aagtcacataaaatactggggtctggacttcctcatatccaaactggaactcatacttccaggctgcagggctaatgcgagttggaggaagctgctgtttytgaggggtactgattggttatcctctctcatcacccccactgtttttccagggtttcctggatttacccagcaggtcaaggaaatgctattaatttttct

SEQ ID NO: 217521 - DNA, 201 bp, Homo sapiens
ctcaagcaacccacctgcctcagcctcccaaagtgctgagagtcatcttttttgttttttaatgtgaattttgctaggtgttgttcaatttccctctatargggttgtaccattctgaatttttaccagcagtgtatcagaaagtattatttctctactgccttgccatagaatattttgtgatatctcactatggttttt

SEQ ID NO: 217522 - DNA, 201 bp, Homo sapiens
gtcccacagctgctgaagagctgtgatttgaccgtggtatgtggccaccctggctcactggcccaatgtgtctttccttcatattggaaggaaagataccrcagtgtgtacatagtggtgattccagtggaggggcttgcaggggggtgtttatttctttttatgttttaaaatattttctcccttccttataaatcggac

SEQ ID NO: 217523 - DNA, 201 bp, Homo sapiens
tcagcctcccaagtagctggtattacagaggtatgtgccaccaggtctggctaattttttgttgttattgtattttttagtagatacggggtttcaccatkttggtcaggccggtctcaaactctgactagtgctaggattacaggtgtgagccaccatgcccagcatgttttttgcttttttttttttttttaataacaa

SEQ ID NO: 217524 - DNA, 201 bp, Homo sapiens
ccagatttcttgacatgtcatttggccagtcacccagcacattcatgggggattgcagcccaaaagaaatggagagagctccggccaggaaaaagggaggwccaggtccttgtttggctcttcctggatagctgcttgtctctgggtaactctgccttctctggggatgttttagctcagctgtaaatttggaacacttgg

SEQ ID NO: 217525 - DNA, 201 bp, Homo sapiens
gacatgtcatttggccagtcacccagcacattcatgggggattgcagcccaaaagaaatggagagagctccggccaggaaaaagggaggtccaggtccttktttggctcttcctggatagctgcttgtctctgggtaactctgccttctctggggatgttttagctcagctgtaaatttggaacacttggtttccagtatc

SEQ ID NO: 217526 - DNA, 201 bp, Homo sapiens
tagacaattcattggttttttagtataatcaaagttgtgcaaccattaccactaatcctagaatgttttcatcaaagaaaccctgtacctaataacagtcyctccccattgcctcctgcccctttacccgctacacccccagcctctggcaaccactaatctattttctgtctctctgaatttaccaatgaacgtttgatt

SEQ ID NO: 217527 - DNA, 201 bp, Homo sapiens
gtcacccaagtctattcagaaaggacaagaagatcctgaatatatatatatatattttttttatatatatattttttgtttttgtttttgttttttgagayggagtctcgctctgtcaccaggctgctcactgcaacctctgcctcctaggttcaagcgattctcctgcctcagcctcccgagtagctgggactacaggca

SEQ ID NO: 217528 - DNA, 201 bp, Homo sapiens
cccagcacattcatgggggattgcagcccaaaagaaatggagagagctccggccaggaaaaagggaggtccaggtccttgtttggctcttcctggatagcygcttgtctctgggtaactctgccttctctggggatgttttagctcagctgtaaatttggaacacttggtttccagtatcccttttatccctaacattgaa

SEQ ID NO: 217529 - DNA, 201 bp, Homo sapiens
tccctctcttccttacacacagaagggagtgtgtagtttccctgttatatcctctgtgggcaccatgtcctgaaccacagctaggagttcacatgtctgtrtgtatttgattgcctctcctgatgtttaaacttgaggacgctgggcctatttatgccagtcattatgtctctagggaccactacagtgcctacactcatt

SEQ ID NO: 217530 - DNA, 201 bp, Homo sapiens
tgggaggtacaagttttgagtcctgtaaaaagaaaaaagaaggaagtgtccttcacacaacttctgacctttttcttcacttcctggtgtgttagtgtgtragagagagagagagagagagtgtgtgtgtgtgtgtgtgtgtgtgtgtgtgtgtgatgtttagggtctgaggatattcaaagtggaaaagggtataagagc

SEQ ID NO: 217531 - DNA, 201 bp, Homo sapiens
gctgaggcagtaggatctcttgagcttgaggagtccttgaggagtttgaaaccagcctgggcaacatagggagacccagtttctgcaacaacagcaacaayaaattagatggacatgggggtgtgtgtgcctgtggtcccagctacttggaaggctgagatgggagaatcacctgagcccgggaggtcaaggctgcagtga

SEQ ID NO: 217532 - DNA, 201 bp, Homo sapiens
caacatagggagacccagtttctgcaacaacagcaacaataaattagatggacatgggggtgtgtgtgcctgtggtcccagctacttggaaggctgagatkggagaatcacctgagcccgggaggtcaaggctgcagtgagtcatgatcacaccattgcactgcagcctgggcaacagagtgagaccctgtctcaaacaaa

SEQ ID NO: 217533 - DNA, 201 bp, Homo sapiens
tttatcttttgttttaggtctttgatccatttaaaattatttatatctggtgagggtagagatcaaggatgactgcccctgaccctagggaaatccaactsgtctatcaccatattgaataaccatcttttgcagtagcaccattattataaatcagcttactacgaatatgtgatctgttcctggactctattctgttcc

SEQ ID NO: 217534 - DNA, 201 bp, Homo sapiens
cccttgtccctagcaaacacattctgctttctctctatatattttgactactccaagtacctcatgtaagtggaatcatatagaatttgtctttttgtgaytggcttatttcacttagcataatgttcttacagttcatctgttccatagcatatatgtcagaatttcctttttatggctgaataatattccattttatgc

SEQ ID NO: 217535 - DNA, 201 bp, Homo sapiens
gcaacaacagcaacaataaattagatggacatgggggtgtgtgtgcctgtggtcccagctacttggaaggctgagatgggagaatcacctgagcccgggargtcaaggctgcagtgagtcatgatcacaccattgcactgcagcctgggcaacagagtgagaccctgtctcaaacaaacaaaagaaaaaaaattggttcag

SEQ ID NO: 217536 - DNA, 201 bp, Homo sapiens
atgctacctcttgcacctggtgactgtgtcacttaactgataggctttgaagtgtcacattttggtctactttaaatctttcttcttttaatcaaagcaattttttttttaacttggaggaattacataaaatcttgagtcaaacatttcaatacattatttataggattaagtattctaataatttcaccaagatattag

SEQ ID NO: 217537 - DNA, 201 bp, Homo sapiens
gcctcccaaagtgctgggatcacaggcgtgagccactgtgcctggcctgaatatatttttttaaatgctgactgattgaattggtccctgtaatttttttytctctctttttttaatgtaacagttttattgagatgtaatttctatgccatacaagtcacccattgaaagtatactatttgatagctgggcatggtggta

SEQ ID NO: 217538 - DNA, 201 bp, Homo sapiens
gtcagtgccttttttaactttcacaacacagagagaaggaagacttagtgttcattgagtactaccaggtaatcttaatcttactcctcccagcagcccasggaagtatagggaatgttatccctgttatatccattttgcaggtgaggaaactggggccaagaaaatatataatatgattagccaataagcaaagtaact

SEQ ID NO: 217539 - DNA, 201 bp, Homo sapiens
tggcactgtttagagagagaaaaagttaagcttctctttctccgttgtcttttcatttttaagccaatctctttcttacaggtagcagtagctgatgtgcwgtttggccccatgagatttcatcaagatcaacttcaggtaataatgaacgatgctgtatttttcacatgctgattttctttaaaaagggtggaggtggag

SEQ ID NO: 217540 - DNA, 201 bp, Homo sapiens
ctaatgtcccccatccttgatctgaaggccttcatctgccccaggagttctcacattctttgttgatgttgttagttcctttactatatacttacctctckttccagtagtttctcctctgaaaccccaagttccgttttcttttgaacgtaagcaaatgacttccttgatttttctgagatgattatttgaaatttagaa

SEQ ID NO: 217541 - DNA, 201 bp, Homo sapiens
gtggcctttgcagaaagtcctattccaggactttccctacagtgtctgtgcctgcatagtcagtggctcagggagggatcagaagccagggaactttgcartgttgtgatggtgaaatatgggttaattatatttgcttcaatatattttcagaattccacgtgctgatacccgtaatactctgtcagaccccattactgc

SEQ ID NO: 217542 - DNA, 201 bp, Homo sapiens
atataaaatgagaataatacgtacatcacaggagtgctgggaggattaaatgagtctcccaatagtgttgagtacatagtaaatactcccagagtgttgcstattattattttttaaataattattataaatgcgaatatgtatgagggagaactgatgaattggaaatttgtggtcagagagagctcttggacattctgc

SEQ ID NO: 217543 - DNA, 201 bp, Homo sapiens
atgtggaaacacatgccacaggggcatgcatgattgccatggggctgggtcacacgttcggctctgagcttccacagcctcaccaaatacgaaaacagttscagaattctggagatttaaaaatggcaaatgactcaggagaagtacagtttctgagctcagacctaaagaaattattctctcaggaaggggaacatcaca

SEQ ID NO: 217544 - DNA, 201 bp, Homo sapiens
tctggacttcctcatatccaaactggaactcatacttccaggctgcagggctaatgcgagttggaggaagctgctgtttttgaggggtactgattggttaycctctctcatcacccccactgtttttccagggtttcctggatttacccagcaggtcaaggaaatgctattaatttttctgtattgaaagggtgggcagag

SEQ ID NO: 217545 - DNA, 201 bp, Homo sapiens
agttgtctctaaggtctgctcagtgaaagaacaggatgttttctctctttacttcacagccatagccagctttgaggttcagtgtttgtatagctctaagkctctgttaattaaggaaatggactagaaaagacagtttaatgaaaactcacagacagtagacaatttgcacacattccattgtttgacaccatagtagaa

SEQ ID NO: 217546 - DNA, 201 bp, Homo sapiens
gaattgcaaacccgtattgtgaagtcctaccaaacctttcctgaagctcgcaagagctgaccctggactctgcgttagcatgaggcagtaaatccactctrtcgcctaatactttaagattaattttcttgacttgcaaccacaagcatcctggctgatacaaccaatgaaatggaagaggaatagggagagagaaaggat

SEQ ID NO: 217547 - DNA, 201 bp, Homo sapiens
tactggaaggctcagtgttaacattcacttctacccaaattggtgtttcaattcaaaaatttcagcaggttttttttctgtggaagtctacagactgtttytaaattatatatgaaaatgagaaggaccttgaataagcaaagcaaactttaaaaagttggaagatatgccctgtttggcttcaaaacttaaaataatcaa

SEQ ID NO: 217548 - DNA, 201 bp, Homo sapiens
atgcttgtctatatggacaagctcccaaaaggagaaaagagcatggagggtcatgagtgagaggtttttaacggccaggtctagaagtggtccatgtcagwttacttactttccattggccacatggccacacttcactgaaggctgggaaatatgatctagctgtgtgcccaataagaagaggaactgagtttcagcagc

SEQ ID NO: 217549 - DNA, 201 bp, Homo sapiens
tctctgggtaactctgccttctctggggatgttttagctcagctgtaaatttggaacacttggtttccagtatcccttttatccctaacattgaatagataccactcagaggaagggaagatgatatctaaattacatggtgcttggtagtcatggtggaatgttgcaaggcagtagaggtgtctaaggtgggccaaatgg

SEQ ID NO: 217550 - DNA, 201 bp, Homo sapiens
acagaatcagagtggctgatttaacagaactttgatttgtgcacaggaaggtgcaggtttttggtgaagcagatgtgtatttattgagcttctatacacayatgcttcttccagcagatggtaggcacagagctggtcacctaggaaagacaggaaaaactgtccctgccctcaagtcattcatgttagcaaggaaggcaa

SEQ ID NO: 217551 - DNA, 201 bp, Homo sapiens
tgtttggtagaatttaaccagtgaaaccatcctttcttgggaggtttttgattactgattcaatctccttgctagtcattggtctattcagattctgtttytttatgattcagtcctggtaggttgcatgtttctaggagtttatccattgtgttggcattcagttgttcatggtactctcttataatcctttttatttct

SEQ ID NO: 217552 - DNA, 201 bp, Homo sapiens
taaaccactcttctctggtgttttctatcttgtgtggccaaaaggattcctaatggtaaaccaagtagcatgcttttaagactttcccagtgaggccgggcttggtggctcacacctctaatcccagcactttgggaggccaaggcaggcagattgcttgagcccaggagttcgagaccagcttgagccacatggtgaaac

SEQ ID NO: 217553 - DNA, 201 bp, Homo sapiens
agtagagacggggtttcaccacgttggccaggctggtcttgaactgctgacctcaggtgatccacccgcctcagcctcccaaagtgttgggattaggggcrtgagccactacccccagcccaatctactttctgtctctgcagatttgcgtattctggacatttcatacactgtgtgatccttgtgactggcttacggttt

SEQ ID NO: 217554 - DNA, 201 bp, Homo sapiens
agcgtgggtcactagcctggaaataactaagactggtataacaataaagctgtcatgtattgactgtttactgcataccaggcactgttctaagtactttrtgcatgaactaagttaatcttatgacaatccagggggcttgaggttaccttaaaggttcaccttttcaaaattctacctttttttttaagagatggggtc

SEQ ID NO: 217555 - DNA, 201 bp, Homo sapiens
caaggcaggcagattgcttgagcccaggagttcgagaccagcttgagccacatggtgaaaccctatctttacaaaacatcaaaaaataaaccaagcatggttggcacttgcctgtagtcccagctacttgagaggccgatgtgagaggatcacttgagcccaggaggtcaaagctgcagtgtgccatgatcacaccactac

SEQ ID NO: 217556 - DNA, 201 bp, Homo sapiens
cctagggactggaagagcatggtggctggtactgggtatccttgttgaactccaggagggatctgaggttgttgaagtggcttcaccttgttgggcacctraagacgtcattacaaatcaaagatcttctggatttgatggtgcactgctgagtgttggattatgagatcacagtgagtgtgtggcacaaacacactttct

SEQ ID NO: 217557 - DNA, 201 bp, Homo sapiens
agtcagtggtttctaaatggtggcagtgagtgctttgctctggccctcagccttcttagctttctttaccactgtagagccaggtagctaaaataatctgycctgtttttcttccttatgaggacattttctggaatttttatcccaccttatccattcttctgaaaaacttgtcttcagacctcatttttctaactccca

SEQ ID NO: 217558 - DNA, 201 bp, Homo sapiens
ggctttcaccatgttagccaggatggtctccatctcttgaccttgtgattcacctgcctcggcctcccaaagtgctgggattacaggcatgagctactgckcccggctggcctcccttttaagatgataagctcacaagaccacaggcttgcctctaattgtgtgtgtttccactgcccccttgattttataaaacctgta

SEQ ID NO: 217559 - DNA, 201 bp, Homo sapiens
ttaaaaaatatggtaaaatacacataacgtaaaatataccatcttaaccagttttaagtgtacggttgaatggtattaaatacattcataatgttgtgcarctgtgatcaccatctatctccagaactcttttcattttgtaaaactaaaacaatatatcaattaaacaagagcttccccattcttcccttccccttgtcc

SEQ ID NO: 217560 - DNA, 201 bp, Homo sapiens
gacacagctggaaactgggccgctgcctcctccagaccaagattgtaccacactggggaagtgtggtgcaaggttgagtgaaaatacccttaagtttcctrctgttttgaatgtggcttttcttgagtgggcattcacttggttgctgtagacttttgactgttttccagagttcctgtaaggttattttagccagtctct

SEQ ID NO: 217561 - DNA, 201 bp, Homo sapiens
ccatctttttcgtgaccttcttgaattctgacttcctgaacattcaggtatacatttcaataatgccaagtaatttctttcctagttttcatgaattccartgcaaggatgttatttttcaactcagtttcctgacatttctgttttctagcccgttcttccttcatatgcaccagaaaaggtcccagtatgtctctacct

SEQ ID NO: 217562 - DNA, 201 bp, Homo sapiens
tacgcatctggaatggttatgttgtataccatctttgagagacttgagaactagtcactcaaattattttctggattttgtgattcagaagtggctctatwccttgaactaacagctgaagcaaatgcagtcagtcttgactggtttctgtgccatcctagacacattctccaggaggccagctcacctttgacttgacta

SEQ ID NO: 217563 - DNA, 201 bp, Homo sapiens
ttatactttaagttctagggtacatgtgcacaatgtgcaggtttgttacatatgtatacatgtgccgtgctggtgtgctgcacccgttaactcatcatttwcattaggtatatctcctaatgctatcccctcccccctccccacaccccacagcaggccccggtgtgtgatgttcctcaccctgtgtccaagtgttctcat

SEQ ID NO: 217564 - DNA, 201 bp, Homo sapiens
acagagagaaggaagacttagtgttcattgagtactaccaggtaatcttaatcttactcctcccagcagcccagggaagtatagggaatgttatccctgtyatatccattttgcaggtgaggaaactggggccaagaaaatatataatatgattagccaataagcaaagtaacttgaattgacacttaacaatcattgttt

SEQ ID NO: 217565 - DNA, 201 bp, Homo sapiens
ttattttagtggttttctagtctgacttcttgaactccatagtaggtattctcttgtcaattctcccatctacacagagaactccagtttggtaaattttyctgataggtcacattctttttttttttttttttttgagacggaatcttgctctgtcacctaggctggatttcagtggtgcaatcttgactcactgcaacc

SEQ ID NO: 217566 - DNA, 201 bp, Homo sapiens
tccacccactttggcctcccaaagtgctgggattacaggtatgagccaacgcacccagccttgatttttaaatttaataataaattgcagccattttcccrttttattaatttcttcagaacatttatatgatggtactaatgctgccatgtacatctttttttgtttttttttgagacagagttttgctctcgttgccca

SEQ ID NO: 217567 - DNA, 201 bp, Homo sapiens
ctttctcatctgtggaaatggaaataatattagtaagaacaacagcctgccttttgtaaggatgtcatgaggactaaatgaattaatgtatgtgaagtgtytactatagtgcccagtgaggaaaatggaccctgacagatagtatcaattattgttttatcatcatcatcattagcacgtgcacagttttcccatgtattt

SEQ ID NO: 217568 - DNA, 201 bp, Homo sapiens
aatacttcacagctgtgaaaaatggattatagttttagatattaactttgataaatctcagtggagagaaagaagaagccatcaaaaaatctgtaagttaygattctttttatttaaagattgataggctgggagtggtggctcacacctgtaatcccagcactttgggaggccgaggcaggaggattacttgaggccagg

SEQ ID NO: 217569 - DNA, 201 bp, Homo sapiens
aataaattcaaagtttacatttttaaatgtgaaatgccataaagtaaaatgtgtaaattttatgtgtaccatttgtgagatatgacaaatgtatatgtctrtgtactatgaatctctatcaagatacagaattacacaatattataatcacccccaaaagttctattgtgctccctttccattcttacccccagccaccag

SEQ ID NO: 217570 - DNA, 201 bp, Homo sapiens
aaggctgaaagggcttttattcatgttccacgagtctatctcaccttgtttagatttaacaaaagttgttggggtgtattctgtgttttaacagaaagctraaatacccttaagccagtgattaatctgtggggtgattagtaaagcttttgcctccaattttgtctgagttagggttaagcaatgttcctgagtcccctc

SEQ ID NO: 217571 - DNA, 201 bp, Homo sapiens
aaatgttccaaagtctgttttgagtgctgacatgatgctcaaaggaagtgctcaatggagcatttcagagtttggattttcagattagggatgctgaactkgtaaatataatgcagatattccaaaagccaaaaaaaaaaaatccaaaacacttctggtctcaagcatttgggataagagatatgcggcctatactggctc

SEQ ID NO: 217572 - DNA, 201 bp, Homo sapiens
ctcctgcttagagaacacacagtgtttggttttctgtgcctgttagtttgctgaggataatgcttccagctccatccgtgtttgtgcaaaggacgtgatckttttcctttttatggctgcacatacatggctttttaaaattattattatactttaagttctagggtacatgtgcacaatgtgcaggtttgttacatatgt

SEQ ID NO: 217573 - DNA, 201 bp, Homo sapiens
ttaagttctagggtacatgtgcacaatgtgcaggtttgttacatatgtatacatgtgccgtgctggtgtgctgcacccgttaactcatcatttacattagrtatatctcctaatgctatcccctcccccctccccacaccccacagcaggccccggtgtgtgatgttcctcaccctgtgtccaagtgttctcattgttcaa

SEQ ID NO: 217574 - DNA, 201 bp, Homo sapiens
cctccactgtgctagccagagagagcaggcctttacaaatgtaatccccgatcacatttatttcctgatggccacatcacagccttggtcaagaatctcargtgtttctcacaagctgttttctaccacgtcatctccatcttgttgggtgaggatttggggtagggatgggtccttgtgctaatcgtagtgagttttcta

SEQ ID NO: 217575 - DNA, 201 bp, Homo sapiens
ctcttttgttttgtcttgcttcactttacttgaaacagtaagaaaatgtgaataataagaattattaagggtcaaagtgaaacccaaaatgtaattaaccrcaagtatcacttgtatattagtgcagtaagaattataatttttcagattgttttcaaagttttaaaaattttgaaaattgtcttttaatgttcgatgaat

SEQ ID NO: 217576 - DNA, 201 bp, Homo sapiens
aatagggagtttacagcaacttgatcaaattgagaagctgaagaaagatgaaacaacagtgtaaaatcagtgagaaacacaaagtcagatagaaagaatakaagcaggctgggcacggtggctcacgcctgtaatcccaacactttgggaggctgaggcaggtggatcacctgaggtcaagagttccagaccagcctggcc

SEQ ID NO: 217577 - DNA, 201 bp, Homo sapiens
caatcctggcatttaggttccttgctgctactggatgagccagtggttttgttgtgaggttcaactgggtatgaaccaggatgggccttgtacaccttgaygtggcagaacttccactgaggcattccatgtccctctcactgaggaggcaagtagaggtaaggaagggatgtgctataagtgctgggctccatccagttc

SEQ ID NO: 217578 - DNA, 201 bp, Homo sapiens
ctgattttggtaatttgggtcttgtctttttttcttagtccatctagccaaagatttgtcaatcttgttgatcttttcaaaaaattatcttttggttttgtttttttctgttctctatatacctctgttctttattatttccttccttttgctagcgttaggtttagtttattctttctgtagctccataacatgttaagt

SEQ ID NO: 217579 - DNA, 201 bp, Homo sapiens
gccaagagggactgcatcaatagcttggtgcatagcttgtagcagacagaagggaggtaatagtcttactcctgttctgaggggagcttggcctggagaargaggcctatgcaaaccacctgcacccaaaccagctcatttactgaatgtttactgttatgtcaggactttgctaagagtttatgtgaattacccaaccta

SEQ ID NO: 217580 - DNA, 201 bp, Homo sapiens
agttgccaaattcagactcctttctttggtctgtaaagcccagcctgatgggttcctgcgccctctccagcttcttcctgtgcctcacacactgaatgcckcgagtactcacatttccagggacttgataacctctggacttttgacggtgcagtttccttgccaatgctccgcaagaatttcttcccaatttaatcagtg

SEQ ID NO: 217581 - DNA, 201 bp, Homo sapiens
agggtggagggaagaggtagattctagtctggcctccatgattttatacctcagattgccacattggatttgaggatcctcagatctcagtgacatgtttraagaagatctcggattgggttatctctcctatagttgactattctcatttttctatgggttaattcttactagttttactttcaaaggtaattttaacat

SEQ ID NO: 217582 - DNA, 201 bp, Homo sapiens
ctaaggttgtactattattattctcaggaactaaatatatatatattttttttcctcaagacagagtctcactctgttgcccaggctggagtgcagtgggstgatatcggctcactgcaacctctgcctctcgggttgaagcaattctcctgccccagcctcctgagtagctgggattacaggcgcctaccagcacgcctg

SEQ ID NO: 217583 - DNA, 201 bp, Homo sapiens
gggctcagaggatactcctgccttagcctctcaaaatgctgagattacaggcatgagctaccgtgcttggcaggtatttgtgtatctaaacatagaaaaartataataaaaatacagtataaaagataaaaaatgggctgggcatggtggctcatgcctgtaatcccagcactttgggcggctgaggcgggcaaaccacct

SEQ ID NO: 217584 - DNA, 201 bp, Homo sapiens
tgggttatctctcctatagttgactattctcatttttctatgggttaattcttactagttttactttcaaaggtaattttaacatttcgggaaaacttacrtttgtcccctgtatttaatacgttaatacgatatttaagaactagatcctactttgtacagtatttcaaggtatcatgaaattaatggttttttgtttgt

SEQ ID NO: 217585 - DNA, 201 bp, Homo sapiens
tttgtagagatggggtcttgctatattgtccaggctggccttgaactcctgggctcaagcaatccacccactttggcctcccaaagtgctgggattacagrtatgagccaacgcacccagccttgatttttaaatttaataataaattgcagccattttcccgttttattaatttcttcagaacatttatatgatggtact

SEQ ID NO: 217586 - DNA, 201 bp, Homo sapiens
tttggccattgagtcggtagactcactgctgggtgcacattagaatcacctgaataacatccctagggagtctgtttcagttggtctggggaggggcctgyatgctggtgttttttcaaattgcagataattctaatatgcagctgagagttgagaaccactgggagaggcctagcaaagatgggctcaggtcctagccgt

SEQ ID NO: 217587 - DNA, 201 bp, Homo sapiens
tacttaaaagaactttttaataagtttgaatgttaaattttgacctctcatgtgcattgcaaatttttttcctcaagtatctttttcttttttttagatartgtttttaaaattttttttaatttaattatttttagagccagggtcttgctctgttgcccaggctggagtgcagtggcagcctcactgcagcctcaaact

SEQ ID NO: 217588 - DNA, 201 bp, Homo sapiens
tttagggcctccatctgtacatgaaagtctgcagggctctaaggtcaggttcatcatctctgttcccagcactgctcccacccagggttatctacctaatscagggttccattatccaaccggatacccagattagaaaccgagagtcatccttggttctttccactcctcaaccccccacatctggttgatcatctgacc

SEQ ID NO: 217589 - DNA, 201 bp, Homo sapiens
tgcagcctggcacaggaagggcaaggtcatacgaggaatcaggcaggaggccacattagctttgggaaattgatgtgttaattcatgacataatcccagcyattccatgagggtacaagaggcagaatttggtcccggaggagaaacctaacaaggacaggatagggctattcttctgggggtctcactccaagcctgtac

SEQ ID NO: 217590 - DNA, 201 bp, Homo sapiens
aatcgggagccccaacgaggctgaggtcagagctgctgtgggcagccagctctcacccgtgcatcatggtcccctgagggcaagaagtggaaccagagttsgttggccccaccagagagaggccagcacagcccaagcaatctccactttgctgccctgcactctctgaaatttggcttggaacctattcaggccttaaac

SEQ ID NO: 217591 - DNA, 201 bp, Homo sapiens
atgagcaaactccccccaacaaatcgggagccccaacgaggctgaggtcagagctgctgtgggcagccagctctcacccgtgcatcatggtcccctgaggrcaagaagtggaaccagagttggttggccccaccagagagaggccagcacagcccaagcaatctccactttgctgccctgcactctctgaaatttggcttg

SEQ ID NO: 217592 - DNA, 201 bp, Homo sapiens
tttatttctcttccaccataatggaatcatatggactcaacatagtccatatgattttttttcctgttttgttttagtgacttttctaaagtttgtctttycatctaggaagtatatagaatacatttatcttacacattgcagtatgcatttgttttatagctgggtattatctctatattactataggacttttttttg

SEQ ID NO: 217593 - DNA, 201 bp, Homo sapiens
agaactagattcccagggcctgtgtgaggaggctacctgaggagtatggattgtgcacaagcctggtacctggtcagggtggggccctaaggaaggagtarcagggcaccaggtggctctgagtcaccagggcctgggggagagtctgctggccacagtgatggcacattcatggaaagcatgcaactgagccagtgactt

SEQ ID NO: 217594 - DNA, 201 bp, Homo sapiens
cagatcacaaggtcaggagttcaagaccagcctggccaacatggcaaaatcctgtctctactgaaaatacaaaaaattagccaggcatggtggcaggtgcytgtaatcccactactcaggaggctgaggcaggagaatcacttgaacccgggaggcggaggttgcagtgagctgagactgtaccacaacactccagcctgg

SEQ ID NO: 217595 - DNA, 201 bp, Homo sapiens
gtatgtcataaagcctcagaaacaaagcagctgtccctgaggcggtactgtcctccctaagaaacagttaatcctggccgggagcggtggctcacaccgcygagatgggcagatcacaaggtcaggagttcaagaccagcctggccaacatggcaaaatcctgtctctactgaaaatacaaaaaattagccaggcatggtg

SEQ ID NO: 217596 - DNA, 201 bp, Homo sapiens
gcagtggggtgatatcggctcactgcaacctctgcctctcgggttgaagcaattctcctgccccagcctcctgagtagctgggattacaggcgcctaccascacgcctggctaatttttgtacttttagcagatacgaggtttcaccatgttggccaggctggtctctcaaactcctgacctcgtgatctgcctgcctcgg

SEQ ID NO: 217597 - DNA, 201 bp, Homo sapiens
tgttaggatgggaaggaagctcagcaaactcagttctatcctgccccttcatcatgcagccgagcacactgagccctctgctgtcaagacaggtgcccagrgttgtgcatgccctgatttgtgcatccctttctccacagtttccagccagagacgacactcttccatggcccggatacattccatgacaattgaggcgcc

SEQ ID NO: 217598 - DNA, 201 bp, Homo sapiens
gaactaagttaatcttatgacaatccagggggcttgaggttaccttaaaggttcaccttttcaaaattctacctttttttttaagagatggggtctcgctrtgttgcccatgctggtcttgaattcctggcctcaagtgatcctcctgcattggcctcctaaaaaactcccacacacgtaaagcagcttttcagtttgtgg

SEQ ID NO: 217599 - DNA, 201 bp, Homo sapiens
tgcattctagtgcctagaactgaaggaaacagaattggttatgccagaaccccaggcttgttaggatgggaaggaagctcagcaaactcagttctatcctrccccttcatcatgcagccgagcacactgagccctctgctgtcaagacaggtgcccagagttgtgcatgccctgatttgtgcatccctttctccacagttt

SEQ ID NO: 217600 - DNA, 201 bp, Homo sapiens
cagattacttactttccattggccacatggccacacttcactgaaggctgggaaatatgatctagctgtgtgcccaataagaagaggaactgagtttcagyagccagcaagccagcctctgccacagcttctttggtaacatttgttgcttccccttttcccctttgccatgcataatagttgtgtagtttgggtgggatt

SEQ ID NO: 217601 - DNA, 201 bp, Homo sapiens
aactgtcccaatcagactatggagtggttgggggaagatgttcctcccacctccctcacagccccccacagtgaggacaaagccaactcctgggtgagaayaggcttagagaattgcaaacccgtattgtgaagtcctaccaaacctttcctgaagctcgcaagagctgaccctggactctgcgttagcatgaggcagtaa

SEQ ID NO: 217602 - DNA, 201 bp, Homo sapiens
atacttgaacacaaccaagttgggtctgaatggatgtatcttagtttcacttccccattctctggaattagagtggggataattacattttttaatattcttttttttttttttttacctttagacaatgttttctctctggattgaatgatacatagtttctttgaagaatacattatgacattttatttctcttccacc

SEQ ID NO: 217603 - DNA, 201 bp, Homo sapiens
aaatgtgatcaaatcactgttgaacacatggagccctgccctgccttgcccaggctcatcctgtctacctccaattcttgggagaggagggaaccctctgsaaactagtgttccctttctccctctctgtggactcctgccaatgggctccattctgagccttttaatggaatcagaaaataaagaaaaggaagaagatac

SEQ ID NO: 217604 - DNA, 201 bp, Homo sapiens
attcttaagctctgtaaggtcacaagggtcatatgtcactgtgccctcggtgccctcagtgccacagtgcttggtacatactagagcgagaccctgtctcaaaataataataacatgtacagtggtttttagtatattcatagtggttttagtatattcatagagttgtgcaactcatagtatattcaattttagaatatt

SEQ ID NO: 217605 - DNA, 201 bp, Homo sapiens
ttcttaagctctgtaaggtcacaagggtcatatgtcactgtgccctcggtgccctcagtgccacagtgcttggtacatactagagcgagaccctgtctcaaaataataataacatgtacagtggtttttagtatattcatagtggttttagtatattcatagagttgtgcaactcatagtatattcaattttagaatatta

SEQ ID NO: 217606 - DNA, 201 bp, Homo sapiens
gcaaatgtcacaattaatttcccatattccccttgatagtgagctttagaagtaacccttagacctgtctgctgaagccttccttctaaggtagacatgcwagttgtggacatggaggacaacccacttatttctgcctagggaaccctgtttagtccttggtggctttggactacaagcctcgtcctgtgggctgagctc

SEQ ID NO: 217607 - DNA, 201 bp, Homo sapiens
ttaagctctgtaaggtcacaagggtcatatgtcactgtgccctcggtgccctcagtgccacagtgcttggtacatactagagcgagaccctgtctcaaaataataataacatgtacagtggtttttagtatattcatagtggttttagtatattcatagagttgtgcaactcatagtatattcaattttagaatattaccc

SEQ ID NO: 217608 - DNA, 201 bp, Homo sapiens
gtactgttgtgttatggagacacatgggctatgatatcagccacagaagggttccctcagtgagtctattagactcttacagggacagaactaatgggatmcacacacacacacacacacacacacacacacacacacacacacacacaaaggggagtttattaagtaataacttacacgatcacaaggtcccacaatagg

SEQ ID NO: 217609 - DNA, 201 bp, Homo sapiens
ggaataccctaggggttcagtgtcctgttgtgggttttagggatttccatagtttaagggccttggtgattttcttggaggaattcataacattttaggayggtgacaaaacccagctccatcctggctttccctaccaccccaagataaagggagtcaccacagcccggttctcttgctgtggtcttgttctgtgtagcc

SEQ ID NO: 217610 - DNA, 201 bp, Homo sapiens
ttttctcaggtaagttgctgcctcttttaagtttctagagagagagagagttaaaacccataaaatcatacgagataatggacttaacactaggaaatagkgttctaaaaaaattctgtccttgttttgcaaggtaacaaatggtaactggtaacaaattttttttttcttaagaatattttattttccctttattcttgc

SEQ ID NO: 217611 - DNA, 201 bp, Homo sapiens
aaaaatttaaccagaaatttgtgtatttcagttattggtgagttgaatgtattgctcctgccatatatgaaacaaagagcattgtgtggcattgtcttccrgaacatttttactcctagagaatggcaagctaagtaattataaaggcttattgtcatagacacaaaaagaggctgtttgacttgggcttgctagattgtt

SEQ ID NO: 217612 - DNA, 201 bp, Homo sapiens
tgttttatcttttgttttaggtctttgatccatttaaaattatttatatctggtgagggtagagatcaaggatgactgcccctgaccctagggaaatccarctcgtctatcaccatattgaataaccatcttttgcagtagcaccattattataaatcagcttactacgaatatgtgatctgttcctggactctattctgt

SEQ ID NO: 217613 - DNA, 201 bp, Homo sapiens
ggaaacttttagagagaggtgagctcgattttggaattgtgaaagacccttattcagcaaatatttaagttctaattgaaatatactttttaaaaagaatrtgtaagtgcatggtctgaatgacttagtttttgaaatgtagtcaacattgtttatacagagtgtggaggcaggtattgctgctagctgtatacattcttt

SEQ ID NO: 217614 - DNA, 201 bp, Homo sapiens
gagaaaaaaatgtgatcaaatcactgttgaacacatggagccctgccctgccttgcccaggctcatcctgtctacctccaattcttgggagaggagggaascctctggaaactagtgttccctttctccctctctgtggactcctgccaatgggctccattctgagccttttaatggaatcagaaaataaagaaaaggaag

SEQ ID NO: 217615 - DNA, 201 bp, Homo sapiens
tcaaacatttcaatacattatttataggattaagtattctaataatttcaccaagatattagcattcaccatctgagaacttacccagttaactttctttyagctaaaataaatattaatgtgttttaattcttttagtttcaagataaaatgcttaactaaatctttgttgagttctgccagtgggtttcttagcaaaaa

SEQ ID NO: 217616 - DNA, 201 bp, Homo sapiens
tcccctcccaaacacaggggcagaggctaagccccctcttccacttcagcaggtgggagttatgagaggaggaagtaagggggagtgccctttatttgggrgtccaggacccctcttgtctgcagatggccactgaaaatatatgaccacttagactatggtgacctgacttttgtcagcaactcagaaggaggtggactt

SEQ ID NO: 217617 - DNA, 201 bp, Homo sapiens
gaggtttcactatgttggccaggctggtctcaaactcctgacctcaagtgatctgcccaccttggcctcacaaagtgctggaattacaggcatatgagccmctatgcgtggccagtgtgtatgtttcgaaaaggctcttgggtctttggagaactttgggggagtttttttttggtttttttttttttttttttttttttg

SEQ ID NO: 217618 - DNA, 201 bp, Homo sapiens
actcgtgtagggctgactgcttttcttagacagcagtggggctgccaacagcagggccttcaccacagccagcggatgctgggccagcgttccccactccycttaccaaagcacgtgaatcccatatgctgaaccaccagaacagcaggaactcttctgacttttgctcagtcccacagtctagcactgttcacctgactt

SEQ ID NO: 217619 - DNA, 201 bp, Homo sapiens
gcacgttcttcatgtggtgcaggtgaaaggagatgctggtgtatgtgaagcatgcgtgaagggacagtgagcacacaagggccaggccatcggttggggcsggggggcaggggcacactacatactgctttctgacaccccaggcccaaaggtgctgctggtttaatggtaattaagcagattagccaccttctgttttat

SEQ ID NO: 217620 - DNA, 201 bp, Homo sapiens
cagatgagtatgttgagaagttctcagaattaaccttagttcactgcctggtacctctgaatgggaattgagagataagaggcacactggagaactgacaggggctctcagagatgggtcctgggcacgaggtgcccattcagagatgtcagggcactggagggctgacagggcaagccctttggagtttctgtttaagga

SEQ ID NO: 217621 - DNA, 201 bp, Homo sapiens
ctctactaaaaatacaaaagttagccgggcatggtggcgcgtgcctgtaatcccagctacttggcaggctgaggcacgggaagtgcttgaacacgggaggyggaggttgcagtgagccaaaattgtaccactgcactctagcctgagcgagactgtgtctcaaaacaaacaaacaaaacaacaacaaaaagtttttttaat

SEQ ID NO: 217622 - DNA, 201 bp, Homo sapiens
aagtaagggggagtgccctttatttgggggtccaggacccctcttgtctgcagatggccactgaaaatatatgaccacttagactatggtgacctgacttytgtcagcaactcagaaggaggtggactttggaagttaagaaagaattgtcctattacctgaaatcagtttggggttgggatcattttttatcttaattgc

SEQ ID NO: 217623 - DNA, 201 bp, Homo sapiens
gcaacaaagtaagacactgtctcaaaaggaaaaaaaaaaataaaatatgagaaaggttatgatacaatgttaaatgcaaaaagtaaaatgtaaaatgatasctagtgtttaatctcaatcatgtaaagaaaagaaggaaaaaagaacaggagaaagtatggcagtggccgttgtagtaaccgctgttgtttaattgagccc

SEQ ID NO: 217624 - DNA, 201 bp, Homo sapiens
caggaaataaacccatgtctcaagaaggccgtagaacaggggtaggcggctggggagaaggactgaagcagtggagctagatagctgcagctttgggggamactgcatactctgcagctcactgcttctgggactgagaccagacgcgtgtgtccccaggctgcacgttcttcatgtggtgcaggtgaaaggagatgctgg

SEQ ID NO: 217625 - DNA, 201 bp, Homo sapiens
atttcctcctccacatgttctagccttgctttgtcagtgacatgaaaacaaccaaaatgctcttaacggaagatgctgaaagaaaagcctttttttttttwaaaaaaatgaaaggctactaaatgatagaaggaaaagcattcttaaaccctattttttaaaaagctaatctggtgcccataaagtttctctcttaccttc

SEQ ID NO: 217626 - DNA, 201 bp, Homo sapiens
agcctgggcaacaagagcaagactctgtctcaaaaaaaaaaaaaacagacttggatatatttaagaatttagtagatgatcggctgggcagggtggctcaygcctgtaatctctgcactttgggaggctgaggttggtggatcacctgaggtcaggagttcgagaccagcctggccaacatgatgaaaccccgtctctact

SEQ ID NO: 217627 - DNA, 201 bp, Homo sapiens
tgaggttggtggatcacctgaggtcaggagttcgagaccagcctggccaacatgatgaaaccccgtctctactaaaaaaaatacaaaaaattagctgggcktggtggcgcatgcctgtcatcccagctacttgggaggctgaggcaggataatcactggaacccgggaggcgaaggttgcagtgagctgagatcgagccac

SEQ ID NO: 217628 - DNA, 201 bp, Homo sapiens
tagtagatacggggtttcaccattttggtcaggccggtctcaaactctgactagtgctaggattacaggtgtgagccaccatgcccagcatgttttttgcttttttttttttttttaataacaactttattgagctataaatttacatattatctcctggttttttttacatgctaaaaatgagctaatttttattggcta

SEQ ID NO: 217629 - DNA, 201 bp, Homo sapiens
agtagatacggggtttcaccattttggtcaggccggtctcaaactctgactagtgctaggattacaggtgtgagccaccatgcccagcatgttttttgcttttttttttttttttaataacaactttattgagctataaatttacatattatctcctggttttttttacatgctaaaaatgagctaatttttattggctaa

SEQ ID NO: 217630 - DNA, 201 bp, Homo sapiens
gattacaggtgtgagccaccatgcccagcatgttttttgcttttttttttttttttaataacaactttattgagctataaatttacatattatctcctggktttttttacatgctaaaaatgagctaatttttattggctaagctattgtctttagtgagacagtttagtaataccagcaataatgtaaaggcattgtttt

SEQ ID NO: 217631 - DNA, 201 bp, Homo sapiens
tgtggtctgtaagagcctctaaggagaagacttcccttcatgctgttggtgacatgctttctgccttaccagaacagttcattctttcattctagaaacayttactacatatttttgtgagcacttaatgtgtacaagatacctgtcctaagtgctttaggtacagcttattttaatgaagccttagaataactcaaggag

SEQ ID NO: 217632 - DNA, 201 bp, Homo sapiens
ctggggttgggggtggtggtagtgcagaggtgggaggattgcttgtgcccaggaattcaaggatgcagtgagctatgatcgtgccactgcactccagcctrggcaactgagcagtaccctggctcttaaaaaaaaaaagttacctagtctaaggtattttgttatagcagctcaaactgactaagacaacagcagaagaaa

SEQ ID NO: 217633 - DNA, 201 bp, Homo sapiens
cagctgcaggggcccagtgaagccctgccaggggaatgacaaaagtaggcactgctctattttgccttcaacttttctgtcaaggattttttttgttgttktttttttttgttttgtttcgtttttttactagagggagtggaaggtcctctagaaagagaggtatgaaggctgagatggatgaagagaccctcaggtgct

SEQ ID NO: 217634 - DNA, 201 bp, Homo sapiens
aagtttaagtaatctgcccaaggatctccatttaggaagtggcagagctagcacctgaatccaggaggactgacactagggctctgaagcacagtttttakgggtgccccaggagcaatcagagatttagtctgaaaagagagacacattgacacaaaggaacacagcaagtgataagaagtgatccccaggaatgagaaa

SEQ ID NO: 217635 - DNA, 201 bp, Homo sapiens
gagaccagcattgcagaatggagacttaggaaatggccagatggctaggagttgggaccttggagtgtcagatgctaggtgttggatattgaagtttgachttggggcagaagagaaattttgctgatgttcaagcagggaatattataaacattttccatctccacaaaccctgctgcccattgttgtcagtggctcctc

SEQ ID NO: 217636 - DNA, 201 bp, Homo sapiens
cttttctgctctgtgtagaaatctcacacttctctggttttagtgtcagcctcttttccaaggtctggttcagcatcctactatcatcttaattgtctagyaatggttttctctcatctcccaaaaacccaatctctcttccaaatcctgctgtctctgctcatggacctacctcacagttgctttgacttagattcctga

SEQ ID NO: 217637 - DNA, 201 bp, Homo sapiens
agcacagtttttatgggtgccccaggagcaatcagagatttagtctgaaaagagagacacattgacacaaaggaacacagcaagtgataagaagtgatccmcaggaatgagaaagggcagtgggtagtcttctagacagggagaggtggatttgaatagaaaagaaatgtgagcgggaaagcattccagcaataaaaacag

SEQ ID NO: 217638 - DNA, 201 bp, Homo sapiens
ttgatcccttcctccccgttggtcccctccatcaaatccacaagcattgatggctgttaaacccctgttttgagggtccattgcctgggcctgaccttgcycagggccttcttcccacactctggagttacagtgtgtaactctgtctccttgtccggaatcctccatctccactcggtccaccatacactactgcctgat

SEQ ID NO: 217639 - DNA, 201 bp, Homo sapiens
ctttgttgggggatttttgattactgattcagtctccttactagtaatagatctattcaggttttctgtttctttatgatttggtcttcgtactttttgcrcttctaggaatttgtccattttatccagattatccaatttgttggtgtataagtgttaatagtactctcttagaatcctttttattgctgtagaattggt

SEQ ID NO: 217640 - DNA, 201 bp, Homo sapiens
tggtttctgtgccatcctagacacattctccaggaggccagctcacctttgacttgactagggcagtctggttatgttcctctacattctcctccttttaragtccctctccaacataagtcgtcttcctctgggtctggggtgagttcctttcttctccagtggagttgttcttctctagagtctgctcgcttctcccag

SEQ ID NO: 217641 - DNA, 201 bp, Homo sapiens
atgaggtgttgatgctcttctttctgaccgattacaatatcttgcatttcctagttttggattatttttggttatttagcctccattttacctagtaactyttcatcctttgtgctccttagaatgcagtggagccagcccttgggctcctttatccccgttgtaagcatagccatcatcttgtggtaatagacataaact

SEQ ID NO: 217642 - DNA, 201 bp, Homo sapiens
tgttgcttaagtctagccattattgagaggggggtgttgaagtcttcaactataattttagaactgtctcttccttcaattctgtcagtttttactttatrtattttaatggtctgtcattgggtagataattgcttataattgttacatcttgttactctgttgaatgtttaacatatagtgtcctcctttgtctcttat

SEQ ID NO: 217643 - DNA, 201 bp, Homo sapiens
gggttgtttgattttttcttgtaaatttgtttaagttctttgtagattctggatattagccctttgtcagatgggtagattgtaaaaattttctcccattytgtaggttgcctgttcactctgatggtagtttcttttgctgtgcagaagctctttagtttaattagatcccatttgtcaattttggcttttgttgccatt

SEQ ID NO: 217644 - DNA, 201 bp, Homo sapiens
ttagatggactgtggaactttgcctggaatggcctgttagccttgacttgggatcgctcagtcacccaagtctattcagaaaggacaagaagatcctgaawatatatatatatattttttttatatatatattttttgtttttgtttttgttttttgagacggagtctcgctctgtcaccaggctgctcactgcaacctct

SEQ ID NO: 217645 - DNA, 201 bp, Homo sapiens
actttgcctggaatggcctgttagccttgacttgggatcgctcagtcacccaagtctattcagaaaggacaagaagatcctgaatatatatatatatattwtttttatatatatattttttgtttttgtttttgttttttgagacggagtctcgctctgtcaccaggctgctcactgcaacctctgcctcctaggttcaag

SEQ ID NO: 217646 - DNA, 201 bp, Homo sapiens
ccactgttggaggttagttcaggaaaatgttgcccatgttggggttccccctgtgaaatacaggcgcaaatagaaatgcaagtatattttcgcttattgtmaacttacatgactttaaagcggaccaaatactgttgttgaatatactctgaaagcctaatataagtaggactttagttaatgaatttcctcctccacatg

SEQ ID NO: 217647 - DNA, 201 bp, Homo sapiens
caaggctgccatggtgcttaacacccagcctgggtcaactctaggtcctgagggactctggaaggctaagaaaggttatggaataccctaggggttcagtgtcctgttgtgggttttagggatttccatagtttaagggccttggtgattttcttggaggaattcataacattttaggacggtgacaaaacccagctccat

SEQ ID NO: 217648 - DNA, 201 bp, Homo sapiens
ttgatcttgggaggtcgaggctgcagtgagctatgatcatgccactgtactccagcctgggcaacaaagtaagacactgtctcaaaaggaaaaaaaaaaawaaaatatgagaaaggttatgatacaatgttaaatgcaaaaagtaaaatgtaaaatgatagctagtgtttaatctcaatcatgtaaagaaaagaaggaaaa

SEQ ID NO: 217649 - DNA, 201 bp, Homo sapiens
tgctttcataagtaggattttctcttccattatgtttctaactgaatttcccttttttttttttttaataaatgaagcctgggccgggcgcggtggctcaygcctgtaatcccagcactttgggaggccgaggcgggtggatcatgaggtcaggagatcgagaccatcctggctaacaaggtgaaaccccgtctctactaa

SEQ ID NO: 217650 - DNA, 201 bp, Homo sapiens
tctcctttcgagttcatggactatacctcattcattttcacctccctaatgcctagcttagggcatcacacatggtgggtgaaggtttgttgagtggaataaaagagagaagaatgaaggaacaaataatcataagttctcagtccaggctcatcaggtggctatgtggacattactcatcatgaagctcagaggaaggag

SEQ ID NO: 217651 - DNA, 201 bp, Homo sapiens
tctcacccatgctggacggggcaccctgcctctgcctgtctgctcttctctagctctagcaccagtccacccaggcagctttgtctgggtattggaagtgtttttttttttttttgtaatgtctgacatagatcatattaactagaataaaccaggcaaggcggcatttttcagaaggggctatggcatggtagtgtcata

SEQ ID NO: 217652 - DNA, 201 bp, Homo sapiens
attttcctctaaataatggggaaccgcgtatgaaagagcagagtgcatttgactgtagaatatgatttggggcctgggctttcaagaacaagagcgaagtraaccatcaccgagggcccctgagggctaggtgttctttcttaacactccccgcaggcataggtgtctttatgcctgttttatagatgacgggattgaact

SEQ ID NO: 217653 - DNA, 201 bp, Homo sapiens
gatcagggatggtttggacctggaggtttggtggaactggctgtccacagcctccaaagatgtcttgatgctacgaagagtggaatttgctcagatttccaaaaaaaaaaagttggtcattgggcctttgcttgtatttcttcttcctgtagctcccttgcctaccttctctacctggctaactcctgctggccctttaag

SEQ ID NO: 217654 - DNA, 201 bp, Homo sapiens
gaagtggaaaatgttcttgggtttatgttttcaacacaaagtatgacgatgcttacattccatttataggagtggcaaggaatttactatgccaaaaagaraaacggagataatatacaacaaaatgtgaagataatacctgtcattggacagggagggtaagtggaaaaaacaagtacatcaatcaacatacagtgtttt

SEQ ID NO: 217655 - DNA, 201 bp, Homo sapiens
atcagggatggtttggacctggaggtttggtggaactggctgtccacagcctccaaagatgtcttgatgctacgaagagtggaatttgctcagatttccaaaaaaaaaaagttggtcattgggcctttgcttgtatttcttcttcctgtagctcccttgcctaccttctctacctggctaactcctgctggccctttaaga

SEQ ID NO: 217656 - DNA, 201 bp, Homo sapiens
gtgccgctgcactccagcctgggcgatagagcaagacgtggtctcaaaaaaagaaaaacaaaaacacaaaaattccctaaagaaggaaacaaatagtggasaaaacaaaagttttgtagtacaaatcaagaagtttccagaaataagagaaagcttgaatctacagtttgaaaagacacactgtgttctggaaaaattaac

SEQ ID NO: 217657 - DNA, 201 bp, Homo sapiens
tgcttgggatggtaagaaatcttccttaaaatagcatattttcctctaaataatggggaaccgcgtatgaaagagcagagtgcatttgactgtagaatatratttggggcctgggctttcaagaacaagagcgaagtgaaccatcaccgagggcccctgagggctaggtgttctttcttaacactccccgcaggcataggt

SEQ ID NO: 217658 - DNA, 201 bp, Homo sapiens
gaggttgaggctgcagtgagccatgattgtacactgcactccaacctgggtgacagagcaagactgtgtcttaataaaaagaaaagagcaacaaccataaraagaaaatttgataaattagacttcttcaaaatttacaaagtttgctcattcaaaacacagctaagaaaatgagcaggcaagccatactggaggaaaata

SEQ ID NO: 217659 - DNA, 201 bp, Homo sapiens
gagatcacctcttccgggaaatctttcttgaaccctctgatccgtctatctgtccctatgttccttatgcttatctctaacttagcaggtatcataccatatcatcgtctgctgtccttccctcccctagaccataacttccttgatgaaagcagggactgtatctttgcatccctggcacagtacctggcatatatttgg

SEQ ID NO: 217660 - DNA, 201 bp, Homo sapiens
catctaataacttttggcatagtgtgcttcattttcatttgtctcaaagtattttctaatttcccttatgatttcttctttgaccccttggttgtttaagmgtatattagtccatttgcattgctataaaagaatacctgaggctgggtaatttataaagaaaagtttattttggctcatggttctgcaggctgtgcaagc

SEQ ID NO: 217661 - DNA, 201 bp, Homo sapiens
tatgcaaaaaaaaaaaaaaaaaaaaagaaccacaactcctatctcataccatagagaaattcatagacctacatacaacagctaaaaccataaagcttttmgagagaaacataccagaatatcctcaatgacttgaaagtggacaaagatttcttagatgcagaaagcaacaaccagccaggtgcagtggcttatacatgt

SEQ ID NO: 217662 - DNA, 201 bp, Homo sapiens
agatcacctcttccgggaaatctttcttgaaccctctgatccgtctatctgtccctatgttccttatgcttatctctaacttagcaggtatcataccatatcatcgtctgctgtccttccctcccctagaccataacttccttgatgaaagcagggactgtatctttgcatccctggcacagtacctggcatatatttggt

SEQ ID NO: 217663 - DNA, 201 bp, Homo sapiens
tacttgtgagtttcccggttttccttccattactgagttttggttcatttcactgttattagaaaaggtactttgtatgaccttaccttttaaaatatatrctgtttgttttgtggcctatcatatgttgtatcctggagaatgttccatttgcacttgagaaaaaaatgtatactctactgttgttgggtggatgttcta

SEQ ID NO: 217664 - DNA, 201 bp, Homo sapiens
gatcacctcttccgggaaatctttcttgaaccctctgatccgtctatctgtccctatgttccttatgcttatctctaacttagcaggtatcataccatatcatcgtctgctgtccttccctcccctagaccataacttccttgatgaaagcagggactgtatctttgcatccctggcacagtacctggcatatatttggtt

SEQ ID NO: 217665 - DNA, 201 bp, Homo sapiens
tttgagtcctgtaaaaagaaaaaagaaggaagtgtccttcacacaacttctgacctttttcttcacttcctggtgtgttagtgtgtaagagagagagagaktgtgtgtgtgtgtgtgtgtgtgtgatgtttagggtctgaggatattcaaagtggaaaagggtataagagctaggtaatttttattttgtgactaggcaaa

SEQ ID NO: 217666 - DNA, 201 bp, Homo sapiens
ttgagtcctgtaaaaagaaaaaagaaggaagtgtccttcacacaacttctgacctttttcttcacttcctggtgtgttagtgtgtaagagagagagagagwgtgtgtgtgtgtgtgtgtgtgtgatgtttagggtctgaggatattcaaagtggaaaagggtataagagctaggtaatttttattttgtgactaggcaaag

SEQ ID NO: 217667 - DNA, 201 bp, Homo sapiens
ctcggcctccagaagtgctgggattacaggcgtgagccactgtgcccagctggaactaaatcttatatgatatttatgtaagtaaatattttttgtttccwctggtgactggaaaacttattgactctgttaccctagccaagccattgcctaaattgtcctgctcctttagatggactgtggaactttgcctggaatggc

SEQ ID NO: 217668 - DNA, 201 bp, Homo sapiens
ctttcgagttcatggactatacctcattcattttcacctccctaatgcctagcttagggcatcacacatggtgggtgaaggtttgttgagtggaataaaagagagaagaatgaaggaacaaataatcataagttctcagtccaggctcatcaggtggctatgtggacattactcatcatgaagctcagaggaaggagacac

SEQ ID NO: 217669 - DNA, 201 bp, Homo sapiens
caatgtttttaagattcagccgctttgtgtctggatgtttcaaggtgaagtataatgctgatatcttgagctcttagagactcaaagaagcagtcatctayctctctccctgaagcactccactctgccctcctgtgctcagcatacatctccttggcattgtctctgtttacatgtcacttccttggggaagccttccct

SEQ ID NO: 217670 - DNA, 201 bp, Homo sapiens
agaccctgtctcaaaataataataacatgtacagtggtttttagtatattcatagtggttttagtatattcatagagttgtgcaactcatagtatattcarttttagaatattaccccttcgatagaacctcaaatttatgagcagttcctttccattccccctcaactcccctagtcctagacaactactgtgatctact

SEQ ID NO: 217671 - DNA, 201 bp, Homo sapiens
tttaataattactttttaattatttgcgtaatgtctgattagattcttaagctctgtaaggtcacaagggtcatatgtcactgtgccctcggtgccctcastgccacagtgcttggtacatactagagcgagaccctgtctcaaaataataataacatgtacagtggtttttagtatattcatagtggttttagtatattc

SEQ ID NO: 217672 - DNA, 201 bp, Homo sapiens
tagcacgtatcacatttcttatttaataattactttttaattatttgcgtaatgtctgattagattcttaagctctgtaaggtcacaagggtcatatgtcmctgtgccctcggtgccctcagtgccacagtgcttggtacatactagagcgagaccctgtctcaaaataataataacatgtacagtggtttttagtatatt

SEQ ID NO: 217673 - DNA, 201 bp, Homo sapiens
aggctgaggctgcggctgcagtgaaccgtgatcacaccactgcactccagcttgagcaacagagccttccctgatctctcatgctaagttaaaccctctarttattcaatcccagatttcttcatagcacgtatcacatttcttatttaataattactttttaattatttgcgtaatgtctgattagattcttaagctctg

SEQ ID NO: 217674 - DNA, 201 bp, Homo sapiens
tcttgaaaaagatggaaaacttccagatcattttgtcaaactcacaaaactctgacatcaacctgacaaagatagcactaaaagggggaagaaaactaaaycaattcccagttaatgtaagtggtgcctattttaaattttatttaaaattgtttctctcctttattaatattagtttatgctggtctaagtcaatatctc

SEQ ID NO: 217675 - DNA, 201 bp, Homo sapiens
cccaaaaaaatcattgccaagtctagtgttgtgaagattttgccctatattctcttttaggaattctgtgtattaggtcttacatttaggtcttcaatccmttttgaataaatttttttatatggtgttagataagggtccaacttcattctttggatgtggttatccagttttcccagcaccatttgttgaaaacactct

SEQ ID NO: 217676 - DNA, 201 bp, Homo sapiens
caaagcagaagatgacatctggcacacacagggagtgaacaagtgttcattcctcaccttgaagggtaaaccttctcagaactttccgtgctccctctggktcttatttctgtttttgttttttgtttttttccagaaaaaatcaaatcagactgtaggtaaaatagggtgtccagagaaggggactgttttctaaattat

SEQ ID NO: 217677 - DNA, 201 bp, Homo sapiens
ggtggctcacgcctataattccagtactttgggaggccaaggcagacagatcacttgaggtcaggagttcgagaccaccctggccaatatggcaaaacccygtctctactaaaaataacaaaaattagccaggcgtggtggctcgtgcctgtagtcctggctactcgggaggctgaggcaggagaattgcttgaatctggg

SEQ ID NO: 217678 - DNA, 201 bp, Homo sapiens
agacatcaattcatataaaggacccaggtggctctctgaccctgctttattgtggcagtagcagcatccctccagtttatgctttttctgctttctcttaygaaactgtgccccatactgtaggacataagcaaaatgattttctttctcttcttcctgtcattttcttcctttcttcttcctgagcagttccactgcatt

SEQ ID NO: 217679 - DNA, 201 bp, Homo sapiens
tggaactcctgggctcaaatgatcctccctcctaagcctcacaagtagctgggactacaggtgtgtgccggcacaactggctaattattttattttttgtrgagacaagatcttgctttgttgcccaggctggtcttgagctcctggcctcaagtgatcctccttcctcagcctcgccaagtgctgggattacaggtgtga

SEQ ID NO: 217680 - DNA, 201 bp, Homo sapiens
tcagggatggtttggacctggaggtttggtggaactggctgtccacagcctccaaagatgtcttgatgctacgaagagtggaatttgctcagatttccaaaaaaaaaaagttggtcattgggcctttgcttgtatttcttcttcctgtagctcccttgcctaccttctctacctggctaactcctgctggccctttaagac

SEQ ID NO: 217681 - DNA, 201 bp, Homo sapiens
ctttattttttatctatttgatccttcttagtaaatttcatgagtattctgtcagagactgagacatcaattcatataaaggacccaggtggctctctgascctgctttattgtggcagtagcagcatccctccagtttatgctttttctgctttctcttatgaaactgtgccccatactgtaggacataagcaaaatgat

SEQ ID NO: 217682 - DNA, 201 bp, Homo sapiens
cagcaggagcaggacctcacctctgggtatttcctttttttttttttttttttttttttttgagacagtgtttccctcttgtcacccaggctggagtgcartggcgcaatctcagctcactgcaacctccgcctaccaggttcaaccgattctcctgcctcagcctcccaagtagcttggattacaggcgcccgccaccac

SEQ ID NO: 217683 - DNA, 201 bp, Homo sapiens
atatttataaatattttctttctttccattcagactttattttttatctatttgatccttcttagtaaatttcatgagtattctgtcagagactgagacaycaattcatataaaggacccaggtggctctctgaccctgctttattgtggcagtagcagcatccctccagtttatgctttttctgctttctcttatgaaac

SEQ ID NO: 217684 - DNA, 201 bp, Homo sapiens
ggagcaggacctcacctctgggtatttcctttttttttttttttttttttttttttgagacagtgtttccctcttgtcacccaggctggagtgcagtggcrcaatctcagctcactgcaacctccgcctaccaggttcaaccgattctcctgcctcagcctcccaagtagcttggattacaggcgcccgccaccacgccca

SEQ ID NO: 217685 - DNA, 201 bp, Homo sapiens
accacatattcaggattgtttacctaggagggatgagccttttgccctgagctatccagacttttatcttttccctcagcttgtgaccaacactatgtaawtatgtatatacatactttttactcatgctggtcattaatatttaaacaattcattattgtctttatatttattttccttaccggtttccttaagtttgta

SEQ ID NO: 217686 - DNA, 201 bp, Homo sapiens
tcttgtactctttgggtaactttagtcgaacagtctcttgtacttttctagaccagtcctctgttcttaaccttttcatgaggtgttgatgctcttctttytgaccgattacaatatcttgcatttcctagttttggattatttttggttatttagcctccattttacctagtaactcttcatcctttgtgctccttagaa

SEQ ID NO: 217687 - DNA, 201 bp, Homo sapiens
ccacgcccagctaattttttgtatttttagtagagatggggtttcaacatgttagccaggctggtctcaagctcctgacctcaggtgatccgcccacctcrgcctccctaagtgctgggattacaggcgtgagccaccgcgccgggccctgagtattaactttaaagtgattttctttttccactcagccaactatagtga

SEQ ID NO: 217688 - DNA, 201 bp, Homo sapiens
tgtaaatattaatgtgaaaaataaattattattaagagggctgtgacctgaaaccttaggtcagtttgattatgatttccatacataaagaaaggatggayacaagaattccagaagttccagtcctcttttctagagcagtcaggaagttgtttactctttgagggcccactgctgacgtctgctcactgagtaatgtca

SEQ ID NO: 217689 - DNA, 201 bp, Homo sapiens
gcctgaccaacatggagaaaccccgtctctactaaagatacaaaattagccaggcgtggtggttcatgcctgtaatcctagctacttgggaggctgaggcrggagaattgcttgaactcgggaggcagaggttgcagtgagccgagattgtgccattgcactccagccttagtaacaagagcgaaactccatctcaagaaa

SEQ ID NO: 217690 - DNA, 201 bp, Homo sapiens
atgattgttttgtagttcctaggacttaggctcttcgtaagattcttctttctgtttctttttttttttttttttttaagacagagtctcgccctgtcacycaggctggagtacagtggctctgtctcagctcagtgcaatctctgcctcccaggttcaatccctcctgagtagctgggattacaggcacccaccacacct

SEQ ID NO: 217691 - DNA, 201 bp, Homo sapiens
taatcccagctactcaggaggctgagacaggagaggttgcagtgagctgagatcgtgccattgcactccagcctgggcaacaagagcaagactctgtctcaaaaaaaaaaaaaacagacttggatatatttaagaatttagtagatgatcggctgggcagggtggctcacgcctgtaatctctgcactttgggaggctgag

SEQ ID NO: 217692 - DNA, 201 bp, Homo sapiens
tcaggaagttgtttactctttgagggcccactgctgacgtctgctcactgagtaatgtcatcagatttcctggtggtggttattttggggggagcagtggyaagtagttgtccggctgttaggagactctgctccatagaggtcctgagagccggatataccccgtagacaggatgtaaggttaaatgcaatctagttaag

SEQ ID NO: 217693 - DNA, 201 bp, Homo sapiens
tcagattatgtcacttctttgtataaaacctttaagcggcttttcatgaaatttagaataaaattcaaatgtcttgtcctgccttagaaaactctgcatcrtatgacccctgcttagctgtaacttcatctcatgaccttctttgtatggcccctgcttagctgtaacctcatctcttgaccttcttcctctttgtttcct

SEQ ID NO: 217694 - DNA, 201 bp, Homo sapiens
aacgaaatcaaaacttctaataatttgtttcatatatctgtaaaccatatttacaaaaagttttacttttcaatattaaaatgcaaatcaacaccatcatrttgtctgatatcctaatattataacctttttaaataatcttaatacattcacaaatatttaaaagtataaaagattaagaacgtgtataattactgatat

SEQ ID NO: 217695 - DNA, 201 bp, Homo sapiens
ttaggttctttgtactcctagtatctagcactgcacttgtcttacagtaataggtggtccacaagtgtctggatttagactcttccacacctaagaactgstatctcctgactctttccaggctgtgtccctttgatcacattatttctctttgtccagagagagaaacagatggtcactggttgtacatggaaagcctga

SEQ ID NO: 217696 - DNA, 201 bp, Homo sapiens
attatttttaatgatttgtgtaatgtctgattagattcttaagctctgtaaggtcacaagggtcatatgtcactgtgtcctcagtgccacagtgcttggtrcatactaggaacttagtgaatatcagttgaagaaagaaaaaacattgtgtcatgaagaatacttattaatatggatttttaaagaagaggattcttgatt

SEQ ID NO: 217697 - DNA, 201 bp, Homo sapiens
cagtggaatactattcagcctgtcatttgtgacaacatggataaacttagaggactttctgctaagtcaaataagccaggcacagagagacaaataccctrtgatttcacttatgtggaatatacaaaagttgaacttagaagtaaagagtagaatgataattaccagaggctggagggtaggggagtggtagatgggaaa

SEQ ID NO: 217698 - DNA, 201 bp, Homo sapiens
gtcaatgtgtaaaaaattataaaacactcaataaattgcagttgcctaaaagggaagcttcaactttattgttagaaaaataatggttttcctagaagaaracctaggcattaccattcaggacataggcatgggcaaggactttatgtctaaaacaccaaaagcaatggcaacaaaagccaaaattgacacatgggatct

SEQ ID NO: 217699 - DNA, 201 bp, Homo sapiens
cttggtacatactaggaacttagtgaatatcagttgaagaaagaaaaaacattgtgtcatgaagaatacttattaatatggatttttaaagaagaggattyttgattttgtaaaactcctttctgccatgttctaggatttcagaggtggagttaaagtagtttctattcatatttgcttatagttacatcagttatcaat

SEQ ID NO: 217700 - DNA, 201 bp, Homo sapiens
tgatctttttccagctagatacagattacggccaggttattttagacttttcctaatagagcatgaaaagatcacaggaattaaattcagacagaactggrtcccattcctgcaactactgcttaccaactatttgaccatacttctctgagtgtcagcttcttcatcaataaaatggagttaatgagcttaccttgctca

SEQ ID NO: 217701 - DNA, 201 bp, Homo sapiens
gacataggcatgggcaaggactttatgtctaaaacaccaaaagcaatggcaacaaaagccaaaattgacacatgggatctaattaaactaaagagcttctrcacagcaaaagaaactaccatcagagtgaacaggcaacctacaaaatgggagaaaattttcgcaacctgctcatctgacaaagggctaatatccagaatc

SEQ ID NO: 217702 - DNA, 201 bp, Homo sapiens
cgaccacgcccagctaattttgtatttttagtagagacagggtttctctatgttggtcacactggtctcaaactcccaacctcaggtgatctgcccgcctytgcctcccgaagtgctgggattacaggcgtgagccacagcacccagcctgatcactttctttttgcaaatgtaaccatccagattaaaaaagagcattcc

SEQ ID NO: 217703 - DNA, 201 bp, Homo sapiens
gtttgttacatatgtatacatgtgccgtgctggtgtgctgcacccgttaactcatcatttacattaggtatatctcctaatgctatcccctcccccctccmcacaccccacagcaggccccggtgtgtgatgttcctcaccctgtgtccaagtgttctcattgttcaattcccacctatgagtgagaacatgcagtgtttg

SEQ ID NO: 217704 - DNA, 201 bp, Homo sapiens
atggcgcaatcttggctcactgcaacctctccctcccgggttcaagggattcccttgcctcagcctcccaagtagctgggattacaggtgcccacgaccaygcccagctaattttgtatttttagtagagacagggtttctctatgttggtcacactggtctcaaactcccaacctcaggtgatctgcccgcctttgcctc

SEQ ID NO: 217705 - DNA, 201 bp, Homo sapiens
tttgcgtaaggtgtaaggaagtgatccagtttcagctttctacatatggctagccagttttcccagcactatttattaaatagggaatcctttccccattkcttgtttttgtcaggtttgtcaaagatcagatggttgtagatgtatggtattatttctgagggctctgttctgttccattggtctatatctctgttttgg

SEQ ID NO: 217706 - DNA, 201 bp, Homo sapiens
acatccatcaggccccaagaatgagaagtcgtcttctaacagcactggtcagggacttctctgaccctttcctgtcctccctgcctcagaaacagcagctrgcagattggggaggaagtgagggagatagaacagtccccacccccagcttcttccccagtggcaggctgcccctgcaactggtcctgctattagagagag

SEQ ID NO: 217707 - DNA, 201 bp, Homo sapiens
tattggtctaaaattctcttttttttgttgtgtctctgccaggctttggtatcaggatgatgctggcctcataaaatgagttatggaggattccctctttytctattgatcggaatagtttcagaaggaatggtaccagctcctctttgtacgtctggtagaattcagctgtgaatccatcaggtacgggactttttttgg

SEQ ID NO: 217708 - DNA, 201 bp, Homo sapiens
gacaataatagcacacatggagattctagtttaaatgacatctagcagttgctaatgccacctttccaaattttcagcagatctgaggttgaaactgacamcaccaaaaaacagtcctagtggggcacatatttagaagttatggaactggattgaaaaacatattttaaaacaggaatatcacccttggcaatttgatag

SEQ ID NO: 217709 - DNA, 201 bp, Homo sapiens
tccatcaggtacgggactttttttggttggtaggctattattgcctcaacttcagagcctgttattggtctattcagggattcagcttcttcctggtttarcctttggagggtgtatgtgtccaggaattcatccatttcttctagattttctagtttatttgtgtagaggtgtttatagtattctctgacggtagtttgt

SEQ ID NO: 217710 - DNA, 201 bp, Homo sapiens
atataaacagaccaactttctgaagtgtcataatatgtggtcccctaatatgtgtatttaatgttctcctttgtttcaccctcagaaccaaagctgccttmattccttggtttcatggaaatagtgtgcatatgtaacagacaataatagcacacatggagattctagtttaaatgacatctagcagttgctaatgccacc

SEQ ID NO: 217711 - DNA, 201 bp, Homo sapiens
atcttcaaagaagatcagaggtaaccaggcgaagaaggtggcaggggagaggcacatttccaagtaggtggtttgtaccaaatcatagaggtttgggaggyaaattaacaaatcataaatagttcaaggtggatagagataggaggtgcagacctcataggactctgggtgccacactgaggagtttgaatcttatcctaa

SEQ ID NO: 217712 - DNA, 201 bp, Homo sapiens
gtctaagtctctttgtaggtctctaaggacttgccttatgaatctgggtgctcctgtattgggtgcatatatatttaggatagttagctcttcttgttgamttgatccctttaccattatgtaatggctttcttggtctcttttgatctttgttggtttaaagtctgttttatcagagactaggattgcaacccctactat

SEQ ID NO: 217713 - DNA, 201 bp, Homo sapiens
aaaaaattaaaaattcaaaactaataaataaatgaatgaaactaaaaaaggaaagaccaaattattatttattttgaatagttatgttggagtttttgatgaagttcttttctcaagagctattctcaaggaccaggaaaatatattttgtttttggaagttcttggaatataaacagaccaactttctgaagtgtcataa

SEQ ID NO: 217714 - DNA, 201 bp, Homo sapiens
tgaggcaggagaatcacttgaacccgggaggcggaggttgcagtgagctgagactgtaccacaacactccagcctgggcaacagagtgagattccgtctcaaaaaaaaaaaaaaaagttaatcctttaaagcctatttgttctccaaattacatcactttacagacactcaaatggtttcaagcaatataatcactcccat

SEQ ID NO: 217715 - DNA, 201 bp, Homo sapiens
agggatctagaactagaaataccatttgacccagccatctcattactgggtgtatacccaaaggactataaatcatgctgctataaagacacatgcacacrtatgtttattgcagcactattcacaatagcaaagacttggagccaacccaaatatccaacaatgatagactggattaagaaaatgtggcacatatacacc

SEQ ID NO: 217716 - DNA, 201 bp, Homo sapiens
gtggaaaaatgcatgggaaaaggtcaatttaaatgcattttaaaaaatcaaagaatatgtgcttatgttaataaggattactttagggtaatgagatttcrggtaatcactttttacttttttcctctgcagcctttctatattgtctggattttggagtgaccatgtgttactccatattcaaaaaaattttttaagcca

SEQ ID NO: 217717 - DNA, 201 bp, Homo sapiens
ccttagcctcctgagtagctacgattataggtgcataccaccatgaccagctttttcttcttcttctcttttttatagagttagggtctcgttattttgcstaggcttgtcttgactcctggcctcaaacagtcctcccaccttagcctctcaaaagcgctgggattacaggtgtgagctaccacatctggccctaacttt

SEQ ID NO: 217718 - DNA, 201 bp, Homo sapiens
gacaatctcttcttgcaaccacccttctgatttttttcttaccacagattagttttgcctgttctaattttaatataagtggagttacacagtatgtaccttttttttttttctgaggcagggtctccctctgttgcctagactggagtgcagtgctgtgatcatagttaactgcagccttgacttccctggctcaactga

SEQ ID NO: 217719 - DNA, 201 bp, Homo sapiens
acaccagcatggcacatgtatacatatgtaactaacctgcacattgtgcacatgtaccctaaaacttaaagtataataataatagaataaaaaaaaaagargaaaataatggttttaacatacagtattgttagactccgaaaagtagattagggctttctttttaagaatttatttggaaattaattttgatgatttata

SEQ ID NO: 217720 - DNA, 201 bp, Homo sapiens
ggtactaatgctgccatgtacatctttttttgtttttttttgagacagagttttgctctcgttgcccaggccggagtgcaatggtgcgatcttggctcacygcaatccctgcctcccaggttcaagcaattctcctgcctcagccttccgagtaactgggattacaggtgcatgccaccatgccaggctaatttttttgtg

SEQ ID NO: 217721 - DNA, 201 bp, Homo sapiens
acagtggcttatgaccgtaatctcagcacattgtgagcctaagagttcaagaccagcctgggcaacgtagcaagacctcatctctacaaaaaatttagcaygcacctgtgatctctgctgcttaggagctgaggtgggaggactgcctgagcccaggagttcagtgctgcagtgagctatgatcatgccactatactccag

SEQ ID NO: 217722 - DNA, 201 bp, Homo sapiens
tgagcttagcagggcttttgggaacaagaggatcttgtatttacataaagtaactttgaaacagtcaagtagaaattaaagcctggttagtctccctccasttttcacagtgcgtccttcatacaccctctgctgcttgctcctctccagccacactgctccatctgcacaagcagtttcctcctcctggaaatgctgtcg

SEQ ID NO: 217723 - DNA, 201 bp, Homo sapiens
ctgctgacatacattttaataaaattgttaaaacttaaaaattgttgatgagctcactttcttttgctagttgaattcagaaaaagaagattgagttatcyttcttagctcttgcgtattagtgtcatctaactctgcaaggctctctccaattggggtgtgtgtgtgtgtgtgtgtgtgtgttttactaatctgcaggca

SEQ ID NO: 217724 - DNA, 201 bp, Homo sapiens
gccactttattcctaaagcctagtggacttgaacctgtatacatcaacccttccctcccaccaaacaaaacattagtgctcagagagtaaagctgtgagcmcacatacactttggctatgggcagatgcaggatccaggtagaatgttgacctggggtcattcttaaggagttcctgcccaagatgttagctcatcaggct

SEQ ID NO: 217725 - DNA, 201 bp, Homo sapiens
agcagagccactttattcctaaagcctagtggacttgaacctgtatacatcaacccttccctcccaccaaacaaaacattagtgctcagagagtaaagctrtgagcacacatacactttggctatgggcagatgcaggatccaggtagaatgttgacctggggtcattcttaaggagttcctgcccaagatgttagctcat

SEQ ID NO: 217726 - DNA, 201 bp, Homo sapiens
ctggctgccagcatatatctgagcagtgaatgtgatgctgtctcagaggctcccatgattaaaatgggggcataaacaggaaacaccccagtagttgaccrtgttagagacattgaaggacagagtacatacgccaggaagcagagccactttattcctaaagcctagtggacttgaacctgtatacatcaacccttccct

SEQ ID NO: 217727 - DNA, 201 bp, Homo sapiens
acatgatgaaaccccgtctctactaaaaaaaatacaaaaaattagctgggcgtggtggcgcatgcctgtcatcccagctacttgggaggctgaggcaggakaatcactggaacccgggaggcgaaggttgcagtgagctgagatcgagccactgcactccagcctgggcaacaagagcaaaactccatctcaaaaagtaaa

SEQ ID NO: 217728 - DNA, 201 bp, Homo sapiens
tagagagtcaaaagatttgtggctgtttttaaaactactacaagttcattttaaaacaagatagatgcttgagcccaaaagtttgaggctgcagtgaactrtgatcataccactgcattccagcctggccctgtctcaaaacaaaaaacaaaacaaaacaaaaaaactaaatttaaaaaataaaacaagttagaatataga

SEQ ID NO: 217729 - DNA, 201 bp, Homo sapiens
aaaagtctgtggaataaacccctcattttctctgatttacaaggaaactaaaatgtggaaaatttgatctttaaggggcatgacttctggtttatgggatkgtttattttaaagtttaaacatttcagtgtcttatgatactcttagttaaaaggaagttctcttgagtatcatataactattaaaattataatttagatc

SEQ ID NO: 217730 - DNA, 201 bp, Homo sapiens
cacctttgctggggttgtgctcttgggcaccaggtaacaaaagccctcaaacttgaatagcaagagacctgctctctaaaattatacttattgtgagcaargaataggaaacatcatcaaattattgacccctatactgctttcctttttttttttttttcttgagacagggtctcattctgtcacccaagccggaatgca

SEQ ID NO: 217731 - DNA, 201 bp, Homo sapiens
atgctcatggattctgtggctcaggaattggacagggtacaatgggaggtggcttgtctttgttccatgatggctgggggttgggatcatttggaggctcytttactccacatctgatgtctgggctggggtgccttgaaggctagtggaatcagctgggaccaatgaccagaacacctacatgtagactctccatgtggt

SEQ ID NO: 217732 - DNA, 201 bp, Homo sapiens
ttctcctgcctcagcctcccaagtagctgggattacaggcgcacaccaccatgcctggctaattttgtatttttaatagagacggtgtttgaccatattgrccaggctggtcttgaactcctgaccccaagtgatccatctgcctcagcctcccaaagtgctgggattacaggtgtgagccaccgcactgtgcccgcccta

SEQ ID NO: 217733 - DNA, 201 bp, Homo sapiens
tgaggattaagatgttctgtggtacatagtaaacatccaaatgttacatgctgttattggtggtgacggcctgattactattcataaatcgctagaggctrattactggctgcctctagtttcagctcttcctgtgtctgactgcttattgctgaatccagggttgcccagttttgtaaggggtatatcctaacctgcagg

SEQ ID NO: 217734 - DNA, 201 bp, Homo sapiens
gtattcactgcattagaaaacagtgaagatgcaattgaaattacaagcgaagaccgttttatacaggtttgttattttggaaatctgtctttctggatttyttgttttgctttttccaacttttaggattgaacctctccaatatgatttttttttttctttttgaagtttaggagaccagtttttccttcgaggattatc

SEQ ID NO: 217735 - DNA, 201 bp, Homo sapiens
ctgttgctccagacctaccctgattcttgccttttctgaccatctcagtcagaatcacttaaaccatcttctgagtttccatagctgtttatagcacacgyagcaataccatgcagtgactgagtacagccctcagtccacacccctgcttcctagctgtgtgactgacaagtagattaacctctctgtttccaaatctat

SEQ ID NO: 217736 - DNA, 201 bp, Homo sapiens
taatggtaaaccaagtagcatgcttttaagactttcccagtgaggccgggcttggtggctcacacctctaatcccagcactttgggaggccaaggcaggcrgattgcttgagcccaggagttcgagaccagcttgagccacatggtgaaaccctatctttacaaaacatcaaaaaataaaccaagcatggttggcacttgc

SEQ ID NO: 217737 - DNA, 201 bp, Homo sapiens
aacttcatatccttcttgtaagaaatctgtatatattagaagattataaattataaaatacacaagctactatgttatctaaaactgaatctgatagcccrtcacatttcttatttggcagactagactgaggcctggagtggataagtgactagcctaggccacataatgatgagaggcagagataagactagacttcta

SEQ ID NO: 217738 - DNA, 201 bp, Homo sapiens
attgtcagttccactgtattttatgcattacatataccagccttgattcagggtggagatgatacacgatcttgtgatgataatcacatctttctttcttcctttctttttctttttctttttctttttttttaaagtcagggtcttgctctgtcccccaggctaccaggctggagtgcagtggcatgataatagcttaat

SEQ ID NO: 217739 - DNA, 201 bp, Homo sapiens
ggcatcactccactcctttggaaaacttttgtgatttttcccttggacagagttaatcagttacttttcagtcacactctctacaagttcctgttgttaarcattcacaaagtgttgtaattatctgtttatatttttatatccttctatatttagcttctggaagatgggatttatgtttttatttctataacatcagta

SEQ ID NO: 217740 - DNA, 201 bp, Homo sapiens
tgtcagttccactgtattttatgcattacatataccagccttgattcagggtggagatgatacacgatcttgtgatgataatcacatctttctttcttcctttctttttctttttctttttctttttttttaaagtcagggtcttgctctgtcccccaggctaccaggctggagtgcagtggcatgataatagcttaatgc

SEQ ID NO: 217741 - DNA, 201 bp, Homo sapiens
aacctcagcaggcatcactccactcctttggaaaacttttgtgatttttcccttggacagagttaatcagttacttttcagtcacactctctacaagttcytgttgttaaacattcacaaagtgttgtaattatctgtttatatttttatatccttctatatttagcttctggaagatgggatttatgtttttatttctat

SEQ ID NO: 217742 - DNA, 201 bp, Homo sapiens
gtcagttccactgtattttatgcattacatataccagccttgattcagggtggagatgatacacgatcttgtgatgataatcacatctttctttcttcctttctttttctttttctttttctttttttttaaagtcagggtcttgctctgtcccccaggctaccaggctggagtgcagtggcatgataatagcttaatgca

SEQ ID NO: 217743 - DNA, 201 bp, Homo sapiens
tggtggcttcacacttccatgcctttgcacataatattttctctttctagaatgttcatgtccctcttcttatctggcagagccctacttttccttcaagwtttaacctcagcaggcatcactccactcctttggaaaacttttgtgatttttcccttggacagagttaatcagttacttttcagtcacactctctacaag

SEQ ID NO: 217744 - DNA, 201 bp, Homo sapiens
gaatcacctgaataacatccctagggagtctgtttcagttggtctggggaggggcctgcatgctggtgttttttcaaattgcagataattctaatatgcasctgagagttgagaaccactgggagaggcctagcaaagatgggctcaggtcctagccgtgggtgtgatatgctttggagaaagtgaggttaagttagctta

SEQ ID NO: 217745 - DNA, 201 bp, Homo sapiens
tcagttccactgtattttatgcattacatataccagccttgattcagggtggagatgatacacgatcttgtgatgataatcacatctttctttcttcctttctttttctttttctttttctttttttttaaagtcagggtcttgctctgtcccccaggctaccaggctggagtgcagtggcatgataatagcttaatgcag

SEQ ID NO: 217746 - DNA, 201 bp, Homo sapiens
cccacaaccattttatttctctttctttttgtaaattcctagaagtgttgaaaacagagggtatgattctgcctgagttttgtctcctgcttgtggaataycttcagttcctggaacctgaggttgtgtcttgcccccgtagcctccattgaatctggcccagtttggtatgatctcctagccacagcctctttgtctccc

SEQ ID NO: 217747 - DNA, 201 bp, Homo sapiens
tttggtcacatgctagttttttttaccttgatttctgcctttggggtaaaaaagtttggtggatacataacattcagaccaattaaaaagtctgattgcaygcatgggaatccatttgtggaaatggataaatacacattccctccacagccctcacatcccctccacagccctcacatcccagaatcttacctgcggagg

SEQ ID NO: 217748 - DNA, 201 bp, Homo sapiens
agttccactgtattttatgcattacatataccagccttgattcagggtggagatgatacacgatcttgtgatgataatcacatctttctttcttcctttctttttctttttctttttctttttttttaaagtcagggtcttgctctgtcccccaggctaccaggctggagtgcagtggcatgataatagcttaatgcagcc

SEQ ID NO: 217749 - DNA, 201 bp, Homo sapiens
ggaagtcaagtgtcactcatatgacaatgtctaaggcaggtgggaagggggacactcttttaactgggagaaagaagtctccacctctccccagcgggctkcccctcaggtcccactgaccaggggttctgtgtgcgtctgctctgttctaaagagggttgcagaaggaacatctagtggcttccactgctgtcaagggaa

SEQ ID NO: 217750 - DNA, 201 bp, Homo sapiens
aggaaaatgttgcccatgttggggttccccctgtgaaatacaggcgcaaatagaaatgcaagtatattttcgcttattgtaaacttacatgactttaaagmggaccaaatactgttgttgaatatactctgaaagcctaatataagtaggactttagttaatgaatttcctcctccacatgttctagccttgctttgtcag

SEQ ID NO: 217751 - DNA, 201 bp, Homo sapiens
gttccactgtattttatgcattacatataccagccttgattcagggtggagatgatacacgatcttgtgatgataatcacatctttctttcttcctttctttttctttttctttttctttttttttaaagtcagggtcttgctctgtcccccaggctaccaggctggagtgcagtggcatgataatagcttaatgcagcct

SEQ ID NO: 217752 - DNA, 201 bp, Homo sapiens
tctactgaaggcttttgtctgagcttattacctctcttatgtttgccttatatccatcttcttcccaaatatacattttacttctatttatttcttttctrcatgaatttgtatatatgtggcgctgagtgaaattacaagaaaatgcaatggtaacacacagtttataaaaccctggagatagaaacattttctggtgcc

SEQ ID NO: 217753 - DNA, 201 bp, Homo sapiens
gggatttggaggtaggttgcagtgagccgagattgtgccactgcactccagcctggcaacagagcgatactccatctcaaaaaaaaaaaaaaaaaaaaaagaaagaaaagaaaagaacttcctagaattttatacctagcatacatatctttcaacaatgaaggtgaaataaagactttcagaaatgtggacattgagaga

SEQ ID NO: 217754 - DNA, 201 bp, Homo sapiens
tcgcttattgtaaacttacatgactttaaagcggaccaaatactgttgttgaatatactctgaaagcctaatataagtaggactttagttaatgaatttcytcctccacatgttctagccttgctttgtcagtgacatgaaaacaaccaaaatgctcttaacggaagatgctgaaagaaaagccttttttttttttaaaaa

SEQ ID NO: 217755 - DNA, 201 bp, Homo sapiens
tcattcattcagcaaacctttggtgcttaccatgggctaggaactgcactggacacttgctggtaatgtgatgatgaataagacatggcctcccttttttkttgttgttgttgttgttgttgctgttttttgttgtttttgagacggagtctcgctctgtcgccaggctggagttcagtggtgcaatcttggctcactgca

SEQ ID NO: 217756 - DNA, 201 bp, Homo sapiens
cagctcactgcaacctccacctcctgggttcaagtgattctcctgcctcagctgcccgagtagctgggattacaggtgtgggccaccatgcccagctaatttttttttttttttttttgtatctttagtagagacggggtttcaccatgttggccaggctggtctcaaactcctgacctcgtgatctgcccgccttggcct

SEQ ID NO: 217757 - DNA, 201 bp, Homo sapiens
agctcactgcaacctccacctcctgggttcaagtgattctcctgcctcagctgcccgagtagctgggattacaggtgtgggccaccatgcccagctaatttttttttttttttttttgtatctttagtagagacggggtttcaccatgttggccaggctggtctcaaactcctgacctcgtgatctgcccgccttggcctc

SEQ ID NO: 217758 - DNA, 201 bp, Homo sapiens
gctcactgcaacctccacctcctgggttcaagtgattctcctgcctcagctgcccgagtagctgggattacaggtgtgggccaccatgcccagctaatttttttttttttttttttgtatctttagtagagacggggtttcaccatgttggccaggctggtctcaaactcctgacctcgtgatctgcccgccttggcctct

SEQ ID NO: 217759 - DNA, 201 bp, Homo sapiens
ctgccctcacccctgctggtgcgccccactcaataccctcccctgtgcttgccccacaggccggcagaggagcccatggagcaggagcctgccctgtgacrccccggcccccatccctctgggcttcaccattgtgattttgtttattttttctattaaaaacaaaaagtcacacattcaacaaggtgtgccgtgtgggtc

SEQ ID NO: 217760 - DNA, 201 bp, Homo sapiens
tcagaggatgtaggcaggcaggcatggtcttcagtctccccagtcctaggcaccctgagcctatgctggctgttgagatgctgggctgggctgggctgggmtaggctggctgggctggatggtggatgagccatgttgggggctgcctgcttcttcattccagtcttccctccttcctctccctccctaaacacaaagctt

SEQ ID NO: 217761 - DNA, 201 bp, Homo sapiens
agtgagccgagatcgcgccactgcactccagcctgggcaacagagcgagactccgtctcaaaaaaaaaaaaagaaaaaacgaaacacacacagccccaccyactcagcaacccaggctgggacttcccatggaggcagggtggtcagccctgcagaaaaccagaggtcaggatggtgctgctgcttgttactgaggccacc

SEQ ID NO: 217762 - DNA, 201 bp, Homo sapiens
gctgggaaagaggaaagtatagagctgggtgcggggggcccaaggctttcccccagagccttgcctctgacctctgcaggaggtggctctactggcctctygattcccatcagagtgaagtcctggcaggtgagggaaggacccaggtccttgtcctcccctgtgaacctttccctggctttcttttcttttcattttttt

SEQ ID NO: 217763 - DNA, 201 bp, Homo sapiens
ttaggagggtgcaaaagggacccatcactcagtcagtgaccaccatgcttttgggatctgggattagatttggagcttggggaggtggtggtgattggttwcagtgtccaactgggaggggaggatggagccagattatgggaacaaaaggaggtgggggggagggtgagatccaggagtcttggtcagagggacccctag

SEQ ID NO: 217764 - DNA, 201 bp, Homo sapiens
gctcaggtttgggtggggggtgcttcaggtcccccagggtttttcctgagtatataggtggtgatatgccagagggggttgtgggggcaagatgcagggtyggtgggagggcagtcaggtgccctgacaatggtgcttagtcatcacccccaactccgtagtgccactccacgggcagtccccactagtgacgggtgaacg

SEQ ID NO: 217765 - DNA, 201 bp, Homo sapiens
acagttccagccctaggcagggttatctgctgggagccaggagtgcttggacctctgcccttccctgggcaggcaggctggaatctggctcctacaacccyggcattgccgggagcagcaggttgacggctgtccattgcttggctgagtgatcagagtgccacgggccaagccaagcttgactaagaacagataaccctc

SEQ ID NO: 217766 - DNA, 201 bp, Homo sapiens
ggagaagaggctggtggggactgctacatcatgctgagcttttaccttctcccaccccaccctgcctgcagggggttccagaggccatactccaggcatgygggtggcatggccttggcctcggcctccagcaggccttgctcctgccttggtgacacccattcagtgctaggttctctggagagatccagacccatctaa

SEQ ID NO: 217767 - DNA, 201 bp, Homo sapiens
ccaccaacgcttggctctccctggcctttcagtggggctctttgctagccagagctcttggcctgtcctcttagggaacagtgccccttcgtctaccctctttttttttttttttttagatagggtctcgctctatcacccaggctagagtgcagtggcatgatctgggctcattgcaacctctgcctcctgggttcaaac

SEQ ID NO: 217768 - DNA, 201 bp, Homo sapiens
ttggccaggctggtcttgaactcctgacctcaggtgatccgcccgcctcagcctcccaaactgctgggattacaggcatgagccactgcgcctggcccagkttcccttttttttaagagacagccctgggtaactggccaccacgccccgggcctgtctatcctcttcttttcccagaggttccccagccttcctagtcca

SEQ ID NO: 217769 - DNA, 201 bp, Homo sapiens
gagagatccagacccatctaaacaggtgtgggggcctctcttagcccaccctttgccacctcctacctcccacctccctctcttctctttaaaaattgttyggctgggtgtggtcactcatgcctgtaatcccagcactttgggaggccgaggcgggtggatcacctgaggtcaggagttcgagaccagcctgacctacat

SEQ ID NO: 217770 - DNA, 201 bp, Homo sapiens
ggtggtgatatgccagagggggttgtgggggcaagatgcagggtcggtgggagggcagtcaggtgccctgacaatggtgcttagtcatcacccccaactcygtagtgccactccacgggcagtccccactagtgacgggtgaacgtgtggccaccagcatgcggacggtaggcaagctcccgcggcatcggcccctgagcc

SEQ ID NO: 217771 - DNA, 201 bp, Homo sapiens
gggactggacccaaggtcttggaacccagcaggccctccactgccttcccctccccagcagccttcctctccccagccggttctccgtaagaccagagttstgagatctctgccgaagctcctgccctccccctgctgttacccttcttcctgtctgattccctttcctttcctgtctcctcctcccacctcctccctgct

SEQ ID NO: 217772 - DNA, 201 bp, Homo sapiens
atgttccccctgcgcagctctgatgctgtgtctgtgacgcggctagggacagatataggcctggagctcggcagccttgttttttttttgttttttttttkttttttttttggactctggaatgtaaatagatgtttcaaatagaaacactttaacctttgggttaaaaaaaatccaccccggataaacacggccatgagg

SEQ ID NO: 217773 - DNA, 201 bp, Homo sapiens
ctctttgggtctcctagaatcctgcgtggtagcctttgggcctcaggcatgactggagtctggggctgggcccactaactccttcctgtctcttctgcccrcagtggaggtgaagccggtgctgccaagagccatgcccagttccatggggggtgggggtggaggcagccccagccctgtggagctacggggggctctggt

SEQ ID NO: 217774 - DNA, 201 bp, Homo sapiens
gctggagaagcagcggctggagcagcagctgctcatcctgcggaacaaggagaagagcaaagagagtaaggcagggcctcctgggacctcgtagggccccrcccgtgatgcctgcccctgccatggggggtctggccccaagcagccaggtcagttgtgccctgtcctgcaggtgccattgccagcactgaggtaaagctg

SEQ ID NO: 217775 - DNA, 201 bp, Homo sapiens
aggggcttcttccccgtgcccatatacgggccctgcaatctctccttagagacaggacccccatccctggtttatttcctcattccttccccaagatccaygtcctcttcctatatacaaacgatttttcataaatgtagattgccaggtggcaggtccagcagactgggtgataacctagatctgcttccatccccaccc

SEQ ID NO: 217776 - DNA, 201 bp, Homo sapiens
tatcagatcctcaccaagacaggggagctgcccaggcagcccaccacccaccctgaggagacagaggaggagctgacggagcagcaggaggtcttgctggvggagggagccctgaccatgccccgggagggctccacagagagtgagagcacacaggaagacctggaggaggaggacgaggaagaggatggggaggaggag

SEQ ID NO: 217777 - DNA, 201 bp, Homo sapiens
ctcacttgtctgccctcctccacccaccctttgccagagtttggggtttccaccctacttccataggctcagccctgagcttgtagggtgagatgtagccygtttccttcatccttgtccggctgtcttggctggatgtgggaggtggttttggatcccggagtggggtaggggtctgtctggaagaaagagttggtgtga

SEQ ID NO: 217778 - DNA, 201 bp, Homo sapiens
ttcaggccaggagtttgagaccagcctgcgcagcatagccagaccctgtctctacaaaaaaatgtaaaaaaaaaaattaatcaggcacagtagcatgcacstgtagttctagctactcaggaggctgaggcaggaggattgcttgagcccaggagtttgaggctgcaatgagccatgatcactgcattccagcctgggcgc

SEQ ID NO: 217779 - DNA, 201 bp, Homo sapiens
tgtagccctgtggcagttgaggtgccttttttttttttgagacagtcttgctctgttggccaggctggagtacagtggtgcgatctcagctcactgcgacytctgtctccccaggctcaagcaactctcttgcctgagcctattgagtagctgggtttacaggtgtgtgccaccacgcccagctaagttttgtatttttag

SEQ ID NO: 217780 - DNA, 201 bp, Homo sapiens
ggatgaggcacttccctacagtgtgggtcccgtcggcagtggcctgagggaacctgtgctgtgcgggctgcccgaccaccttcccttcggtctgctccccrcctctggcggccccctccctggcatgctgctggtgcccaaggctcaggggctcgtggagatgctgcagaccatctatgagacagaatcctgtttctcagc

SEQ ID NO: 217781 - DNA, 201 bp, Homo sapiens
aaaaaaagtcctctcagaggagctacctcacctttttctaattcacatagaagctctacctggaagaagggagggagggaaggatagactgttctgggttwtaggctgcacagctgctccccaactcccagctgatgtgcccccatattctgttatcagatcctcaccaagacaggggagctgcccaggcagcccaccacc

SEQ ID NO: 217782 - DNA, 201 bp, Homo sapiens; identical to SEQ ID NO: 38943

SEQ ID NO: 217783 - DNA, 201 bp, Homo sapiens
gtgagcccccaccaactgttaggtccttctgccaggcaccagagggcctgtgtgtggtgtctgccccatggcagggggaagaggctgctggggccccttasgcaccctgaaaggaggggacacaggccttcgttctctccctgtaccccagagctgttcatggtagcggcagggccttctgcctcagccgggagagtgggt

SEQ ID NO: 217784 - DNA, 201 bp, Homo sapiens
gtttccaggctgtgcaggagcagctttctgtagagagcaaaaggggagtgggaaggaggccggtggggagaagggggagctgtttgtgttgatctcagagytgtgtctgtcctaggctgccagttccctccctgtgtctgtgatactggcctgcctctctgcttgtgtgtctgtgtatgcatgcgtcggtccctgtgcgtg

SEQ ID NO: 217785 - DNA, 201 bp, Homo sapiens
cccgggaggtggaggttgcagtgagcccagatcgtgccactgcactctagcctgggcaacaagagtgaaacttggtctcaaaaaaaaaaaagaaagaatcycatctgcctgttttaaattccctactagccttaatgttttccccaaaactgtgaggtggaatgggttctgtagggagatatgccacatttatcccatggt

SEQ ID NO: 217786 - DNA, 201 bp, Homo sapiens
gccaagggtggagtcctgggctcaagcgatcctcccagccctcagcctcccaaaatgctaggattacaggcatgagctacagtgctcagctgacaggtggmatttgaccattgggtcagagcgcgggccattttcccgatgcttctacctcccctcataggacattcaccatggcaatggcacccagcaggcgttctacaa

SEQ ID NO: 217787 - DNA, 201 bp, Homo sapiens
gggtgagatgtagcccgtttccttcatccttgtccggctgtcttggctggatgtgggaggtggttttggatcccggagtggggtaggggtctgtctggaaraaagagttggtgtgaggtagtggggtgggcaggggtctgtctgcttatgatgtcctggaagttgggccactccctggtttggcatccaagtgttaggtca

SEQ ID NO: 217788 - DNA, 201 bp, Homo sapiens
tgcccagcgcctggcagaagcctggaaaccacatgccttggaactcggcggaagtaaagtgagaccaccgattgaagccagagcacgcgggtgtccacttccctgtagagagccccaagaaggaaaggtatgggccatggggcaggagataagaggtgggaaggaaggaaatggttagtccccagggtctgctgcagcccc

SEQ ID NO: 217789 - DNA, 201 bp, Homo sapiens
ctaggattacaggcatgagctacagtgctcagctgacaggtggaatttgaccattgggtcagagcgcgggccattttcccgatgcttctacctcccctcayaggacattcaccatggcaatggcacccagcaggcgttctacaatgacccctctgtgctctacatctctctgcatcgctatgacaacgggaacttctttcc

SEQ ID NO: 217790 - DNA, 201 bp, Homo sapiens
cctcttctgcctcaggggtgaggatcagcatctttaagacccacagagagagtaggtgggttaggatgatgggggctaggggctaaccttaacctggtttstgtgccactggggctgtgccccttctgagcaccttgctgtggaggtgcctctcactgtggagatggactgggctactcaggctgctgggaatcgtgggca

SEQ ID NO: 217791 - DNA, 201 bp, Homo sapiens
tgcatcgctatgacaacgggaacttctttccaggctctggggctcctgaagaggtacagctcctgggcgtaaatgcagaccctcctggcccctctgggagrtggcacaatgggacctggcggggagccacggaggcccatggtggtgttggtacctggggagtctgggctcctagtgggaggaccacactgatctgactgc

SEQ ID NO: 217792 - DNA, 201 bp, Homo sapiens
aatgtgaacgtggcatggacaggaggtgtggacccccccattggagacgtggagtaccttacagccttcaggtagggactgaaaagggccatggtagtcartgggagcccctctgggccctgcagtgggaggggcagaaggcactcagttcagtgtgggtagagggggttgtctctgggaggataacagtggggcgaggcc

SEQ ID NO: 217793 - DNA, 201 bp, Homo sapiens
tgggaggccaaggtgggtgaatcacttggggtcaggagttcgagaccaggatggccaacatggtgaaaccctgtctccactgaaaattcaaaaaaattagytaggtgtggtggcgggagcctgtaatcccacctattggggaggctgaggcaggagaattccttgaacctgggaagtggaggttgcagtgagtcaagatca

SEQ ID NO: 217794 - DNA, 201 bp, Homo sapiens
ctgagcttggcctcagccctgcctgcgcagccttttttgtcttaatcccatacctgtgcccgtcaggagcaatttagccccttcaactctgccccccaatstgagtgcacctttctccagccatagagtccaagccctgtggtcccagcagcaagcctgggacctcagggtctcgtgtgtgcatgtgtgcgtgcatgcgca

SEQ ID NO: 217795 - DNA, 201 bp, Homo sapiens
ttgctttcattgggtattggagggcctgccttcatttggaagcaaatgaatgagatcatgtctggggtggatcgtgggccgtttagggatgggccaggtgkctgtatgcatagtgtctgaggcttgaggactaactgtgggggagaactggaggagtgggcatgggttggcaaagccgtggtcctgtaatacctcctcctt

SEQ ID NO: 217796 - DNA, 201 bp, Homo sapiens; identical to SEQ ID NO: 38939

SEQ ID NO: 217797 - DNA, 201 bp, Homo sapiens
tgaactgtgggagaccaaaacagaagcacatccatatttccagagctgggtggcacaaggatcagaaagtcgggagaagacccctagaagtcccagcttakgctatggaggctgggataccagtttctcccttcacttctgccagggactctagatcagccctgcatctccccactgctatggatacagatcagaagcccc

SEQ ID NO: 217798 - DNA, 201 bp, Homo sapiens
cctaggaccctgtccagtgctgccagaaatagtctatttgggggactctaggcagcttgatgtgcagctgggtctggatgtatgcctgtgaggctgtgttmtagtggcctgagctggaccctcagcagtttcccaggagggtcctggggcagtgtggtcagagtagtggctgtcgtctcctcctcctcgggtgtctccttc

SEQ ID NO: 217799 - DNA, 201 bp, Homo sapiens; identical to SEQ ID NO: 38942

SEQ ID NO: 217800 - DNA, 201 bp, Homo sapiens
acaaaaaattagccgacgtggtgcatgcctgtaatcctagctacttgggaggctgaggcaggagaatcgcttgaacctgggaggcagaggttgcggtgagycgagattgcgccattgcactccagcctgggcaacaagagcaagactttgcctcaaaaaaaaaaaaaagcttcttttgtgcagatttttaaaaggtggccc

SEQ ID NO: 217801 - DNA, 201 bp, Homo sapiens
taggcagcttgatgtgcagctgggtctggatgtatgcctgtgaggctgtgttctagtggcctgagctggaccctcagcagtttcccaggagggtcctgggrcagtgtggtcagagtagtggctgtcgtctcctcctcctcgggtgtctccttccacacagtgttaaaggtccatcttgctcaactttagctctccacggcc

SEQ ID NO: 217802 - DNA, 201 bp, Homo sapiens
gaggcaggagaatcgcttgaacctgggaggcagaggttgcggtgagtcgagattgcgccattgcactccagcctgggcaacaagagcaagactttgcctcaaaaaaaaaaaaaagcttcttttgtgcagatttttaaaaggtggccctcttctgggtagatacgtcctcatgccagtgtgcatggcctggcgattggagct

SEQ ID NO: 217803 - DNA, 201 bp, Homo sapiens
tgtgcagctgggtctggatgtatgcctgtgaggctgtgttctagtggcctgagctggaccctcagcagtttcccaggagggtcctggggcagtgtggtcasagtagtggctgtcgtctcctcctcctcgggtgtctccttccacacagtgttaaaggtccatcttgctcaactttagctctccacggcccatcgtactcct

SEQ ID NO: 217804 - DNA, 201 bp, Homo sapiens
ttggagcttgggctagatgtcagccccaactcacccctttagacgagagcccatgtgcaatatgccacctacacagccttaagtgctgggcctgtcagtgygcgtccacagtttgtgctcctagagcacaggaaccattctagccttgggggcctcctggggttgtgagaggaggctttgttttctgtaaatactgaggac

SEQ ID NO: 217805 - DNA, 201 bp, Homo sapiens
gtgtccaccaacgcaggaggctggcagcttgagagccactgctgagccctggccaggaggggcgtcctgagtgggcctgtggaatgggccccgcgtcctgsctggctttccagctccccccagcagggggagatgctgtcttctctgtgttggggaaagaaggaaaaaaggagggggccagggattgggaacctcatttta

SEQ ID NO: 217806 - DNA, 201 bp, Homo sapiens
gaggaccacttggtctgtgatctttctccctgaggggattttagcccaaggagaggaggggctcaggaataaagttgaacaccagcccccatacaacctcstgtgtccccctccccctgcctcatcccctcttcttgtttttgagaccctcagctgtcccttccctgccacacagctgccagacaggaaatcagattaact

SEQ ID NO: 217807 - DNA, 201 bp, Homo sapiens
aacagcaccagcagttcctggagaagcagaagcagcagcagctacagctgggcaaggtgagcctggaaaggtgaatggcctggggctgtggtgggggcagsacacaggagagtaccaggctggcagaaaagtcctcctttcaggccagacacggtggctcgcgcctgattgggaggccgaggtgggcagatcgcctgaggt

SEQ ID NO: 217808 - DNA, 201 bp, Homo sapiens
ttgtctctgatatatatataggtagagagataaatacacacacatatgtatgtgtgtgtgtatatatatatatacacacacatacgtacacacatatatayacacacacacacacagatacataaaatgcgtcgagtagtcacaatctgtcaggtacagcttcatgcttatgcacattttctttatttttttgagatggag

SEQ ID NO: 217809 - DNA, 201 bp, Homo sapiens
gggagggctccacagagagtgagagcacacaggaagacctggaggaggaggacgaggaagaggatggggaggaggaggaggattgcatccaggttaaggaygaggagggcgagagtggtgctgaggaggggcccgacttggaggagcctggtgctggatacaaaaaagtgagccccgtccctggtcccagtccttggtcac

SEQ ID NO: 217810 - DNA, 201 bp, Homo sapiens
tccagggcagccttgctggggcttgaggagcagggaagcttctgataggcaataatggagcaaaggaatttcaggaggagtcaagagggggcaaaggctgsagaggaaaggccaggtgcagtggctcacacctgtaatcccagcattttgggaggccaaggtgggaggatcacttgagcccaggagtttgagaccaacgtg

SEQ ID NO: 217811 - DNA, 201 bp, Homo sapiens
agatctctgccgaagctcctgccctccccctgctgttacccttcttcctgtctgattccctttcctttcctgtctcctcctcccacctcctccctgctgcstgcccgcccatcctcttattccccctccccccaggcacagctgctgtttggctcactctatatatagcggcattttcagggtaattacaataaaactgtt

SEQ ID NO: 217812 - DNA, 201 bp, Homo sapiens
ccagccggttctccgtaagaccagagttctgagatctctgccgaagctcctgccctccccctgctgttacccttcttcctgtctgattccctttcctttcstgtctcctcctcccacctcctccctgctgcctgcccgcccatcctcttattccccctccccccaggcacagctgctgtttggctcactctatatatagcg

SEQ ID NO: 217813 - DNA, 201 bp, Homo sapiens
agtgaggcccactgtgcaagccagtctgggtggcagcggggccatggaggaggcggccaggatccttctccccagtgtgggagggagacaagcttcatgamaacacctgcctgcccagcgcctcccagaaccttcacactttctctctttcccttttccaggatggagggcagcagcccccccccccccacgcctgctctc

SEQ ID NO: 217814 - DNA, 201 bp, Homo sapiens
cgcctgctctctgggtgaccagagaaactggggcatgggtgtggggtggagccaggaacctcggtgtcctgccttccagccttgggctctgcctccttcaragcccccagggaaggcaggcagtgagaaagtgggtcaatcctggcatggggctggggtctgagaagtagactcctggcctcccttctctactgagatgcc

SEQ ID NO: 217815 - DNA, 201 bp, Homo sapiens
gtcaaccctgaggggaagtagaagatgccaaagtaggtgttcacatttttcctggacttggcttcaaatgagagggttcagccaacacctagcatggggcctggctggcacatggcagctcccaggccatgctgatgggctccagcatgactgggctcgaagggcaggaaagaacaggagggtgggcaggtctgatatctg

SEQ ID NO: 217816 - DNA, 201 bp, Homo sapiens
tcaaccctgaggggaagtagaagatgccaaagtaggtgttcacatttttcctggacttggcttcaaatgagagggttcagccaacacctagcatggggcctggctggcacatggcagctcccaggccatgctgatgggctccagcatgactgggctcgaagggcaggaaagaacaggagggtgggcaggtctgatatctgg

SEQ ID NO: 217817 - DNA, 201 bp, Homo sapiens
acatggcttatcatctgcccaggcagggatgcccatgcagttttctcatgtaggagcatgaccctgaagactagccctgcagggtatccatgcaggccccraggataggggcattaccctggggccagccctgtaggctggggtggggatgggggcgtaaccttgggaaccggctctacaagatacccacgtagtcccctg

SEQ ID NO: 217818 - DNA, 201 bp, Homo sapiens
aggaggggctcaggaataaagttgaacaccagcccccatacaacctcctgtgtccccctccccctgcctcatcccctcttcttgtttttgagaccctcagstgtcccttccctgccacacagctgccagacaggaaatcagattaactgtgtccatgcacacagctgtaacagctgtcaggttggcaggaggcagcctggg

SEQ ID NO: 217819 - DNA, 201 bp, Homo sapiens
gcactccctgagccactcggcccattgtccatgtggggactggacccaaggtcttggaacccagcaggccctccactgccttcccctccccagcagccttyctctccccagccggttctccgtaagaccagagttctgagatctctgccgaagctcctgccctccccctgctgttacccttcttcctgtctgattcccttt

SEQ ID NO: 217820 - DNA, 201 bp, Homo sapiens
cctcccaagtagttgggattataggcgcctgccaccgcgcctggctaatttttgtatttttaatagagctggggtttcaccatcttggccaggctggtctygaactcctgacctcaggtgatccgttcgcctcggcctcccaaagtgctgggattacaggtgtgagccgccatgctcatcctttttttttttttttttttt

SEQ ID NO: 217821 - DNA, 201 bp, Homo sapiens
caaccctgaggggaagtagaagatgccaaagtaggtgttcacatttttcctggacttggcttcaaatgagagggttcagccaacacctagcatggggcctggctggcacatggcagctcccaggccatgctgatgggctccagcatgactgggctcgaagggcaggaaagaacaggagggtgggcaggtctgatatctggg

SEQ ID NO: 217822 - DNA, 201 bp, Homo sapiens
gcatgaccctgaagactagccctgcagggtatccatgcaggccccgaggataggggcattaccctggggccagccctgtaggctggggtggggatgggggygtaaccttgggaaccggctctacaagatacccacgtagtcccctgaggtaggggcgtatgcctgggggccccctacacaggtccctgggatgaggaataa

SEQ ID NO: 217823 - DNA, 201 bp, Homo sapiens
ggctcaggaataaagttgaacaccagcccccatacaacctcctgtgtccccctccccctgcctcatcccctcttcttgtttttgagaccctcagctgtccyttccctgccacacagctgccagacaggaaatcagattaactgtgtccatgcacacagctgtaacagctgtcaggttggcaggaggcagcctggggacgct

SEQ ID NO: 217824 - DNA, 201 bp, Homo sapiens
cgtgcactccctgagccactcggcccattgtccatgtggggactggacccaaggtcttggaacccagcaggccctccactgccttcccctccccagcagcyttcctctccccagccggttctccgtaagaccagagttctgagatctctgccgaagctcctgccctccccctgctgttacccttcttcctgtctgattccc

SEQ ID NO: 217825 - DNA, 201 bp, Homo sapiens
aaccctgaggggaagtagaagatgccaaagtaggtgttcacatttttcctggacttggcttcaaatgagagggttcagccaacacctagcatggggcctggctggcacatggcagctcccaggccatgctgatgggctccagcatgactgggctcgaagggcaggaaagaacaggagggtgggcaggtctgatatctgggt

SEQ ID NO: 217826 - DNA, 201 bp, Homo sapiens
ataagcccattggaacttcgtgcactccctgagccactcggcccattgtccatgtggggactggacccaaggtcttggaacccagcaggccctccactgcyttcccctccccagcagccttcctctccccagccggttctccgtaagaccagagttctgagatctctgccgaagctcctgccctccccctgctgttaccct

SEQ ID NO: 217827 - DNA, 201 bp, Homo sapiens
acacagctgtaacagctgtcaggttggcaggaggcagcctggggacgctgtgaggcagtggttctcaaacttttggtcgcatcagaattaaccaagggagsgtattaaaatgcagattctcaggccttgacaccctgcccccccaacaaaggtttggattctgtagggcagcccaggaaccagtgatttaaactcatgtct

SEQ ID NO: 217828 - DNA, 201 bp, Homo sapiens
gacttgaccgccatctgtgatgcctctgaggcttgtgtctcggctctgctcagtgtagaggtaaggggtgggaaggagctgggaggtggcaggccagaggkctgaggggccagcaaggggtcagccagcactgggagccccttaggaagcttttccttggtcctaaggaacagctaatggccaggctttctgagtatgcgt

SEQ ID NO: 217829 - DNA, 201 bp, Homo sapiens
aatagctgcagactttgaatggttagtgtgccttttacttgcctgtagctttgtacccaggtatatgctagaaatggctggactgggaaatgtgagtctayttctccagagagcatcccaggatcgactactaactctatttgcaccagtgagagatgttttatgccttccatcagggctctgcatcccgagcttaaggtc

SEQ ID NO: 217830 - DNA, 201 bp, Homo sapiens
agcgccatggccttgctgtcggtgggggccgagcaggcccaggctgcggcagcccgggaacacagccccaggtaagcagcaacccgcaccacctctctgcyctcacccctgctggtgcgccccactcaataccctcccctgtgcttgccccacaggccggcagaggagcccatggagcaggagcctgccctgtgacgcccc

SEQ ID NO: 217831 - DNA, 201 bp, Homo sapiens; identical to SEQ ID NO: 38946

SEQ ID NO: 217832 - DNA, 201 bp, Homo sapiens
ttgtaaatactgaggaccacttggtcggtgatcttcctccctgaggggattttagcccaaggagagaagggggctcaggaacaaagttgaacaccagcccytgtacatccttccctgcccccctccccctacctcatctcctctttattgtttttgagaccctcacctgtcccagggctggcttacactgagcacatagga

SEQ ID NO: 217833 - DNA, 201 bp, Homo sapiens
ccctacccagagcttggggggtagatagtgggtagatggggatgctagtccaaagttggcaggactgaggctgtataagcccctcccttcaccccccaggsctccccgaagctgtcgacacagcaggaggccgagaggcaggccctccagtccctgcggcagggtggcacgctgaccggcaagttcatgagcacatcctct

SEQ ID NO: 217834 - DNA, 201 bp, Homo sapiens; identical to SEQ ID NO: 38938

SEQ ID NO: 217835 - DNA, 201 bp, Homo sapiens
ctctcttcagccccagacttcggggccagttctcccaccaccccgttccatcccttgcagcctgttttcccccatggtccccagctgagtgggggggatcygggagtaaggtcatgacagagccaggatctactttctgaaaatatttggatctcctgaggccaggaagtggctctgtgtgccctggctatggggcagaga

SEQ ID NO: 217836 - DNA, 201 bp, Homo sapiens
gtgttgtgtgggacccacaagaagggctttgtttgtgccaggaccgcagagtgacattcagacagtctgaaatgagtgctaagacttccctctggtgggaktctgaggctggcacccttagaatccaggtggtctgtgaagttggccccacttaaaagatttgggaattcttaagtatttcattttatgcactttattttt

SEQ ID NO: 217837 - DNA, 201 bp, Homo sapiens
ttgtctttccctctcccccatctgcagtttccaggctgtgcaggagcagctttctgtagagagcaaaaggggagtgggaaggaggccggtggggagaaggrggagctgtttgtgttgatctcagagctgtgtctgtcctaggctgccagttccctccctgtgtctgtgatactggcctgcctctctgcttgtgtgtctgtg

SEQ ID NO: 217838 - DNA, 201 bp, Homo sapiens
ctccgcctccttccaaactccctcaggccaggacaggaacaagagcttttccccaatctccaagagacagaacaaggtaattagaagctgctgtctccccyacctggtgagggaggtcctgagggcctgggtgctggtgggagattctgccctctagggtaggccagttacctagggctgtctcttaaataaagggaacct

SEQ ID NO: 217839 - DNA, 201 bp, Homo sapiens
tgggctgggctgggctaggctggctgggctggatggtggatgagccatgttgggggctgcctgcttcttcattccagtcttccctccttcctctccctccmtaaacacaaagcttggggagatcttggtttgtctccttcctcttttcttgactcctctctttgccctctcttcacttgaacttggatctgggctttcttg

SEQ ID NO: 217840 - DNA, 201 bp, Homo sapiens
tgatcttcctccctgaggggattttagcccaaggagagaagggggctcaggaacaaagttgaacaccagcccttgtacatccttccctgcccccctccccmtacctcatctcctctttattgtttttgagaccctcacctgtcccagggctggcttacactgagcacataggacatcccacatgggagccagactgcacac

SEQ ID NO: 217841 - DNA, 201 bp, Homo sapiens
gaggggattttagcccaaggagagaagggggctcaggaacaaagttgaacaccagcccttgtacatccttccctgcccccctccccctacctcatctcctytttattgtttttgagaccctcacctgtcccagggctggcttacactgagcacataggacatcccacatgggagccagactgcacacgtgtgtgttcagag

SEQ ID NO: 217842 - DNA, 201 bp, Homo sapiens
ctgagcacataggacatcccacatgggagccagactgcacacgtgtgtgttcagagggaacctgcctgtgccaggagtcaggacacctgcgttcagatctstgttttgctgctacttagctggtaggatcatctgcagagcagcctctctaagaggcttggtttcctcacctgtgtcttgagggtattgaaacagatgacc

SEQ ID NO: 217843 - DNA, 201 bp, Homo sapiens
atgacaagagcaaaactccatctccaaaaaaaaaaaaaacaaaaaaaaaccaaaacttgttttttgttttttttttccctctctcgcctcttaatgctggsgggtggtctggagagaggccagctcatgaaggcagaagatactggtagccagaaggatttcggggtccttttttctcaggcctgggctggagtgggccac

SEQ ID NO: 217844 - DNA, 201 bp, Homo sapiens
aaaaaaaaacaaaaaaaaaccaaaacttgttttttgttttttttttccctctctcgcctcttaatgctggggggtggtctggagagaggccagctcatgarggcagaagatactggtagccagaaggatttcggggtccttttttctcaggcctgggctggagtgggccactttgccacaggagtcttcccagcccctcgt

SEQ ID NO: 217845 - DNA, 201 bp, Homo sapiens
ttcgttctctccctgtaccccagagctgttcatggtagcggcagggccttctgcctcagccgggagagtgggtagcgtctttctcaccccgctgaaggaargactgccccacagcctgaagtgctgggtagagagagcctgctgtccctgttgggccctgaccttctaccttcccttccttctccctgtgaggtctgggat

SEQ ID NO: 217846 - DNA, 201 bp, Homo sapiens
gtggtgtttgcccagttgtcctggcaaccacagggcagtggtgaggagtgacatgcagtgacctgagaactgtgtgtaggtacaaagaagtggagacctakccctcccataagcccattggaacttcgtgcactccctgagccactcggcccattgtccatgtggggactggacccaaggtcttggaacccagcaggccct

SEQ ID NO: 217847 - DNA, 201 bp, Homo sapiens
cctcttgatcttcccaggccctgtgccaagctcctccgcgtacattctcccgagcctaactaccctgggtgttgggtgctgttctgcctgccagtttacasatgcctgcatggagcgcagggtggtgccctgtgtcttgccctaggaaggggagagcctgaattgaaccccagcgtcctctcactccagagcccttgctct

SEQ ID NO: 217848 - DNA, 201 bp, Homo sapiens
tggaacttcgtgcactccctgagccactcggcccattgtccatgtggggactggacccaaggtcttggaacccagcaggccctccactgccttcccctccscagcagccttcctctccccagccggttctccgtaagaccagagttctgagatctctgccgaagctcctgccctccccctgctgttacccttcttcctgtc

SEQ ID NO: 217849 - DNA, 201 bp, Homo sapiens
aggtgagagtcagacccagcttgcctatgtggaaatagtatctgaattgtggtagaacctgttgagcctaaattggcctcactagtcacacaagagcacasaaatagatcatgggaaactgtccttggtggggaggggtcatcggtgtcacagcgtcatgggctcagggtgtgaaatgttgttctccgcctccttccaaac

SEQ ID NO: 217850 - DNA, 201 bp, Homo sapiens
tcacattgcgtctgctttgtgggaagaggggcttagggcctcctatgtcctcagcccgggaggatgtggaatagaactggggagagaggtgtcacctgcastggggctcagtgaggttggagcccagggaagaattttggactgcttgcagctgggggccccgagagcaaggcccaaaacttgtgcttatctgtgctaagt

SEQ ID NO: 217851 - DNA, 201 bp, Homo sapiens
cacattgcgtctgctttgtgggaagaggggcttagggcctcctatgtcctcagcccgggaggatgtggaatagaactggggagagaggtgtcacctgcagyggggctcagtgaggttggagcccagggaagaattttggactgcttgcagctgggggccccgagagcaaggcccaaaacttgtgcttatctgtgctaagta

SEQ ID NO: 217852 - DNA, 201 bp, Homo sapiens
ttgagatgctgggctgggctgggctgggctaggctggctgggctggatggtggatgagccatgttgggggctgcctgcttcttcattccagtcttccctcyttcctctccctccctaaacacaaagcttggggagatcttggtttgtctccttcctcttttcttgactcctctctttgccctctcttcacttgaacttgga

SEQ ID NO: 217853 - DNA, 201 bp, Homo sapiens
tgcgtgaggacacgtagaggggctcaggctgccaagggggcacggagcttgtgggagcaccaggactgggactgttcatgtgggtgtcctctgccctcccygaccccttgcctgtctctcgtccacaggcaaacactggagctgtgtgcagaagttcgccgctggtctgggccggtccctgcgagaggcccaagcaggtga

SEQ ID NO: 217854 - DNA, 201 bp, Homo sapiens
ggaatttgaccattgggtcagagcgcgggccattttcccgatgcttctacctcccctcataggacattcaccatggcaatggcacccagcaggcgttctayaatgacccctctgtgctctacatctctctgcatcgctatgacaacgggaacttctttccaggctctggggctcctgaagaggtacagctcctgggcgtaa

SEQ ID NO: 217855 - DNA, 201 bp, Homo sapiens
aaggtcttggaacccagcaggccctccactgccttcccctccccagcagccttcctctccccagccggttctccgtaagaccagagttctgagatctctgycgaagctcctgccctccccctgctgttacccttcttcctgtctgattccctttcctttcctgtctcctcctcccacctcctccctgctgcctgcccgccc

SEQ ID NO: 217856 - DNA, 201 bp, Homo sapiens
ccagcagccttcctctccccagccggttctccgtaagaccagagttctgagatctctgccgaagctcctgccctccccctgctgttacccttcttcctgtstgattccctttcctttcctgtctcctcctcccacctcctccctgctgcctgcccgcccatcctcttattccccctccccccaggcacagctgctgtttgg

SEQ ID NO: 217857 - DNA, 201 bp, Homo sapiens
atgaggtccagctgcagaagcacctcaaggtgagcgaggggggtgcggggggccgcccagacctccgatccccgcccgggcctggctcacttgtgcctccrttcccatgcccctgcagcagcagcaggagatgctggcagccaagcagcagcaggagatgctggcagccaagcggcagcaggagctggagcagcagcggca

SEQ ID NO: 217858 - DNA, 201 bp, Homo sapiens
ctcctgccctccccctgctgttacccttcttcctgtctgattccctttcctttcctgtctcctcctcccacctcctccctgctgcctgcccgcccatcctmttattccccctccccccaggcacagctgctgtttggctcactctatatatagcggcattttcagggtaattacaataaaactgttgaaaggagataatcc

SEQ ID NO: 217859 - DNA, 201 bp, Homo sapiens
gcccgggcctggctcacttgtgcctccgttcccatgcccctgcagcagcagcaggagatgctggcagccaagcagcagcaggagatgctggcagccaagcrgcagcaggagctggagcagcagcggcagcgggagcagcagcggcaggaagagctggagaagcagcggctggagcagcagctgctcatcctgcggaacaag

SEQ ID NO: 217860 - DNA, 201 bp, Homo sapiens
ctacaggatgccaggcactgttcttgacaaaatctgctgccatcttggcgttcacatcccagagcagtgttgttcagtagaaacataacacaatctacatrcgtaatttctagcatccacattaaaaaatgtaaaaagaaggccgggcgcggtggatcacgcctgaaatcccagcactttgggaggctgaggcgggtggat

SEQ ID NO: 217861 - DNA, 201 bp, Homo sapiens
ctgtgcaggagcagctttctgtagagagcaaaaggggagtgggaaggaggccggtggggagaagggggagctgtttgtgttgatctcagagctgtgtctgycctaggctgccagttccctccctgtgtctgtgatactggcctgcctctctgcttgtgtgtctgtgtatgcatgcgtcggtccctgtgcgtgcctgtgcgt

SEQ ID NO: 217862 - DNA, 201 bp, Homo sapiens
ctttctcaccccgctgaaggaaggactgccccacagcctgaagtgctgggtagagagagcctgctgtccctgttgggccctgaccttctaccttcccttcyttctccctgtgaggtctgggatgagaccagagtcctcttccctatgaagctgccacaggctgggctctggggggacacagacgtgcctgagggtggccct

SEQ ID NO: 217863 - DNA, 201 bp, Homo sapiens
gaggcaggagaatcgcttgaacccaggaggcggaggttgcagtgacccgagatcaccccaccccaccgcactccagctgggcaacagagagactgtctccaaaaaaaaaaaaaaagagagaacctggccgggcatatggctcatgcctgtaatcccaacactttgggaggccgaggcaggcggatcacgaggtcaagagtt

SEQ ID NO: 217864 - DNA, 201 bp, Homo sapiens
tgagaggaggctttgttttttgtaaatactgaggaccacttggtcggtgatcttcctccctgaggggattttagcccaaggagagaagggggctcaggaayaaagttgaacaccagcccttgtacatccttccctgcccccctccccctacctcatctcctctttattgtttttgagaccctcacctgtcccagggctggc

SEQ ID NO: 217865 - DNA, 201 bp, Homo sapiens
tcgagatccagagtgcgtgaggacacgtagaggggctcaggctgccaagggggcacggagcttgtgggagcaccaggactgggactgttcatgtgggtgtsctctgccctccctgaccccttgcctgtctctcgtccacaggcaaacactggagctgtgtgcagaagttcgccgctggtctgggccggtccctgcgagagg

SEQ ID NO: 217866 - DNA, 201 bp, Homo sapiens; identical to SEQ ID NO: 38935

SEQ ID NO: 217867 - DNA, 201 bp, Homo sapiens
cacaaggatcagaaagtcgggagaagacccctagaagtcccagcttaggctatggaggctgggataccagtttctcccttcacttctgccagggactctakatcagccctgcatctccccactgctatggatacagatcagaagcccccctgcactttctcctttggtgcacacctagtcccatggcaggcactgttggga

SEQ ID NO: 217868 - DNA, 201 bp, Homo sapiens
tcctggtctgttgttgaactgtgggagaccaaaacagaagcacatccatatttccagagctgggtggcacaaggatcagaaagtcgggagaagacccctakaagtcccagcttaggctatggaggctgggataccagtttctcccttcacttctgccagggactctagatcagccctgcatctccccactgctatggatac

SEQ ID NO: 217869 - DNA, 201 bp, Homo sapiens
gggcctccctgcccctcctgccgccaggagtgcccaggccggatgaggcacttccctacagtgtgggtcccgtcggcagtggcctgagggaacctgtgctstgcgggctgcccgaccaccttcccttcggtctgctccccgcctctggcggccccctccctggcatgctgctggtgcccaaggctcaggggctcgtggaga

SEQ ID NO: 217870 - DNA, 201 bp, Homo sapiens
cctcctgccgccaggagtgcccaggccggatgaggcacttccctacagtgtgggtcccgtcggcagtggcctgagggaacctgtgctgtgcgggctgcccraccaccttcccttcggtctgctccccgcctctggcggccccctccctggcatgctgctggtgcccaaggctcaggggctcgtggagatgctgcagaccat

SEQ ID NO: 217871 - DNA, 201 bp, Homo sapiens
ggatcctggcctagttggcactgtggtcagaggggaggaagtgggtcagtgacccgcctccatgctgcccgctccccaagtttgggcaagggaagaaggtstagctgggtgtccacaagaataaaggttactccagctcctctggcttggttcttggggctacaggatcgagtacagtgacttccgcaagtccccagccag

SEQ ID NO: 217872 - DNA, 201 bp, Homo sapiens
tctgttccttgctaccagcagcagccagcagttggccggaagtttcctcctcagcttgttcattcacctgcttccagattgtaccccagaaaccttgcagrctgggaccctgctctctcatctcctccctaagcctggctgcccctgcatggactcccaggcagcccctctgtccagatccctgtctccccactccacccc

SEQ ID NO: 217873 - DNA, 201 bp, Homo sapiens
aggggtctgtctgcttatgatgtcctggaagttgggccactccctggtttggcatccaagtgttaggtcatctgggacacagctcctggtgtccctgactkcccactgagacccaacagatttctctggcagatgtgggaacaaacagctcaggttttaaacatcaggctccccttctccccttcatgtcccaccccagac

SEQ ID NO: 217874 - DNA, 201 bp, Homo sapiens
tgttcttgcttaaagagtggggcggatctcagcatctgctcttagcgatcagaggtcttccttgatggatggggtctctgcctggccaccctaccacagcyccccagtgcacagtgggcaccaccatcatcccagcttagttctggcttggggagcctgggagtttgaactctagtatgggattctcaaggacacagaggt

SEQ ID NO: 217875 - DNA, 201 bp, Homo sapiens
ctaaggaacagctaatggccaggctttctgagtatgcgtttgtccaaaaaggccatgtttgcccctgttgtgagggatatctggggctgagtggggcagtyagaggggtatgcatggcaaccctactccccaccctaagccttctcttctttcccctgccagctgcagcccttggatgaggcagtcttgcagcaaaagccc

SEQ ID NO: 217876 - DNA, 201 bp, Homo sapiens
gagaggttaaggaacttactggacatggtagctcatacctgtaatcccagcactttggaagcctgagggaggaagatcacttcaggccaggagtttgagaycagcctgcgcagcatagccagaccctgtctctacaaaaaaatgtaaaaaaaaaaattaatcaggcacagtagcatgcacctgtagttctagctactcagg

SEQ ID NO: 217877 - DNA, 201 bp, Homo sapiens
agccctgagcttgtagggtgagatgtagcccgtttccttcatccttgtccggctgtcttggctggatgtgggaggtggttttggatcccggagtggggtakgggtctgtctggaagaaagagttggtgtgaggtagtggggtgggcaggggtctgtctgcttatgatgtcctggaagttgggccactccctggtttggcat

SEQ ID NO: 217878 - DNA, 201 bp, Homo sapiens
gagatgtagcccgtttccttcatccttgtccggctgtcttggctggatgtgggaggtggttttggatcccggagtggggtaggggtctgtctggaagaaaragttggtgtgaggtagtggggtgggcaggggtctgtctgcttatgatgtcctggaagttgggccactccctggtttggcatccaagtgttaggtcatctg

SEQ ID NO: 217879 - DNA, 201 bp, Homo sapiens
ttttggatcccggagtggggtaggggtctgtctggaagaaagagttggtgtgaggtagtggggtgggcaggggtctgtctgcttatgatgtcctggaagtygggccactccctggtttggcatccaagtgttaggtcatctgggacacagctcctggtgtccctgacttcccactgagacccaacagatttctctggcaga

SEQ ID NO: 217880 - DNA, 201 bp, Homo sapiens
gatgtcctggaagttgggccactccctggtttggcatccaagtgttaggtcatctgggacacagctcctggtgtccctgacttcccactgagacccaacasatttctctggcagatgtgggaacaaacagctcaggttttaaacatcaggctccccttctccccttcatgtcccaccccagacaggaatctgtgcttgtcc

SEQ ID NO: 217881 - DNA, 201 bp, Homo sapiens
gtgagtagggcgtacagcagtgggggtgggcgggcggctctcctaggtctgtctcttccctgcctaccacagccgctggcccactgtccaggtgccctccsctgttcttgccctgcagggggcacactgaaacctgctctcctgccctgcaggtggacagtgacaccgtgtggaatgagatgcactcctccagtgctgtgc

SEQ ID NO: 217882 - DNA, 201 bp, Homo sapiens
ctgagccactcggcccattgtccatgtggggactggacccaaggtcttggaacccagcaggccctccactgccttcccctccccagcagccttcctctccmcagccggttctccgtaagaccagagttctgagatctctgccgaagctcctgccctccccctgctgttacccttcttcctgtctgattccctttcctttcc

SEQ ID NO: 217883 - DNA, 201 bp, Homo sapiens
tagactgagcccatccttggagtaagagctgtgtggacatgggtcacagggcccagcagtcagccagtagatgtcatcagcatccctggaaggccttagtkggtcttgggactcctgggagaagggcctatacaggaggagggaggctgtcgccctagaaagaggtgaatccaactcccagccgcctgtcagtcaggagag

SEQ ID NO: 217884 - DNA, 201 bp, Homo sapiens
cctgggtcctccatctcctttccaggtgaccttggacaagtctcttccttctctggcctcactttcctccctctgaaaacagggggaattgagttgctggycttcaggcctttccttccctgacactctaagggtctctgaggtcagtttcacattgcgtctgctttgtgggaagaggggcttagggcctcctatgtcctc

SEQ ID NO: 217885 - DNA, 201 bp, Homo sapiens
ctcactttcctccctctgaaaacagggggaattgagttgctggtcttcaggcctttccttccctgacactctaagggtctctgaggtcagtttcacattgygtctgctttgtgggaagaggggcttagggcctcctatgtcctcagcccgggaggatgtggaatagaactggggagagaggtgtcacctgcagtggggctc

SEQ ID NO: 217886 - DNA, 201 bp, Homo sapiens
gcagctgggggccccgagagcaaggcccaaaacttgtgcttatctgtgctaagtaatgtttttgagggacaaaagggatcccacaattgtggcctgagccragagcacagagtggcccttcctggaggtagcgaggcaggtgagatggcctggaagtgcgggagtgggaaggaagctgctctcagagattcctcctctggc

SEQ ID NO: 217887 - DNA, 201 bp, Homo sapiens
ccccattggagacgtggagtaccttacagccttcaggtagggactgaaaagggccatggtagtcaatgggagcccctctgggccctgcagtgggaggggcrgaaggcactcagttcagtgtgggtagagggggttgtctctgggaggataacagtggggcgaggcctggcctggtcatctgccgggctcagcttgagccat

SEQ ID NO: 217888 - DNA, 201 bp, Homo sapiens
cctaactaccctgggtgttgggtgctgttctgcctgccagtttacagatgcctgcatggagcgcagggtggtgccctgtgtcttgccctaggaaggggagwgcctgaattgaaccccagcgtcctctcactccagagcccttgctctcaaccactacgtgatgtgtgttcacttgtgttacttaaggaattgtgaaaattg

SEQ ID NO: 217889 - DNA, 201 bp, Homo sapiens
aggtggcccttcttctgggtagatacgtcctcatgccagtgtgcatggcctggcgattggagcttgggctagatgtcagccccaactcacccctttagacragagcccatgtgcaatatgccacctacacagccttaagtgctgggcctgtcagtgtgcgtccacagtttgtgctcctagagcacaggaaccattctagcc

SEQ ID NO: 217890 - DNA, 201 bp, Homo sapiens
tatgccacctacacagccttaagtgctgggcctgtcagtgtgcgtccacagtttgtgctcctagagcacaggaaccattctagcctcgggggcctcctggrgttgtgagaggaggctttgttttttgtaaatactgaggaccacttggtcggtgatcttcctccctgaggggattttagcccaaggagagaagggggctca

SEQ ID NO: 217891 - DNA, 201 bp, Homo sapiens
tgtagccgactttagctaattaaactttctctgcctttcttcttccctatcccacctcaccccaggcccagccgcagccctttcttgaatggggaccctgyctggtagtgctgggaagagggtatcattctgcctgaggttttagggcaaacagaccccgtcttctgccctctgcctccgcctcctcccttcctcccctct

SEQ ID NO: 217892 - DNA, 201 bp, Homo sapiens
gctaagcctcttgggtctgccaggcaggtccacactgtgccagctccctccccccagggcttctctagggggaactatagttcccatttccttgctggccrgggttcttgtcacagggattcttgagttggagatgttgtctctgagagggggcttggacctggggtgcagctcatggtgtgttcagagcaggcggaaggc

SEQ ID NO: 217893 - DNA, 201 bp, Homo sapiens
acattgcgtctgctttgtgggaagaggggcttagggcctcctatgtcctcagcccgggaggatgtggaatagaactggggagagaggtgtcacctgcagtkgggctcagtgaggttggagcccagggaagaattttggactgcttgcagctgggggccccgagagcaaggcccaaaacttgtgcttatctgtgctaagtaa

SEQ ID NO: 217894 - DNA, 201 bp, Homo sapiens
tcagctcactgcaacctccacctcctgggttcaagtgattctcctgcctcagctgcccgagtagctgggattacaggtgtgggccaccatgcccagctaatttttttttttttttttttgtatctttagtagagacggggtttcaccatgttggccaggctggtctcaaactcctgacctcgtgatctgcccgccttggcc

SEQ ID NO: 217895 - DNA, 201 bp, Homo sapiens
tgtcaaaagacaacatttcaacacattgagtataaagatctaattggattttattattgattaacaaattaggtagcaccccatctataaaaaaataggtscccattgggcatggtggaacaatcggtttttataaggttgagcaggaacaggaaaacaacatagtacaaaaatgtgggttaacatcaggttacttgaggt

SEQ ID NO: 217896 - DNA, 201 bp, Homo sapiens
tgaacgctttctttgtgctaggcgctctgcttttctctttacctgaattgagtcatatcctcaatattgttctctgaattgtgagtatgttgtgaatgtasgttctacagtccgcacaaaggtaatcactgaagtgggctatcctatgtagagtcagtgtgtggcggaaaagaaatcactgaagagagggctaggtagaga

SEQ ID NO: 217897 - DNA, 201 bp, Homo sapiens
attctgactggagatgtgaaagatgtatgattagatggcaggagatacaaaagaaaatattctttgcttcttaaacttttttaggcctctttttttctccrcaatactactactatctcttatactcttctggtacctacaactttctgtttttttgtatctagtagtatcattatcattttaatttgcaggtggattctg

SEQ ID NO: 217898 - DNA, 201 bp, Homo sapiens
agattagctggacatgatggtgggtgcctgtagtcccagctgcttgggaggctgaggccggacaatctcctgaagctgggaggcggaggttgcagttagaygaactgacacaccactgcactccagcctgggagacagggtgaccaaaaaaaaaaaaagaaaaaagataaaaaatgtatatgcaggtgggctttctcccct

SEQ ID NO: 217899 - DNA, 201 bp, Homo sapiens
tgttgctcctaggccacaactgtatagagcatgttacagtactgaatgctgtaggtgattgtaatacaatggtaaatatttgtgtatctaaacagaaaagrtacagttaaaatacagtattacagtcttatgggatcactgttgtatatgacaccagtcattgacctaaacttccttatgtggtgcatgatacttgtaact

SEQ ID NO: 217900 - DNA, 201 bp, Homo sapiens
tccttatggctgaataatatttcgttgtgtggatatataccacattttgtttatccattcatctgttgatggacatttgagttgtttccatctttgggctrttgtgaataatgctgcagtgaagattggtgtacaggtacttgactacctgttttcagttttggatatgtgcctgggagtggaattattagtcatattctt

SEQ ID NO: 217901 - DNA, 201 bp, Homo sapiens
ggatcactgttgtatatgacaccagtcattgacctaaacttccttatgtggtgcatgatacttgtaactttgcattttaattaaatagcaagtcagtaggygaaatgattgtgagagattgtttcagtgaaaactaagttgaatgctttaggaagactaaataatagcatgtatactacctcctaagaatctagaacttgt

SEQ ID NO: 217902 - DNA, 201 bp, Homo sapiens
ctggctatacagacaagagggggcccagggtattgccctcctgtgaaaggtatcaagagaaagattcttatagttcaataggagaactactagaccccagsggtgaggagaagaggaatgatgttgacaagtacatcaaggtcaaagtgtgtgtgtcttggctacctcgaagggtattttgactttatctcctaggtattc

SEQ ID NO: 217903 - DNA, 201 bp, Homo sapiens
ctctagcctgggcagcagagtgagactgtgtccccccaacccctgcccaagaaaaaatcaacatcaacaaaaaaagaggaaactaatgtatatgagactgsggaaaatagtaaaaatcttgcataattctgtagtttgcttctttttaaacactttgcattttaaagaagcagactcaaaatcacagtgcactgtgggtgt

SEQ ID NO: 217904 - DNA, 201 bp, Homo sapiens; identical to SEQ ID NO: 38993

SEQ ID NO: 217905 - DNA, 201 bp, Homo sapiens
aagtttgtttttttttgttcgaaacttagttcccagacaggttttgcatgagaatcacttggagaattttaaaagccaagctccctgtctgattggatttrggagccatgtagtaggtttgaggaattgtccaaagctctgggtgggtctgtggcatagctaggcttgagaactgttgtgtttatctgccgtctcggggaa

SEQ ID NO: 217906 - DNA, 201 bp, Homo sapiens
cgatgccagagcccacagcttttaagtgttcctatcactatccagctctcctcttccttttttctttcctgttgacaacctgcctggtcacaggtataaartaaatgactcagatgctttagtcacctggactagtcagcttggactgtgcaaggggttaaggagtcagtaattgtaatgaggtcttgaaactgttgagtc

SEQ ID NO: 217907 - DNA, 201 bp, Homo sapiens
gccttctgagtagctgggaccacaggtgcccgccaccacgcctggctaattttttgtatttttagtagagacaggggtttcactatgttggccaggctggyctcaaactcctgacctcgtgatccgcccaccttgtgatccgcccgcctcggcctcccaaagtgctgggattacaggcgtgagccactgcgccaggccctg

SEQ ID NO: 217908 - DNA, 201 bp, Homo sapiens
ttggccaggctggtctcaaactcctgacctcgtgatccgcccaccttgtgatccgcccgcctcggcctcccaaagtgctgggattacaggcgtgagccacygcgccaggccctgacaaactaaaatgatcagtgtgtcttccatttagatgcaggttggcattcaaatagaggcaatatatgactggtgaattgtaatttc

SEQ ID NO: 217909 - DNA, 201 bp, Homo sapiens
ttaagatttgtgtgttttgggtttcctctacttcctctatttcctgtcttttttgggttataggtcagatgggttctactttttattcccatttcagactrtggagagcttctaaaaataccagtgtccatccctgcccctaggatctagttaatttttaaaagctctctgtgtttcaaatttgcatgtgtttctgtatgt

SEQ ID NO: 217910 - DNA, 201 bp, Homo sapiens
agtatgcacctatagtcccagctatttggaaggctgaggtgggaggattgcttgagtccaagagcttgcggctgcagtgagctgtgatcacattacgtgcwctccatcctgggcaactgagcaagaccctatccaaaaaaaacaaaaaccctatgattgagaaaccgtgcttgccttggtaaatgttggttgttagtaata

SEQ ID NO: 217911 - DNA, 201 bp, Homo sapiens
aaaaaaaaaaaaggaatgactatttatgagttcagaaatgacggtgactttcttgaggctgttgtatccattggcagtactggcaccagctatatctgacsttccatcttaccagagggcatgtgctttgagtagttactgagtagttctagatgatgttggttacatgatagactgaagtattttattaactctgaattc

SEQ ID NO: 217912 - DNA, 201 bp, Homo sapiens
attcttcttttcctcaatgtggctaaataacactatactgtttcttccctaggtttgaattttgggaagattttgaagaagaccatgggaaggggagagaraatggctaccagagtcttcataaggtgctagagcctttccttctccggagagtcaaaaaagatgtggagaaatcccttcctgctaaagtggaacagattc

SEQ ID NO: 217913 - DNA, 201 bp, Homo sapiens
ctaggcgctctgcttttctctttacctgaattgagtcatatcctcaatattgttctctgaattgtgagtatgttgtgaatgtaggttctacagtccgcacraaggtaatcactgaagtgggctatcctatgtagagtcagtgtgtggcggaaaagaaatcactgaagagagggctaggtagagagccaggacagagtgtag

SEQ ID NO: 217914 - DNA, 201 bp, Homo sapiens
taaaaacatttacatggttcaaagtcacaactataaaacaaggtacatttggagcatcttgttttcgttttttgttccccagctgccttctcttcctcctyaataggtcactgtttctattagttgtaagtttatctttgattgtttcttttaaaatttaagtgtgtgtgcgtattttccttcttacacagaagagaacat

SEQ ID NO: 217915 - DNA, 201 bp, Homo sapiens
cttaaaagactgaatgttcagaggttattttacagacattagttgagaaaaaaatttgtcttatagattatatcttcaaaataacaataagccagagatayattcagagagactaagaggtcagggttcgttgatacatgttttctgtggaacttctgcagattttcatttaactaatgtgaaactggtatttttcaggaa

SEQ ID NO: 217916 - DNA, 201 bp, Homo sapiens
ttttgtcttttgtgtattagcacattgccagatcctgattaggtaggtatttgtgaagtgccttaactaatttgtaccttaaccaggcttcttgctagaayacatgtttctctaatgtatgcctgggtgctaatagtttggtgctatggaaactacttatatttggttattggggagcagaagtagtatgcatgatgaggc

SEQ ID NO: 217917 - DNA, 201 bp, Homo sapiens
ttataagcaaagcaaatttgaggaaaaaaacccataataccacacctcatttttttcaagtaatagggtcataagtctcattcttcatataatatgttgaktatgcaatatattatgtgttaggctctggaaaggcagaggttagatcatgttacagatcatatctgattaggcagataaacagtattttaaccttttcct

SEQ ID NO: 217918 - DNA, 201 bp, Homo sapiens
ggttgcagtgaggcaagatggcacctctacactccagcctgggtgacagtgcaagactccatctcggaaaaaaaaacgaaaaaggaatatggacattttawtgtggtataggccatgtataaggcctataggtttttatttgttttggtttggtcttgtgaggtaaaatgagttgcactcttttgatttctttggaatttt

SEQ ID NO: 217919 - DNA, 201 bp, Homo sapiens
gagggagaagtgaaagtatgaagtggggtttcggttgagggttatttatttattttagctatacttatcatgccagctggaataaaatcatctgaaatgtrtttggtttacgagtggattaaatggaaatagaatatgtaagtcttcgcttaatctgtcagcgaggatagtttaagtcagcaactgcaaatttgtacataa

SEQ ID NO: 217920 - DNA, 201 bp, Homo sapiens
acactaaagtgaaatggcggcttttgggcggggctcccacaggctggctccttttaagtggaatgttgctgtgctgccctcttgtggccatttgggaaacsgcgattaaaaatggaacagtaagtgttaatggcacttcgtttcaaagtccagttccaagaaggttaatcactccgtttttacctacttcagaaagtattt

SEQ ID NO: 217921 - DNA, 201 bp, Homo sapiens
tgtgtttggtttacgagtggattaaatggaaatagaatatgtaagtcttcgcttaatctgtcagcgaggatagtttaagtcagcaactgcaaatttgtacrtaatggaagtaaatgaaggggactatgacatttttgttgttgttgtttgtttgtttgtttttgagatgaagtctcgctcttgtccgcgaggctggagtgc

SEQ ID NO: 217922 - DNA, 201 bp, Homo sapiens
atttacatgtaaatacgaaatacgttctcagattcatattagaggagcacaatccacaactgaatttgaatacttgaagagtttgagtcaaaaacaaataytagcaagagttattggaatataaatggatgaaaagccttgctattataacctttacattaggggttttatgaagttcattctaaaccaaagaatttggta

SEQ ID NO: 217923 - DNA, 201 bp, Homo sapiens
gcattgcggcatgtgcctacgggcccagttgcatgggaggcagaggtgagaggattgcttaggcccaggagctcgaggctgcagtgagccatggttgtgtsacacttcactccagcttgggcaacagaggaagaccttgtctcaaaaaaaaaaaaaaaaaaatcatttttaatagttggggaggattctgtttgggtgtaa

SEQ ID NO: 217924 - DNA, 201 bp, Homo sapiens
ttgggttgaggaggttttcttttcttcctagtttgtgaggttttaataaagaatggatattaggttttgtcaaatgcttattttctgtgtctgttgagatraccatgtggttttgtcctttaacaatatagtatattacattaattgctttttagacattaggccaactttttttttcctagcataaatctgacttgttaa

SEQ ID NO: 217925 - DNA, 201 bp, Homo sapiens
atgtgtgtatgtttttttttttttttcaaatcccttaagattcttttctataattagttttctttgaagaagcttggaaagttttctgcattgagatttaraatccacagtgtttctgtaatttagctttccaggaattttgaattttaatttttgtttttactttttatgtacacagtataatgatgttagtgttaaata

SEQ ID NO: 217926 - DNA, 201 bp, Homo sapiens
tgtgggtggtggggcttgatctcctttgaaagttttcattataggatgatgtagcagaaacttctgacagatagtcaggatcatttggtgtttcctctggsgcggtcacattttgtgaagaatgccccagtttcctgactctccagagcgtgaaggcctggctccatccactctggaatgtgagaggcagagacctgggtg

SEQ ID NO: 217927 - DNA, 201 bp, Homo sapiens
tgggtcatcctgtgtgactgtgctcatgtgctcaggtaatcctgttttcagtgtggtgggctcagccctcatctgtgcctgtgcagtcccgctcagaggtycttttatccttttctggagaataagtctttatatttgctgctggttggagttagagatctgggtatcttatgaatctggatatgtgttacttcttaagca

SEQ ID NO: 217928 - DNA, 201 bp, Homo sapiens
cttccccttaccctttcaggttttgtgccacgtgtcttatctcctggcttctgaactcagggacttttctgttaatgttactgtaggttctgggtttttcyttgcccccctcagagcaaagatgggtagtttttaagcaagagtaaacagtccacctcttgctgtagagtccatccgtttgaggtctttttgcttcagagt

SEQ ID NO: 217929 - DNA, 201 bp, Homo sapiens
aaggaaaacttaaaaggactggagtctggggtgtcattgatagaaatttggaggagttctaggtattgatagagccttagtctctaaatccctctgtcagrctcttttggcagaaccatgtaaaggtgtacggtaagtcctcacataacgttgtttccttcagctttgtttcattataacattgatgagaaaaaaaattga

SEQ ID NO: 217930 - DNA, 201 bp, Homo sapiens
tttgaatgaaggggacagtaatatccatgttcagagtttctgtcaagagcctgtccatagaaataacctgttctgtagcatcatgtaaacattcaggaaakggtagctattggggattttgagaatggtagcaataacgttatttggaatgtaaaagtataaatgtgaatttgaagattttggtcttatattactaaaatt

SEQ ID NO: 217931 - DNA, 201 bp, Homo sapiens
tcgaaaactgcataagttatacaagatggctcataagaaaaggtctcaagaagaagaggtaaagtacaaattcagtcctaattcatacaaacaaataccarttccacagaaaaatctcttaatttttgtttttccatggggagatgatcacagaatcatgggttattgctggtgctaatagtcaaacaataagaccagatg

SEQ ID NO: 217932 - DNA, 201 bp, Homo sapiens
  misc_feature (1)...(201): n = A,T,C or G
ttctgtcaagagcctgtccatagaaataacctgttctgtagcatcatgtaaacattcaggaaagggtagctattggggattttgagaatggtagcaataangttatttggaatgtaaaagtataaatgtgaatttgaagattttggtcttatattactaaaattactatctgcaaatgttttaccatgagaattttttttt

SEQ ID NO: 217933 - DNA, 201 bp, Homo sapiens
tcaatgtggctaggcgcggtggctcgtgcctgtaatcccagcactttgggaggctgaggcgggtggatcacttgaggccgagagttcgagaccagcctggscaacgtgatgaagcctcatctctacataaactacaaatattagctgggtgtggtggcacatgcctgtagccccagcccctcaggaggctgaagtgggagg

SEQ ID NO: 217934 - DNA, 201 bp, Homo sapiens
tttttttaaagcacctactgtgtgctagatgttgcgctgggtgctttacgtataatacctgtaatcttcatgatagtcttcaaagctgatggcattctttyctgctactgatgaagaattgactcagagagtcttaacacgcgaccctagcgagcaagaatgtggcagagctcagattcggacacaggtgtttctatctag

SEQ ID NO: 217935 - DNA, 201 bp, Homo sapiens
cctaaaatgagaacttctaaggaaggctcttggttttctatgtacacctccttttcacatggtagctctctgtccccctccaaaagcttattactcatgtragagtactcagtagtgagtaactccacatagtagatttttcatggaggagttgacttagatatcggctctcaaaaggacaaataagaacacaagataatt

SEQ ID NO: 217936 - DNA, 201 bp, Homo sapiens
gcagcagcagcattggaaactcaagattctcagtttaacacatggaaggggtccacgtatactcgagcttttgcttgggataaatctcagcttcttccatygggttaacccaattagcccattgatttttttcagaaaaatatgtataaataacaagtacacaggtatttggtattgtagtaagcaaggaacaaatgtaga

SEQ ID NO: 217937 - DNA, 201 bp, Homo sapiens
gttaaatggtgctatgcttgaattcttgacttcctattttaatggccttatttgtgtgtgcagaagccagcgtttttttcagtcactgtataatacattgygcttactctggttactggctcatagtcttgtcagcctttttgttttgttttgttttgagacagggtctcactctgttgctcaggctggagtgcagtggct

SEQ ID NO: 217938 - DNA, 201 bp, Homo sapiens
ttccctaccctagggctgttcataggaactgccttgggctgagatagttcccctcatgttcctgtgtttgggcactgggctagccttcgtttctgctattmtctggccagctggtgagtattgtggatttacagagagctcttctcctgagtcaccagttgagattcctgaaagattaattaggggaggtcttgtagctgc

SEQ ID NO: 217939 - DNA, 201 bp, Homo sapiens; identical to SEQ ID NO: 38979

SEQ ID NO: 217940 - DNA, 201 bp, Homo sapiens
agaggattggacacatatgtgctgagaaaatattacaaaatgaaatgatgattgccattttgaagtgaaagaaggtgatttaaatatgacattaaagcaawaggagagaatgaattatttcatggctttgctgacttgtttaatcttgcaatttacataattagaaatagagatatttgagagaatacttgaaaggattta

SEQ ID NO: 217941 - DNA, 201 bp, Homo sapiens
ctagatgatgttggttacatgatagactgaagtattttattaactctgaattcagtctgagaattggaaacgtgctattatccagtgtagactgatggagwtgatttcattttacttttcccctttttgttttcccttctatttaagagctctagtgattgataatgtctttccttatgggaaagattcatttttttacag

SEQ ID NO: 217942 - DNA, 201 bp, Homo sapiens
tgaaatatccagcagaatctttaacattcctaattctgactggagatgtgaaagatgtatgattagatggcaggagatacaaaagaaaatattctttgctwcttaaacttttttaggcctctttttttctccacaatactactactatctcttatactcttctggtacctacaactttctgtttttttgtatctagtagta

SEQ ID NO: 217943 - DNA, 201 bp, Homo sapiens
agatggcaggagatacaaaagaaaatattctttgcttcttaaacttttttaggcctctttttttctccacaatactactactatctcttatactcttctgktacctacaactttctgtttttttgtatctagtagtatcattatcattttaatttgcaggtggattctgaccaggaattacaaggctcttgccaaaggaac

SEQ ID NO: 217944 - DNA, 201 bp, Homo sapiens
gtgattcagcgcatggacaccactggccggacgatcctggaaaacaactcaggaaggtccaagtaagtgccaggaagattgggaggtaggcagaatcaaaytgattctacatcactgttggatataataggattttctaccacagacattagtctgttcattacctggaagatgccaggccagaaccacaaataggatagc

SEQ ID NO: 217945 - DNA, 201 bp, Homo sapiens
ctacagaagtgttgattattcaaagaagaggccttgcattgttcccctgacacagaggcttcaagagcagagttgatactgtaggaaacttaacaaaggaragtggagaaatctgcagagctcctgagcacacctgtgagacatcggatttggtctttgcaaattggctctttgtgaagctgataaacagggtctgaaatt

SEQ ID NO: 217946 - DNA, 201 bp, Homo sapiens
atgacaagaagccaaagcgcagagggcgtccgaggagtgtgcggaaggacctcgtggagggatttactgatgcagagatccgaaggttggtggaggctctrttctcactgagcttgtttgaaagtgcgtactgtaagtcttgggttgactggatcctggacatcgtgacagggtaggcagaggctaatacctacaaaaaag

SEQ ID NO: 217947 - DNA, 201 bp, Homo sapiens
gtccgaggagtgtgcggaaggacctcgtggagggatttactgatgcagagatccgaaggttggtggaggctctgttctcactgagcttgtttgaaagtgcrtactgtaagtcttgggttgactggatcctggacatcgtgacagggtaggcagaggctaatacctacaaaaaaggaaagagaagctgggtcctgtcccaga

SEQ ID NO: 217948 - DNA, 201 bp, Homo sapiens
taaggacaggcttgaggaccacacatgcctagtgatttcaggtgtttattctgagctgcgtttctgtgagcttaatattctactctcctacaggtctactyacaaatgaagttgatttgcagaaggtgtagagtgaagaaaaagatgaaatggtttttttttgtgttgctgtagaaagtttaaattcgtcggagtgatgta

SEQ ID NO: 217949 - DNA, 201 bp, Homo sapiens
gatttgttgtgtaatatttttatatcgattacttatttctaactattttcgagggggcatcaaattagaaattagtatagtcattcttggaaatacttccrtctttagcagattgtggcactgtttcacggatgaagataaagggaaaagacagtagccaggtgaaattttggggaaactgtaggagaaatcttaaaattc

SEQ ID NO: 217950 - DNA, 201 bp, Homo sapiens
agccactggtggactgtacatcatattaatgctatcagtttctgagctcagcacttccttaatggtgttgttcttcagctctgtagaaaaaagctggaagkccagtaaaatgagtagagacacttatttggtggcatgtctttgatcttcacataattatagacagaagatggatttttccatgaggtcataggttccttt

SEQ ID NO: 217951 - DNA, 201 bp, Homo sapiens
tgtcagcagggttggttccttctggaggctccgagggaaaagctgttccatgcctctcttctgccttctggtggctggcagcagttcttggcgttcttgastcacgccgatttctgcctccatctttgcatagccttctcctatgcatagcctgtcatagctccctctgcctttattttgaaaggatgcctgtcctggaat

SEQ ID NO: 217952 - DNA, 201 bp, Homo sapiens
cggtgagtgtagtctggagagattttcagagaccaggcacagcaggtaccagcaggtgaaataaacgttagatgtgtaaccggaggatattactcgcagcygtgaaactcagcggtatcattttctgaattagtttggttttgttgttaagagtctgccacagattggaaggttaaacaggtatggagagtgaaaagcggt

SEQ ID NO: 217953 - DNA, 201 bp, Homo sapiens
tttcttttgagacagggtttcactcccatctctcacactggagtgcagtggtacaatttcggttcactgcaacctccaccctccaggctcaagcagttctyctgccttagcctccctagtagctgggactacaggcacatgccactgcacttggctaattttttgaattttttgtagagagggggtttcgccacgtttccc

SEQ ID NO: 217954 - DNA, 201 bp, Homo sapiens; identical to SEQ ID NO: 38973

SEQ ID NO: 217955 - DNA, 201 bp, Homo sapiens; identical to SEQ ID NO: 38975

SEQ ID NO: 217956 - DNA, 201 bp, Homo sapiens
tggcgcacagttccgcaggctgtacaagcatagcaccagcatctggttggcttctggagaggcctcagggagcttttactcatggtggaaggtgaagtggsagtaggcgtcccatggcaagagagggagcaagagagagaggaggaggtgccagcctcttttaaagcaccagctctcacgtgaactcagagaactcactca

SEQ ID NO: 217957 - DNA, 201 bp, Homo sapiens
catctccatttgcctgactttggctaaactctggtacaaagacgaacaaaaagtcttggtgtacaaggacccatctactggggaaatgcatatggaaacaygcagtgctagtagaagttgaataatattcataaaattgctccactgaccgtccgtggaaggcctgaattgttgttttttccccctaaggtctccaccaat

SEQ ID NO: 217958 - DNA, 201 bp, Homo sapiens
gtccgtggaaggcctgaattgttgttttttccccctaaggtctccaccaattcaggtttagggtgaccgttgtagcttttaggaaggttctcaatctgcasatcagccacctcctttcaataagctttcaccattacttgacctgttctcccatgaagaatattgatttgacatttgtcttgttgtagctgttgtctttag

SEQ ID NO: 217959 - DNA, 201 bp, Homo sapiens
tcatggtggaaggtgaagtggcagtaggcgtcccatggcaagagagggagcaagagagagaggaggaggtgccagcctcttttaaagcaccagctctcacrtgaactcagagaactcactcattatcacaaggacagcaccaagccatttatgagggatctgcccaaacacctcccactacaacattggaggtcacatttc

SEQ ID NO: 217960 - DNA, 201 bp, Homo sapiens
ggttttacgtgtgtgtgtgtgtgtgtatgtatatatgtatatatatacacatatatacatatatataaattttttcttttgagacagggtttcactcccayctctcacactggagtgcagtggtacaatttcggttcactgcaacctccaccctccaggctcaagcagttctcctgccttagcctccctagtagctgggac

SEQ ID NO: 217961 - DNA, 201 bp, Homo sapiens
ctttagtatgacctcattccctataaagtgacccataggcaaattggtaattgtttgatttacagagaagccccaggcacttgcctgtcagttttttcctrggtatttcatgcctagcagctattacatgtttcttccctcttctctgtaggtgagaaatgagtggggtccctgcaatatcttgttggattttcaagtaaa

SEQ ID NO: 217962 - DNA, 201 bp, Homo sapiens
ttagtgcatttataatattgggcagccaccacttctatctagttccaaaacactttcatcagtcagagaaaaccctataaccattaaataatccttccccmttattccctctccccagcctctggcagccaccagtttgcattctgtctctctggatttgcctgttctagacatttcatatagaaagagtcatacaatatg

SEQ ID NO: 217963 - DNA, 201 bp, Homo sapiens
gtggggtccctgcaatatcttgttggattttcaagtaaactaaaactgtttgggatagtaggacgcctgtaggttatggctctttcaagccttctaagaaytcaaggagcaaaggaacatctactgtatctaataattattaaaaactacatctttagctgaacagattagttatatgataggtttattgttgaaaaataa

SEQ ID NO: 217964 - DNA, 201 bp, Homo sapiens
agagctttaatgagatgcattgtgttttgattctgcgttttagatatctgtggttcactttcagccagcctacattgcaggtcttactgcttctttcttcrcagactggctatcgtggggcaaacatgtcttccgcttttagtaaaactccttatatgtttggccagggtacagtctctttttgggagaacaaattgttta

SEQ ID NO: 217965 - DNA, 201 bp, Homo sapiens
gaaatagcagcaaattatgctaatttttgataagacagatggcagcctaagatagtgatgacaggaaaagggagtcagaagacaggccccagggaaaattwcctccttgtagtattgcttagaatggactcagcaaactatgccctttgggccaaatttcatccaccacctattttcatatggcctgtgagctaagaatag

SEQ ID NO: 217966 - DNA, 201 bp, Homo sapiens
gtaaatgtacctgattatttcattttgaattatttaaaaaaatttgtgaaaatttattttctttcattatgtaaggacctatacattggtccccattttgyctcttggctggcagagcctaaaatatttactctctggccatttacagaaaaagtttgccaacctctggcctaggacattgtacttaccccccaacaccag

SEQ ID NO: 217967 - DNA, 201 bp, Homo sapiens
  misc_feature (1)...(201): n = A,T,C or G
aaaaaaaaataataccatctacccaacaggattattagaaactatgctaagattttgtgacattaaataaatgtagggtattacagagccttacagaaaantacttaattttgccctgctagagcgcattcagttttcatttgtgttttggagaaatagtaactgtaagcaaacctgcacttggcatcttagaaggctttt

SEQ ID NO: 217968 - DNA, 201 bp, Homo sapiens
ccatgatcctgtgtgttcttcagagatactcttactgatgatgtataaatgaactttgattcagtaaggtcagtttgtaggtctcaaagtactttggttaktgtggtacatcagaatgatagctagtatttactgagatctttctatatgtcaggtaataaaaatcctataaaagtattctttctacagccacaggaggta

SEQ ID NO: 217969 - DNA, 201 bp, Homo sapiens
aaataacaataagccagagatatattcagagagactaagaggtcagggttcgttgatacatgttttctgtggaacttctgcagattttcatttaactaatrtgaaactggtatttttcaggaaaaggaccagggaaaaggagaggtccaacaatcaagatatccggagttcaggttaatgtgaaatccattatccaacatg

SEQ ID NO: 217970 - DNA, 201 bp, Homo sapiens
ttacccattttaataacacaacataggtaagaaacctaaatcgcacggtaggattgcacaaatgacaatgactccttgtaactcttttttaaaagcctaaragtggtgatgccaaatcttcgagtaaatcaaagcgatctcagggtcctgtccatattacagcaggaagtgaacctgtccccattggagaggatgaggatg

SEQ ID NO: 217971 - DNA, 201 bp, Homo sapiens
ccactcttcctctagcaattatatggcataggggtgggctgtgttttcatcgagagcacagtaagcaaaggacaagacttattttctgcagattgtttatrtctttactctgttgtcctgttgcagtgtaaggagaggatgaggcccgtgaaaaaggcactgaaacagctcgacaaacctgacaaggggctcaacgtgcaa

SEQ ID NO: 217972 - DNA, 201 bp, Homo sapiens
tgaggcccgtgaaaaaggcactgaaacagctcgacaaacctgacaaggggctcaacgtgcaagaacagctggaacacacccggaactgcctgctgaaaatyggagaccggatagccgagtgccttaaagcctactcagatcaggagcacatcaaactctggaggaggtaaccactttggcctcgtctgcccagtttgattt

SEQ ID NO: 217973 - DNA, 201 bp, Homo sapiens
gatagagccttagtctctaaatccctctgtcagactcttttggcagaaccatgtaaaggtgtacggtaagtcctcacataacgttgtttccttcagctttstttcattataacattgatgagaaaaaaaattgattttgtttcccttaaagttgcaatttccaagaacctatcgacaacattaagttaggacttactgtat

SEQ ID NO: 217974 - DNA, 201 bp, Homo sapiens
agaaccatgtaaaggtgtacggtaagtcctcacataacgttgtttccttcagctttgtttcattataacattgatgagaaaaaaaattgattttgtttccyttaaagttgcaatttccaagaacctatcgacaacattaagttaggacttactgtattattaatgcaaatacctgaaataatatttctgtagcttaatttc

SEQ ID NO: 217975 - DNA, 201 bp, Homo sapiens
taaagttgcaatttccaagaacctatcgacaacattaagttaggacttactgtattattaatgcaaatacctgaaataatatttctgtagcttaatttctrtgcttagggagtataccacagcaaaatttaatagcttgccatccatgaagatcataaaaaattgcttttctaattctataattcaccagaactgttcatt

SEQ ID NO: 217976 - DNA, 201 bp, Homo sapiens
gatagcctttattcttctctggggaattaagcctgggatcttgagcttctttggtttccttttactctttaggagcaaaagaagaaagacgacgtgactgsgggtaagaaaccatttcgtccagaggcctcaggctccagccgggactctctgatatctcagtcccatacctcacacaaccttcaccctcagaagcctcat

SEQ ID NO: 217977 - DNA, 201 bp, Homo sapiens
taactacaatcaccccaacaagagacacttcagtaatgcaggtaggtcattaagtggagtttttaaaagaggtgccaaaagataaaaaattcacacagccrtttcattttccaaagacactggctagacttctgtgctttattatcttctaacactttattgtcctctcttttcttaatgagagaaagcatgaaataaaga

SEQ ID NO: 217978 - DNA, 201 bp, Homo sapiens; identical to SEQ ID NO: 38969

SEQ ID NO: 217979 - DNA, 201 bp, Homo sapiens
ggatgtattttgctaataagtgtaaaatgactctgttattaatttttttgattcctaataatgtgagcatttgtccttgaatatgagtatatgaggaagarccaagtgggtagtgaagagaagtggatgggaatctggcttcagtctttcgactaatccttgcatctctatttcaggcaccatcatgactccaagcggagg

SEQ ID NO: 217980 - DNA, 201 bp, Homo sapiens
gatgtattttgctaataagtgtaaaatgactctgttattaatttttttgattcctaataatgtgagcatttgtccttgaatatgagtatatgaggaagagycaagtgggtagtgaagagaagtggatgggaatctggcttcagtctttcgactaatccttgcatctctatttcaggcaccatcatgactccaagcggagga

SEQ ID NO: 217981 - DNA, 201 bp, Homo sapiens
atgtattttgctaataagtgtaaaatgactctgttattaatttttttgattcctaataatgtgagcatttgtccttgaatatgagtatatgaggaagagcyaagtgggtagtgaagagaagtggatgggaatctggcttcagtctttcgactaatccttgcatctctatttcaggcaccatcatgactccaagcggaggag

SEQ ID NO: 217982 - DNA, 201 bp, Homo sapiens
tgaaacattcacgttctttcccataaatgattgaggattatcagcattagaatgaccttcctgttggaaatccagatttctagtgaattagaatttcaggragtagggcccaagaatatgcatgtttaacattccccaagtgaaatgttacattctgatgtatgaaccactgctctgggaaatactgttatataaagtaga

SEQ ID NO: 217983 - DNA, 201 bp, Homo sapiens
aacctctgcctcccggattcaagtgattctgctgcctcagcctccagagtagctgggattacaggcgcccaccatgccggctaatttttgtatttttaatmgatacggtcaccatgttggccaggctggtttctaactcctgacctcgtgattcacctgtgtcagcctcccaaagtgctgggattacaggtgtgagcctcc

SEQ ID NO: 217984 - DNA, 201 bp, Homo sapiens; identical to SEQ ID NO: 38995

SEQ ID NO: 217985 - DNA, 201 bp, Homo sapiens
tttcatattcttattactgggagacaacatacagggttgacatttttaattttagaaatattgcttctctttttgcctgatgaaatagtagcaaatttttycttccattatggtttttctttttttgtgtggtagtctacttgtttacataataatctgatactaaaaaatgaaaaaaatagaagtgtccttatagttttc

SEQ ID NO: 217986 - DNA, 201 bp, Homo sapiens
gtacactatgtctttaagattttaaattaagctagtatagataagtgtcaatgttttataaagcagtgatatagcagagatacctgctaattaacattaarcaaatccacctttggttatttgtttcttaagctccttgtgaaaatatcaaactggttaaataaatattgtggtaatattgaagatttttaaatatctaat

SEQ ID NO: 217987 - DNA, 201 bp, Homo sapiens; identical to SEQ ID NO: 38997

SEQ ID NO: 217988 - DNA, 201 bp, Homo sapiens
tatgtctttaagattttaaattaagctagtatagataagtgtcaatgttttataaagcagtgatatagcagagatacctgctaattaacattaagcaaatscacctttggttatttgtttcttaagctccttgtgaaaatatcaaactggttaaataaatattgtggtaatattgaagatttttaaatatctaatttagat

SEQ ID NO: 217989 - DNA, 201 bp, Homo sapiens; identical to SEQ ID NO: 39011

SEQ ID NO: 217990 - DNA, 201 bp, Homo sapiens
aattccagtgtagattgctttgtgattgttttgccagattttgctttcacccacaaaaacactaagctctgccaaccagttcggccattttgtaagttagsaaaataaacactaaagtgaaatggcggcttttgggcggggctcccacaggctggctccttttaagtggaatgttgctgtgctgccctcttgtggccattt

SEQ ID NO: 217991 - DNA, 201 bp, Homo sapiens
ttattcacacattctttagttttcacaataagtgcatgagatttgtactgttattacccattttgtagatggggagaatacggcacacagcaattctgcargtggactcaggttttgaattctgatgccctgaatccagagcttattctcttaagcaccttgttattttcctgtagttaggctggggtggcttagatgtag

SEQ ID NO: 217992 - DNA, 201 bp, Homo sapiens
atggtaactcacttcagccatatttgaacttgaggaatagtggcttttgcttttggaagtaatgtaaattttaaaaatgcactttggagactagacacgtsctaggtttattttaaaggaaaagctaagaagatttgctggtaaatttggatgtgggggatgagagaaagaggtgttaagtatgacctcaagatttgtggc

SEQ ID NO: 217993 - DNA, 201 bp, Homo sapiens
aagtacccaattaagtgcaaatgcttaatgtctttagtgttttatagtaaagcaaaaaatccttatttagaattagaagtacaggcctgtgcaacatggcraaaccccatctttaccaaaaaatacaaaaattagctggacatggtggcatgcttatgtagtctcagctacttgggggctgaggtgggaggatcgcttgag

SEQ ID NO: 217994 - DNA, 201 bp, Homo sapiens
aagatgagccaccgcgcccggccctttttttttttttttttaagttaaagagacagggtcttcctctattggtgcacatgtgtggccatagctcactgcamccttgaactcctgagctcaagtgatcctcttgcttcagtctccccagtagctgggactgtaggcacgtacaaccacatccagctgtattcatacttttaa

SEQ ID NO: 217995 - DNA, 201 bp, Homo sapiens
ctgctactctaacaaacattgtcctacagggtggaatccagtcaaccggtattgagattgattcgctaaggcctcaggacactggacattctttttaattgttttttttgatttccatgacgacagctcacaagacactagacattcttttaggctctcaggtaaatgcgcaacaggcagtctacaaatccacaaataaat

SEQ ID NO: 217996 - DNA, 201 bp, Homo sapiens
cctaatgggcaaaaatgcccttatatttatttacctcaaattcagtcacacttgactgtatctccacaaattcagatggagagctggaaaatttatagagwagaccagggtttaaatcttgttttttcaaattatgtttggtcatgatgaatctgaatcatttatttaatgataaaatcatctgacttctcacttctcact

SEQ ID NO: 217997 - DNA, 201 bp, Homo sapiens
tattttaatgatgggtaagcggtgtaccatatagatttatagctgttaagtaatgaagacattgttaaactaatatttcctaggataatatgcctattttwaaaaaaatggcgctttattgtctcataaatagaactagcaaaacaacccttttgatacttggttacttgaattctcttcaattgcaataaacgtttgata

SEQ ID NO: 217998 - DNA, 201 bp, Homo sapiens
ctcttactagctcgggtgactgtctaccttgacctgttgcaatagcagcagcagcattggaaactcaagattctcagtttaacacatggaaggggtccacrtatactcgagcttttgcttgggataaatctcagcttcttccatcgggttaacccaattagcccattgatttttttcagaaaaatatgtataaataacaag

SEQ ID NO: 217999 - DNA, 201 bp, Homo sapiens
acattccccaagtgaaatgttacattctgatgtatgaaccactgctctgggaaatactgttatataaagtagacaccaaatgataaagtgaagacttagcyttttgtttctcttctcattttagaacagtgcccaaacctcgtgttaaaaagcagccgaagactcagcgtggaaagagaaaaaagcaagattcttctgatg

SEQ ID NO: 218000 - DNA, 201 bp, Homo sapiens
gcatagcacgtgatgctgagctggtagataagtcggtggcagatctgaagcgcctgggtgaactgatccacaacagctgtgtgtcagcaatgcaggaataygaagagcagctgaaagaaaatgccagcgagggtaagcgaagttggctttagtgagtcttcgcaacctggcactcttggactggatttctgttgctaaagg

SEQ ID NO: 218001 - DNA, 201 bp, Homo sapiens
actggtgtgatgtgataaagtagttggttagattttggttctcataagtccggggttgtgcacttaatagataaaaataacagcctatgtcctgaagttgwtttcagaaatctggttagctttcttgcaaaaagagtggtattgagccaaggggaataggaaaagagtagcaatagctcatttgaagccttcattcctaaa

SEQ ID NO: 218002 - DNA, 201 bp, Homo sapiens
tacagggatgcgccaccacgcccagctaattttttttgtatttttagtagagatgggatttttccatgttggtcaggctggtcttgaactcccgacctcakgtgatccgcccacctcggcctcccaacgttttgttgttattaagcaaaatttcaatactgttgttatgtctaaaaaattttaataattccttaacagttt

SEQ ID NO: 218003 - DNA, 201 bp, Homo sapiens
aggctgaggcggcaggattgcttgagcacaggagtttgaggccaacctggggaagattgtgatacccgttctctaaaaaaaaaaaaaaatagagagcgggmagtgatagaaaaggcgagtgtctttgaattctaagttagaaattaaatatataggcttatttgctagattggctgaataaatcctttccttggaatttat

SEQ ID NO: 218004 - DNA, 201 bp, Homo sapiens
ttttctaggggcaggaaatactggagaaacttaactgtgcttcctcctgaatagtattgaaaagtgagggaaataagaaggaaattactcaaaggaatatrctacatcgtttaaactgtgtagaaaattaggtgtacctgagatgtataggggtatggcttcatcattctccctttcccaagtgtgatcttctttgtttct

SEQ ID NO: 218005 - DNA, 201 bp, Homo sapiens
aggtttatctatcacaaaagtgcaactcagatgttctttaacaaatatgcttactagttaaaaagcaacagcagtatgtgagtgggaatctcttttagctrggttgcaatattaaatttttcttctctctgccctttttacttctaagattgctttatatgagataatatggagttaatactttgtgtaatattaatatta

SEQ ID NO: 218006 - DNA, 201 bp, Homo sapiens
agtacccaattaagtgcaaatgcttaatgtctttagtgttttatagtaaagcaaaaaatccttatttagaattagaagtacaggcctgtgcaacatggcaraaccccatctttaccaaaaaatacaaaaattagctggacatggtggcatgcttatgtagtctcagctacttgggggctgaggtgggaggatcgcttgagt

SEQ ID NO: 218007 - DNA, 201 bp, Homo sapiens
cttctaagattgctttatatgagataatatggagttaatactttgtgtaatattaatattatttttgctttctcaatagacatattactgaaaataatcaytcttcgaatttcttaatttcttaaacagtgaggttgcataacttataaaaaaggaataaaagtaaaggaaaacaagctattttaggactgtagaaataag

SEQ ID NO: 218008 - DNA, 201 bp, Homo sapiens
aagctgatggcattcttttctgctactgatgaagaattgactcagagagtcttaacacgcgaccctagcgagcaagaatgtggcagagctcagattcggayacaggtgtttctatctagtctagagctttgctctttcatcactgtatataaactatttctgggaaattgcttgtaataagagcaagccattagcaatgtt

SEQ ID NO: 218009 - DNA, 201 bp, Homo sapiens
cacctgcaggcacttactgtcttgttctccagttcctaacttgacagccaaactgcaagagcgttgtcatgagtcttcgtgcttgctgagtgtccagttayacttcagtatgaatgtgctcatctttgtgttcttttacattgacgttattatacgtattgcattatattttcatcttacaagcctccctttttgttgggg

SEQ ID NO: 218010 - DNA, 201 bp, Homo sapiens
tacataggtgacctgatgagcagaaatacggtgtgtaaacaaaaagagctgggttagaatctgtgttataaatgtaatttagaaattcacttaaagccttyagtagatcatcagtaaaatttgtggttattattctgatactgtgctgtgttctcaatattaggaggtttatctatcacaaaagtgcaactcagatgttct

SEQ ID NO: 218011 - DNA, 201 bp, Homo sapiens
gtaattggttgctgtagggattgtatgcatcagtcttcttcaggttagtactgactcagttctggtaaaatagggcaactttgccccgctgtagctccatyttcacttccttatgttataaatccaagaatacaaggaaataattattgctttccacaggtttgtcttttaaggacatatagaaaagagaaaaaaaatata

SEQ ID NO: 218012 - DNA, 201 bp, Homo sapiens
aaatccaagaatacaaggaaataattattgctttccacaggtttgtcttttaaggacatatagaaaagagaaaaaaaatatatactatctttcatatttayccatatatttgatcattttcagtgatcttcatttcttcctgtgtattcaggtcgctgttgggtattgctttcttttagtctgaagggcttcctttattta

SEQ ID NO: 218013 - DNA, 201 bp, Homo sapiens
cccaactttctatagtttgatgtaaaatgttttgacttttcagtggtatgaaagcaatacactttcagtagaaagtatactttgaatgaacacaaccattytgtttttcattttcagtgtaatattcgataaattacatgagatattcaactctttattataaagttggctttgcgttaggtgattttgctcaatatcctc

SEQ ID NO: 218014 - DNA, 201 bp, Homo sapiens
tgttttgacttttcagtggtatgaaagcaatacactttcagtagaaagtatactttgaatgaacacaaccattctgtttttcattttcagtgtaatattcrataaattacatgagatattcaactctttattataaagttggctttgcgttaggtgattttgctcaatatcctcatgataagcgttctgagcacattcagg

SEQ ID NO: 218015 - DNA, 201 bp, Homo sapiens
gatgtaacatggtgtctttatacatcaccactatgaccttataccttttctatatctaatattataaattaataattgttttcagggcagcagactttttytaaagaatctgatagtatgccgggcgtggtggctcacgcctgtaatcccagcactttgggaggctgaggtgggcagatcacgaggtcaggagatcgagac

SEQ ID NO: 218016 - DNA, 201 bp, Homo sapiens
tgcttattttgggatcaacgtaagctccatgcattttgcttgtttggggatcgatataagctccatgcattttgattggttggtatgtctcttaagtatawtttaatcaatttatttttctttgccttataaattttttgagtcaggaaactgaatttatgttttgtagacttttctcacagtctggattttgctgattct

SEQ ID NO: 218017 - DNA, 201 bp, Homo sapiens
agcttatttccaatttttatatttcagtgaagagtgtttcagtgacagtcattttccattcacacatgcacacacaggttgagtctcttatcaaaaatgcytggggaccagaagtatttcagattttgggatatttgctttatacttactagttaagcattccaaatctggaaatcagaactgtaaaatgctctaatgaga

SEQ ID NO: 218018 - DNA, 201 bp, Homo sapiens
agagggcagtatcagacattccccccaaaagttgaccctggctgtgaggctgggaacatagcagaacactgctacttaaaaccttgctactccctgaagtragtgatgatggcttcccctattttctgtggagttccttaactggagttactgtcttcacacagttatctcctatggggaaaatttcttccgcatagtaac

SEQ ID NO: 218019 - DNA, 201 bp, Homo sapiens
cccgccaccacgcctggctaattttttgtatttttagtagagacaggggtttcactatgttggccaggctggtctcaaactcctgacctcgtgatccgccmaccttgtgatccgcccgcctcggcctcccaaagtgctgggattacaggcgtgagccactgcgccaggccctgacaaactaaaatgatcagtgtgtcttcc

SEQ ID NO: 218020 - DNA, 201 bp, Homo sapiens
tatccataatatcttatatggtctttcagttgctgtcttagaatatagcttaaggctgtgcttgttatcaagaaacagcctattgcaaaaagtcacttctstgtcagtgaatcgaatccctatgagctttcattcctaggaaatcccgtgataccaagtaaatcaagaatgcatcgtttttctctctagggaatagataag

SEQ ID NO: 218021 - DNA, 201 bp, Homo sapiens
ctttttatctgataaaatctagtacaatatttaatactcagttgtgaaaattaggtgtcttgagaagattgagaatgtgggtttgatataatgattctgarttgcttaaaaatgatttttccttttagaggttagtgggacctaattcatctaaatgacagttaataaaagttagatgaactttaattgtgatctaatcct

SEQ ID NO: 218022 - DNA, 201 bp, Homo sapiens
actgtagttgagtttttgtcttctagtcattttttgcttcattattttggggttgttctgttaggtatgtatccattcataacttttgtatgttcctgagrtattgacctttttctggtcaataccagaatgtcccatttgacctctaatgatatttattgttttgtaaatccattttgtgtgattttattatagctcctc

SEQ ID NO: 218023 - DNA, 201 bp, Homo sapiens
cattgcccagtgcatagtaagcgctctaaatatctgctatttttatcatgtagtgttggttgaaattggttttgtgttctccactcttagtttaaaaaatwgtatgagtcgaatgtttcatattgccctgtctcaggggaaaaaaaaaattgctttttgcatagctctcagttgattcccactcactatgatggctatata

SEQ ID NO: 218024 - DNA, 201 bp, Homo sapiens
cccccggcttatatattttattctttttctcctgcccccatatttttctgagcactcagacgcaggcaggtgtgctgtgcttgcccagtgtctactgtcaytgctgtggatactgcagtgtcagtgcctgggtggttccacacatcgctctccagccaaacctgttttgatttttttataattttggcatgttttgtggta

SEQ ID NO: 218025 - DNA, 201 bp, Homo sapiens
  misc_feature (1)...(201): n = A,T,C or G
cctgcttggatggcttacagtcttctatggttagagaataaattctgttaaaattttcccctcttgggttttgacagagctaatccttctctctttttttnggggggttggggggtggttcaggcataagcataacagttccttttcctacaggtaaatatttaccgcttagttacaaaggggactgtggaggaggagatc

SEQ ID NO: 218026 - DNA, 201 bp, Homo sapiens
aggcccacctcagcccctcaaagtgctgggattataggtgtgagccattgtgcccgctgcagctatgttaaaggtgtattcaaattagcccttcctaaatraaatgttttcagatagttttctgtttaagaggaagctagatgagaaaagcctagctcttttattttggaccggggttgagaaggttgaaaattcttggtg

SEQ ID NO: 218027 - DNA, 201 bp, Homo sapiens
gaattgaattaggggaaattgtgtgaagtgtttggaaggaagcaatattgtgtgattagctccaaagctggccactggtagaagttgtttcaatggaagarcaaggatggaattgagtgggccagagagccctagattaatgggttaggatgcagaggatggggtagagaagggggaaggtgatttattagtgttcgtcat

SEQ ID NO: 218028 - DNA, 201 bp, Homo sapiens
ctgggggctgcctgccactgctcagatgctgtccagaggtggtagatgtttctgtgtactcctcctctggttctttgaaatggatacacttagatggcttkctttctgggatacctactgttttagtacaaatacatatcggatattaaataatatttgataagaaatgaagagagtattcttctagatttatttaaattt

SEQ ID NO: 218029 - DNA, 201 bp, Homo sapiens
ttatatgctgcctcgaattcggagttccactaaaaaggtgatcaagtgagatgaaagatatgaaattatttcttatgttgtgaatgctacagaagtgttgwttattcaaagaagaggccttgcattgttcccctgacacagaggcttcaagagcagagttgatactgtaggaaacttaacaaaggaaagtggagaaatctg

SEQ ID NO: 218030 - DNA, 201 bp, Homo sapiens
tcaaatgcttattttctgtgtctgttgagatgaccatgtggttttgtcctttaacaatatagtatattacattaattgctttttagacattaggccaactktttttttcctagcataaatctgacttgttaacagtgtttgatactttctatgcattgctagattcagttggctaatattttgttaaagatttttgcatct

SEQ ID NO: 218031 - DNA, 201 bp, Homo sapiens
gtgagacatcggatttggtctttgcaaattggctctttgtgaagctgataaacagggtctgaaatttccagaagtttgcattttgcctttgagtagtcctyacagtttggctgttaattgccactgccttcaactttcagaaagtcacacctctgtttgtccataacagttcacagcacttgatataaatacttagtaaag

SEQ ID NO: 218032 - DNA, 201 bp, Homo sapiens
caccatccccatttgtgctgttgtcgcacattacatctttacacattttaaacccatcaatgcagttttataattcatactttatatagttagttgtctcttttttttttttcttttgagacggagttttgctcttctcaccaaggctggggtacagtggtgcaatctcggcccactgcaacctccacttcccaggttcaa

SEQ ID NO: 218033 - DNA, 201 bp, Homo sapiens
aaatctgcagagctcctgagcacacctgtgagacatcggatttggtctttgcaaattggctctttgtgaagctgataaacagggtctgaaatttccagaastttgcattttgcctttgagtagtcctcacagtttggctgttaattgccactgccttcaactttcagaaagtcacacctctgtttgtccataacagttcac

SEQ ID NO: 218034 - DNA, 201 bp, Homo sapiens
tgtgaggtgtttcttttcacttaaaggtcacacctattcttctttctttgtttaatttactatggaaaaatagaaatatttcaaaatactgacagaatagyatgtaacacatcccctcttgtgcttatcatcttaacaattttgaatttgtagccaaaattgtatgtatatatacacaccccacctcttcttgctccctat

SEQ ID NO: 218035 - DNA, 201 bp, Homo sapiens
gagtcgtgatgattgaatcctttatgacacagtgaagtctataaacttgtatcttctaaaaaggatattagagctaagtcacagttctctagcatgttatytaagcaggtttatgtacagtcactgagaataaagttgatctttaatttgaatagatttttagcagtcattattttaagttgactagtttcaaagacattc

SEQ ID NO: 218036 - DNA, 201 bp, Homo sapiens
atactaatgctgggaacatttttttttctggaaacatttatttacaaacatttatatattgggtgcctgttcattcatgtctctctgcagagggatgacaragatgataaagacaggccatccataaaaagactttcaccttcgtgagggagataaagcaagtatattcaaaaccatagtgcgtgaaataatttccagaga

SEQ ID NO: 218037 - DNA, 201 bp, Homo sapiens
ccttcagtcaatgtccaggggttcttgttggagccttagaatgaccactaaaggaacgcaaagaaaagtgtctttgcaggagaagattatgtgaggcctastggcatctcatgacacttaagaagagtgggcacagggtcctaaagtgtccccatatttgttcctcctcaggctggagtgcatagcacgtgatgctgagct

SEQ ID NO: 218038 - DNA, 201 bp, Homo sapiens
gtggacacctctgtattttggctgcaaataagaggtgttatagatcacaagcattgttaattatcttggatatatattgtgcgttatggcaaacacaaagkatttagagaattaattggaataaataaaatattggatgaatatcgtaaacatttttgggttacgttgagattttcatgccactagaatttgttctcattg

SEQ ID NO: 218039 - DNA, 201 bp, Homo sapiens
agtgattttgcctgtcctgtgtgatatctttaaaagcaagaggtataggaatgcttgtgaggagagaactctgaagtagttattggtaaggacaccctcayagtgaactttaaagaaacgaagagaggccaggcgcagtggctcacgcctgtaatcccagcagtttgggaggctgaggccagaggatcacttgagcccagg

SEQ ID NO: 218040 - DNA, 201 bp, Homo sapiens
taggaatgcttgtgaggagagaactctgaagtagttattggtaaggacaccctcatagtgaactttaaagaaacgaagagaggccaggcgcagtggctcasgcctgtaatcccagcagtttgggaggctgaggccagaggatcacttgagcccaggagttcaagtccagtctgggcaatatgtaagtgagaccttgtctct

SEQ ID NO: 218041 - DNA, 201 bp, Homo sapiens
ttgaataagtaatacatctacatggcttaaaactgaaaaacgtattcctgttacttcttgatgcttttgagaaatgaataatgttttctcccttttaaatrgtagtacagcatgcacacttttctgtgcttgcttttttatctcatagtatcttgtggagctgttttcttaacagtcccttctccccaaagtctccctttt

SEQ ID NO: 218042 - DNA, 201 bp, Homo sapiens
aatgcgaagtgtgatttctttgcatttctttttgatcttagaatatatcacactaacaatataaagtcaaaatatatgtttaaattattcaaagttattcstttctctgtgtggttaatgccaccaccttaatatatagttagactcttttgttttcatttattttcagtacttagggactgcttttctcatttagattcg

SEQ ID NO: 218043 - DNA, 201 bp, Homo sapiens
gggttattatatctttgtgtggacatatgtttttctttctcttgcttagagacttaggaatagaattgctggattgtttggaaagtttatgtttaacattwtagaaactaccacgctgttttctaaagtgactaccattgtgcagtcctaccaaaaatgtttgaaggttctagtttccctgcgtcatcaccaggacttggt

SEQ ID NO: 218044 - DNA, 201 bp, Homo sapiens
tctgggagaaggtgatacctaagcccacaaaattagagaggtatttaatttgctgtgtccgcagtgggtgcaggagctagaggggagcaatgctaggtctrgagtctggagcagtgggggtgagggaagaaatgattaagtcatgtgccttgagaaattgtcagaggccaggttttatagggcatgctgaaattggatgtt

SEQ ID NO: 218045 - DNA, 201 bp, Homo sapiens
agatttctagaagatttgttgtgtaatatttttatatcgattacttatttctaactattttcgagggggcatcaaattagaaattagtatagtcattcttrgaaatacttccatctttagcagattgtggcactgtttcacggatgaagataaagggaaaagacagtagccaggtgaaattttggggaaactgtaggagaa

SEQ ID NO: 218046 - DNA, 201 bp, Homo sapiens
gtatatattcaacgaaaatgaaatcagttatgttgaagaaatgcctgcacttacatattcattgcagcattatttacgatagccaagatacgtaatcatcytaagtgcccatcagcaggtgagtggataaagaaaatgtgtatatacacaattgaatagtattcagctttaaaaagaaggaaatcctgtcgttcgcaacaa

SEQ ID NO: 218047 - DNA, 201 bp, Homo sapiens
acatattcattgcagcattatttacgatagccaagatacgtaatcatcttaagtgcccatcagcaggtgagtggataaagaaaatgtgtatatacacaatygaatagtattcagctttaaaaagaaggaaatcctgtcgttcgcaacaacatggttgaatctggagggcatttatgttaagtgaaataagtgaggcacaga

SEQ ID NO: 218048 - DNA, 201 bp, Homo sapiens
cttatgtatggaatctgaaaaagtcaaactcatagaagcagggagtagaacagtagttaccagggtcggagggcaggggagaattgggaagatattaacarcggagataaaatttcagttagatatgaggaataagttgagaaatctgttgtacagcatggtgactgtagttaataacaatgtattatataagtgaggtag

SEQ ID NO: 218049 - DNA, 201 bp, Homo sapiens
tatgcctctactctcttctcacatggaacttgtgtattcagtgaaaggctaatcaagagacttaaaagaatgcaactgtttgtctattatctacctatgayctggaagccccctcccctgcttccagttgtccggcctttccaggccaaaccagtgtgcatcttacacatattgatgtctcatgtctccctaaaatgtgtg

SEQ ID NO: 218050 - DNA, 201 bp, Homo sapiens
tacaataaatacccaggtgagtttgttaatgataaaagcattccttggccttagttattggccctttgtttaaaagtacatttgaaacaaccatatttcayttcctcacgtaaagattgaatgtcaccttggtattctttgtaatggaattaaacattggctgttcttctcccacaaaatcgagcctcccaccctatctgt

SEQ ID NO: 218051 - DNA, 201 bp, Homo sapiens
aagtttggggtgttctttaaaaaagaaggcctttacttggtcttttatgacatatttcagggggaaatgtttgaatgagataggacaggtgagagaaatckgcatttacatgtaaatacgaaatacgttctcagattcatattagaggagcacaatccacaactgaatttgaatacttgaagagtttgagtcaaaaacaaa

SEQ ID NO: 218052 - DNA, 201 bp, Homo sapiens
agtcattttttgcttcattattttggggttgttctgttaggtatgtatccattcataacttttgtatgttcctgaggtattgacctttttctggtcaataycagaatgtcccatttgacctctaatgatatttattgttttgtaaatccattttgtgtgattttattatagctcctcagctctcttctgattcctgtttgc

SEQ ID NO: 218053 - DNA, 201 bp, Homo sapiens
gtttgtcttcatgatgtttcaggattttattttactttttaaaaaataaactgagaccatcatatttacccattttaataacacaacataggtaagaaacytaaatcgcacggtaggattgcacaaatgacaatgactccttgtaactcttttttaaaagcctaaaagtggtgatgccaaatcttcgagtaaatcaaagcg

SEQ ID NO: 218054 - DNA, 201 bp, Homo sapiens
  misc_feature (1)...(201): n = A,T,C or G
tcatgggctgggtccaggaatatggtaatgtttatggatcttaccagatttttcctaaagggagtgagtttgcaaaagccatcagtaatttttcaagtgtntacttgtgtcactgcacacttgagccttatttcataggatgtattttgctaataagtgtaaaatgactctgttattaatttttttgattcctaataatgt

SEQ ID NO: 218055 - DNA, 201 bp, Homo sapiens
tatatatccactgtccactttggatattttaagaaaacatgactggaaatttttttttttttttttttttaaatgagacagagtctgactctttcactctrtcgcccaggctgaagtgcagtggcacaatcttggcactgcaacctccacctccctggttcaagagattctcctgcttcagcctcctaagtagctgggatt

SEQ ID NO: 218056 - DNA, 201 bp, Homo sapiens
ggtgtattacagtgtgcaagagaaaactaaatgtttgacttttaactgtagtgttttaaagatacaacatttacaagaatagttgaaacatccctcacttsaaaacttctttaacacaaatgccgagattagggtttcctctgtgcaattgatgtgatattaaattggcattcctgtcattgggcactgttaaggaaattg

SEQ ID NO: 218057 - DNA, 201 bp, Homo sapiens
gaatggcgtcaacccaggagcccaggaggcagagcttgcagtgagccgagatcgcaccactgcactccagcctgggcgacagagccgagactctttctccaaaaaaaaaaaaaaaccaactcagaatctgatggtaaatatttttggttcatagcccacacagtcattgttagccactcatctctgctgtttagaggaaaa

SEQ ID NO: 218058 - DNA, 201 bp, Homo sapiens
ttttattttttgagtagccttcctatagtggtacatgttacatcagttgcgcatatcttgattttacagaatctgtcttaagtaccaattttggtttttcmaatcaatgtttctgaaatttttgaacactgaaagtggttttaaatgaatattctgaatctagttctttagaatcctctttgaattgtgaaatgcaaaata

SEQ ID NO: 218059 - DNA, 201 bp, Homo sapiens
aatggcgtcaacccaggagcccaggaggcagagcttgcagtgagccgagatcgcaccactgcactccagcctgggcgacagagccgagactctttctccaaaaaaaaaaaaaaaccaactcagaatctgatggtaaatatttttggttcatagcccacacagtcattgttagccactcatctctgctgtttagaggaaaag

SEQ ID NO: 218060 - DNA, 201 bp, Homo sapiens
ttttattttaatgcaagactgctgaccccatgatcctgtgtgttcttcagagatactcttactgatgatgtataaatgaactttgattcagtaaggtcagtttgtaggtctcaaagtactttggttattgtggtacatcagaatgatagctagtatttactgagatctttctatatgtcaggtaataaaaatcctataaaa

SEQ ID NO: 218061 - DNA, 201 bp, Homo sapiens
gaaacagtattacaagtaagttcttgtttgggttaggcctgaaggggttgagatcagtaccatgaaactattagataggagatatatatatatacttttgttttttttttttttggagacagagtctcgcgattctgctgcctcagcctaccgagtagctgggattacagggatgcgccaccacgcccagctaattttttt

SEQ ID NO: 218062 - DNA, 201 bp, Homo sapiens
tttggctttggattggctttgcaggagtgcagattgatcatagcttttttcatgtcctaagagttgtcagagttttctcttgtagcatgtttttctttacttttttttttttactatctttaaatatatgactgtaagagtatgataaatatgctgttttctaatctctgctgttgtcacataaactaatatattttgagt

SEQ ID NO: 218063 - DNA, 201 bp, Homo sapiens
tagcttgctttcagtgttcagtctaaaccataggactatatatttgtcttagcataatgccgaacatgcaagtctgcttaaactatagtcttaagatttgwgtgttttgggtttcctctacttcctctatttcctgtcttttttgggttataggtcagatgggttctactttttattcccatttcagactgtggagagctt

SEQ ID NO: 218064 - DNA, 201 bp, Homo sapiens
ttgggatcaacgtaagctccatgcattttgcttgtttggggatcgatataagctccatgcattttgattggttggtatgtctcttaagtatattttaatcaatttatttttctttgccttataaattttttgagtcaggaaactgaatttatgttttgtagacttttctcacagtctggattttgctgattctagctccat

SEQ ID NO: 218065 - DNA, 201 bp, Homo sapiens; identical to SEQ ID NO: 38994

SEQ ID NO: 218066 - DNA, 201 bp, Homo sapiens
aaaaagtgcaggcactatttataaattttaaaggcactatttggaaatcttaaaatagaaaatttgcccagttttacattttcccttttcataccttagcrtcccttctccccgcccccgttcagtgtgaagagatgagtgggtttaattttgttacaattgaccaaaacgtttgagtgtcagaggcggatacttttattt

SEQ ID NO: 218067 - DNA, 201 bp, Homo sapiens
cctagttagttgtcttttaaaatcagatagaaggaaaagagttacaaaaatgcatgtatactgtttttatatttacttactctattattccatgggtgctyttatttcttcatgtgatttgagttactattttatgtcctttcatgtctgcccaaaggactctcttttagcattttattttgaggcaggtctgctaacaat

SEQ ID NO: 218068 - DNA, 201 bp, Homo sapiens
gtgttcatcaaataatttgtacctgattttaaaattatatgctcaaatgtatattgcgtataaaatgctaacagagaattaagtgtttatagaacttgatraacgtttaactgtagcttccaacttaaagtatacctgccacaagaacgaaagtaataatctcacctccctttttgtgtagagactgaattctaattagtt

SEQ ID NO: 218069 - DNA, 201 bp, Homo sapiens
atttctcccataaaatttgatacactaagtttgtttctggtataaaaattgagtgactgctctgtgtcagccattaaattttttcttgctatgagccatcttttttttttttttttttaagatcctttagtttttagctgcttcttggtaaccttagaactttgcttccttgaagaacttggctttcttgatatggtgtca

SEQ ID NO: 218070 - DNA, 201 bp, Homo sapiens
gaaaaatatggtattgaaggtaacagtggtgaactgaatacgctgatgaaacgatataagggtttgtcacaatagagtcgtgatgattgaatcctttatgacacagtgaagtctataaacttgtatcttctaaaaaggatattagagctaagtcacagttctctagcatgttatctaagcaggtttatgtacagtcactga

SEQ ID NO: 218071 - DNA, 201 bp, Homo sapiens
tgaatacgtcttcggtttaaggctctgagtagagtagtcagtgagaaagaagtaagggactcctcacctgtcagttgacttgagttaggtctggtgggcaragttctgggtatgtaggcccttccacagagtctgctgccagccaagtcacctttcaggttagttttgccttctgtaaaatgaagtattttgttcatctca

SEQ ID NO: 218072 - DNA, 201 bp, Homo sapiens
aaaaatatggtattgaaggtaacagtggtgaactgaatacgctgatgaaacgatataagggtttgtcacaatagagtcgtgatgattgaatcctttatgacacagtgaagtctataaacttgtatcttctaaaaaggatattagagctaagtcacagttctctagcatgttatctaagcaggtttatgtacagtcactgag

SEQ ID NO: 218073 - DNA, 201 bp, Homo sapiens
gatcaattttaacattttcaatgattcagcaaaatgtttttcaaacaaaattattatataaataaatttttggtttgtgtgacactttaagtgatagtttyagccacattagctaagaagcatcatttttctgcaggagcttattattgggtgacccgtggtcctatttcctaatctctgcagtacctacagaaacagaag

SEQ ID NO: 218074 - DNA, 201 bp, Homo sapiens
aaaaattttgttaaccatttatattatgagcttgaaggttatatgtgaaatacagaaaagatctaggtttgtctgattatggaattctagatcaaaacatstcttccatgtctgcagtaattcacaagttactggaaaggaacatgtagagggttttgatatctaaaccctacccagttttctgtaggatcttgattttat

SEQ ID NO: 218075 - DNA, 201 bp, Homo sapiens
gactacaggcgcccaccaccacacctggctaatttttttgtatttttagtagagaaggggtttcactgtgttagccagtatggtctcgatctcctgacctygtgatctgcctgcctcagcctcccaaagtgctaggattacaggtgtgagccaccgcgcccgcctgggttagtgtaattttcttaagccaccacttgttca

SEQ ID NO: 218076 - DNA, 201 bp, Homo sapiens
caatctcggcccactgcaacctccacttcccaggttcaagtgactgtcctgccttagcctcccaagtagctgagattactggctcctgccaccacgctggytaattatttttgtatttttagtagagatgggatttcaccatgttggccaggctggtcttgaacttctgacctcaggtgatcggtgtgcctcggcctccca

SEQ ID NO: 218077 - DNA, 201 bp, Homo sapiens
gtctaagtaaagtgaatagtaagttggtatcatttagtgtgctatttcagtgacaactttatggaatttctgagagtgtaattgtacttggatattagctscaagaggatcagcagtgtgtacaggaactagcatggatttgagtcatacatacagatatttatttatttattatgagttgctttttgagatggagtcttg

SEQ ID NO: 218078 - DNA, 201 bp, Homo sapiens
atttttagtagagaaggggtttcactgtgttagccagtatggtctcgatctcctgacctcgtgatctgcctgcctcagcctcccaaagtgctaggattacwggtgtgagccaccgcgcccgcctgggttagtgtaattttcttaagccaccacttgttcatcatttcacatgtgttagatgtgaacttaagctcatgtgtt

SEQ ID NO: 218079 - DNA, 201 bp, Homo sapiens
aacaggagccgttaaaaggctcatttcattagtgtccattcctcagggatcactgttcttcattgcctgatgtctggtgtcttgaaaaccactgttctatrcattttgtcccttttggctgtttcaggcaggatggtaaatctagtccctgttattccattttgactggaacttgagattgctcacttcttcctccctctt

SEQ ID NO: 218080 - DNA, 201 bp, Homo sapiens; identical to SEQ ID NO: 38996

SEQ ID NO: 218081 - DNA, 201 bp, Homo sapiens
ataatgggttaaagaattttgtgaaagaacaaagaaaaatggatattcttgaataaaaattggttgcattaacttttgctccagtgcaacttgaacactarggaggcgctcttgagttgtaaaagttacccctttcttccagtggagatggaaaattcccccttaaattttgtctttagattatttttaggcatcataaag

SEQ ID NO: 218082 - DNA, 201 bp, Homo sapiens
ctgggaaaaagaacatttcgggaattgctggtcaagcaggttgctaagggcttcagaaagctttaagatgatttttaaaatatggatttgtagagattagrgaagattaaaatttgtgtttcaacataattattggaatgtcttttaaatcttcagtccctcataaggagcagtgggaagttgattttattagacaaactg

SEQ ID NO: 218083 - DNA, 201 bp, Homo sapiens
gaccaggaagtctgatatcaaggtgtcagcagggttggttccttctggaggctccgagggaaaagctgttccatgcctctcttctgccttctggtggctgscagcagttcttggcgttcttgactcacgccgatttctgcctccatctttgcatagccttctcctatgcatagcctgtcatagctccctctgcctttattt

SEQ ID NO: 218084 - DNA, 201 bp, Homo sapiens
tggaacttgtgtattcagtgaaaggctaatcaagagacttaaaagaatgcaactgtttgtctattatctacctatgacctggaagccccctcccctgcttccagttgtccggcctttccaggccaaaccagtgtgcatcttacacatattgatgtctcatgtctccctaaaatgtgtgaaaaccaagctgtgccccatcac

SEQ ID NO: 218085 - DNA, 201 bp, Homo sapiens
catagtcttttaggaaatgtcgtttttttaagggaataatatgaatatatatatacgtatatatacacatgtacgctatatatacacacatatatacacayatacatatatatacatacacacatatatatacatacatatatatatatattttttgagacagagttttgctgttgatgcttgggctggagtgcagtggtg

SEQ ID NO: 218086 - DNA, 201 bp, Homo sapiens
ctggagtgcagtggcacgatctcattttccatttccagtttatttagtgattattcctcttacgagaagtatgaaaattaagtaatgactttgttaaggcttttttttttcttctttaagcagttcccctcattagtacttgtattcagtcttacatctgattctggttccaaaaacaatttaaaaacacttttttttttt

SEQ ID NO: 218087 - DNA, 201 bp, Homo sapiens
cattgtgccagatactcagtggctgacaaccatgtccctacaccattctgtgaaattttcttgaattatatggtggtaattttctctaagttcccagttttacctttatggaatttcttgtgtttggatatcgaattctggatattggtccctaattttactttttaagttgttcatttctgctttttactctactttctg

SEQ ID NO: 218088 - DNA, 201 bp, Homo sapiens
attgtccaggctggtcttgaactcctgggctcaagcaatcttcctgcctaggcttcccaaagtgttgggattataggcttgagccactgtgtccagcttgttttttttttttttttttttctggagaccaagtctcgctctgtctctaggctggagtgcagtggcgtgatcttggctcactacatcctttgcctcccaggt

SEQ ID NO: 218089 - DNA, 201 bp, Homo sapiens
aaattgctgggattacaggcatgagctactgctcctggctgattcgtatacattttaagggttactggctattcttacaattatttaatactaagagactytaatttctgcaaagcagatgagtgcaaaataaccagttataatgtttcccaagttaacagaggtttagttatttttaaaaatgagtttattggccatttc

SEQ ID NO: 218090 - DNA, 201 bp, Homo sapiens
attgtgccagatactcagtggctgacaaccatgtccctacaccattctgtgaaattttcttgaattatatggtggtaattttctctaagttcccagttttacctttatggaatttcttgtgtttggatatcgaattctggatattggtccctaattttactttttaagttgttcatttctgctttttactctactttctgg

SEQ ID NO: 218091 - DNA, 201 bp, Homo sapiens
aattgtggagagaaagagctactgaaatgtctgtgactgtaagctttccttggcctagtgctgttagcagagcactgttggctcatgagtgaacatactcwtaaatgagtctaaaatgaatacatcagtagttggtgcctttaaggcacactgactaaatgttgtggcatttttatttgatagtctcaatctgcagtatcc

SEQ ID NO: 218092 - DNA, 201 bp, Homo sapiens
ttgtgccagatactcagtggctgacaaccatgtccctacaccattctgtgaaattttcttgaattatatggtggtaattttctctaagttcccagttttacctttatggaatttcttgtgtttggatatcgaattctggatattggtccctaattttactttttaagttgttcatttctgctttttactctactttctggg

SEQ ID NO: 218093 - DNA, 201 bp, Homo sapiens
ttgtcagcctttttgttttgttttgttttgagacagggtctcactctgttgctcaggctggagtgcagtggcttgatctcagctcactgcagccttggctygctggacttaattgacccacctaagccactcgagtagctgggactacaggcatgtgctatcatgcccagctaagtttttaaaaatttattgtatagatgg

SEQ ID NO: 218094 - DNA, 201 bp, Homo sapiens
tgtgccagatactcagtggctgacaaccatgtccctacaccattctgtgaaattttcttgaattatatggtggtaattttctctaagttcccagttttacctttatggaatttcttgtgtttggatatcgaattctggatattggtccctaattttactttttaagttgttcatttctgctttttactctactttctggga

SEQ ID NO: 218095 - DNA, 201 bp, Homo sapiens
cttaaatatgtaaggtgtatttcttaaaaataaggattttctcttttataagcacagtacagtacagattcaacttagatttaaaacattgctgacgtacttttttttttttttttttgagacgcagtctggctttgtcgccaggctggggtacagtggcgcaatctcggctcactgcagcctccgcctccggggttcaag

SEQ ID NO: 218096 - DNA, 201 bp, Homo sapiens
ttactttttaagttgttcatttctgctttttactctactttctgggagattgcttcaactttgtttcacattatttctttccaagatctttttcctccacygctctcgaatatctttatacttctctttgctttccattgttcacgttacacactttgcttcggtggctttgctgaccctcagttgtcagctcatgtttaa

SEQ ID NO: 218097 - DNA, 201 bp, Homo sapiens
cgccgttgggggaattttgccgtgtaagtcaggttagttctaggctgtcttccctcctggcttcgaatttcattttctcaggtctgttttgtcatttcccrtgctgccaatattttgttgccattatcctctctcttgttttctcttgtctttgtgggcttgtctcttttaaggacagtccctttaccattgttttagtgg

SEQ ID NO: 218098 - DNA, 201 bp, Homo sapiens
cattgccttggggcctcttggctaaatcttggtatttttctccctagttctcaaaatttcgggaaaaatttagttgaattatgtgtttttacagtatctaggggggactctgttaatggcctctaaagctggatattgtaagtttcctttgatagacattttttgctcacgatctcatatcttaaactattctttattgta

SEQ ID NO: 218099 - DNA, 201 bp, Homo sapiens
tgttggttgatgggcatttaggctggttccatgtttttgcaattgcagattatgctgctataaacatgtaagtgcaagtgcctttttcatataatgacttcttttcccctgggtggatacccagtagtgggattgctggatatatatccactgtccactttggatattttaagaaaacatgactggaaatttttttttttt

SEQ ID NO: 218100 - DNA, 201 bp, Homo sapiens
gcaacaataggttaatcaatttttttacccattcagatcatcaaaaattaaaaagggaaatacacaccgattgctaagagtgtgaattgctataatctttkcagaaaataatctgaaaacccactctgcgggttgtctgttcctccagcagtggtccctgcctgggaaagacccagatccttagcctgttgcaggtgctca

SEQ ID NO: 218101 - DNA, 201 bp, Homo sapiens
attgccttggggcctcttggctaaatcttggtatttttctccctagttctcaaaatttcgggaaaaatttagttgaattatgtgtttttacagtatctaggggggactctgttaatggcctctaaagctggatattgtaagtttcctttgatagacattttttgctcacgatctcatatcttaaactattctttattgtag

SEQ ID NO: 218102 - DNA, 201 bp, Homo sapiens; identical to SEQ ID NO: 38972

SEQ ID NO: 218103 - DNA, 201 bp, Homo sapiens
gttggttgatgggcatttaggctggttccatgtttttgcaattgcagattatgctgctataaacatgtaagtgcaagtgcctttttcatataatgacttcttttcccctgggtggatacccagtagtgggattgctggatatatatccactgtccactttggatattttaagaaaacatgactggaaattttttttttttt

SEQ ID NO: 218104 - DNA, 201 bp, Homo sapiens
gccaagcaactcatttcctcactgcacttcagtttccttctctgggaggagaactttggactagttgatttgctaagttttttttttctttctttctttcttttttttttttttgagaacagagtctcgctttgtcacctaggctggagtgcagtggcccgatctcggcccactgtaagctccacctcccgggttcacgcc

SEQ ID NO: 218105 - DNA, 201 bp, Homo sapiens
ttggttgatgggcatttaggctggttccatgtttttgcaattgcagattatgctgctataaacatgtaagtgcaagtgcctttttcatataatgacttcttttcccctgggtggatacccagtagtgggattgctggatatatatccactgtccactttggatattttaagaaaacatgactggaaatttttttttttttt

SEQ ID NO: 218106 - DNA, 201 bp, Homo sapiens
tggttgatgggcatttaggctggttccatgtttttgcaattgcagattatgctgctataaacatgtaagtgcaagtgcctttttcatataatgacttcttttcccctgggtggatacccagtagtgggattgctggatatatatccactgtccactttggatattttaagaaaacatgactggaaattttttttttttttt

SEQ ID NO: 218107 - DNA, 201 bp, Homo sapiens
ggttgatgggcatttaggctggttccatgtttttgcaattgcagattatgctgctataaacatgtaagtgcaagtgcctttttcatataatgacttcttttcccctgggtggatacccagtagtgggattgctggatatatatccactgtccactttggatattttaagaaaacatgactggaaatttttttttttttttt

SEQ ID NO: 218108 - DNA, 201 bp, Homo sapiens
taacaagccctttaggtggtcctgataacattttaaaattttggaagcactgatcttgtgcatgttatggtttcaatcttgtcaataagagtagtaaatgaaaaaagtacatatatatccatttttatttatttttgttactggagataaaataggaatcgatattatgtagtccaggaaggatcacaattcaagtttaaa

SEQ ID NO: 218109 - DNA, 201 bp, Homo sapiens
taagggaccaaaacaaaaggatgttgctgctctgtttttattgtttttgaataagggatttctttgatttcacctgcaaatttaggaatatgtaaaaagtggtttacatttttaaaatacttgaaatttttgattgagtccgttctgtgttgtttgtgagtttgtacttatttcaagttgaagtattttggtgcttcatcc

SEQ ID NO: 218110 - DNA, 201 bp, Homo sapiens
gaaatagagtatcacgtggtaagaagaagtagtctgagagcatttcagcttttggaagtcagaaagaagctagcaaaggagactgagaaagaacagtcggwgagacaggaggagagctgagagagagtggtgtactggaagccaagtgattcacatagccaggagagaggaaatgctgtcagtcaaggacgattaggactg

SEQ ID NO: 218111 - DNA, 201 bp, Homo sapiens
tataatgacttcttttcccctgggtggatacccagtagtgggattgctggatatatatccactgtccactttggatattttaagaaaacatgactggaaatttttttttttttttttttttaaatgagacagagtctgactctttcactctatcgcccaggctgaagtgcagtggcacaatcttggcactgcaacctccac

SEQ ID NO: 218112 - DNA, 201 bp, Homo sapiens
ccccatctttaccaaaaaatacaaaaattagctggacatggtggcatgcttatgtagtctcagctacttgggggctgaggtgggaggatcgcttgagtccrggaggccaaggttgcagtgagccattttcgcaccattgcactccagcctgggtgacaaagtgaaacttcaccttaaaaaaaaaaaaaaggacagcttaaa

SEQ ID NO: 218113 - DNA, 201 bp, Homo sapiens
ataatgacttcttttcccctgggtggatacccagtagtgggattgctggatatatatccactgtccactttggatattttaagaaaacatgactggaaatttttttttttttttttttttaaatgagacagagtctgactctttcactctatcgcccaggctgaagtgcagtggcacaatcttggcactgcaacctccacc

SEQ ID NO: 218114 - DNA, 201 bp, Homo sapiens
cttgattcattgctggttcccattgtctagaatagcacctggtgcacagtaaacaattcagttaatagttgttcagttgatagatatatgctctacaatctttttttttttaattcaggattaaattttattttttacttttatttttatttttaaattttaaatttaaatttgtttagtaactttatagtttgcaaccat

SEQ ID NO: 218115 - DNA, 201 bp, Homo sapiens
taatgacttcttttcccctgggtggatacccagtagtgggattgctggatatatatccactgtccactttggatattttaagaaaacatgactggaaatttttttttttttttttttttaaatgagacagagtctgactctttcactctatcgcccaggctgaagtgcagtggcacaatcttggcactgcaacctccacct

SEQ ID NO: 218116 - DNA, 201 bp, Homo sapiens; identical to SEQ ID NO: 38970

SEQ ID NO: 218117 - DNA, 201 bp, Homo sapiens
ggagcaaattacattttatgtatgcttagtaagacttagattttaggtattttaactctaatgtgatgaattttagtctactgctgtatttgttgtgataygtagaagtctttctgacccagtgtttcagagctgaggacaaaggtatgtgtacactatgtctttaagattttaaattaagctagtatagataagtgtcaa

SEQ ID NO: 218118 - DNA, 201 bp, Homo sapiens
ctcctctgagggctgccacgttgggcgaggggagccatgccaagggtccaggctgctttaggccatctgtgccccactcatctggggacagatggtttttytttattgtaaaattgtggacttttaaaacctgttgactaaacagtaattaatttatatttgtgaaaaatgccactgtcctagtgatttctgatgtaaata

SEQ ID NO: 218119 - DNA, 201 bp, Homo sapiens
attgggaaggataatgtcgtgctgaaatgagagctttaatgagatgcattgtgttttgattctgcgttttagatatctgtggttcactttcagccagcctrcattgcaggtcttactgcttctttcttcgcagactggctatcgtggggcaaacatgtcttccgcttttagtaaaactccttatatgtttggccagggtac

SEQ ID NO: 218120 - DNA, 201 bp, Homo sapiens
gagaatttcttaggcctgggaggtggaggttgcggtgagccaggattgcaccactgcgctccagtctgggcaatagagtgagaccgtctcaaaaaaaaaaaaaaaaaaaaaaaaattgcagttttgaaacaaaactcaaaggaatccagattgaattaaaattttggaaatttgattagaaaaaaactctgtggagcttat

SEQ ID NO: 218121 - DNA, 201 bp, Homo sapiens
gtatttttgtacagacagggtctcaccatgttggccaaggtggtcttgaactcctgacctcaggtgatccattcgcctcagcctcccaaagtgttgggatwacaggcgtgagccactgcgcctggcctaaacgcattctttttaatcttccctttctcattgtttttggcaggatgtaattctgctacaagctaccctgcc

SEQ ID NO: 218122 - DNA, 201 bp, Homo sapiens
agttgtaaaagttacccctttcttccagtggagatggaaaattcccccttaaattttgtctttagattatttttaggcatcataaagaaggaaaaacttgwatttatattatgaaattaaggttttacttttatttagcaatcatttcacccattgggggattaatttttaaaaagattagtacttagctgagctttagat

SEQ ID NO: 218123 - DNA, 201 bp, Homo sapiens
aaattttcccctcttgggttttgacagagctaatccttctctctttttttgggggggttggggggtggttcaggcataagcataacagttccttttcctayaggtaaatatttaccgcttagttacaaaggggactgtggaggaggagatcatagaacgggccaaaaagaagatggtattagatcatctggtgattcagcg

SEQ ID NO: 218124 - DNA, 201 bp, Homo sapiens
gtttgacttttaactgtagtgttttaaagatacaacatttacaagaatagttgaaacatccctcacttcaaaacttctttaacacaaatgccgagattagsgtttcctctgtgcaattgatgtgatattaaattggcattcctgtcattgggcactgttaaggaaattgagaaatgggtctcttatgtgaagcataatctg

SEQ ID NO: 218125 - DNA, 201 bp, Homo sapiens
tccactgcactagctttacccactcttcctctagcaattatatggcataggggtgggctgtgttttcatcgagagcacagtaagcaaaggacaagacttaytttctgcagattgtttatgtctttactctgttgtcctgttgcagtgtaaggagaggatgaggcccgtgaaaaaggcactgaaacagctcgacaaacctga

SEQ ID NO: 218126 - DNA, 201 bp, Homo sapiens; identical to SEQ ID NO: 38971

SEQ ID NO: 218127 - DNA, 201 bp, Homo sapiens
cccgcgggcggcaggtgggcggggggcagcctcgtcgccgggactggatccgccgggaaaggggcggcgggtgaatgccggcgagagcccgaaggggatckggcgtggagagcccctttctgtcctggtgagttattttgatatttagggtaaaaaaatccctttcaggttctccaacggaggagctttttaacctctttc

SEQ ID NO: 218128 - DNA, 201 bp, Homo sapiens
actgctttatagtttggttgcttaggtcattttagaatgtgagatattcattgaattctaatcagatttattttttatttggcatgtttctattacatcartcacaaaacttatgtgatatagaaaggtagaagtagaaattatgtcttaattatgtttttttcttatagatacgggaatatgaatggattcattcccaaa

SEQ ID NO: 218129 - DNA, 201 bp, Homo sapiens
agaaacaaatgagttctaggaaagacaaagaaggggacaaggaaagaaagaagtcaaaagataagaaagagaaggtaatgatgcccttctgttcatgcagrtatccacagcctttgcaattcgccatttggatttagaagtagaatgagatttgagggccctggaataattgtctttttatgggtatgttcaagaaggatg

SEQ ID NO: 218130 - DNA, 201 bp, Homo sapiens
caaagaaggggacaaggaaagaaagaagtcaaaagataagaaagagaaggtaatgatgcccttctgttcatgcagatatccacagcctttgcaattcgccrtttggatttagaagtagaatgagatttgagggccctggaataattgtctttttatgggtatgttcaagaaggatgggtggggccgttgatgggatacctg

SEQ ID NO: 218131 - DNA, 201 bp, Homo sapiens
tggcatagccacctaagaaatctttttcccagcacaactcatctattggcaatatacctgcaggctttaactccctttccatgaaataggccattccactragaccagccttttgaaggggtaggacgatgtcattaatttattttatgagagaaagatagtgttactggatttgctggtctattctcagaaataaatttt

SEQ ID NO: 218132 - DNA, 201 bp, Homo sapiens
tccaccgtccttggcctcccaaagtactggtattataggcgtgagccactgcacccggcctagactgctttttaaaaatggagaagtacaagttccatttycttctttttcaaaattgttttggttattctagaattcttgatacttccatgtacattttaggatcaggttgttaatttctgcaagaaaaatatggaattt

SEQ ID NO: 218133 - DNA, 201 bp, Homo sapiens
gatgaaagatatgaaattatttcttatgttgtgaatgctacagaagtgttgattattcaaagaagaggccttgcattgttcccctgacacagaggcttcargagcagagttgatactgtaggaaacttaacaaaggaaagtggagaaatctgcagagctcctgagcacacctgtgagacatcggatttggtctttgcaaat

SEQ ID NO: 218134 - DNA, 201 bp, Homo sapiens
tacatgttacatcagttgcgcatatcttgattttacagaatctgtcttaagtaccaattttggtttttcaaatcaatgtttctgaaatttttgaacactgmaagtggttttaaatgaatattctgaatctagttctttagaatcctctttgaattgtgaaatgcaaaataattgttagcagtttaacctgaaagatctttt

SEQ ID NO: 218135 - DNA, 201 bp, Homo sapiens
aaccactttggcctcgtctgcccagtttgatttgactgagtgtgggagtggattctgttttcttttaataaaaggtggcatagccacctaagaaatctttytcccagcacaactcatctattggcaatatacctgcaggctttaactccctttccatgaaataggccattccactgagaccagccttttgaaggggtagga

SEQ ID NO: 218136 - DNA, 201 bp, Homo sapiens
atttgaattttctgtatttctgtttaattcaatgcgttaatctttagcattggtcaatacagccaaaagatgaggaaaacaaagactgatagatactaagrtaagaaataactgcaaccataaatgtatacaggttatgtgtccatgagccatctcttcagtttgcccatagatttttgtctgtggaatattttcttgttt

SEQ ID NO: 218137 - DNA, 201 bp, Homo sapiens
gtgacccacccagcttggactcccaaaagtattggaattacaggtgtgagccactgcgccctgcctattttcatattgaacttttaaataagttttctttrtggtggtgggatgattattgtaatcatacttgggaacagaagtgatgaaaaaggtatgttacttgagatatgggaaacgctattttccatgtttagttat

SEQ ID NO: 218138 - DNA, 201 bp, Homo sapiens
gcacacgcctgtaatcccagctacttaggaggctgaggcaggagaatggtgtgaacccgggaggcggagcttgcagtgagccgagttcgggccactgcacyccggcctgggcaacagagcgagactccgtctcaaaaaaaaaaaaaaaaaaaaaaaaaaaaaaaaaattcatttaagaccacggcatcttggcagctttct

SEQ ID NO: 218139 - DNA, 201 bp, Homo sapiens
tgtagggaaagtttatcctaggtcctacagcttttccttttgtcagcattgccttaacctgtatagaactcagaagcccttcggttctcttttggtaatakaacataatttttaatgatttccaatattataattacttttaattaattaattttgaagttaaacttgaaagcccaacaaaaagttctttagcctgattgt

SEQ ID NO: 218140 - DNA, 201 bp, Homo sapiens
ccagtaatgatggtttgcttggtaataatagaaatgttcatttaggcctggcgcagtggctcatgcctgtaatcccagcactttgggaggccgaggcgggyggatcacaaggtcaggagattgagaccatcctggctaatatggtgaaaccccgtctctactaaaaatacaaaaaaattagccgggcgtggtggcacacgc

SEQ ID NO: 218141 - DNA, 201 bp, Homo sapiens
aaaattctcacttttggctttggattggctttgcaggagtgcagattgatcatagcttttttcatgtcctaagagttgtcagagttttctcttgtagcatktttttctttacttttttttttttactatctttaaatatatgactgtaagagtatgataaatatgctgttttctaatctctgctgttgtcacataaactaa

SEQ ID NO: 218142 - DNA, 201 bp, Homo sapiens
ttttactatctttaaatatatgactgtaagagtatgataaatatgctgttttctaatctctgctgttgtcacataaactaatatattttgagtaattttgmaatgatattaataatgtcattagattttctttggattttttgaaaaaaataatggttttagaaggaaatctggataaattttatctctgtcctgtgtcag

SEQ ID NO: 218143 - DNA, 201 bp, Homo sapiens
aaaaaaataatggttttagaaggaaatctggataaattttatctctgtcctgtgtcagaaaaatataaaacttgagttttttaaattaaggtactaagatraataaattgcatctatagatattgaaatatgactgtaatttgataatgcattttcattctcagtgtcattgttcatcataatagtatttacatcaccaac

SEQ ID NO: 218144 - DNA, 201 bp, Homo sapiens
ttggcaaatgacccttgcaagatgttgacattttgggtataaatcatggtgcttaataatctgttttcattttttatgtataaaattaaattctttttgtyctctgcagaaatatgaacctcaaactgaatcctctaaaggccccatacaatgaagtagacattggtggaaacatttagtaagtattattcaatttacatg

SEQ ID NO: 218145 - DNA, 201 bp, Homo sapiens
gaatagaatggtgctggggacagggaagcactcaggagtatttgttatgctgtgcccagtgctgtgttggcctgtgaagcagcaccctcaagtagttgatratttaattttacatggaagaatatgttatagcagtaacatacaggaatcatatactaataagcattataaaaagtctataaatggatagtccggaaaggc

SEQ ID NO: 218146 - DNA, 201 bp, Homo sapiens
atttttataaataatacacttttctattaggctagtgaatttgaaagttttgaacatgatgtgttactaatatgctgaattctatttattttatttgactraaagcatattgagccttgctttagaaaataagttaccaaatttttttgcattgagttgtcacccagtttgtagtgctgtcttaattgaattgcccatgta

SEQ ID NO: 218147 - DNA, 201 bp, Homo sapiens
tgaattctatttattttatttgactaaaagcatattgagccttgctttagaaaataagttaccaaatttttttgcattgagttgtcacccagtttgtagtkctgtcttaattgaattgcccatgtaaattactagattaaattgaggacagaaaagttttttactcatcctaagctgtttttttctggaaagtaatgacaa

SEQ ID NO: 218148 - DNA, 201 bp, Homo sapiens
gaatcaatttggcttcagcggacacagtcgtcatctttgactctgactggaacccccagaatgacttgcaggcacaagcccgagcgcatagaattggtcaraagaagcaggtcagtatggagaggcttctggaaattgctttagggtggggggccagggggcttgttcagccctttcaggatgttaataaaatgctttttc

SEQ ID NO: 218149 - DNA, 201 bp, Homo sapiens
tttgtcttgaagaatggtaaactttttctttgtttattgcctgtcataaaaagagggaaagtaaaaaaaaaaaggttcataatcttaaatcagtccaaaawtttgaattttctgtatttctgtttaattcaatgcgttaatctttagcattggtcaatacagccaaaagatgaggaaaacaaagactgatagatactaaga

SEQ ID NO: 218150 - DNA, 201 bp, Homo sapiens
ataccattaaagtttgttaatgaaacaaactgtagactacttatcactgaaaggatgagaaaaccatcaaatttctttgcctgacattgaaaacacttctrttactatcaagacagtcgatgcatgtaatttatattggagcaggaagacatttagtacttcttaataaaatggtgctttaggattgtggttaaatctgca

SEQ ID NO: 218151 - DNA, 201 bp, Homo sapiens
atttacataattagaaatagagatatttgagagaatacttgaaaggatttaggcacttttattttattttattttattattttattttgagacagagtttygctgtgtcgcccaggctggagtgcactggcactatcttggctaactgcaacctctgcctcctgggtttaagtgattctcctgcctcagcctcctgagcag

SEQ ID NO: 218152 - DNA, 201 bp, Homo sapiens
tatgaatatgagtaaactatcaaataatttgacaaaagcctttaagccttttcactgcaggaaagattaaaagtatatacgcatagccattgtaacttaaygtaccctttgaatagtttaaaatactgaaggtcctttaagcctttgtttaattttgggaacaagagaagactgattagattttgaggaaaaccatgaacc

SEQ ID NO: 218153 - DNA, 201 bp, Homo sapiens
atcttaatacatgtacataattatgacatcacttccttttaaaatgtgcagctgtagaatgttagtggtgttttaatgtggtagattaatattacttctastgagctgaactgtccctgtaattagtacttggttccttctgccatcagagtttttattgcccaaagtatagtgtttagggaatactacgaaaatcacctt

SEQ ID NO: 218154 - DNA, 201 bp, Homo sapiens
tactttatcacgatttttgaaaattaaaaactttaaaaaacgcgattttaaaaacatttgattgatatttgtaaaatttctaagtatttaaaacaaagttytaatgatggacatacgagaagtataccatactttttatctgaataatttgcagcttggggataacttaagtaacatcaaagaatgaaaacgggactgtgt

SEQ ID NO: 218155 - DNA, 201 bp, Homo sapiens
agaacaggcagtttaactggcagccattttatgacgctgataatacattaaaaaacgggattttggagaagactgaatctaaactaatagaaatctgaaayaccaaagcctatttccttccccctctctgctcttctggggaactctggtgccgacataaaaggcagttcgatagggcacgcagcagctctttgagcccct

SEQ ID NO: 218156 - DNA, 201 bp, Homo sapiens
gccattttatgacgctgataatacattaaaaaacgggattttggagaagactgaatctaaactaatagaaatctgaaataccaaagcctatttccttcccmctctctgctcttctggggaactctggtgccgacataaaaggcagttcgatagggcacgcagcagctctttgagcccctggcatcttgatgcaggtccagc

SEQ ID NO: 218157 - DNA, 201 bp, Homo sapiens
ccggcgcggggtgctgattggctgtgcgcgcgcctggtaacagcagggtcaacggcggcgccttcggcagcctccgccccgtgacgtcagacggctcccckggggggcggggagagaacgcagtgacgtctggccgcgtgcgcatgtcgggcgctttctcctccccctacccagggagccgcacgccgaggggaaaaggaa

SEQ ID NO: 218158 - DNA, 201 bp, Homo sapiens
gatattttaacctaaataccattatgagttaaaatgcataccatgatataacaatttacctattaactgttgacaatcttgcagccaattaagttttttawagaaccagtgttcttaggtatgtttgttgagccttctactttttttccctttgatgtggggaatagcatcaagcagcaagaaaagagtgttgatcgattt

SEQ ID NO: 218159 - DNA, 201 bp, Homo sapiens
attaaattttttcttgctatgagccatcttttttttttttttttttaagatcctttagtttttagctgcttcttggtaaccttagaactttgcttccttgragaacttggctttcttgatatggtgtcacttgaacaaagaaacttaaaaaaaaattcctctaagagtattttgtgtacaggtgaaagtaactttgtggct

SEQ ID NO: 218160 - DNA, 201 bp, Homo sapiens
cagtaattcagcacaatgctggaacacattactcacatttgtcttatgacccttttctgtaatcaatggaatctttaattgataaagcaagtctagggggwgagaccttttttaaaaaaagctcctatatactgaatatatttgagccctgattatgaagtgagggacaaggcttttctttttgaaataaatgatggagga

SEQ ID NO: 218161 - DNA, 201 bp, Homo sapiens
ttcagcacaatgctggaacacattactcacatttgtcttatgacccttttctgtaatcaatggaatctttaattgataaagcaagtctagggggtgagacmttttttaaaaaaagctcctatatactgaatatatttgagccctgattatgaagtgagggacaaggcttttctttttgaaataaatgatggaggacataga

SEQ ID NO: 218162 - DNA, 201 bp, Homo sapiens
gtcaaaagacaacatttcaacacattgagtataaagatctaattggattttattattgattaacaaattaggtagcaccccatctataaaaaaataggtgsccattgggcatggtggaacaatcggtttttataaggttgagcaggaacaggaaaacaacatagtacaaaaatgtgggttaacatcaggttacttgaggtt

SEQ ID NO: 218163 - DNA, 201 bp, Homo sapiens
ttaccctgccctccccctcggagccgcctcatgggcgctctctgctagacttaccctgccctctcaggttggagtatgaggcgcgaaaccagaagaaggawgccaaggagctggccttcctggaggctgccaggcagcaggcggcacagcccctgggggagcgcgatggtgacttctaacctggcagaggccctggccggc

SEQ ID NO: 218164 - DNA, 201 bp, Homo sapiens
cacctcggagccgcctcatgggcgctctccgctagacttaccctgccctccccctcggagccgcctcatgggcgctctctgctagacttaccctgccctcycaggttggagtatgaggcgcgaaaccagaagaaggaagccaaggagctggccttcctggaggctgccaggcagcaggcggcacagcccctgggggagcgc

SEQ ID NO: 218165 - DNA, 201 bp, Homo sapiens
tcaccaacaggtgcagttgggtgggggcacctcggagccgcctcatgggcgctctccgctagacttaccctgccctccccctcggagccgcctcatgggcrctctctgctagacttaccctgccctctcaggttggagtatgaggcgcgaaaccagaagaaggaagccaaggagctggccttcctggaggctgccaggcag

SEQ ID NO: 218166 - DNA, 201 bp, Homo sapiens
gagccccaggggtccccagcctgcccagcccatccctgctactcactggcagccccgccccatgtctgagccgtctctcaccaccctgtggccctggcttwccagtagcagggaccgagcaagtctttctgcccccactgtccccacagtacgtgtcagaagtggtgattggagccccgtacgcggtcacagcagagctcc

SEQ ID NO: 218167 - DNA, 201 bp, Homo sapiens
tgtcctgtctggggcatccccacaagggcgagcaacctccccgacttcttcccatgagggacagccgggaggggcacaccctgtccccccaaaaagtctcygggctgagctagccgcactctggccgcaggaggtcaatcactacaaggggaagaactaccccatcatgaatctgcatgaacggactctgagcgtgctggc

SEQ ID NO: 218168 - DNA, 201 bp, Homo sapiens
atgagggacagccgggaggggcacaccctgtccccccaaaaagtctccgggctgagctagccgcactctggccgcaggaggtcaatcactacaaggggaaraactaccccatcatgaatctgcatgaacggactctgagcgtgctggcctgccgggtgagtgggggccaggagccagcccaaggatggggagacattccca

SEQ ID NO: 218169 - DNA, 201 bp, Homo sapiens
ggccctacatcatcgcgggcttacactttgaccaggtcactgccttcttgctccctgggcccctgggcagctgatgggccctcgaggggccctaagcgttsctgttaggtgcaggtggtctctgggaaggggccccaggtgaagtcacaggagaccctggggggtgatcgtaggcttctggggtccagggctgtcctgtct

SEQ ID NO: 218170 - DNA, 201 bp, Homo sapiens
gagcagctgtcagcagggaggatggcggggaggcccttgggcatgagctgtcagggagctgctccctgtcatccccatcccgactgcttcttaacctgggygcagacatcgggcatgtggacttcctggagaaggtgcacaggctggcagagaggccctacatcatcgcgggcttacactttgaccaggtcactgccttct

SEQ ID NO: 218171 - DNA, 201 bp, Homo sapiens
aagtctttctgcccccactgtccccacagtacgtgtcagaagtggtgattggagccccgtacgcggtcacagcagagctcctaagtcacttcaaggtgagsctccgcatgggctcacctcgttccctctgttcacctctgttcctgcatgggctgggaatgcaggctggctgtgggctcctaggcggggcccaggaggtac

SEQ ID NO: 218172 - DNA, 201 bp, Homo sapiens
ttgtcaacaagtgaaaggaagacgaccgttactgataatttgctacctctgaccctttcacgtgcctgccggatggaatccaggaagcaagcgcctctatytgattagcccttcccaggagagcaagcagggccttgtcttctgtgtccgagtcacctctgggaaaaggaatgtggctttgtgtcagtggactttgacctt

SEQ ID NO: 218173 - DNA, 201 bp, Homo sapiens
agtctttctgcccccactgtccccacagtacgtgtcagaagtggtgattggagccccgtacgcggtcacagcagagctcctaagtcacttcaaggtgaggstccgcatgggctcacctcgttccctctgttcacctctgttcctgcatgggctgggaatgcaggctggctgtgggctcctaggcggggcccaggaggtacc

SEQ ID NO: 218174 - DNA, 201 bp, Homo sapiens
ctcaccacagacctcatcgtccagcggatcatcaccaacaggtgcagttgggtgggggcacctcggagccgcctcatgggcgctctccgctagacttaccstgccctccccctcggagccgcctcatgggcgctctctgctagacttaccctgccctctcaggttggagtatgaggcgcgaaaccagaagaaggaagccaa

SEQ ID NO: 218175 - DNA, 201 bp, Homo sapiens
cctccctgagccagggcaggggggcttgggtcactggcagagctgcacccagcaccccgagttctgtggcacctgcccatacctgtttgttgaggcatgargaggggtggtcaggtctccagatgctgttccttcttgtctcatggaggagccccaggggtccccagcctgcccagcccatccctgctactcactggcagc

SEQ ID NO: 218176 - DNA, 201 bp, Homo sapiens
tgcatgaacggactctgagcgtgctggcctgccgggtgagtgggggccaggagccagcccaaggatggggagacattcccacaacatcccccctactaagkgcctccctgagccagggcaggggggcttgggtcactggcagagctgcacccagcaccccgagttctgtggcacctgcccatacctgtttgttgaggcatg

SEQ ID NO: 218177 - DNA, 201 bp, Homo sapiens
ctgtatcttaagttatgatctgtggttctgcatctccgtcagacacatgctttcttcacggggtcgtctgtaggccacgcctccctagtcagctgggaagrgggagagggtctggtccacctgccccagcggtacaagtggaaggtggggcccagagttgctagtgactcatccctggagacggaggcagccctggggcca

SEQ ID NO: 218178 - DNA, 201 bp, Homo sapiens; identical to SEQ ID NO: 39027

SEQ ID NO: 218179 - DNA, 201 bp, Homo sapiens
cgttaacactgactcactatgacttaaccatcagcaggtccaaaaattagactctcaactcctgagtctctgcagccaacaggccccatgttaacaaagcytgagcacactgtgtcagcggagacatgctgagtgttcagggcaacaccctctggatgccccatcacaggcccagctggcatgctgcagggcgggctctgc

SEQ ID NO: 218180 - DNA, 201 bp, Homo sapiens; identical to SEQ ID NO: 39029

SEQ ID NO: 218181 - DNA, 201 bp, Homo sapiens
tgtcactgcttagatgacatcaccctgactgtagatggccgggacacctatgaggaagtaaagcaggctgggaggtacaggtgagtctccaccgcgggccyggccatccagggagctggacacggggctccctcctggctcgtgctttgctatttaccgggagcccgtgaggggagcgtccaggccctgggccatgttcct

SEQ ID NO: 218182 - DNA, 201 bp, Homo sapiens
cactcaggaggagagatacaagatggtgcaggccatcaaatgggtggacgaggtggtgccagcggctccctacgtcactacactagagaccctggacaaayacaactgtgacttctgtgttcacggcagtgagtggcggggctgggacctgggggcctggggacatcaggtggctcaggatcagatctgctggtgggacat

SEQ ID NO: 218183 - DNA, 201 bp, Homo sapiens
cagctgagggtttggtgacctggtgagggcagcacctgggaggcctcccccgccaacctgctccctctcttggcttgcagtgccctggtgggcggaacccytggaccggggtatcccagttcctgcagacatctcagaagatcatccagtttgcttctgggaaggagccccagccaggggagacagtcatctatgtggctg

SEQ ID NO: 218184 - DNA, 201 bp, Homo sapiens; identical to SEQ ID NO: 39024

SEQ ID NO: 218185 - DNA, 201 bp, Homo sapiens; identical to SEQ ID NO: 39025

SEQ ID NO: 218186 - DNA, 201 bp, Homo sapiens
cctccacagacaccagacaggccggacctgccacaagtgtgggacccagctgcgggacaccattgtgcactttggggagagggggacgttggggcagcctytgaactgggaagcggcgaccgaggctgccagcagagcagacaccatcctgtgtctagggtccagcctgaaggtacgtgccgatgacacaatgagtgaacc

SEQ ID NO: 218187 - DNA, 201 bp, Homo sapiens
cagtcatgactcagggtttgacgagggccttggcgtttcacggagatgtttattcatgagagttttcatatcaaaacacaccgagaccacatctatatgcygagaacacaggcacccagaggcctccagcaagatttgagtagtttaatgagttttcacttattggataaaagtgtcaacatagtgatggcaaaacaaacg

SEQ ID NO: 218188 - DNA, 201 bp, Homo sapiens
ctgtgggtggcgacggccgctgcctccccggggagggctcctgaccccactccttctccaggtggacctggtgtgtcacggcaagacagaaattatccctkacagggatggctccgacccataccaggtgggtcatgctggcccttgctgggcacaggggttgccattggcacctcccagccatttaatgactcactgtgc

SEQ ID NO: 218189 - DNA, 201 bp, Homo sapiens
cacagatggcctcgcccacccgcggccccccagccctcctgtgggttgcgactgttgactgaaagcctgcaggcctggggccaccttgccagggcacagcwgtaggggagggcactgtaggctcacccagcccagccccagctgaggatggcctaatgcctttcccatcttgcatttcctgtcccagctaaagagaagggg

SEQ ID NO: 218190 - DNA, 201 bp, Homo sapiens
tcatcaatgcctgagaggtggcccccaggctggcctttgccagcatgttcaacagcttggagcagtcccagaagggtaagccatgctgcagacttggggcrtgggtgcagagctggctgagccactgggaaggggccttgctcacaggagcctgctcccgtcagggttcaggggcagttctagcaccccccatcccttcct

SEQ ID NO: 218191 - DNA, 201 bp, Homo sapiens
gtctgtgggtgcggccccctgacacaggcagggcaggcacagcccaaggaccttgcaggccgtagcagcagtggagcggccctctgccttcaggaccctgygctgataatgggatgaggagatacagacccttcccaccacgtgtggggacacattctgagcgtggggacacattctgagcgtgaggtcccagtggccact

SEQ ID NO: 218192 - DNA, 201 bp, Homo sapiens
attcagccacttagcagggccaaatcccctgatgttcctgttggctgtctagccttcagggacaggtcatggggccttggttcctgccctgtcatcttccyagtcaccctgatcttcagggggaggaatagcctgaaaaagggcttggtcatagcacctccaccctagggctattgaggatctcacagttgtgtgtctggt

SEQ ID NO: 218193 - DNA, 201 bp, Homo sapiens
caggctggcctttgccagcatgttcaacagcttggagcagtcccagaagggtaagccatgctgcagacttggggcgtgggtgcagagctggctgagccacygggaaggggccttgctcacaggagcctgctcccgtcagggttcaggggcagttctagcaccccccatcccttcctggccccatagcaccctcccacaatg

SEQ ID NO: 218194 - DNA, 201 bp, Homo sapiens
tcttggactaggtaagctcatgggtcctccggccgctcctgctctttccctgcctctgctcctcctcggaggtggccacccccagatcccagtcccaattyggaggccccctgaggagtgctgcagggggccgcaggcgtggctctgagccactctggagagtgggggtgcccagccagttctgtggctgggactttccca

SEQ ID NO: 218195 - DNA, 201 bp, Homo sapiens
agcatgttcaacagcttggagcagtcccagaagggtaagccatgctgcagacttggggcgtgggtgcagagctggctgagccactgggaaggggccttgcycacaggagcctgctcccgtcagggttcaggggcagttctagcaccccccatcccttcctggccccatagcaccctcccacaatgagtggtcaggaccatc

SEQ ID NO: 218196 - DNA, 201 bp, Homo sapiens
cctccagagccatctctgggacactggctgtgagttcagatgttctgaacagggacagggagagccagagggacccagcctggggctctctggaggggctygtgggcagacagtgccctttggagggaactgagtctgaaaggaaggaaaccctttccccggctcatagcacctgccatccagggccctgccagggctgcg

SEQ ID NO: 218197 - DNA, 201 bp, Homo sapiens
tatgctagcagacctcatggaccagggctcactggggcccacgctctgctctgtgcttttcacccacgagcttctcacaaccctccctgctcctttgggcwaggggatgctgtgtggattcccattttacagggtggggatgctgaggctcagacaggtcatgcaaatcagctgaggtcacacagctgggaggtggtgaag

SEQ ID NO: 218198 - DNA, 201 bp, Homo sapiens
gtgtggattcccattttacagggtggggatgctgaggctcagacaggtcatgcaaatcagctgaggtcacacagctgggaggtggtgaagctaaaattgawcccaggctgtctatatcctgccttttcaacaggcatcccattcactcatttgttcatttgtggggatggcgctctagaatgtgaggtggagtctctcttt

SEQ ID NO: 218199 - DNA, 201 bp, Homo sapiens
gtgtggggacacattctgagcgtggggacacattctgagcgtgaggtcccagtggccactgtggctggccatgtgtcctgagtggcaagggacactagaakgttcccggaagggacactaggaggatgagcgctgagtgacagggccacccacctgtgacaggcgctgcccctgctttgtgctggtctcctgtgtgggcag

SEQ ID NO: 218200 - DNA, 201 bp, Homo sapiens; identical to SEQ ID NO: 39040

SEQ ID NO: 218201 - DNA, 201 bp, Homo sapiens
actatcagccccaggcccaccaagcctggggaggtggccacccttccacgatggcatttggatgttccctgtgtgtggggagggcacagggactccattcrtagaccacctctgggacagtgtgtctgcctctgaggtcagacgctctgcactgggacagggtggagtggagggaaacccagcttggggctcattggaggg

SEQ ID NO: 218202 - DNA, 201 bp, Homo sapiens
gtggctgcagatgccaagcagtgctcggagattgggaggtgagcggggcagggcatgggacatgggccctgaaaactgggcaagtggacctgagcaatacsttcacccctctgagactcagtttccccacatgtaagcttcgcttggactccctcagtagcctttgggaaggggacggtgactccgagagcagggtgtggg

SEQ ID NO: 218203 - DNA, 201 bp, Homo sapiens
tcatgaatgcctcggaagaggagagggagaggggcaggggttgtgggttgggccgaggcacagctgggtggcccccaggctcacgtggcataaagggtttkggtgggtgggcctgcctacctgcttctccttctaggaaaagctgaggtcatcaatgcctgagaggtggcccccaggctggcctttgccagcatgttcaac

SEQ ID NO: 218204 - DNA, 201 bp, Homo sapiens
cctggcctgtctccccactctctgggcctcagtgtattgtgtgtgaaatggagccgtctggctggggaggaacagagaggtgggattcggagatcttcacratgcgggcactggaactagcctcagcatcttcagcatggggagagccgggcacatggctgggggccaggggaaggttcacaccaagccctgccccttccc

SEQ ID NO: 218205 - DNA, 201 bp, Homo sapiens
ggagggctgtgtctctggggctctgcaagggtgaggtggaggtaggctcaactggtgtacaagtcactcttcaatccttattttatttatttaattttttwaaaaaaaatttaaaccaatagagatggggtctcactatgttgaccaggctggtcttaactcctgacttcaagcagtcccccaatctcagtctcccaaagt

SEQ ID NO: 218206 - DNA, 201 bp, Homo sapiens
gagggctgtgtctctggggctctgcaagggtgaggtggaggtaggctcaactggtgtacaagtcactcttcaatccttattttatttatttaatttttttwaaaaaaatttaaaccaatagagatggggtctcactatgttgaccaggctggtcttaactcctgacttcaagcagtcccccaatctcagtctcccaaagtg

SEQ ID NO: 218207 - DNA, 201 bp, Homo sapiens
tgtgtgggcgcatcctgcagagggatcccacagaaggggagagccctgggttctttatctgactgggtctgggctgggggggcctctgtttcttggctgaygagtttatgtgagtttgagtgaggtatgcgggtgggtgaaggagggctggggggagtcacctgacttgtgcgaagaagctcttgagagagccgtggcttc

SEQ ID NO: 218208 - DNA, 201 bp, Homo sapiens
ctgtgtccataatagatgctgcatattgctggcccagctcctgaggctctttggacctccaggaatcggtgtctctatcaggaacccttaaccctgacccrgactcccggctgggacccagggtgttggagtggcaggagcgctgtcaggcttggtgaagggtgtgagctgtccaacggggcaaggaggaggcagggcctg

SEQ ID NO: 218209 - DNA, 201 bp, Homo sapiens
caggagaacgagaaggctgcctgatcagagagtctctgaagaagattctgtggctacaggcttcagcagagtgtgagggagaccccagttatttcctcagstgtttccaccaaatcctcctgtctttcgtggccaacaccccaggcaaggcttggggcccccgtctgctgctggacggtaagtcctggccccgtggcagtg

SEQ ID NO: 218210 - DNA, 201 bp, Homo sapiens
tgctgccatcttccaggctggacagttcagtgatttgcctgaggccccacagcaggtgagtggcaagtccagcatcagagcagggaaggctggcggtgccycctgagccccctttgccatgcttaccacatgcacatcctgggcttctgcaggaatgccctgtcccctacctgccctgctccgtgcaaaaccctctttgag

SEQ ID NO: 218211 - DNA, 201 bp, Homo sapiens
cccggccatgtgatgggaatgttctgtgtccataatagatgctgcatattgctggcccagctcctgaggctctttggacctccaggaatcggtgtctctaycaggaacccttaaccctgacccggactcccggctgggacccagggtgttggagtggcaggagcgctgtcaggcttggtgaagggtgtgagctgtccaacg

SEQ ID NO: 218212 - DNA, 201 bp, Homo sapiens
actactccaccgcctccagagccatctctgggacactggctgtgagttcagatgttctgaacagggacagggagagccagagggacccagcctggggctcwctggaggggctcgtgggcagacagtgccctttggagggaactgagtctgaaaggaaggaaaccctttccccggctcatagcacctgccatccagggccct

SEQ ID NO: 218213 - DNA, 201 bp, Homo sapiens
cgcaggcgtggctctgagccactctggagagtgggggtgcccagccagttctgtggctgggactttcccaggcagacaagtctgtctcttcctccccagcrggtgcagcccagaactgtcttctgaggaagaggtgctctcctgggcccccactgtccccaggcctcaggtaagcccatcagggtcacaaggaagggggtc

SEQ ID NO: 218214 - DNA, 201 bp, Homo sapiens
tttggagggaactgagtctgaaaggaaggaaaccctttccccggctcatagcacctgccatccagggccctgccagggctgcgtgaactttagtcatgcgrtgacaggccgagtcaccgtgccaagtcactgtgcgcctccttgctgctgtgacgtcagcttccccatcctcccagccaggctggatctctgtgagaggcc

SEQ ID NO: 218215 - DNA, 201 bp, Homo sapiens
ggcaccccctggctggtctcttggactaggtaagctcatgggtcctccggccgctcctgctctttccctgcctctgctcctcctcggaggtggccaccccyagatcccagtcccaatttggaggccccctgaggagtgctgcagggggccgcaggcgtggctctgagccactctggagagtgggggtgcccagccagttct

SEQ ID NO: 218216 - DNA, 201 bp, Homo sapiens
accctctttgagctgtgcctgggagacatgctgagagaattcatggaaacaaatgtgttactgacagcctctttgcctccagagttcaactggagacagaraaaccagctagaggcagagggaggtaacccggagtcccccagaaaggtctgggctgtgcgtgcttcaggtaacctcccttgaccttcaggagaacgagaa

SEQ ID NO: 218217 - DNA, 201 bp, Homo sapiens
tgtcttcctccgagccgtggacatctgcctgtgggaggctgggcccaccctcccttgctgacctgctctgggaggaagggacagggcccagcactgcctamtcccctccctgttcttcccagcagtctgagcctggctgggtgccccctgctcctccaggtgcctacttgggcctttgggtagagagattaacagacaggg

SEQ ID NO: 218218 - DNA, 201 bp, Homo sapiens
gagagccaggctccagtttgagaggcatgtgtcggggggcctgttcagcctcaccgtccagagagccgaggtcagcgacagcggcagctactactgccacrtggagtagtggctgctgagccccaactatgcctggtacaagctggcagaggaggtttctgggcgcacagaagtcactgtgaaacagccaggtaaggccgc

SEQ ID NO: 218219 - DNA, 201 bp, Homo sapiens
gtggagatgggggtttcaccatgttgtccaggctggtctccaactcttcacctcaggtgatccacctgcctctacctcccaaagtgctgggattataggcrtgagccactgcacccggccatgtgatgggaatgttctgtgtccataatagatgctgcatattgctggcccagctcctgaggctctttggacctccaggaa

SEQ ID NO: 218220 - DNA, 201 bp, Homo sapiens
cctgttggctgtctagccttcagggacaggtcatggggccttggttcctgccctgtcatcttcctagtcaccctgatcttcagggggaggaatagcctgaraaagggcttggtcatagcacctccaccctagggctattgaggatctcacagttgtgtgtctggtgggttctgtccagagcccatttgagagcagtggatg

SEQ ID NO: 218221 - DNA, 201 bp, Homo sapiens
agggtgtgagctgtccaacggggcaaggaggaggcagggcctgttctgtagttggacagacagagccctctagctgctttctggaagactgaagggcaggygatgttggagggagggagtgcaggcaggggctgtgagggagttcagatcagaaacaggtggcgcctggattcaggctgtggtggtcacggtggggatgag

SEQ ID NO: 218222 - DNA, 201 bp, Homo sapiens
aactctgtgccgcaagggtggaaactgtgagagacagattccaactccacttctgggtagtaagcatccagtccaggggtgtagacggtcttggggaagcygccagagatctgtacattctcatatccagggatagcgacttcaggctgggggctggcagggtaaggggtgggtgggtcccaggctcacccacaggtctgc

SEQ ID NO: 218223 - DNA, 201 bp, Homo sapiens
ggtgggcctgcctacctgcttctccttctaggaaaagctgaggtcatcaatgcctgagaggtggcccccaggctggcctttgccagcatgttcaacagctyggagcagtcccagaagggtaagccatgctgcagacttggggcgtgggtgcagagctggctgagccactgggaaggggccttgctcacaggagcctgctcc

SEQ ID NO: 218224 - DNA, 201 bp, Homo sapiens; identical to SEQ ID NO: 39039

SEQ ID NO: 218225 - DNA, 201 bp, Homo sapiens
ccttttcaacaggcatcccattcactcatttgttcatttgtggggatggcgctctagaatgtgaggtggagtctctcttttctaatctggtcttaagtggrgaggaggcccccaaattccccaggtacctgaagggaagccactgtccatccaggaagccactgtctgaccccaaaggaggcacaatagattgtgagataa

SEQ ID NO: 218226 - DNA, 201 bp, Homo sapiens
ttcatttgtggggatggcgctctagaatgtgaggtggagtctctcttttctaatctggtcttaagtggagaggaggcccccaaattccccaggtacctgargggaagccactgtccatccaggaagccactgtctgaccccaaaggaggcacaatagattgtgagataaaagttggaggatgggagggtctcaacaactca

SEQ ID NO: 218227 - DNA, 201 bp, Homo sapiens
gagtctctcttttctaatctggtcttaagtggagaggaggcccccaaattccccaggtacctgaagggaagccactgtccatccaggaagccactgtctgwccccaaaggaggcacaatagattgtgagataaaagttggaggatgggagggtctcaacaactcaacacctctaatcctagcactttaggaggccaagtca

SEQ ID NO: 218228 - DNA, 201 bp, Homo sapiens
tcttaagtggagaggaggcccccaaattccccaggtacctgaagggaagccactgtccatccaggaagccactgtctgaccccaaaggaggcacaatagaktgtgagataaaagttggaggatgggagggtctcaacaactcaacacctctaatcctagcactttaggaggccaagtcaggaggagtgcatgagcccagga

SEQ ID NO: 218229 - DNA, 201 bp, Homo sapiens
gaagccactgtccatccaggaagccactgtctgaccccaaaggaggcacaatagattgtgagataaaagttggaggatgggagggtctcaacaactcaacrcctctaatcctagcactttaggaggccaagtcaggaggagtgcatgagcccaggagacctgcctggacaacatagcaagactccatctctacaaaaaaat

SEQ ID NO: 218230 - DNA, 201 bp, Homo sapiens; identical to SEQ ID NO: 39092

SEQ ID NO: 218231 - DNA, 201 bp, Homo sapiens
gctaaggtgggaggatcacttgagcccaggaggttgaggctgcagtgagccatgattataccactacactctagcttgggcaacaaagtgagaccctgtcaaaaaaaaaaaaaaaaaggttgggcctttttttcacaggctcacgcctgtaatcccagcactttgggaggctgaggcagatggatcacctaggtcaggagt

SEQ ID NO: 218232 - DNA, 201 bp, Homo sapiens
aggacacactcaccatagcaggtcttagacttcaggtgggggtcctgggtggtgccctttggagtcttctgcaacatactcaatctttgatttttttttctttttttttttttttttttgagacggagtctcactctgtcgcccaggttggagtgcagtggtgcgatctcggctcactgcaagctctgcctcctgagttca

SEQ ID NO: 218233 - DNA, 201 bp, Homo sapiens
agattagaacttctcctgtcttggctgggcacggtggctcatgcctgtcatcccagcaccttggaaggctgaggtgggtggatgacctgaggtcaggagtytgaaaccagcctggccaacatggcaaaaccccatctgtactaaaaatacaaaaattagcctggcgtgctggcctgtgcctgtaatcccagcgactcggga

SEQ ID NO: 218234 - DNA, 201 bp, Homo sapiens
cttgctgctgtgacgtcagcttccccatcctcccagccaggctggatctctgtgagaggcctgcctgtcctgcaccctgtgcggatgcctcccactgtccrccagggctgctgggcaccccctggctggtctcttggactaggtaagctcatgggtcctccggccgctcctgctctttccctgcctctgctcctcctcgga

SEQ ID NO: 218235 - DNA, 201 bp, Homo sapiens
gctgctgtgacgtcagcttccccatcctcccagccaggctggatctctgtgagaggcctgcctgtcctgcaccctgtgcggatgcctcccactgtccaccrgggctgctgggcaccccctggctggtctcttggactaggtaagctcatgggtcctccggccgctcctgctctttccctgcctctgctcctcctcggaggt

SEQ ID NO: 218236 - DNA, 201 bp, Homo sapiens
cagggaaggatgtttagcggtggcctgggctccgtgctgccttcctcacactgaagccagtcggtgttaaatcccccaggaactgtgctggaggaaaactractcagagcctcgaggtggatgggccacgtttctgggagtctgtggtgattcctgtgttcccctttcctttgcagtgacaaagctgcaggtgagcaaatc

SEQ ID NO: 218237 - DNA, 201 bp, Homo sapiens
ccgttctctctctttgttcattcattcaccttttcattcattccttcttccctccattcccccatctgtccatccttccctgccctgattgctcacaccaccccccagcccctcctgacctggtcctttggtttctctttagggctttctgtctcctcccacagggctgagaatggcagctcagggacaagtgggggctgg

SEQ ID NO: 218238 - DNA, 201 bp, Homo sapiens
ggaccctggccgggctggctggaggcctcaggaagaggcctgctacatcgtcatcctggccaagattcctccctgcagaggaccctggccacactgccacrgggtctgctggggccaccagaagcccatgctcctgcctccatctctcccctctgtgctcacctctcaccaggaggccctcccagagttcagtgtcctgct

SEQ ID NO: 218239 - DNA, 201 bp, Homo sapiens
gagtgcaggcaggggctgtgagggagttcagatcagaaacaggtggcgcctggattcaggctgtggtggtcacggtggggatgaggggctgctttggattrtgctggggatgtgcggtggtgcgctgctgtgtggctactgccaggtctctctgctcttggtgtctgcatccagggctgggagggggtcaaatgtatcaca

SEQ ID NO: 218240 - DNA, 201 bp, Homo sapiens
gtagttggacagacagagccctctagctgctttctggaagactgaagggcaggcgatgttggagggagggagtgcaggcaggggctgtgagggagttcagrtcagaaacaggtggcgcctggattcaggctgtggtggtcacggtggggatgaggggctgctttggattgtgctggggatgtgcggtggtgcgctgctgtg

SEQ ID NO: 218241 - DNA, 201 bp, Homo sapiens
gcacggaatagacctcaggtggaggctgcaggggctctccggcactgtagaccaggatcaggggagggagccatgactcagggagactctggcccatatcsttggcagatgagggccacaggggaatgggcagcactgtccaaagtcccctgggctgggtccgcagctgttcctggctcagacttcttggtgggctggtca

SEQ ID NO: 218242 - DNA, 201 bp, Homo sapiens
ggtgtggaggttccggggagccctgcccctacctggcaacagcagtgcagcaggcaccaagttctcctgcacattgcgacagtgtgaccatgggctctggyaggcagtaggtggggcctttggacctaccagcagtgagggagttaacacagcagctgacttctctaggcaaagaaaactcccctcagacgctttgctgcc

SEQ ID NO: 218243 - DNA, 201 bp, Homo sapiens
ccaggccagtgtccccagagaggctgtgctgccagcacagtagtagcggatttggattcagggaagcagacctgcagccagggtgggaaagagctgcaggyggggtggggcccccacatggcacagcccccctccctggaggtccatgctgcatttccaggacagcaagtcccagggatggatggtgccgggtaccaaggg

SEQ ID NO: 218244 - DNA, 201 bp, Homo sapiens
gtgtccccagagaggctgtgctgccagcacagtagtagcggatttggattcagggaagcagacctgcagccagggtgggaaagagctgcaggtggggtggrgcccccacatggcacagcccccctccctggaggtccatgctgcatttccaggacagcaagtcccagggatggatggtgccgggtaccaagggctagaggc

SEQ ID NO: 218245 - DNA, 201 bp, Homo sapiens
gaggcaggagaattacttgaactcgggaggtggaggttggagtgagccaagattgtgccattgcactccagcctgggcaacaagagtgaaactccatctcaaaaaaaaaaaaaaaaagccacatgtagtggggtatgtctgtagtcttaggtacttcagaggctgaggtgggaggatcgcttgagcctgggaagccaaggc

SEQ ID NO: 218246 - DNA, 201 bp, Homo sapiens
aggcaggagaattacttgaactcgggaggtggaggttggagtgagccaagattgtgccattgcactccagcctgggcaacaagagtgaaactccatctcaaaaaaaaaaaaaaaaagccacatgtagtggggtatgtctgtagtcttaggtacttcagaggctgaggtgggaggatcgcttgagcctgggaagccaaggct

SEQ ID NO: 218247 - DNA, 201 bp, Homo sapiens
ccagctgggacaacagagtgagaccctgtctcaaaacagacaaacaaacaaaaacccttatagttggatggagaaactgaggctgggagaggggacaggayggaggttaaggctcagtcttgcctatctggggcagtagaaaagaggaagggagccctttcttggggctggctgtgtcttgaaggtggcctgtgcttgacc

SEQ ID NO: 218248 - DNA, 201 bp, Homo sapiens
cctgggacagcaaaacccagccgcatgctactgcttcccctcctgtgccctcctcagacatccctggtccatgtacactcctacctgctaagcccctcttaaaaaaaaaattaaacatcccctcctaaaaaaaataataaaataaaaatcaggaggctgaggtgggaggattgcttgaatccaggagttcgagatcaggct

SEQ ID NO: 218249 - DNA, 201 bp, Homo sapiens
gaggatgagcgctgagtgacagggccacccacctgtgacaggcgctgcccctgctttgtgctggtctcctgtgtgggcaggtgtggggggtggtctagctragtccaccccacctgctgcctcacatgagccccctctgccccagtgaggtgttctgccgggatagaaaggtgcttcgggagggggagagactgaccctgc

SEQ ID NO: 218250 - DNA, 201 bp, Homo sapiens
cagtgactagccatgtgggtccacagctcctgcttatatcaaaaccaagagaggccacacagtccaggagagcaagtccctgttggggtaaatgcaggtgwaggcaagagccagggctagggaagcactagaatacagcctgaagatccaggaggacttcttggaggaggtggcggctgggctgcagataactttgttagg

SEQ ID NO: 218251 - DNA, 201 bp, Homo sapiens
agctagatttgtatttcagcaggatcaccctcagaggccctgtgatggtgggctgtgcaggcagtggataggggagagatggtgaaggcctaagccaggcrcatggcaaggaggagacagggaaggatgtttagcggtggcctgggctccgtgctgccttcctcacactgaagccagtcggtgttaaatcccccaggaact

SEQ ID NO: 218252 - DNA, 201 bp, Homo sapiens; identical to SEQ ID NO: 39034

SEQ ID NO: 218253 - DNA, 201 bp, Homo sapiens
aaaaaaagtattgagaatctacataaatatagtgggggtgggggtggggaacaagaaaacaaaaaattcaaagcatagtgaaaagaaatatagcaaaaccyggccgtgcatggtggctcatgcctgtaatcccagcactttgagaggtcgaggcgtgtggatacggggtcaggagatcgagaccatcctggctaacacagt

SEQ ID NO: 218254 - DNA, 201 bp, Homo sapiens
agtattgagaatctacataaatatagtgggggtgggggtggggaacaagaaaacaaaaaattcaaagcatagtgaaaagaaatatagcaaaacctggccgkgcatggtggctcatgcctgtaatcccagcactttgagaggtcgaggcgtgtggatacggggtcaggagatcgagaccatcctggctaacacagtgaaacc

SEQ ID NO: 218255 - DNA, 201 bp, Homo sapiens
tcaccatgttggtcaggctggtctcgaactcctgacctcaggtaatccacccacctgggcctcccaaagtgttgggattacaggtgtgagccaccatgccyggcttattcttttctttttattttttggttaggagacaatttctttctttcttttttttattttattttattattattatactttaagttttagggtaca

SEQ ID NO: 218256 - DNA, 201 bp, Homo sapiens
cgtaggcctccagctcaccctgccgatgacactggcggtgaagctgaggtccgaggaatggggactgggcaacaggctggaggaaaacatctcggtcagarccacgcccctcgggggttcccaagagcaagcccagagtgaaacccaagcttgtgatcctctccagagggaggcctggttctcagggaacagcaaacggga

SEQ ID NO: 218257 - DNA, 201 bp, Homo sapiens
gcagtgacactacctaggatcagccaccagggggtgtcacgaccctggcgctttcttaggcagagggtggccagctgatgctgggaacctgggcgccttcycagacccgtaggcctccagctcaccctgccgatgacactggcggtgaagctgaggtccgaggaatggggactgggcaacaggctggaggaaaacatctcg

SEQ ID NO: 218258 - DNA, 201 bp, Homo sapiens
tattatgtttttcatattttgagacagggtcttgttctgtcacccaggctggagtgcagtggcatgatcatagctcactgcagccttgaactcttgggctyaagcgatcctcccacctcagccccctgagtagctaggactacaggcgtgcatcacacctgactaatttaaaaagactgttttgtagagacggtctcactc

SEQ ID NO: 218259 - DNA, 201 bp, Homo sapiens
gcagtggcatgatcatagctcactgcagccttgaactcttgggctcaagcgatcctcccacctcagccccctgagtagctaggactacaggcgtgcatcayacctgactaatttaaaaagactgttttgtagagacggtctcactctattgcccaggctggtcttgaactcctggcctcaagtgatcctccaccttggcct

SEQ ID NO: 218260 - DNA, 201 bp, Homo sapiens
cactgcagcctcaaactcttggatttaagtgatcctcccgcctcagcttcctaaagtgctgggattacaggtgtgagccatggtgcctggcttctactgtkttattctattttgggctcttatctcatgttatatataaagatcagttcccttctaaagacttaaacagaaaaaatattatgtttttcatattttgagaca

SEQ ID NO: 218261 - DNA, 201 bp, Homo sapiens
ctaatcccctccctgttcttcccagcagtctgagcctggctgggtgccccctgctcctccaggtgcctacttgggcctttgggtagagagattaacagacrggggaggctgggtcatggttggaccaccccaggatcctgactgggggctcagctcatgaccctgagcctgggagagatgaggccatgccctccagggcac

SEQ ID NO: 218262 - DNA, 201 bp, Homo sapiens
acttgtggtggaaatgtccttttgtttttgttttttgcttttttttttgagacggagtttccctcttgttgcccaggctggagtgcagtggtgcaatcttkcctcactgcaacctccacctcccgggttcaagcaattctcctgactcagctcctgagtagctgggattacaggcacctgccaccatgccaggctaatttt

SEQ ID NO: 218263 - DNA, 201 bp, Homo sapiens
agctgggtggcccccaggctcacgtggcataaagggtttgggtgggtgggcctgcctacctgcttctccttctaggaaaagctgaggtcatcaatgcctgmgaggtggcccccaggctggcctttgccagcatgttcaacagcttggagcagtcccagaagggtaagccatgctgcagacttggggcgtgggtgcagagct

SEQ ID NO: 218264 - DNA, 201 bp, Homo sapiens
tgaggcaggagaatggcgtgaacctgggaagcggagcttgcagtgagccgatatcatgccactgcactccagcctgggcgatagagtgagactccgtctcaaaaaaaaaaaaatagcaaaacacaacaaaaaaaattaaaatttgctgggtgtagttgtgcctttagtctcagctactggggagggtctgctggaggatca

SEQ ID NO: 218265 - DNA, 201 bp, Homo sapiens
acaggagtcatcaggaaggagagaggtgcaggagctcagggctgcagggcctggtccagagggtaccctggtccagtgggtgaccctgccacttggtcacygaatggccagagctgatgcgtgacgtgaggtccaggctcgggagccctcaccttacttcactctcaccacagccttctgaagcagctgctgctattggtt

SEQ ID NO: 218266 - DNA, 201 bp, Homo sapiens
cctgctgtcccttctctttacctacagtaggctcccttggctgttttgtttttgttgtgtttttgtttggacacagagtctctgtcatccaggttggagtrcagtggtgtgatcttggctcactgcagcctcaacctccatggctcaagcaatcctcccacttcagccccctgagcagctgggaccagaggcacgtgccac

SEQ ID NO: 218267 - DNA, 201 bp, Homo sapiens
atcttcatcctcttctccccaccccactccattcactctctgcctatcgctcaccagcctataccacctgcctcagggcctttgcactgaccatttaggcygcattccaggctcttttcacacgttgcctcctctgagaagccctccctgaccactctgcccatacctcatgcctcttgattccccttacctggcttgtgg

SEQ ID NO: 218268 - DNA, 201 bp, Homo sapiens
tcttcatcctcttctccccaccccactccattcactctctgcctatcgctcaccagcctataccacctgcctcagggcctttgcactgaccatttaggctrcattccaggctcttttcacacgttgcctcctctgagaagccctccctgaccactctgcccatacctcatgcctcttgattccccttacctggcttgtggt

SEQ ID NO: 218269 - DNA, 201 bp, Homo sapiens
ccactccattcactctctgcctatcgctcaccagcctataccacctgcctcagggcctttgcactgaccatttaggctgcattccaggctcttttcacacrttgcctcctctgagaagccctccctgaccactctgcccatacctcatgcctcttgattccccttacctggcttgtggtttcagcactttccctgtgtgtg

SEQ ID NO: 218270 - DNA, 201 bp, Homo sapiens
ctgatgttcctgttggctgtctagccttcagggacaggtcatggggccttggttcctgccctgtcatcttcctagtcaccctgatcttcagggggaggaayagcctgaaaaagggcttggtcatagcacctccaccctagggctattgaggatctcacagttgtgtgtctggtgggttctgtccagagcccatttgagagc

SEQ ID NO: 218271 - DNA, 201 bp, Homo sapiens
ggcccaggcaaggtcgggcgctgtctgaccctgctgggcggtagctttggctccaaggtctgctccccggtcagcgggatcctgttcaataatgaatggaygacttcagctctcccagcatcaccaatgagtttggggtacccccctcacctgccaatttcatccagccaggtatggggtggaggtccgggggtgggggac

SEQ ID NO: 218272 - DNA, 201 bp, Homo sapiens; identical to SEQ ID NO: 39038

SEQ ID NO: 218273 - DNA, 201 bp, Homo sapiens
ggggctgtgctctggtttcacccttgtggctctggggttgtggtgacaaagccatcaagctgggttgaaggattaaccaggaaacctcagactggctgccktgtctacctcttcctcctactcctctctctgctacatcctgggaagctgctctgctcagcctagatgaggctcagttgtgtgtgtgtgcacgtgcttgca

SEQ ID NO: 218274 - DNA, 201 bp, Homo sapiens
gggcctggggtgctaatgtttctggatgggcagcagaaccagtctgcactcagggccccaggccatgttcctggaacacacctttagcattgacagcagcrtgtggtgaggccccttagtctgggttctggtctagtgccaggggcaccactactccaccgcctccagagccatctctgggacactggctgtgagttcaga

SEQ ID NO: 218275 - DNA, 201 bp, Homo sapiens
cttcccctgtgagcagcagagcagcataataaatgaggccactgtgccaggctccaggtggcctccctggcctgtctccccactctctgggcctcagtgtwttgtgtgtgaaatggagccgtctggctggggaggaacagagaggtgggattcggagatcttcacgatgcgggcactggaactagcctcagcatcttcagc

SEQ ID NO: 218276 - DNA, 201 bp, Homo sapiens
tctgctacatcctgggaagctgctctgctcagcctagatgaggctcagttgtgtgtgtgtgcacgtgcttgcacgtgtgttggaagtgggtggtattgacrccagagtcagtgtctccgggtgagtgaggcttgcacatttctcgggacagggaactcactaccttatgtgcccaggacaagagctgtggggtctggagaa

SEQ ID NO: 218277 - DNA, 201 bp, Homo sapiens
cagcagcatgtggtgaggccccttagtctgggttctggtctagtgccaggggcaccactactccaccgcctccagagccatctctgggacactggctgtgmgttcagatgttctgaacagggacagggagagccagagggacccagcctggggctctctggaggggctcgtgggcagacagtgccctttggagggaactga

SEQ ID NO: 218278 - DNA, 201 bp, Homo sapiens
actacactccagcctggcaatagagcaagactccatctcaaaacaaaaaagaaagaaactaaaaacaaaaaccccaaaactcgaatggacttctcttccaycctcctttgggcaggtaggcagcagggtatgtatgcggtgccagggtggaagcctgcaggttctcatgcctttatgtgccacatggcagggacacactgc

SEQ ID NO: 218279 - DNA, 201 bp, Homo sapiens
agctgctctgctcagcctagatgaggctcagttgtgtgtgtgtgcacgtgcttgcacgtgtgttggaagtgggtggtattgacgccagagtcagtgtctcygggtgagtgaggcttgcacatttctcgggacagggaactcactaccttatgtgcccaggacaagagctgtggggtctggagaagacttctaggccagccc

SEQ ID NO: 218280 - DNA, 201 bp, Homo sapiens
gtggagtgttactctgtcacccaggctggagtataggggagcgatcatagcccactgcagcctcaaactcttggatttaagtgatcctcccgcctcagctycctaaagtgctgggattacaggtgtgagccatggtgcctggcttctactgttttattctattttgggctcttatctcatgttatatataaagatcagttc

SEQ ID NO: 218281 - DNA, 201 bp, Homo sapiens
aggccctacctctattaacatgtcctttgataaagtgcctcccctcctgtctcccctctctggaatcctcagctgctgccaggcttcagctgtgccccatkgaaggcagctctgtctccctactttccccagcccagggttttccttttggggtcagctgcagggatctgggccatcctttacccactcagactttcttcc

SEQ ID NO: 218282 - DNA, 201 bp, Homo sapiens
ctaaaaacaaaaaccccaaaactcgaatggacttctcttccatcctcctttgggcaggtaggcagcagggtatgtatgcggtgccagggtggaagcctgcwggttctcatgcctttatgtgccacatggcagggacacactgcgggatggtggctctgcggtggatgcagccattgcagccctgttgtgtgtggggctcat

SEQ ID NO: 218283 - DNA, 201 bp, Homo sapiens
cctttggagggaactgagtctgaaaggaaggaaaccctttccccggctcatagcacctgccatccagggccctgccagggctgcgtgaactttagtcatgygatgacaggccgagtcaccgtgccaagtcactgtgcgcctccttgctgctgtgacgtcagcttccccatcctcccagccaggctggatctctgtgagagg

SEQ ID NO: 218284 - DNA, 201 bp, Homo sapiens
ggggtcagctgcagggatctgggccatcctttacccactcagactttcttcctgcccacctgctgctgtgaatcctgtatgtcatatatatatatatatawtatattatataatatattatataattattatatttatgtaatttatataatatattataatatattataaatatatatagtattatatataaaattatac

SEQ ID NO: 218285 - DNA, 201 bp, Homo sapiens
caccccaccacaggccccagtgtgtgatgttccccttcctgtgtccaagtgttctcattgttcaattccaacctatgagtgagaacatgcatgtcttatakgctctcaggcagagaggaaactgctgagcagggcaggggacagagccctatggctctccactttagacccctcccggctgactgccatggaattcagcca

SEQ ID NO: 218286 - DNA, 201 bp, Homo sapiens
cagcatccagctggcccgccagggcttccccgtgggcaagggcttggcggcagtcctggaaaacaagcggaccgtcatcgagcagcagcctgtcttgtggyatgtctgtgggtgcggccccctgacacaggcagggcaggcacagcccaaggaccttgcaggccgtagcagcagtggagcggccctctgccttcaggaccc

SEQ ID NO: 218287 - DNA, 201 bp, Homo sapiens
acagctgggtggcccccaggctcacgtggcataaagggtttgggtgggtgggcctgcctacctgcttctccttctaggaaaagctgaggtcatcaatgccygagaggtggcccccaggctggcctttgccagcatgttcaacagcttggagcagtcccagaagggtaagccatgctgcagacttggggcgtgggtgcagag

SEQ ID NO: 218288 - DNA, 201 bp, Homo sapiens
cctctcgcagggaccggcccagaccagcggcgaacttctgcacacagctccagtgtttgcctgtggacgagagacaggcaaggggtcagggagggcagagsacacccacatgaacagtcccagtcctggtgctcccacaagctccgtgcccccttggcagcctgagcccctctacgtgtcctcacgcactctggatctcga

SEQ ID NO: 218289 - DNA, 201 bp, Homo sapiens
gcagtcagatcagtgtggtcctcccactaggagcccagactccccaggtaccaacaccaccatgggcctccgtggctccccgccaggtcccattgtgccayctcccagaggggccaggagggtctgcatttacgcccaggagctgtacctcttcaggagccccagagcctggaaagaagttcccgttgtcatagcgatgca

SEQ ID NO: 218290 - DNA, 201 bp, Homo sapiens
ggcctcgccccactgttatcctcccagagacaaccccctctacccacactgaactgagtgccttctgcccctcccactgcagggcccagaggggctcccaytgactaccatggcccttttcagtccctacctgaaggctgtaaggtactccacgtctccaatgggggggtccacacctcctgtccatgccacgttcacatt

SEQ ID NO: 218291 - DNA, 201 bp, Homo sapiens
tcacctgcttgggcctctcgcagggaccggcccagaccagcggcgaacttctgcacacagctccagtgtttgcctgtggacgagagacaggcaaggggtcrgggagggcagaggacacccacatgaacagtcccagtcctggtgctcccacaagctccgtgcccccttggcagcctgagcccctctacgtgtcctcacgca

SEQ ID NO: 218292 - DNA, 201 bp, Homo sapiens
ttacgcccaggagctgtacctcttcaggagccccagagcctggaaagaagttcccgttgtcatagcgatgcagagagatgtagagcacagaggggtcattrtagaacgcctgctgggtgccattgccatggtgaatgtcctatgaggggaggtagaagcatcgggaaaatggcccgcgctctgacccaatggtcaaattcc

SEQ ID NO: 218293 - DNA, 201 bp, Homo sapiens
atggctcaagctgagcccggcagatgaccaggccaggcctcgccccactgttatcctcccagagacaaccccctctacccacactgaactgagtgccttcygcccctcccactgcagggcccagaggggctcccattgactaccatggcccttttcagtccctacctgaaggctgtaaggtactccacgtctccaatgggg

SEQ ID NO: 218294 - DNA, 201 bp, Homo sapiens
gggcttttgctgcaagactgcctcatccaagggctgcagctggcaggggaaagaagagaaggcttagggtggggagtagggttgccatgcatacccctctractgccccactcagccccagatatccctcacaacaggggcaaacatggcctttttggacaaacgcatactcagaaagcctggccattagctgttccttag

SEQ ID NO: 218295 - DNA, 201 bp, Homo sapiens
acgcatactcagaaagcctggccattagctgttccttaggaccaaggaaaagcttcctaaggggctcccagtgctggctgaccccttgctggcccctcagmcctctggcctgccacctcccagctccttcccaccccttacctctacactgagcagagccgagacacaagcctcagaggcatcacagatggcggtcaagtc

SEQ ID NO: 218296 - DNA, 201 bp, Homo sapiens
ttttcagctgaagaaggagttgggggcaggggggcattctaaaattaccagcagaatggagcaaagcctagaagcacaaaagagtgcaagttcaggaacaytgaaaggtcagggtggctggaaagattgtagcgagagctttgagatgctgcccattaacacttagaatgcaaaggtttatctttcaaaatctaattgcat

SEQ ID NO: 218297 - DNA, 201 bp, Homo sapiens
atgttaagctcctgctatgggcctcagccctgggagacaaggatcctgctcaggaggcccgtagcccagtagggaaacagacaaggatgacggcaatcatrattcagtgtggctagaggggagcaaagagggatgtagggacttagacagggatgattaattctgtggaatggggtaggtaattcaaagaaatgtatttaa

SEQ ID NO: 218298 - DNA, 201 bp, Homo sapiens
tgggatagaagggaatgtatggattcagggagatggcttagaaccctaagattcatggtagcagggtctcgagcaggggcttgcttgagcaagcaggtccygtggagcaggtttgtcttaactctcgttgtctttctgaatgggtatcaaagaggggcttcctgcagcctggatgaccggggctgccttcctttgtttgtg

SEQ ID NO: 218299 - DNA, 201 bp, Homo sapiens
tgagccactgtgcccagcctgatcaaggtcttgagaggtgaattttttcagctgaagaaggagttgggggcaggggggcattctaaaattaccagcagaakggagcaaagcctagaagcacaaaagagtgcaagttcaggaacattgaaaggtcagggtggctggaaagattgtagcgagagctttgagatgctgcccatt

SEQ ID NO: 218300 - DNA, 201 bp, Homo sapiens
tttctcaccctgagtactccacaccaaaggccccagtggaactagctccatgcagtccaggagctgcatgttaagctcctgctatgggcctcagccctggkagacaaggatcctgctcaggaggcccgtagcccagtagggaaacagacaaggatgacggcaatcatgattcagtgtggctagaggggagcaaagagggat

SEQ ID NO: 218301 - DNA, 201 bp, Homo sapiens
ttggggacttgtttcatgaacagctccctgtaggatctctgttggggtgggggattctaggggcatctccgcagttttcttctgaaaacaaaacgaatacmagttgggcaggtgcaacaactgtgcatgcagtcccctcccagggctggctagcagtattgttgggtaccgtaagcacttagcattgttaagtgagcataa

SEQ ID NO: 218302 - DNA, 201 bp, Homo sapiens
ttttacaagatataacatcttagggagaataagccattttggcactgataagaaggtgtttgtgggttttgagagcctggctttggcgaccccgctaagtrtggggtgcatattccttgtgggttttggtggccacgaatgccctactgtgacaccaaagagtagactttaaaacagatgggtggggcctattaggtggta

SEQ ID NO: 218303 - DNA, 201 bp, Homo sapiens
cacatgcttattatgcaccaggcattttttaagcacgttgcatgtaattgctttaattttctcagtgaccttctgagatagataggtactcatgatccccrtggagaggaggaaacagaagcacagtgagatcaagtggcttgcccaaggtcacatagtaggcatggagcagagccaggatgtgaacctgagtagtctcat

SEQ ID NO: 218304 - DNA, 201 bp, Homo sapiens
agaagggcaatttcacgttcgccatgtccatatttctatcgtcatgagccatctcaccttacaggcagggaagttttgagcttagagaatgggatgtgtcmagaaaaccgtggctcccccagctctgttcctggattcagtgcctgttgtttcatcctgtgtagactggagtcagggtctacacagttggaattctatgga

SEQ ID NO: 218305 - DNA, 201 bp, Homo sapiens
ttggctatctcgcctggcttttgctgacttacagtctaaacacataaacttttgccatggcaaacccccaagactactctgtgtaggattagctatattayctccatgtcacaggtggggaaacagagtcaaagagtgatttttcacaagctcacataatcagcagtgaaaccaagtctaaaaaaccagcttctggtgtca

SEQ ID NO: 218306 - DNA, 201 bp, Homo sapiens
catatatttgatccttctacaaaagggaactgtttggaaatactatttttgaattcctagttttcagacccagagcagccactctcacttgctatttaataattaatatatgtggaagttttgcttactgcaaaatgatcgatatttatcaggtgacctggaatctctcctcgagccctcattggtgaggagtcgctgttg

SEQ ID NO: 218307 - DNA, 201 bp, Homo sapiens
acagagaagggcaatttcacgttcgccatgtccatatttctatcgtcatgagccatctcaccttacaggcagggaagttttgagcttagagaatgggatgygtccagaaaaccgtggctcccccagctctgttcctggattcagtgcctgttgtttcatcctgtgtagactggagtcagggtctacacagttggaattcta

SEQ ID NO: 218308 - DNA, 201 bp, Homo sapiens
atatatttgatccttctacaaaagggaactgtttggaaatactatttttgaattcctagttttcagacccagagcagccactctcacttgctatttaataattaatatatgtggaagttttgcttactgcaaaatgatcgatatttatcaggtgacctggaatctctcctcgagccctcattggtgaggagtcgctgttga

SEQ ID NO: 218309 - DNA, 201 bp, Homo sapiens
tatatttgatccttctacaaaagggaactgtttggaaatactatttttgaattcctagttttcagacccagagcagccactctcacttgctatttaataattaatatatgtggaagttttgcttactgcaaaatgatcgatatttatcaggtgacctggaatctctcctcgagccctcattggtgaggagtcgctgttgac

SEQ ID NO: 218310 - DNA, 201 bp, Homo sapiens
acctcctcccctccttgcccttgctgagatctcaattttgattgaggatttccctggccacctcttacacttgccgtctgcctccagctctccaccacccygagcctctttccttgtctacatttttgtatacaaccttatcaccttctcgcatgctttggaatttatttttctgctttccctactagaatatggtctcta

SEQ ID NO: 218311 - DNA, 201 bp, Homo sapiens
ggcctacccacaggggaggaaggcggttgtgttcctgctccccagtgccagctgtttgcaccctggctgcctctagctcttggacccctcctttggtgacytcttccgggtctttggctggcagacctgatccagtgtcgctccttggacataaaaacccacctctgtcaggcactgggaacagtcactggctgcttacac

SEQ ID NO: 218312 - DNA, 201 bp, Homo sapiens
tgttcagtgaaagaggctgaggtcaagaagggggacaggaggaagacagtgctggtggccagtgctatctctgttttaaaagtttaagcaagttttaaactttaaccttttataatttttgttgaagagctccagcatcaaagggtggcctggtccctctgtccatatcccagatgtgttcccagggagcaggtcagggct

SEQ ID NO: 218313 - DNA, 201 bp, Homo sapiens
cccctggttgctcctgcagtcagggcgagatggggctgagacaggggaatgggagagtgcctggaaggtggtggcagcagtgggaccacgagagctctccraggggagataaggcagttgatgggggagtgaaagaaagatgcaaatcaggctttccctggctggcccatatggagaatgggttcctggcctaggagggtt

SEQ ID NO: 218314 - DNA, 201 bp, Homo sapiens
ttgtgtcccatccacccgcctcccccaaccccactcttggccgtgatccatccttcccacatcccttcaggcagccaatgcccagggtcaccgcacttctaagtctctagggtgctgaggctgtggctgggctgggcttgggaaacatcagatgggagtctctgaaggatgctttatgtctcagaaacctctgctcctgcc

SEQ ID NO: 218315 - DNA, 201 bp, Homo sapiens
ccaaggggagataaggcagttgatgggggagtgaaagaaagatgcaaatcaggctttccctggctggcccatatggagaatgggttcctggcctaggaggrttccctttgccctccacatccactcctcacctttcccaacactgcttttggtcccagaaggctgatctctacggactgcatcaaacaggcttccatgcct

SEQ ID NO: 218316 - DNA, 201 bp, Homo sapiens
ggaaaaaaagccagaatacactgtttcgtttgtacaaataaggattataaatagctgttgtggagaggaggtaaagtaggaggcagtgtggagagagtggkgtgccatggttagccctgactcagtgccgtaggggcccaggtcctgttgatctggagatggtacatgtgtctgtctctgagcgaacgtcgcctcactcct

SEQ ID NO: 218317 - DNA, 201 bp, Homo sapiens
tgggggagtgaaagaaagatgcaaatcaggctttccctggctggcccatatggagaatgggttcctggcctaggagggttccctttgccctccacatccaytcctcacctttcccaacactgcttttggtcccagaaggctgatctctacggactgcatcaaacaggcttccatgcctctggctcacaggtgggcatggcc

SEQ ID NO: 218318 - DNA, 201 bp, Homo sapiens
tgtcttgaccaacatctgttcagattggttgggtgttctgcctgggcagtgcccatctgttccagttgttaagtattttgaatagtatttctgtgcggagktctcattaatctacaactccagtggctgagctacctggccacagaactgtagacatttgcactggaaaaatgaggaagaagagttcagtagcaggatgcg

SEQ ID NO: 218319 - DNA, 201 bp, Homo sapiens
gcagttcacctgaggtcaggagttcgagaccagcctggccaacatgttgaaaccctgtccctactaaaagtaaaaaaaattagctgggtgtggtagtataygcctgtaatcccagccacttgggaggctgagtcaggagacttgcttgaacctgggaggcggaggttgcagtgagctgagatcatgccactgcaccccaga

SEQ ID NO: 218320 - DNA, 201 bp, Homo sapiens
acttggattcagagatgaatgctcgaagatagctttcttgctgtcagccttgaaagttcaggaaaaaggtgtatcctatgcatatgttcatgacacacacrcatacacagctgcaggtgtgtagagactgcggtgtatagtacctgcactcacacacacgtgcatccatacataaaacacatacacatcctcacctatcag

SEQ ID NO: 218321 - DNA, 201 bp, Homo sapiens
atccactcctcacctttcccaacactgcttttggtcccagaaggctgatctctacggactgcatcaaacaggcttccatgcctctggctcacaggtgggcrtggccgtggaggcatctggcagtggctgtgctcttccgtgaacaatgctcccagccacagctcttgctgggctcctggaaggactctctcccttgacccc

SEQ ID NO: 218322 - DNA, 201 bp, Homo sapiens
tgtaatcccagcactttcagaggccgaggcaagcagttcacctgaggtcaggagttcgagaccagcctggccaacatgttgaaaccctgtccctactaaawgtaaaaaaaattagctgggtgtggtagtatacgcctgtaatcccagccacttgggaggctgagtcaggagacttgcttgaacctgggaggcggaggttgc

SEQ ID NO: 218323 - DNA, 201 bp, Homo sapiens
gaatttgttatgcccagagagctctgttctagaaagcagaacatggaaaataaaatctggctttataaatacatttagacttagggttttaaaaatgtataaatatatatttaatcttgaagaattttaaatatttcatgggccattgctcatggcttggtacctctaattggtgaaccttggtggcagagacactgcttt

SEQ ID NO: 218324 - DNA, 201 bp, Homo sapiens
ccaggagaggaggtaccaggatgttctgaggaccatggccctggggcctcttcctattttttctgttgtgtacttagagaagctggtgggtccagtgctcyctccccatcttctatgactaacactttgctcctggataattgatctactggttctgacttacttctcaactagaatcctttcttaatgaaaagccagaga

SEQ ID NO: 218325 - DNA, 201 bp, Homo sapiens
ttggaggaagaggtgggagggaagtgagggataaaagatacacaatggggccaggcacagtggctgtgcctgtaatcccagcactttcagaggccgaggcragcagttcacctgaggtcaggagttcgagaccagcctggccaacatgttgaaaccctgtccctactaaaagtaaaaaaaattagctgggtgtggtagtat

SEQ ID NO: 218326 - DNA, 201 bp, Homo sapiens
gaagcagatgctgctcgtctccatccttagtgcagagttggcaggggacaggggttggggggtgccttcaagacaatgaagacttttggaaggatcactaygcagggagtacagacctagacaggaaacattcctggccaggaatgccaaggtcattggcaatctggtgtcaaggcctggagaaatgcatttataaatgag

SEQ ID NO: 218327 - DNA, 201 bp, Homo sapiens
cttctatgactaacactttgctcctggataattgatctactggttctgacttacttctcaactagaatcctttcttaatgaaaagccagagaccacagggrccccaaatctgtctttttctatgtctgtgtgttttcaagaatttgcatctttgtgtctttctaacttttgggaagaccaagagcaaccctcactgttttg

SEQ ID NO: 218328 - DNA, 201 bp, Homo sapiens
aaaagggaacactttcatcattacatttctgagatacatccctgctattacctgtagttgtaatttgttcatttttactactatgtagtattccattttayaaatatactataattcatgatctattcaactgctgatggacacttggactatggccagtttggaagtatcatgaatactgctgctatgaacaaccttgat

SEQ ID NO: 218329 - DNA, 201 bp, Homo sapiens
aaaaccaaccctggtaaccacgacacctaaaggtacatcatctctactaggaaggattcagagcactgggaaagccctagaaatcccaggtccaattaatmattccataggacaattcattagaatgcacaagtgcttaactaaacaaaaccataatcgaacttgtcagaagtgatccacggttgtgttaaaattttctca

SEQ ID NO: 218330 - DNA, 201 bp, Homo sapiens
actccttcaagaatggcctaattaaaaagtcaaaaaccaatagatgttggcatggatgtggtgaaaagggaacactttcatcattacatttctgagatacrtccctgctattacctgtagttgtaatttgttcatttttactactatgtagtattccattttataaatatactataattcatgatctattcaactgctgat

SEQ ID NO: 218331 - DNA, 201 bp, Homo sapiens
cagagcactgggaaagccctagaaatcccaggtccaattaataattccataggacaattcattagaatgcacaagtgcttaactaaacaaaaccataatcraacttgtcagaagtgatccacggttgtgttaaaattttctcattcgcacatcatttcctctacaatttagttagataacaaacactacttatcccatcac

SEQ ID NO: 218332 - DNA, 201 bp, Homo sapiens
gtccactatcacagaagcctggctttgaaatgatgttgcaatgtgcccagccctgagatttgccctggagtcacagagatcccattttctagagaagatcrcagcctagaagaaaagatagatgggccaacaggtcacacaaggtggtgtgaaaagtggcacaatagctggataactccttaaaggcaggcaccttcattt

SEQ ID NO: 218333 - DNA, 201 bp, Homo sapiens
gtaggcactggcgcatagagaaagcctacttttcccaggatgacttacaatgcaccattatggcttcattcctttagctgaagctggtaataatgggaaaytgcagatttcttttctcaggggcatgattttggagggttatcagtgttcttactttggttagaatagtttgtcaagccttcttctgagtgggttttgaag

SEQ ID NO: 218334 - DNA, 201 bp, Homo sapiens
gtgcttcccgatccccgccaggaatgcaggactagtttccccacatgctggcgtagggcctgcagaagcctcagccgcctatggggtgctcctgctgaggrgactgccttgcctggcccacgcccctccccggactgatccacaggaaatgcctgaccaggaaggggttccttcactccagcctgtgacagctgtgcaggc

SEQ ID NO: 218335 - DNA, 201 bp, Homo sapiens
atggggccttgggatcagtgtgaagagcacagctctagggcagagccaaatgcacagtgacggcgtgcccactgcacggggctggcacagctgggggaggrtggcaggcccctccgactgcacatgggcttcccagcagacaggctggagctgaatgttctttctcaccctgagtactccacaccaaaggccccagtggaa

SEQ ID NO: 218336 - DNA, 201 bp, Homo sapiens
agatagaaatactgaacatactgtctggcatttagtttgtgtttttataaacatagcatagctgatttcaaggtaggtagacattgtaatcattagttttrttactctaactagactcaatgtataagagtctgtatctttgtttcactctgcacattcagaaggggctcaataagcacttaacttgtcatttgttaccga

SEQ ID NO: 218337 - DNA, 201 bp, Homo sapiens
tttggtgcacccattacccaagcaggatatactgaacccaatttgtagtctttcatccttcaccccttcctaccctttctccctgagcccccaaagtccaytgtgtcattcttatgccttgatgcaacataaaatgatttttataataatatcatgaagacaacctttcacagaaaaagggaagtggaatggttaaataaa

SEQ ID NO: 218338 - DNA, 201 bp, Homo sapiens
ccccaaagaggtccacatcctaatctccataatctgaatacagtttattccatggcaagagggaatttggtttgctaatcagctgaccttgagttgggaargttatcctggatcgtccacaagagtcttaacaagcaaaagaggcaggctggagagtcacagtgattcaatgcgagaaggattcgatccacctgggctgac

SEQ ID NO: 218339 - DNA, 201 bp, Homo sapiens
atttccaacagttaaagagcacttatgtgccaagtattgttcacttgactctccaaacaaccctatgtggcaggaaggatgatggcccccaaagaggtccmcatcctaatctccataatctgaatacagtttattccatggcaagagggaatttggtttgctaatcagctgaccttgagttgggaaggttatcctggatcg

SEQ ID NO: 218340 - DNA, 201 bp, Homo sapiens
agaattgcttgaacctgggaggcggaggttgcagtgagccgagattgcaccattgtactcaagcctgggtgacagagcaagactctgtctcaaaaaaaaamcaaaaaacaaaaaagacaggcgagcacccccaccctgtgtatcaggtaggagctaccggggacaacaagttccctttttcagtcttccttcattccctct

SEQ ID NO: 218341 - DNA, 201 bp, Homo sapiens
tacattttccctcattgcagaacagtccaagctgacccatctgcccagaggcctcattcccttgccttctggctccaggggtctgtgggccagggtggagrgctttcataaatggggccttgggatcagtgtgaagagcacagctctagggcagagccaaatgcacagtgacggcgtgcccactgcacggggctggcacag

SEQ ID NO: 218342 - DNA, 201 bp, Homo sapiens
acttgaggactaccctgaggagcctctactgggtcctggaggccctggatagggtctagggatcctgatttgaagtctagacaattttcctctacatccasttacttccctcaacttcaggagaaacgtgtgcaccaggaaggaaaatccttacttgtttgtcctcagatgaaaccaggtgcttatgggacaaagaggtgg

SEQ ID NO: 218343 - DNA, 201 bp, Homo sapiens
agccctgtgcatctgaccttggagggtttatttccgttttccctgtgcctggaagtttggctttagctaatttcataagattgctgaagaactgatgtacmagcccatcaccttagtgtgcctgggatactgatttgcttttttcttcttcttaacacgtttgcaatcagtagccatgtttctgatttcccaccggcacag

SEQ ID NO: 218344 - DNA, 201 bp, Homo sapiens
agggggacctggctggaagatatgaaggaaaaatatcattcttgaactaataagttgagagatcacagccttcaggggaccagaagggaaggctgaacagrgaagggcaatttcacgttcgccatgtccatatttctatcgtcatgagccatctcaccttacaggcagggaagttttgagcttagagaatgggatgtgtcc

SEQ ID NO: 218345 - DNA, 201 bp, Homo sapiens
ctgcccagaagggagccctagagctgaattttagcaggctaagagtagagctggcaaaggaggacagtctaggcaaagggagcagcaggcatagaggcaagaggcaagacagtccctctcttaggcacagcagtgggcatcagattggaccaaggggaaggtgctcaggatttcagactggcaaacccatagcttcttatg

SEQ ID NO: 218346 - DNA, 201 bp, Homo sapiens
  misc_feature (1)...(201): n = A,T,C or G
cagctctgggtatccctgaataaccacaggagaacagttccaggccctgataagtcagctattgcaaggtaagagtctggaatcccgggagacatgatgangaggggtcacttctctatgctgttattaatgtttggatgtctcccaatttcactgctactcataagaaccttatcagctggtacagggaaagactgaact

SEQ ID NO: 218347 - DNA, 201 bp, Homo sapiens
gctctggagttaaactgcctcgctgtaaatctcagctactcaccaaccgtgcgactttggaaacattgcttatggtctccgtgcctcagctttctcgtctrtaaggtaagggataatattagtacctgcctcatgagttattgctaagattaaacaagataaagcatgtaagtcatttcatgtctggcacagtgtaagagg

SEQ ID NO: 218348 - DNA, 201 bp, Homo sapiens
ggaggggtggtggggggcaagcccagatcaggggctgtgccaggggcatggtgcaggagaggcagtggtccagcttacaccttcaatcactccagttgctsagtggagaagagcttggagaaggaatatgggaagagggaggtcaggtgtttggagtctgtggcagagtccaaatgagagatgatgacgacggcctagaca

SEQ ID NO: 218349 - DNA, 201 bp, Homo sapiens
  misc_feature (1)...(201): n = A,T,C or G
acatttcatttgcttatttattgcctttaattttataggctataggagaaatttctgccttctgaatgtgtccaactagctctgttcacctgagaaatcanattccccagctctgggtatccctgaataaccacaggagaacagttccaggccctgataagtcagctattgcaaggtaagagtctggaatcccgggagaca

SEQ ID NO: 218350 - DNA, 201 bp, Homo sapiens
ggtaaggtaacaaacacctgctgttctcccagctggggtgcctgagggtctatgagtcaccctgtgtgcctccctgaccaaggagctaatgcctcccattygcatgcagagcctccctgagaagagttctagagacagagccatcttgaatttattttatttgctgtatttttagtactgcttgttgatgggcacagagaa

SEQ ID NO: 218351 - DNA, 201 bp, Homo sapiens
tcctttcctggccaaaggtgtgtgggctgggtttctgagtgggctcgcctgagtcacctccgttcccttcacataagcttcatcggaagtgactgtcattrtactgtaaattatgtttaggaagaaggtggctttgagcaatttttgttctcccgccactgtaatcttctctgccattttctgatagtgaataagaggact

SEQ ID NO: 218352 - DNA, 201 bp, Homo sapiens
aggaggtgattaaacaagcaattgcaatggtgttagttcagggaacaaggcaggaccacacagcacaccaggtaaacctagcggaagggggtgcagcaaaktgacagtgaactgaggcttggaggatgagtcagggaggcaggcagggttgggtacgtcattgcatgtgcagaagtctgaggtgaggggaaaaaacccatg

SEQ ID NO: 218353 - DNA, 201 bp, Homo sapiens
aaggtaaggtaacaaacacctgctgttctcccagctggggtgcctgagggtctatgagtcaccctgtgtgcctccctgaccaaggagctaatgcctcccayttgcatgcagagcctccctgagaagagttctagagacagagccatcttgaatttattttatttgctgtatttttagtactgcttgttgatgggcacagag

SEQ ID NO: 218354 - DNA, 201 bp, Homo sapiens
tagagagtcactgacttggattaaaggatgagggatgaggagtgagtctagctggtggccagagagtgggctgagcattctagcaggtggggcttacaccrtaagtcaccagagctcccgacagactttccaaggttttacctttcttgtaatttaaaaatgtttgctagtttgtacccctgtttgtatccagatagtggt

SEQ ID NO: 218355 - DNA, 201 bp, Homo sapiens
aaaacacataataaagcagttagcttaagattaaaaggtaaggtaacaaacacctgctgttctcccagctggggtgcctgagggtctatgagtcaccctgygtgcctccctgaccaaggagctaatgcctcccatttgcatgcagagcctccctgagaagagttctagagacagagccatcttgaatttattttatttgct

SEQ ID NO: 218356 - DNA, 201 bp, Homo sapiens
aggaacaagggcacggggagccttcctagacagcagtggaaggccagccaggggctctaaggctccctacggtggaccctgcgatgtgcttcccgatcccygccaggaatgcaggactagtttccccacatgctggcgtagggcctgcagaagcctcagccgcctatggggtgctcctgctgaggagactgccttgcctgg

SEQ ID NO: 218357 - DNA, 201 bp, Homo sapiens
aaaggtgtaaaaattatataatggactctggggacttggaggaagaggtgggagggaagtgagggataaaagatacacaatggggccaggcacagtggctrtgcctgtaatcccagcactttcagaggccgaggcaagcagttcacctgaggtcaggagttcgagaccagcctggccaacatgttgaaaccctgtccctac

SEQ ID NO: 218358 - DNA, 201 bp, Homo sapiens
agcctacttttcccaggatgacttacaatgcaccattatggcttcattcctttagctgaagctggtaataatgggaaactgcagatttcttttctcagggrcatgattttggagggttatcagtgttcttactttggttagaatagtttgtcaagccttcttctgagtgggttttgaagcttgggggctggggtagggacc

SEQ ID NO: 218359 - DNA, 201 bp, Homo sapiens
gtgctgtgattgattacttggatctgctgtgggcataggagtcagtgctggtatgcatgccatctgcctgccatccttcatagagattcaagaatctggtaactcacactgttatcttagtgtggtctgtcctttcctgtcttcttgtttttacttaaggttgatattcataatatctcacaaccaatccatgactaatca

SEQ ID NO: 218360 - DNA, 201 bp, Homo sapiens
aaagacactggcacatgcgtgtttatagcagcacaattcacaattgcaaaaacatggaaccagcctaaatgcccattaaccaatgagtaaagaaaatgtgrtatatataccatagaatacttctcagccatgaacaggaatgagataatggcatttgcagcaacttggatggagttgcaggccattctaaatgaagtaact

SEQ ID NO: 218361 - DNA, 201 bp, Homo sapiens
tcatccaaggcaaacagaatgcccagcacataattggcactcagtaaattgcccctcttgcctagcaagtataggctctcattaaatgttccataacccaatatatatatatatatattttgagatggggtcttgctctgtcacccaggccaaagtgcagtggcatgatcatggttcaccgcaacctccaccttccaggct

SEQ ID NO: 218362 - DNA, 201 bp, Homo sapiens
ggtgtttactgaaaggaaaagaagtcattctatggaaaagacactggcacatgcgtgtttatagcagcacaattcacaattgcaaaaacatggaaccagcytaaatgcccattaaccaatgagtaaagaaaatgtggtatatataccatagaatacttctcagccatgaacaggaatgagataatggcatttgcagcaact

SEQ ID NO: 218363 - DNA, 201 bp, Homo sapiens
catccaaggcaaacagaatgcccagcacataattggcactcagtaaattgcccctcttgcctagcaagtataggctctcattaaatgttccataacccaatatatatatatatatattttgagatggggtcttgctctgtcacccaggccaaagtgcagtggcatgatcatggttcaccgcaacctccaccttccaggctc

SEQ ID NO: 218364 - DNA, 201 bp, Homo sapiens
cctgagctcaagcaatccacctgcctcagcctcccaaagtgcagggattacacacatgagccatcacgcccggtgatgacctgatttatttgtgatcaagtttttttttttcttttcaataagaaaaatatgaatatgtttgagggcagaataaaatgcttgttactcactagaacttcagggagtcaggagtgtgcccag

SEQ ID NO: 218365 - DNA, 201 bp, Homo sapiens
tagatgatataaaaagtcatgaattataattttattttttattttttttaccagctgaacaaggcctgaaaaatgaattataatttttaaaaagggaaaayaaagatgtagaactccaatctggagacacagctcaaatagaagccttggccttacaccaaaatattagcatgaaatgttttaagttgaaatagtgtttat

SEQ ID NO: 218366 - DNA, 201 bp, Homo sapiens
ttataatttttaaaaagggaaaacaaagatgtagaactccaatctggagacacagctcaaatagaagccttggccttacaccaaaatattagcatgaaatrttttaagttgaaatagtgtttatggtttgtgtgtatgtgtgtgtgtgtgtatatatatatatatatatagaaaatatgtatatgcacatacacatttatc

SEQ ID NO: 218367 - DNA, 201 bp, Homo sapiens
aaaccgaggctcagtgtttcccatcagcttgccctgcaggtcctgcccttccttcctggtgcagtctttccttcttcccaccctctgtgtggtagcccttyatctacttctctgtgatgttgattagaacctactgagagatagcaagctgcttgttctttagaaaagtagaattgatgaagaggaaatcttttcctaaga

SEQ ID NO: 218368 - DNA, 201 bp, Homo sapiens
gcttactgcaagagaggccatggagcacccctatttctacactgttgtgaaggaccaggctcgaatgggttcatctagcatgccagggggcagtacacccrtcagcagcgccaatgtgatgtcagggatttcttcagtgccaaccccttcaccccttggacctctggcaggctcaccagtgattgctgctgccaaccccct

SEQ ID NO: 218369 - DNA, 201 bp, Homo sapiens
gctgtgggaaagactccagcagcacttggtgaatggtgtcctgtgcagaagccaggctcttggtgggtggtggggacggtggggacagggtagcagagaarggacatccccgacctaaaatgggtggcatatccagttccagagtgggtctccatcgaggctcctttgtcctcaccacgtccctgtcactccagctgaggt

SEQ ID NO: 218370 - DNA, 201 bp, Homo sapiens
ctgaccttgtaccagtggctcctcagcctgggataagaaagtgatctgagcctccctgagaacccactacatgcccgcctttgctcgtgggagcttgtcayatacagcatctcttttaaacctggggaatcattattcccaagaaaaagctgacatccaaagacaggtccaagtcaaagactaatatatgacagagccagg

SEQ ID NO: 218371 - DNA, 201 bp, Homo sapiens
cctctacctcttcctgtatgaccacccctactaaatcttccccatcctttgagactcagctccaggggtccctcctctagaaagccagctccaactggggraagagctccccctcctaaatatctctctgtcattgcatgaccagcctgtgaaagagtgttctgttatctaaaagtctccctctcattagaacagtggctt

SEQ ID NO: 218372 - DNA, 201 bp, Homo sapiens
atttggtggcttcaaacaacagaaatttattctctcccagttctggaagccagaagtctaacattcaggtgccagcagagctgtgctccctccagcatctygaggggagagtccttccttgcctcagccagcttctggtggccctgagggggtccctggttgtggatgtatcaccttagtctcagcctctgtcttcacatg

SEQ ID NO: 218373 - DNA, 201 bp, Homo sapiens
agacacagggtttttgggggagtgctttttctatggaaaggtaaattgttggttataggagaagaaagatgaaagcgactttaattccttctgacgttttygaaatactaaagctgccacatttatgctccaggaagtgctttgactcaaggtttaaagattagagttgagatgaaagaagtactctattttaacctggag

SEQ ID NO: 218374 - DNA, 201 bp, Homo sapiens
attccttctgacgtttttgaaatactaaagctgccacatttatgctccaggaagtgctttgactcaaggtttaaagattagagttgagatgaaagaagtaytctattttaacctggagatgaattccacgaagccatcacctctcccctgtgtggtattggccccagtgtccgcaggggcattaaagacctctcatggatc

SEQ ID NO: 218375 - DNA, 201 bp, Homo sapiens
atgattcggatagaggaggggcagatattttatgtcaaggagaggaaaaaagagagaaaattcacatttatcagccatgtaccagatgtttagcactgttkaatccacttcatattatttaatccttaaaataaggctgtgagataattagccccattttacagatgagaaaatcatactgtcctgtaattattagtctgc

SEQ ID NO: 218376 - DNA, 201 bp, Homo sapiens
tcctcagactctgcctgtcgggacagcacagcccattagccggagcctcagacaactatgatttttcttttcctattattctctgatattttcaatttgaraagagtcatttaggcagtagcgtggaagagggcatagtagacataggggaaaaattgaaaatgtcatttaaaaaggactattccattctttttttttacc

SEQ ID NO: 218377 - DNA, 201 bp, Homo sapiens
gtaagtttgggctaaacttgaggggctgctagttgggttcaactgagtcaggcaagagctgaccctccttccctgtaattggacccagtttgcagtatggmagcatgtggagtgttgctgatgctagggtttttggtgataggtgaaccacagaagaggggcctgtcatttttcaggcagagggttgcaatcaaatgaagt

SEQ ID NO: 218378 - DNA, 201 bp, Homo sapiens
agagcagtgattttattttccttttcatttcaaacagattgtgtagcctttggggtgtgggggaccagtggaatgaagctatgggccgggaaactaattaygcctccctgcatggctgagctagttaataccaaactgtcattgaggctgattcttccctggggcagaaaagcttcccaaattccttatccctttctcttt

SEQ ID NO: 218379 - DNA, 201 bp, Homo sapiens
ggaaaattcctatgatcaaagggacaactggctcaagccacaaacagacaaaagcacagggatggaaataaatctccgttctgaagttccagagcagaaaggcacgactttccaatttcttgggccttagcagggcctcctacttatctagtcaccaactgggaggctcagtggtgggtgtacctcatggctttttttcca

SEQ ID NO: 218380 - DNA, 201 bp, Homo sapiens
atttgggctgctataacaaaataccataaactgtgtggtgtattaataacagacacttatttcctcacagttctggaggctgggaagtccaaaattaaggyatagcggattctgtgtttggtgagggcccaatttcttgctcgtagatggcacctttgtgtttcacatggtagaatagacaaaacagctttctgaggttcc

SEQ ID NO: 218381 - DNA, 201 bp, Homo sapiens
gaaaattcctatgatcaaagggacaactggctcaagccacaaacagacaaaagcacagggatggaaataaatctccgttctgaagttccagagcagaaaggcacgactttccaatttcttgggccttagcagggcctcctacttatctagtcaccaactgggaggctcagtggtgggtgtacctcatggctttttttccaa

SEQ ID NO: 218382 - DNA, 201 bp, Homo sapiens
aaaaagcatttgacaaaatctaccctttctggatgaaaacactcaataaactaggaattgaagataatttcaacaacctgatgaagaacatctacaaaaartcccacaactaacatcatacttaatggtcaaagactgaatgaccattaagatcattcagtatcaggaacaacagaagcatatctgctgtcatcacgccta

SEQ ID NO: 218383 - DNA, 201 bp, Homo sapiens
ccctgggagatggtttttgatacatgccccatctggcaggactaattgttctttgctttcagtgactaggttggtgctctgaacccgggaagaaagtctgraaggtgttcatgcctgtcaatgtcactgctcatggctcttggatgatagtatatcttttttgacacctgtttcttgcaaatgattcacaggacatgtctt

SEQ ID NO: 218384 - DNA, 201 bp, Homo sapiens
tgctcacactattatctcagggaggttcagctcagatgcataggtttcaatgtaatgtgtactagtcctctcctagcaccgtatccttgagacctgcccamgtcaaaggatggaacttcagggatcccacatctctcagctatcagtttgctaacagcaagctatttccacccatgtgtgagtgcctgctcatttcactgt

SEQ ID NO: 218385 - DNA, 201 bp, Homo sapiens
aaaacaaactataaaaaatcatgtataatggaatcaaaaagaataaaatgcttaggaagaaattaagaaaaaagtgcagaaactcatactctgaaaactayaaaacattgttgaaaaagttaaagaagacctaaataaatgggaagacatctcatgttcatggactgcaagacttaatattgttaagatggcaatacttca

SEQ ID NO: 218386 - DNA, 201 bp, Homo sapiens
gaccttctgagcacaccttctggaccttctgggctgtctctgacgcacaagtcagagatggtcccacggaagacttgcatttccttgtaactctggtcacmccattggccatttgaaaacaatagtacctgtccctataggcccctggactgggctgagtgctctatcactgagcctccattcatttcttatgtgtttaat

SEQ ID NO: 218387 - DNA, 201 bp, Homo sapiens
agagatttattggctcatagttctgaaggctgggaagtccaagatggaggggccaacatctggtaagggcctttttgctgtattatcccatggtggaaggwgtgtgtgtgtgtgtgtgtgtgtgtgtgtgttagagagagagagagagagagagagagagaatgagtgaaggagaagaggccaaacttgcccttttataag

SEQ ID NO: 218388 - DNA, 201 bp, Homo sapiens
gtatatatacacatatacattcttggagattatatatatatatacacacgcatattttgtatctgtgtgtatatgtagattttatatatatatatatttatgtgtgtgtgtatgtatgtgtatatatatatatatatatatatatatatatgcccaagataattgaaaacacatatctacacaaaaacttgtacacaaatg

SEQ ID NO: 218389 - DNA, 201 bp, Homo sapiens
taacccatgtgactttctgcacgctccatctagtgtccattccatcatttgaaggcagcagagagacccctgggggctttattaacatttcacttgggtatttttttttttttttttttttttgagatggagttttgctctttttgcccaggctggagtgcaatggcgtgatctcggctcaccacaacctccgcctcctgg

SEQ ID NO: 218390 - DNA, 201 bp, Homo sapiens
tatatatacacatatacattcttggagattatatatatatatacacacgcatattttgtatctgtgtgtatatgtagattttatatatatatatatttatgtgtgtgtgtatgtatgtgtatatatatatatatatatatatatatatatgcccaagataattgaaaacacatatctacacaaaaacttgtacacaaatgg

SEQ ID NO: 218391 - DNA, 201 bp, Homo sapiens
aacccatgtgactttctgcacgctccatctagtgtccattccatcatttgaaggcagcagagagacccctgggggctttattaacatttcacttgggtatttttttttttttttttttttttgagatggagttttgctctttttgcccaggctggagtgcaatggcgtgatctcggctcaccacaacctccgcctcctggg

SEQ ID NO: 218392 - DNA, 201 bp, Homo sapiens
atgtgactttctgcacgctccatctagtgtccattccatcatttgaaggcagcagagagacccctgggggctttattaacatttcacttgggtattttttyttttttttttttttttgagatggagttttgctctttttgcccaggctggagtgcaatggcgtgatctcggctcaccacaacctccgcctcctgggttcaa

SEQ ID NO: 218393 - DNA, 201 bp, Homo sapiens
attcttggagattatatatatatatacacacgcatattttgtatctgtgtgtatatgtagattttatatatatatatatttatgtgtgtgtgtatgtatgtgtatatatatatatatatatatatatatatatgcccaagataattgaaaacacatatctacacaaaaacttgtacacaaatggttatagcaatattattt

SEQ ID NO: 218394 - DNA, 201 bp, Homo sapiens
actcatgggagaccagaggagggcttcttacagccgggggaatcaggggaagctgcccagaagggagccctagagctgaattttagcaggctaagagtagrgctggcaaaggaggacagtctaggcaaagggagcagcaggcatagaggcaagaggcaagacagtccctctcttaggcacagcagtgggcatcagattgga

SEQ ID NO: 218395 - DNA, 201 bp, Homo sapiens
gaaggtgcctgcaagagtaggttcagagattctgtgtttccttcccaggaggctgcgcaggaccagccctgttgttccactctgcctgtctgctccctccrggaccctcacccctgctcagagaccctgggctcagacagacactgtcagaaacaggccctgcagtcctggaatctggattctcttgcctctcccctgaca

SEQ ID NO: 218396 - DNA, 201 bp, Homo sapiens
  misc_feature (1)...(201): n = A,T,C or G
cacctccagagtcctaggaaacacatttcatttgcttatttattgcctttaattttataggctataggagaaatttctgccttctgaatgtgtccaactanctctgttcacctgagaaatcacattccccagctctgggtatccctgaataaccacaggagaacagttccaggccctgataagtcagctattgcaaggtaa

SEQ ID NO: 218397 - DNA, 201 bp, Homo sapiens
ttcttggagattatatatatatatacacacgcatattttgtatctgtgtgtatatgtagattttatatatatatatatttatgtgtgtgtgtatgtatgtgtatatatatatatatatatatatatatatatgcccaagataattgaaaacacatatctacacaaaaacttgtacacaaatggttatagcaatattattta

SEQ ID NO: 218398 - DNA, 201 bp, Homo sapiens
ccattggctcctccagaatgaatggcctttaccctcagaataatgtccagtggacatcctttcctcttcgaccaagacgtttcaagtgtctgtggcagcarttggttgtatagagctgaccgcatagttccccatgtgatgaggagacttcagagctgcacagtctgatgaaagctgtgctatgactgaggacagagtcat

SEQ ID NO: 218399 - DNA, 201 bp, Homo sapiens
gcccatgctgctgggccatggaacacactttgtagagcaagggatagctttgtagcaggcaggacaagccctgtgcatctgaccttggagggtttatttcygttttccctgtgcctggaagtttggctttagctaatttcataagattgctgaagaactgatgtaccagcccatcaccttagtgtgcctgggatactgatt

SEQ ID NO: 218400 - DNA, 201 bp, Homo sapiens
  misc_feature (1)...(201): n = A,T,C or G
tttcctgagaacaggacattccaattagtgagctgatagctcatccttgtcaccggagctgtccatagcagaacaagagtgctgggcaatgctttatgagncaataaagaaagcacctccagagtcctaggaaacacatttcatttgcttatttattgcctttaattttataggctataggagaaatttctgccttctgaa

SEQ ID NO: 218401 - DNA, 201 bp, Homo sapiens
gcaagagggaaggaggtgattaaacaagcaattgcaatggtgttagttcagggaacaaggcaggaccacacagcacaccaggtaaacctagcggaaggggrtgcagcaaagtgacagtgaactgaggcttggaggatgagtcagggaggcaggcagggttgggtacgtcattgcatgtgcagaagtctgaggtgaggggaa

SEQ ID NO: 218402 - DNA, 201 bp, Homo sapiens
tataaatgcttcccattcctcacgtggacctcgtgctgtggttgatgaacataagatcattctggaaatgactctccttcatttctgatttagcatcagtrcactgtggccctcagcactgtagcgaacttctgtgtcaaggggttaatgaccaataaccaaacccttaaatcagcctgcctgtctgcagagaggcctgca

SEQ ID NO: 218403 - DNA, 201 bp, Homo sapiens
aaagtagagtttggggagaagctgcaacctgggagtggcttcatctctgcttccgcgtccctgtgcaggactcaggaattgacattggggacatcactgcraggaaggctctcaggaaacagctgcagtgcaagaccttccggtggtacctggtcagcgtgtacccagagatgaggatgtactccgacatcattgcctatg

SEQ ID NO: 218404 - DNA, 201 bp, Homo sapiens
tccccaaaggtgggtgtacaggaccgtccaaatagcagcaacgtaataattattaaattattatgaaataataataggcacacacacagactgagggctamcagtatcctgagcacttcagcaggggctccctgagcccacagcctggtgtggtatccattgtcatgggtgtttgttacatagcccgacaccactccacaa

SEQ ID NO: 218405 - DNA, 201 bp, Homo sapiens
ctgatagtccctgagggaggggctcccgctcttccctctgctttcccaatgcccaggccagccctggcacccgagaggcaaagagggtgtttgttgaattraatgggatcgactcctcactgatgggctgagttccagctacaaacttctccccaaagagctgagggattcgtgtgcctgtgctcagcctcacctgttccc

SEQ ID NO: 218406 - DNA, 201 bp, Homo sapiens
ctccccaaaggtgggtgtacaggaccgtccaaatagcagcaacgtaataattattaaattattatgaaataataataggcacacacacagactgagggctwacagtatcctgagcacttcagcaggggctccctgagcccacagcctggtgtggtatccattgtcatgggtgtttgttacatagcccgacaccactccaca

SEQ ID NO: 218407 - DNA, 201 bp, Homo sapiens
tattcagaaagataagctgaacaaagggctagttcttgagcttcctagcaggagatggccacctggtggattgtacctctctcatcttttactcgatcgtmtggagggaggcaaactttgccctgttcctaagtgcagaaagaaacttttcctgtgggaacccagaagtttaggaaaacacagaggcctttgtgagacagg

SEQ ID NO: 218408 - DNA, 201 bp, Homo sapiens
ggcgacctgggatgggagcttgagagatgtgccctcccctactgggatagaagccagcccctggttatctttcttaatgatgggccagttgctatgagcayaggttggaaaggagcaggggacacctccttctatcagtgtctctcctgccaccaagtcatgctagcacatgaagctgacctgcctttccatttgactcaa

SEQ ID NO: 218409 - DNA, 201 bp, Homo sapiens
caccaactttttaggtggggcagttctttactgcgtgggactgtcctattcaatgtaggatgcttaccattctttgaccctgacaccagcagtgtccatayaagaccaaaacatccccatacacctccaaaaggcctctggaggaggtggtaccactcctggctgagaatctgagaagggagagtaaataaagaagttctg

SEQ ID NO: 218410 - DNA, 201 bp, Homo sapiens
ggtaagcagggcatttctgcttcaagaggagagacagcattgaagtcattttaattgacacctgaagagtcactagaaaggagaaagcatagcttcatttycaagaaaggaaacagagtgcttgggaccccagaggtaaagggaagttggcctctggctttccctctgaagcagaaacagagggcctcctgttcaccccga

SEQ ID NO: 218411 - DNA, 201 bp, Homo sapiens
acacatgaactttgggggacacagtcaaaccacagcaaggtgattgggcaaaagtagggcaatggagtattagacttcagaggtaaagtagtttggggcastaagagctggggtctaggtgtgggtgggctaaagtggaacacagcataccaccccagaattgaggccacagtgcaacgtgaatgctgcccagtgtgatgt

SEQ ID NO: 218412 - DNA, 201 bp, Homo sapiens
cagaggtaaagtagtttggggcactaagagctggggtctaggtgtgggtgggctaaagtggaacacagcataccaccccagaattgaggccacagtgcaaygtgaatgctgcccagtgtgatgtagaggaagctgtgagcctggtgccaaagaccttgatggatgtagctgactgcctggcacttaagtgagaagaacaac

SEQ ID NO: 218413 - DNA, 201 bp, Homo sapiens
gcaggaaagctgaacattgggccagtgttctcttacttgaaaagggtgttttggggaccagttaaaaggagaaagtgtggggattatttggcttattgagtttttttttttttttttttggttctttttatgtttttcggctccttctcatgactggctgtcttttgctagccagtgacctgcaggagcgtcagccccaga

SEQ ID NO: 218414 - DNA, 201 bp, Homo sapiens
ctctaaggaattccctgtggctaaggtaaagccataaggaagttccatgagaactgggaggattggaggaagtgggtatcagaatcagaccgagagaaacracatctccttgtgctgcagccactgcggtcacccctggcccccagcttttgtgctcaggacaaagcgcccacttccaaaactctgtctgtcctcgtggca

SEQ ID NO: 218415 - DNA, 201 bp, Homo sapiens
tcctccctgcccttatgccatgggacattgtcagccttcgtgggagttcagcaccttctgggacatgtgtcacagtctcctctgtgtctggctgaggctcrtgtgcctgtgggccatgttttgccccaggtcaatgctggcaagaaaaccattccctctcgcagttctggatgagacattcagagcactttcattttaggg

SEQ ID NO: 218416 - DNA, 201 bp, Homo sapiens
ttaatttgaggggagggggtcattatcaacaacaaataaaacaaatttgggtagcttaaggtaaagacaaagggtgaatgttattagagaaaacctggggygattcctttttatagactcagaggaaaggttgaccgggaaaggcaggaactaggacagctccaggggcctcagcagtaaaagtttatgggtcttccctag

SEQ ID NO: 218417 - DNA, 201 bp, Homo sapiens
tctggatgagacattcagagcactttcattttagggaagatttgaagggtcctggggacagtcacattttggagctgaggctggctttctccttctcctawcaaattgcttcttgcccttttcctgccaaatgcccctgccgatctgtattgctccctctcattatatgaaacagtttcttcttcctggaagccttggcca

SEQ ID NO: 218418 - DNA, 201 bp, Homo sapiens
agagaaaacctggggtgattcctttttatagactcagaggaaaggttgaccgggaaaggcaggaactaggacagctccaggggcctcagcagtaaaagttyatgggtcttccctagagagttgccctaaatgtgtcttagcttcagggctactttgtctgtgtcttttccttttcaggttttaaattcctgggagaagtct

SEQ ID NO: 218419 - DNA, 201 bp, Homo sapiens
ctggggacagtcacattttggagctgaggctggctttctccttctcctatcaaattgcttcttgcccttttcctgccaaatgcccctgccgatctgtattsctccctctcattatatgaaacagtttcttcttcctggaagccttggccacaccaataaccacccacgccctgtcttcttaattctatttaatcacttccc

SEQ ID NO: 218420 - DNA, 201 bp, Homo sapiens
ttctagaacctcttgtaaacagtgtcccaatataactctccctttctacccctcaccactctctaggcccaggacagtttcagccaaagacgatcactgcwgccccatgcaggaggctcagcggggagagtctaaatgccccaaagatacctcatttttcacgggcacctacttgataggccagcagagttgtcaaggaag

SEQ ID NO: 218421 - DNA, 201 bp, Homo sapiens
acatcatgtggcatagccagaatttggatgtagttaagaattgagggaggttcttatgttttgatatcaaaatcagacctttaagtccagaccagggagayggttcacccatggtacctatccagccctcaggttctctactcccccagtctagggagcagatttgaccagatttctggtctgagcagggctgggattcat

SEQ ID NO: 218422 - DNA, 201 bp, Homo sapiens
ttggttccatagatatgcctggacttgaactagcttaccttcccagccttgtgcatcgggaagctgtgagggtcagatccttctagattttgtgtcccctkacaagggttggaagagtctggctgcagccctggcctcaccagctggctccctcttgcgtaagtggagttgccacagggcttctgtctgtggctttccaag

SEQ ID NO: 218423 - DNA, 201 bp, Homo sapiens
actctcatagcctcagtttccttatccttaaaagtggcagtagccacgggcatggaaaacacctagcagaggactgctaggcgcacaaaactatgtgtgtkttcttctcttccttcccttcctgaagctgtggcagagtttccatcagccaggtgaggcttgacacatgtgaggggtggcttctttggagggctagaggcc

SEQ ID NO: 218424 - DNA, 201 bp, Homo sapiens
attgttttaccttgcaggtgattttgctcttcctcctgcaagaatcaaaatgaaatgctggagatctggtttacagccctgctgagctgtgtagagctgastagagaatgagccaaatcaatcattggcagctgaggaggagctgagtgggtggggatgacgtttctctgccccgggggtttgtaagacgtccacaggcag

SEQ ID NO: 218425 - DNA, 201 bp, Homo sapiens
ggccatggagcacccctatttctacactgttgtgaaggaccaggctcgaatgggttcatctagcatgccagggggcagtacacccgtcagcagcgccaatrtgatgtcagggatttcttcagtgccaaccccttcaccccttggacctctggcaggctcaccagtgattgctgctgccaacccccttgggatgcctgttcc

SEQ ID NO: 218426 - DNA, 201 bp, Homo sapiens
aagtgaatgaagaccatgcctctgtcttctgattactgcttgaatctgtaagggagggattacaataattgcagcgattaaaagacaacaacaatttgggraagcagatattcacatggccttggagtaacacccacacattacttattaattacaaacgaatgaagtacttttacgatggagaaatatggcagatgccac

SEQ ID NO: 218427 - DNA, 201 bp, Homo sapiens
gatttgcagagagagtgaagtgaatgaagaccatgcctctgtcttctgattactgcttgaatctgtaagggagggattacaataattgcagcgattaaaaracaacaacaatttggggaagcagatattcacatggccttggagtaacacccacacattacttattaattacaaacgaatgaagtacttttacgatggaga

SEQ ID NO: 218428 - DNA, 201 bp, Homo sapiens
tcttggagattatatatatatatacacacgcatattttgtatctgtgtgtatatgtagattttatatatatatatatttatgtgtgtgtgtatgtatgtgtatatatatatatatatatatatatatatatgcccaagataattgaaaacacatatctacacaaaaacttgtacacaaatggttatagcaatattatttat

SEQ ID NO: 218429 - DNA, 201 bp, Homo sapiens
cttggagattatatatatatatacacacgcatattttgtatctgtgtgtatatgtagattttatatatatatatatttatgtgtgtgtgtatgtatgtgtatatatatatatatatatatatatatatatgcccaagataattgaaaacacatatctacacaaaaacttgtacacaaatggttatagcaatattatttata

SEQ ID NO: 218430 - DNA, 201 bp, Homo sapiens
ctcagcaggaagtgaaacttaaagagaggaccacttggaagggctcccgggggcagctggttagcagtgtctgccatcgggtgggaattgtgggggtgctgggggggagcttggtgcttctcagtcctctccacacttctcctttccataaagggccttcccaggggctttcccatttctccttcagtgagttttgaaggc

SEQ ID NO: 218431 - DNA, 201 bp, Homo sapiens
tactttattttattgttttgttagaaatggggtcttgctgtgttacccaggctggtctcaaactcctggcctcaagccattctcctgcctctgcctcacasagcactggggttaggggcatgagccaccatattggactaaagcctggaaatttttaaagggtgacaatcacttataagaagcctctggaaatggtagaaa

SEQ ID NO: 218432 - DNA, 201 bp, Homo sapiens
ccatgaaatcaatttactaggtcatgaacagcattccttcttaatagaatattacagaataaaacagaatgtgtcagagttaatcacacatggtcatgctraagattgttttgtaacctcgtttcccttatatctgtttgcgtataatgggtgaaatgcaaaaaatacagttttgtaggttatgattgagaagagctgaga

SEQ ID NO: 218433 - DNA, 201 bp, Homo sapiens
ggaggccgaggcgggcggatcacgaggtcaggatatcgagaccatcctggctaacacggtgaaaccccgtctccactaaaaatacaaaaaattagccgagygttggggggtgcctgtagtcccagctactcaggaggctgaggcaggagaatggcgtgaacccgagaggcgcagcttgcagtgagctgagattgcgccact

SEQ ID NO: 218434 - DNA, 201 bp, Homo sapiens
gagacccaggcccagccctgcatgatttggagagaacacaagtcaaatgcagcacagggcttcttggttgcatctgccaggacagaccttctgagcacacmttctggaccttctgggctgtctctgacgcacaagtcagagatggtcccacggaagacttgcatttccttgtaactctggtcacaccattggccatttgaa

SEQ ID NO: 218435 - DNA, 201 bp, Homo sapiens
aaatcaatttactaggtcatgaacagcattccttcttaatagaatattacagaataaaacagaatgtgtcagagttaatcacacatggtcatgctaaagattgttttgtaacctcgtttcccttatatctgtttgcgtataatgggtgaaatgcaaaaaatacagttttgtaggttatgattgagaagagctgagaagcac

SEQ ID NO: 218436 - DNA, 201 bp, Homo sapiens
tttattgagttttattacatgccaggtaccatgctaaatgctatgcacaaattatctcactttatcttcacagcaacaaactgagatatgctattattatyccctttttctattataaaattgaggcacagaaacattaaatcatgtatctgaggtcactcagtcagcatgtgttgggataggaattgactctatgtggtc

SEQ ID NO: 218437 - DNA, 201 bp, Homo sapiens
ctctgacaatccgcgttggagtttcattagggagacccaggcccagccctgcatgatttggagagaacacaagtcaaatgcagcacagggcttcttggttrcatctgccaggacagaccttctgagcacaccttctggaccttctgggctgtctctgacgcacaagtcagagatggtcccacggaagacttgcatttcctt

SEQ ID NO: 218438 - DNA, 201 bp, Homo sapiens
tgctataagcagtgagcaaccacttgggactagaagaatctgttttcaggatgagcttttgtaggctgctgcgggcttctggaactctctctctctctctstgtgtgtgtgtgtgtctgtctgtctgtctgagtgtgtatgtccatgtgtgaggatacagccagtgataactgagggaagcaggaaccctgttctcttgtg

SEQ ID NO: 218439 - DNA, 201 bp, Homo sapiens
agagcccacctttgggtactggactttcaggtctgggagtgtggctatgccagaataatagtgcatttaggttgcattatccagttctagatgtgccagasaaacctctgacaatccgcgttggagtttcattagggagacccaggcccagccctgcatgatttggagagaacacaagtcaaatgcagcacagggcttctt

SEQ ID NO: 218440 - DNA, 201 bp, Homo sapiens
tgagctcattatttattgaagtaacgtctgtgcatcctgaaagcacacctcccatcacagcccccatcacctgccctcccacagctcattagcgtcaccamgggctgcctttagagccttctgccattcagggtcttgcctcaatcggaagagaaagagtgtgtggatttcagaatggtcttatgaagttggcgtgctgac

SEQ ID NO: 218441 - DNA, 201 bp, Homo sapiens
gggcatctcccagaatctgtcttctccttgcacctgtcacatcatgcccaagttgctatgaaatagccatctcaaatatctaaatgcctgtgagcaatcgstcctgaaaagagacagtgggggctggaaatttgattccttcagaaaaagagtttcctgagaacaggacattccaattagtgagctgatagctcatccttg

SEQ ID NO: 218442 - DNA, 201 bp, Homo sapiens; identical to SEQ ID NO: 39201

SEQ ID NO: 218443 - DNA, 201 bp, Homo sapiens
ccaacttcagggaacccaaatctattctgtaggtggttccactgaagcctctcccactaagtgtggggtgggaggtcggtcatccagcctttccctcgggkatgggtggaccccaactcagaaatcctcttcatagaccctcttaatcttcaacaatgcagtcctttgtccctcaatctaagtgaatcactaattaatttt

SEQ ID NO: 218444 - DNA, 201 bp, Homo sapiens
ctccactatgagtcaggcacagatgcctgtgttctccaacttcagggaacccaaatctattctgtaggtggttccactgaagcctctcccactaagtgtgsggtgggaggtcggtcatccagcctttccctcgggtatgggtggaccccaactcagaaatcctcttcatagaccctcttaatcttcaacaatgcagtcctt

SEQ ID NO: 218445 - DNA, 201 bp, Homo sapiens
acagatgaataaactgaggcacagtgtggttaaggaattttcccaagatcatactgctaataaacggcagaactgagatatgaacccagctgtctggctcygtaatctgtgctcaagagagaacatgaaaaacactaggcctggtacaacgtaggcactaaacaaacgtttctctcttcatttaccatccctccccaagaa

SEQ ID NO: 218446 - DNA, 201 bp, Homo sapiens
gtcattagttccaagagtttggaggagctgggccaggccggctttggatggatgtggagagcaggaaggaggctttctgggctaagagaacagtgggaacmgtttgccaagagcaaagagctcattaaaagtcataagaagatgaaagctgcacagtatctgagatctgatcttgtggatgtggctatgaagtacaaggct

SEQ ID NO: 218447 - DNA, 201 bp, Homo sapiens
caggccccctgtatgggatgggccagtttgctgagaatgacacattactgttgcccctctaacttgaccctgggtttcctgtgggtaagcagctgtttcarcaaatcccagattcctgcaaaacagccttttaagtttttcttcatggaaagcttccagacattccagcccagcttgtctctccttggaattctgcccaat

SEQ ID NO: 218448 - DNA, 201 bp, Homo sapiens
tttggtggcttcaaacaacagaaatttattctctcccagttctggaagccagaagtctaacattcaggtgccagcagagctgtgctccctccagcatctcsaggggagagtccttccttgcctcagccagcttctggtggccctgagggggtccctggttgtggatgtatcaccttagtctcagcctctgtcttcacatgg

SEQ ID NO: 218449 - DNA, 201 bp, Homo sapiens
ggtggggagtagaagtgcacctaaggagacacactggatagtcacctgccttccccgggaagtggcagaggccatgtcctctctcatctcatcgatttgcrccctcctgactgcaaggggtgcagggaaatatggaggagcacccaggtgtcagtgagcaataggggtctctgccacacctttggagaccactctactcct

SEQ ID NO: 218450 - DNA, 201 bp, Homo sapiens
accccagggaggtgggcaagggaggtgagtggtcgcacatatggctctggagttaaactgcctcgctgtaaatctcagctactcaccaaccgtgcgacttyggaaacattgcttatggtctccgtgcctcagctttctcgtctataaggtaagggataatattagtacctgcctcatgagttattgctaagattaaacaag

SEQ ID NO: 218451 - DNA, 201 bp, Homo sapiens
ttaccatgaatttggtggcttcaaacaacagaaatttattctctcccagttctggaagccagaagtctaacattcaggtgccagcagagctgtgctccctycagcatctcgaggggagagtccttccttgcctcagccagcttctggtggccctgagggggtccctggttgtggatgtatcaccttagtctcagcctctgt

SEQ ID NO: 218452 - DNA, 201 bp, Homo sapiens
ccagaccagccactagacacctcctaccacccccaccatcatgacaaccaaaaatgtctccaggcattccagatagcccctggtttataacattcctccaytgaggaccatcgttctaagtcactttttgccttaaacgttccagagtccccattgctcagaaagcttagctatgcttgctgggactgcaggcactgaagg

SEQ ID NO: 218453 - DNA, 201 bp, Homo sapiens
ttctcctgctcccagaggtgtgagtccccagagctctccctactcagcgtcctgctgcccttctctacctcagaggctgcctcacaggaagccagcccacracatccccttgcacgccacacaggccctaggtcatctctgggactgttcaggtctgctcggtgagtggcatggaacatcttttcagagatgtctgacatg

SEQ ID NO: 218454 - DNA, 201 bp, Homo sapiens
caggccaccccatctttaaccctcccatcgtggtcagcactgtgctgcagcctggctctccctctgccccatctagctttctcctgctcccagaggtgtgrgtccccagagctctccctactcagcgtcctgctgcccttctctacctcagaggctgcctcacaggaagccagcccacgacatccccttgcacgccacaca

SEQ ID NO: 218455 - DNA, 201 bp, Homo sapiens
  misc_feature (1)...(201): n = A,T,C or G
cacggcttactgcaagagaggccatggagcacccctatttctacactgttgtgaaggaccaggctcgaatgggttcatctagcatgccagggggcagtacncccgtcagcagcgccaatgtgatgtcagggatttcttcagtgccaaccccttcaccccttggacctctggcaggctcaccagtgattgctgctgccaacc

SEQ ID NO: 218456 - DNA, 201 bp, Homo sapiens
cgtaagcacttagcattgttaagtgagcataagtaacaagatgcaacagcctctggccaagttttgaagattttgttttaaagtatgcttttagatgttgrcattcatgattattaaaaggaacaaaactcaatttggggtctcaagagccacaattctagacttctaggatgtcaggagccatgctcttaagcttctcac

SEQ ID NO: 218457 - DNA, 201 bp, Homo sapiens
cctggagtcacagagatcccattttctagagaagatcgcagcctagaagaaaagatagatgggccaacaggtcacacaaggtggtgtgaaaagtggcacartagctggataactccttaaaggcaggcaccttcatttctatttcttgcactgagccccaggttagacccaggaaatgcatctctggaaggcagctatgct

SEQ ID NO: 218458 - DNA, 201 bp, Homo sapiens
gattcacaggacatgtcttataagtgagcagctgccacagagctcctggaatggcagagagttgaggtgcccttgtatgtccagggcatgtgatgaagagmcacctcatgttgcttgtctggcttctgactccctagtgacaacgaccccacctggaccagggagagaagtgatttggactagagatgaccacctctctct

SEQ ID NO: 218459 - DNA, 201 bp, Homo sapiens
tttttgacacctgtttcttgcaaatgattcacaggacatgtcttataagtgagcagctgccacagagctcctggaatggcagagagttgaggtgcccttgyatgtccagggcatgtgatgaagagacacctcatgttgcttgtctggcttctgactccctagtgacaacgaccccacctggaccagggagagaagtgattt

SEQ ID NO: 218460 - DNA, 201 bp, Homo sapiens
gtttcctgttcctgttttagtttgctgacaatgatggtttccagcttcatccatgtccctgcaaaggacatgaactcattcttttttatggctgcacaatrttccatggcatatatgtaccacattttctttatccagtctatcattgatggacatttggattggttccaagtctttgctattgtaaatagtgcagaatgc

SEQ ID NO: 218461 - DNA, 201 bp, Homo sapiens
aggaaaggtgtggagggcaggaggcttcccacttgactgatactgtcttgaagtggccttgtgcctgcaggcccaggcagatatttaagatgactcttctmttgtgattgtgtgagttctctggagatgcccctgctgggccaggtgactgcagcttctttgatagagccagggcctcagcttcaactggctactcccaac

SEQ ID NO: 218462 - DNA, 201 bp, Homo sapiens
ctagaaaggaggagggagaggaaaggtgtggagggcaggaggcttcccacttgactgatactgtcttgaagtggccttgtgcctgcaggcccaggcagatrtttaagatgactcttctattgtgattgtgtgagttctctggagatgcccctgctgggccaggtgactgcagcttctttgatagagccagggcctcagctt

SEQ ID NO: 218463 - DNA, 201 bp, Homo sapiens
ggaacccagaagtttaggaaaacacagaggcctttgtgagacaggttcttctactggctccctataaaacagacacagtgttaaatttagtcacataaagrcaattataacatgaagggagaaggaatgaatgggtcctgggacacagttttctgatataaggataaagtaccatggagtgtgaagggttaatacttaatg

SEQ ID NO: 218464 - DNA, 201 bp, Homo sapiens
ctagaggatctgtagtccaaggaggggaatgggttcctgcttgtctctcccagctcttcctccctatttgccagctgtgatctctcaccattctagaaagraggagggagaggaaaggtgtggagggcaggaggcttcccacttgactgatactgtcttgaagtggccttgtgcctgcaggcccaggcagatatttaagat

SEQ ID NO: 218465 - DNA, 201 bp, Homo sapiens
agtaaagatgctggttagggctgcagtcatcagaaggtttgactgggcctggatggtctgtgtggatcttttctcatgacatggcagttggcttcctccayagtgagtgatccaagagagagtgtccaagctggaatggtttttatggtttagtctcagaagtgacacatcatcacttccactgctgccatattctatttt

SEQ ID NO: 218466 - DNA, 201 bp, Homo sapiens
tatcaccaactttttaggtggggcagttctttactgcgtgggactgtcctattcaatgtaggatgcttaccattctttgaccctgacaccagcagtgtccmtataagaccaaaacatccccatacacctccaaaaggcctctggaggaggtggtaccactcctggctgagaatctgagaagggagagtaaataaagaagtt

SEQ ID NO: 218467 - DNA, 201 bp, Homo sapiens
cagactcaagacgggcacagagatgagagggtgaggcattgcagctggacgggtagccctctccctcctgggtcttttcttgccctcctatggataccctsgtccctgcctaccttgtccttgccctgcagatagggataagttcccccttctcattgtgggggcaagctagatcccgatctgcaggggcattgcttttaa

SEQ ID NO: 218468 - DNA, 201 bp, Homo sapiens
aaatgggatttgcagagagagtgaagtgaatgaagaccatgcctctgtcttctgattactgcttgaatctgtaagggagggattacaataattgcagcgaytaaaagacaacaacaatttggggaagcagatattcacatggccttggagtaacacccacacattacttattaattacaaacgaatgaagtacttttacga

SEQ ID NO: 218469 - DNA, 201 bp, Homo sapiens
atcacagtggaagtcctctcccggctccccctgcccctcccagcctggaggctggagctggagtgaccccagggaggtgggcaagggaggtgagtggtcgyacatatggctctggagttaaactgcctcgctgtaaatctcagctactcaccaaccgtgcgactttggaaacattgcttatggtctccgtgcctcagcttt

SEQ ID NO: 218470 - DNA, 201 bp, Homo sapiens
cattgcttatggtctccgtgcctcagctttctcgtctataaggtaagggataatattagtacctgcctcatgagttattgctaagattaaacaagataaarcatgtaagtcatttcatgtctggcacagtgtaagaggtaaaaacatgttagcttttattataccttaagttggggtatctcaacagcggcactactgaca

SEQ ID NO: 218471 - DNA, 201 bp, Homo sapiens
gggcagagactatttcgaacaacaaatcaatctgtatttaagaagtatgaattgactgtcacaagctgatgcagagtaggcagactgttgtttgtgaagartgtcaggggaagtattcctcagtgcatacgatatgcaccctctttgctgtttgtgattgagtaggcacagcttatagcagacaagcagacacagctatga

SEQ ID NO: 218472 - DNA, 201 bp, Homo sapiens
gacacctcctaccacccccaccatcatgacaaccaaaaatgtctccaggcattccagatagcccctggtttataacattcctccactgaggaccatcgttytaagtcactttttgccttaaacgttccagagtccccattgctcagaaagcttagctatgcttgctgggactgcaggcactgaaggtagggcatcttgaac

SEQ ID NO: 218473 - DNA, 201 bp, Homo sapiens
  misc_feature (1)...(201): n = A,T,C or G
tgagtttggggcttctatagggttttggttccatagatatgcctggacttgaactagcttaccttcccagccttgtgcatcgggaagctgtgagggtcagntccttctagattttgtgtcccctgacaagggttggaagagtctggctgcagccctggcctcaccagctggctccctcttgcgtaagtggagttgccacag

SEQ ID NO: 218474 - DNA, 201 bp, Homo sapiens
ccagtggtggtttactcatcacctacctctggccttaaagtcagtgcccatattttaaggcttggcagtacccctcctctagtgtcagtttctttatcagkcatcttaggctgatgtccgcacatctcagtggcttacaacaagatgtgtttatttcttactcatgctcctcggttgtcatcattcagcttcagctctgtc

SEQ ID NO: 218475 - DNA, 201 bp, Homo sapiens
  misc_feature (1)...(201): n = A,T,C or G
cttgtagactatcagatgtacgattatagtttggatatgtggagtttgggttgtatgctggcaagtatgatctttcggaaggagccatttttccatggacntgacaattatgatcagttggtgaggatagccaaggttctggggacagaagatttatatggctatattgacaaatacaacattgaattagatccacgtttc

SEQ ID NO: 218476 - DNA, 201 bp, Homo sapiens
tgtttggcatggcatcaaaagttcccatgctttctcctctgcctgtattttaaccccactgcctgtattttaatcccactgcctaccactccctgttttgmagtctgcatacgttgcgtggactatgggaactgcccattacataccgtccatgccatgctgtttctcacacctcggtgcttgttcatcctgcttggaatt

SEQ ID NO: 218477 - DNA, 201 bp, Homo sapiens
catgggatgacgcctcaggtgagtcctctaagagattcctgtgccaggagtgtgcatatgagtgcctggcatggggaaggagagctaggctctgtcatggrgaaggagagctaggctctgtcatggcagctctgggaccaggggcctctggggcttttcattagggcacatcctcatgagctgaagaggatgggtcacacc

SEQ ID NO: 218478 - DNA, 201 bp, Homo sapiens
  misc_feature (1)...(201): n = A,T,C or G
tttatatggctatattgacaaatacaacattgaattagatccacgtttcaatgatatcttgggcagacactctcgaaagcgatgggaacgctttgtccacngtgaaaatcagcaccttgtcagccctgaggccttggatttcctggacaaactgctgcgatatgaccaccagtcacggcttactgcaagagaggccatgga

SEQ ID NO: 218479 - DNA, 201 bp, Homo sapiens
tgagattctgaaggccctggattattgtcacagcatgggaattatgcacagagatgtcaagccccataatgtcatgattgatcatgagcacagaaagctaygactaatagactggggtttggctgagttttatcatcctggccaagaatataatgtccgagttgcttcccgatacttcaaaggtcctgagctacttgtaga

SEQ ID NO: 218480 - DNA, 201 bp, Homo sapiens
aaactcttcccaatcattggctcaggttattttgacatctccgtcatcagcactgagccatgtttggcaggctccagggacattctgaaggatttttataycatgtaggctcttaagctaagaaattcctaagggctcttgcaccctggaattctatgactttttaattcattaccttgtccaaatcaaggtaacggcttg

SEQ ID NO: 218481 - DNA, 201 bp, Homo sapiens
tgagtgagaacatgcggtgtttggtttcctgttcctgttttagtttgctgacaatgatggtttccagcttcatccatgtccctgcaaaggacatgaactcrttcttttttatggctgcacaatattccatggcatatatgtaccacattttctttatccagtctatcattgatggacatttggattggttccaagtctttg

SEQ ID NO: 218482 - DNA, 201 bp, Homo sapiens
ggcataagtagaattttagggaggagacgcaaaggcagcctgcagcagggtgttctagttaggcctggtcttggggtggctgccatgagagaaatcctgakaatcatattgacacaaagattcttactgcacttgtattttttatgttaaagtttgcatggttttttttcctcctctctctctcttttttttttttttttt

SEQ ID NO: 218483 - DNA, 201 bp, Homo sapiens
cccagctacaggccctggggcctcttcttttagtctcagtgcactgatttgtgggctccactccttggggacctggaagagctgttcagtttctcctcacytgctttggacctttggcagggctgctaaggtccccccataacttgggttctgtccttctagtccctgggactcttgtttttgtaacccatgtgactttct

SEQ ID NO: 218484 - DNA, 201 bp, Homo sapiens
atcatgggcatggcagatgctgaagctcatgtcgcggctgcctggccctggctgctcccagctacaggccctggggcctcttcttttagtctcagtgcacygatttgtgggctccactccttggggacctggaagagctgttcagtttctcctcacctgctttggacctttggcagggctgctaaggtccccccataactt

SEQ ID NO: 218485 - DNA, 201 bp, Homo sapiens
tttctatgtaatttttgctttggtgcttttgggcactggtcttctctttctgggtgttactgcttgctctctgatgtttttaaagtctgcttgaatggagkctgccacacgtgactttctgtcataactacttcatcttagattccacttatggctctttgctcctaatgagcaaatgaatatggctgcttaagagtggag

SEQ ID NO: 218486 - DNA, 201 bp, Homo sapiens
attgcaacctctgcctcccgggttcaagcaattctcctgtctcagcctccccagtagctgggactacaggtgcacagcaccatgcccggctgattttttgyattttagtagagatgaggtttcaccgtgttgcccaggctggttgcgaactcctgagctcaggcaatctgcccaccttggcctcccaaagtgttgggatta

SEQ ID NO: 218487 - DNA, 201 bp, Homo sapiens
caaaagcctggagtctagtgaagacagacaaaatcattggaataggaacattattctaccatgcaggcagaaagtgcattgaaagtggggaaatgcttttyagagggcagcattttcacttgtttttgaaggcgagtagaagatggccaggttggggaatggacacccatatgcaaagttcatgaacacagagaaggttca

SEQ ID NO: 218488 - DNA, 201 bp, Homo sapiens
  misc_feature (1)...(201): n = A,T,C or G
attgtaaaagaccctgtgtcacgaacccccgccttggtttttgaacacgtaaacaacacagacttcaagcaattgtaccagacgttcacagactatgatantcgattttacatgtatgagattctgaaggccctggattattgtcacagcatgggaattatgcacagagatgtcaagccccataatgtcatgattgatcat

SEQ ID NO: 218489 - DNA, 201 bp, Homo sapiens
tagaagatggccaggttggggaatggacacccatatgcaaagttcatgaacacagagaaggttcaaagtcactagaagtgggaagtgagccagcagccccyggcagtaggggtggaggggctgagaggcaagatcggaccccacaggacagtgtataccttgatgatatttgagtgttattctgtaagactcagacaaaag

SEQ ID NO: 218490 - DNA, 201 bp, Homo sapiens
gctggcagaaggcaagaaataactaagatcagagcagaactgaaggagatagagacatgaaaaacccttcaaacaatcaatgaatccaggggctggttttytgaaaagatcaacaaaatagaccactagccagactaacaaaaaaaagagaagaatcaaatagatgcaataaaaaatgataaaggggatattaccactgat

SEQ ID NO: 218491 - DNA, 201 bp, Homo sapiens
gtgatgtttaaattgctaggatggcattctgggcctttcgaaatctcctccatttcgttgtttttcctaccactcctcctccccaccctgtctatattccrgcaacaccagaatgtattcatgcatatatatgtattttttttcttgcacctctctgaatttgtatattggtttttctgcatgaaatcccctcctttctct

SEQ ID NO: 218492 - DNA, 201 bp, Homo sapiens
catctttccagcctccagtggtggtttactcatcacctacctctggccttaaagtcagtgcccatattttaaggcttggcagtacccctcctctagtgtcrgtttctttatcaggcatcttaggctgatgtccgcacatctcagtggcttacaacaagatgtgtttatttcttactcatgctcctcggttgtcatcattca

SEQ ID NO: 218493 - DNA, 201 bp, Homo sapiens
acagctctgctaggttctgttccacgtgtcttcccattctgaggcacaggctgaaggaccaatccctatttggaacacaccattttcctggaagagaaaaygaaagtgagagcctccatatgcaatggctcctaaagcttctgctagggcctagtttatatcatatcccattgatcacagcaagttacaggttcaagctca

SEQ ID NO: 218494 - DNA, 201 bp, Homo sapiens
tgagaattataatatactctgctgaaatccatgaaattaaatagagtcatgctgctgaaaaggatcttgaagaactccaatttcctcatttgttagacatktgtcattttgggccacctagcatctgagcccacttcttatgtttgggaaattccctactttttgagtcttggtaggaagagaggctgatcagaacaggct

SEQ ID NO: 218495 - DNA, 201 bp, Homo sapiens
atgctgacctcctgggatctggccacacagataatgtcagccctcaccagccacttggcctgaggctcccgaatttctgcatgttgcctctatgccctctraccccactgtctgccctggcccctagggaggacccatccagaaccgcaagtctaagcgctgtctggagctgcaggagaatagcgacctggagttcggctt

SEQ ID NO: 218496 - DNA, 201 bp, Homo sapiens
tgtttcttccctgaccttatctctcttttgcagaatcttgtcaaaagcagctgatactaaaaaggcacactctgcatctaagcatgggctcacttgcaacrttagcagtctaccaagatattgaggccaactaagatatttgtatcttaccaaggtatttcaccaaccgtctcttcgttgcatagatgaggtcaccatctt

SEQ ID NO: 218497 - DNA, 201 bp, Homo sapiens
tagataagtgatttctagcctttcttggatttagggccaggtctatgacttgggctacatcagtcacaagtatttgatttaagactttgaatcaagagctgtacctcgcactagctgaagtgccaggagccttgagttcttggggtcctggtagctgcaatgcagtgcccagtatccacagtattggcagtgcccagaggg

SEQ ID NO: 218498 - DNA, 201 bp, Homo sapiens
gacttgggctacatcagtcacaagtatttgatttaagactttgaatcaagagctgtacctcgcactagctgaagtgccaggagccttgagttcttggggtsctggtagctgcaatgcagtgcccagtatccacagtattggcagtgcccagagggtcctctactgaagtaataagatttggggtgatgttcttggtgacct

SEQ ID NO: 218499 - DNA, 201 bp, Homo sapiens
atgcagtgcccagtatccacagtattggcagtgcccagagggtcctctactgaagtaataagatttggggtgatgttcttggtgacctgagagcctggttygctacctctcttggcaattccatgagcttcccagtgtcctttaattaattcacttctgacccatgttagccagtgctgttgctgttgcttgcagccgtgt

SEQ ID NO: 218500 - DNA, 201 bp, Homo sapiens
tgacctcaagtgatccgcctgccttggccttccaaagtgcttggattataggcgtgagccaccacgcctggccagtagtatatactttttaatgtatggtkttctgattactgttttgtataatttctctctctgggcagctctattgtaaactcctcagggagagggctacatcttagacacaatgtttcttatagggcg

SEQ ID NO: 218501 - DNA, 201 bp, Homo sapiens
cctttaattaattcacttctgacccatgttagccagtgctgttgctgttgcttgcagccgtgtgtcctacctcctttcccagggaggcagggtgtacgatwtttttttttttttttgagatggagtctcgctctgttgcccaggctggagtgcagtggtgcgatctcggctcactgcaacctcttcctcccgggttctcac

SEQ ID NO: 218502 - DNA, 201 bp, Homo sapiens
ctgacctcaagtgatccgcctgccttggccttccaaagtgcttggattataggcgtgagccaccacgcctggccagtagtatatactttttaatgtatggktttctgattactgttttgtataatttctctctctgggcagctctattgtaaactcctcagggagagggctacatcttagacacaatgtttcttatagggc

SEQ ID NO: 218503 - DNA, 201 bp, Homo sapiens
tgagcctcctcatttctcaggaggaccaggtaaggtctagacatggcatagactatgtcctggggagagaccccattctatccaagtcattaatccactgkgctatatggagagtgatgtccaaggtccaaaactggccagagagcagcttagaggagttttggagtaaggggtacgaggcaggcaccagggagtgcacct

SEQ ID NO: 218504 - DNA, 201 bp, Homo sapiens
catgcacacacacacacatacacacacacatgcacacacagacacacacacattccaccactctcactgggaatattctaagctctgcttaatgctgtgcrgaataactgttgtatgctaaaaaggtattgagcctcctcatttctcaggaggaccaggtaaggtctagacatggcatagactatgtcctggggagagacc

SEQ ID NO: 218505 - DNA, 201 bp, Homo sapiens
ctggaatgagaatatctattctatgcctttcccacagttgtgttttggaaccacatgacttatctaattccacaggctcacattcgaagagaaattttgcsttgggatgaattgtacttggagtctcatttacctgctgtagaggatatttagatgagactttggactttagagttgatgttagaatgagttaagaccttt

SEQ ID NO: 218506 - DNA, 201 bp, Homo sapiens
tttttcacatgtactttatatagttggcatggagtgtaaaaacttgaccctttaatagcagctttcattctgcataatttctaatcaaggctatttccacktctgtgagtgtgtgtgcacatgctgagccctgctgctcctacctgcaccagccatcctagccgcacactcagacacacccaggcccagaagtcccccttg

SEQ ID NO: 218507 - DNA, 201 bp, Homo sapiens
aaggggacagagaaagtgggatagaatgaaagaatgctattggacttggagtacataggaccatagggaccatagagctatttggctgtgaatgtgctctrttcctcaagaaaaggaagaatgatgcaaaaggcatttttagggatcatcagggctgccactcccaccacaagaccaggagaagggctggtgccctgtcta

SEQ ID NO: 218508 - DNA, 201 bp, Homo sapiens
tttatggacattgtcaaaatttgaaagacataggaaagtgttaagaatataacaatcttccagggaaaacattttggcatatttccatttaatcttctctractgtaactacaattacattgctaccatcatagaatctctcttaacccacttcccttcttttatttatttatttttttgagatggagtctcactctgttg

SEQ ID NO: 218509 - DNA, 201 bp, Homo sapiens
ctgcaaaggaggctggtctcccctcagcacctttacgcaaggcaaaagctggtgcttgttggttctatagtgttcaagggccttgggctgattatggacaygaaatctgtctcagcagaatacttgtttctccagagttaattcatttgctctctctgttcctctctctttggtgtggccatctgttctctgatgttcagc

SEQ ID NO: 218510 - DNA, 201 bp, Homo sapiens
ggaaagacttgcccccatgattcagttacctccaccgggtccctcccacaacacatgggaattataggagctacaattcaacatgagatttgggtggggaygtagccaaaccatatcagagactatatatgtaaaaactggggagagggctggatgttcaggatagggtttgctgagaaagtgacttttgagtaaagacat

SEQ ID NO: 218511 - DNA, 201 bp, Homo sapiens
tgatcaatgtactttgtaatctcccccacccttaagaaggttctttgtaattctccccaccctggagaatgtactttgtgagatccaccccctgctcgcaraacattgctcctaactccaccgcctatcccaaaacctataagaactaatgataatccaccaccctttgctgactctctttttggactcagcccgcctgca

SEQ ID NO: 218512 - DNA, 201 bp, Homo sapiens
atctctgatggctgcctaccatcatctagcctgggacccaaaaaacgggcgcctaagaaaactcccattccctagtgactaatgccagacagcctgactarcctgccccacacactctatccctggacttcacctaggcctgctgatcctcctcacgtcttacattgtaaggaggcacaggatggaagaaccagcattcaa

SEQ ID NO: 218513 - DNA, 201 bp, Homo sapiens
ggaataggtgtatttgtatggttagaggtcagagtatgtggacagtagataacactaggtaggttggctggatctgggttgggaaaggcttcgaaggcacrgtcaagattttgtgtttatccagtgagcaatgggagccgtgataccttttacagcattgcagtggcagaatttgatttgtagaggactatagagacggga

SEQ ID NO: 218514 - DNA, 201 bp, Homo sapiens
aagaggtgtagctagggcaccatgtagagcacagggtaaacagaggccaggccatgctgtgggttgtacttcttggagggcaaggcagaggcctggggttyctggaggtcagggctggaacagggcagaagcacaggtgggcagatagaggggacggggacacagatagcagatggcagagcaagaaggaagtccacagtc

SEQ ID NO: 218515 - DNA, 201 bp, Homo sapiens
aatcccatgcgtccatctggttttccaaccttttcttctccatatcaaaacttcctattagttcagtgataacccaatgtcctgtgatgtggtcacctggkctgggaaactggagcttcttgggatcagtcaggcactgtgtatgtgttcatttttagcagagtagttaattgcgcagagctgaagcccgactgcctgagt

SEQ ID NO: 218516 - DNA, 201 bp, Homo sapiens
cacctgtgagccaccccaaccccaacaatttcctgtgctgtgtcagtactaaattgggtcagcagaggtctgaatctttcttgagtcaccaggaagaggtrtagctagggcaccatgtagagcacagggtaaacagaggccaggccatgctgtgggttgtacttcttggagggcaaggcagaggcctggggttcctggagg

SEQ ID NO: 218517 - DNA, 201 bp, Homo sapiens
tttagtcagcaaagacactgacttctattagttcattattctcattcccatttgctaaattactcaaggtggacaaatagaggacacggagttatggtccyaggggaagagcttctgttgagcctacaaagctgactccttcggaaggctgctggacagactggaaaagagccaagtcttcagaggcaagcaggcctgagt

SEQ ID NO: 218518 - DNA, 201 bp, Homo sapiens
gggaggtgtcctgtatcctgcaggatgatgaccggtgcttgccagcatccctgctgccttctactgagagatgcccatggcgcatctccatccacccaccrcgatgtgacaaccaaaaacatctccagacatggctgctgatctgggtattggcctgaactcatttaagcctccacaatcctgtgaggtaggtgttaccat

SEQ ID NO: 218519 - DNA, 201 bp, Homo sapiens
tttaattaattcacttctgacccatgttagccagtgctgttgctgttgcttgcagccgtgtgtcctacctcctttcccagggaggcagggtgtacgatatwtttttttttttttgagatggagtctcgctctgttgcccaggctggagtgcagtggtgcgatctcggctcactgcaacctcttcctcccgggttctcacca

SEQ ID NO: 218520 - DNA, 201 bp, Homo sapiens
gccaccctagcagattaatcacaccgaggagggggtcataggaatctctgatttatagtgggtcatcaaaaggataggtaaccacctgctacttgcaagcrgcatctgaagtggaggcagtcttgtgggacttagccctcaaccaatggtagatggggtcggaatggaattgaattagagaacacgcaggtggtgtctgct

SEQ ID NO: 218521 - DNA, 201 bp, Homo sapiens
cagctggatagcacaagcatgtccacaaggagacggtgcctcacagcaattgaaagggacttaacccccaaaaagggctctgaatatgctgagtaaatagrtgagcccagttagctgataaaaatgactctcagattagagatgggaaggtttttatttggattttagaaaattgctccccactccatcgccgccatattg

SEQ ID NO: 218522 - DNA, 201 bp, Homo sapiens
acccgcctcagcctcccaaagtggcacggtgtaagaattttaagagcattagctttgaaaccagacttcttgagtttgaagacctctagaggtagctctcsgttacctctgcacagagcaagcaagctacttaacttccatgagcctccatttcctcacctgtgacattgtcctcacctgtgagagtgacaagatttgcct

SEQ ID NO: 218523 - DNA, 201 bp, Homo sapiens
agacttctccctaaaaggaattgtgtctggccattgtgatattatgaaatgcatagttggtcttcatccccatttctggcaaaaagttcttggaggtggascacccttctgccatgccttacaccatgcatttcttccatctggctgtttatctatatcctttataatacactggtaaacataagtaatgtgtttccctga

SEQ ID NO: 218524 - DNA, 201 bp, Homo sapiens
aacagccactgattagagacataaaaaaagaaatactttaagtgagtaagtggttcatcttcatataggaaagtataaattaaacatggtccaggagatgygctttgaatagcagctggatagcacaagcatgtccacaaggagacggtgcctcacagcaattgaaagggacttaacccccaaaaagggctctgaatatgc

SEQ ID NO: 218525 - DNA, 201 bp, Homo sapiens
atagcactgtagaccttcactcagatggaattgatcttgcggacataatgaaagggcttgtaatcagaaaaagcatgtaaattgctactttcttggcaagsagtttgtaagggagagcctctgcctgaattgttagtggactgcactgcgctcagtctcttactttactctcatctgcctaatctgaggacaggggaagaa

SEQ ID NO: 218526 - DNA, 201 bp, Homo sapiens
cctcttttgctgtctggtccacagttggtatacagttggtgccctggtcctgggtatgtgtatgtgtgtgtttgtatgcccacctgccagccagcactcaygaaattggtcttgcaaagacttctccctaaaaggaattgtgtctggccattgtgatattatgaaatgcatagttggtcttcatccccatttctggcaaaa

SEQ ID NO: 218527 - DNA, 201 bp, Homo sapiens
atggacggccaatttgaatctgactgggacatgctaatgagccattcatatgtgtgggatttgtttctgattcgattaagcttcagagagaggaaagaaasagccactgattagagacataaaaaaagaaatactttaagtgagtaagtggttcatcttcatataggaaagtataaattaaacatggtccaggagatgcgc

SEQ ID NO: 218528 - DNA, 201 bp, Homo sapiens
agatggaattgatcttgcggacataatgaaagggcttgtaatcagaaaaagcatgtaaattgctactttcttggcaaggagtttgtaagggagagcctctkcctgaattgttagtggactgcactgcgctcagtctcttactttactctcatctgcctaatctgaggacaggggaagaagtttcatgtttggtgctccaag

SEQ ID NO: 218529 - DNA, 201 bp, Homo sapiens
ctgcctaatctgaggacaggggaagaagtttcatgtttggtgctccaagagaatttcagagtaagggtggggagactgtaaacccagatttgaataggaarctagtctaacccatgctgtctgtgtggcaaatgtgtgctccagacttctgaaacaagtggcacagattgtgcacagctagctgcgtgacaagtgtctttg

SEQ ID NO: 218530 - DNA, 201 bp, Homo sapiens
ctgcctggcctcgagtttcttccgtggtgtaatcagaactctctctgacctcctgagcatctgtttggctcttcacaaggcctgcagcgtcccgagaactrgagagcaagtcactatgaagggacttagagagtcactgacttggattaaaggatgagggatgaggagtgagtctagctggtggccagagagtgggctgag

SEQ ID NO: 218531 - DNA, 201 bp, Homo sapiens
ttcccatccacagagcccttatggacctgaattctttctgctgttcatttattcatgtgttcactcagcccatcaccaggtgcattctgaatttctactcygtgctgaacttcatacccagtattagggatacctgatgagcaaagcagacacggccctaaccttgtacagcttatagtctagtggagacactgacgtttg

SEQ ID NO: 218532 - DNA, 201 bp, Homo sapiens
ccctccgcccccagaacgtgtactacacgagcagtcagcagatccatgtgggcattctgagccccaccgtggatgatgatgacaaccgatgcctggtggaygtcaacagccggccccggctcatcgaatgcagctacgccaaagccaagaggatgaagcttcactggcagttctctcaggtaacagccccagagcccgggc

SEQ ID NO: 218533 - DNA, 201 bp, Homo sapiens
ctagacctgtgtactccatattcctatgacatgtgagtccaacagtggagagcgttgctgcttgctgaattcctgaattctacgtggcaggaaaaacaaawcccaccctcctgctttgcaaatgagatgggtggatggatgcatggatgcatgggtgggaagacgcataggtgtgggtgggagatagattctgtcttttct

SEQ ID NO: 218534 - DNA, 201 bp, Homo sapiens
caaagaggggcttcctgcagcctggatgaccggggctgccttcctttgtttgtggggagggacgcatgcctggcaacttcatagaggcccaggccatgggyattgccagaggctgagcagaccatgctgaagaaagccaccccgagtgcctggtcccacaggccttattatctgtagctggctttgaatgctctttgcatc

SEQ ID NO: 218535 - DNA, 201 bp, Homo sapiens
gtgagttggagctttacaaaagcaaatctttaaacctttcctcacctgatgaatttgatggggtgacagaaatgaattagaaattaagtaggggctcagartttacatgagctccatgccaaatggaaattaaaaagagtgtctccaacagggttaatggtgaaggtcaggttcccagcatccttggcagggtgtcccgac

SEQ ID NO: 218536 - DNA, 201 bp, Homo sapiens
gtggctggggcatgttcaagttgaggccaggtggtggtgaaatcatagctgatggagtcgccagggtatggtcagggtctgtgcggggctggagccgggakgaaggttgaggtcaaaaggatgttaaggttgagatgaagtcagagttaggttgaaatgagagttgagacagagagagtcccatttgaatgagaatatggc

SEQ ID NO: 218537 - DNA, 201 bp, Homo sapiens
aggaagggttgatgggtgcagccaaccaccatggcacaggtatacctatgtaacaaacctgcacattctgcacatgtatcctagaacttaaaaataaaaargaattgtgatgcttgactgttcactttttaagagcaggagtcatgtctgtgtgcttcccactgtaccccagtgcacagtatagcttctggcatctaccaa

SEQ ID NO: 218538 - DNA, 201 bp, Homo sapiens
ataatttataagatggaaggatgagaaacctggaagacatcatcaacattcggggtatctactgcagtagataccaaggcctgtttgaggaataggtgtawttgtatggttagaggtcagagtatgtggacagtagataacactaggtaggttggctggatctgggttgggaaaggcttcgaaggcacagtcaagattttg

SEQ ID NO: 218539 - DNA, 201 bp, Homo sapiens
ggaacttaaacaactcaacaagcaaaaacaaataacccattaagaatgggcaaaggacatgaacagacactcctcaaaggaagacatacaagcagccaacmaacaatgaaaaaatgctcatcattactaatcatcagagaaatgcaaatcaaaaccaccatgagataccatctcacaccagtcaaaatggctgttattaaa

SEQ ID NO: 218540 - DNA, 201 bp, Homo sapiens
atgttcaggggaagtgaggaacccattacggtgccagggaaagccaggatgtagtcaggaagggatcaagaatcagggcagaggaccagaccccgcctgtyggtaccacctctaattatatctatccctgtcctggatgctgtctcgagcaatgggccagggcccttgttagagacctagtgaggccatgattgaggcgtg

SEQ ID NO: 218541 - DNA, 201 bp, Homo sapiens
taatatgttttgagtgtatatcatgtaataagcagaggttcattaatagagatataagggtgggtaagacaaacatggtgtctgccctcagggaacttggratctaaagggggtgactgctgttacagtcgcatccctgacagctaacaccaagcacaaatccttctatgtaattctgccaacatcctcggaggttggcag

SEQ ID NO: 218542 - DNA, 201 bp, Homo sapiens
cctactctctgctgtctttccgtaacattctctaggactcagtttcctcctttgtaaaatgggggtaatcacagcacctatgtgatggagttgttatgagkattaaataagataacccatgctaagtgcttagcacagtatctggtatatcagaaatgctcagcaaatatccagctgccagcctgcctggcatctagaggt

SEQ ID NO: 218543 - DNA, 201 bp, Homo sapiens
ccctctgggtccctggtgttcaactttgcctttattgtactgcaatggcaactgggaaccatcccttcctttcaacatggctgaaatagtacataaatgtygaaccatttctgcaagcgactttggagatggacagggggctggaaatatcagcgttttgtgatacttaccagctttcagttcatttagtataaaaagtta

SEQ ID NO: 218544 - DNA, 201 bp, Homo sapiens
tgcgaggaaacgaattgtgccaacaacgagtcaatctcaaagaggaccctaagccccagttgagaactacagtgctggccaacaccttgatttcagcccartgaaaccctgagcagagaatccaggctcattgtacctggacttctgacctatagaaactatgagataataaatttgtgttgtttcaagctgctcagttta

SEQ ID NO: 218545 - DNA, 201 bp, Homo sapiens
atgtaataaagatagtacactgtaagtaatcagcactttccaggtgaggaaccatttttaataagttgtcaacctgtctagtactatgaattattttttargtagaagaagatgaagaaaacccatttggagtgatttaactttcagatctactcctcatctctgccccttcttgacaggggtgcaagtgtcctggggtgc

SEQ ID NO: 218546 - DNA, 201 bp, Homo sapiens
tggcaagggccacactgctttctccctgtctagcccagctgttcccatccgtgtgtctgtgtcagggaagcatgcctctttaacattagcagggttggtcyggcttgttcattccaatagattgatgtgtggaaacactgggaacactgttttatgtgtgaacagtgtagtgtatatttagaagtccgggtgtcagctccg

SEQ ID NO: 218547 - DNA, 201 bp, Homo sapiens
gcctcgtgcatcatcatatccttgatcacaactgactttctctgcttgcacatggccatggccaacagaaccccccatgcccagtttaaacagccttacarttctagtggccaccacccactgatcacagtctctgggttctgtttaggttcctaagacaggataagagagtaatgagatggggaggagagagaggcagag

SEQ ID NO: 218548 - DNA, 201 bp, Homo sapiens
tcagtactaaattgggtcagcagaggtctgaatctttcttgagtcaccaggaagaggtgtagctagggcaccatgtagagcacagggtaaacagaggccasgccatgctgtgggttgtacttcttggagggcaaggcagaggcctggggttcctggaggtcagggctggaacagggcagaagcacaggtgggcagatagag

SEQ ID NO: 218549 - DNA, 201 bp, Homo sapiens
ggcgtcccaaagggctgtgattacaggcatgagctaccaagcccggcctatttcagtattttaagaactgatatggtggaaccagtgcataccagctaaayataaatgctgaaacgttttattttttttaaaagatcaactatgtcctgactacagcctaagcaaaagggttcctggtggtttctgcctgtcaacagggaa

SEQ ID NO: 218550 - DNA, 201 bp, Homo sapiens
tcagaggcctccacagatcttcttgcaaggcagtgggcaaaggagcaagcaacgtagaagcaagatctcaggcctctctgaagctgcatttgctgcaagarggaagtgtcttcctgtgctgtgtcagctaagagggcagaacctccccaggcgaggcagtcaataaatggaaaaaggacaggcatcttcgcaacttggagt

SEQ ID NO: 218551 - DNA, 201 bp, Homo sapiens
tgattcaactgtgtccatttctgaacctacctctcagctgccatgcatgattctatgccagggcacccaggccaggggcacgtaggggctaaaataaagtmtgtgctgtctatttgctaaattatgcatcctggtgtgagtctgtctccaaagtgccttttctaactgcatagtccagagaaggcaccttttggccaagta

SEQ ID NO: 218552 - DNA, 201 bp, Homo sapiens
cactgctcattagcaacctgcagaaaagctgggatgcagtcttcactgatttggtgtgtaacggattccttgaagggaagcctgctttgctgatggggtcrgcatacgtggcgtactgacatgggaatcatggcatttccagccagtgctcaactctgtggaatgcttcccctttcagcccaagtctcaaattgcctccaa

SEQ ID NO: 218553 - DNA, 201 bp, Homo sapiens
caactgcagaaagttggggaaagggttaggagcctcaagcagaaggacttgtgtgtataaaagtgtggaagctggaaacagcatgcctattttgtaatttmttggtagagacatgccactcttagtgaattagtagaaaggcttcctttctccccctgcctctctctttcctttcggatttctatattttgtgttcttatt

SEQ ID NO: 218554 - DNA, 201 bp, Homo sapiens
ggtttcatcgactacagagctgtagaggaagaagctgatgtcaggaagggagaagttatcagaggccagaatagcagcatctgatcagatcctagtgaggygtaaggaggggaagccctggtttcctccctcttgccttcctctgagggtccagagccaccttgactgtcttgggaggcaggatagaaacctggcttagca

SEQ ID NO: 218555 - DNA, 201 bp, Homo sapiens
gagaacatggaaagagcatggaggtgcccatgagccaggactcgcatggagcacctaatttccaccacattttattcacagaatcagccatgtagcagcckctgactgcaagggaagctgggaaatgtagtctacctggtttccctggaagaaaggaaggtggttttagtgaacacacagcagtgtctgccacatgaccat

SEQ ID NO: 218556 - DNA, 201 bp, Homo sapiens
aatatccctcacttacccaacaagcaatgtggaagttccttgtgggcctgcagccttccttccatccaaggacataggcttgggccctgtcgctttctgcrtgaccccttgcatgcaatcggcagatacggggagagagaacatggaaagagcatggaggtgcccatgagccaggactcgcatggagcacctaatttccac

SEQ ID NO: 218557 - DNA, 201 bp, Homo sapiens
gggcagaggaaaccaaagaaaaacagtactaaagtcttcctggaggagtataaatgttggtcattagaaagcgttgagccaagacatgactcatgcactcmttcattcttgcaatgcatatttatgaaaacgaaacacacgcctgtggcacctctgccacatgccaggctcggcgtagcagatctgtcagggctggggtat

SEQ ID NO: 218558 - DNA, 201 bp, Homo sapiens
tcttttgattagctgtggttaaagctgagttcaaagcctgccccagatgggaatgtagtgaacaggacaattgcctataagcgggaagaatctgctgagarattgggctcagtgctccctatgtgccccccaactcttatatcatatacatcctaggattccaaagcagacagaattggaatcctagacccatgccctcta

SEQ ID NO: 218559 - DNA, 201 bp, Homo sapiens
gtttctccaagagttggttgtctggggtctgcacagcacctcgctgttggcaaggcctgggccggccccaaggatgagctgagcagccagaatcttcagcygagtgggcagcggcagttggtccgggcccgtctgttgtgcgctttggtcacagcccccaccctgatcctccgatccgtacggtttatagctgataaacgg

SEQ ID NO: 218560 - DNA, 201 bp, Homo sapiens
ctacagaactgcccttggagatgcttcacagctggtaaagagctgtccatcctctgccctaatccctgctgagcccaggagtgagttagggatggaggcakccctgctatggtgtgatgacccttggtgtgggcagggccaatggtcactggaacatgctggcatggccatatgggctgtcttgaccaacatctgttcaga

SEQ ID NO: 218561 - DNA, 201 bp, Homo sapiens
caaatgccgtaaggtattttaaatggtattttgattgatttttggctatctcgcctggcttttgctgacttacagtctaaacacataaacttttgccatgrcaaacccccaagactactctgtgtaggattagctatattacctccatgtcacaggtggggaaacagagtcaaagagtgatttttcacaagctcacataat

SEQ ID NO: 218562 - DNA, 201 bp, Homo sapiens
gtgagagcctccatatgcaatggctcctaaagcttctgctagggcctagtttatatcatatcccattgatcacagcaagttacaggttcaagctcagtgtyattgagaaaccattctcccataggatggagggatactgcaaggcaatggtaataaataactatgtgtaatatttcacagagaaggagggcagataaatga

SEQ ID NO: 218563 - DNA, 201 bp, Homo sapiens
cccttccccagtctctaggaatcttgttgggggcacaaggtcatgccaaagtagagtttggggagaagctgcaacctgggagtggcttcatctctgcttcygcgtccctgtgcaggactcaggaattgacattggggacatcactgcaaggaaggctctcaggaaacagctgcagtgcaagaccttccggtggtacctggt

SEQ ID NO: 218564 - DNA, 201 bp, Homo sapiens
gtaaattatgtttaggaagaaggtggctttgagcaatttttgttctcccgccactgtaatcttctctgccattttctgatagtgaataagaggactgaacrgttcaggaatgaagttggagctcaggaaagtggctgcctggcctcgagtttcttccgtggtgtaatcagaactctctctgacctcctgagcatctgtttg

SEQ ID NO: 218565 - DNA, 201 bp, Homo sapiens
tggaaggccagccaggggctctaaggctccctacggtggaccctgcgatgtgcttcccgatccccgccaggaatgcaggactagtttccccacatgctggygtagggcctgcagaagcctcagccgcctatggggtgctcctgctgaggagactgccttgcctggcccacgcccctccccggactgatccacaggaaatgc

SEQ ID NO: 218566 - DNA, 201 bp, Homo sapiens
accttatcagctggtacagggaaagactgaactaattgatttctgatttccagggggacctggctggaagatatgaaggaaaaatatcattcttgaactartaagttgagagatcacagccttcaggggaccagaagggaaggctgaacagagaagggcaatttcacgttcgccatgtccatatttctatcgtcatgagcc

SEQ ID NO: 218567 - DNA, 201 bp, Homo sapiens
ggctccctacggtggaccctgcgatgtgcttcccgatccccgccaggaatgcaggactagtttccccacatgctggcgtagggcctgcagaagcctcagcygcctatggggtgctcctgctgaggagactgccttgcctggcccacgcccctccccggactgatccacaggaaatgcctgaccaggaaggggttccttcac

SEQ ID NO: 218568 - DNA, 201 bp, Homo sapiens
cactcggtgcatccaacaggcagctgggagctctgccctggcctccctccctctcttctgtggagcagccatggcttgccgctctttactcctgctgctcrtaatcccaggggatctggtcccttttcctttagctttccaaacctttgtttggccatgctccctcttctcctttgccctccttttaggtttattaagttc

SEQ ID NO: 218569 - DNA, 201 bp, Homo sapiens
gctgtgctcttccgtgaacaatgctcccagccacagctcttgctgggctcctggaaggactctctcccttgaccccttcaggcctaatgtggtaatggctycccccttttgctagccaagggtgcctctacctctgttgactttccttaatgctgtctgcctttgtaaatagtttttaaattaaactcagttggaaatttc

SEQ ID NO: 218570 - DNA, 201 bp, Homo sapiens
tgaccccttctgtgctgctagagtagagacttgatttgtagccaaccaaagagggcatggcctgcgtgcagagatatgtgattctctttgtgttttccatygccggtgcccatactgtgacttccagtggccttctccagtggctcaggtggttctccactgagcacctgacctacaactagggtagtgacctggttcact

SEQ ID NO: 218571 - DNA, 201 bp, Homo sapiens
tggaaggactctctcccttgaccccttcaggcctaatgtggtaatggcttcccccttttgctagccaagggtgcctctacctctgttgactttccttaatrctgtctgcctttgtaaatagtttttaaattaaactcagttggaaatttcatgctggggccctgacagatccacacccctctgggctgatgcatcccctgg

SEQ ID NO: 218572 - DNA, 201 bp, Homo sapiens
aactttcagtcattcgcgtttccttgagagtgatgtttaaattgctaggatggcattctgggcctttcgaaatctcctccatttcgttgtttttcctaccwctcctcctccccaccctgtctatattccggcaacaccagaatgtattcatgcatatatatgtattttttttcttgcacctctctgaatttgtatattggt

SEQ ID NO: 218573 - DNA, 201 bp, Homo sapiens
actcaggctgttcctgtaaatgactttccttctctgtttgcttcctggctctctctacctgttttcctttgcacagaagccaacagagtatggcgaaggcytcttgtctgtgtttctgagcagtccttccccagagggaaccagggcctctcaaaggccacacatgctcctgcctgcctgctcagcctaggcataccccag

SEQ ID NO: 218574 - DNA, 201 bp, Homo sapiens
agcactgtggcaggggccctgtttctgcggcctcatctatgtagctagtctcgcaaggggataaggaggggagtaaccactcatttttaaatattatttasaacaggccagatctgtacagccccagagcagggatgccagggctaaatgtgagggtctctttagttttctggggataactaacacaccacaaatatgcat

SEQ ID NO: 218575 - DNA, 201 bp, Homo sapiens
tactgtcaaactcacactcaagtgaactcagcttcttgggagcttactttattagcggctgaacacatagtgcctagcgcagggcctggcctgagcaggcmccatggagtctttgtgaaatgatgggatggatgaacacctgcaggctgtagcatccctgcaaggattcaggtacaggtaaaactggaaattgcagtggag

SEQ ID NO: 218576 - DNA, 201 bp, Homo sapiens
gcaataatctcattgatgagggctctgccctcataacctaatcaccccccacctcctagtaccaccaccttgggggttaggatttcaccgtatgaactttktgggttcatatacattcagtccattgcactggacatattgcagctcagtcagctagcgtcagccgtggccatgatttaccccttagctttagcacatcca

SEQ ID NO: 218577 - DNA, 201 bp, Homo sapiens
ttgaccagggagattgctgtatgggggtgctaaacttgagaaaattcatcggattgtacacatgtatttggtgcacttttctgtatgtacatttacgtcarcaaaaaggggaaaaaagatgatgcctgaatatacagttggaacggtcacagaaggtggcgaagctttctcataatccgcagggaatactgtggcactgta

SEQ ID NO: 218578 - DNA, 201 bp, Homo sapiens
gctccagaagcctccaagttctgaaagcatctgctggcccctttaccacacaaggtttccctgccccacagttcatcctaggctcatgtcagcttgctggyctgccacttgtggtcctcccttctctttgtcagaagcaagccccctgttcttcatgctggcccatgaaggtcaactcctcccctcttttgctgtctggtc

SEQ ID NO: 218579 - DNA, 201 bp, Homo sapiens
tcctaagatggggatagtcctgatgcagcatgggcttctgactttcagagcacattgtgacaggcagagaagtttgaggaaatgaatacagggaagaaggyaagtagggcgggaggtacaaggacctgggatggtgccaagcctctgacaagggtggcccaggtgccagcaggcctactcgctcctcaaagatatatgcat

SEQ ID NO: 218580 - DNA, 201 bp, Homo sapiens
cacccattacccaagcaggatatactgaacccaatttgtagtctttcatccttcaccccttcctaccctttctccctgagcccccaaagtccattgtgtcrttcttatgccttgatgcaacataaaatgatttttataataatatcatgaagacaacctttcacagaaaaagggaagtggaatggttaaataaagggggag

SEQ ID NO: 218581 - DNA, 201 bp, Homo sapiens
gaagggacaagagagctctctgggattccttttataagggcaataatctcattgatgagggctctgccctcataacctaatcaccccccacctcctagtascaccaccttgggggttaggatttcaccgtatgaactttgtgggttcatatacattcagtccattgcactggacatattgcagctcagtcagctagcgtca

SEQ ID NO: 218582 - DNA, 201 bp, Homo sapiens
gggcaaatcctttaagagaagatgtagcataccagtgtttataatctgagtttcatttgattaagaggggaagctctttagaacaaatatcatttctgagygagagaatgttcagcatctcagcctcatttgtatcatttgataaaagggccccactgagccaagtgtgaggatgatgcttgagccagacacatagacacc

SEQ ID NO: 218583 - DNA, 201 bp, Homo sapiens
gtttgcaggaggaagcgagtgtggtattaaatcagaatggggacttctgaatctggtgaggaggaaggcaatggaaatcttagtgagaatgctttcattgrgatgtcggagactgaatccagatgatgtggcattgatgggggaggaggtggtaaggcaatggaagctgtaatatgcaacccaggatgatgccagctccta

SEQ ID NO: 218584 - DNA, 201 bp, Homo sapiens
gtaggacttgacaccaagactgtttggccccagaggctatgctctgaaccataatgacttcctgtcttccaaaaggcaggctcttggatccatatcttacygtgcttctaaattatcctgtgaccctgaaccttagtttgctcacctgggaaatgaagggaggtcctggttaggttcccttcagttctactctattgcagt

SEQ ID NO: 218585 - DNA, 201 bp, Homo sapiens
ataaaccagaatagtccccagcaaaccagaacatatggtcattctactgagaattttttgtgcatgtttaatcacctccttaaatgccccatctccaatakagtcacatggggagttacagcctcagcatatgaatttgaggaagggggagacaattcagtccatagggagtgctgtaacagaaaaaacacagtgtaagta

SEQ ID NO: 218586 - DNA, 201 bp, Homo sapiens
ctggagtttcctctaaggaattccctgtggctaaggtaaagccataaggaagttccatgagaactgggaggattggaggaagtgggtatcagaatcagacygagagaaacgacatctccttgtgctgcagccactgcggtcacccctggcccccagcttttgtgctcaggacaaagcgcccacttccaaaactctgtctgt

SEQ ID NO: 218587 - DNA, 201 bp, Homo sapiens
gacctcctgggatctggccacacagataatgtcagccctcaccagccacttggcctgaggctcccgaatttctgcatgttgcctctatgccctctgacccmactgtctgccctggcccctagggaggacccatccagaaccgcaagtctaagcgctgtctggagctgcaggagaatagcgacctggagttcggcttccagc

SEQ ID NO: 218588 - DNA, 201 bp, Homo sapiens
caagctatttccacccatgtgtgagtgcctgctcatttcactgtcataataatgctcccccattcatactcctgtggggatggaataagataaactccatmaagcttttcattcagggctgggcatgtaggaagtactcaaaaaatgttagctactgatggtattattattaccaagtcactttctttccatgtttggggc

SEQ ID NO: 218589 - DNA, 201 bp, Homo sapiens
gctgagcaggtacccaaagaagtaatactaggttgtgttgaagtacctggttgaggttaaagatcatgagtttgtggtggatttaatttacccagttccaygaattttctctggtggtgctagcatccagggaacaggtgtggagaaggtgaacaaggctatagaggtggggtttacagggtgtaaaaggcagaaaaagta

SEQ ID NO: 218590 - DNA, 201 bp, Homo sapiens
atgaggtaggtctgggctggggtccaagagcctgcatttctgacatgctcctcagcgatgcccatgctgctgggccatggaacacactttgtagagcaagsgatagctttgtagcaggcaggacaagccctgtgcatctgaccttggagggtttatttccgttttccctgtgcctggaagtttggctttagctaatttcat

SEQ ID NO: 218591 - DNA, 201 bp, Homo sapiens
tttcccaagctcttactgtaatgacttatatgactcttgagtttctggctactctgagtattgaatgcccatctctccctgttgattcaagccctgacccyaggcctgggccctgctttggccactttctatggaagtaaagtttctctcatagatatagatatagatatagatgatatagatatagatgatatagatatc

SEQ ID NO: 218592 - DNA, 201 bp, Homo sapiens
atgcaagtactctgttcatgtatgcacacatacgtttgtgtacatgtgtatcgtgttacatacatataacacatgtgtttgtgtgcatgccttgcatgcayatccatgtgttcatattcatgcatacaagtgtgtgtgtgcatgtgtgcacacatgtatgtgttaatgcatccatgtgagcactgtgtttgtgtgtgtatt

SEQ ID NO: 218593 - DNA, 201 bp, Homo sapiens
tatgaacagacacttctcaaaagaagacatttatgcagccaacagacacatgaaaaaatggtcattatctctggtcattagagaaatgcaaatcaaaaccrcaatgagataccatctcacaccagttagaatggcgatcattaaaaagtcaggaaacaacagatgctagagaggatgtggagaaataggaacacttttaca

SEQ ID NO: 218594 - DNA, 201 bp, Homo sapiens
ccttgggagaggaggaggagtcccagtgggatctggggcttcagctccaatagtgcaaagcatgctaggatcttggtcatagcctaagggaaaagaggtarttctgggaataggtgagatgtaggtgtgtgagtgagccaggcaacaaggctggacctttagggttcgaggtgtggtagaggggagggggtagccaggggt

SEQ ID NO: 218595 - DNA, 201 bp, Homo sapiens
acaaaactatgtgtgttttcttctcttccttcccttcctgaagctgtggcagagtttccatcagccaggtgaggcttgacacatgtgaggggtggcttctwtggagggctagaggccaggctctgagaccagggtatcctgcaggatgggggcccttgccccaaggtgagggacagagtcaggagaacctccggccctggg

SEQ ID NO: 218596 - DNA, 201 bp, Homo sapiens
agcattagagccaaagccccccacttcccttctcccctttcttatccctcaagcctcagccaaaagcctgcttctttagggcagtctttcctgaccatccyatctaaggtgtccttacttgttattcttagatctctgtaccttgtctgattttttcacagctcttggatttggtgattctttgtgaattgttacacctga

SEQ ID NO: 218597 - DNA, 201 bp, Homo sapiens
gaaatgctggagatctggtttacagccctgctgagctgtgtagagctgactagagaatgagccaaatcaatcattggcagctgaggaggagctgagtgggyggggatgacgtttctctgccccgggggtttgtaagacgtccacaggcaggataacagctcaccccagcctcagaccagagttacaggagggatgctgctg

SEQ ID NO: 218598 - DNA, 201 bp, Homo sapiens
attggcagctgaggaggagctgagtgggtggggatgacgtttctctgccccgggggtttgtaagacgtccacaggcaggataacagctcaccccagcctcrgaccagagttacaggagggatgctgctgtctcagaactttgtagcatcttttattctaggctcctccagctctctggtactgtcttagtccaggccccca

SEQ ID NO: 218599 - DNA, 201 bp, Homo sapiens
tgcttttgcatcagctttttctcagccaattctgtgccccattcaacagctggtatgcaggccaaggaattcttagtgctgcccaactctgctctacaagmaatatgaggaagggggcttctctagccttctcactcctggacacaatcatgtgtcacttctgctccctggctgctgcaccgtggtggctcaggagccacc

SEQ ID NO: 218600 - DNA, 201 bp, Homo sapiens
tacagatatgctccaccacatccagctaattttgcatttttagtagagatggggtttcaccatattggccaggctggtctcgaactcccaacctcaggtgrttttcccacttcggcctcctgaagtgctgggattacaggtgtgagccactgtgcccaaccaggaattttctaaggccacttagtgctgagacgagaattt

SEQ ID NO: 218601 - DNA, 201 bp, Homo sapiens
tggagctggagcccttcaacccttcccaggtggctgccttgagaattaaataagttaatacatgtaaagactttgatcagtgcttggcacacagcgctagrtaagtgttaactcttgtcggtgatgtgatcgtttatgccctgtactttccttccacagttttcaaatgttcatgctggacagacatcctctgcttgttgc

SEQ ID NO: 218602 - DNA, 201 bp, Homo sapiens
ccaccacatccagctaattttgcatttttagtagagatggggtttcaccatattggccaggctggtctcgaactcccaacctcaggtgattttcccacttmggcctcctgaagtgctgggattacaggtgtgagccactgtgcccaaccaggaattttctaaggccacttagtgctgagacgagaatttaagtccaggcct

SEQ ID NO: 218603 - DNA, 201 bp, Homo sapiens
accacgcccgggtaactttttttgaaattttcagcagagatgaggtctcaccatgttacccaagctggtctcaaactcccaagctcaagtgatccacccamctcagcctcccaaagtgctgggattacatgcgtgagccaccgcaactggcaagggacgttctttagtttccacttcctcacttggaattgggcataataa

SEQ ID NO: 218604 - DNA, 201 bp, Homo sapiens
aaactatgatcctctagctctgcatgggctccttgctgagttgcctctctcccgttgagggacccacctctcctcccactacctctctccctcatggggcygtgctacctggcctttcagggcccttccttcctgcccagtgatctgctcccacgaggggctctgcatttgctcttcctgctcctgggaatgctcttcctc

SEQ ID NO: 218605 - DNA, 201 bp, Homo sapiens
ggagctccagtacctagatatggtttaagcataggccccaacacttactccctgtgtgacttagataagtgacttcatgtttctgagcctcagtttcctcwtctgtgatgtgggaatcattggatgggtttgggtccaagtttctctttaagtgagcgtattttagaaagcccccttctctgttccagcctcctcctctgt

SEQ ID NO: 218606 - DNA, 201 bp, Homo sapiens
gcatagaggctttctggcttctgttgggtgagaggtaattgaacagttggcagccatgctttaggtcaccttgtgagagggaggcagcttcctattctctytgaaatagggagaaattggcatgcctgtgtgagtgtgcatgtatgtgcatgtgtatgtctgcacatctttatacatgtatatgcaagtactctgttcatg

SEQ ID NO: 218607 - DNA, 201 bp, Homo sapiens
tgcactgggtcttcttcagatccccagaggatggacccctcggcagcctctgcttttgcatcagctttttctcagccaattctgtgccccattcaacagckggtatgcaggccaaggaattcttagtgctgcccaactctgctctacaagcaatatgaggaagggggcttctctagccttctcactcctggacacaatcat

SEQ ID NO: 218608 - DNA, 201 bp, Homo sapiens
gcacagctttattagttttattgcctaagtcctctttgagatgtgccaatctcagcttcttgtgggatgtggaaggacaacccacgtctttgaaagagatrgaccctgtggccagtggagggttgaaaaaccagagtcagattctcccaaaatgattcaatcaggagttgctcagaacagagcaagggacaggaagtcaac

SEQ ID NO: 218609 - DNA, 201 bp, Homo sapiens
tcagtgaatcactccgtttaaagggcagcactcctccctgtcactcctcaccccaccccttgtttcttttcctctgtatctccaactgccttctgacataytgtgctcactcatttactctctcctaattatttgcacatttccctcccccagtgtgtaagctccatgaagacaggggcatttattttgccacgtgaagca

SEQ ID NO: 218610 - DNA, 201 bp, Homo sapiens
tcaagtcttactgatttcgccactgaaatgtttcgtgaacttttttgcttttactatcgctgtttcagataaggaccttatcatctggcactggttttcayctaacagtctttcttattcattgagctccctgcttctcattcacctccattctaccacttctagggtaatatttctattaccctagaaggtaaggatcca

SEQ ID NO: 218611 - DNA, 201 bp, Homo sapiens
gttggctctgtgaccttcagcagattgtttaatataaactttctgtgtctcagtttcctatttgtaaaacaggataacattaatacctaccttattgggtygctacaaggaataagagttaacacatatgctcgttgaccaggaccttgcacttggtaaacacctacataaatgtttgctattattaatatcatcatcatc

SEQ ID NO: 218612 - DNA, 201 bp, Homo sapiens
ggtggctcatgcctgtaatcccagcactttggtaggccaaggcaggaggatcacttgagcccaggagttcaaggccagcctgtacaacatagcaagacccygtctgtatattattaaaattttattttttgaataatatggagattcataccaggcatgccactgcctcaggacatttgcccttgctgttttctccacctg

SEQ ID NO: 218613 - DNA, 201 bp, Homo sapiens
tccgtggctattgcgtgttatcccctagcacaccagccagccgtggagtgactctttgcaattacaaaccagcagctgagtagacgcagtttaaaagtacrttgtaaaagttttatggttagtgaagataagtgcaaaattaatccctacagaacaaagcaatttaaaaagtacataatgaagtgattagctagaaatggt

SEQ ID NO: 218614 - DNA, 201 bp, Homo sapiens
gactaaatgaacctttgctgttagaattcagtatcatggttacccttggttgagtagtggtggaagggagaacaaggggtttctgcactgctggcaatgayttgaccagggagattgctgtatgggggtgctaaacttgagaaaattcatcggattgtacacatgtatttggtgcacttttctgtatgtacatttacgtca

SEQ ID NO: 218615 - DNA, 201 bp, Homo sapiens
attagacattatgtattgatttcttattatagtcgataaggatttggctgccttatattttctatctccttaaaacacatacctcctcttcctcaatcctsaaactttgggttaaaatggtagacagtattaacattatgtactgtgaaaatattgttccctgttaaggagacttccatgatgtaaactttatttttccta

SEQ ID NO: 218616 - DNA, 201 bp, Homo sapiens
cctgaaattcccaaggtctttgaggtcggagcaacctgaggcctctgaggccaaagcatctgcgatttgagggtgttccctagctggtgatttccatatayaaggacatttcggtaccccaagcagccagtctagaaccaattggtctgccccatacccagcggctccaggaaggcatctgaaaacatggagcaggaagct

SEQ ID NO: 218617 - DNA, 201 bp, Homo sapiens
cctgcccctttggtccctcatagtggcttattgagggatcccatgccctggaaagatgccttcctgggcaggatgcctactaaaacaattgcaggctggcrttccctccatgggttctgggtttggccaccttcatcctgccattggaggaggtgttagtggcctctctagctttctccactatgagtcaggcacagatgc

SEQ ID NO: 218618 - DNA, 201 bp, Homo sapiens
caatgcaaaaaagtgttaaccccagtgaaaataattctgctaaaataaaactagaaaattagtatagacggaaatattttaatttggtctatagaaaatcratgaagagaatcaaattggcttagtgacatttactcaaaaaagagtttctgagtgaaaattcatcactgagcataattcaggttaatgtgctaaacggca

SEQ ID NO: 218619 - DNA, 201 bp, Homo sapiens
agagtccaaacacattatctcttttgtctgggtttcagagtcagtttattttcttccatcagttgggaaggtgattctatgcatagggattccttgtatgsaatctttcccaagatagggcttagtgtattgtgccagctttgacttcagtcactctgcttgctgatgcaactgaccctgcttcatcaggcctgggcaaaa

SEQ ID NO: 218620 - DNA, 201 bp, Homo sapiens
ggcctctctagctttctccactatgagtcaggcacagatgcctgtgttctccaacttcagggaacccaaatctattctgtaggtggttccactgaagcctmtcccactaagtgtggggtgggaggtcggtcatccagcctttccctcgggtatgggtggaccccaactcagaaatcctcttcatagaccctcttaatcttc

SEQ ID NO: 218621 - DNA, 201 bp, Homo sapiens
ggatcatccctcctttcctgggtgtccgtatcaaaatcttgggaaagtcaagtggcacatgtactttgaaaaatcatatttcaaaatggccattgtttctrtttgttttcatttgtgatacctaatttattttcaaatttcaagtaacatgaaaggagggtagggatttcaatattcacgtaaaggtggcactggtttata

SEQ ID NO: 218622 - DNA, 201 bp, Homo sapiens
acaacagatgctagagaggatgtggagaaataggaacacttttacactgttggtgggagtgtaaattagttcaaccattgtggaagacagtgtggccattyctcaaggatctagaactagaaatactatttgacccagcggtcccatcactgggtatgtacccaaagtatcataaatcattctataaagacccatgcacat

SEQ ID NO: 218623 - DNA, 201 bp, Homo sapiens
gaggtgagcacccagccagcttcccaccctgcttttagaaagaaccttatttccatttctcttttggtagttgcaaaagagaggcagaccagccatctccwgcctggacacatcagctcagggtcaggggagcaggcagacagggagggagccaacggatgttataggcacacagatgttagtgctgcagtgttaaccttc

SEQ ID NO: 218624 - DNA, 201 bp, Homo sapiens
gctgctttctctaccagcactgactccttagaatccacagcctccacagggcatagcccaaaggactttcacagctgccccctggaacctgcctgcagttrtccctgattctcaggccacccagagctggtgcccattctctgggtgaggtgagcacccagccagcttcccaccctgcttttagaaagaaccttatttcca

SEQ ID NO: 218625 - DNA, 201 bp, Homo sapiens
cagcatgcacttcttcctgcttgtctgcactatctgtgggcatggtggcccatagccagaccatcctggtttgttcctttgctgggaatgaatgtcctccrctaccccacccactttgcttagctccagacttccaaagtcagcgttactaccactgtttccagaaactcctccatggttctgcccctagcaccgccccag

SEQ ID NO: 218626 - DNA, 201 bp, Homo sapiens
ttggcgggggaaaagggcatcttgaagaagggaaatggatgagaaggctattgcagcagtagagagagaagtcaagaggcctggagtcagggagaagttayaggcctgagaggtattatgaaggaaaaatctgttggaccatttggctgagaagccatgggcaggcgggccaacagaggggaggtcaatgatggctcagag

SEQ ID NO: 218627 - DNA, 201 bp, Homo sapiens
ccctgtccagtgggcttgccaattctgtccaatttctctgatttctgacctcaaatgattcacctgatggcctgtcccagggaagtaattccaaagtcctrgactatcagcccatgtcctggcaagatctatcttttagcccccatcaaagagagatttcaataaccttcccttgctataataaccctaattgccattggc

SEQ ID NO: 218628 - DNA, 201 bp, Homo sapiens
gaacatgattgtaggttttactatgtcacagccaggagcaactgctcccacggcgaaggctgggaagaggagggctaccacccagcagcgctgctttctcyaccagcactgactccttagaatccacagcctccacagggcatagcccaaaggactttcacagctgccccctggaacctgcctgcagttatccctgattct

SEQ ID NO: 218629 - DNA, 201 bp, Homo sapiens
gtgtgtaggccataagtcctagaacatgattgtaggttttactatgtcacagccaggagcaactgctcccacggcgaaggctgggaagaggagggctaccrcccagcagcgctgctttctctaccagcactgactccttagaatccacagcctccacagggcatagcccaaaggactttcacagctgccccctggaacctg

SEQ ID NO: 218630 - DNA, 201 bp, Homo sapiens
gaagaatgagcaagttctgagatggagatttgggcaagccactgcaatcctgacaatgctgtgtcttagaagagtttgcatagtttgcattttattcttcrgtatatcctaatctgtttaaattttccgactttgcttttatgtctttaaggaaaatcagtcaccgagatggtatgccatgtttgtctttgtacttcacgt

SEQ ID NO: 218631 - DNA, 201 bp, Homo sapiens
acagtgggaacagtttgccaagagcaaagagctcattaaaagtcataagaagatgaaagctgcacagtatctgagatctgatcttgtggatgtggctatgragtacaaggctgaagtgccaccaaccccagtcccttacccatggtaaccgtaatgaataaattgtggcatacttctccactgagactggacagagcctca

SEQ ID NO: 218632 - DNA, 201 bp, Homo sapiens
tacgtggtaggggcatgggaatttccagtaaagagaatggcagaaagaggggacagaaacccaagaatgtgatccacctatgtccatggcataactggacrtaactagatggcatgagagatgaggctgcaggaaagagacagggccagttctcagaggtcttgcaaaccatgttaaggaatgtgctgttatctggagact

SEQ ID NO: 218633 - DNA, 201 bp, Homo sapiens
ggcatgagccaaaactagggcagccagggaaggtaggtgggaattagcaagggaaataagtgtatacgtggtaggggcatgggaatttccagtaaagagartggcagaaagaggggacagaaacccaagaatgtgatccacctatgtccatggcataactggacgtaactagatggcatgagagatgaggctgcaggaaag

SEQ ID NO: 218634 - DNA, 201 bp, Homo sapiens
cagagaagcttgtcacctccaggcctctctggttcccggaggccattctcaagacccttcctaagctgtgcttcctgacctcatggccaggtggctttggyttctgtggctactgagctgccatggatacggatcatgagccccaggatcagagggcagcgtgacaccgtccgtgcagcctggaggagcagcactcaagct

SEQ ID NO: 218635 - DNA, 201 bp, Homo sapiens
acaatgtcaaatgttggcaaggataggaagcaatatgagcctcatccatgctggtgggagtataatgtgatccacattatttggaacagtgtcacttttcytaggaaagttgaacatgtgtatataacctatgctccagaaatttcagtgagataaatacatggaggcctgcccactctcgtgcaccaggagacacataca

SEQ ID NO: 218636 - DNA, 201 bp, Homo sapiens
ctctcccgagccggagcgcgattggtggcagcgcttgtcgctcggagggggccgggccgctctgcttcgcggctctccccgccgccgctgccgctgccgckgttctcctagcagcgcgggccggtcggaccgccaaggcagccggcgctggcgatgggaagcggcgtggccgccgacacaggcagtggcaaagtttcccag

SEQ ID NO: 218637 - DNA, 201 bp, Homo sapiens
agtgatttaactttcagatctactcctcatctctgccccttcttgacaggggtgcaagtgtcctggggtgcccaaagaccttggggcttacacacccttcrtttcacagaaacccaatattccttttgttttatttcctaagatggggatagtcctgatgcagcatgggcttctgactttcagagcacattgtgacaggca

SEQ ID NO: 218638 - DNA, 201 bp, Homo sapiens
agtcctaaaagagttgaaaagaatactgtaatactgtcaaatattctagtatacacatttttctaattctctcataagtttttgttttgttatacaatttstttgcttgaatcaagtttcagttggttaatttgtctttccagtctccataatctactgaatatctttctccatctctttttccccccctcttgtaatttc

SEQ ID NO: 218639 - DNA, 201 bp, Homo sapiens
atgctattttcagtcctaaaagagttgaaaagaatactgtaatactgtcaaatattctagtatacacatttttctaattctctcataagtttttgttttgwtatacaatttctttgcttgaatcaagtttcagttggttaatttgtctttccagtctccataatctactgaatatctttctccatctctttttccccccct

SEQ ID NO: 218640 - DNA, 201 bp, Homo sapiens
ttggtttcatctttacctctgcctaatcccccacctaactctagttattttgagggaaatcccagacatcatatcatttcatcaaaaatatttcagtatgyatccaaaatagataaggacttttaaagaaccatggccacaatgctattttcagtcctaaaagagttgaaaagaatactgtaatactgtcaaatattctag

SEQ ID NO: 218641 - DNA, 201 bp, Homo sapiens
caagtaaaacgcaaacactggctccatcttacagaagacaagcagggcccagggagctgggggtttgcccagtgttggagatgaggttaggccaaggcttyctgtctcccagaccagccagctttccacgggtctcagtgcctggctttggctgggaccaggcacaaaggctgggatttggatctcaaggctgggtgtttg

SEQ ID NO: 218642 - DNA, 201 bp, Homo sapiens
ttgtgaagctatattctggtgctagcaacagactattctctattttctaatcttcaaatcttcaccacagccaagatttgaacttgtttctctcttgagcwttgcatatggggcaacatttgagcttcatgacttggatttcagccagcaatggccaagaatggtgaaggtgtaagaagggcaagaaggcaggactgcagg

SEQ ID NO: 218643 - DNA, 201 bp, Homo sapiens
tcttgtgattgatatcctctctctccacactgcagagcactgcttaccctcccacctgcctgtcctgtaggggcaggtgcatgctatacatctagacccasgcaccaacacagttaaggggtctctgagagaggaggtttgctggtgtgcccagggctcaggctctggggtttggctgacaccccaaatacttgttctttg

SEQ ID NO: 218644 - DNA, 201 bp, Homo sapiens
caccctggaattctatgactttttaattcattaccttgtccaaatcaaggtaacggcttgtagcagcataactccacccttcacatgacattctccatgtrtgtgtctgtgtccaaattgctccttttttatgaacagcattcatgtgccagatactgttcttggccctgggaaatggatgaaccagaaaaaaagtgactg

SEQ ID NO: 218645 - DNA, 201 bp, Homo sapiens
agaaatcacattccccagctctgggtatccctgaataaccacaggagaacagttccaggccctgataagtcagctattgcaaggtaagagtctggaatccygggagacatgatgacgaggggtcacttctctatgctgttattaatgtttggatgtctcccaatttcactgctactcataagaaccttatcagctggtaca

SEQ ID NO: 218646 - DNA, 201 bp, Homo sapiens
tgagtatattcaggagccctcaacaacttgccttggggaggtgggtctttccatgctcaggcagggaagatgaaacattatgatgttcagatgaggaaaayagaccttgcagtcataagttattaaacttccaaaggctgtgggacagaggagaatgataacatattactacatctgaaagaaggcatggtattttaccag

SEQ ID NO: 218647 - DNA, 201 bp, Homo sapiens
acttgtctttctacacctgagtatattcaggagccctcaacaacttgccttggggaggtgggtctttccatgctcaggcagggaagatgaaacattatgaygttcagatgaggaaaatagaccttgcagtcataagttattaaacttccaaaggctgtgggacagaggagaatgataacatattactacatctgaaagaag

SEQ ID NO: 218648 - DNA, 201 bp, Homo sapiens
acttaggtttgccctcatagaacttatattctagtgagttttatgctgtatgtcatttacccctcccaagaatcacaggaaaccagaattactgtcaccgktttacagatgaggccactgaggctcagagaagttaaggaacttgccctggtcccaagagaaaaagtggaggagcctggatttaaacacagttctgtccaa

SEQ ID NO: 218649 - DNA, 201 bp, Homo sapiens
tagctgctttataaggtagtgagttccccatgccaggagataatcaagcagggcatggaccccatatcggaaatgtgatgtggaggattcacacagtgctraagggttggataaactaactgtggaaggcccttcctgtgggaggctttgagaaggatgccgcaagttcaaggtcaagtgtttggttacaggcattgctta

SEQ ID NO: 218650 - DNA, 201 bp, Homo sapiens
tccccaaatcaggactggctggtagcagagttcccctgggcaaacacttggaaccagtgggtggatgtgactgcagagtagatttcttgtatacttgagaragacttttctctcacccacagccattcaacaggagaattagctgctttataaggtagtgagttccccatgccaggagataatcaagcagggcatggaccc

SEQ ID NO: 218651 - DNA, 201 bp, Homo sapiens
ctatcactcatgtactgatagaacttcttataaggcagtatgtacccttcctctcccatggggcatggggagccacatacctacaataattgacttgcctrgattgtcctctgattgttgaaagatgctacagtgtcatgtggaaagctcaggctcaggggcctagatttgaatgtcagctctttctcagagtagttaggt

SEQ ID NO: 218652 - DNA, 201 bp, Homo sapiens
tcaaaggatggaacttcagggatcccacatctctcagctatcagtttgctaacagcaagctatttccacccatgtgtgagtgcctgctcatttcactgtcrtaataatgctcccccattcatactcctgtggggatggaataagataaactccataaagcttttcattcagggctgggcatgtaggaagtactcaaaaaat

SEQ ID NO: 218653 - DNA, 201 bp, Homo sapiens
tgaattgagtgcccccagccccaatatgtcctaacctcttgtgaatgtgatctcatttgaaaccagaggtccttgcagatgtaatcaagttaagacaaaaytgtgctggattagggtgggccctaatccaacgagactgatgtccttataagaagaggagaatttggtcacaggaagacgtaaaggaaagacagccatgag

SEQ ID NO: 218654 - DNA, 201 bp, Homo sapiens
ctttctttctctggtcagagctgctcagatgctggggggaaagggaccagacagaaggcccaagtggctgcagccagccaggaatagagtggcggatgcasacctccctgcagggctggagggcacagggccacctgctgtgtgtaactttgcctgggcctgggagacacaggctctggcaatgaccataagtagctgggg

SEQ ID NO: 218655 - DNA, 201 bp, Homo sapiens
tgagggaagggaacttaaaggatgggtcagtaggtgcagcaaaccaccatggcacatgtatacctatggaacaaacctgcatgttctgcactcgtatcccwtttttagaagaaatagtgaaaaaaaattaaggaaaaaagagaaaaaactctttattatggacaatatcgaatatatacaaaaacagtgagatagtaaaat

SEQ ID NO: 218656 - DNA, 201 bp, Homo sapiens
cagtgtgaatatgggatgtgggccgatgcaaggcaataaggagtggtggaaactggtgaacaaaagaatgagcccaagccctcctgagaggggcagccagsactgtctccagcctattgctggcctgcaggactggcaagttttctcaagttggagattcacacttttatgcttggtgggctgaacaagacacatgggcag

SEQ ID NO: 218657 - DNA, 201 bp, Homo sapiens
ctcactgcaacctcaaccttctcagctcaggtgatcttctcacctcagcctcctgagtagctgggactacaggtgggagccactgcacccggcccatatayagtctttctaagacatttctttgagtttctatttccttgtatacaaaatgaggatggtaatacctatcccatggtttattctgaaaatgaaataatataa

SEQ ID NO: 218658 - DNA, 201 bp, Homo sapiens
tgatagaatgaatgacccctcaaaatgcaccaaatgaagatggtgcacagaaagccccagcacagtgctcagcaccccgccttctgcagtgggaaggatcrccgtccagcctcgggaagtcaccgtcgacgctcatgcatgggcatcttccaagtgggtttattgagaccatgatgaggatacaatataggagataggata

SEQ ID NO: 218659 - DNA, 201 bp, Homo sapiens
agcaccccgccttctgcagtgggaaggatcaccgtccagcctcgggaagtcaccgtcgacgctcatgcatgggcatcttccaagtgggtttattgagaccrtgatgaggatacaatataggagataggatatccccttccatctcatgaagcttttggctggagagaaattctttctctcctcggagatcctgctgttttc

SEQ ID NO: 218660 - DNA, 201 bp, Homo sapiens
catccatgtcaagtatgagtcaaggccgcccaccataatgaacatgaacatgctctctggaggggcgctgtagttcagaaaggcagggttttggaaccagwtcaatgtgaattcagacccagtgtccactccttgctggccctgggttactttcattagtatctctgagacccaggtttctcatctgtaaaatgggctaag

SEQ ID NO: 218661 - DNA, 201 bp, Homo sapiens
ccagggccctgactcatgcccaagttcacatcccaagctgggtgtctttggattagctgcctaaactctgtctcggttatttacctttaaaacagaaatarcaacagtaacacactcatacaattttcatgaagactaagttattcaggcaaagtgcttcatctggtgctgacagttgataaatgttaattcttgttatta

SEQ ID NO: 218662 - DNA, 201 bp, Homo sapiens
cccttaccaggttttcttcatctccttcttgagctcaaatgcttgcccaagagtcagcttctggggggatcctaagctaagaccagcgaggagggattcaygctttagggagcacagggcatgtagaggtgtagctgtagccagggcaaggggtagcacagactgccttctcatgggaatttgcagatgaattgcctagtg

SEQ ID NO: 218663 - DNA, 201 bp, Homo sapiens
tttctgtttccaccacacaaagtcaggggttgattctccaaagacatgcccttgggaccttttccttttgtgtctgaaggtagctatacacacagcccaarggtcaggctgcctggattgaaatcctggtcctgacactgactagccaggagctgttggataaactgctaagttaatcttaagccttgatttttttcatct

SEQ ID NO: 218664 - DNA, 201 bp, Homo sapiens
gaagaaagtctggaaggtgttcatgcctgtcaatgtcactgctcatggctcttggatgatagtatatcttttttgacacctgtttcttgcaaatgattcayaggacatgtcttataagtgagcagctgccacagagctcctggaatggcagagagttgaggtgcccttgtatgtccagggcatgtgatgaagagacacctc

SEQ ID NO: 218665 - DNA, 201 bp, Homo sapiens
accatctgggtggcttaaccaacagacattgtttcatacttccggaggctagaagtctgaaatcaaggtgccagcaggactatgagggggaatctgttgcmtgcccctctcctagcttctggtgctttgctggccatctttgacaggccttggcttagagatacatcactccagtctctgccttcctcttcacatgacttc

SEQ ID NO: 218666 - DNA, 201 bp, Homo sapiens
tcaggctgcctggattgaaatcctggtcctgacactgactagccaggagctgttggataaactgctaagttaatcttaagccttgatttttttcatctgtraaatggaaagaataagactgacctcattaggttgctgtgagggttaaatgaaggcaagaaaggaagcaggcaacaaattaggaggttcttagggtggccc

SEQ ID NO: 218667 - DNA, 201 bp, Homo sapiens
ctttttaaaacccaggctttaattggttatgccctgggagatggtttttgatacatgccccatctggcaggactaattgttctttgctttcagtgactagrttggtgctctgaacccgggaagaaagtctggaaggtgttcatgcctgtcaatgtcactgctcatggctcttggatgatagtatatcttttttgacacctg

SEQ ID NO: 218668 - DNA, 201 bp, Homo sapiens
agtgtttggttacaggcattgcttagctctctgcatacccctctgctgtacagacccctgatttgttccctgtctgtgtcctctcatctcctccacatcahgctggagcgtcattccttctgccctggggagagcatgattcttcctaaaggatcacttttctttcccagttctgaggctcactttcctcaggggaatgcc

SEQ ID NO: 218669 - DNA, 201 bp, Homo sapiens
ggaaggttgaggtcaaaaggatgttaaggttgagatgaagtcagagttaggttgaaatgagagttgagacagagagagtcccatttgaatgagaatatggytgcgggcagtaaagcttgagaggaattccagaacgcagggtggggcggagggcttaggtttggatggagccgtggttcagatacactcagacattttcct

SEQ ID NO: 218670 - DNA, 201 bp, Homo sapiens
tggggcccatgaaaaacactcagtggatgttaactgttactaatacctcatgtctttaatatagcatgggtttaactggttggtaagagggaagatgtggrgataatttggagagtaactctttacaggcaagtaaattacctgttcattccattgttcaacagtgtgctgagccctgaatgtgccagggactctgctcgt

SEQ ID NO: 218671 - DNA, 201 bp, Homo sapiens
ggggactttcagaaggagaagttccagagggaagaaaatgtgatctgacctctcagagacaaagaatgacacatgaggatggtgaaaggatctagaagtayagtattcagtttccagaagggaagacttgggatgcccaaagcagctccccaaatcaggactggctggtagcagagttcccctgggcaaacacttggaacc

SEQ ID NO: 218672 - DNA, 201 bp, Homo sapiens
tcgtgctggggatgcaatggagacctgagatcattgccttttcacaacacttgggctgaagcctgatattaaatgggtcagtacacattgcaagaagtgcrgtcaaggcaaaaaatggagcgtgtgagagaaacaaggtgtaagtagggaaataaatccttcctgagctggggtggccagggggagctttgagactgtgat

SEQ ID NO: 218673 - DNA, 201 bp, Homo sapiens
acacctaaagctccctgaggtccctgatgttgcctcctcaccatccttataggctctgggtctcagtttccccatctcatgggatcattgtgaagactaartgagcaaatgtgggtgaagcccctagcacaggccctgctacatatgcagattaaatgagctgatgcagacgaagcacaggccctgccacacagtgggcac

SEQ ID NO: 218674 - DNA, 201 bp, Homo sapiens
caaaaaatggagcgtgtgagagaaacaaggtgtaagtagggaaataaatccttcctgagctggggtggccagggggagctttgagactgtgatctgaaagraagaagagctggtttggtgaattgtggaaaaaagctttctaggcagagggcagggtcccccaggaggaaaagaaagtatgttatggtgtgttcaagaaac

SEQ ID NO: 218675 - DNA, 201 bp, Homo sapiens
agggaggagacacaggtctgcagtgctatcaggttgttctggccacggcatggagaacagagcgggtggagggcaagaaaggaagcaggcgacaaattggraggctcttggggtggcccatggtgactcactttagcacgttgaatcccacacggtgtgctcagcccagtgctaagctctccagggcaaaccatggttcct

SEQ ID NO: 218676 - DNA, 201 bp, Homo sapiens
caagtaccctcctcctccaagtcagtgaaaatctgcgacacccttccacctccatctcattccttccaaagtctagccacttcaaattcactttgaaaagrattattttaactcgtctctgtggaggagataaccatggtcttaattttgtcttaaaaacaatataagtgtagtgggaataaaaccaaatgatttttaaca

SEQ ID NO: 218677 - DNA, 201 bp, Homo sapiens
cttgcccctgacaaagagccctcttgcttctatgtggttctctttgctctaaatccaaaagcccatggaagaagagaccttgaaccccagactcatgtgcrcaagtaccctcctcctccaagtcagtgaaaatctgcgacacccttccacctccatctcattccttccaaagtctagccacttcaaattcactttgaaaag

SEQ ID NO: 218678 - DNA, 201 bp, Homo sapiens
acttgagaaaatcctctttgccgaacctccctctgtgatctgccagccttgtgattacgccagtcaagaggcactttgttgttttgtttttaaataacaaycgtctgccccattatgattttcccagactctggagcaataaacagctctgatgacagctgtaccagatagtaagtgcacacgtctctcccagcatctccc

SEQ ID NO: 218679 - DNA, 201 bp, Homo sapiens
ctctcaggaaacgtgaacttgctctcttccatctgatagcttctaggcattgaaaagatatctcccagcttgcagattggacaaaaggcgccctcagaggrcccccacttgtggtctgcattcggcgcgtctctctaactttcctaaggagaaaatgtgatcctttcctgtgttctgagacttgcccctgacaaagagccc

SEQ ID NO: 218680 - DNA, 201 bp, Homo sapiens
gttgaacactgagaacacatggacacagagaagggaacaacacacatgaaggcctgtagggggttgggggttgagggaagggaacttaaaggatgggtcagtaggtgcagcaaaccaccatggcacatgtatacctatggaacaaacctgcatgttctgcactcgtatcccttttttagaagaaatagtgaaaaaaaatta

SEQ ID NO: 218681 - DNA, 201 bp, Homo sapiens
gttgtctggggtctgcacagcacctcgctgttggcaaggcctgggccggccccaaggatgagctgagcagccagaatcttcagccgagtgggcagcggcasttggtccgggcccgtctgttgtgcgctttggtcacagcccccaccctgatcctccgatccgtacggtttatagctgataaacggattcctatcagtcctc

SEQ ID NO: 218682 - DNA, 201 bp, Homo sapiens
cctcctggagtgcagatattattttctctataaacaaagtcccttgagctaagctcttactctctgagacccaagatgaagaggcaggaagggttgccacyttcccccacctgcaaagtgctttcctggccagggaagctgtggaaatccagcagtgcgtcagaagaggggagctttatcccagccctctggctgcagggg

SEQ ID NO: 218683 - DNA, 201 bp, Homo sapiens
acttcatgtttctgagcctcagtttcctcttctgtgatgtgggaatcattggatgggtttgggtccaagtttctctttaagtgagcgtattttagaaagcycccttctctgttccagcctcctcctctgtaatcacaaggcatctcacagcaacagggtcccctcactcccagtggcttctcctggcccttggggggaacc

SEQ ID NO: 218684 - DNA, 201 bp, Homo sapiens
gaggctcttggggtggcccatggtgactcactttagcacgttgaatcccacacggtgtgctcagcccagtgctaagctctccagggcaaaccatggttccygagatggagttctcttttccagccagtccggggctccgccttctggacactcccagcctggctgagctccctcacgtctctgcttgcagaggaaacaggc

SEQ ID NO: 218685 - DNA, 201 bp, Homo sapiens
tgttttcccagccaggaaaagtccaagccacactccctcacttcctgagtggcctgctctgcttctgtccctctttataaatgtccccgaaccaaagttcytctctttcctgagcttttcctgtctccatggactggcctctctctctgtttcagttccctttctcctatggctaccccaaagacctcatgccctgttttg

SEQ ID NO: 218686 - DNA, 201 bp, Homo sapiens
aaagaacctttttccagcttggggtattggggtgggggcaagtggtggtcttacccagatactcaaggcagaagataaaccgcaagtagaaagctaaaacwttgagctcacttccttgatggtgtctctgaactgcttttttttttttttttcccttcagccttccaaagtctaataatcaccttagagaaatagaggaag

SEQ ID NO: 218687 - DNA, 201 bp, Homo sapiens
agaagataaaccgcaagtagaaagctaaaactttgagctcacttccttgatggtgtctctgaactgcttttttttttttttttcccttcagccttccaaartctaataatcaccttagagaaatagaggaagctgttttataactcttggttgagttgttgtgaatctaccttgttacattcttgcttgtcagtcattcac

SEQ ID NO: 218688 - DNA, 201 bp, Homo sapiens
gtagaaagctaaaactttgagctcacttccttgatggtgtctctgaactgcttttttttttttttttcccttcagccttccaaagtctaataatcaccttrgagaaatagaggaagctgttttataactcttggttgagttgttgtgaatctaccttgttacattcttgcttgtcagtcattcactactgggtgccctctg

SEQ ID NO: 218689 - DNA, 201 bp, Homo sapiens
agctcacttccttgatggtgtctctgaactgcttttttttttttttttcccttcagccttccaaagtctaataatcaccttagagaaatagaggaagctgktttataactcttggttgagttgttgtgaatctaccttgttacattcttgcttgtcagtcattcactactgggtgccctctgggtgttagtaaatcctgga

SEQ ID NO: 218690 - DNA, 201 bp, Homo sapiens
tgttttataactcttggttgagttgttgtgaatctaccttgttacattcttgcttgtcagtcattcactactgggtgccctctgggtgttagtaaatcctkgactacaatggcaaggaagtgggtggccacagaatatacaagaagtcaggcatcagggaggatcagcatgtgtcagatctggaaaggccctcagagatca

SEQ ID NO: 218691 - DNA, 201 bp, Homo sapiens
ttgctctctatcttagacagtgagtctccattggctcttggtgtggagcctccccaggagaggaaaagggggtgatttttactctgagatctccagtggcrttgctgaaacattaaacctacctttttccccccttaaccagagtcactggcaggatgagtcatgaactaagggtgttgccgggaagattcacttcttaag

SEQ ID NO: 218692 - DNA, 201 bp, Homo sapiens
gattcacttcttaaggagcctagggtataaatggatggaaaatgagttatggtgaaattggaactaggcctgggctttgttaggtgggtgataggagccayaggacataggtgcaaagagctggccaactccccagagctacctgctactcctgtattgaagggtaattagtcagttgtcgcgaagtctggctgcataaca

SEQ ID NO: 218693 - DNA, 201 bp, Homo sapiens
gctgcataacaaacaacctcaactctcagtggcttacaaagcaacagtttctttcttccttatgtcacctgggctgtgcgttggctgtggttctgctccayatactttctcgttttgtgatctgcctgttttattgtggttgagaacagcaagaggctgagccaaattgtatagtcacatttacaacttctgttcagacct

SEQ ID NO: 218694 - DNA, 201 bp, Homo sapiens
gggaaggcattcccttcctaactaacacagggaaaacaagctaaatccaaatctggctttatcccagacttattgttgttgatgggtacatgttatatatstgaacttcatctaccaagttcatggtgatgttgacagtatctggcaagtaatatctactgtccaccaggagatcttgattactttccctcagaagccaca

SEQ ID NO: 218695 - DNA, 201 bp, Homo sapiens
agtccacagcctgctgggcattcatagctggcatggaacccatagtatttctttgagtgcccccatttcctctgcacttgggtgaatgcttaccaagggtyacagagctgggtttcttcccagtccttcctgtgcttgctgagcttgttattgtactaacataatctaattaaatattgagtgacccagtaaaatatgagc

SEQ ID NO: 218696 - DNA, 201 bp, Homo sapiens
ttctatgatttttgtctataaataaataagaataccaggcgctgggtggctgtgcagtttggaaaaacccctgagttgatttcttgtgccctccatgactyggtggcgtgtggtttcattgctcaggtgtctgctagtgaatggtattggggaaccccaaccaggtaatgttcaggggagcctcgcacactcctgcagctt

SEQ ID NO: 218697 - DNA, 201 bp, Homo sapiens
ctgcccaccttggcctcccaaagtgttgggattacaggcattagccaccatgcctggccaacccacttcttaaccaagtcacaaattcatgagttttctcractcttctacagaagccactgactgaagtccacagcctgctgggcattcatagctggcatggaacccatagtatttctttgagtgcccccatttcctctg

SEQ ID NO: 218698 - DNA, 201 bp, Homo sapiens
cactagacacctcctaccacccccaccatcatgacaaccaaaaatgtctccaggcattccagatagcccctggtttataacattcctccactgaggaccaycgttctaagtcactttttgccttaaacgttccagagtccccattgctcagaaagcttagctatgcttgctgggactgcaggcactgaaggtagggcatct

SEQ ID NO: 218699 - DNA, 201 bp, Homo sapiens
agagccaggctgcctggatcctgcccactgcacatgactcctctggaataggggccaggaattgaggacagggatcctctgaccatctaagggggagcagytacagctgctggcagcagggctgggtttcctctgtaccatccacagcaattaaactgaaggacaaggagcaacctcaccctcttctgcagcatcacggag

SEQ ID NO: 218700 - DNA, 201 bp, Homo sapiens
cacagatagcagatggcagagcaagaaggaagtccacagtccaggaagggaagtgagacagggcaatacaggcacaggctctagagggcaaatgctgatgmagctacatctgtcccaggtctgggagtcttgagcccacaggtgggggagggaggtaacaggctgcagtcaggggtgggagggcagtggggaaggccagaa

SEQ ID NO: 218701 - DNA, 201 bp, Homo sapiens
gccacacgattgcaaagaaggatgactgtcagctggacacgccaacctttaaaaccagcccctgccatccacagccatcctcaggcactcctcccctttayggccttggcctgaacacattgtctctgcctatgacgtgtaaaatcccagcttgttcccaagtcctgggcttggcaatctgctggtttaaatccattaggc

SEQ ID NO: 218702 - DNA, 201 bp, Homo sapiens
atagaccctcttaatcttcaacaatgcagtcctttgtccctcaatctaagtgaatcactaattaattttcagtcaccttctttgaagtgtcatgcactgayttgtctgagaacttgcttgggcatctggtatccattgcatcttggtgccttagtgaaaattcccagcttaactttcttgttatgtgggcatctcccagaa

SEQ ID NO: 218703 - DNA, 201 bp, Homo sapiens
cactgtgggggaatgtttatcctcatgtagctgtttgggactctccaatctctctgctatgaacctccgtgagatgagatgtgaggcttctggtccagcakgactgccgacaccttgcttgttgtagaggaccatgttgaaggtgctaaaaatcaaattaggactagtgcagcagtaaggctgcctgcagcaagaaagaca

SEQ ID NO: 218704 - DNA, 201 bp, Homo sapiens
ccagtagtatatactttttaatgtatggttttctgattactgttttgtataatttctctctctgggcagctctattgtaaactcctcagggagagggctayatcttagacacaatgtttcttatagggcgctcaggacacactgcttcaaggagtgaatgactgcgggtggggcctccactcggtgcatccaacaggcagc

SEQ ID NO: 218705 - DNA, 201 bp, Homo sapiens
agatgatgatataagttacacagttcacaaggagaaaatcacaatagggagatacactgtgggggaatgtttatcctcatgtagctgtttgggactctccratctctctgctatgaacctccgtgagatgagatgtgaggcttctggtccagcaggactgccgacaccttgcttgttgtagaggaccatgttgaaggtgct

SEQ ID NO: 218706 - DNA, 201 bp, Homo sapiens
aaaaagttagccctatggagacagaatatttcaacctttaactgtaatttgatagttgtcaccagataccaaggtggaaaaccagaaaaggtacaataaayagctgagctgagtcattacaacagactcttatcttgtagaaactgcagacattatgatgattatcctcctacctaccaaaggagggttgtctacaacagc

SEQ ID NO: 218707 - DNA, 201 bp, Homo sapiens
agggcacttcagcaggaaggagcagcagggcgtgcacacagcctggcctggatgctgccataacaggcccaaatgaaggctgcaacacagccattttttayagttgaagtccctgcttgccacttgtgactatttaaacagcattttctttggatttatggccaggataggagagggacacttactatttcaagctgattt

SEQ ID NO: 218708 - DNA, 201 bp, Homo sapiens
gacatcacatgtgactctggctggcagggtcatcagggagaagggtacatgccaagggcaaagcagagagtgtcccgctaaggacagggttcccacacctrggaaaggagagctgggccagacgtgaggcagaagcccagcctcacagccagggccaacagcaagtgggcaaaggtgggggaagcttgccccatgttgtca

SEQ ID NO: 218709 - DNA, 201 bp, Homo sapiens
ttgtgatacttaccagctttcagttcatttagtataaaaagttagccctatggagacagaatatttcaacctttaactgtaatttgatagttgtcaccagrtaccaaggtggaaaaccagaaaaggtacaataaacagctgagctgagtcattacaacagactcttatcttgtagaaactgcagacattatgatgattatc

SEQ ID NO: 218710 - DNA, 201 bp, Homo sapiens
ggcagcattttcacttgtttttgaaggcgagtagaagatggccaggttggggaatggacacccatatgcaaagttcatgaacacagagaaggttcaaagtsactagaagtgggaagtgagccagcagcccccggcagtaggggtggaggggctgagaggcaagatcggaccccacaggacagtgtataccttgatgatatt

SEQ ID NO: 218711 - DNA, 201 bp, Homo sapiens
ggaaccatcccttcctttcaacatggctgaaatagtacataaatgttgaaccatttctgcaagcgactttggagatggacagggggctggaaatatcagcrttttgtgatacttaccagctttcagttcatttagtataaaaagttagccctatggagacagaatatttcaacctttaactgtaatttgatagttgtcacc

SEQ ID NO: 218712 - DNA, 201 bp, Homo sapiens
gatatccccatttagatataccatagaggaactacagaatatcaaagacaaataaaagatcttacagcagtcaaagagaaaagatagatgacctaagtcartaataattagaataacagctgacttttcaactgtaacaatgggacccagaagattatgatataatgtcttcaatacactgagagaaaataattgtcaacc

SEQ ID NO: 218713 - DNA, 201 bp, Homo sapiens
ggaggtagccgtgctgatgatggcttttcaggtcactaggcctggtttgaaagtggactgtgccactcacaagctgcatgatgctggagaacttgataaamtcttttgagctaccattttcctattggcttgttgtgaagattaaatagaccttgtttgtggtgtatatgaccctgtgcattgctggacctcagaaaatac

SEQ ID NO: 218714 - DNA, 201 bp, Homo sapiens
ccgacttgtatggcattttaaccctctgggtccctggtgttcaactttgcctttattgtactgcaatggcaactgggaaccatcccttcctttcaacatgrctgaaatagtacataaatgttgaaccatttctgcaagcgactttggagatggacagggggctggaaatatcagcgttttgtgatacttaccagctttcag

SEQ ID NO: 218715 - DNA, 201 bp, Homo sapiens
aaaggttgaggctattctacatggagaatctggtgacacttaagtttatgttttctcaacttcatagaatacagagaacagaaagcctaaggcttgccttmcttcccataaagctgggactccaaaggcctgttttctcagtataaagtagaaatcctctctggagaaagagccttttaacccaggccacacaattcccac

SEQ ID NO: 218716 - DNA, 201 bp, Homo sapiens
cccctctcctagcttctggtgctttgctggccatctttgacaggccttggcttagagatacatcactccagtctctgccttcctcttcacatgacttcctmcctcagtctgcatccagatctactctttttttaagaataccagtcatactggattaggatcctatcccactccagtatgatctcatcttaactaattata

SEQ ID NO: 218717 - DNA, 201 bp, Homo sapiens
tgataagtgaggaagctgggttatactcatttcctatgtctgttgtaatgaaagtgccaccatctgggtggcttaaccaacagacattgtttcatacttcyggaggctagaagtctgaaatcaaggtgccagcaggactatgagggggaatctgttgcatgcccctctcctagcttctggtgctttgctggccatctttga

SEQ ID NO: 218718 - DNA, 201 bp, Homo sapiens
ggcaatgcctggcagtggggccaggcctttgtgagtcacaaggcaagggagatgggttatatagttctcttaaagacagggtgagggtggtaactgttaaygaatgcattgtaccagaatgggtgttttggggtgattggtggaagatatataggatgtttatctccctaggtatataggatgtttatctccctaggacat

SEQ ID NO: 218719 - DNA, 201 bp, Homo sapiens
cacaactaatcacggaaggtggaacacgtaatcaaaatgtactcacatccactctgcagaaaaacaagccggtgctaggtcacttcagaggggtctgaagratggaaggggttcaaagtggtctgttcatcaggaccttttgttcctctgaattttctcaaatttctattttttccaaactttttatttcaaaagatttca

SEQ ID NO: 218720 - DNA, 201 bp, Homo sapiens
ttattaagaactaggttgaagagattttcatatgattaaggctatttgcatttcttttttctgtaagctgttcgtatctttggcccactttcctatagggktgttagtcttctctctatttttagaatatctttacacattagagatggtaatactttgcccatcatacaaattgcaagtattttctcccagtttattact

SEQ ID NO: 218721 - DNA, 201 bp, Homo sapiens
ttcaagtttacaaaaaagttgcaagaataatgcaaggaacatctgtatatccttcacctagactcaccattgttaacattttgccatatttctcttatctytctttctatatatacttgttatctccctgaaccatttgagaattagttacagccattaagccctctaagcacttctgcagatcgaagacacctctcaaga

SEQ ID NO: 218722 - DNA, 201 bp, Homo sapiens
tgttatacaatttctttgcttgaatcaagtttcagttggttaatttgtctttccagtctccataatctactgaatatctttctccatctctttttcccccmctcttgtaatttcgtttttgaagagatcaggtcatttttcctgcagagattctcacagtctagattttcttgattacattcccctgatgtcatttaacag

SEQ ID NO: 218723 - DNA, 201 bp, Homo sapiens
ttgaatatttgggagaaaggctgtatattcctcaaagtctaaaatattttactatttgactctttaagaaaaagtttcccaacctgtgcattaacgtttgygtaatccagtatctaatcaaggctcatgctttgcatatgtttttaatttaaaaaaatatatgtgatccctaacttatgaacattctttacatacaaatga

SEQ ID NO: 218724 - DNA, 201 bp, Homo sapiens
cacttgaacatatctgcaagtcactgactccttctctgaatatctaagctttacccacttggggtttcttactggcattttagaatatcttgggatattcrtaatcatttgcctctttagaatatggtctactgttataatgacacttacacagatatctcatcctccaggatgaccttttactatctgctcctaggactg

SEQ ID NO: 218725 - DNA, 201 bp, Homo sapiens
aaggtcccaagttctttcctgcctttgctgccatcttcctagactcatgaatgactcccttgtgtggtctcggcttttaaggttcaggactcctccaaaarctgtccccactagtttttatttctgtctgtgtttgtttttgtttttgtttttgtttttgagacggagtctcactctgtcacccaggctggagggcaatgg

SEQ ID NO: 218726 - DNA, 201 bp, Homo sapiens
gtctaagctcccaagaccgactggattttctgatgttgtagcactgaccacacaagtgcattgatctattttctgttagtctcacccactagtttgtggakgccttgagggcagggtccatgttttattcatctgtgtctccttggtgcctaatataaggtcctaaaatgctcagccattgtttactgaatgaatgaatgg

SEQ ID NO: 218727 - DNA, 201 bp, Homo sapiens
ctgaaggtagggcatcttgaacaccttttttgtgttcgagcaatttgtttatttaatccgctaggctgggcttctgagatgtccatgtgaggacttgagaraatcctctttgccgaacctccctctgtgatctgccagccttgtgattacgccagtcaagaggcactttgttgttttgtttttaaataacaatcgtctgcc

SEQ ID NO: 218728 - DNA, 201 bp, Homo sapiens
agctgtggtgccgctacctaaatccccccaaggcctggtggaagctggagaactccacagcgccaatcaggtaaagcaaacctttacctgtgggtctctcygctttgacctccaggctagggaccgcctactggtccaatgcttattctccaacttgagccccatcgtggggatgacaggggtgggcagggtcgaaaggaa

SEQ ID NO: 218729 - DNA, 201 bp, Homo sapiens
gaggaagaatgccactacaaccacagccagtgccccaccgtggtgtccagagcaggcaaccagagaaaagacccctctcctctccatcttgccccaactgygaatcactcctgactggattgagctgttagaaatgtattacagaaaagagagtctcccagaaaggccttgctgttggaaagacacccacttgaacatatc

SEQ ID NO: 218730 - DNA, 201 bp, Homo sapiens
actataaaaataatcagtcatagtaggataaaaatggaatttcaaacatgaaaaatgtaagaaagacaaaagctcaacagatgggcagaacagctacatgmacattattaaaggaataaaattaagaaactggaaaatagatctaaagaaatcactcaaaatcagcccaaagggcccagaaaaaattgtgaaaaaatgttg

SEQ ID NO: 218731 - DNA, 201 bp, Homo sapiens
ggcagatagaggggacggggacacagatagcagatggcagagcaagaaggaagtccacagtccaggaagggaagtgagacagggcaatacaggcacaggcyctagagggcaaatgctgatgcagctacatctgtcccaggtctgggagtcttgagcccacaggtgggggagggaggtaacaggctgcagtcaggggtggga

SEQ ID NO: 218732 - DNA, 201 bp, Homo sapiens
ctcatttggcacagatgcagactgtgcccaggttatggttgattttaggagctcatgtcccaagagcttatggcataagtagaattttagggaggagacgyaaaggcagcctgcagcagggtgttctagttaggcctggtcttggggtggctgccatgagagaaatcctgagaatcatattgacacaaagattcttactgc

SEQ ID NO: 218733 - DNA, 201 bp, Homo sapiens
agtggtgtttcagtccccactaacaatgggttgagcctctttcaccacccactgctacctggagccaccttcaaaatcctgatgaatgacaaataattgcwcaactgtgaatcattgttatttttaattgttggtaagaaagtcaatgtagtgatgaaatagaaacagagctccccagattgcttgccaccagctgctggg

SEQ ID NO: 218734 - DNA, 201 bp, Homo sapiens
gtttcaatggccctaaatggcttcagagaaaagccagttaatcttctgatctgaagaagacaagccacttttcacttggaaaggaataaacacacttttamtctttaaattagcaccattggagacaagcaattaattgcacttgtcagtgggaggtggattagtgggggtgtgggtggggtgttcccactcccctcctgg

SEQ ID NO: 218735 - DNA, 201 bp, Homo sapiens
aggctcttaagtggtgcacatcatatgtgcataatatatcattgttgagtgaatgaataaaggatggattgatctgaagtgctgagcacagtgcacattaygtggtgtaggggaagggtcacagagcgttagaccagccctgggcgttagaccagcgctggggctgacctggactagccgagctcatcgtgcacatcctca

SEQ ID NO: 218736 - DNA, 201 bp, Homo sapiens
cttctcctttgccctccttttaggtttattaagttcagtggccaaataaagttttgcagctcccttgtcctgcagtgcctcctgactgtctgggataacasggttactgggaatatctcctctcctgtcccctaaatcatctggcagcattggctggctacatcatgcagctgactttgagaacactccgcagtgctgttt

SEQ ID NO: 218737 - DNA, 201 bp, Homo sapiens
ctgaaaaaaaaaaaagaaaatttctccccaaatccctatgacatttaagctcattgtcattctctggcagcaccagtgacagtaatgggggccagagatcytatttcaaaacaaagaagtgattacagtagatagcgcaggtgtcaatgggaccctgatttggaacttgctaatacttctgtctctgagtttggggcttct

SEQ ID NO: 218738 - DNA, 201 bp, Homo sapiens
agcctttcatgtgatcttttctacacagacagaaatctaggagttagcatacaacttcatagtgtctgagagagaatcaaaaggtaaatagcaaagtcaarcatgagtacattctcttggaaaattacatactcttggatgggcccgttaatgtcccaggataatattaaaaggacaggccacttcccctctttgtttttg

SEQ ID NO: 218739 - DNA, 201 bp, Homo sapiens
aatgactgcgggtggggcctccactcggtgcatccaacaggcagctgggagctctgccctggcctccctccctctcttctgtggagcagccatggcttgcygctctttactcctgctgctcgtaatcccaggggatctggtcccttttcctttagctttccaaacctttgtttggccatgctccctcttctcctttgccct

SEQ ID NO: 218740 - DNA, 201 bp, Homo sapiens
ccttactaccagttctagagcaccctcccctcccagcctccagggagggagctctcctggcctcatactccaccctccctgacaggctcagatattctcayggaggttgtgtcccatccacccgcctcccccaaccccactcttggccgtgatccatccttcccacatcccttcaggcagccaatgcccagggtcaccgca

SEQ ID NO: 218741 - DNA, 201 bp, Homo sapiens
acattattctaccatgcaggcagaaagtgcattgaaagtggggaaatgcttttcagagggcagcattttcacttgtttttgaaggcgagtagaagatggcyaggttggggaatggacacccatatgcaaagttcatgaacacagagaaggttcaaagtcactagaagtgggaagtgagccagcagcccccggcagtagggg

SEQ ID NO: 218742 - DNA, 201 bp, Homo sapiens
ggatttgagctgctgaccctgagcagggagctggggagaagagcatcctggctgcccccatgagccagtagctagaagcaggtgggcagaaggccaccagscaccagcctcccacgcctcagcagggagtggcatctgttggtagcatttggaaggaaatgctggtttcacctctagcctgtggtaccagggctgttttta

SEQ ID NO: 218743 - DNA, 201 bp, Homo sapiens
cctgacaggctcagatattctcacggaggttgtgtcccatccacccgcctcccccaaccccactcttggccgtgatccatccttcccacatcccttcaggyagccaatgcccagggtcaccgcacttctaagtctctagggtgctgaggctgtggctgggctgggcttgggaaacatcagatgggagtctctgaaggatgc

SEQ ID NO: 218744 - DNA, 201 bp, Homo sapiens
tttggttcccactgccaaaagcctggagtctagtgaagacagacaaaatcattggaataggaacattattctaccatgcaggcagaaagtgcattgaaagyggggaaatgcttttcagagggcagcattttcacttgtttttgaaggcgagtagaagatggccaggttggggaatggacacccatatgcaaagttcatgaa

SEQ ID NO: 218745 - DNA, 201 bp, Homo sapiens
gagtgatgaagatttggttcccactgccaaaagcctggagtctagtgaagacagacaaaatcattggaataggaacattattctaccatgcaggcagaaastgcattgaaagtggggaaatgcttttcagagggcagcattttcacttgtttttgaaggcgagtagaagatggccaggttggggaatggacacccatatgc

SEQ ID NO: 218746 - DNA, 201 bp, Homo sapiens
attgtctgagtgggttggaccgcctccattcgcttgtgttctctgggtaaaaatgtgcaggaatggagaaaggaattagatttgtgaactctgcttccagyatgtgtgtgagtcagtcacagagtggagatttctggcttttccttccttagattataaagttataaagctattctggagtgtgggcctgggtgaggctct

SEQ ID NO: 218747 - DNA, 201 bp, Homo sapiens
acagcacctcgctgttggcaaggcctgggccggccccaaggatgagctgagcagccagaatcttcagccgagtgggcagcggcagttggtccgggcccgtytgttgtgcgctttggtcacagcccccaccctgatcctccgatccgtacggtttatagctgataaacggattcctatcagtcctctggctcatccttccag

SEQ ID NO: 218748 - DNA, 201 bp, Homo sapiens
catgggacccctccctttgagaatacattgctggaaggtgttctgaagcagagaaaaaggtccttccacctccccactgacaagatcaggctaggtgtaartacatgtgtgaagccctccgggtctcctgagtcatgaatcagccaggctgaggcccctggtcacacagcctgagcagcagtgatttgcaggagtgtggag

SEQ ID NO: 218749 - DNA, 201 bp, Homo sapiens
caaattagagagcggggctggttttggtcccctgcctgcgtgctgctcccagcatggtggggaagacaaaccactgggctggcaggactgcggtggggccrgggaactggccacagatctgttcaagaagcatcagcaacacagcccagcctgggtgtgggcagcagatatgcccaggccacagggttttacacagaagct

SEQ ID NO: 218750 - DNA, 201 bp, Homo sapiens
gggggaaacaacataaaacaaaaacctcacctccttaggtttctagagtgggccagttccttctgctgctacagtagagtttttaattaagaaattgatgraaagttcttcctgacatttcagttcatctcttggagacctttaggtgggaggaatccaaacaaagcttccttatgacttcctaatgttttttggctcatc

SEQ ID NO: 218751 - DNA, 201 bp, Homo sapiens
tcccctgcctgcgtgctgctcccagcatggtggggaagacaaaccactgggctggcaggactgcggtggggccagggaactggccacagatctgttcaagmagcatcagcaacacagcccagcctgggtgtgggcagcagatatgcccaggccacagggttttacacagaagctaaggaaatgtgggccatggagcaatgg

SEQ ID NO: 218752 - DNA, 201 bp, Homo sapiens
acacagcccagcctgggtgtgggcagcagatatgcccaggccacagggttttacacagaagctaaggaaatgtgggccatggagcaatggtctggccttgyttggagcaactggcacaggggatgcctctgggcctaagagtctagcttctaagggacaggatgggcacccaaggtggaccacagtttgagaggacaactt

SEQ ID NO: 218753 - DNA, 201 bp, Homo sapiens
gccatgggcattgccagaggctgagcagaccatgctgaagaaagccaccccgagtgcctggtcccacaggccttattatctgtagctggctttgaatgctstttgcatcattcactgtctaggggccttacctgagcctgaagttgcacaaagtaggtcaggagctcctctgtggctgcctccacccccacccttcactcc

SEQ ID NO: 218754 - DNA, 201 bp, Homo sapiens
ggaatagttttgtagagcaacttataacgggacccagtggggcccagaaatattggagacccaaagacagcttgggctggacaaagggacacatttcacayctgtgtttaaaccttttgagagactgtgcttcagtgccatttaaaaagttcactctgttgtcgttgtgatattcccaggtctcagagaaggccttggata

SEQ ID NO: 218755 - DNA, 201 bp, Homo sapiens
tttggagcaactggcacaggggatgcctctgggcctaagagtctagcttctaagggacaggatgggcacccaaggtggaccacagtttgagaggacaactygaggctgtgcttcacacccatcaggagcaccatgtggccccaaagtgccaattccttggctatattgaaggggcctcttgtccagtataagtgaggcagt

SEQ ID NO: 218756 - DNA, 201 bp, Homo sapiens
gcacttaacttgtcatttgttaccgatttcttattacagaatgaataatcatcatcagttgcacagcccagaaagaactaccaacattttagtgtattctstgcctccctctctctctgaatatacccatcttgaattgactttgatttactgggggcagaaaagggaagctctgagaaatacatgaagtcagtgagagag

SEQ ID NO: 218757 - DNA, 201 bp, Homo sapiens
tgaataggtttgtgtgatcggctgggccatctccccaacacaggaagtcggtaatcccatgtcccctcccaacacacacatacacagtcccctccacccgyaccccctgcttctcagtccctgcctccttcatctgtgactcaaagtcccttctcagggagctggattttttatttcaatttttcaattgaagaacatgga

SEQ ID NO: 218758 - DNA, 201 bp, Homo sapiens
aagcaagacactataaaaataatcagtcatagtaggataaaaatggaatttcaaacatgaaaaatgtaagaaagacaaaagctcaacagatgggcagaacrgctacatgaacattattaaaggaataaaattaagaaactggaaaatagatctaaagaaatcactcaaaatcagcccaaagggcccagaaaaaattgtgaa

SEQ ID NO: 218759 - DNA, 201 bp, Homo sapiens
agaagcaagacactataaaaataatcagtcatagtaggataaaaatggaatttcaaacatgaaaaatgtaagaaagacaaaagctcaacagatgggcagarcagctacatgaacattattaaaggaataaaattaagaaactggaaaatagatctaaagaaatcactcaaaatcagcccaaagggcccagaaaaaattgtg

SEQ ID NO: 218760 - DNA, 201 bp, Homo sapiens
aagtctccagctgttgaatccatcagacacggaatataaagtaggttatattatatacttagaaaaagaagagattgaaaatatgaataagaagcaagacwctataaaaataatcagtcatagtaggataaaaatggaatttcaaacatgaaaaatgtaagaaagacaaaagctcaacagatgggcagaacagctacatga

SEQ ID NO: 218761 - DNA, 201 bp, Homo sapiens
gcttctttcttttgaaaccagcttcttctcctgtgcccctgtattgatgagtggtctccaacccactgtcacctgagccagaaagccagatggcatccagrttcctctccctttctcacccttgtgtagttcatctattttgaagttgggctgattttacatcaaaatatgtctttaaaaaattcctatctctgttcctga

SEQ ID NO: 218762 - DNA, 201 bp, Homo sapiens
tgagcctgggatgagcactgtcttcagtgcaagcactctgggaagtcgccctgcacacgaaacgcttgaaccaccagttgcttttccttgtccccctcatrgctatttgggggaagtatagtcatctggacagggtctagatggtgtatttgacatccttgcctgactatcctgggtctgaagtcatcccactttaggaaa

SEQ ID NO: 218763 - DNA, 201 bp, Homo sapiens
acctctgtttgtttgcccacattttcaggttcccagtgtacaaggaatgtgttctgccagagagtaactttcttgcaggtgctctttctattgggagcgascctgaagggttttgtcctgtactttttcttgtctggggcatctactgtggaagatgaagaagtgaaaatgtggtttgggaagggacataggattatctga

SEQ ID NO: 218764 - DNA, 201 bp, Homo sapiens
gggaaaatcatatctcctttggtgggtttttatgataattaaatattcctgatataaagtaagtcttcagtcaatatttgtttcaatgatttctccttttrtttagaatgaatgagagacttaaaaagtggaaattctaacaatagaaaaattcatttattaattcactccttattcacttaacagtagtgtccaagtgat

SEQ ID NO: 218765 - DNA, 201 bp, Homo sapiens
ccgtcatacctcaaaagtagagaagctaacagtgcagccttcagtctgtggtcgaaggtagaacttggagtccaatgttcaagggcaggaagcatccagcrtgggagaaagatgtaggctgggagactaagccagtgtagtctttccaggttcttctgctgcttttattctgaccacactggcagctgattagatggggcc

SEQ ID NO: 218766 - DNA, 201 bp, Homo sapiens
tttcatgcatttctcctccccccactgctgatgacatcatttaatctctaagcagactctctcttcctcacctctcgaaatgttgcccttcttgatccatstcttgtggatcccaggccagaatcgagaaagccaaacactgtttgcgaacaccactgacagacccagccgctgtcgtgccagttctttgctctttcaaat

SEQ ID NO: 218767 - DNA, 201 bp, Homo sapiens
cgtgaattctttctccatcatccctgcagctctccatagtaacccatttcatgcatttctcctccccccactgctgatgacatcatttaatctctaagcaractctctcttcctcacctctcgaaatgttgcccttcttgatccatctcttgtggatcccaggccagaatcgagaaagccaaacactgtttgcgaacacca

SEQ ID NO: 218768 - DNA, 201 bp, Homo sapiens
tcccatctggatagtttcctcgtctgattcatcggtacctcccacacgtgaattctttctccatcatccctgcagctctccatagtaacccatttcatgcrtttctcctccccccactgctgatgacatcatttaatctctaagcagactctctcttcctcacctctcgaaatgttgcccttcttgatccatctcttgtgg

SEQ ID NO: 218769 - DNA, 201 bp, Homo sapiens
agattaggtggcgttaatccctactgcccccaaccacactattgccccagactggagtcccgcgtgcaaatctttgcaattgccatgagatcatccccacrcttggcttccattttctttgtttgttaccaagctgtccgtgttgctatgtagacttctgaggagggaagttttgttttcagctcccatctggatagtttc

SEQ ID NO: 218770 - DNA, 201 bp, Homo sapiens
caggaatgtgatgatggatacaacaaaggatcttgtcctagaaggaagcctgcccacctctaggaccagggagtatccttggcagacccagtattagagctgcaggatgtcctccccacgatggcccccactgtcttctccgtggggaaccctcagcagccagccacccccacactctacaggcttgccgatgatgcttgg

SEQ ID NO: 218771 - DNA, 201 bp, Homo sapiens
gatgggatagaagggaatgtatggattcagggagatggcttagaaccctaagattcatggtagcagggtctcgagcaggggcttgcttgagcaagcaggtsctgtggagcaggtttgtcttaactctcgttgtctttctgaatgggtatcaaagaggggcttcctgcagcctggatgaccggggctgccttcctttgtttg

SEQ ID NO: 218772 - DNA, 201 bp, Homo sapiens
ctggccaagaatataatgtccgagttgcttcccgatacttcaaaggtcctgagctacttgtagactatcagatgtacgattatagtttggatatgtggagwttgggttgtatgctggcaagtatgatctttcggaaggagccatttttccatggacgtgacaattatgatcagttggtgaggatagccaaggttctgggga

SEQ ID NO: 218773 - DNA, 201 bp, Homo sapiens
acataaatctatgatgaagccctctttcttatctgaggttcctgttaggtcccctggtgttaggcaggaatgtgatgatggatacaacaaaggatcttgtmctagaaggaagcctgcccacctctaggaccagggagtatccttggcagacccagtattagagctgcaggatgtcctccccacgatggcccccactgtctt

SEQ ID NO: 218774 - DNA, 201 bp, Homo sapiens
tcaacctagactggcaggctgagcaccaattctcaaagctaacacacacacaagcaccaccccactaatagctgatcccaggatggcagctgtctacccamtgcccggatgaaacagcctttctggagtggttgggtgaggccagacccaggggccactccaagaacaaggctcacactggctctggcagcaaaggaagga

SEQ ID NO: 218775 - DNA, 201 bp, Homo sapiens
cttcatttctccttttattcccccactgccaccaagtcctccagccaggcaagggctagaaatggtagcaataagcagtagaacaattcaacgtcactgcrtaagcagggctctcagcagagaagtagccccgtgctctcacgctaactcacctcatgtgaatcattctctgtgaggtgctgcactgggtgtcttcacaga

SEQ ID NO: 218776 - DNA, 201 bp, Homo sapiens
acgcaaggcaaaagctggtgcttgttggttctatagtgttcaagggccttgggctgattatggacatgaaatctgtctcagcagaatacttgtttctccaragttaattcatttgctctctctgttcctctctctttggtgtggccatctgttctctgatgttcagctgcagaattctctgaagactgatttgtgtcttga

SEQ ID NO: 218777 - DNA, 201 bp, Homo sapiens
caaaagggggtctgtgtatgtagatatgtgtgtgtctgcacacatttgccatgggggtgcatttgttcacaggaaaagactcctaggtttcctctgactcycagagacccccaagatgcacaggggagagaactatggcatcattctctccagccactgggagaggaagttgttagctcagcaagttgtccagcaccctgc

SEQ ID NO: 218778 - DNA, 201 bp, Homo sapiens
tttggttttgagaatctcctcccaaagcctacaatccacagatttctttcccatacactctttgatatctgtctactaaaacccaggctctgtgaataccyggcctccccttctctctcaagcaggcactgtgaaaagacacgggcatttcccttacagttcccaacattccacctcaccactcaattctttgtgggtgat

SEQ ID NO: 218779 - DNA, 201 bp, Homo sapiens
tggtggcaggtgggcggctgtagtcccagctacttgggaggctgaggcatgagaatcacttgaaccggggaggtggaagttgcagtgagccgagatggtgycattgcactccagcttaggcaacagagtgaaccctgtctcaaaaaataaaagtcctcaagagttctccaggtcctaattattctgggtttcctccctttt

SEQ ID NO: 218780 - DNA, 201 bp, Homo sapiens
agcacttcagtgagggaacattgcagttatttaataaatgttaatttccttcctcttcccttcaaattgcacattagtctcccaggcatggatgcaagcgkctgaatggaagctgaggggctgcactttctctccggcatctcatacagtatgccattggccccagccagcggccccttcttgctcatcttcttaactgtt

SEQ ID NO: 218781 - DNA, 201 bp, Homo sapiens
gggcactaatcccattcatgaccacatgaattctaactacctctcaaaggtcccaccttctattactatcacattgcaagagtagactttcaacagatgamttttggggaagcatgtttgtccatatcaggccctttctttagggttggctccaccttcctttcagctccagctccctctcactcctgtgcacctgctatc

SEQ ID NO: 218782 - DNA, 201 bp, Homo sapiens
  misc_feature (1)...(201): n = A,T,C or G
tcacactggcagacattgtaaaagaccctgtgtcacgaacccccgccttggtttttgaacacgtaaacaacacagacttcaagcaattgtaccagacgttnacagactatgatattcgattttacatgtatgagattctgaaggccctggattattgtcacagcatgggaattatgcacagagatgtcaagccccataatg

SEQ ID NO: 218783 - DNA, 201 bp, Homo sapiens
gccccagaagtctcctgtatctgcattccccagggaaatgacctgcaaaatcgcctttctccaccttgataagtttccattttcaaagatgggttcatttrcatgtgatggaccgacagttttctcatccctgaggagccttcatttctccttttattcccccactgccaccaagtcctccagccaggcaagggctagaaa

SEQ ID NO: 218784 - DNA, 201 bp, Homo sapiens
gaatagatcctatgttacagatatggaatcggaggctcagagaggctagggaacttctcttagagacatgcatccggaagggggatttttcccagagagaytacctcgaaggcctgggttcagttacctccaccacagcagggtctcagtctgctttaggagtggtggattagcttcccaggatgcctgcaggtctgtgag

SEQ ID NO: 218785 - DNA, 201 bp, Homo sapiens
gtccagacatttatctatttatggttctctatgtattttaaattttctcataagctatttctaatcctttcaggaatgaggcaaggtgtaaatcgataacyctttcatgctgatagaatccacttaataccctagccggttaataataaaccactgaggtggcctgtgctcatctcagagtaactgtttcagattctgttc

SEQ ID NO: 218786 - DNA, 201 bp, Homo sapiens
gcgtaagatccaggatacggatgtgttgattgttttaccttgcaggtgattttgctcttcctcctgcaagaatcaaaatgaaatgctggagatctggtttrcagccctgctgagctgtgtagagctgactagagaatgagccaaatcaatcattggcagctgaggaggagctgagtgggtggggatgacgtttctctgccc

SEQ ID NO: 218787 - DNA, 201 bp, Homo sapiens
ggatacagataccagccagaaggagggacagtcttgattgttctcttggccaatgggaacctccatactgccttcatcctctggttttattatgtcctgcmatctgggagctgacaggcctgggaatctaatctggaaagatctggaagaagctagatgtatctgagtaaggccagaggataatcaagctagtcccatgca

SEQ ID NO: 218788 - DNA, 201 bp, Homo sapiens
cttgccaaatctctgaagtcctggatatacttagtatccccaccctgcctccatcatcctgttcttcacccctttggcttgtgggatgatctagtcttatygctgcagtcaggcagggagtaaatgtacaactcagtgattccattcccatcaggtcatggtagaattcccatccacagagcccttatggacctgaattct

SEQ ID NO: 218789 - DNA, 201 bp, Homo sapiens
ctgagtgttcggtgggcaagattgttttaacagtccagactctagagagacatctggcatctttgaactttgggggtcctggtttcatgggtagacagaawaatggcctcccaaagaggtccacatcctaatcccccatacctatgagtatgtaatgttacatagcaagggggatctatggttgccgatggaacgaagatt

SEQ ID NO: 218790 - DNA, 201 bp, Homo sapiens
caccgtttctgaagtggttgagttggggctggagctctggcaggctatggtgctcactcctgtgctgtgcagcctctctggcaaggtggggagaaactctrgactagaggtgagaagtggtgctgcccttgagcatcaggacagtaagtggggactccagtaaccactcctcctggagtgcagatattattttctctataa

SEQ ID NO: 218791 - DNA, 201 bp, Homo sapiens
tgaagccctcaaaatctgtccatttaaccattatactgcactgactctcaaagttttatatcgttactgtttgtagtcattcttgctgttgttgttgtttrcatgtgttcctgacctgcagccctagcctgttaaagaaatgtgatgtatttattgacttgttctgataaaaaaaactatgctgggctgaagaatcgccat

SEQ ID NO: 218792 - DNA, 201 bp, Homo sapiens
atacttacagcaaatgtctacactgcctctggagcctttctcatacctttcccccactccaggcagatggaagtttcttccgtgtcttccaattgccaacyggtcacccccattagcatgttgcagtgacacctcaaatgtgatatgcgtggccgggcacggtggctcatgagtgtaatcccagcactttaggagactgag

SEQ ID NO: 218793 - DNA, 201 bp, Homo sapiens
cagaagtgacacatcatcacttccactgctgccatattctattttttaggagcaggcaactaaatccagcccacactcaattaaatagaaataaagcttcrtttttgaagataaaaatgtttttaaaacctgtgtatataaccaccacaatcattaaattggataatgcatgtaaaatctttattgctatatatttaacac

SEQ ID NO: 218794 - DNA, 201 bp, Homo sapiens
tgcgggaaattgttacatggaaaagccgatactggcttccctccctccacccacatctaacttcctggtcttccctgatgacatcctgcctttatggcttyatacatccctgactgcctgcctaaaatgccattgctctcttttcttccaacatcctgtccctgagaacgcctagcatacttacagcaaatgtctacactg

SEQ ID NO: 218795 - DNA, 201 bp, Homo sapiens
gttgtgaaggaccaggctcgaatgggttcatctagcatgccagggggcagtacacccgtcagcagcgccaatgtgatgtcagggatttcttcagtgccaaycccttcaccccttggacctctggcaggctcaccagtgattgctgctgccaacccccttgggatgcctgttccagctgccgctggcgctcagcagtaacgg

SEQ ID NO: 218796 - DNA, 201 bp, Homo sapiens
tttgttactgcaatataaccagctctcccctgacaaatacactatatttttaaaagaaatatatttttaaaagaaagaatgatgtatttattacttccatraataactacatatgttctggtttttatagcagaaagacaatgaaagaagtaactatacatgccagaaagggaccagcgctgcatttttaaaggaacatca

SEQ ID NO: 218797 - DNA, 201 bp, Homo sapiens
tcttttcccaatgtaagggtgacaatgatgacacaggagcagagatcctaggtgatcctgatggatgtgtagcctgagatgtagcctttgtgatataagcyaccggtatttggggtgtttttgttactgcaatataaccagctctcccctgacaaatacactatatttttaaaagaaatatatttttaaaagaaagaatga

SEQ ID NO: 218798 - DNA, 201 bp, Homo sapiens
tgctcaatggtcaatggtacaggtattctagcagctcttttcccaatgtaagggtgacaatgatgacacaggagcagagatcctaggtgatcctgatggaygtgtagcctgagatgtagcctttgtgatataagccaccggtatttggggtgtttttgttactgcaatataaccagctctcccctgacaaatacactatat

SEQ ID NO: 218799 - DNA, 201 bp, Homo sapiens
aatggagtttggggacctgcagtgggtcagatggagaccctttgagagactctagcctggtgttttgtgtcctccatgattggaatccagtcttcccctgrtctcgtctcactactgccctcctgtgtcccgtatccaagcactgcctacgttcctgccccggccgaccctcagccattgaagatgtgggcacttagcccc

SEQ ID NO: 218800 - DNA, 201 bp, Homo sapiens
tccttactgtcttacacctgcccacttctctccttggttacttgtctagtctctgaagtcagaggcccaaactcttccacaccgcatttgagttccatcamaatttggccttagttgaccttcctagttggaattttaggcaattctacctaagtactctgtgctttagccttcctagtctatacatttccacaaacacac

SEQ ID NO: 218801 - DNA, 201 bp, Homo sapiens
tgttcattccccatttaggaaaggagataaattttctgtactctgagctctcagatctggaatgtctgaggttgaacatatcatgatttcctgattctctyctgggtttgcaaaggatccagaagcatcctttttcctgacggaatggagtttggggacctgcagtgggtcagatggagaccctttgagagactctagcct

SEQ ID NO: 218802 - DNA, 201 bp, Homo sapiens
caactccttactgtcttacacctgcccacttctctccttggttacttgtctagtctctgaagtcagaggcccaaactcttccacaccgcatttgagttccrtcacaatttggccttagttgaccttcctagttggaattttaggcaattctacctaagtactctgtgctttagccttcctagtctatacatttccacaaac

SEQ ID NO: 218803 - DNA, 201 bp, Homo sapiens
gacactggctctatccatgaaaaagaggacttatgccttgagataatgaagtttgaggacagaaagccatgccatgtgcaatccttctctccaagagctgyggctgatgtcctcagtgtcacataactccatgccctgagcagaggcctatggacaccttgacaaaagaagctcatcattttgctttttgttgctgaaaag

SEQ ID NO: 218804 - DNA, 201 bp, Homo sapiens
tagctttgaagaggctccccttgcctcttgttctggttacatttccacatcaaagctggacatcccacatttggcctctgctcagaactttggtcacagtraatccttcacctttgttatagaaaaactcagtcattttagtcattttgatatcaattaccatggatttgccaagcttgataacttgtaaggtgaccacag

SEQ ID NO: 218805 - DNA, 201 bp, Homo sapiens
catcatccacatgcttgtcagggagatttgttaacaaaaagatctgacagtatcagtctctgattaattccccttatcagcttctcattgccttgtagagkttgcaagctgattccctaaaggccaaattcagctcacacttaaagaatctgattgcctttacagctgaaggtgtgtaccttctggtttgccacagtcctc

SEQ ID NO: 218806 - DNA, 201 bp, Homo sapiens
tggtcacagtgaatccttcacctttgttatagaaaaactcagtcattttagtcattttgatatcaattaccatggatttgccaagcttgataacttgtaargtgaccacagagagcagatcttggctgtaatgagcgtcttctgctcctccctccagacacactctccacccacctccctccaccctgagaggctgacgtt

SEQ ID NO: 218807 - DNA, 201 bp, Homo sapiens
gcattggctcatttgatcatcatcgcaacctgttgaccgctcatgtctcatccctgttttacaagaggaggagagcaagactgagagaggtgaatggccctgccaaaggctctgggcggtagagccaggatccacccagagaagctagactcagtggctagttttcacccctcttattgtccactgttgagctcagaactg

SEQ ID NO: 218808 - DNA, 201 bp, Homo sapiens
gaacatttcaatggaaatctctggtttccagttgggttctgccagtggcctgacctagcatgagattgaagtggggaggaaagagtgaacttggggtgttkattcagcatcacttgccatgacccccaagccctcctctcagctttctctccatgacttttctcttacacgttctggtgacagctctgtcctctcattcca

SEQ ID NO: 218809 - DNA, 201 bp, Homo sapiens
cttctgtgtcaaggggttaatgaccaataaccaaacccttaaatcagcctgcctgtctgcagagaggcctgcagctcgttctttgaaaaagagggaaaagrgcccatttctaatacacattctggatgtcaaagccagcactctgtaaattgaaatttaataaagcaaggctcccttccttcttcccgccctctgtgtctg

SEQ ID NO: 218810 - DNA, 201 bp, Homo sapiens
tccagttgggttctgccagtggcctgacctagcatgagattgaagtggggaggaaagagtgaacttggggtgtttattcagcatcacttgccatgaccccmaagccctcctctcagctttctctccatgacttttctcttacacgttctggtgacagctctgtcctctcattccactgggcgtaggggtactaactgcttc

SEQ ID NO: 218811 - DNA, 201 bp, Homo sapiens
ctttatgagtcaataaagaaagcacctccagagtcctaggaaacacatttcatttgcttatttattgcctttaattttataggctataggagaaatttctsccttctgaatgtgtccaactagctctgttcacctgagaaatcacattccccagctctgggtatccctgaataaccacaggagaacagttccaggccctga

SEQ ID NO: 218812 - DNA, 201 bp, Homo sapiens
gcctcctgcctttaaggttctccactttctctgaggaattggggtactcatctccccactgggagatatctaatctcagcattccagggcccgagcattasagccaaagccccccacttcccttctcccctttcttatccctcaagcctcagccaaaagcctgcttctttagggcagtctttcctgaccatcctatctaag

SEQ ID NO: 218813 - DNA, 201 bp, Homo sapiens
agtggggaggaaagagtgaacttggggtgtttattcagcatcacttgccatgacccccaagccctcctctcagctttctctccatgacttttctcttacaygttctggtgacagctctgtcctctcattccactgggcgtaggggtactaactgcttcatgttactttcctcagggaatcatcctatcccttgtggttccc

SEQ ID NO: 218814 - DNA, 201 bp, Homo sapiens
gctcatcagctccctcctggcttgtgagggctgtctgcacatgcctcctgcctttaaggttctccactttctctgaggaattggggtactcatctccccaytgggagatatctaatctcagcattccagggcccgagcattagagccaaagccccccacttcccttctcccctttcttatccctcaagcctcagccaaaag

SEQ ID NO: 218815 - DNA, 201 bp, Homo sapiens
ctgccaagtcacattacctcactgagcctccctgatcagtaaaatgggggcgggtgctattaaataaagtaacaaacctgcatgtgcctagcaccaaatcrggcacagaactgggctcagtaatattggtctctcgttcaaactggagtaatctctcaacaaacattcatgattattaaaggtagcttgcatttgttgctt

SEQ ID NO: 218816 - DNA, 201 bp, Homo sapiens
ggcactctcaaagtgggtaatttgagcagtttcatcaagagatgagtgtagaggtgtgagcaggatgcaaggaagctgccaggagggacagcacaagaccmtggggctagaaacagcaggaatccctcctactccaggcctgaagggagagaggacacagggaaacaggagccagcacagggagtccttgacagggagagg

SEQ ID NO: 218817 - DNA, 201 bp, Homo sapiens
gcaagcaaaggatggtaaatggaaattaattatacagtgcccctgattgctcatttaagacatgtaaaaataccaccgatgtgccctttaattcatttgcygtctttattatttgagtataatgaacataaaaatgtgttagggcttttcctaggtttgcttctgaactcacttcccttccccccaatattccacacaatc

SEQ ID NO: 218818 - DNA, 201 bp, Homo sapiens
gtaaaattcatgccttagaatgatcccccttgagagaggagggagctggggtatttatccactagctcccttccatcattggttgagagttgctttctggrggtgttaatttctagcacttcagccttccacatgctggggcagagcagccttctgtgcatttgaatgaagcccatggacaaaagttctgataattaaatg

SEQ ID NO: 218819 - DNA, 201 bp, Homo sapiens
ccctcccaggggttaggatggactggctcttgggtttgacaggtgggttagggcgtggggctaggacaggaggcgttggcaaaggtggtcagaatatgttytgcagccctaggtgggaataattgggacagatccacacacaggctcacaacagagccctgggtctggagctggaggtaatcctttgtgagcaccaaagtg

SEQ ID NO: 218820 - DNA, 201 bp, Homo sapiens
ccctgaccactctgctaccctgtgatcccctatggatggcttcccttggctgagccttactgaggaggctgggtgctgcataggcaggggcctccttcccrggcacagagcctggcagagaaagggggagagtaaccagcccgatgcgtatgcactcgcatacacttatgtacacgcaagcacagattgtctgagcttctt

SEQ ID NO: 218821 - DNA, 201 bp, Homo sapiens
ggagggagctcttgttacacctagggctggctggacaaggggagaaatagtgttaccagggtagggtaggaaccagagctttggaagcgatgctgcctggygcaagatacagtccctgtggagacgtgggcccaaagcactgcaggaggggaagaaataccctgaccactctgctaccctgtgatcccctatggatggctt

SEQ ID NO: 218822 - DNA, 201 bp, Homo sapiens
gggtggtaaggaagcgggaggatggcttgagatggtattgaagaattaggcagtggccttgtcatgtgggactttttagaatattactttcagtgcaatasacaatgctgatgagctttcaacaaacaaaagtatgcaaatgggcatttttgaagctctctctggctactgtgtaatgaataatttgggaatgggtaagag

SEQ ID NO: 218823 - DNA, 201 bp, Homo sapiens
gcatatgttcatgacacacacgcatacacagctgcaggtgtgtagagactgcggtgtatagtacctgcactcacacacacgtgcatccatacataaaacayatacacatcctcacctatcagaaggggcctggcccgaagcagaatatacccaaattgtttacctgaaaggatcacaatgaagagatcgaggcagagttaa

SEQ ID NO: 218824 - DNA, 201 bp, Homo sapiens
attacctaagggctggggagtaacatggatgggggtgggcagggcaatgcactggttactatgagggggcaggtgtgcccagaccccactttgagctctgracaggtctcaaactttgagccatctgaccttccaaagaattatgacagtaattattattatggcaattatgtagcacccttattgccatctagttaatta

SEQ ID NO: 218825 - DNA, 201 bp, Homo sapiens
gtgttgagttttctgccatcagcatagagatctgttaattgaatttacatgtactgccttggataagaaacttttagcctgcaaaagtggagttggtcaasctgggaaaagtgataaattgtgcatgtgtttatttttgtgtgcctgaggcttactgcattcagaacttgtttagatgggcaaagtcattattgatggaga

SEQ ID NO: 218826 - DNA, 201 bp, Homo sapiens
aacaggcttggagggcgttagcatcagtaggtatggcaaaaacagtaggatttggaacaaggcagacctgggtacctgggtttggatcctggcttcctcaytgaccagctgtgagactgctggcaagttggctgagctcagcttcttctctgtagcctgcaggtgatgacagatcactaatagggcgccctgaggatgaaa

SEQ ID NO: 218827 - DNA, 201 bp, Homo sapiens
agagagtggggtgccatggttagccctgactcagtgccgtaggggcccaggtcctgttgatctggagatggtacatgtgtctgtctctgagcgaacgtcgyctcactcctggtggctccttagggagacgtatgtggataaagagcactgtggcattggaacaggcttggagggcgttagcatcagtaggtatggcaaaaa

SEQ ID NO: 218828 - DNA, 201 bp, Homo sapiens
aaaaaaaaaaaaaaagaggggtttgtaaactgggtgaagaaataaatttaaaaggttatgaccaatgttttccaatgaaagattagaacagaaatcagtgyatattacatatgtaagggtgttttatttcttgtagttatacaggtggaccagacactataccggatcataatgtaaaagggtttcttcttgtccattgca

SEQ ID NO: 218829 - DNA, 201 bp, Homo sapiens
cggctcatcgaatgcagctacgccaaagccaagaggatgaagcttcactggcagttctctcaggtaacagccccagagcccgggcacagtggcagccatcrtggaaaaccaggagagtggcctcaggggccagggaggtggtggaggagaggggaaggggaaggagagacagactggcagtagtgaggctgtggctccaga

SEQ ID NO: 218830 - DNA, 201 bp, Homo sapiens
tttgaatatcagcctccctcaggggccatcaggttggcgataggagtcaccattggagtttgttagttctgaccagctgtggtcaaaggcgtgaacctatwacccatggctaagggcctggacaccaaagtctggttgccctagttcaagtcttggcttcatcactttccatgaccttgggcaagccactcgacctctata

SEQ ID NO: 218831 - DNA, 201 bp, Homo sapiens
attattgtactttttagatataaggaaactgaggctcagagatgggagtcccctgcccagagtctcacagctggggcagggctgggatataaactcaggtytttctgactttaaaccttcacgtttctcctatacaagcctctgctcacgagatggagcccccagtctcccagatgtagacagtgctgggtctctgatctg

SEQ ID NO: 218832 - DNA, 201 bp, Homo sapiens
attgaaacccattactcaagataagagtgagacaaaatggctggtgagtagctcattctcctttcatattatgcctaccatgggctaatacttcctccttyagagggttctggcagatctcatggtcattgtgtgtctctttgaatatcagcctccctcaggggccatcaggttggcgataggagtcaccattggagtttg

SEQ ID NO: 218833 - DNA, 201 bp, Homo sapiens
gggcagggctgggatataaactcaggtctttctgactttaaaccttcacgtttctcctatacaagcctctgctcacgagatggagcccccagtctcccagrtgtagacagtgctgggtctctgatctgcaaccccctctgccttccacgcagtattgggtcactctgggagaagaggtttccttgccagacagcatcttgg

SEQ ID NO: 218834 - DNA, 201 bp, Homo sapiens
agcagagttgatctggataaagcacttgcaacagtgtctgatccatagtgagcagtatattcatttttatataaaacataaaacattctgctcactgtgcrgagtaaaaatgtaactgcgtgagatggcctggacaaatccaggaagaaccagcaccacacatacttcaggaaattaaataagaaacttaggtagtggtgc

SEQ ID NO: 218835 - DNA, 201 bp, Homo sapiens
ggagcctcagggctgcctgggggctgtacatggtggacactcccagggaagttcgggagggaacacctgtattcatggaactgagtggcaggagtccctgrctccagcctcccggcaagctgcttctcccctggtgaggatggaggctgctgggggcactgcaaggagctttggaagctggctataccttgattccaatcc

SEQ ID NO: 218836 - DNA, 201 bp, Homo sapiens
gcctcagggctgcctgggggctgtacatggtggacactcccagggaagttcgggagggaacacctgtattcatggaactgagtggcaggagtccctgactscagcctcccggcaagctgcttctcccctggtgaggatggaggctgctgggggcactgcaaggagctttggaagctggctataccttgattccaatcctgg

SEQ ID NO: 218837 - DNA, 201 bp, Homo sapiens
tggtggagaggagcccaggagccaaatgggagcatttccgagggcaggtggaggatgcaggtggcagctctgtgagtcccagctcaccctgcaaagtgtcrggggttcaatgaaagggaactcatgcaaaggactcatggctcctgctccttcctgtctatgtaacctttgacatgtgctgtaaactgtgaagttctatcc

SEQ ID NO: 218838 - DNA, 201 bp, Homo sapiens
gataaccagagagaacaccctgaatattctaacctaaagtggaaaagtgtggtatcttggtttgtttctgaggcgtaatcactggggcaggggagcactartgatgagggtagcagcatgttaatgcctttggcaatgtgaggagaagagttcacagaaccctaagacttttcactcggagccctgactgggaaccatggc

SEQ ID NO: 218839 - DNA, 201 bp, Homo sapiens
acctaaagtggaaaagtgtggtatcttggtttgtttctgaggcgtaatcactggggcaggggagcactagtgatgagggtagcagcatgttaatgcctttrgcaatgtgaggagaagagttcacagaaccctaagacttttcactcggagccctgactgggaaccatggctcagggctgagggaagttgctgaaaacattg

SEQ ID NO: 218840 - DNA, 201 bp, Homo sapiens
tgaggcatctatttgtgtcactctaatgggagtggcaggcccgctttaacaatatagcactgagcatttgctgatcagttttggagggaggaaggtcggcrtctacatgttggaaaaaactgttttagtgcacatgaaaccaaggcttgttgccaaggctcagaatgatgcctgggctctggctaatgttgggatttggac

SEQ ID NO: 218841 - DNA, 201 bp, Homo sapiens
tcaggttccctggtccaagtcaggagtaggaatagatgtggccagtgcctgagaaagccgaccaggctgcagaggagtcacatagaggaagggtcacttargacagcttgtcagtcaggtggggctcatctcagcaggactctgcccaggagcaagggctgggggaggggatggggcagggctcagtcctattcatgggtt

SEQ ID NO: 218842 - DNA, 201 bp, Homo sapiens
aaaaggccttcttcccctggtcagctgtgtgatcatctgtcaacagggaaagtccccaaactggagctgagtgttgggagtaaatcaggaggggtttctcytgccctctgaggggccctgttgccagccactgggatcaagctgtccctagaaagggccagggaacattacttagggccacagtgcagccagcaggaaagg

SEQ ID NO: 218843 - DNA, 201 bp, Homo sapiens
aatggaatcctcacaatctctggaggctggttgggtattattatctctgcattctaggttggggaattttggccttgggaggttgactgtgctatggtcaygtagccaggacgtggtggagcactgactggaatccacgactgtgtgacttcaaagcctctgctctcacagttagtgattcccctccatttttctgggaag

SEQ ID NO: 218844 - DNA, 201 bp, Homo sapiens
gaggaagagaggcaacattcgataaggaaatgacctatcgcagtgcttgactcttggcagaaattcaacaaatattacatctttcctgctgtaggcccccyacctcatctttcaggactcactggctttgagtttgtcatccttcgtgcccatactgagtgaaaaggtaggaccatgtggtgtcaccaggactttaatatg

SEQ ID NO: 218845 - DNA, 201 bp, Homo sapiens
aggaggaagagaggcaacattcgataaggaaatgacctatcgcagtgcttgactcttggcagaaattcaacaaatattacatctttcctgctgtaggcccyctacctcatctttcaggactcactggctttgagtttgtcatccttcgtgcccatactgagtgaaaaggtaggaccatgtggtgtcaccaggactttaata

SEQ ID NO: 218846 - DNA, 201 bp, Homo sapiens
tcagcagagttgatctggataaagcacttgcaacagtgtctgatccatagtgagcagtatattcatttttatataaaacataaaacattctgctcactgtrcagagtaaaaatgtaactgcgtgagatggcctggacaaatccaggaagaaccagcaccacacatacttcaggaaattaaataagaaacttaggtagtggt

SEQ ID NO: 218847 - DNA, 201 bp, Homo sapiens
tgcctctcccatagaattattatgaagatcagcagagttgatctggataaagcacttgcaacagtgtctgatccatagtgagcagtatattcatttttatrtaaaacataaaacattctgctcactgtgcagagtaaaaatgtaactgcgtgagatggcctggacaaatccaggaagaaccagcaccacacatacttcagg

SEQ ID NO: 218848 - DNA, 201 bp, Homo sapiens
acagattcctaggaaatacagagtagggtagcacagtggttaaaaatgcagactgactcacagctccaccccgattaactgtgtgactttaggcaagctgkatgacctctcagtgcctcagttccctcatgtttggaacaggactaacagcagtgcctctcccatagaattattatgaagatcagcagagttgatctggat

SEQ ID NO: 218849 - DNA, 201 bp, Homo sapiens
accattaccaatgtcacctgatgtaacagggaggcagacccagcgaagttaaggaatttgtccagagttacagaggtgcgatttgactgtttggtttcagmgtctacaccctttaccattaaacaggctgcttgcctctggtacaccatgggtctctgattccaaacaacttatttgaattttgtccttatcccttttctc

SEQ ID NO: 218850 - DNA, 201 bp, Homo sapiens
cctgtatcctggtgaccacattttctaaattctccaaagaattatggttaaaggatttttttttccctgacttgtgtattcatcttaaaagccttacaaargtaaagcaatatatttatctttatttgtatattgaacagattcctaggaaatacagagtagggtagcacagtggttaaaaatgcagactgactcacagct

SEQ ID NO: 218851 - DNA, 201 bp, Homo sapiens
gattcctgtttaaacagacatagcagtcaacaaagcaggcatctgtggcacaaggctcttcggtgactgggcagttttcagccactttggcatatgtctamttaaaactccccggagtgctttggcaaccatatatttgatccttctacaaaagggaactgtttggaaatactatttttgaattcctagttttcagaccca

SEQ ID NO: 218852 - DNA, 201 bp, Homo sapiens
agggcctgtagtcttcagtgaagctcctgttctctgggcagccctggagacacacggacatatcctttcttctcagctccctgtctagacaccatgcagasctacaaaatcttttctccttataaaacatgattgcctgtatcctggtgaccacattttctaaattctccaaagaattatggttaaaggatttttttttcc

SEQ ID NO: 218853 - DNA, 201 bp, Homo sapiens
ccaaacttcgttgtaatccaaatatctgagaagcttgttaaaaattcagggttttgggttatgctcccttttattccttcctgagagattctgatcatgcrtccagggtgaggtcctaaatcaacatttttaataaaatcctgagatggttctgttgtggcaagtccaaggactgggttttgggaaacagtgttttataac

SEQ ID NO: 218854 - DNA, 201 bp, Homo sapiens
gccatggaactgggctgggctgtaactcatcctttattcggaggccaggtcatatttcccaaggatgcacagtgcacagattctcacagcaaatagagccrtcagatttttagggcagagaattccaaacttcgttgtaatccaaatatctgagaagcttgttaaaaattcagggttttgggttatgctcccttttattcc

SEQ ID NO: 218855 - DNA, 201 bp, Homo sapiens
aaccgaggcccagagagatggtggtgggtggggctggggtgccagcccagaggccaggctgcaagtgccggactggcatcggggtcccctgtgcagctccstctcccctcatttcccattggtactggaaatccaggtgccctttacccctgcaaggcactgtgtctggaaactgtatatcacacttgtgtaaagcaaatt

SEQ ID NO: 218856 - DNA, 201 bp, Homo sapiens; identical to SEQ ID NO: 39205

SEQ ID NO: 218857 - DNA, 201 bp, Homo sapiens
ctgtggagttgcaccagtgaggaggaagagaggcaacattcgataaggaaatgacctatcgcagtgcttgactcttggcagaaattcaacaaatattacayctttcctgctgtaggccccctacctcatctttcaggactcactggctttgagtttgtcatccttcgtgcccatactgagtgaaaaggtaggaccatgtgg

SEQ ID NO: 218858 - DNA, 201 bp, Homo sapiens
cactatgggttacttattaactgatgtattttgaaatgatcgattgagtcccttgtaagaagcagttactgtgctaggagctggcagtccagcaggggtcmagtcagatgtggtcctgctctgtggagttgcaccagtgaggaggaagagaggcaacattcgataaggaaatgacctatcgcagtgcttgactcttggcag

SEQ ID NO: 218859 - DNA, 201 bp, Homo sapiens
agatggggcacttgaaggaaagtgaagattctgtttggagggtgtggccaggtgattttcatagcaggcacacccaagttcaagaattgtgatgcatttakgacaaatacctaatgcatgcgaggcttaaaacctagaggaagggttgatgggtgcagccaaccaccatggcacaggtatacctatgtaacaaacctgcac

SEQ ID NO: 218860 - DNA, 201 bp, Homo sapiens
actggcccgggctggagtttgacccccacttctccaggcctgggcctgagactcaagtgacccccagtgcccctagatagaaagagtcctgaccaggcgcycccagctcattgagcgcttagtatgtgccagagctattttaagtacttcaccataaattaatcagtgccatatgatggtggtatggaccattaccaatgt

SEQ ID NO: 218861 - DNA, 201 bp, Homo sapiens
caaagagaatatgttaacaagtggatgtgactgtgttctaataaaactttatttacaaaaacaagcagtggcccttggaccatggtttgccacccctggtrtagagaaaagaatgtggagtttggaggagccaggcctttattcgatgtcactgacacactgggtggccttggattagacatttaaccttttcacttttgg

SEQ ID NO: 218862 - DNA, 201 bp, Homo sapiens
tctatgatttttgtctataaataaataagaataccaggcgctgggtggctgtgcagtttggaaaaacccctgagttgatttcttgtgccctccatgactcsgtggcgtgtggtttcattgctcaggtgtctgctagtgaatggtattggggaaccccaaccaggtaatgttcaggggagcctcgcacactcctgcagcttt

SEQ ID NO: 218863 - DNA, 201 bp, Homo sapiens
gtgccctccatgactcggtggcgtgtggtttcattgctcaggtgtctgctagtgaatggtattggggaaccccaaccaggtaatgttcaggggagcctcgyacactcctgcagctttttctggtcacctccagctctgcattatttagggactaatccagttagggttaattgggtctctgtatttattgtcctctgagct

SEQ ID NO: 218864 - DNA, 201 bp, Homo sapiens
agtcactagaaaggagaaagcatagcttcatttccaagaaaggaaacagagtgcttgggaccccagaggtaaagggaagttggcctctggctttccctctraagcagaaacagagggcctcctgttcaccccgaggtctctgagaacctcagaatggactctaccacctgtgtcttcagggtggcggtgactggcggcctg

SEQ ID NO: 218865 - DNA, 201 bp, Homo sapiens
ctcagctagctgccactggcccgggctggagtttgacccccacttctccaggcctgggcctgagactcaagtgacccccagtgcccctagatagaaagagycctgaccaggcgcccccagctcattgagcgcttagtatgtgccagagctattttaagtacttcaccataaattaatcagtgccatatgatggtggtatgg

SEQ ID NO: 218866 - DNA, 201 bp, Homo sapiens
taatagttggagacttccatactttctttaaataatgggtagaacaattaggcagatgtactaatgatgatatagaagacttgaacaaaagtataaaccarttagacctaatagacacttataattcactccatttaataacagcagaatacacatttttttcaagcatatatggaaaattatccagaatacaccatacac

SEQ ID NO: 218867 - DNA, 201 bp, Homo sapiens
gcatcaacttgggcacctcctctctggttctctcctgacagccagcccaccccattgcttcttagggagggcagaccagagccaggacagccgccacatgmactaaaatggcaggtccaacgtaggtgagcctccctggtcctttcttgggtgcaggtgatggctggggtcctgcatctactttgttgggggcagcaggca

SEQ ID NO: 218868 - DNA, 201 bp, Homo sapiens
cataggggaaaaattgaaaatgtcatttaaaaaggactattccattctttttttttacctccgcagactcacggccaggagcaatagccagtgggtcaacygaggagagcagtgattttattttccttttcatttcaaacagattgtgtagcctttggggtgtgggggaccagtggaatgaagctatgggccgggaaacta

SEQ ID NO: 218869 - DNA, 201 bp, Homo sapiens
tcagactagccaaggtgaccagtgtgacaggaacatgatcctggtcatctccagaccccaacaacaactaacccagtgtgccgctcatcgtagtcattctrtcaattttgttgacaaaagaatagtcatgatctcccagggaggtagatgtggtcaccatctccacttcatagatgaggcagctaagtctcagagggtcta

SEQ ID NO: 218870 - DNA, 201 bp, Homo sapiens
agcatagcttcatttccaagaaaggaaacagagtgcttgggaccccagaggtaaagggaagttggcctctggctttccctctgaagcagaaacagagggcmtcctgttcaccccgaggtctctgagaacctcagaatggactctaccacctgtgtcttcagggtggcggtgactggcggcctggcaagttaggacttgctg

SEQ ID NO: 218871 - DNA, 201 bp, Homo sapiens
aattctctgttccatgataactcctagcaacggggtaaaaatagcctttctgatggtgccgcatccggtctttgctctctgctcttgaacgctgacttgcwtgaaggttacaaagaagaaggtgagggtccacagccccttccccattttccttgcccacacaggctgcctcctctcttttttgttattccttccgctttg

SEQ ID NO: 218872 - DNA, 201 bp, Homo sapiens
tatgtagttgtagtattacacaaataatgtagatgacagggctggtgaaccaaatgactgtgccctccacagagggaggggccagcccaggtctctgcacraagccccagcctagagccatgagactgggccggaggctgcaggttggaccctgcgagtgaggacagaagtcggctaacatgtgtcccttcttccttcctt

SEQ ID NO: 218873 - DNA, 201 bp, Homo sapiens
gttccagttttttgggtctgacctagtgtgcaattgtcctataggcaacctcagggaatggtaacctctctatcactcatgtactgatagaacttcttatraggcagtatgtacccttcctctcccatggggcatggggagccacatacctacaataattgacttgcctagattgtcctctgattgttgaaagatgctaca

SEQ ID NO: 218874 - DNA, 201 bp, Homo sapiens
atatatctcagtggcctagaatggtaggtgctcattaaatatgtgttgaatggatggaaggattaatgaatagtgtctctgcagagggccctcagaggaarcagacctaattttgaagctcgttgaggtgatccttctccaccctaggcattggggcaccaccagctccctcagtctagttcaccaccactgtgataggca

SEQ ID NO: 218875 - DNA, 201 bp, Homo sapiens
ggtggccagtgctatctctgttttaaaagtttaagcaagttttaaactttaaccttttataatttttgttgaagagctccagcatcaaagggtggcctggyccctctgtccatatcccagatgtgttcccagggagcaggtcagggctctgctcagcgatgccccaccatggccttactaccagttctagagcaccctccc

SEQ ID NO: 218876 - DNA, 201 bp, Homo sapiens
taatcttcctaatgaagatgctctctccctcaaagtgccagccgggagcttgtctgcctcctcttgacaagaagatgagagcttccctctttcctagggcmtggtcccgaatcctccagcccttctgaatcgatttggggtgttgagcctaggattctatgcttcttcaaaagctccagcccagcttctctgggctttact

SEQ ID NO: 218877 - DNA, 201 bp, Homo sapiens
caatatgctggtttcctttcttttgggtatatacccaacaatgggattgctagattatacagtagttttattttcagttttttgaggaacctccatactgytctccatagtagctgtaataattttcattcccaccaacaatgtacaaaggtttccttttctctacatcctcaccagcatttattattgcctgtctttcgg

SEQ ID NO: 218878 - DNA, 201 bp, Homo sapiens
tgtcccaatataactctccctttctacccctcaccactctctaggcccaggacagtttcagccaaagacgatcactgctgccccatgcaggaggctcagcrgggagagtctaaatgccccaaagatacctcatttttcacgggcacctacttgataggccagcagagttgtcaaggaaggctcatttaatggaggaaaaac

SEQ ID NO: 218879 - DNA, 201 bp, Homo sapiens
caaggtgagggacagagtcaggagaacctccggccctgggggacgttacccagcctcgactctgtggctctaaaggcaggaatgtgcaaccagagttctgkggtctccctggccagctgttagctctcagtcatggctcctacccctggcctggaggagaggaaaatgccactagcgtaagatccaggatacggatgtgtt

SEQ ID NO: 218880 - DNA, 201 bp, Homo sapiens
taaacgttccagagtccccattgctcagaaagcttagctatgcttgctgggactgcaggcactgaaggtagggcatcttgaacaccttttttgtgttcgarcaatttgtttatttaatccgctaggctgggcttctgagatgtccatgtgaggacttgagaaaatcctctttgccgaacctccctctgtgatctgccagcc

SEQ ID NO: 218881 - DNA, 201 bp, Homo sapiens
ctccggcggcccgatagggctgtgggctttgtgcgggcttcagcagtgtttatggagagcttactatgtgccaggcaccgtgccaagctccttacctgacyatctcatttatcctcacacatgttctatgaagaaggcactattgttatcaaccccattttccagaagaggaaactgaggctcagggtgaggtggaccaaa

SEQ ID NO: 218882 - DNA, 201 bp, Homo sapiens
cagctatcggctaagacatctccaaggaaaccaatgctgggtttgaaaaccactgatcagtttagacagagggaatgacttgtactaggtcacccaggccmttagagactccgtggttttaagggggtcacatggcccagtgacttagcctgaatccaaatccagaactccagactcctagtccagtgccctctcctgtac

SEQ ID NO: 218883 - DNA, 201 bp, Homo sapiens
aaggtcaccttcctgtcccaactccggcggcccgatagggctgtgggctttgtgcgggcttcagcagtgtttatggagagcttactatgtgccaggcaccrtgccaagctccttacctgaccatctcatttatcctcacacatgttctatgaagaaggcactattgttatcaaccccattttccagaagaggaaactgagg

SEQ ID NO: 218884 - DNA, 201 bp, Homo sapiens
tacatggaacctcatgtatactaggaaatactagattactcatttgttgtctttctcttccagtaaactgtaaacatcctgggggcagggactttgtcctytttagccccctatctggtataccagatgcctgacatctggtggactttcaataattagatgttgaatgtgaatggctggtcacctgtgggtctcaaagaa

SEQ ID NO: 218885 - DNA, 201 bp, Homo sapiens
atgtttttttttttttttctgggatgtgtttgcactacagtaggagcgttgagttttcagaggctgtatggtcctctgtgcagaaaggagtttgcagagckggcctggctgctgtcctttgaaaggcttgcttatgaggttggcatctaagagcctgggtctcaggattcccagcagaactgataagagtggctctctgtg

SEQ ID NO: 218886 - DNA, 201 bp, Homo sapiens
tctgtgttgtgctcagaatcctccaaatactccccttcacactctctggctttgcagctcacagagttcattgtgccctgctcaatctctgcctcgaatgrgccctcctggggagtcctcagcccctggagatgtgcttctcttaagtcacctcatcagttggtcagacatgcccaggtaggtctgaatgcctgcaggggc

SEQ ID NO: 218887 - DNA, 201 bp, Homo sapiens
cccagcccctagcccaagcttcagagttgggtgggtctagggtcgagtcctagcttcatttccttccagctgtgtggcctcaatttcctaatctgtggaaygggataatcatctttcctcctatggtcattatgaaagttacacaaaagttgcacattcagagtgcctgggatgacctagagtacatgcctgcatgttgta

SEQ ID NO: 218888 - DNA, 201 bp, Homo sapiens
aagaggatgccaagacacaggcaagataaatggttcgttgaacaaagtacagcagacaacccttgaccaagaatgtcataggctgacctgttctgaattgrtaacattcccagagtttacttatctccagaagtacacaatgatttaaaaagatgttttaggccaggcacggtggctcacacctgtaatctcagcagtttg

SEQ ID NO: 218889 - DNA, 201 bp, Homo sapiens
agcaacataatccatcacataaacagaaccagtgacaaaaaccacatgattatttcaatagatgcagaaaaggccttccataaaattcaataccccttcawgccaaacactctcaataaactaggtatcgatggaacatatctcaaaataataagagctatttatgacaaacccacagccaatatcatactgaatgggtga

SEQ ID NO: 218890 - DNA, 201 bp, Homo sapiens
tcaaagaggatgccaagacacaggcaagataaatggttcgttgaacaaagtacagcagacaacccttgaccaagaatgtcataggctgacctgttctgaaytgataacattcccagagtttacttatctccagaagtacacaatgatttaaaaagatgttttaggccaggcacggtggctcacacctgtaatctcagcagt

SEQ ID NO: 218891 - DNA, 201 bp, Homo sapiens
tcaacaaacatgcgttgagtattattttacgtcaagcattacaagacaaaaaggcagctttgcccaagtccctgccctggaggagttcctgtctggagagrgaggcaggaacttagatgatcacagtttatacaatgaaatcttacaacctactgctccacactcctttcccactagcccacaaaaagagagagcaggaat

SEQ ID NO: 218892 - DNA, 201 bp, Homo sapiens
tcattcatttgctcattcaacaaacatgcgttgagtattattttacgtcaagcattacaagacaaaaaggcagctttgcccaagtccctgccctggaggasttcctgtctggagagggaggcaggaacttagatgatcacagtttatacaatgaaatcttacaacctactgctccacactcctttcccactagcccacaaa

SEQ ID NO: 218893 - DNA, 201 bp, Homo sapiens
ctaggagttagcatacaacttcatagtgtctgagagagaatcaaaaggtaaatagcaaagtcaagcatgagtacattctcttggaaaattacatactcttkgatgggcccgttaatgtcccaggataatattaaaaggacaggccacttcccctctttgtttttgccttatttctaggtttcaggtatttttcttactctt

SEQ ID NO: 218894 - DNA, 201 bp, Homo sapiens
ggcacattcggggccccagtcacatcacagagccatgggatgtaggagtcagtgatctcagctggcccctcactttgcagttgtaaaagcctaggtcctakggatggatgggattcgcatcaggtcagtgggtggcgaggggaggaacagaggctctgatgtgctgggcactgaagccaggccctttctgccgttccatgc

SEQ ID NO: 218895 - DNA, 201 bp, Homo sapiens
tcaagcaaggcaatggctggttcccagctcttcatgtgcttgaaggctggatggaatcttctgtctctcccagaccagggatctcctttgctcacggaccyggtcttcatgctggccatgtttgctagaaacctcccatatctgttgccaggagaaggcatacaactcagcgggcctcaagagatgggcagaaggaaactg

SEQ ID NO: 218896 - DNA, 201 bp, Homo sapiens
taagcacctactaggcgccagatgctgttctgagtctgagggactcaacagagaacaaagcaaatgcctgacctcacagagccacgttccagtcagggaarcaaacaacaagcaaaatgaatggagactatattagtctgttctcatgctgctaagaaagacgtaagtgagactgggtaatttataaagaaaagaaggctt

SEQ ID NO: 218897 - DNA, 201 bp, Homo sapiens
tctgtctgctctgggttggcagtgccttgcccaacctgaatccagcccatcacttgtctcctgctgctgctttcaagcaaggcaatggctggttcccagcycttcatgtgcttgaaggctggatggaatcttctgtctctcccagaccagggatctcctttgctcacggacccggtcttcatgctggccatgtttgctaga

SEQ ID NO: 218898 - DNA, 201 bp, Homo sapiens
gcaagtgcccagtgaacgtgaactctttcaggttccctctccagctgtcccagctgttccctcgccccatcccacaattcagccacttccacttctggggraaaaaaaaaagttttctttgctgtagtcagtttctgcttcctttttgaactcctgtcctcttttgataaacataaaaatcacatacccttctttcatgcc

SEQ ID NO: 218899 - DNA, 201 bp, Homo sapiens
ttaattgtggcttttctccttggcttggctgatacttaggtgggcacatgtaccttagtgtaagagaaggagcaggcagaaatcccttttatttcagtctrcccagccttcccacaggcactgtgatgctgcggccccacccggggacagagagctccatcttcagtattgaaagctgtgtgtagggaatctctgggacat

SEQ ID NO: 218900 - DNA, 201 bp, Homo sapiens
gatggtcttatggttaggaagtgtcagaaccagtgtacatactgggagctggtggttccacagcccctttccagtcacttgcagtgttcactaatttcccytgggagcagtggtgtatccctggcaccccgagtttaacctgtgaaggaatatattatcttctgcagtgctggagtttggggttagggtctagatcagggc

SEQ ID NO: 218901 - DNA, 201 bp, Homo sapiens
cattatatgaaacagtttcttcttcctggaagccttggccacaccaataaccacccacgccctgtcttcttaattctatttaatcacttcccaaaccaatratcttcctaatgaagatgctctctccctcaaagtgccagccgggagcttgtctgcctcctcttgacaagaagatgagagcttccctctttcctagggcct

SEQ ID NO: 218902 - DNA, 201 bp, Homo sapiens
cctgcccaggagcagggctggacagcagggctgctccagctggtgccaggttccattctggggcctggggcaattcagtggctcccacagtggtcgtctcygctcatctgctgagtccaccagggtctggtgggtgtgaagttgaaagatgatgacaataatcagaataatggctaccattactgagcccctggaatgggc

SEQ ID NO: 218903 - DNA, 201 bp, Homo sapiens
ctttttgcccaggctggagtgcaatggcgtgatctcggctcaccacaacctccgcctcctgggttcaagcaattctcctgcctcagcctcctaagtagctrggattacaggagtgtgctaccatacttggctaattttgtatttttagtagaggtgggggtttctccatgttggtcaggctggtctcaaactcccgacctc

SEQ ID NO: 218904 - DNA, 201 bp, Homo sapiens
tatgcataatttcagataatctcacagcttccagcatgctgagtccttcttgtagattcccacgcactcccagggactcaaggtggcctctgcctcctggstgtccatctccccaccaaccatctctgtgatgctctcactgtgctgatagtctgcagattccaccaagagaattcactcatgtgcaaggttcaggatcac

SEQ ID NO: 218905 - DNA, 201 bp, Homo sapiens
ctttgatgagggctgaaaggctgtgttggttagtttccactgggttatgctggagcaacatcacaaaggcttttagccctcaatgtgtatttctactgcayactgaaagtctgcgctgcttcacacgatatctacaatccaggaactgggctgagggagcagctattgtttccatcttgtggcagaggaaaagagaacaat

SEQ ID NO: 218906 - DNA, 201 bp, Homo sapiens
agcacagggcttcttggttgcatctgccaggacagaccttctgagcacaccttctggaccttctgggctgtctctgacgcacaagtcagagatggtcccayggaagacttgcatttccttgtaactctggtcacaccattggccatttgaaaacaatagtacctgtccctataggcccctggactgggctgagtgctctat

SEQ ID NO: 218907 - DNA, 201 bp, Homo sapiens
gcagggctgggattcatttgtagccttcagaagccatctactttctccagtgccatctataaagtgtagttccagttttttgggtctgacctagtgtgcarttgtcctataggcaacctcagggaatggtaacctctctatcactcatgtactgatagaacttcttataaggcagtatgtacccttcctctcccatggggc

SEQ ID NO: 218908 - DNA, 201 bp, Homo sapiens
tctggtataagagatttacagaggagtcctgggagagcagtggagattgcttaccactgaccgtattttgtggaactacctgagaagctcttaaacatgcygtgccagtctgcgtaactgtgcacaatcatttgcttaagtgaactggggaggaattaactgcacacagctggaatttgccccggccatgccttcactggc

SEQ ID NO: 218909 - DNA, 201 bp, Homo sapiens
gaagaagacacagcctccttctctccctgcctccctccttatcttccttctccctatattttgggggtaattactccatgcacagtcctattctggatacytgggagagaagcctggtaattctctggtataagagatttacagaggagtcctgggagagcagtggagattgcttaccactgaccgtattttgtggaacta

SEQ ID NO: 218910 - DNA, 201 bp, Homo sapiens
gggtttgtcttgctacacaattgcaacatcaccttaatcttctctgggcctttattttgttttactattttattgaggtagaattttatactaaaatacaygaatcttaactgcacagttcttaactttgtatacactgtacagtcaccattaagttcaaacccatcattccagaaggcttcctcatttgtcctcttggtc

SEQ ID NO: 218911 - DNA, 201 bp, Homo sapiens
taagcctatttttttagtttgtaaaatgtggactaacaatggtagatacaccaaaaaggttgttgtgaggatttaacacatgtaaaatatttaaaaccatrcctggtatgtagtaagtcctcaataaatgttatctattagtatttctataaggatggtgttaccattattactccactttaaccctgactcctgttcagt

SEQ ID NO: 218912 - DNA, 201 bp, Homo sapiens
gggctgggcagcattacaatacccctttcactctgaagcccgtttcctccccactccattgtgcagtctcagtaccaccacaatcttggagcacgagccaktggggccagtgctttgtgtggactgcccactgaagcagaacccttcatgcaggaattcctactttcagcatcactggcttcaggagcctcaaaagccttg

SEQ ID NO: 218913 - DNA, 201 bp, Homo sapiens
aagtgtcaatttccacaactgtagaatggcagaaatgatagacactttattgggttgttggtaagatttagtgagaccacaatctcaaagtgcaaggaagktgcctgcaagagtaggttcagagattctgtgtttccttcccaggaggctgcgcaggaccagccctgttgttccactctgcctgtctgctccctccaggac

SEQ ID NO: 218914 - DNA, 201 bp, Homo sapiens
tcaaaaaccaatagatgttggcatggatgtggtgaaaagggaacactttcatcattacatttctgagatacatccctgctattacctgtagttgtaatttsttcatttttactactatgtagtattccattttataaatatactataattcatgatctattcaactgctgatggacacttggactatggccagtttggaag

SEQ ID NO: 218915 - DNA, 201 bp, Homo sapiens
aacctgcctgacctagtttctcctgcctcctctcactgggttctggatcttatcaccaaacaaccagagctttgctataagcatggcctgagggcagaaasagaaatagcagtggctacagaactggctgcaggacaaaagctagcccccactccccacccaccctcaaagccttctcagtgatcccctctgcctgagaga

SEQ ID NO: 218916 - DNA, 201 bp, Homo sapiens
catttttctattgctcataattggatagcattagccactcctgttagctaaagataatggtagtgtacattgacatatcatgaaatgtttgttccctgcaratagcgctgtatcctgctttcctgttttcagaattttagccagcagctggcatcatgcaagtttggtttgcagttgcatggtctgtagctgcatggcaca

SEQ ID NO: 218917 - DNA, 201 bp, Homo sapiens
cctcctgcctcgccctcccaaattgttgggattacaggtgtgagccactgagactggtcttaaaaagcattcctaatgattcacagctctgttagagaagstttagtttcaggaataacgtgtggcttcacttttgaacatatttggtgtccagtgcatggtgtgaagggccagagctctggactaaagcctgaagtcata

SEQ ID NO: 218918 - DNA, 201 bp, Homo sapiens
cagatacctggcaccccaacctgcctgacctagtttctcctgcctcctctcactgggttctggatcttatcaccaaacaaccagagctttgctataagcawggcctgagggcagaaacagaaatagcagtggctacagaactggctgcaggacaaaagctagcccccactccccacccaccctcaaagccttctcagtgat

SEQ ID NO: 218919 - DNA, 201 bp, Homo sapiens
ttgggattgtagtttactgcacatttttctattgctcataattggatagcattagccactcctgttagctaaagataatggtagtgtacattgacatatcrtgaaatgtttgttccctgcagatagcgctgtatcctgctttcctgttttcagaattttagccagcagctggcatcatgcaagtttggtttgcagttgcat

SEQ ID NO: 218920 - DNA, 201 bp, Homo sapiens
gtggagaaactgaaggctgaggaaaggtgtctcctgatgccgagagagaggccacagcggcagcatggctgtcgccaggaggccccagcagtcccaggagrgaagagaaaagaaggatttaaggaggtcagggcgtttggcctgaagggattacagtgtaaagaaactgagcacttctggagactgcgaatgtgaggaatt

SEQ ID NO: 218921 - DNA, 201 bp, Homo sapiens
gtgcagcttgcctcaggccttgggcacacccaggctccacctgcagggacaagcgctgtgccctccgcagagcccagcctcaccctgcctgataccttgcrcaaatgtgaagcacacacactaaggcatttgcaagcattcagcagtaggactttagccatttttttcctcacttgtctttttctagagaaaatcaaggat

SEQ ID NO: 218922 - DNA, 201 bp, Homo sapiens
cccacccctcgcctctctgctcacgcagggccacattaggtcaggtgtggagaaactgaaggctgaggaaaggtgtctcctgatgccgagagagaggccasagcggcagcatggctgtcgccaggaggccccagcagtcccaggagagaagagaaaagaaggatttaaggaggtcagggcgtttggcctgaagggattaca

SEQ ID NO: 218923 - DNA, 201 bp, Homo sapiens
cttcactaaatccttgcagcagcactctgagctacttttacaatcccattttatagatgagaaaacagaggcaccgatggcttaggtaatgtgtgctcctyggatctgaacctaggcagtctgattctagagccaggttctggaccattatgccatggtctctgtgacagctccccatggctgtggtctctgctgccacac

SEQ ID NO: 218924 - DNA, 201 bp, Homo sapiens
aagagaattgcttcttagaaaaaatcaagttgcatgcattgaacgacttgataaaagtcaattactagcaatgatggctgtcaaattagttgtaggcaggrcagctgataaagattagaagacatatgtacataatcctagaagaattttgccctcaattggtttcacatatgagtttaaattccttctccattttttaag

SEQ ID NO: 218925 - DNA, 201 bp, Homo sapiens
acaggcaggataacagctcaccccagcctcagaccagagttacaggagggatgctgctgtctcagaactttgtagcatcttttattctaggctcctccagytctctggtactgtcttagtccaggcccccatcatggttggaagggatcacagtggaagtcctctcccggctccccctgcccctcccagcctggaggctgg

SEQ ID NO: 218926 - DNA, 201 bp, Homo sapiens
gctgttgataggttcttagaaattgtgactttaagcaaatcaggcaggtcctcaaataacgtcatttccttcaatgttgttttgttataacattgatgagraaaaaacaggttttgttatatgttatattttgcttaaagtcacagtttccaagaatctattgatgatgttaagtgaggacttactgtagtttaacagaca

SEQ ID NO: 218927 - DNA, 201 bp, Homo sapiens; identical to SEQ ID NO: 39206

SEQ ID NO: 218928 - DNA, 201 bp, Homo sapiens
gtgaagacagctgtggcacatattcagtcttccagaggagactaatatatgagtgataggggagcctgcagtttcatgggaatgctgacctcctgggatckggccacacagataatgtcagccctcaccagccacttggcctgaggctcccgaatttctgcatgttgcctctatgccctctgaccccactgtctgccctgg

SEQ ID NO: 218929 - DNA, 201 bp, Homo sapiens
caaagtcttgcttgtaattccagcactttgggaggctgaggcaggcagatcacctgaggtcaggagttcgagaccagcctggccaacatggcaaaactccrtctctcctaaaaatacaaatactagccaggcatgatggtgcatgtctgtaatcccagctacttgggcagctgaggcgggagaatcacttgaacctgggat

SEQ ID NO: 218930 - DNA, 201 bp, Homo sapiens
tccttattcattaacctattgatggatacttaggttgattccatatgttgtctattgcgaatagtgctgcaataaacatgggagtgcagatatctcttcartatgctggtttcctttcttttgggtatatacccaacaatgggattgctagattatacagtagttttattttcagttttttgaggaacctccatactgctc

SEQ ID NO: 218931 - DNA, 201 bp, Homo sapiens
catggacacagggaggggaacatcacacactggggcttgtcagggagtggagggctaggggaggaataacattaggagaaatacctaatgtaggtgacagkttgatgggtgcagcaaaccaccatggcatgcatatacctatgtaacaaaactgcacattctgcacatgtacctcagaacttaaagtacaataataaaaaa

SEQ ID NO: 218932 - DNA, 201 bp, Homo sapiens
aatcattgaattgtacatttaaaatgggtgaattttatggtatataaattatacctcaataaagccgcttttaaaatgaggagtggaagaaaaggaaaacmttctttatgaattcttatctgggatattcagcaatgcttgctgcattatttgatgcttagctttcatctttcccaaagctgacttcacagtgacctctga

SEQ ID NO: 218933 - DNA, 201 bp, Homo sapiens
gaagaaaagtttttttaaaaaaatcattgaattgtacatttaaaatgggtgaattttatggtatataaattatacctcaataaagccgcttttaaaatgargagtggaagaaaaggaaaaccttctttatgaattcttatctgggatattcagcaatgcttgctgcattatttgatgcttagctttcatctttcccaaagc

SEQ ID NO: 218934 - DNA, 201 bp, Homo sapiens
aaacaccaatggaagacctgctgcttgcatcatggtgtgaggcagtgggcaggaggctgtgagcaaggccagtctgtgccctcagagctggtggtataggyatgggggaccgcctgacctggtgtgcctaggactttcagtgctgaaactgggaaggtcctgggcaaactgggatgagcttgtcaccctacatagtcacga

SEQ ID NO: 218935 - DNA, 201 bp, Homo sapiens
tccctctgcatggtggtgtgagtcctgccctcattagcagtgctcgggtgaactgggctttgatgctctgcaaacatggtctgggcttctcgggcaaggcscaagcatcaagctttttaatgggaataatggtgacttctcatcattggaagtcagcgggcaggagtttactgaaagccgacaagagaaatgtacatttct

SEQ ID NO: 218936 - DNA, 201 bp, Homo sapiens
atccaggtgctctgggagggcatcttagcagtacagatttgggagcaaaggccactgggtcagtgctgggttgccaggccgagaaagtggctggactctgsagcaaaagctctgggcttgggtccagagcagtcctctcccacgcagctcttggaggcgtgttcttttcaaggtgacttggactacagcacaaagccctct

SEQ ID NO: 218937 - DNA, 201 bp, Homo sapiens
aatgggaacctccatactgccttcatcctctggttttattatgtcctgcaatctgggagctgacaggcctgggaatctaatctggaaagatctggaagaarctagatgtatctgagtaaggccagaggataatcaagctagtcccatgcatacaggtaggagacagaggctggagtgaggccatggtggccttgagggcca

SEQ ID NO: 218938 - DNA, 201 bp, Homo sapiens
  misc_feature (1)...(201): n = A,T,C or G
tatgtggagtttgggttgtatgctggcaagtatgatctttcggaaggagccatttttccatggacgtgacaattatgatcagttggtgaggatagccaagnttctggggacagaagatttatatggctatattgacaaatacaacattgaattagatccacgtttcaatgatatcttgggcagacactctcgaaagcgatg

SEQ ID NO: 218939 - DNA, 201 bp, Homo sapiens
caacagacacatgaaaaaatggtcattatctctggtcattagagaaatgcaaatcaaaaccacaatgagataccatctcacaccagttagaatggcgatcrttaaaaagtcaggaaacaacagatgctagagaggatgtggagaaataggaacacttttacactgttggtgggagtgtaaattagttcaaccattgtggaa

SEQ ID NO: 218940 - DNA, 201 bp, Homo sapiens
caaccccatctaaaagtgggtaaaggatatgaacagacacttctcaaaagaagacatttatgcagccaacagacacatgaaaaaatggtcattatctctgstcattagagaaatgcaaatcaaaaccacaatgagataccatctcacaccagttagaatggcgatcattaaaaagtcaggaaacaacagatgctagagagg

SEQ ID NO: 218941 - DNA, 201 bp, Homo sapiens
tgacaaatgggatctaattaaactaaagagcttctgcacagcaagagaaatcatcagagtgaacaggcaactacagaatgagagaaaactttggcaatctrtccatctgacaaagggctaatatccagaatctacaaagaacaaacaaatttacaagaaacaaacaaccccatctaaaagtgggtaaaggatatgaacaga

SEQ ID NO: 218942 - DNA, 201 bp, Homo sapiens
ggaccccttccttacatcttctacaaaaatcaactcaagatggataaaagacttaaatgtaagacctaggaccataaaaatcctagaagaaaacctgggcrgtaccattcgggacatcggcatgggcaaagacttcatgactaaaacacacaaagcaatggcagcaaaagccaaaattgacaaatgggatctaattaaact

SEQ ID NO: 218943 - DNA, 201 bp, Homo sapiens
gaagaaaaaatgtatactcatacttaaaacgggataaaaccacctaactttcctgaagttacctgatacctactctgctcggcccctgccacaattttgtgttgttaaacatttgctgacagtctgctatgtacaagggtcttttacacgcattggctcatttgatcatcatcgcaacctgttgaccgctcatgtctcatc

SEQ ID NO: 218944 - DNA, 201 bp, Homo sapiens
gtactggtaccaaaacagagagatagaccaatggaacagaacagagccctcagaaataacaccacacatctacaacaatctgatctttgacaaacctgacwaaaacaagcaatggggaaaggattccctatttaataaatggtgttggggaaactggctagccatatgcagaaaactgaagctggaccccttccttacatc

SEQ ID NO: 218945 - DNA, 201 bp, Homo sapiens
aacagccacattatggcttggggaggacacatttggactgcgccaggcagctgggcccactgcaagcagctgctcctccactgtttgagggcactctgtgrggtgtggtggggggtcacctcctgggctggaggagtcttgtttgcagggtgggggtggaagtatatagggaagccatgaagcacaaaacgtcaggaccaa

SEQ ID NO: 218946 - DNA, 201 bp, Homo sapiens
agtattagagctgcaggatgtcctccccacgatggcccccactgtcttctccgtggggaaccctcagcagccagccacccccacactctacaggcttgccgatgatgcttggagagaaccctgtgcctactggtgtccgtagggattatctgagatgctccacctcactgccagcctattcacacatccatgcagacctca

SEQ ID NO: 218947 - DNA, 201 bp, Homo sapiens
ggaagggaaagcccaggcctcgagctaggcagaccccagttcaagtcttttttgccactttcctccacgtgacctgggttaaatagcctctctcagccttsagttagcatcattaaaatggggattgaaggcagagcactttgtgtttggaggaacttaatgcgtggttgagcctttctccctacggaatttcataatatg

SEQ ID NO: 218948 - DNA, 201 bp, Homo sapiens
ttgttctagtaaaatatagttttcactgcaggtcttaagtgactttttcgttaaaatgccatcaaagaaagaaaaggttaaataaaatgagttttccatgrcagaagtgtgaaccaaggggcctctgcaggacaagaccctggggcagccaagcagtaggctttgccactccccagtggcagagttgtggcaattctgcca

SEQ ID NO: 218949 - DNA, 201 bp, Homo sapiens
gtattagagctgcaggatgtcctccccacgatggcccccactgtcttctccgtggggaaccctcagcagccagccacccccacactctacaggcttgccgatgatgcttggagagaaccctgtgcctactggtgtccgtagggattatctgagatgctccacctcactgccagcctattcacacatccatgcagacctcat

SEQ ID NO: 218950 - DNA, 201 bp, Homo sapiens
agggatttcttcagtgccaaccccttcaccccttggacctctggcaggctcaccagtgattgctgctgccaacccccttgggatgcctgttccagctgccrctggcgctcagcagtaacggccctatctgtctcctgatgcctgagcagaggtgggggagtccaccctctccttgatgcagcttgcgcctggcggggaggg

SEQ ID NO: 218951 - DNA, 201 bp, Homo sapiens
tattagagctgcaggatgtcctccccacgatggcccccactgtcttctccgtggggaaccctcagcagccagccacccccacactctacaggcttgccgatgatgcttggagagaaccctgtgcctactggtgtccgtagggattatctgagatgctccacctcactgccagcctattcacacatccatgcagacctcatc

SEQ ID NO: 218952 - DNA, 201 bp, Homo sapiens
gggcttattggggagctaatgtattcatagaggacagcccctgcataatcaccctcgtttctgcagctctctctacattggccatttattccccatttgtrtcctcaccatctcatttcagcactgctcctggataaatgctcaccccaaacataatatttttcacgaggagctgctgtcaggaattgtctgagtgggttg

SEQ ID NO: 218953 - DNA, 201 bp, Homo sapiens
gttttttttttttcctccatctcttctctctcagttgacagaaatgaagtgtcattggagttgaagaaagggtggcatttaaaacagagaaccaacaagcygttaacttgcaaaactaagtacaaatgggagggatgagttcatttgaatttcagttccccctttaagggttacggaaccactgatcgtcagcaaaacaga

SEQ ID NO: 218954 - DNA, 201 bp, Homo sapiens
ttgcgcaattactaaatgcctgctttgtgccatgggttttactggcacttatgtcatccatccacgaaacaccctaaaaagactattattgtaatagtggttttttttttccataagatactgtgaaattaggggcttacatatatctcaaggtcatgtacctcgtaagaggtagagaaaggattcagccccagatcttta

SEQ ID NO: 218955 - DNA, 201 bp, Homo sapiens
aagttgaacactgagaacacatggacacagagaagggaacaacacacatgaaggcctgtagggggttgggggttgagggaagggaacttaaaggatgggtcagtaggtgcagcaaaccaccatggcacatgtatacctatggaacaaacctgcatgttctgcactcgtatcccttttttagaagaaatagtgaaaaaaaat

SEQ ID NO: 218956 - DNA, 201 bp, Homo sapiens
aaaggatgggtcagtaggtgcagcaaaccaccatggcacatgtatacctatggaacaaacctgcatgttctgcactcgtatcccttttttagaagaaatartgaaaaaaaattaaggaaaaaagagaaaaaactctttattatggacaatatcgaatatatacaaaaacagtgagatagtaaaataaatcccgttgcagtt

SEQ ID NO: 218957 - DNA, 201 bp, Homo sapiens
aaaagaatactgtaatactgtcaaatattctagtatacacatttttctaattctctcataagtttttgttttgttatacaatttctttgcttgaatcaagwttcagttggttaatttgtctttccagtctccataatctactgaatatctttctccatctctttttccccccctcttgtaatttcgtttttgaagagatca

SEQ ID NO: 218958 - DNA, 201 bp, Homo sapiens
acttaagagtagccaaataccaacaccgaagtccaaagaacagtagcaggaagccagttggacactataatgattccgtctgtgtgggtcaggaagaaacagggaggcaggagggcgactgcctcagtccctgccttgcaccagctagggctctcctttctaccttgttagtgagtgtacgagggaggaaaggccaaaagg

SEQ ID NO: 218959 - DNA, 201 bp, Homo sapiens
tctgattcctaagatacagacatttgtcactctctaaaatgagttttttcacatgtactttatatagttggcatggagtgtaaaaacttgaccctttaatrgcagctttcattctgcataatttctaatcaaggctatttccacttctgtgagtgtgtgtgcacatgctgagccctgctgctcctacctgcaccagccatc

SEQ ID NO: 218960 - DNA, 201 bp, Homo sapiens
acttacccgcacctcttggacctcatctcctcccactaaccccaagctcagggcccacgactccgccatttctgccgtgggccacctcctcccctccttgyccttgctgagatctcaattttgattgaggatttccctggccacctcttacacttgccgtctgcctccagctctccaccaccccgagcctctttccttgtc

SEQ ID NO: 218961 - DNA, 201 bp, Homo sapiens
ggctgcttgcccatggaaaattaattaaaaaagaaagtggaatgggaattctaaaataagcagagaagtatttggaatacacgagctagtacacacacagygtccttgtgaactccttgattgcaaaagtaagaccagcctgagcttaacacaaatactccagacgttccacctcaggatgcaagcgaccagctgggccca

SEQ ID NO: 218962 - DNA, 201 bp, Homo sapiens
gtttttgttttgttatacaatttctttgcttgaatcaagtttcagttggttaatttgtctttccagtctccataatctactgaatatctttctccatctctttttccccccctcttgtaatttcgtttttgaagagatcaggtcatttttcctgcagagattctcacagtctagattttcttgattacattcccctgatgt

SEQ ID NO: 218963 - DNA, 201 bp, Homo sapiens
cagggtgaatttagcctagcaaactaatgcataaaggtcttggattcaaaggaggggaagatctaggcaagacacaagtatcatctttccctcttctttcstgctggactttaaaacacgtgatgtcaggatttatggctgtttaattttcataatgtgcttggagcctagtatgtgctgaaagagcaggctttgaattta

SEQ ID NO: 218964 - DNA, 201 bp, Homo sapiens
agaggaagtcagaaatctgggcagggacagtgtgatcccacagtctcagagaagaatcagccagaaagataggagctgtattggtggaaaatcacagatgktagggaaaggcagcatttcagaactcaaacaggcaggcaaacatgaatactaatgataatagctaccatttgttgaacatttattttgtatttagtgcat

SEQ ID NO: 218965 - DNA, 201 bp, Homo sapiens
cagcctgaccaacatggagaaaccctgtctctactaaaattacaaaattagctgggcgtggtggcgggcgcctgtaatcccagctactcgggaggctgagkcaggagaattgcttgaacccagcaggtggaggttgtggtgagctgagatagtgtcattgaacttcagcctgggcaacaaaagcgaaactccatctcaaaa

SEQ ID NO: 218966 - DNA, 201 bp, Homo sapiens
caataggggagtggagacatggacagaagtaatccattcccaaggtgaaaagtgactagtgccataagaaaaggacaagaaagtgtgagggaaggttggtkgggatgaaaccaggaagggggtatggctcacttccagctgagcagatgggtgtgtaggtttggggaagttttcatggagaaagaagtatttgaactgagc

SEQ ID NO: 218967 - DNA, 201 bp, Homo sapiens
tccaccgtgaaaatcagcaccttgtcagccctgaggccttggatttcctggacaaactgctgcgatatgaccaccagtcacggcttactgcaagagaggcmatggagcacccctatttctacactgttgtgaaggaccaggctcgaatgggttcatctagcatgccagggggcagtacacccgtcagcagcgccaatgtga

SEQ ID NO: 218968 - DNA, 201 bp, Homo sapiens
ccaccgtgaaaatcagcaccttgtcagccctgaggccttggatttcctggacaaactgctgcgatatgaccaccagtcacggcttactgcaagagaggccwtggagcacccctatttctacactgttgtgaaggaccaggctcgaatgggttcatctagcatgccagggggcagtacacccgtcagcagcgccaatgtgat

SEQ ID NO: 218969 - DNA, 201 bp, Homo sapiens
tattttctcccagtttattacttgtcttgattttacttctcgtgtttgtttgtttgtttgttttgccatccaaaggctgcttttttcgtgttttttctgtktaatgtaagcaaactttttttcttcttgcttccagattttaatcatagaaaatcttacccactctcaggttataaagaaattcacttatgttttcttcta

SEQ ID NO: 218970 - DNA, 201 bp, Homo sapiens
gtggcaggagcctgtaaccgcagctacaagggaggctgaggtgggaggatcccttggacccaggaagtggaggttgcagtgagctgagatcatgccactgyactccagcctgggcgacagagcaagactccatcgcaaagaaaaaaaaaaaaaaagaaaagactttgccacagccacacactgaatgtactgagagccaag

SEQ ID NO: 218971 - DNA, 201 bp, Homo sapiens
tgaggcttggaggatgagtcagggaggcaggcagggttgggtacgtcattgcatgtgcagaagtctgaggtgaggggaaaaaacccatgtgagaggaagtaaaaaaaatagcgtggctacagcatagaggctgtagcagagagtgtattggggagcacaaggtcagggctggaggggtggtggggggcaagcccagatcag

SEQ ID NO: 218972 - DNA, 201 bp, Homo sapiens
cttgactctggtggggaagacaagaaataataagcagccaccccaacaattccccactgctcataattccatccccagctcccagcccagcacctgaccastaacaataatagtaacaacagccggtgtttatgttgcccatagaatgtgaaaggctctgttattaacttattcagtcctcacaataaccccacaaggaag

SEQ ID NO: 218973 - DNA, 201 bp, Homo sapiens
gttcctgttaccccatcttcagtccaaggggcccttcacacaacaagccctgggcagaatctcactcaggcaaaggtgagactaagaaagagaacgcccargtagttaaaaaaaaaaaaaaaaaaaaaaaaaacacgaaagtctttactagtaaatcaggtgttgagtattcataatacaaaaagaccacttaactctacc

SEQ ID NO: 218974 - DNA, 201 bp, Homo sapiens
aagaaaaaatgtatactcatacttaaaacgggataaaaccacctaactttcctgaagttacctgatacctactctgctcggcccctgccacaattttgtgttgttaaacatttgctgacagtctgctatgtacaagggtcttttacacgcattggctcatttgatcatcatcgcaacctgttgaccgctcatgtctcatcc

SEQ ID NO: 218975 - DNA, 201 bp, Homo sapiens
agggaagagctgcgcagtcacattgcaaagtagtttgtatgcgaggatgggaaaaatctgtggccatttgtataacacgtcacaatgcctcatcatgttcmctttgtattattttattcatttgttcactcattcaaaaatattgagtgctcatctgtggtatggcaagaaaagggatccccaatatgaatggccttagtt

SEQ ID NO: 218976 - DNA, 201 bp, Homo sapiens
tttaccatataacaaactaccccaaaatttggtagactgagacacatccattttttttttcctgagagcaggcaatttgggctaggctagactggccctaycttctgctagtctcagctgggctgactcaggcatctgtggtcaactgctgctcagctagttgactctgcttctggagactggctgacagtcggctggagt

SEQ ID NO: 218977 - DNA, 201 bp, Homo sapiens
caaggtcttacccccaagctgcttctgaacacagtgactgccagatctccaaacatcaagtccagctttgtccgccaacctgtctgacatgtcgggacccrtgccaagcagggccagagtttacacagatgttaatacacacagacctcgagaatactgggattacgagtcacatgtggtggaatggggaaatcaagatga

SEQ ID NO: 218978 - DNA, 201 bp, Homo sapiens
atcctgctgtctccataacccctctctacctgtgctttgcacttgatgttcctgttaccccatcttcagtccaaggggcccttcacacaacaagccctggrcagaatctcactcaggcaaaggtgagactaagaaagagaacgcccaagtagttaaaaaaaaaaaaaaaaaaaaaaaaaacacgaaagtctttactagtaa

SEQ ID NO: 218979 - DNA, 201 bp, Homo sapiens
gccatcctgctgtctccataacccctctctacctgtgctttgcacttgatgttcctgttaccccatcttcagtccaaggggcccttcacacaacaagcccygggcagaatctcactcaggcaaaggtgagactaagaaagagaacgcccaagtagttaaaaaaaaaaaaaaaaaaaaaaaaaacacgaaagtctttactag

SEQ ID NO: 218980 - DNA, 201 bp, Homo sapiens
tctctcctcgagccctcattggtgaggagtcgctgttgacaaggcctgaagaagccaggagcctctgaaatgattaaagtcttgtgcttgggctaattttyttgcaacaggttttaatctttgcaaattgcattcagatcctaccaactagaacgttctggtactcaagttgggctgaaaggagcttttactgggtgcatt

SEQ ID NO: 218981 - DNA, 201 bp, Homo sapiens
tttgagttgctgattggtgaaaagaactggagcattccaagaaaagggccagagcacctggggttgcaggggggccctggaggtattttaggcggcagctrtttgccaccgctaggaaggtatttcaatagtttaacaactagtttgaaccagtacagaccaagtgagtagcctcctggggactgaagtatctccagtcct

SEQ ID NO: 218982 - DNA, 201 bp, Homo sapiens
tatcaagggctgtgggggccagaggagggagaaattggctctactctgaatatcgagcaaagactccacaatgttggggccatatagtcaaggtctttttaaaaaaaaaaaaattttaatgttttagagacaggatctcactatgttgcccaggcttgtctcacactcctgggctcaagcgattctcccaccttagcctcc

SEQ ID NO: 218983 - DNA, 201 bp, Homo sapiens
atcaagggctgtgggggccagaggagggagaaattggctctactctgaatatcgagcaaagactccacaatgttggggccatatagtcaaggtctttttaaaaaaaaaaaaattttaatgttttagagacaggatctcactatgttgcccaggcttgtctcacactcctgggctcaagcgattctcccaccttagcctccc

SEQ ID NO: 218984 - DNA, 201 bp, Homo sapiens
tcaagggctgtgggggccagaggagggagaaattggctctactctgaatatcgagcaaagactccacaatgttggggccatatagtcaaggtctttttaaaaaaaaaaaaattttaatgttttagagacaggatctcactatgttgcccaggcttgtctcacactcctgggctcaagcgattctcccaccttagcctccca

SEQ ID NO: 218985 - DNA, 201 bp, Homo sapiens
gtgttggttttctgttctggaatatggatttgcctgggtggcgttgcgagtggaaggtagggaaaggcctcctggatttctattaagagaaggtggctagrctcagagggagtttatttcccttttccctcccctcccttctcagctccctgaaaaaggcgcctcgcagtttctgctgctgctgtttctcatggattttta

SEQ ID NO: 218986 - DNA, 201 bp, Homo sapiens
cctttgaccagagttataaagatccacatgcctttcaggtttcttgagccacgtgtatggggatgggggcacacctacagggaccttcactaggagatgggagttattctgggcagtttttagacagtgtttaaccttcacagagcctcatcattgcctgccactgtcctctatccctctggtcacctgtacttaagaaat

SEQ ID NO: 218987 - DNA, 201 bp, Homo sapiens
agcactttgggaggctgaggtgggtgaatcacttggggtcaggagttcaagaacagcctggccaacatggtgaaaccccatctctactaaaaatacaaaamttagccaggcttggtggcacatgcctgtaatcccagctactcaggaggctgaggcaagagaatcattttaacctgggaggcggaggtcccagtgagctga

SEQ ID NO: 218988 - DNA, 201 bp, Homo sapiens
gatgcagtttgaagatttagccatttcttcctccctctcctccatgaccccggggtcttcatagcctgcgtcagcccccaaagtctcctcttagcacaggytctaaggccaatcctagggactcagctttggtggtgtgggctggaaatgttgacaggcatcaccaggagtcctcaatcgacaagagtactgcttcagatt

SEQ ID NO: 218989 - DNA, 201 bp, Homo sapiens
aaaccccatctctactaaaaatacaaaaattagccaggcttggtggcacatgcctgtaatcccagctactcaggaggctgaggcaagagaatcattttaamctgggaggcggaggtcccagtgagctgagatcgtgccactgcactcactccagcctgggtgacagagcgagactgtctcaaaaaaaaaaaaaaaaaaaaa

SEQ ID NO: 218990 - DNA, 201 bp, Homo sapiens
agaagcactggtctggatggatgcctcctgtggttcctttgggccctgactttggctcacatccacatctgggagaccttcctaccccctatgttgagcasagcactggtgagccatgcagtgaggccagggaagaaggcagaagtactcagcagtatgacagtgcaagcccctcccctagagatagctgagtaccctaca

SEQ ID NO: 218991 - DNA, 201 bp, Homo sapiens
aggcaagagaatcattttaacctgggaggcggaggtcccagtgagctgagatcgtgccactgcactcactccagcctgggtgacagagcgagactgtctcaaaaaaaaaaaaaaaaaaaaaatctttaaatgactcctgctatgtacaaaatcaagcacaaagcccagtgtttggcatggcatcaaaagttcccatgcttt

SEQ ID NO: 218992 - DNA, 201 bp, Homo sapiens
tgctccctctgtgaagtccctgggaacagtctggtaccatggtttggggccttcgttagttctgcactgtctgagacattcacagaggcaagaaagcagaygggcttctttatgtttatagcaactcagactgcttttcttggctaccgggatccaaaaaataatatcatcagagctggctgattcacagtgacgtggtta

SEQ ID NO: 218993 - DNA, 201 bp, Homo sapiens
aatttggtggcttcaaacaacagaaatttattctctcccagttctggaagccagaagtctaacattcaggtgccagcagagctgtgctccctccagcatctcgaggggagagtccttccttgcctcagccagcttctggtggccctgagggggtccctggttgtggatgtatcaccttagtctcagcctctgtcttcacat

SEQ ID NO: 218994 - DNA, 201 bp, Homo sapiens
agaggacaggggcttctgttgagccctgcagcagcctgtctctgccatggagatctgtactggaccctgtaaaagacatagccataacaacaaacttgacraggactgtctattgctgtgaagcttggaagtgcttataatgaggggcaggctttcagcgctgtctccatgcctttcatctgctccctctgtgaagtccct

SEQ ID NO: 218995 - DNA, 201 bp, Homo sapiens
tttaaccttcaggctgtagcaggttcaaatttttatattgcctgaactcttgtgggcaaaaaggaatctatctcttttatatctaaattgtgttttttggtttttttttttttggagacggagtcttgctctgtcgcccaggctggagtgcaatggtgcgatctcggctcactgcaagctccacctcctgggttcacacca

SEQ ID NO: 218996 - DNA, 201 bp, Homo sapiens
tagaatgaatgacccctcaaaatgcaccaaatgaagatggtgcacagaaagccccagcacagtgctcagcaccccgccttctgcagtgggaaggatcaccrtccagcctcgggaagtcaccgtcgacgctcatgcatgggcatcttccaagtgggtttattgagaccatgatgaggatacaatataggagataggatatcc

SEQ ID NO: 218997 - DNA, 201 bp, Homo sapiens
aggccacagcccagccaggcacttgtagccctggggacttggtgtcatccagacatgggtattcctgaactgaagtaagcctccagccctcttcagactcytctgcctgtgagcctcagcctttctgtgttcagccttatacagtttgaggttaatagcacagcaagcccacctccaatatgagacattgagatgaagtca

SEQ ID NO: 218998 - DNA, 201 bp, Homo sapiens
aggaataacagctaacattcatacagtacttactatgtgtcaggcatatattaactcatttaatcctcaccaaacccagatgtgataggtaccacctgacstcatagatgaggaaactgagtcacagagaagttaacgaacatgcccaaggtgctcatgttggtcattatttatgaaatagttcaaattctctcttacttc

SEQ ID NO: 218999 - DNA, 201 bp, Homo sapiens
ttgtgtaatgtttgtagagctcatgggccactgcctgacacataggaactgctatttaacttttagtcacttttattgtctgggtctctgatttgtaaaaragaagacttgggggaacatgttcatgagtttaacaacctgaaggactgctatgtggacaaggagcacatgggacagggcactgccctggcagtagatgag

SEQ ID NO: 219000 - DNA, 201 bp, Homo sapiens
tggggcagaactgggaacagcacctgggtgacttcatccccttcaaacgctttcccaaaaacgatccccccatatcatcttccttaccctgcccacccctygcctctctgctcacgcagggccacattaggtcaggtgtggagaaactgaaggctgaggaaaggtgtctcctgatgccgagagagaggccacagcggcagc

SEQ ID NO: 219001 - DNA, 201 bp, Homo sapiens
gactctcggtagtaacaaggccacctctccaccttcaactaccatcattcctttgaatggtttgtaatagcctaatgttagagggagtcctctgttcaaakatgttattgaagagattcttgctttaggaaggctgttgttatgatgtggtcctccaagctcccactttctgaaagtccatctatatgtttgaattcatgg

SEQ ID NO: 219002 - DNA, 201 bp, Homo sapiens
tcctctctctttggtgtggccatctgttctctgatgttcagctgcagaattctctgaagactgatttgtgtcttgaccaggggccagatacagagaatgtycccatcatgtacatctgccatgggatgacgcctcaggtgagtcctctaagagattcctgtgccaggagtgtgcatatgagtgcctggcatggggaaggag

SEQ ID NO: 219003 - DNA, 201 bp, Homo sapiens
gccaacccccttgggatgcctgttccagctgccgctggcgctcagcagtaacggccctatctgtctcctgatgcctgagcagaggtgggggagtccacccyctccttgatgcagcttgcgcctggcggggaggggtgaaacacttcagaagcaacgtgtctgaaccgttgcttgtggatttatagtagttcagtcataaaa

SEQ ID NO: 219004 - DNA, 201 bp, Homo sapiens
ctcagtttacagagtgcatagctgagccaacagaaaagtgaagtgacttgctcaaagacccgcagctagaaagtggcagattcaaaacttgaatgcgggcyctggatctggcctctgtaatgcctctcatttggaccacacaagcgtagtgcacagttggctcttgataaataatggctgttctccttcataggatctgtc

SEQ ID NO: 219005 - DNA, 201 bp, Homo sapiens
ctgtaatgcctctcatttggaccacacaagcgtagtgcacagttggctcttgataaataatggctgttctccttcataggatctgtcttttcccatggctraattgtctcttggtttcggtccacttttggattcctggtccttcatcctcccatgagcaaccaaacctctgcctcctggtccagatccttcacttgccct

SEQ ID NO: 219006 - DNA, 201 bp, Homo sapiens
atgggaatggtcatggcagacttggatgacatccttcaagaagtttgccacctctccctctctcagtgcacttcccactgtgagctggaaaaggcacaaartgaagagcaccagcccagcttgtagactgaggaggtggaagtggaggtggggcatgggtgggcagtagagacttcctggaggaaacggaggagttgagct

SEQ ID NO: 219007 - DNA, 201 bp, Homo sapiens
gacttagataagtgacttcatgtttctgagcctcagtttcctcttctgtgatgtgggaatcattggatgggtttgggtccaagtttctctttaagtgagcrtattttagaaagcccccttctctgttccagcctcctcctctgtaatcacaaggcatctcacagcaacagggtcccctcactcccagtggcttctcctggc

SEQ ID NO: 219008 - DNA, 201 bp, Homo sapiens
ggaaaaggcacaaaatgaagagcaccagcccagcttgtagactgaggaggtggaagtggaggtggggcatgggtgggcagtagagacttcctggaggaaayggaggagttgagctttgatacatggttgcagcttagcctgtcatgggagcatggggaagaatcccaagcggagagcacagcttgcttaaagtgcaggaac

SEQ ID NO: 219009 - DNA, 201 bp, Homo sapiens
ctggctttgaaatgatgttgcaatgtgcccagccctgagatttgccctggagtcacagagatcccattttctagagaagatcgcagcctagaagaaaagayagatgggccaacaggtcacacaaggtggtgtgaaaagtggcacaatagctggataactccttaaaggcaggcaccttcatttctatttcttgcactgagc

SEQ ID NO: 219010 - DNA, 201 bp, Homo sapiens
ctgtcatgggagcatggggaagaatcccaagcggagagcacagcttgcttaaagtgcaggaaccctgagttaatgtaaatgggttcagaaaagtacaaggratttggtgtggctgcagcaaaagtcatggagctggggaaggatcagagatgaggctagaaaggcagcactgagccatggaggccttcagtgctgcactga

SEQ ID NO: 219011 - DNA, 201 bp, Homo sapiens
agttttccaagctgcacagtcctgatggctgactccttaatcaagcgatagagtttgaccttcgctccttatgtttatcccaacttcacgtagtgggaacsctgagcccatttctgcttccacctcatggagtatatttgggcaactaatgcctcccttttctgggtcttagtttcctccatgaaacctgaattgtttata

SEQ ID NO: 219012 - DNA, 201 bp, Homo sapiens
gatttcttattatagtcgataaggatttggctgccttatattttctatctccttaaaacacatacctcctcttcctcaatcctcaaactttgggttaaaayggtagacagtattaacattatgtactgtgaaaatattgttccctgttaaggagacttccatgatgtaaactttatttttcctagttgaatcggtgtccaa

SEQ ID NO: 219013 - DNA, 201 bp, Homo sapiens
tgagcccgacgccatgttgtgaatgcacagtcctgcccttggggaactgctgcaaccatgagagaggtagaaagccaaccagaaggacggatggacaggcrgaagccagggtagacctcttaaaaaaggagtggaatggaagcaagtgggggaaatgagaggctaggatgagagtgacccagaaaaggttttcttagatga

SEQ ID NO: 219014 - DNA, 201 bp, Homo sapiens
catggctccagaaacattgctgtcctcacaggtgcatgggtgcttggtactaactggtctgctgagctgagtcgggaagaagccgccagtcagcggagggwgtggtgaccaccggggaggacgcatcactcaacagaagattgattccccttgcctgtaactggcaaacccttttgtagttacgaagtgctgcgcggtggg

SEQ ID NO: 219015 - DNA, 201 bp, Homo sapiens
taaagtggggcatgacttatcgagtgggtttatttgttctttcatttatttaccaaacttctcttgtgcatctattaggtgctgagcccgacgccatgttstgaatgcacagtcctgcccttggggaactgctgcaaccatgagagaggtagaaagccaaccagaaggacggatggacaggcggaagccagggtagacctc

SEQ ID NO: 219016 - DNA, 201 bp, Homo sapiens
gagacctggggaatcacagcaagaagaatcttgcctgcaatttgcattgccaccagcaccatgattagcagccagtccccacctacctatcatgatgccayggagatggaagtcccagaacaatactatgtcagggctggaccagtcctacatgactcactgctttataggtaacaaattgagtcctaaagtggggcatga

SEQ ID NO: 219017 - DNA, 201 bp, Homo sapiens
accttaaagctcagaatctctcatcttgcctcttgaggtagggaaaagctttattcagatggattcttcccatttctttcatctacacccagactatagcttttttttttttttctttaaggatttggcatcttttttttcaatggcccttgatgacaaggcccggcaatgctgacctcgtgtttcgtagtctaaatgagg

SEQ ID NO: 219018 - DNA, 201 bp, Homo sapiens
agtgtgggagaaaatattcacaaactatgcatccaacaaaggataaatatccagaatctacaaggaactcaacagatcagcaagaaaaaaaaaacacatamtctcatcaaaaagccaaaggacatgaatagacaattctcaaaagaaatatacaaacagctaacaaacatatgaaaaaatgctctacatcactaatcatca

SEQ ID NO: 219019 - DNA, 201 bp, Homo sapiens
aagtgaaaacgtacgatatttggtttttcattcctggattacttcacttagaataatggcctccagcttcatccaagttactgcaaaagacattattttakttctttttgtggctgattagtattccatgatgaatatataccacattttctttatccactcgttggctgatgggcactcaggttggttccctatttttac

SEQ ID NO: 219020 - DNA, 201 bp, Homo sapiens
  misc_feature (1)...(201): n = A,T,C or G
tagcattggattaatcacagctctggtgctgagagtagagatggaggggcatctggaaacagacatgcctggcttctgaatgttagctttgccccttaatngctatgtaaacttgacaatgtgcaaaaccttagtggtcacagtaatgccatttcgtagggcatatgttacagcctcaggattatagccatttgcactacg

SEQ ID NO: 219021 - DNA, 201 bp, Homo sapiens
atcttgtcctttttggggactgagttgctgtgacattactggctggttaattgcaggccagcaaatcaggttgtgctcacacaacccagtatggcaacacrttcctcattgttaacaatggtgtggcatttttaatgagtgactatctttttaaacattgtattgaagtaaaacatatatagagggaataaatgaattgta

SEQ ID NO: 219022 - DNA, 201 bp, Homo sapiens
gaaacagacatgcctggcttctgaatgttagctttgccccttaatggctatgtaaacttgacaatgtgcaaaaccttagtggtcacagtaatgccatttcrtagggcatatgttacagcctcaggattatagccatttgcactacggaaagagcttgggttttggagtctgacagaccagctctttcacttgtccgactat

SEQ ID NO: 219023 - DNA, 201 bp, Homo sapiens
ttgtgaaggaccaggctcgaatgggttcatctagcatgccagggggcagtacacccgtcagcagcgccaatgtgatgtcagggatttcttcagtgccaacyccttcaccccttggacctctggcaggctcaccagtgattgctgctgccaacccccttgggatgcctgttccagctgccgctggcgctcagcagtaacggc

SEQ ID NO: 219024 - DNA, 201 bp, Homo sapiens
ttatgctaagcacttgtagacattgtttcacttaatcctcataacagccttatgaggtaggcactattattattcctattttagagggaagaaaacaaacaagaaggagttacattgctttattcaagacccctcagctggagccaggtttccatcccagcctgttgcttctagctccttcagtggactacctgcctaagg

SEQ ID NO: 219025 - DNA, 201 bp, Homo sapiens
ttaaaatacaaactgtccccttgtgtttgcaaggtgttatttatttatttttcttcttccctggacataacttccaggcctttcctggcataggtcagtgwctatcctcgagcttcctgtccccagctgctggaaggacactttgctctaattttattgccgctggcccacttgtcctaccatttggaaccaagttccctg

SEQ ID NO: 219026 - DNA, 201 bp, Homo sapiens
tatgctaagcacttgtagacattgtttcacttaatcctcataacagccttatgaggtaggcactattattattcctattttagagggaagaaaacaaacaagaaggagttacattgctttattcaagacccctcagctggagccaggtttccatcccagcctgttgcttctagctccttcagtggactacctgcctaaggg

SEQ ID NO: 219027 - DNA, 201 bp, Homo sapiens
acttctctccgtatgtcctcttatctcttttctgcttgaccacagttttcaaagcttaaatctgtctccagccagcccagctcatgatgccattccttttygaattcctatgtcctcacaagaattcagttcatctctatttcattgagtgtgaccttgtgctttcatcttgtggggagccgttgacttgtctaagaccat

SEQ ID NO: 219028 - DNA, 201 bp, Homo sapiens
atgctaagcacttgtagacattgtttcacttaatcctcataacagccttatgaggtaggcactattattattcctattttagagggaagaaaacaaacaagaaggagttacattgctttattcaagacccctcagctggagccaggtttccatcccagcctgttgcttctagctccttcagtggactacctgcctaaggga

SEQ ID NO: 219029 - DNA, 201 bp, Homo sapiens
attcttggctaagcaacatcttacctagaaaccgaatttgtacagtagatcaaaacagagcccatctggcagaagcaggggatgaggttatattggccacrggcttcttctcatctcagctatcggctaagacatctccaaggaaaccaatgctgggtttgaaaaccactgatcagtttagacagagggaatgacttgtac

SEQ ID NO: 219030 - DNA, 201 bp, Homo sapiens
gcgatgcccatggggtaccctggcggggttccagaggctagaggcctgatgggtaggacagggatagaaactcccacctcaacccccacctaatccgagcrgctccattccatctgtattatatattgaggtttgcataggagtttatttggacacacattaaatgacggaatttgaaaatcactacctgaagtgagcaag

SEQ ID NO: 219031 - DNA, 201 bp, Homo sapiens
tgacgcaggagaatggcgtgaacccgggaggcagagcttgcagtgagctgagatcgcactactgcagtccggcctgggcgacagagcgagattccgtctcaaaaaaaaaaaaaaaaaaaaagatatttagcatgtaagatatgcctatgtgtgcaattacaattaaaagagggtttaaaagagctattgcctaccgaaaca

SEQ ID NO: 219032 - DNA, 201 bp, Homo sapiens
ctacatttggggaatgagatgtaaatgtatcctttgctggggccaggtggagaggaatttagtagctacaactcttatttattgattaaactcagctttcrtgcactttccagccagaaacagagctagaaacctttttaccccgtggattttattttcacctatggattcagatagtctacatttcttcattcattcaga

SEQ ID NO: 219033 - DNA, 201 bp, Homo sapiens
atgagcagtggcctctgggctgtcttggagtagcccctggaggccacagcccagccaggcacttgtagccctggggacttggtgtcatccagacatgggtmttcctgaactgaagtaagcctccagccctcttcagactcctctgcctgtgagcctcagcctttctgtgttcagccttatacagtttgaggttaatagcac

SEQ ID NO: 219034 - DNA, 201 bp, Homo sapiens
gacgcaggagaatggcgtgaacccgggaggcagagcttgcagtgagctgagatcgcactactgcagtccggcctgggcgacagagcgagattccgtctcaaaaaaaaaaaaaaaaaaaaagatatttagcatgtaagatatgcctatgtgtgcaattacaattaaaagagggtttaaaagagctattgcctaccgaaacac

SEQ ID NO: 219035 - DNA, 201 bp, Homo sapiens
agcaaatttgatgaggaggacccagggctagtctttgggggtggcgggagggagaaggaataagatggcaccttccttgctgtcggattgagaacacatgrggtttgccctgagtctgccgaggtatttcaccaaggggtttgcatcttgggaacaaactgggaaacctggacccaaacatggaatgtgacaggccaaagg

SEQ ID NO: 219036 - DNA, 201 bp, Homo sapiens
tttatttttatttcaatggtttttgagattcaggtggtttttggttacatggatacttggataagttctttagtggtgattgctgaaattttagtacaccygtcacccaagccgtgtacactgtacccagtatgtactcttttattcctcacccctcctcccaaccttccctgctaagtccccaaaatccattatgtcatt

SEQ ID NO: 219037 - DNA, 201 bp, Homo sapiens
aggaataagatggcaccttccttgctgtcggattgagaacacatggggtttgccctgagtctgccgaggtatttcaccaaggggtttgcatcttgggaacraactgggaaacctggacccaaacatggaatgtgacaggccaaaggtcacaatggtgagttagtggcaaccccagggtcaaaatgattgtgaaagagagtc

SEQ ID NO: 219038 - DNA, 201 bp, Homo sapiens
acacataatctcatcaaaaagccaaaggacatgaatagacaattctcaaaagaaatatacaaacagctaacaaacatatgaaaaaatgctctacatcactaatcatcagggaaatgcaaattaaaacaacaatgagataccaccttactccttcaagaatggcctaattaaaaagtcaaaaaccaatagatgttggcatgg

SEQ ID NO: 219039 - DNA, 201 bp, Homo sapiens
gcagccagcaggaccccacagccaaaggcagaagaacccccactatagaaaccacagctgagcgaagagggaaaaaccacagccaaacgaagggggggaamccccctctccatctgctgtcagatattccaccaaagcctcccactggccaaacccagctgggggtgggggtcgggggagccactgattcagcccacaggg

SEQ ID NO: 219040 - DNA, 201 bp, Homo sapiens
tgataaaaatgactctcagattagagatgggaaggtttttatttggattttagaaaattgctccccactccatcgccgccatattgtctgtgtgagcagargggagagcggccacagccgctgccgcttccaccacagtgtgaagaaaacaggtctgaaacaaggtcttacccccaagctgcttctgaacacagtgactgc

SEQ ID NO: 219041 - DNA, 201 bp, Homo sapiens
agcagatccatgtgggcattctgagccccaccgtggatgatgatgacaaccgatgcctggtggacgtcaacagccggccccggctcatcgaatgcagctaygccaaagccaagaggatgaagcttcactggcagttctctcaggtaacagccccagagcccgggcacagtggcagccatcgtggaaaaccaggagagtggc

SEQ ID NO: 219042 - DNA, 201 bp, Homo sapiens
ttttataaattaccaagcctcaggtactcctttatagcaatgcaaaatggactaatacaaagctattgtcttgatttgggtcttgagggtctcctttggtktgtggcagaaagccaagcttggctttttgttagctgggttctatctgggagatggggacagacaggctgccctgtggagaagcacattgccaagcagtac

SEQ ID NO: 219043 - DNA, 201 bp, Homo sapiens
tgggagcatggggaagaatcccaagcggagagcacagcttgcttaaagtgcaggaaccctgagttaatgtaaatgggttcagaaaagtacaaggaatttgrtgtggctgcagcaaaagtcatggagctggggaaggatcagagatgaggctagaaaggcagcactgagccatggaggccttcagtgctgcactgaggagct

SEQ ID NO: 219044 - DNA, 201 bp, Homo sapiens
gctgcacactctgcacactccagagaaacctacttatcttgcaagcaatccctaaataaaacccaaattgtttcctgcaagtggctttctgctgagcctcrtcttgctgtcctccttgactcagccatgtccccatcactctctgaccagctcttcgccaggcccttcatggcccccagacaactgtgctgctgatgggga

SEQ ID NO: 219045 - DNA, 201 bp, Homo sapiens
ggctgcacactctgcacactccagagaaacctacttatcttgcaagcaatccctaaataaaacccaaattgtttcctgcaagtggctttctgctgagcctsgtcttgctgtcctccttgactcagccatgtccccatcactctctgaccagctcttcgccaggcccttcatggcccccagacaactgtgctgctgatgggg

SEQ ID NO: 219046 - DNA, 201 bp, Homo sapiens
gtggagcccctgtcctgtcatgggaattggttgctatcagctgtgcctagtgtgagatagatcatttgatctttcctggctgcacactctgcacactccaragaaacctacttatcttgcaagcaatccctaaataaaacccaaattgtttcctgcaagtggctttctgctgagcctcgtcttgctgtcctccttgactca

SEQ ID NO: 219047 - DNA, 201 bp, Homo sapiens
gtatccctgaataaccacaggagaacagttccaggccctgataagtcagctattgcaaggtaagagtctggaatcccgggagacatgatgacgaggggtcmcttctctatgctgttattaatgtttggatgtctcccaatttcactgctactcataagaaccttatcagctggtacagggaaagactgaactaattgattt

SEQ ID NO: 219048 - DNA, 201 bp, Homo sapiens
cgctggctgcccagggctttgactgggagctgtggtgccgctacctaaatccccccaaggcctggtggaagctggagaactccacagcgccaatcaggtaragcaaacctttacctgtgggtctctctgctttgacctccaggctagggaccgcctactggtccaatgcttattctccaacttgagccccatcgtggggat

SEQ ID NO: 219049 - DNA, 201 bp, Homo sapiens
agcagaattcctgagtcatagggttgaaatatgttcactttagtagacattgcctgcattagtctgctcaggttgccaaaacaaaatatcacaggccttaaaccacataaacttattttctcacagttctggaggctgggaagcccaagatcagagtgctggcctattcagtttctggtgagggctcctttcttgtcttga

SEQ ID NO: 219050 - DNA, 201 bp, Homo sapiens
gcagaattcctgagtcatagggttgaaatatgttcactttagtagacattgcctgcattagtctgctcaggttgccaaaacaaaatatcacaggccttaaaccacataaacttattttctcacagttctggaggctgggaagcccaagatcagagtgctggcctattcagtttctggtgagggctcctttcttgtcttgaa

SEQ ID NO: 219051 - DNA, 201 bp, Homo sapiens
cagaattcctgagtcatagggttgaaatatgttcactttagtagacattgcctgcattagtctgctcaggttgccaaaacaaaatatcacaggccttaaaccacataaacttattttctcacagttctggaggctgggaagcccaagatcagagtgctggcctattcagtttctggtgagggctcctttcttgtcttgaag

SEQ ID NO: 219052 - DNA, 201 bp, Homo sapiens
attgggatgcctgagttcaagggtttgtcttgctacacaattgcaacatcaccttaatcttctctgggcctttattttgttttactattttattgaggtasaattttatactaaaatacacgaatcttaactgcacagttcttaactttgtatacactgtacagtcaccattaagttcaaacccatcattccagaaggctt

SEQ ID NO: 219053 - DNA, 201 bp, Homo sapiens
aagtactgagtgcatttgaggaactgagtatctgtaggcattttctaagtaagacggttaagcaagtactgagtgcatttgaggaactgagtatctgtagrcattttctaaagaaaaacgtcaaaataaaatggagagattaaatgcaaaagtggttcatgtcctatggggaaataaaattatagcctttcatgtgatctt

SEQ ID NO: 219054 - DNA, 201 bp, Homo sapiens
accatttaactgtgggttatattgtttttatgtcttaatatataatatttatatatctgtttatgcatttacttctgtatgtacacatatatacacacatacacacacacacacacacacacacatataattagtatgtgtccatctctgctagacactttcagtatgtcagttgatgtaatcttaaaaccaccttgccag

SEQ ID NO: 219055 - DNA, 201 bp, Homo sapiens
aagagctatttatgacaaacccacagccaatatcatactgaatgggtgaaaactggcacaagacagggatgccctctctcaccactcctattcaacatagwatgggaagttctggccagggaagtcaggcaagagaaagaaatacaggatattcaaataggaagagagagaggaagtcaaattgcctctgtttgcagatga

SEQ ID NO: 219056 - DNA, 201 bp, Homo sapiens
ccatttaactgtgggttatattgtttttatgtcttaatatataatatttatatatctgtttatgcatttacttctgtatgtacacatatatacacacatacacacacacacacacacacacacatataattagtatgtgtccatctctgctagacactttcagtatgtcagttgatgtaatcttaaaaccaccttgccagc

SEQ ID NO: 219057 - DNA, 201 bp, Homo sapiens
tatatctgcaatgactctatttccaaataagattacattatgaggtactgggggttaggactttaacatatgaattttggggtgacacaatccaacccagktcacctccaaatgggaagagtggaaatggaaacctgactctcactttctaggccaaaaagggtctcccatcacttcctctctcatttcactggccagaca

SEQ ID NO: 219058 - DNA, 201 bp, Homo sapiens
aacatgtaaagatatccctaggccccaccaccaatagttgagtgtgtaggccataagtcctagaacatgattgtaggttttactatgtcacagccaggagcaactgctcccacggcgaaggctgggaagaggagggctaccacccagcagcgctgctttctctaccagcactgactccttagaatccacagcctccacagg

SEQ ID NO: 219059 - DNA, 201 bp, Homo sapiens
acatgtaaagatatccctaggccccaccaccaatagttgagtgtgtaggccataagtcctagaacatgattgtaggttttactatgtcacagccaggagcaactgctcccacggcgaaggctgggaagaggagggctaccacccagcagcgctgctttctctaccagcactgactccttagaatccacagcctccacaggg

SEQ ID NO: 219060 - DNA, 201 bp, Homo sapiens
gcgtgtacccagagatgaggatgtactccgacatcattgcctatggagtggtaaggagctggcctcctccgggtttcattcagacacagacagaaagaaamatagtgaagaaagggagaggagggaaagagcctctcagctgctcacatgaagaactgcagtaggcctggggaccgggcgctgggttctgcacctgcaaga

SEQ ID NO: 219061 - DNA, 201 bp, Homo sapiens
catgtaaagatatccctaggccccaccaccaatagttgagtgtgtaggccataagtcctagaacatgattgtaggttttactatgtcacagccaggagcaactgctcccacggcgaaggctgggaagaggagggctaccacccagcagcgctgctttctctaccagcactgactccttagaatccacagcctccacagggc

SEQ ID NO: 219062 - DNA, 201 bp, Homo sapiens
gtgggaggatcccttggacccaggaagtggaggttgcagtgagctgagatcatgccactgcactccagcctgggcgacagagcaagactccatcgcaaagaaaaaaaaaaaaaaagaaaagactttgccacagccacacactgaatgtactgagagccaagactaggaagttcctcctctacagctgagattctcagagtg

SEQ ID NO: 219063 - DNA, 201 bp, Homo sapiens
cttaagagtagccaaataccaacaccgaagtccaaagaacagtagcaggaagccagttggacactataatgattccgtctgtgtgggtcaggaagaaacagggaggcaggagggcgactgcctcagtccctgccttgcaccagctagggctctcctttctaccttgttagtgagtgtacgagggaggaaaggccaaaaggg

SEQ ID NO: 219064 - DNA, 201 bp, Homo sapiens
tactggtaccaaaacagagagatagaccaatggaacagaacagagccctcagaaataacaccacacatctacaacaatctgatctttgacaaacctgacaraaacaagcaatggggaaaggattccctatttaataaatggtgttggggaaactggctagccatatgcagaaaactgaagctggaccccttccttacatct

SEQ ID NO: 219065 - DNA, 201 bp, Homo sapiens
gatgagtgataatgtggatgtctgaaagaatggggtagggggacagctggaggagtttctagcttttttggggtcctgggctcctttccagattttggccrtggcaggtgaggggtgggtgaccacaattctcacatgcatggctcattgcctggaaaccctgcctcttgttgaagacctgcatttccagagggcctatgg

SEQ ID NO: 219066 - DNA, 201 bp, Homo sapiens
aaagggctaatatccagaatctacaaagaacaaacaaatttacaagaaacaaacaaccccatctaaaagtgggtaaaggatatgaacagacacttctcaaaagaagacatttatgcagccaacagacacatgaaaaaatggtcattatctctggtcattagagaaatgcaaatcaaaaccacaatgagataccatctcaca

SEQ ID NO: 219067 - DNA, 201 bp, Homo sapiens
ttactctgacaaagcacagtatctgacatgaaatatttatgaagggaggaaatcaggcaatctgtaaataatggattcaaggcaggcagatcacgaggtcrggagtttgaaaccagcctgaccaacatggtgaaaccccgtttctactaaaaatacaaaaattagccgggcatggtggtgcgcatctgtaatcccagctac

SEQ ID NO: 219068 - DNA, 201 bp, Homo sapiens
ctgcttctgttttttctgatcactgtctcattccaggctcctggctccatctcttacttccctcatgaatttgtgagcatagacgaccctgtccagtgggbttgccaattctgtccaatttctctgatttctgacctcaaatgattcacctgatggcctgtcccagggaagtaattccaaagtcctggactatcagcccat

SEQ ID NO: 219069 - DNA, 201 bp, Homo sapiens
aagggctaatatccagaatctacaaagaacaaacaaatttacaagaaacaaacaaccccatctaaaagtgggtaaaggatatgaacagacacttctcaaaagaagacatttatgcagccaacagacacatgaaaaaatggtcattatctctggtcattagagaaatgcaaatcaaaaccacaatgagataccatctcacac

SEQ ID NO: 219070 - DNA, 201 bp, Homo sapiens
cagcagaactgataagagtggctctctgtgcttaatctgattatacaaacaaaacagcctaggtttaccacccactttccttctggaagcctgggattttsgtgcataccaggcagaggctgcctatgtgacagcccccagtaaaaaaccctggtgctgcgtctctaacgtaattctctggtagacagcatttcccatgtg

SEQ ID NO: 219071 - DNA, 201 bp, Homo sapiens
caacatggtaagattaccttttttcttacctttttagaggtaagaaaatgaagacttagagtttgttcaaggtaggtcacagggctgatgggtggtagagccaagaagggaaactggctacaaaaccaatgctctctacagaataggaaggaggatgaatgtttctcgtagagaggaatgggagatcatcttatcaaacat

SEQ ID NO: 219072 - DNA, 201 bp, Homo sapiens
gtcacaatgcttaagtgacttccccaggtcacctggcttatacatggtaattcagcatttgaatccaaaattatatgatttcacatcccttcctttccctvcagtgcttcatttggagaagtgttggttttctgttctggaatatggatttgcctgggtggcgttgcgagtggaaggtagggaaaggcctcctggatttct

SEQ ID NO: 219073 - DNA, 201 bp, Homo sapiens
agtcacgtggctttcccctagaccagacccaaactacagcccatgggagactcctacttttgtaaatgatgtgttaatgaaacacagccatttgtttatgkttttttttttttttctgggatgtgtttgcactacagtaggagcgttgagttttcagaggctgtatggtcctctgtgcagaaaggagtttgcagagcgggc

SEQ ID NO: 219074 - DNA, 201 bp, Homo sapiens
aggttaagtaacttgcccagggtttcatggccattaggaagctgggctgggatttgaaaactatgctgcccatatgctgtttgcatttactcaatagccarttgtcacaactgttgtcccccaggccccgtgctgggaggtatcaaaccagggcctgccttccagaagctcttggtctttttgagaaggtaaaggctcaaa

SEQ ID NO: 219075 - DNA, 201 bp, Homo sapiens
ccatggaggcaggacccagatcttggattccttctggcctgtggaactctgggagaggcaggcagggagggggtgacagaggcctgggtcccgtccatgcyctgggacaagacaggagctgtggaggtgggctttggaggggcagccttgctgcctggcagtgtcttggttccagtcgtggctggccccaggtgcttgact

SEQ ID NO: 219076 - DNA, 201 bp, Homo sapiens
aagagaggaccacttggaagggctcccgggggcagctggttagcagtgtctgccatcgggtgggaattgtgggggtgctgggggggagcttggtgcttctyagtcctctccacacttctcctttccataaagggccttcccaggggctttcccatttctccttcagtgagttttgaaggcattttccctcccctgactacc

SEQ ID NO: 219077 - DNA, 201 bp, Homo sapiens
ggatggcacccctgcctcctgcttgctgtagaatcttttttatttatttatttttttgagacagggtctcactctttcatccaggctggagtgccatggcwtgatcatggctcactgcaacctcaaccttctcagctcaggtgatcttctcacctcagcctcctgagtagctgggactacaggtgggagccactgcacccg

SEQ ID NO: 219078 - DNA, 201 bp, Homo sapiens
tttcatttcgaatgtttgaatgagactgggtttgtatttataaaataagttgtatagaagagcatattctgggcctggagtgctttcatttgattgctcartaaatacattttcactcatccaaagctcttgccttgaagtattttgcactgaagaagtcaaataagtgacagtagccctattgaattctatttaatttta

SEQ ID NO: 219079 - DNA, 201 bp, Homo sapiens
atgtaaagatatccctaggccccaccaccaatagttgagtgtgtaggccataagtcctagaacatgattgtaggttttactatgtcacagccaggagcaactgctcccacggcgaaggctgggaagaggagggctaccacccagcagcgctgctttctctaccagcactgactccttagaatccacagcctccacagggca

SEQ ID NO: 219080 - DNA, 201 bp, Homo sapiens
tccaaactccacaattagagttgtaaacagtgagttttgcatgacttttattaaactcctgcaggctggggagaagcagtcattagcagctccacagtggrccaatgttcagactcactaaccagagaggggctgagtctcttgccctccacccaccgttctttggacagtcttgcttcccaggcctctctggccttgggg

SEQ ID NO: 219081 - DNA, 201 bp, Homo sapiens
ttaaagtctcaatgtctgccaggtgcctgacaggcaataggtgttcagttagcttaacaaacttgctggcttagaagtgaacttgcttctctctccccctgtgtgcatacacactttggctttgcaaaaaagacagccctgctgctgccctcaagcctaccttctgagaaggcactcaggatgctgaaagtgaagctcaca

SEQ ID NO: 219082 - DNA, 201 bp, Homo sapiens
atcaatcaccagaacagctttagtttttttcttgctcaaaagtgcactattaaatgcagaaacacgtatgggagtggaggttggcttgggtgaaggacackttttaaaagaaaaattttataacaattttttctgcaggaaaaaggacttgctggtcttgcttcttgtacaactgggctacggaatagatttacatctccg

SEQ ID NO: 219083 - DNA, 201 bp, Homo sapiens
ttttttctgcaggaaaaaggacttgctggtcttgcttcttgtacaactgggctacggaatagatttacatctccgcagcatttttagcatccttggaataygctgggtcattcagaagtcacctaatcatattttcttggggcactccaggtgtttaacaaatacatgttgaacaaaggaacaactaaattaatggaaaat

SEQ ID NO: 219084 - DNA, 201 bp, Homo sapiens
tattgagctgacccacttaaaagaagtttattctttatataaataaagtgaacttgttatagagtatctgaaaaatgtttttggttattttcttctgggctttttttttttttttggtaccgtatagagtttcagttttatatccaaagttggatcacccactgaaatgtgactgcttcagagtgatgttccctctccccc

SEQ ID NO: 219085 - DNA, 201 bp, Homo sapiens
agggctaatatccagaatctacaaagaacaaacaaatttacaagaaacaaacaaccccatctaaaagtgggtaaaggatatgaacagacacttctcaaaagaagacatttatgcagccaacagacacatgaaaaaatggtcattatctctggtcattagagaaatgcaaatcaaaaccacaatgagataccatctcacacc

SEQ ID NO: 219086 - DNA, 201 bp, Homo sapiens
caactgggctacggaatagatttacatctccgcagcatttttagcatccttggaatatgctgggtcattcagaagtcacctaatcatattttcttggggcwctccaggtgtttaacaaatacatgttgaacaaaggaacaactaaattaatggaaaattaactaaagctttttaagtggtgattacaaaatggaatgagcc

SEQ ID NO: 219087 - DNA, 201 bp, Homo sapiens
ctcccctcagcacctttacgcaaggcaaaagctggtgcttgttggttctatagtgttcaagggccttgggctgattatggacatgaaatctgtctcagcagaatacttgtttctccagagttaattcatttgctctctctgttcctctctctttggtgtggccatctgttctctgatgttcagctgcagaattctctgaag

SEQ ID NO: 219088 - DNA, 201 bp, Homo sapiens
caccagtgtcccctgaggcccatgtccctccctcccaggggttaggatggactggctcttgggtttgacaggtgggttagggcgtggggctaggacaggaggcgttggcaaaggtggtcagaatatgttttgcagccctaggtgggaataattgggacagatccacacacaggctcacaacagagccctgggtctggagct

SEQ ID NO: 219089 - DNA, 201 bp, Homo sapiens
tcagagttttctgtgaagggatgggggccctggccatcagaagggatgtggggttgaaaggaggtgtgcatttggatttgctttttaaagaaagcaataagggaacatgttttgagactgaagggaagaaataagtagagagatctatttaagggggcaattaacaaagcaatatccctgggggtggggacagggtgagga

SEQ ID NO: 219090 - DNA, 201 bp, Homo sapiens
aaatgcagctggacatgggtactccagcagggaagccactgaagccgctgcaggggcaagatggtctcttttgtctctcattctgtctgcctcgtgcatcrtcatatccttgatcacaactgactttctctgcttgcacatggccatggccaacagaaccccccatgcccagtttaaacagccttacagttctagtggcca

SEQ ID NO: 219091 - DNA, 201 bp, Homo sapiens
cttgttttatcttttgagctttctttgctgtcaggtaataaatttcctagtgaatcagttgctgtaatgagaagttcagatgggcaatttgtgatttgttrtcaattaaagctgaaatacattggataattgaaatgtatttaatctgagaaagcaaatcttcattttcattttatcatcatgtggtaagaagtgtgggag

SEQ ID NO: 219092 - DNA, 201 bp, Homo sapiens
gaaggtttagaaaccctgcagagtgaaagtggctcagctgctgagcaggtacccaaagaagtaatactaggttgtgttgaagtacctggttgaggttaaaratcatgagtttgtggtggatttaatttacccagttccatgaattttctctggtggtgctagcatccagggaacaggtgtggagaaggtgaacaaggctat

SEQ ID NO: 219093 - DNA, 201 bp, Homo sapiens
agggctctccaggccttcctctttgcaacagcagttagcagattttcctagtgggttacagtgcttggctttagatatgacacccacctcttcatgggctrtaggacaagaacaaagtgtgtttacatatgctcttcccactaaggtaaaccaaggaattggtttataatggaggatttgctgcagaaatgctactggggg

SEQ ID NO: 219094 - DNA, 201 bp, Homo sapiens
agaaaactcccattccctagtgactaatgccagacagcctgactaacctgccccacacactctatccctggacttcacctaggcctgctgatcctcctcaygtcttacattgtaaggaggcacaggatggaagaaccagcattcaaggatgaaaacattccccaagcaagaggctgaactcctcacataataagagagaag

SEQ ID NO: 219095 - DNA, 201 bp, Homo sapiens
taaagccataaggaagttccatgagaactgggaggattggaggaagtgggtatcagaatcagaccgagagaaacgacatctccttgtgctgcagccactgyggtcacccctggcccccagcttttgtgctcaggacaaagcgcccacttccaaaactctgtctgtcctcgtggcaactgaacttcgttcccatcacattgc

SEQ ID NO: 219096 - DNA, 201 bp, Homo sapiens
gccaactcagctcggttcaactaagatttctgtagtaccagcctgggctaacggaaggaagagggtgatggatcagacctagtccctgccatggggagttyggcagataagtctaaagtggggatgaaatgttctaggacttggtttccaggctcggttctgctgctttctggccatgggtctctgggcttaggttttctc

SEQ ID NO: 219097 - DNA, 201 bp, Homo sapiens
aaagccataaggaagttccatgagaactgggaggattggaggaagtgggtatcagaatcagaccgagagaaacgacatctccttgtgctgcagccactgcsgtcacccctggcccccagcttttgtgctcaggacaaagcgcccacttccaaaactctgtctgtcctcgtggcaactgaacttcgttcccatcacattgct

SEQ ID NO: 219098 - DNA, 201 bp, Homo sapiens
cacatgtatgtgttaatgcatccatgtgagcactgtgtttgtgtgtgtattgtgtgtctgtgtgtgagtgtgcttgtgggtggatgcggacctgtgtgtgygcacttacgcagtagtgtgcatgcataagcagcatatacaggcacatgggcacgtgggcttgtgtgtgcttgtgtgaacagtggtgtttcagtccccact

SEQ ID NO: 219099 - DNA, 201 bp, Homo sapiens
cagattaaaatcagccaccattattttatccacatgaactccatttttttttctgggctaacatcttcctactggatcttaacctgcatattttattactrtgttctttcctacatccttctgatcaccaagattgctagtgagtccagatcccacattgaccatatgttatctgtgcatactcgtgcacatgcatgcaca

SEQ ID NO: 219100 - DNA, 201 bp, Homo sapiens
tggtgccactggggtattgagaaaaaaacaaaaacaaaaactcctgcagctagctcagtgtctgcccaaacagccgccctgttttgtgcttgaaacccagmaccatggtggtatagacacctggtcctggtctgccagttgcaaagaccgtgggaaaagcacagtatctgagccggagtgcactgttcctcccggtacact

SEQ ID NO: 219101 - DNA, 201 bp, Homo sapiens
tggccttgacttaacagcagtgcagcagcctgggatgacttccctgtacctgctggccagcaaccccagctttccccaaccttctctgcattggtcctgcstttggcctgcctctgtttcctgtcaacttgctgttctctgatggaatggaatcttgctctgatgcctgcctcatccccttagctgggccccagcttccca

SEQ ID NO: 219102 - DNA, 201 bp, Homo sapiens
cgccctgttttgtgcttgaaacccagcaccatggtggtatagacacctggtcctggtctgccagttgcaaagaccgtgggaaaagcacagtatctgagccrgagtgcactgttcctcccggtacactctctcacagctttccttggctggggaagggagatcccccaaccccttgcacttcccaggtgaggcgataaccca

SEQ ID NO: 219103 - DNA, 201 bp, Homo sapiens
tggcaatgcctagagaccaaccctggtccagtgctttgctagctggactcattcattcaacagacattcacagagtgcattctcaagtgtcagccatcacrctcagcacaccaatccaaagaccgatgagaaagtgtttctgtccccagcgagctggcagccgagtgcagatgataacactcaaataagcaaagcacacaa

SEQ ID NO: 219104 - DNA, 201 bp, Homo sapiens
tggttgggcctgacataatcacatgaaccttctgaaagcagagtgttctctagctgatggcagaaggggaagtcacagagatgtactctggtggcctgagwagagacccatgctgtgaactgtccatgcggcaaggagattgggcagcctcttgttgccaagagcattccccagatgacagccagcaggaaagcagggacc

SEQ ID NO: 219105 - DNA, 201 bp, Homo sapiens
gtttgtagtcattcttgctgttgttgttgtttacatgtgttcctgacctgcagccctagcctgttaaagaaatgtgatgtatttattgacttgttctgataaaaaaaactatgctgggctgaagaatcgccattttttgacacaggcactcaaaacccaccccttttcaatcttgatccttgctctttgaataaaggtgaa

SEQ ID NO: 219106 - DNA, 201 bp, Homo sapiens
ctggaataaatccccgtgcccaggccccagtccctgagactgtggtttataggttttaaagctccccaggtgattctgctctgcagccaaggtggagaccyctgccttagcttgattgcattcaggagtttgtccttgtgattcttgtgatttcatttgctctcagatattcctcctcttccaagatccagcccacagctt

SEQ ID NO: 219107 - DNA, 201 bp, Homo sapiens
agcgaacttctgtgtcaaggggttaatgaccaataaccaaacccttaaatcagcctgcctgtctgcagagaggcctgcagctcgttctttgaaaaagaggraaaagggcccatttctaatacacattctggatgtcaaagccagcactctgtaaattgaaatttaataaagcaaggctcccttccttcttcccgccctctg

SEQ ID NO: 219108 - DNA, 201 bp, Homo sapiens
taccaaaacacagtcttaagagggtccagtgctatttaatcagcaaaacttaaactcgctgttaattctgctagaggatctgtagtccaaggaggggaatrggttcctgcttgtctctcccagctcttcctccctatttgccagctgtgatctctcaccattctagaaaggaggagggagaggaaaggtgtggagggcagg

SEQ ID NO: 219109 - DNA, 201 bp, Homo sapiens
ctttctttgtcataagtcgtatataaatttataccaaaacacagtcttaagagggtccagtgctatttaatcagcaaaacttaaactcgctgttaattctrctagaggatctgtagtccaaggaggggaatgggttcctgcttgtctctcccagctcttcctccctatttgccagctgtgatctctcaccattctagaaag

SEQ ID NO: 219110 - DNA, 201 bp, Homo sapiens
ctccctttttataggaacatgtcttccagtagcttcccaagaaagaggccatgggaaataaatattttgcctttgcatgtctgaaaatgtctttattctaygctcacatttgattggcatgttagctagctttagaactctaggttgaaaacaagtttccctggaattttgaaggtgctgattcattgccttccagctccc

SEQ ID NO: 219111 - DNA, 201 bp, Homo sapiens
attaaagtctcaatgtctgccaggtgcctgacaggcaataggtgttcagttagcttaacaaacttgctggcttagaagtgaacttgcttctctctcccccwgtgtgcatacacactttggctttgcaaaaaagacagccctgctgctgccctcaagcctaccttctgagaaggcactcaggatgctgaaagtgaagctcac

SEQ ID NO: 219112 - DNA, 201 bp, Homo sapiens
cctcaagtaatcttcccacttcggcctcacaaagtgctgggattacagacatgagccactgcacctggccttggtctattttattaaagtctcaatgtctsccaggtgcctgacaggcaataggtgttcagttagcttaacaaacttgctggcttagaagtgaacttgcttctctctccccctgtgtgcatacacactttg

SEQ ID NO: 219113 - DNA, 201 bp, Homo sapiens
cttctccctggaggtgccaagcagagctgaagggtcccatggccacagaggccattaggcatgtgagagcgagaggctggccttcaaggtctctttcagcrtggggattccagggcccttcctaggcttgtccaagggcccctttcagaggccgagcctgcaggtttctccctggcaaacagtgggccccagcagctgctg

SEQ ID NO: 219114 - DNA, 201 bp, Homo sapiens
accatgcagacctacaaaatcttttctccttataaaacatgattgcctgtatcctggtgaccacattttctaaattctccaaagaattatggttaaaggatttttttttccctgacttgtgtattcatcttaaaagccttacaaaagtaaagcaatatatttatctttatttgtatattgaacagattcctaggaaataca

SEQ ID NO: 219115 - DNA, 201 bp, Homo sapiens
tccccaacacaggaagtcggtaatcccatgtcccctcccaacacacacatacacagtcccctccacccgcaccccctgcttctcagtccctgcctccttcwtctgtgactcaaagtcccttctcagggagctggattttttatttcaatttttcaattgaagaacatggatacatacagaaacatgtataaaatacacact

SEQ ID NO: 219116 - DNA, 201 bp, Homo sapiens
tcccaggttcaagccattctcctgccccagcctcccaagtagctgggattacaggcatgcaccaatatacccagctaatttttgtatttttagtagagackgagtatcaccatgttggccaggctgatcttgaactcctgacctcaagtaatcttcccacttcggcctcacaaagtgctgggattacagacatgagccact

SEQ ID NO: 219117 - DNA, 201 bp, Homo sapiens
attgctagtgagtccagatcccacattgaccatatgttatctgtgcatactcgtgcacatgcatgcacacacacacacatacacacacacatgcacacacagacacacacacattccaccactctcactgggaatattctaagctctgcttaatgctgtgcagaataactgttgtatgctaaaaaggtattgagcctcctc

SEQ ID NO: 219118 - DNA, 201 bp, Homo sapiens
ctcctcacaaaggctcacaggtcctgtacgatctttccccagccttataccttacctatctttaccactctcagccaatcacactcgtgccattttggttmtttgagccccctgagttctttctggccgcaagtcttttatacttgctgtctccttagttctgtggctggctcattttcatctttggataccacttcaaat

SEQ ID NO: 219119 - DNA, 201 bp, Homo sapiens
ttccaggctccttggacgtttttgagtcagaagactcttagagcccctcagatgtgctaacaagtgggggcacttactgatctgaatcacagctccctggkgaccagcggggtgctacccagtctcctccccacctcatcccattggcactatcatttttcaaatggcattgtactgtcaagcgtctgtggcttgtgtttg

SEQ ID NO: 219120 - DNA, 201 bp, Homo sapiens
ctccttggacgtttttgagtcagaagactcttagagcccctcagatgtgctaacaagtgggggcacttactgatctgaatcacagctccctggggaccagyggggtgctacccagtctcctccccacctcatcccattggcactatcatttttcaaatggcattgtactgtcaagcgtctgtggcttgtgtttgcctgttt

SEQ ID NO: 219121 - DNA, 201 bp, Homo sapiens
tggctgcggaggcctcaggaaacttacaattatggcagaaggtgaaggagaaacagtcaccttcttcacaaggtggcaggagagagagggagagagagacagagagagagagagagagagagagagaggaagtgccacacttaaaccatcagatctcatgagaactcactcactatcatgagaacagcgtgtgggaaactg

SEQ ID NO: 219122 - DNA, 201 bp, Homo sapiens
catgagtatattctacccatcctcctgcatgtctgtctctccgccaggctgatagtccctgagggaggggctcccgctcttccctctgctttcccaatgcycaggccagccctggcacccgagaggcaaagagggtgtttgttgaattgaatgggatcgactcctcactgatgggctgagttccagctacaaacttctccc

SEQ ID NO: 219123 - DNA, 201 bp, Homo sapiens
ggctgcggaggcctcaggaaacttacaattatggcagaaggtgaaggagaaacagtcaccttcttcacaaggtggcaggagagagagggagagagagacagagagagagagagagagagagagagaggaagtgccacacttaaaccatcagatctcatgagaactcactcactatcatgagaacagcgtgtgggaaactgc

SEQ ID NO: 219124 - DNA, 201 bp, Homo sapiens
ttgttgaattgaatgggatcgactcctcactgatgggctgagttccagctacaaacttctccccaaagagctgagggattcgtgtgcctgtgctcagcctyacctgttcccgctccaccagggaaatgggttcacagaggaagccctgagctagaaacccagccttacacatgtatgtcgtcacactaatggagaatggtg

SEQ ID NO: 219125 - DNA, 201 bp, Homo sapiens
gcaacccaatgaatggtagagaactgagtgagtgaaaataattgaaaaatgatgaaattcagtgtctgtctgcgactcctcaaggtggtagttcaaatcaratgggtagggggaagtgaacacaagacaggtaagaggtggaattgcccaggataaagccttaggtggagaaggaaaggatcagtgtgtttccgaaaataa

SEQ ID NO: 219126 - DNA, 201 bp, Homo sapiens
ttgggtgaggttcaggaaggcagggtagtgtagtaattaagagctttgcctcggaaccaggtagagcagggatcctatcccaactgtgccccttacaagtygtgtggtctagtgcaagttacttagcctctctggacttcagtttcctcatctgagcaaagtaatagatttcttccatagcaccagaccagtgtttctgag

SEQ ID NO: 219127 - DNA, 201 bp, Homo sapiens
caaggatgctggttcatccctttccaatgtaagtccctggccaattccgttgttttctcccttatgatgggttctagaacctcttgtaaacagtgtcccartataactctccctttctacccctcaccactctctaggcccaggacagtttcagccaaagacgatcactgctgccccatgcaggaggctcagcggggagag

SEQ ID NO: 219128 - DNA, 201 bp, Homo sapiens
acacccaccctctcacccaagcactggcattaagaacccaggggaaagccaagtctaatatcagggctctccaggccttcctctttgcaacagcagttagsagattttcctagtgggttacagtgcttggctttagatatgacacccacctcttcatgggctataggacaagaacaaagtgtgtttacatatgctcttccc

SEQ ID NO: 219129 - DNA, 201 bp, Homo sapiens
aggattgaatcacggtattctgcacggggtgccaagccctgtggtaggtgtcctgtgatggcaaaatattaagaacacttggaaactccccaggagctcamcagtgaggcatagcaggtccccaggttctgcttaggactggtgagtgagcatactcttactgccttctctctgtaccccagagctgcaaaacttctagcc

SEQ ID NO: 219130 - DNA, 201 bp, Homo sapiens
gtacttcaaggcattttgtttcttctttattttcttttttggatagcagttgtttggttggggctaagagaattccctcttctaatcagcagcacatgttygggatgcaactaactggggatggaatttttctactatctggtccaccagaagcctttactctagctcagtgttaacagagctcgcaggtacaaagaggca

SEQ ID NO: 219131 - DNA, 201 bp, Homo sapiens
gaggttggaggcgggaggcaggaggttgagattctcatctgcatgtttgcaaaggctctttggtggagtagaagctaacaaaggcctactcatctgcaacrtcctcctcctggacagaagcctcctgcttcagagaagtggttttcaaacttcttaaaattcatcataacctgttgttcaaagaaaatgttatatgaaagc

SEQ ID NO: 219132 - DNA, 201 bp, Homo sapiens
ctgtcacatgccattgtgcaggttgtgcactgtacaactgcaggagatggaggtggcactttacattgttgcctagggaatatagaccaagccagggtaayggtatttctgacctcttctatgaaaacttacatattcctccctaagcatcacacttgataggaagcctgaaaatgctgaaagacaatttctgaggcaata

SEQ ID NO: 219133 - DNA, 201 bp, Homo sapiens
caagaaggagttacattgctttattcaagacccctcagctggagccaggtttccatcccagcctgttgcttctagctccttcagtggactacctgcctaarggatggtggggggtgggggaaggaatggcacagagccagggaggactttatcaaaagacacccaccctctcacccaagcactggcattaagaacccaggg

SEQ ID NO: 219134 - DNA, 201 bp, Homo sapiens
ttgcaatcagctggtggcccgactggggctgaaggatccacgagggcctcactcacctgtctggggcctttgtggggtggcctaatgactgggctggggargaggctgcctagaccttccttagttagggcagcaagacagcaaatgcaaaaggcctggaacttgcgcagggtccctcttgctgtgtcctgctgtgtcacg

SEQ ID NO: 219135 - DNA, 201 bp, Homo sapiens
gcttcagagaagtggttttcaaacttcttaaaattcatcataacctgttgttcaaagaaaatgttatatgaaagccagttatccaaaagacaaaagaagayctgctgtgatggggctgggagaggggctctagaaccccacccacaatggcccctgagaccccttcttggaatccccagagctcagcgtgacaacctggtg

SEQ ID NO: 219136 - DNA, 201 bp, Homo sapiens
gtaaattcttgctctgctttctgacacctgtgatcttatctggaccattggacaaatgttgaatgttttgtctgtgtgatggtagatgttggcctgagcaraggctgccagttctctaccaactgcagatgatacaatatgggacagtatctgttatacttacagtgtggattctggagccagattgcctgaatctaaata

SEQ ID NO: 219137 - DNA, 201 bp, Homo sapiens
tctcataccagacttgggtcgggaaaggcttccagagtggcagataagctgagagccaagggaagaggcaaagaggaggccaagaccaagggcgatatggkgaagtgtccacacaggctgaatagcactatagacagggaggagagtggagcttgttactacaccacagttccttcatccttaaaagagataatatctctg

SEQ ID NO: 219138 - DNA, 201 bp, Homo sapiens
ctggaacttgcgcagggtccctcttgctgtgtcctgctgtgtcacggtccagcccagactcagtgtgtgaggcagccacacaaagatgtgaattcagagasgtgaaattcataggagaccatttggtagcaatcatcctcagcctcctcccatcaataccttagtcatggtaggtattggcaggagtcaactggcaggagt

SEQ ID NO: 219139 - DNA, 201 bp, Homo sapiens
gaagtggttttcaaacttcttaaaattcatcataacctgttgttcaaagaaaatgttatatgaaagccagttatccaaaagacaaaagaagacctgctgtkatggggctgggagaggggctctagaaccccacccacaatggcccctgagaccccttcttggaatccccagagctcagcgtgacaacctggtgggaacggc

SEQ ID NO: 219140 - DNA, 201 bp, Homo sapiens
gagaccatttggtagcaatcatcctcagcctcctcccatcaataccttagtcatggtaggtattggcaggagtcaactggcaggagtctcacctgagggtkgaggagggagagaaggggacaggtatccctttcatggggaagagaggggatttgtatcaggccatttggtactagcccagttctcacttcaagttctgtg

SEQ ID NO: 219141 - DNA, 201 bp, Homo sapiens
ctgcacatgtatcctagaacttaaaaataaaaaagaattgtgatgcttgactgttcactttttaagagcaggagtcatgtctgtgtgcttcccactgtacyccagtgcacagtatagcttctggcatctaccaagtgctcactgatttttgtttgaataaacaaattatatgacttaatgcacccaaaatgcttagcatag

SEQ ID NO: 219142 - DNA, 201 bp, Homo sapiens
tgtgggtctctctgctttgacctccaggctagggaccgcctactggtccaatgcttattctccaacttgagccccatcgtggggatgacaggggtgggcagggtcgaaaggaactgcagtctgatcttcagtcactgccacaggctctgaagatctcagaatccattcacagcctcaaagtgacccattttcacacatcac

SEQ ID NO: 219143 - DNA, 201 bp, Homo sapiens
agaagaaaaaatgtatactcatacttaaaacgggataaaaccacctaactttcctgaagttacctgatacctactctgctcggcccctgccacaattttgtgttgttaaacatttgctgacagtctgctatgtacaagggtcttttacacgcattggctcatttgatcatcatcgcaacctgttgaccgctcatgtctcat

SEQ ID NO: 219144 - DNA, 201 bp, Homo sapiens
ttgaattgaatgggatcgactcctcactgatgggctgagttccagctacaaacttctccccaaagagctgagggattcgtgtgcctgtgctcagcctcacytgttcccgctccaccagggaaatgggttcacagaggaagccctgagctagaaacccagccttacacatgtatgtcgtcacactaatggagaatggtgctt

SEQ ID NO: 219145 - DNA, 201 bp, Homo sapiens
caggaggaggaaagggaggagcagtggcagaagaatctggatgaggggctaaggcctagatcaggagagtttgcaagccctggtccctagagacacacccrgaggctgcagaaaaagagagacttcaccagcaatcccagtaaaatggggcacccattctttgtcttgtactcaaccacaccaaggcacctccaggccaag

SEQ ID NO: 219146 - DNA, 201 bp, Homo sapiens
gttgaaaccttggctggtggaagagtcatgcagggtgtctggttacctggtgggttagtctcatttcctagctccttggtggagagtgtcttcttgaggasagatttttccctctcttctaactcaactttcaaaccaaattgaagccacatcagcctatcttcctgccaggatgaatttgatttaactcagagcaatgtg

SEQ ID NO: 219147 - DNA, 201 bp, Homo sapiens
gatgcaggagcctgtcccaggcagccaggctggtctggggggtgcaggcagagggcaggaggaggaaagggaggagcagtggcagaagaatctggatgagrggctaaggcctagatcaggagagtttgcaagccctggtccctagagacacacccggaggctgcagaaaaagagagacttcaccagcaatcccagtaaaat

SEQ ID NO: 219148 - DNA, 201 bp, Homo sapiens
tcacttgggttaggctggcctatgttttcccaaaggtatttatgggattcagagtcacaaacagggttactggagcgtcttcattaccatcgtataggatktctgacctcacttcacttgaatagctgaatgtgcttgatatgcttgaatgtttgtaccctccaaatctcatgttgaaatgtggtccccagtgtttgaggt

SEQ ID NO: 219149 - DNA, 201 bp, Homo sapiens
tgtgatctgtcccatggcagcgtgtttctgcttgatgtggcttttgtttgcagctcccatctgtgtcaaggcactttgctggagaaagccactgatgcagragcctgtcccaggcagccaggctggtctggggggtgcaggcagagggcaggaggaggaaagggaggagcagtggcagaagaatctggatgaggggctaag

SEQ ID NO: 219150 - DNA, 201 bp, Homo sapiens
caaattagcccaagaagcaagaaggatgtgttatttgtccaccagcttccatccaccattggttgggggctgctcctggagctaggtacaggcaaggcaarctcctgcagccagaaaagtcccccaggcagagggcagcaggggccaatagaggaggttgttcacatggccagggctggggagtgcccagatgcatgggtg

SEQ ID NO: 219151 - DNA, 201 bp, Homo sapiens
tgtgaatgcacaggttagcagtggggggctgctggtgccagtgctgctggggatttctggaggcctgtagggaatatatctccaaattagcccaagaagcragaaggatgtgttatttgtccaccagcttccatccaccattggttgggggctgctcctggagctaggtacaggcaaggcaagctcctgcagccagaaaag

SEQ ID NO: 219152 - DNA, 201 bp, Homo sapiens
agtctggtgtgtatgagccccactgctgactgaggttgcgctagggcccaagtacagtgacaggcttgggctcagcctctatctagtatcagtgctgaggrcctggacataatggccacaggtatagctagccatgggccagcattgtcttgagtcaggtttctctagaagcagatcctgagacaagggtttgtgacaagt

SEQ ID NO: 219153 - DNA, 201 bp, Homo sapiens
ctaatgaacaagctaactgtatttgttaatttgaggggagggggtcattatcaacaacaaataaaacaaatttgggtagcttaaggtaaagacaaagggtraatgttattagagaaaacctggggtgattcctttttatagactcagaggaaaggttgaccgggaaaggcaggaactaggacagctccaggggcctcagca

SEQ ID NO: 219154 - DNA, 201 bp, Homo sapiens
ccttccaaaatagggcccagtagtcagatatctggtgtttgagatttcttgaacatagagaacttactaatgaacaagctaactgtatttgttaatttgargggagggggtcattatcaacaacaaataaaacaaatttgggtagcttaaggtaaagacaaagggtgaatgttattagagaaaacctggggtgattccttt

SEQ ID NO: 219155 - DNA, 201 bp, Homo sapiens
gtgctctatcaaatctgttttatgaatgtgatccattcatttcatttggtttccaggagtgctccatccttctgctgcatctgggctgtttgctcaggcckgcctcggtgctgccgtttggggcatgaggacggcttcatctcagggagtcccttatcctgctcctgggctgaacccctgcgttaattccttatcttcctt

SEQ ID NO: 219156 - DNA, 201 bp, Homo sapiens
aggagtcagccctgaggaggtgccacctccgcgggagatgccgagatgccgcaagagacagacagccaggggcagaaacacctaggcttctcccctccccygcccccatctctcttcagtgcctcctgttggccaaattcacatagaagccaattgagaaacgcggcttgcaggagtcagcctgctctgctcgcttcaact

SEQ ID NO: 219157 - DNA, 201 bp, Homo sapiens
agccaaacagaggcagtcaaggcaaccagaaattaggcacagcaggaagctgccaccaccaggcctagggctagagagccaagggcatggacagtttttcsagagcccaagacgcagggccattggcagaaggtggaaccagggcagtcctttctgagaggagtcagccctgaggaggtgccacctccgcgggagatgccg

SEQ ID NO: 219158 - DNA, 201 bp, Homo sapiens
atccaatactactagcatcatccaagccacttctttcctggactactcaatagttacgcactggcctccttccattcattcttttgaactttcaattatgktaatcggattctgttcctcctttgctgaaaacccttccaagttttcccattgctattagaacaagagccacactcctcacaaaggctcacaggtcctgta

SEQ ID NO: 219159 - DNA, 201 bp, Homo sapiens
aaggagttgggggcaggggggcattctaaaattaccagcagaatggagcaaagcctagaagcacaaaagagtgcaagttcaggaacattgaaaggtcaggrtggctggaaagattgtagcgagagctttgagatgctgcccattaacacttagaatgcaaaggtttatctttcaaaatctaattgcattcggatcaatctc

SEQ ID NO: 219160 - DNA, 201 bp, Homo sapiens
tttcttattatagtcgataaggatttggctgccttatattttctatctccttaaaacacatacctcctcttcctcaatcctcaaactttgggttaaaatgktagacagtattaacattatgtactgtgaaaatattgttccctgttaaggagacttccatgatgtaaactttatttttcctagttgaatcggtgtccaatt

SEQ ID NO: 219161 - DNA, 201 bp, Homo sapiens
gaaatgctcagcaaatatccagctgccagcctgcctggcatctagaggtattggtggtttgggcagtggcagggcctctgctgtttgtctcctgctagggkgcctgagtttaacagtctcttactattcacagtttaagaaaatagagaataattgatgtccatcaggcaatgaatagaaaacagctcattgcagatgcct

SEQ ID NO: 219162 - DNA, 201 bp, Homo sapiens
atagattaaatgtatacatatatgttatctcatctatggtgaatttgaggcgtccctgtttgcactgcagcaactcttcccatggttaggagcctctgcaktcctaaagcattgttgatacagtgaggaataaatccttggccttcagatttcttgatctccaatgattgttgaatgaatgaatccacctttacttaactt

SEQ ID NO: 219163 - DNA, 201 bp, Homo sapiens
tttcaaacttcttaaaattcatcataacctgttgttcaaagaaaatgttatatgaaagccagttatccaaaagacaaaagaagacctgctgtgatggggcygggagaggggctctagaaccccacccacaatggcccctgagaccccttcttggaatccccagagctcagcgtgacaacctggtgggaacggccctggtag

SEQ ID NO: 219164 - DNA, 201 bp, Homo sapiens
cagctgtggagtcaacactgtctctcatgtcctctagtatgttttctagaatagattaaatgtatacatatatgttatctcatctatggtgaatttgaggygtccctgtttgcactgcagcaactcttcccatggttaggagcctctgcagtcctaaagcattgttgatacagtgaggaataaatccttggccttcagatt

SEQ ID NO: 219165 - DNA, 201 bp, Homo sapiens
agctcagcgtgacaacctggtgggaacggccctggtagtcccattgctggttcatgggtgagttcatggtggccctcgggaccaagctcccgggcctgggyagctgcagctgaggttcgggactgggcggaggcagtggccatcagtgcagccgaggagagcccctccaaggaatgggtaaggggccacaggccctgagct

SEQ ID NO: 219166 - DNA, 201 bp, Homo sapiens
cctctagaaatatgataattatcagctatttgagatgcagtcactgtaatgtgataacaagatgtgttgtgcaggtagaaagcatggagagaaatggcacraagtagagttataagaaaaaagaaagaagagatcttgtttggttattcactttattgtgataaaattgaaatgggagaaagttgaaatctacatactgaa

SEQ ID NO: 219167 - DNA, 201 bp, Homo sapiens
gccctggtagtcccattgctggttcatgggtgagttcatggtggccctcgggaccaagctcccgggcctgggcagctgcagctgaggttcgggactgggcrgaggcagtggccatcagtgcagccgaggagagcccctccaaggaatgggtaaggggccacaggccctgagctgccagaactcagccttgctcaggacttc

SEQ ID NO: 219168 - DNA, 201 bp, Homo sapiens
agagcccctccaaggaatgggtaaggggccacaggccctgagctgccagaactcagccttgctcaggacttctccctaggcaaggaggggagagagcaacygcctacctgagtgtcttcacaagtttttaaaactctcatagcctcagtttccttatccttaaaagtggcagtagccacgggcatggaaaacacctagcag

SEQ ID NO: 219169 - DNA, 201 bp, Homo sapiens
cagttgccaagttctccctcaactccaataaactagaagccacaggacatcagctttcttcggtggtgacctggaaatccaggccacacaatggacagtcycaggattctgatgagcaaaccacctcttgcccaggatagctttgaagaggctccccttgcctcttgttctggttacatttccacatcaaagctggacatc

SEQ ID NO: 219170 - DNA, 201 bp, Homo sapiens
ttgttatagaaaaactcagtcattttagtcattttgatatcaattaccatggatttgccaagcttgataacttgtaaggtgaccacagagagcagatcttrgctgtaatgagcgtcttctgctcctccctccagacacactctccacccacctccctccaccctgagaggctgacgttatggaacatttcaatggaaatct

SEQ ID NO: 219171 - DNA, 201 bp, Homo sapiens
cccctagaccagacccaaactacagcccatgggagactcctacttttgtaaatgatgtgttaatgaaacacagccatttgtttatgtttttttttttttttctgggatgtgtttgcactacagtaggagcgttgagttttcagaggctgtatggtcctctgtgcagaaaggagtttgcagagcgggcctggctgctgtcct

SEQ ID NO: 219172 - DNA, 201 bp, Homo sapiens
accctgaagcctgttggctgtcagagaggggctgggtccttggcagcttggctggcatgaatggtggggtggggataggcacccccgccctgagcagcccwtcagggatcctgagcaggactcatcattcagagtccttagttcaagtcccgatgactccgaatttcttagcctctttaagtgtcaatttccacaactgta

SEQ ID NO: 219173 - DNA, 201 bp, Homo sapiens
atacacatatgcacacacatgcagcaggttggacacatgcagacatacatgtacgtactcagatacacaaacgtgcatgagtgcaaacacactgactccawagagaaaagggatttctgctcctcccagaatctgcttttataagaatagggctgtcatcatttgacatggcccttgtgaagcaaaggttgttggaaatca

SEQ ID NO: 219174 - DNA, 201 bp, Homo sapiens
ggctcctgctccttcctgtctatgtaacctttgacatgtgctgtaaactgtgaagttctatcccaataggaataacagctaacattcatacagtacttactatgtgtcaggcatatattaactcatttaatcctcaccaaacccagatgtgataggtaccacctgacctcatagatgaggaaactgagtcacagagaagtt

SEQ ID NO: 219175 - DNA, 201 bp, Homo sapiens
agctggggttggggaagatgagaagcctgtttctggcaaacgtttacactgtgtcaggaaaatgctctctagctagatctcctgaaaacagagaaccctgmagcctgttggctgtcagagaggggctgggtccttggcagcttggctggcatgaatggtggggtggggataggcacccccgccctgagcagcccatcaggg

SEQ ID NO: 219176 - DNA, 201 bp, Homo sapiens
gtacccactcactcacccactccacgagtgttgactgtctcctttgtgcctggcctgtatgatatacagtgagactgagacccagtctgatgactaacagkgcagacaagtgaagaaggaacaagaatgcaacctgctaagtgctaccctgagaaatggggtgctagtgaagcacaggaatgtggtctcataccagacttg

SEQ ID NO: 219177 - DNA, 201 bp, Homo sapiens
gctcctgctccttcctgtctatgtaacctttgacatgtgctgtaaactgtgaagttctatcccaataggaataacagctaacattcatacagtacttactatgtgtcaggcatatattaactcatttaatcctcaccaaacccagatgtgataggtaccacctgacctcatagatgaggaaactgagtcacagagaagtta

SEQ ID NO: 219178 - DNA, 201 bp, Homo sapiens
tccccatggaaacacattgcactgtaaggtgcctatctgtcccattcacctccccagaaccatcctgaggacacagctgcctttgatgccccacactccayccatagcaagctatgtatgctgcttggccatgggtgaacccaatcctaaaaggagagttacgctgctgtggctccagagaaactattggccccaagcctc

SEQ ID NO: 219179 - DNA, 201 bp, Homo sapiens
ccatatatttgatccttctacaaaagggaactgtttggaaatactatttttgaattcctagttttcagacccagagcagccactctcacttgctatttaataattaatatatgtggaagttttgcttactgcaaaatgatcgatatttatcaggtgacctggaatctctcctcgagccctcattggtgaggagtcgctgtt

SEQ ID NO: 219180 - DNA, 201 bp, Homo sapiens
aacaaccttgatcatgtcgtttggtgtacatatatgctcacttcttttggttttatgcccaggagcagaattcctgagtcatagggttgaaatatgttcastttagtagacattgcctgcattagtctgctcaggttgccaaaacaaaatatcacaggccttaaaccacataaacttattttctcacagttctggaggctg

SEQ ID NO: 219181 - DNA, 201 bp, Homo sapiens
gcagtaagcactacaagcttgttggttaaaaacatcgcccaagggcactggccagggactctctccaggggcctacccacaggggaggaaggcggttgtgytcctgctccccagtgccagctgtttgcaccctggctgcctctagctcttggacccctcctttggtgacttcttccgggtctttggctggcagacctgatc

SEQ ID NO: 219182 - DNA, 201 bp, Homo sapiens
attcctcagtgcatacgatatgcaccctctttgctgtttgtgattgagtaggcacagcttatagcagacaagcagacacagctatgaagtgttttgagcawtaccttccaaaatagggcccagtagtcagatatctggtgtttgagatttcttgaacatagagaacttactaatgaacaagctaactgtatttgttaattt

SEQ ID NO: 219183 - DNA, 201 bp, Homo sapiens
atctgtatttaagaagtatgaattgactgtcacaagctgatgcagagtaggcagactgttgtttgtgaagaatgtcaggggaagtattcctcagtgcatasgatatgcaccctctttgctgtttgtgattgagtaggcacagcttatagcagacaagcagacacagctatgaagtgttttgagcaataccttccaaaatag

SEQ ID NO: 219184 - DNA, 201 bp, Homo sapiens
gacgtctgtcactcccgctcatgtcccagctagaaacgtggccatgtctggcattaatgatctggtgatgtacgatagctcagtagggaggggaatacagraagaagcatcataggagagggcagagactatttcgaacaacaaatcaatctgtatttaagaagtatgaattgactgtcacaagctgatgcagagtaggca

SEQ ID NO: 219185 - DNA, 201 bp, Homo sapiens
gatgctgcaggtccagtggcagagaacaaaaagacagtgtatcacatgattgctcctgaagcttctgattgggaatgacgtctgtcactcccgctcatgtyccagctagaaacgtggccatgtctggcattaatgatctggtgatgtacgatagctcagtagggaggggaatacagaaagaagcatcataggagagggcag

SEQ ID NO: 219186 - DNA, 201 bp, Homo sapiens
caggatgctgcaggtccagtggcagagaacaaaaagacagtgtatcacatgattgctcctgaagcttctgattgggaatgacgtctgtcactcccgctcaygtcccagctagaaacgtggccatgtctggcattaatgatctggtgatgtacgatagctcagtagggaggggaatacagaaagaagcatcataggagaggg

SEQ ID NO: 219187 - DNA, 201 bp, Homo sapiens
agaggagttttggagtaaggggtacgaggcaggcaccagggagtgcacctgcatgaatttctggagtccaaatgtccctggaataatttattaacacattrcttgattcaattaatatgttttgagtgtatatcatgtaataagcagaggttcattaatagagatataagggtgggtaagacaaacatggtgtctgccctc

SEQ ID NO: 219188 - DNA, 201 bp, Homo sapiens
tttgctggcaccactgttttctgattcaatagtattagacattatgtattgatttcttattatagtcgataaggatttggctgccttatattttctatctycttaaaacacatacctcctcttcctcaatcctcaaactttgggttaaaatggtagacagtattaacattatgtactgtgaaaatattgttccctgttaag

SEQ ID NO: 219189 - DNA, 201 bp, Homo sapiens
cagtgtggctagaggggagcaaagagggatgtagggacttagacagggatgattaattctgtggaatggggtaggtaattcaaagaaatgtatttaagctrtgctttgaaggatctgccattcaacaatactatggggcctgacactgagctatgctctggggatacaactgtgataattcaaacaaggtctgtgcctcct

SEQ ID NO: 219190 - DNA, 201 bp, Homo sapiens
aggaagctagttttaatacctttctcttcctcgtaggtttcatgaattgtgaaatccggtcagatctgccgccaaaatgacttaaaaattttttcttcctytgctttctcacagatagcatcttcttttacaccattatgccctccttctggtgtagcataactcaggtgttcttaaatggggagtagggaatctggtgct

SEQ ID NO: 219191 - DNA, 201 bp, Homo sapiens
ctatcttggcttaccgcaacctccgcctcccgggttcaagtgatttctcctgcctcagcctcctgagtagctgggattacaggcatgtgccaccacacccrgctaattttttatttttagtagagatgggggtttctccatgttggccaggatggtctcgaactcccaacctcaggtgatccacccgccttggcctcccaa

SEQ ID NO: 219192 - DNA, 201 bp, Homo sapiens
ttttttttttttttttttttttttgacaaaagacagtttcgctcgttgcccaggctggagtgcagtggcgctatcttggcttaccgcaacctccgcctccygggttcaagtgatttctcctgcctcagcctcctgagtagctgggattacaggcatgtgccaccacacccggctaattttttatttttagtagagatgggg

SEQ ID NO: 219193 - DNA, 201 bp, Homo sapiens
cttagagttgtttggtgtccctgtggcttgaacaaagctttgcaaaccgacatgtaatattaaaaaaccattaatgatttggtgaaaattcttaaatcatyatagttatgtctgttacctgagttgttcttttcaaatttatttttctctttcttaggtaatacgaggaaatagtatcatcatgttagaagccttggaacg

SEQ ID NO: 219194 - DNA, 201 bp, Homo sapiens
tgtcattcccccaagtgaaactctcactggctcattgttagtttctgatgtcctccaaacactaagattggcatttgaagctttccaagattgaatgccarctatctttgtttcctgattctcttcgtgaactttttactgcattcaaattagattacttccttatcctctcatactttgtcttcatcttagttctgtcta

SEQ ID NO: 219195 - DNA, 201 bp, Homo sapiens; identical to SEQ ID NO: 39208

SEQ ID NO: 219196 - DNA, 201 bp, Homo sapiens; identical to SEQ ID NO: 39209

SEQ ID NO: 219197 - DNA, 201 bp, Homo sapiens
ggtcagttatttgcgtcctgcgagtcccttggttccctctccgttagccgaatgtcttgagccgcttcacttcatttcttcttccggtccgaggtcgccgrgatcccggccaggctcccgcgcatgagacgtgaagcccgcgcagagctcgcgcgtcggtgtggttacagccggcagccacggcacctccttccggccgac

SEQ ID NO: 219198 - DNA, 201 bp, Homo sapiens; identical to SEQ ID NO: 39210

SEQ ID NO: 219199 - DNA, 201 bp, Homo sapiens; identical to SEQ ID NO: 39212

SEQ ID NO: 219200 - DNA, 201 bp, Homo sapiens
cgggcatggtggtgtgcacctgtagtcccagctactcaggaggctgaggcaggaagtcaaagctgcagtgagctgagatcacactactgcactccaatctktgtgacaaagcgagatcctgtctcaaaaaggatgtgtttgttttcaggagtgagtttgtttttaacctgtcagttggatcgttacctaatgataaatctc

SEQ ID NO: 219201 - DNA, 201 bp, Homo sapiens
catgagacgtgaagcccgcgcagagctcgcgcgtcggtgtggttacagccggcagccacggcacctccttccggccgactagtctccaggtcccgcggtcyggcccctggtcacccggcgctgtccctcgttccttgaagatctccagtgctaccttttgttgaacatctcgaatagtatcatgttctagatagacggcta

SEQ ID NO: 219202 - DNA, 201 bp, Homo sapiens
aaattaaaaactgatttgactgcatggcttaatctcgtattccactaaaatggaatttttttttaattcatatcgtttgaagtttcaaatgtgcatttatyattctaaaatatacttaaatgttgaggactaccctgaacatttatgcttgatgctttaatattaaataaaagaacactacttatttcaaatataaaatac

SEQ ID NO: 219203 - DNA, 201 bp, Homo sapiens
ccctttatgaaccttgtgatagatgaatgtgtggagatggcgactagtggacaacagaacaatattggaatggtggtaagtaaagatacaagagttctctkggagatttcatttttcttttggaatgtgtattaactttcctggttagtaacccccagaaatggcaaataacaggcaagattagactttccatctcctttt

SEQ ID NO: 219204 - DNA, 201 bp, Homo sapiens
gaccgaggcgctgagatatcgcgaggtgaaatgtaaaaactgccaacaatccattggctaacgaggtcgatgacgccagacgcaagacgccgggcctacarcgggagcgtgaggaaagccgtgcgttgcgttccaaggcatctgtgagcccgcggagtatacaccatgagcaaagctcaccctcccgagttgaaaaagtaa

SEQ ID NO: 219205 - DNA, 201 bp, Homo sapiens; identical to SEQ ID NO: 39213

SEQ ID NO: 219206 - DNA, 201 bp, Homo sapiens
tctggggttgatggggcatggagcttagtcctgtggatgtggctgcagtgaaccaggaggacctggaggcggggggatggccttcttcatgtctgccagcytccacacacctcagcttctccatgagacccacggcacccttcttctcccaggtttcaacctgcgcattgggaggccgaagggtccccgggacccgcctgc

SEQ ID NO: 219207 - DNA, 201 bp, Homo sapiens
aaggctttgggttgggcctaaaaggttgaatgatttaacccacagtccactcatactgcaggaaaccctctggtgttagcctgcaaatagttagaacttamtatagggatagcctttgcatttttattttggctacaatcagttaatctctgtcatgtaaatgtgcctggttaggttgttgaaattcttacttctcttacc

SEQ ID NO: 219208 - DNA, 201 bp, Homo sapiens
cactgcactcagctaactaaaaaagattttttttagatacaggctagctatgttgccaacacacctagctaattttaattttttttttttttttttttttytttttaagatacaggctatgttgctcaggctggtgttgaagtggcctcaagcaatcctcctgccttagcctctcaaatagctggagcagccactgtctgt

SEQ ID NO: 219209 - DNA, 201 bp, Homo sapiens; identical to SEQ ID NO: 39226

SEQ ID NO: 219210 - DNA, 201 bp, Homo sapiens
aggagaatcgcttgaacctgggagttgcaggttgcagtgagccgagattgagccactgcacgccaagcctgggtgacagagcaagggtctcaaaaaaaaawttttttttctcttcttcattctttttcagtaatttgatcatgatctgccttggcgtgactttctttaggtttaggtttattctccctctggttcattgac

SEQ ID NO: 219211 - DNA, 201 bp, Homo sapiens
gttttctgtatttgattttttaatcaggaatgctttgctttctataaatgtcttctggtacctatgatctttgttctcctccctcttcttacttgccccaccccccttactcagataaaggagaagtggctgaatgaggacatcatgctcaggaccctcaaggtcacattccagaaggtactgtgacaggggaggaggagg

SEQ ID NO: 219212 - DNA, 201 bp, Homo sapiens
cgccctcggctctccccttcgggcctccggggaagcgtccccgctaggggtggggtcttgggactccctggggcttccggagctgacccgtggggggtctsctgccctcagttcctgctgaccaaagtcctgccggatctggcgcctacgaggacgtggcgggtggagctcagaccggtgggctaggtaagtcaggtagag

SEQ ID NO: 219213 - DNA, 201 bp, Homo sapiens
agcagtcctgaccacatgctcgccatggtggaggaagcccgtcgcctccagggatctggccctgaacccctctgtgtccactgcaggttttggaaatgggyttcaggagggtctggtgaggcagaggggacagagcatggaggggagtacagggcatggggctagtcttgtagtctgagtgcctattttgagaacccttgc

SEQ ID NO: 219214 - DNA, 201 bp, Homo sapiens
gtctgagtgcctattttgagaacccttgctcaccctccatggactgtaattgtgagcacttgttcagcacagactcagctggggaataagcacacagctcytgctcaacaaaatgtaagtgattaaaaaggttttccttgttcagatataatctgaagattctgggaatcaagaggctctgcaggggatccatcaggaccc

SEQ ID NO: 219215 - DNA, 201 bp, Homo sapiens
gtgccatcagggtctgcactcacctccccaggccactggctttgtatcctgcaagcgtgcctaggtggcctgggactctgacctggctcctctcctgtctyctcccctccctgacccactcataatgctctaccaggacatccaggcctgctcggccgcctggaaggctgacggcgtgtgctccaccgtggccggcagtcg

SEQ ID NO: 219216 - DNA, 201 bp, Homo sapiens
agtctgagtgcctattttgagaacccttgctcaccctccatggactgtaattgtgagcacttgttcagcacagactcagctggggaataagcacacagctsttgctcaacaaaatgtaagtgattaaaaaggttttccttgttcagatataatctgaagattctgggaatcaagaggctctgcaggggatccatcaggacc

SEQ ID NO: 219217 - DNA, 201 bp, Homo sapiens
gaccaggcacactctgattctcttgtcagtgcgggttgtgggcgaacaggcgtcctgtgcaccgtggattatgtgaggcagctgctcctgacccaggtacvatacaggcatcctgtgtgtgcagtgtgctgcccatgaccacgtgtcctgctcaagtgccttgtctgtctgccccagatgatcccacctgacttcagtctc

SEQ ID NO: 219218 - DNA, 201 bp, Homo sapiens
caggcacactctgattctcttgtcagtgcgggttgtgggcgaacaggcgtcctgtgcaccgtggattatgtgaggcagctgctcctgacccaggtacgatrcaggcatcctgtgtgtgcagtgtgctgcccatgaccacgtgtcctgctcaagtgccttgtctgtctgccccagatgatcccacctgacttcagtctcttt

SEQ ID NO: 219219 - DNA, 201 bp, Homo sapiens
gagcctcccctcctgtttttcttcagaattgtgccccactctacgacgatgccctcttcctccggactccccaggcacttctcgccataccccgcccaccmggaggggtcctcaggtacccggctccatccccggattcttccctgcccaatttctcaggctaaccccttcttcatccttggaacaccagtccgttccttg

SEQ ID NO: 219220 - DNA, 201 bp, Homo sapiens
tattgggcagctgatatctgacctcatgaagcagaaggggagggtgaggaattgccacttgcaatagggatcccctgagcttccctgatactaacatggtgggggggggggcttgataaaaaacaaagggcaggctcaagagctcagggctgctgctgagagtctaatggcttctcagcccctggtaaccttaccctccag

SEQ ID NO: 219221 - DNA, 201 bp, Homo sapiens
gctgtcatttgcccctgccttcccttcttgatggtccctcaccccaacaggagcagtacaggttcctgtaccacacggtggctcagatgttctgctccacrctccagaatgccagcccccactaccagaacatcaaagaggtacagaggctcctttcccactctcctgtccaccatcagcaccctcagagaccaggacccc

SEQ ID NO: 219222 - DNA, 201 bp, Homo sapiens
gcacactctgattctcttgtcagtgcgggttgtgggcgaacaggcgtcctgtgcaccgtggattatgtgaggcagctgctcctgacccaggtacgatacargcatcctgtgtgtgcagtgtgctgcccatgaccacgtgtcctgctcaagtgccttgtctgtctgccccagatgatcccacctgacttcagtctctttgat

SEQ ID NO: 219223 - DNA, 201 bp, Homo sapiens
ccagcttcctccctcaggagcctcccctcctgtttttcttcagaattgtgccccactctacgacgatgccctcttcctccggactccccaggcacttctcsccataccccgcccaccaggaggggtcctcaggtacccggctccatccccggattcttccctgcccaatttctcaggctaaccccttcttcatccttggaa

SEQ ID NO: 219224 - DNA, 201 bp, Homo sapiens
cttcatccgggtgagggttggggtcacggaaggaggtggactgggagtggccaggggtgggccgcagaatctcagtcgtgaattcggccttcaccagggcrtggatggaagcctggcctacattgccacgcaaggacccttgcctcacaccctgctagacttctggagactggtctgggagtttggggtcaaggtcagcac

SEQ ID NO: 219225 - DNA, 201 bp, Homo sapiens
caccctgctagacttctggagactggtctgggagtttggggtcaaggtcagcacttgggggtgcggcacaatggtggggtcaacatctaagtaccccctcrgcagtttccctggccccctcacccaaatcaccttcctctcccctgaccctccttgtctaggtgatcctgatggcctgtcgagagatagagaatgggcggg

SEQ ID NO: 219226 - DNA, 201 bp, Homo sapiens
tgagtctgcatgtgtttaatctgatggctctgttggctggcgtctgttataggttataagtatagctgcctgtgcttccaccacgagcacctggggtgtcytgtggcatgattgagctagctctgaagctgactccctcttctcactccctgccttttctcccttaccttttgcagaaaaggtgtgagcggtactgggccc

SEQ ID NO: 219227 - DNA, 201 bp, Homo sapiens
aatgaccacccctcaaaccaacactctgccccaaattaccctccaggctgaccccgttcctccttcatccccctaacttgcagggcgctagggacacagargcgaggcctccaacccaaggagccctccctcccatctagcgcaccgcctcggcgggaaggaagcccgtggtttgcgcgctgagcagcctccccactcccg

SEQ ID NO: 219228 - DNA, 201 bp, Homo sapiens
aaagtcctgccggatctggcgcctacgaggacgtggcgggtggagctcagaccggtgggctaggtaagtcaggtagagcctgggttgctgggactttgctrctttgagtgaacccaggagtctggggttgatggggcatggagcttagtcctgtggatgtggctgcagtgaaccaggaggacctggaggcggggggatggc

SEQ ID NO: 219229 - DNA, 201 bp, Homo sapiens
ttcccttcttgatggtccctcaccccaacaggagcagtacaggttcctgtaccacacggtggctcagatgttctgctccacactccagaatgccagccccsactaccagaacatcaaagaggtacagaggctcctttcccactctcctgtccaccatcagcaccctcagagaccaggaccccgagcagggtccagcccccg

SEQ ID NO: 219230 - DNA, 201 bp, Homo sapiens; identical to SEQ ID NO: 39227

SEQ ID NO: 219231 - DNA, 201 bp, Homo sapiens
agtagatggccaattaatgcttttttcttttttttcctaagtcttttgctcatctttttctgtgtttcaggagtcccgttctgtgtaccagctacagtatrtgtcctggccagaccgtggggtccccagcagtcctgaccacatgctcgccatggtggaggaagcccgtcgcctccagggatctggccctgaacccctctg

SEQ ID NO: 219232 - DNA, 201 bp, Homo sapiens
ttcggcctctcgaagttctgggattatgtgagccaccatgcctggactattttatttattatttatttttttatttttttatttttttgagacggagtctygctctgttgcccaggctggagtgcagaggtgtgatctcagctcactgcaagctctgcctcccgggttcacgccattctcctgcctcagcctcccaagtag

SEQ ID NO: 219233 - DNA, 201 bp, Homo sapiens
cctttaaatttcacctacctatttttattttattttttatttttaaagaaccaacaccgagcagtagatcaagtaattaaagctgtaagaaaaatctgtartgctttagatggtgtcgagactcttgccattacagaatcagtaaagaagctaaagagagcagttaatcttccaaggagtaaaactgctgatgtgagtatt

SEQ ID NO: 219234 - DNA, 201 bp, Homo sapiens
cctctgtttcagttttccatctgtacaattgttatgatgatagtacctaagtcattgattgttgtgagattctaaatatgttaatgtatacacacacacayacatatacacacatacacagagaagtgcctggtttgtgctaaatgctatataaacatttgctgttatcatcattggtaatgatttctggggaattatgga

SEQ ID NO: 219235 - DNA, 201 bp, Homo sapiens; identical to SEQ ID NO: 39236

SEQ ID NO: 219236 - DNA, 201 bp, Homo sapiens
gaatagtgagtgaatgcaaaggcctaggacattactgtatactactgtagattttataaacactgtacatgtactatgctaaatttgtaaaaatatatatwtttttctttttaattaaaaaaaaaaatcttttttagacagtctcactctgttgatcaggctagtgcaatggtgtgatcacagcttactgtggcctggaag

SEQ ID NO: 219237 - DNA, 201 bp, Homo sapiens; identical to SEQ ID NO: 39237

SEQ ID NO: 219238 - DNA, 201 bp, Homo sapiens
tgaagcatggccgggcgcggtggctcacacctataatcccagcattttgggaggccaaggcgggcggatcacgaggtcaggagatggagaccatcctggcyaacacggtgaaccgtctcttctaaaaaatacaaaaaattagctgggcatggtggcaggcgcctgtagtcccagctacttgggaggctgaggcaggagaat

SEQ ID NO: 219239 - DNA, 201 bp, Homo sapiens
tttatgacatattgctgtacatatattaaatgctgtacatactatagcatgttattttactaaatactgtaggcaattgcaacaattgttaagtatttgcrtatctaaacatagaaaaggcacagtaaaaatatggtataaaagatttaaaaatgtacctgtgtagggcacttaagtatgagtgaagcttgcaggactgga

SEQ ID NO: 219240 - DNA, 201 bp, Homo sapiens
taaaaaggcagttcattttataggtgtgtgcaaccatgcccagctaatttttgtgtttttagtagaggcggggtttccaccatgttggccaggctgatctygaactcctgacctcaggtgttctgcccactttggcctcccaaagtgctgggattacagctttcatagtatgtaatctgttaagtcttttggagatgtaca

SEQ ID NO: 219241 - DNA, 201 bp, Homo sapiens
ctccactatcaaagtccacagtattttcatcacaccaaaaagaaagcatgtccccattttcccctcccagccactaaactgttttctgtcaatatggataygtctatacttctatatggatattctggacacttcatggacttttctgtctagtttctttcacttagcataaagttttcagagttcatctgtgttctagca

SEQ ID NO: 219242 - DNA, 201 bp, Homo sapiens
gcattttaggaggccaaggcaggaggatcacttgagtctaggagtttgagaccagcccaggcaacacagggagaccctgtctctacaaaaatgaataaatrgtctcagctgctctggaggatggggtgagaggattacttgagcctaggaggttaaggcttcagtgaaccatgatcatgctactgcactccaacccaggta

SEQ ID NO: 219243 - DNA, 201 bp, Homo sapiens
atttattgaactgttttgaaataatggatgtaaaacatcctaatatctgatatgtattatgtgctcaataaatggcagccatcattattcttattcaacaratgtttgttgtttaccatctataaaatggtaagaatatatggtactcatattttagaaggaagcaataatatgtacaagtaatcagagtatgctttaata

SEQ ID NO: 219244 - DNA, 201 bp, Homo sapiens
agtagtgctatcttggctcactgcaacctctgcctcctgggttcaagggattctcctgcctcagcctcctgagtagctgggattacaggtgcctaccaccrcgccccgctaatttttgtatttttagtagagacggggttttgccatgttggccaggctggtctcaaactcctgacctcaagtgatccacccacctcggcc

SEQ ID NO: 219245 - DNA, 201 bp, Homo sapiens
tagtagagacggggttttgccatgttggccaggctggtctcaaactcctgacctcaagtgatccacccacctcggcctcccagagtgctaggactgcaggygtgagtcactgcacccaggcagacttgaatttttttgaaggtaacaattgctagctggtttcctatgtcaaagattgaaaactataactttttaaaaggc

SEQ ID NO: 219246 - DNA, 201 bp, Homo sapiens
ccccagaaaaacagctgaagcacagggttacttttggacaatctgttaagtccttttattgccattttagtatacatgcatgataacctcttggaaaactwaaatatggtaacttagctggtagcaatcagctcacttttactacttagagttgaatttactttagcatatactactttgggtgttggtactagaaataga

SEQ ID NO: 219247 - DNA, 201 bp, Homo sapiens; identical to SEQ ID NO: 39240

SEQ ID NO: 219248 - DNA, 201 bp, Homo sapiens
tttgaaagcataatatacccttgttacttataattccttacttttcttttagtttttcatacttctccaaaactgtctttttaaaaaatcactaatattasgggaaatgtgaaaccctgccaatgagaaactctgctaatgggtgcagggtttctttatggggtgatgaaagtgttctgaaacttggtggtagtgatggtc

SEQ ID NO: 219249 - DNA, 201 bp, Homo sapiens
aggtgattctcccacctcagcctccctagtagctgggattacaggtgtgtgccaccacgcctggctaatttttgtatttttggtagagacagggtttcacyatgttggtcaggctggtttcgaactcctgacctcaagtgatccactcgccttggcctcccatagtgctggaattgggcgtgagccactgcgcctggcccc

SEQ ID NO: 219250 - DNA, 201 bp, Homo sapiens
tgggtgcccgcgtctgaccctccatcccgtgctcttggcgttgcccagcccgactcccccctccctccgggccttgcttccacccaggccgtgagcaagtsctgcgctggaggtgcgaggagcccgcgtccccaccaggcccctcttctcgggagcggaggtgcgccagggagttagttttgtcccacagaaggagggcag

SEQ ID NO: 219251 - DNA, 201 bp, Homo sapiens
gggtgcccgcgtctgaccctccatcccgtgctcttggcgttgcccagcccgactcccccctccctccgggccttgcttccacccaggccgtgagcaagtgstgcgctggaggtgcgaggagcccgcgtccccaccaggcccctcttctcgggagcggaggtgcgccagggagttagttttgtcccacagaaggagggcagg

SEQ ID NO: 219252 - DNA, 201 bp, Homo sapiens
gatagcttgatttgtgttttataggaacaggatatgattcaagctaactggaacatagaaatctttagggagattctgggaaataagattggattagattktggcagatttggagtgtgaaaccagaggatttgctaggaaatataaaatcccattctttagagtaatatagtctatttgtcatagtggttgcttctgtaa

SEQ ID NO: 219253 - DNA, 201 bp, Homo sapiens
ctgcgctggaggtgcgaggagcccgcgtccccaccaggcccctcttctcgggagcggaggtgcgccagggagttagttttgtcccacagaaggagggcagsccccccggccgccggcccccctcccccgccttgtcccgcgggaccgggctggagccgcagtggccggtcctattttcttggcagattgttagttctggcg

SEQ ID NO: 219254 - DNA, 201 bp, Homo sapiens
atataaaatcccattctttagagtaatatagtctatttgtcatagtggttgcttctgtaatacaaattgattgatatgtgattggtaactatgagactgargtcaatacaatggggaagtagcattagttcagacgtaatctttcccggcatattaactttttgaaataatcagaaacaaacttctcacaacctaagggaa

SEQ ID NO: 219255 - DNA, 201 bp, Homo sapiens
aagtagatcaaagttcagtaattatctccacaaagcagtactactgttgggattctgagttagattgaaaacttcttggtcagcaaaatgtctttcaatarggatctcttgctgtgactatatcccctttccttgtccccctcccacatacatacagtgatacacatatgcagacatagaaaattatcatggttagatacc

SEQ ID NO: 219256 - DNA, 201 bp, Homo sapiens
tccgcacagtatggactcactacctctctgatctggcttcttatcacttccctttgttttttttctggttgattatctgccagttatgttccccactgggracccctgtgcatgttgttcccctctaaatgcttttccctgtgacatttgcatggctcacccttacacttttttaaggtcagtgcccaaatatcaccagag

SEQ ID NO: 219257 - DNA, 201 bp, Homo sapiens
accacttgcagagtggctaaggaaatacaatccctctgaagaagaatatgaaaaggtaattagcatgtctcctcattctaaaaagctttgtcaaaaatgtrttacagaggttttaagttctttcattttccagctctggtgaccaaatagtcatttagtctaagtcaggaaaagagcatctttttctaagtataggaaaga

SEQ ID NO: 219258 - DNA, 201 bp, Homo sapiens
gtggattacaatagtgtttttaaagagtgataaattactttactatttataaactctgcctcttttaaaaataattcattttctaaaataattgtgtatgktttttataggcttcagagaactttatctattcctgtgctggatgctgtgtagccacctatgttttaggcatctgtgatcgacacaatgacaatataatgc

SEQ ID NO: 219259 - DNA, 201 bp, Homo sapiens
  misc_feature (1)...(201): n = A,T,C or G
cattgccacaaagtttaacttcttcattcacaaccttgctcagcttcgtttttctggtcttccttctaatgatgagcccatcctttcattttcacctaaancatactcctttagacaagatggtcgaatcaaggaagtctctgtttttacatatcataagaaatacaacccagataaacattatgtaagtttgatttcaat

SEQ ID NO: 219260 - DNA, 201 bp, Homo sapiens
gcgcaatctcgtctcctgaaacctgtgcctcccaggttcaagcaattctcatgcctcagctcctgaatggctagctgggactacaggcatgcgccagcacrcccggctaatttttgtatttttagtagagatggggtttcgccatgttgcccaggcacatggccaggcgaattcctggccccaagtaatccactcatttcg

SEQ ID NO: 219261 - DNA, 201 bp, Homo sapiens
ctctttctcagcctcccaagtagctgggattacaagcatgtgccaccacgcctggctgattttttatatttttagtagagatggggtttctccatgttggycaggctggtctcgaactcctgacctcaagtgatccacccgccttggcctcccaaagtgctgggattacaggtgtgagccactgtgcccggctattctaac

SEQ ID NO: 219262 - DNA, 201 bp, Homo sapiens
accacgcctggctgattttttatatttttagtagagatggggtttctccatgttggtcaggctggtctcgaactcctgacctcaagtgatccacccgcctyggcctcccaaagtgctgggattacaggtgtgagccactgtgcccggctattctaacttttgataatcatttccttcacagttttgccataatgtaagcat

SEQ ID NO: 219263 - DNA, 201 bp, Homo sapiens; identical to SEQ ID NO: 39233

SEQ ID NO: 219264 - DNA, 201 bp, Homo sapiens
gagtcttcagttttaatgtagctcaatgaccagtagatttcctgtgtcgagttttttcatattttcttcagactagatttcaaaagtgaggatgaggtgaagtgggtattagagtttgtttccgtgtacagtttcatttttccactgccaccaaaataagtggaattaagattatcctttcagcaccttacttaggcctta

SEQ ID NO: 219265 - DNA, 201 bp, Homo sapiens
caacttggaaatgtgactgcatacttaacgtaacaaaatttggagaaaagaattaaactttacaagttaaatttaatattatagaaatctaagagttagarttaatctttttttttttttcttcgagatggagtttcgttcttgttgcccaggctggagtgcaatgtcgcagtctcggctcactgcatcctctgcctcctg

SEQ ID NO: 219266 - DNA, 201 bp, Homo sapiens
tggagtctcactctgttgacgaggctggagtgcagtggcacgatcttggctcactgcaacctccacctgccgggttcaagtgactctcctgcctcagcctcccgaggagctgggactacaggcgtgtgccgctatgcccagctaatttttgtatttttagtagagacggggtttcaccatgttggttggccaggatggtct

SEQ ID NO: 219267 - DNA, 201 bp, Homo sapiens
gaggctggagtgcagtggcacgatcttggctcactgcaacctccacctgccgggttcaagtgactctcctgcctcagcctcccgaggagctgggactacargcgtgtgccgctatgcccagctaatttttgtatttttagtagagacggggtttcaccatgttggttggccaggatggtcttgagctcttggccttgtgat

SEQ ID NO: 219268 - DNA, 201 bp, Homo sapiens
ccgtcacccaggctggagtgcagtggcgtgatctcagctcactgaaacttttgccttctgggttcaagcaatcctcctgcctcagcctcccaagtagctgrgattacaggtgcacaccaccacacccacctaagttttgtattttggtagagacggggtttcaccatgttggtcaagctggtcttgaactcctgacctcaa

SEQ ID NO: 219269 - DNA, 201 bp, Homo sapiens
ccagtctcctgcctcagcctcccgagtagctgggactacaggcgcccgccaccacgcccagctaattttttatattattttagtagagacagggtttcacrgtgttagccaggatggtctcaatctcctgaccttgtgatctgcccgcctcggcctcccaaagtgctgggattacaggcgtgagccactgtaccctgccag

SEQ ID NO: 219270 - DNA, 201 bp, Homo sapiens
gctggaacatcaatttttttcctacctttggactaaaacagaagcattggcccttcctgcgttctgcaactgcaccattgctctcctttgtctccagcttrccagctgcagatctggagacttgtcagctcataattgcataagccattccatatatacgaaaataaagagatgtcccagttctgtgcctcacagatacag

SEQ ID NO: 219271 - DNA, 201 bp, Homo sapiens
cctttcccaaaatgccatataaattggcatcacacagtgtatatagccttttgagactggcttctttcatttagcataacacttttgagattcaataacatgtctcttttttattaataaacttttttagaaagtttatagaaaaatcatgaagttaccaatttacagaaaatttgtaattgtagtacagagaaatccctt

SEQ ID NO: 219272 - DNA, 201 bp, Homo sapiens
tgttttcccttggccagtgctttattcttgaggctccaatttacttaaattgaaagctactgatctagacccttgtagtaatgtgactccttggctgtctrtgctcgagatgctgtgatggttaattttatgtttcagcttgactaggccatgaggtgtccagatatctgatcagacattattctgggtatttctatgagc

SEQ ID NO: 219273 - DNA, 201 bp, Homo sapiens
ctttcccaaaatgccatataaattggcatcacacagtgtatatagccttttgagactggcttctttcatttagcataacacttttgagattcaataacatgtctcttttttattaataaacttttttagaaagtttatagaaaaatcatgaagttaccaatttacagaaaatttgtaattgtagtacagagaaatccctta

SEQ ID NO: 219274 - DNA, 201 bp, Homo sapiens
ttaaatgaatcttatatttagagatgtatactgtagaatttaaaatgtagtaaaatcaagtgaggtattggggtttggagggcttatagatgaaacaagaytggctatatgttgataattgttgaagccgatgatggatacctgggtgtttattctattatttactttgtgtatatttgaaaattttcatgataacaagtt

SEQ ID NO: 219275 - DNA, 201 bp, Homo sapiens
ggtcaaacctgcaaggttctagaattaagtttgttgaaaatgggaaacaatatgaagatttcgatcaagacgatgactttctaatgccttttttttttttgaaatgcagtctcgctctgtcgcccaggctggagtgcagtggcgcgatctcagctcactgcaacttcctcctcctgggttcaagcgattctcgtgcctcat

SEQ ID NO: 219276 - DNA, 201 bp, Homo sapiens; identical to SEQ ID NO: 39238

SEQ ID NO: 219277 - DNA, 201 bp, Homo sapiens
taaattttatgtgtttgtggtgtgatttcttttcagatttatgtagtccgaattttgagggaaggacagattgaaccatcatttgtcttccgaacatttgwcgaatttcaggaacttcacaataagctcagtattatttttccactttggaagttaccagggtatgtattcatccttgtacattaatcctttttgtaggaa

SEQ ID NO: 219278 - DNA, 201 bp, Homo sapiens
tattttttgtattttttaccatcccaaacaaactctgtagctgttaagcagtgactgttcattctcttctcaacccagcccctggtaaccactaatctacttttttttttttttttttgagatggaggctggaatgtagtggcacgatctcagctcactgcaacctctgcctcccaggttcaagcaattctgcctcagcct

SEQ ID NO: 219279 - DNA, 201 bp, Homo sapiens
agctgtgataaaaatgttttggttgatctaaaaagatgaattctgataagagctgcttagggaaggctaaagagaggagacagtatttgaattgggccctraaggacaagtagagtttttccaaggcagaatgtgtaaagaaaagattctgtaggtccctcattggagaagtttgacagtgaaaaaagaaaattaaaatgg

SEQ ID NO: 219280 - DNA, 201 bp, Homo sapiens
ataatcatttccttcacagttttgccataatgtaagcattcttaaataaaatagtttttcatgtttttgaactttatatgaatcaaatcgtgtgtgtgtgtttgtgtgtgtgtgtgtgtgtgtgtgtgtgtgtgtgtgtgtgtgtgtgtgtatatatatatatatttaaaaatgggatctcaccatgttgcccaggttggt

SEQ ID NO: 219281 - DNA, 201 bp, Homo sapiens; identical to SEQ ID NO: 39242

SEQ ID NO: 219282 - DNA, 201 bp, Homo sapiens
taatcatttccttcacagttttgccataatgtaagcattcttaaataaaatagtttttcatgtttttgaactttatatgaatcaaatcgtgtgtgtgtgtttgtgtgtgtgtgtgtgtgtgtgtgtgtgtgtgtgtgtgtgtgtgtgtgtatatatatatatatttaaaaatgggatctcaccatgttgcccaggttggtg

SEQ ID NO: 219283 - DNA, 201 bp, Homo sapiens
atagtttttcatgtttttgaactttatatgaatcaaatcgtgtgtgtgtgtttgtgtgtgtgtgtgtgtgtgtgtgtgtgtgtgtgtgtgtgtgtgtgtgtatatatatatatatttaaaaatgggatctcaccatgttgcccaggttggtgttgaactcctgggctcaagggatcttcctaccacagcttcccaagtagc

SEQ ID NO: 219284 - DNA, 201 bp, Homo sapiens
tagtttttcatgtttttgaactttatatgaatcaaatcgtgtgtgtgtgtttgtgtgtgtgtgtgtgtgtgtgtgtgtgtgtgtgtgtgtgtgtgtgtgtrtatatatatatatttaaaaatgggatctcaccatgttgcccaggttggtgttgaactcctgggctcaagggatcttcctaccacagcttcccaagtagct

SEQ ID NO: 219285 - DNA, 201 bp, Homo sapiens
tcgaactcctgacctcaggtgatccacctgtctcagtctcccaaaatgctgggattacaggtgtgagccactgcgcctagcctttttttttttgttttttkttgttgttgttgttgttgttttgttttctagtagttctttttaatgtattagaaagattagctctttgtgataggaatagcaaaaattttttcttggttt

SEQ ID NO: 219286 - DNA, 201 bp, Homo sapiens
aaaggattgcttgagcccaggagttctaggttacggtgagctatgatcgagccgctgcacttcagcctgcgcaacagagctagaccctgtcttcaaaatarataaataggccaggtgcggtggctcacacctgtaatcccagcattttgggaggctgagatgggcggattacctgaggtcaggagtttgagaccagcctga

SEQ ID NO: 219287 - DNA, 201 bp, Homo sapiens
acctgtaatcccagcactttgggaagctgaggcgggtggatcacctgaggtcaggggtttgagaccagcctggccaacatggtgaaaccccatctctactaaaaaaaaaacaaaaatgagccgggcatggtggtgggcacctgtaatcctagctactcaggaggctgaggcaggagaattccctgaatccgggaggcagag

SEQ ID NO: 219288 - DNA, 201 bp, Homo sapiens
cctgtaatcccagcactttgggaagctgaggcgggtggatcacctgaggtcaggggtttgagaccagcctggccaacatggtgaaaccccatctctactaaaaaaaaaacaaaaatgagccgggcatggtggtgggcacctgtaatcctagctactcaggaggctgaggcaggagaattccctgaatccgggaggcagagg

SEQ ID NO: 219289 - DNA, 201 bp, Homo sapiens
ccagcactttgggaagctgaggcgggtggatcacctgaggtcaggggtttgagaccagcctggccaacatggtgaaaccccatctctactaaaaaaaaaacaaaaatgagccgggcatggtggtgggcacctgtaatcctagctactcaggaggctgaggcaggagaattccctgaatccgggaggcagaggttgtggtga

SEQ ID NO: 219290 - DNA, 201 bp, Homo sapiens
gcaggagaattccctgaatccgggaggcagaggttgtggtgaaccgagatcgcaccattgcactctagcctgggcgacagagtgagactctgtcccccacaaaaaaaaaaaaatcagttccatggaagtaccctaatttattttcctttaaggtttatattcatttggggggacaaatatctgtattgttcaactcaaata

SEQ ID NO: 219291 - DNA, 201 bp, Homo sapiens
ttttgagacagagtctcgctctgttgccaggctggagcgcagtggtgcgatctcggctcactgcagcctccgccttctgatttcaagcaattctcctgccrcagcctcccgagtagctgggactacagacgcgcgccatcatgccccgctaatttttatatttttagtagagatggggtttcaccatgttggccaggttgg

SEQ ID NO: 219292 - DNA, 201 bp, Homo sapiens
gaaatgtgactgcatacttaacgtaacaaaatttggagaaaagaattaaactttacaagttaaatttaatattatagaaatctaagagttagaattaatctttttttttttttcttcgagatggagtttcgttcttgttgcccaggctggagtgcaatgtcgcagtctcggctcactgcatcctctgcctcctgggttcaa

SEQ ID NO: 219293 - DNA, 201 bp, Homo sapiens; identical to SEQ ID NO: 39235

SEQ ID NO: 219294 - DNA, 201 bp, Homo sapiens; identical to SEQ ID NO: 39241

SEQ ID NO: 219295 - DNA, 201 bp, Homo sapiens; identical to SEQ ID NO: 39243

SEQ ID NO: 219296 - DNA, 201 bp, Homo sapiens
acttcgtgatgagaaagctgaagggatagctaggtctgcaggtgagattattttttttctctttattggtaactcatgatctgcaagtctgtaacttctcratgaatgtggtagaatgacagcaggcttactagctgtagtctgagaatgggaggagagtattctttctaagccagtctatttctgaataaatataacttt

SEQ ID NO: 219297 - DNA, 201 bp, Homo sapiens
cagggttcaagggattcttctgcctcagccttctgagtagctgggattacaggcctggcgtgccaccacacccagctaaattctgtatttttagtagagayggggtttcaccatgttggccaggctggtcttgaactcctgacctcaggtgatccacttgcctcagcctcccaaagtgctgggattacaggtgtgagccac

SEQ ID NO: 219298 - DNA, 201 bp, Homo sapiens
tcagccttctgagtagctgggattacaggcctggcgtgccaccacacccagctaaattctgtatttttagtagagatggggtttcaccatgttggccaggmtggtcttgaactcctgacctcaggtgatccacttgcctcagcctcccaaagtgctgggattacaggtgtgagccactgcgtggctgctgttttgttttaa

SEQ ID NO: 219299 - DNA, 201 bp, Homo sapiens
tctgtttttacatatcataagaaatacaacccagataaacattatgtaagtttgatttcaatattcataaacaatcatgcatgtattattgttgtcctttstacttcctttgctgattctgctaaagttgcaagcatttgttctattcatgcttgtttctttcatgaatggtccataaataagtaaatgtacttgaagcat

SEQ ID NO: 219300 - DNA, 201 bp, Homo sapiens
accacacccagctaaattctgtatttttagtagagatggggtttcaccatgttggccaggctggtcttgaactcctgacctcaggtgatccacttgcctcrgcctcccaaagtgctgggattacaggtgtgagccactgcgtggctgctgttttgttttaatacatctaattttgtgaaaaataggcagtatactttggtg

SEQ ID NO: 219301 - DNA, 201 bp, Homo sapiens
tagtagagatggggtttcaccatgttggccaggctggtcttgaactcctgacctcaggtgatccacttgcctcagcctcccaaagtgctgggattacaggygtgagccactgcgtggctgctgttttgttttaatacatctaattttgtgaaaaataggcagtatactttggtgttccacaataggtgattacacttgatt

SEQ ID NO: 219302 - DNA, 201 bp, Homo sapiens
cacttgaggtcaggagttcaagaccagcctggccaacatggcaaaacgctattagtctctactaaactttttggtctctactaaaaatacaaaaattagcygggtgtggtggcgagcgcctgtaatcccagctactcgggaggctgaggcaggagaatcgcttgaacccaggaggcagaggttgcagtgagccgagactgt

SEQ ID NO: 219303 - DNA, 201 bp, Homo sapiens
acaagttggaggtcaaggagagggctgcagaactctttgcaagcagcaaagttctgacattcaaacccatctgactctaaaagccctcccttttttttttytttttttttttcacttttttgagacagtttctctcttgttgcccaggctggagtgcaattgcgtgatctcagctcaccgcaacctctgcctgctgggttc

SEQ ID NO: 219304 - DNA, 201 bp, Homo sapiens
tctgagtttctttatctatgaaataaagttggctagactagatcctttcataaataatagttaaaatttgggaagttgccatgtggaagaggaagtggacttttttttttttttttaaggttttgtattttggacatacattttcaaaccaattcaggaagtagaatacctgaaagtcatggtgctcttataaaacaggat

SEQ ID NO: 219305 - DNA, 201 bp, Homo sapiens
caacaccattttccccaagataatgtcctttaattctccctctctttgttcccaccctacatttcaatacatttaccctacacctgaaaagtttcagtacratgtggagagtgaatccttctgatatgttcttaaagatatcctttttatttagttgatctcatactaacttttcaaattcattacatgtgttgtaaattt

SEQ ID NO: 219306 - DNA, 201 bp, Homo sapiens
cattgcatagaaaaacttaaaattaaacaagtcctatttgtttgtttgtttttgtttgtttttttgaaacagggtctcgctctgtcacccaggctctggartgcagtggcgtgatctcggcacactgcaacctccacctcccaggttcaagtgattctcctggctcagcttcccgagtagctgggactacaggtgcatgcc

SEQ ID NO: 219307 - DNA, 201 bp, Homo sapiens
atgccaccatgccctgctaatttttgtatttttagtagagttggggttacaccatgttgactaggctggtctcgagctcctgacctcaagtgatccacccrcctcagtccccccaagtgctgggattataggcgtggccaccgtgcctggccaaacaagtcctatttgtttatatatttttttctgtgaattgagaattca

SEQ ID NO: 219308 - DNA, 201 bp, Homo sapiens
tttgttcctgtcttccccaaagttattactgtttgtttgtttgttttgttttggtttggttttgttaaggcagggtcttgctctgtcatccaggctagagttgtaatggtgcaacctcggctaactgcaacctctgtctcctgggttcgagccatcctcctgcctcaacctcctgagtagctgggactacaggggcatgcc

SEQ ID NO: 219309 - DNA, 201 bp, Homo sapiens
tctgccagtaatcccagtgctttgggaggctcaggtgagaggattgctttgagccaggagtttgagaccagcctgggcaacacggtgagaccctgtctctrtaaaaaatttaaaaattagttggatgtagtagtacatgcctgtagtcccagctgctcaagagtttaaggcaaaaggattgcttgagcccaggagttctag

SEQ ID NO: 219310 - DNA, 201 bp, Homo sapiens
taatctttttgtaacttatcctatgtggttgattgtgaacacatttctctctaaaatgttaagttttctaaatctagaatattaaggtaattagaaagtaygtactttaaaaattaaaaagttataaaggataagacctcatttaaaggctgtaggttggccaggtacaatggtttctgccagtaatcccagtgctttggg

SEQ ID NO: 219311 - DNA, 201 bp, Homo sapiens
ctgggttggtgaacacatagaggtgccgggagatagtgtccagaaagggtatggaagttctgtcccgccacctctaataccttgccctatgcatctcttcyctttggctgttcctgagttgtatcctttataataagtcagtaataagtaaactcttccatttggctgttcctgagttgtatcctttataataagtcagta

SEQ ID NO: 219312 - DNA, 201 bp, Homo sapiens
tgcagcaatttatgatcttctcagactccatgcaaattctggtaggagtcctacagactgtgcccaaagtagcaagagtgtcaaggaagcatggactacarcagagcagctccagtttactatttttgctgctcatggaatttcaagtaattgggtatcaaagtaagtaactgtttaagcagccaggcatggtggcttgca

SEQ ID NO: 219313 - DNA, 201 bp, Homo sapiens
aaagttgatttactaataaatacaaaggatttgcaataatattttttaaaatatacttatttgcctcaaaatatctcaaggtttatttaatatgtaatttsaatgataaaaacatatttttctacagtgccatgtgccattttaaaatcttttttaattttttattttgagactgagtcttgctgtttcatccaggctaga

SEQ ID NO: 219314 - DNA, 201 bp, Homo sapiens
ttctgattcatagtaattgcacatagtaggctgtcaaaagttgatttactaataaatacaaaggatttgcaataatattttttaaaatatacttatttgcytcaaaatatctcaaggtttatttaatatgtaatttcaatgataaaaacatatttttctacagtgccatgtgccattttaaaatcttttttaattttttat

SEQ ID NO: 219315 - DNA, 201 bp, Homo sapiens
aattctgattcatagtaattgcacatagtaggctgtcaaaagttgatttactaataaatacaaaggatttgcaataatattttttaaaatatacttatttkcctcaaaatatctcaaggtttatttaatatgtaatttcaatgataaaaacatatttttctacagtgccatgtgccattttaaaatcttttttaatttttt

SEQ ID NO: 219316 - DNA, 201 bp, Homo sapiens
gtgattttacgtaggtagaaagcacatatggagtttcttccataaattccgtaattttggctgaattaatacattctaaagtaggttttttcttatcaaartgtcttgctatttgtgttttatatgcgtgtttcctgcagttttctttgcaaataacatgttttaatgttttcatcacaggttttacaatttttttctgtt

SEQ ID NO: 219317 - DNA, 201 bp, Homo sapiens
ctgaggtcaatacaatggggaagtagcattagttcagacgtaatctttcccggcatattaactttttgaaataatcagaaacaaacttctcacaacctaarggaaagctttagcactatatgaagatattaggaaaacactgagaatcctgcagaagtgtcctcttattaatgaaaatgagtggcttcaagaacagtttca

SEQ ID NO: 219318 - DNA, 201 bp, Homo sapiens
ttcttccataaattccgtaattttggctgaattaatacattctaaagtaggttttttcttatcaaagtgtcttgctatttgtgttttatatgcgtgtttcytgcagttttctttgcaaataacatgttttaatgttttcatcacaggttttacaatttttttctgtttgaatctcgctctgtcgcctaggctggagtgcag

SEQ ID NO: 219319 - DNA, 201 bp, Homo sapiens
tatttcttttctgtagttcctgttactatgctgaaatgtcccatcacttcatacatattgtctatcttttctactagatcatttaatatttttatcataatttttttttttttttgagacagagtcttgctctgtcgcccaggctggatggagtgcagtggcgcaatctcggctcactgcaacctctgcctcctgggttca

SEQ ID NO: 219320 - DNA, 201 bp, Homo sapiens
ccaagcatgtgcttgggtagtgttgataatgttaccaaagatatcctggcagtagttcatctcttccttttccttgggtttcttttatttaaaaggaaaawgctggtatttggagtttcaacaggagctcattcattgcagtttcatgagctgcttgagttggacaaagacacagaactgagtggctgtaaacatgtaaag

SEQ ID NO: 219321 - DNA, 201 bp, Homo sapiens
gactacaagcacgtgccatcacgcctggctaatttttgtgttttttgtagaggaggggttttgccacattgtccaggctggtcttgaacccctgggcccamcttggcctcctaaagcgctgagattacaggcataagccaccacgtccaccccagtattcttttcttttcttccttctttcttttttttttttttttctgg

SEQ ID NO: 219322 - DNA, 201 bp, Homo sapiens
ggcctgagccaccacgcccagcctaaacttactatttaataataattccaacatttggggcatctttgagtttgcttattttgactatttcctttactttkacttaccattggtcacattttcttgcttctttttatgtctcataatcttttattttataccagacatcttttttttttttttttttttttttgagacaga

SEQ ID NO: 219323 - DNA, 201 bp, Homo sapiens
ttatttttattttttagatagaatatcgctctgtaacccaggctggagtgcagtggcacgatcttggctcactgcaacctccgcctcacaggttcaagcgrttttcctgtctcagcttcctgagtagctgggattacaggcgtctgccaccacatctggctaatttttgggtttttagtagagacgggatttcaccatgtt

SEQ ID NO: 219324 - DNA, 201 bp, Homo sapiens
acgcccagcctaaacttactatttaataataattccaacatttggggcatctttgagtttgcttattttgactatttcctttacttttacttaccattggkcacattttcttgcttctttttatgtctcataatcttttattttataccagacatcttttttttttttttttttttttttgagacagagcctcactctgtg

SEQ ID NO: 219325 - DNA, 201 bp, Homo sapiens
gtgcccggcttgaatcgcctagtttcatctgactagatctcataatgacatttatcaggctagaattctgtgtgtattgaaatgtatgacatgatactacmattgttaaggattctttttgaaaagtcatacttattaaggtataatttacacttagtaaaattcatctgttttaggtgtaaagttctgtatagttctgct

SEQ ID NO: 219326 - DNA, 201 bp, Homo sapiens
agtttgcttattttgactatttcctttacttttacttaccattggtcacattttcttgcttctttttatgtctcataatcttttattttataccagacatyttttttttttttttttttttttttgagacagagcctcactctgtgacccaggctggagtgcagtggctcaatttcagctcactttttagtttttcatact

SEQ ID NO: 219327 - DNA, 201 bp, Homo sapiens
gtaataatagaataattataacagtatactttcataaaagttgtttaagacttatgaattgttgatatctggaattttctatttaatatttttggaccacytttgactgtgggtgactgaaaccttggaaagagaaactgtggataagggggaactactgcattcattttttaatgttttacttgtattttaaaatgcagt

SEQ ID NO: 219328 - DNA, 201 bp, Homo sapiens
gcactgttactttatgcacagtagtcagctgtgatttccttttagttgcctgaaataatcattatatgaatctttttcttacccaggtatttattatatcttttttttttttttttgagacggagtttcactcgttacccaggctggagtgcagtggcacagtcttggctcaccacaacctccacctcccgggttcaagcg

SEQ ID NO: 219329 - DNA, 201 bp, Homo sapiens
gttgtgaatcacttatgtgtagaatgttgctcctaagggctgaagactactagtcttcaggaataatgactactagtggatattaagctatggtgcaaccrttgccttttgtcaaaatagaattaaggcctttattaatgtgcttatagtagttgtgcagtggataatcgttttaatagagtaatatggaggctaaagaat

SEQ ID NO: 219330 - DNA, 201 bp, Homo sapiens
ggtgtgttggccaggctggtctcgaactcctggcctcaaatgattcacctaccttggtctcccaaagtgctgggattacaggcgtgagccaccgcgccctktcaggaatgatgttcttgactacatttgcgtaatgtagacttagggtagaagagcgagtaccttgttcatgatggggagtgggaggaaaattgattatca

SEQ ID NO: 219331 - DNA, 201 bp, Homo sapiens
aatatcttactatagtagtttccccaccttttccttagtaggatatgttccaagatccccagtggatgcctaaaacttcggatagtaccaaaccctatgtrtacagtcatgtgttgcttaatggctgggatatgttctaagaaatgcatcagtaggcaattttgtcattgtgtgaatgtcatagcaagaacttaaatcttg

SEQ ID NO: 219332 - DNA, 201 bp, Homo sapiens
ttcgaactcctgacctcaagtgatccactcgccttggcctcccatagtgctggaattgggcgtgagccactgcgcctggccccatacccttttttttttgttttttttttttaacatattctttcttgtcatttacatttgtgctccaacactagagttgagtagttggaacagagattgtgtatcctgaaaacctaagct

SEQ ID NO: 219333 - DNA, 201 bp, Homo sapiens
tagaaataagtaaatttactacctatgcatacaatgatgagagtgtataatcatttctctcactgattgtaatatcttactatagtagtttccccaccttwtccttagtaggatatgttccaagatccccagtggatgcctaaaacttcggatagtaccaaaccctatgtgtacagtcatgtgttgcttaatggctgggat

SEQ ID NO: 219334 - DNA, 201 bp, Homo sapiens
gccagagactgtatggcccacaaagcctaaaatatttactaactggccttttaaaggaaaagtttgccaaccctactctaaggggtccagcgataggaggygcataaaagcagctgtcacctctaggctgaggaaaaaaggacagtaaaacactctgaggactgtgataaagtctctccccgaaccttagactgaaattta

SEQ ID NO: 219335 - DNA, 201 bp, Homo sapiens
actctgttccttgtatttatttgataccagtcttcatgtgctaatcgctctcatgatttttttcttgtttcttttttatcttcactctacacattctcccrgggcaatctcaactacttccatgactttaggtcttcagctgtacacttagataacgcctaaagatttatctctagccaaattgctctgttgagcccaaag

SEQ ID NO: 219336 - DNA, 201 bp, Homo sapiens
tacttataattccttacttttcttttagtttttcatacttctccaaaactgtctttttaaaaaatcactaatattaggggaaatgtgaaaccctgccaatkagaaactctgctaatgggtgcagggtttctttatggggtgatgaaagtgttctgaaacttggtggtagtgatggtcacacacctctgaatatactaaaaa

SEQ ID NO: 219337 - DNA, 201 bp, Homo sapiens
ctggtttgtttcttcttatccccatctacagtacgttttctcctgatgctgctgcaccagggaagagagtagtgttgggcctctctctctattaaagggcyatcactttctgaaatttaattcattaggtgtttgtgtgttctctgttctgtgacatttctttttctttttttttgagacagggtctcactctgtcaccca

SEQ ID NO: 219338 - DNA, 201 bp, Homo sapiens
gagatctctgcagcaaaggagatctctgccttgctgctcttacccttgcctcaggagggcagctgttttacattctgtgaaggcctggaatgccgtggagrgctttttctcagctcttgcctccacagcctttggtagccaaaagcttggattacctcagatggatttctgtctgccacttgccaatcctcctttggaaga

SEQ ID NO: 219339 - DNA, 201 bp, Homo sapiens
gaggttctctttgttctttaattgtgcttcttgcctttctgtgtctcaggagatctctgcagcaaaggagatctctgccttgctgctcttacccttgcctyaggagggcagctgttttacattctgtgaaggcctggaatgccgtggagagctttttctcagctcttgcctccacagcctttggtagccaaaagcttggat

SEQ ID NO: 219340 - DNA, 201 bp, Homo sapiens
atttggggcatctttgagtttgcttattttgactatttcctttacttttacttaccattggtcacattttcttgcttctttttatgtctcataatcttttwttttataccagacatcttttttttttttttttttttttttgagacagagcctcactctgtgacccaggctggagtgcagtggctcaatttcagctcactt

SEQ ID NO: 219341 - DNA, 201 bp, Homo sapiens
ttgatggatggatcgatggatggatggatgacagggtgtcactctgtcacccaagctggagtgcagtggtgtgatcacagatcactgcagctgcaaccccytgcagatttctctgtgttgtctgggctggtcttgaactcctgggctcaaacaatcatcttgcttcggcctcccaaagtgttaagattacaggtgtgagcc

SEQ ID NO: 219342 - DNA, 201 bp, Homo sapiens
tgccagataaaagtagtttaggctttgcagaccatatagactctgtcacaaatgcaaaagcagtcgtagacagtacattaacaaatgagcatggctatgtstggtaaaagtttatttacaaagccaggtgtgaaggccagtttgtttacatgtggctataaataaactctgtaaaggcaggttggagtttgctgaccctga

SEQ ID NO: 219343 - DNA, 201 bp, Homo sapiens
aaaagtttatttacaaagccaggtgtgaaggccagtttgtttacatgtggctataaataaactctgtaaaggcaggttggagtttgctgaccctgaattaraagatgcttaaaaagacatccaaatgtattgtgccactgcacttcagcctgggcgacagaacaagactccgtctcaaaaaaaaaaaaaaaagacatccaa

SEQ ID NO: 219344 - DNA, 201 bp, Homo sapiens
agactgccaagtagtgcaggcgatcttggtaatgttaggacttcacgttcaaggaatactcagaaattaagagggaagatgattaagagagatgattattrttattacactttgtttctctacattagtacatgtagagaaacagtatataatatagttgagttaaccactgtgttataatgattagtaatcctagtcttg

SEQ ID NO: 219345 - DNA, 201 bp, Homo sapiens
ttctgacttatgtcttaagatctctcttctagatatgattttatagaacagactgaaattctcattaaaaaatattaaataccgaccgggcgcagtggctyacacctgtaatcccagcactttgggaggccaaggcgggcggatcatgaggtcaggagatcgagaccatcctggttaacacggtgaaaccccgtctctact

SEQ ID NO: 219346 - DNA, 201 bp, Homo sapiens
gaaattcattaacttctgacttatgtcttaagatctctcttctagatatgattttatagaacagactgaaattctcattaaaaaatattaaataccgacckggcgcagtggcttacacctgtaatcccagcactttgggaggccaaggcgggcggatcatgaggtcaggagatcgagaccatcctggttaacacggtgaaa

SEQ ID NO: 219347 - DNA, 201 bp, Homo sapiens
aattgcaaggataaaagaaggggtgcatctcaaaggccatgataaatataaaggatagaaaagttacgttgatggtgtgcccctcgatatctagaagatarcatagtccatgcattctcagaaagatcctatccatgtggtatgtagagatgtgggtttctttttttctacttttttatgtgcttctttttagaaacttat

SEQ ID NO: 219348 - DNA, 201 bp, Homo sapiens
ggaggctgaggcaggagaatcacttgaacccaggaggttgcagtgagccaagatcccaccactgcactccagcctgggcagcagaatgagagtccgtctcaaaaaaaaaaaaaaaaaaggcaaagtaatatgaagtaatataggagaatggcatgaccttcaaaactggaaagatttttgcatgaatgtgaagtaaaagga

SEQ ID NO: 219349 - DNA, 201 bp, Homo sapiens
ccaccatgcctggctaatttttttgtatttttagtagaaaaggggttttgccatgttggccaggctagtcttgaattcctgacctcaggtgatccgcccaycttggcctcccaaagtgctgggattacaggtgtgagccactgtgcccggcctaaaatagtgtttttaaactaagggaactctcattatttaggcagatag

SEQ ID NO: 219350 - DNA, 201 bp, Homo sapiens
ttcaaatggcttcccaaatttagttatatgtcacagtatcctagagagtttaggcctactcagtcctgatttggaggaaggggtgtcaaaggacagtatgraatttcagggggaagataaccagttttttcaaaactttcccccttggacctccatttgggacctcttgactaggttattttaaagtttattcatactcag

SEQ ID NO: 219351 - DNA, 201 bp, Homo sapiens
gtgatctcagctcaccgcaacctctgcctgctgggttcaagcgattctattgcctcagcctcccgagtagctgggattacagtcatgcaccaccacgaccrgctaattttgtatttttagtagagacgcggtttctccatgttggtcagattggtctcaaactcccgacctcaggtgatctgcctgcctcagccttccaac

SEQ ID NO: 219352 - DNA, 201 bp, Homo sapiens
ttggagtttgctgaccctgaattaaaagatgcttaaaaagacatccaaatgtattgtgccactgcacttcagcctgggcgacagaacaagactccgtctcaaaaaaaaaaaaaaaagacatccaaatgcaagtgttaggccttgcttggatcttgttttaagcaaaccaactgtttttaaaaaacatcatttatgggacaa

SEQ ID NO: 219353 - DNA, 201 bp, Homo sapiens
tgaggtgggaggattgctcgagcctgggaggtggaggttgcagtgaggcaaggtcatgccactggactccagcctgggcaacagagccagacctggtctcaaaaaaaaaaaaagaaaaaaaaattgaacttgttatttttcagagaggttcacctagttcttagaagtgactaacatggccgggcatggtggctcacgcct

SEQ ID NO: 219354 - DNA, 201 bp, Homo sapiens
tctgttaaaaatttttaaataaaaaagttgaccacatatatgggtttttttctagactctcaattctatatcatatatgtctatccatatgctatatttgtttttttttttttttcctttttttccttgagatgaggtctctctgttgcccaggctggagtgcagtggtgtgatcacaattcaccacagcctcagcctcct

SEQ ID NO: 219355 - DNA, 201 bp, Homo sapiens
gagaccaggaggttgagactgctgtgacccatgattgtaccactgtactccagcctgggcgacagagcaagactctatctcaaaaaaaaaggggcagttgrggggaaggcactggtccccctaattttcccatcctgcagggcccaggtcactgctggattcatattcgggtcaatttctaataggcagatgactccccag

SEQ ID NO: 219356 - DNA, 201 bp, Homo sapiens
gtcttgaactcctgacctcgtgattcgcccacctcggcctcccaaaatgctgagattacaggcatgagccaccatgcctggcctttttttttttttttttkgagatggagtcttgctctgtcactcaggctggaatgcaatggtgcaatctcggctcattgcgacctccgcctcccaggttcaagtgattctcctgcctca

SEQ ID NO: 219357 - DNA, 201 bp, Homo sapiens
ctgttatcttccagagagtctagaaaagcaattctaaattagccgggtgtggtggcgggtgcctgtaatcccagctactcgggaggctgaggcaggagaaytgcttgaacccaggaggcagagattgcagtgagctgagattgcaccattgcagtccagcctgggcaacaagagcaaaactctatctcaaaaaaataaata

SEQ ID NO: 219358 - DNA, 201 bp, Homo sapiens
accctaagccatggctcctgaagcacctagaaccggaagctatattcagcaatttttaagttgaatttctgttaatacctttagatttaagaatatttttyaaatataaaacttagtgggataacaaagccgatttctaaggaaatattcttcagggaatttcagtttctaactgcggcggaaaaatctcttatttcagga

SEQ ID NO: 219359 - DNA, 201 bp, Homo sapiens
gattctccatgttgcctttttagaaaattgaatataggccacatatggtggctcatgcctgtaatcccagcactttgggaggctgaggcaggcagatcacmtgaggtcagaagttcgagaccagcctggccaacgtggtgaaaccccatctctactaaaaatacaaaaattagccaggtgtggtggcaggcacctataatc

SEQ ID NO: 219360 - DNA, 201 bp, Homo sapiens
actgctaaaatgaaagcgtctaaagttcatttactgtgccagctttccagttgtgtcaggaaatggggttaaagtaatgtgtatctgaacatcttctgtarcccaacagtgtataaggtgttaagtgttccttcacccagattttatctgttttattttgtttattttgtagtatatttttctaagtggcttaaagtccaa

SEQ ID NO: 219361 - DNA, 201 bp, Homo sapiens
gacatattgctgtacatatattaaatgctgtacatactatagcatgttattttactaaatactgtaggcaattgcaacaattgttaagtatttgcgtatcwaaacatagaaaaggcacagtaaaaatatggtataaaagatttaaaaatgtacctgtgtagggcacttaagtatgagtgaagcttgcaggactggaaattg

SEQ ID NO: 219362 - DNA, 201 bp, Homo sapiens
ggctggtctcaagctcctgggcttaaggatcctctcctcttggccacccaaagtgctgggattataagcatgagacaccatccccagccatttttctttcyttagtaataaattaaccttagcttactgtaacctttttactttataaactttttaattttttttaacttctgacgcttttgtaataacatataagaacat

SEQ ID NO: 219363 - DNA, 201 bp, Homo sapiens
ttagttgcctgaaataatcattatatgaatctttttcttacccaggtatttattatatcttttttttttttttttgagacggagtttcactcgttacccargctggagtgcagtggcacagtcttggctcaccacaacctccacctcccgggttcaagcgattctcctgcctcagcctcctgagtagctgggattacaggc

SEQ ID NO: 219364 - DNA, 201 bp, Homo sapiens
actgaattatccttcattttcctaactaagcatcttttatcaagacataatcattcctttcagttcccggattagcattaattactggcatttgccatacrttgcatttttctattccaaattagtattaatgattttatgaagaagtagctgtcccaaataaataaatttcttctttgtatttttaatcattgagattat

SEQ ID NO: 219365 - DNA, 201 bp, Homo sapiens
agcccaatatggcgaaagccggtctctactaaaattacaaaaattagccgggcatggtggcacatgcttgtaatcccaccttctcgggaggctgaggcagsagaatcatttgaacccaggaggcgaaggttgcagtgagctgagatcatgccactgcactccagcctgggtgacagagtgagattccacctcaaaaaaaaa

SEQ ID NO: 219366 - DNA, 201 bp, Homo sapiens
attgactctgaaatttatatgtctaaccttaaccttttccacatctccagactcaaatatctattacttgacatctttatgtgaatatctaattaattgayatctcaaatttaagatgtacaaaactgaattttttatagtacccatcatatctattcatccatcgacctttcctttctctttttaagagtttattttttg

SEQ ID NO: 219367 - DNA, 201 bp, Homo sapiens
ttctttttttttttcttttggagacagagtttccctctgtcatccaggctggagtgcaatgatgtgatcttagctcactgcaacctctgccacccaccctsaagcgattctcatgcctcagcctctggaatagctggaactgcgggcatgcaccaacccacccagctaatttttttttttttgtatttttagtagagacgg

SEQ ID NO: 219368 - DNA, 201 bp, Homo sapiens
atacagtaaagtgtgtatattttaaatatacattgtgcccatgctttgtagtctaccacagaagggaaaatagttgtatgaaggaattgcaaaataatacwctaagaacattccaaggacattctttgaattcctctttcttcatgacctccttagtaaaaatttttttttttgtttagtattacctcaacacttaggatt

SEQ ID NO: 219369 - DNA, 201 bp, Homo sapiens
ctcatatttgtatcacctagattctactattaacatttttctatacctgtctaatcacatatttatccatctatcctgctatccattagtttaccttttawaaaaaatgcatttcaaagtaaattgtaagagccaggcacagtggatcatgcctgtaatcccagctgaggcaggaggcttgcttgaggccaggagttcaag

SEQ ID NO: 219370 - DNA, 201 bp, Homo sapiens
tggtggaagttaaaacagaagtttgttgctaaatagtaaaaatggcttgcgctttgttttctaaaactaataagaaaaagtttatcagttatctattgctrtgtaacagaatcattccaaaatgattctgtgggttatcaatttggctttagctcagcttggtgatttcttctgctggtctcaccttcagtcactcatgga

SEQ ID NO: 219371 - DNA, 201 bp, Homo sapiens
ttaaaacacatgttcagccaggtgaggtggttcacgcctgtaatcccagcactttgggaggccgaggcaggtggatcacttgaggtcaggagttcaagacyagcctggccaacatggcaaaacgctattagtctctactaaactttttggtctctactaaaaatacaaaaattagccgggtgtggtggcgagcgcctgtaa

SEQ ID NO: 219372 - DNA, 201 bp, Homo sapiens
tgtccaatagccctcactccctcttgttaaaacacatgttcagccaggtgaggtggttcacgcctgtaatcccagcactttgggaggccgaggcaggtggrtcacttgaggtcaggagttcaagaccagcctggccaacatggcaaaacgctattagtctctactaaactttttggtctctactaaaaatacaaaaattag

SEQ ID NO: 219373 - DNA, 201 bp, Homo sapiens
tcctcaggtgatccacctgccttggcctcccaaagtgctgggattacaggcatgagccatcgctactggcctcattctgtttcttttggacagcgtcgctstaaccgaatcacatcaaatacctggacattcttttatttttgtctttgtgacaaatttttatagttcctaacaccagagtacttggtttctttcatcaga

SEQ ID NO: 219374 - DNA, 201 bp, Homo sapiens
gtcactgcacccagccaagagtagattattctttatggttaagtaacgcacagaaaagtgcacaaatcatatatgattatttaacaaataattataaatamatacttgggtaaccagtcactaggttaggaagcagaacattgctagtaccccaaagtccccactatatttctttctgattataactttgtgagtaactac

SEQ ID NO: 219375 - DNA, 201 bp, Homo sapiens
ttggagggcttatagatgaaacaagactggctatatgttgataattgttgaagccgatgatggatacctgggtgtttattctattatttactttgtgtatrtttgaaaattttcatgataacaagttggaggtcaaggagagggctgcagaactctttgcaagcagcaaagttctgacattcaaacccatctgactctaaa

SEQ ID NO: 219376 - DNA, 201 bp, Homo sapiens
ggcatttaagatattttaaatttgtctgtccatgtctcctcattacatatgctcccttctttctcttccttattcctttttttttttaaatgcaaataagraattttggtttttagccccattatagaaattctcacgcattttgttttgttgtttttaaccatgaatcaatgaataaataaccccagagagaagagcaat

SEQ ID NO: 219377 - DNA, 201 bp, Homo sapiens
aggggccataatatgcatggagctgtcatctcctaggataacaatgccgtcttctgaaatacctcctgaaggacctacttgaggctgttttacagttaacttttttttttttttaaagtagaaggagtgtactataaagtaacaatgaaaaatataggaaatattactaggagtttttcatctctgttataacattataat

SEQ ID NO: 219378 - DNA, 201 bp, Homo sapiens
ttgtaccttttctctgaatgagttaggagctattgaaaattctgtgcagaggagtgacaagttctaggtttttcaagatcactccagctactgtgttgagratagtctgaaggtggggaaaggaggggttataaatgtagcagggaaacagtttggggaaggctatttcaataatccaggaaagaacaagagatgatgatt

SEQ ID NO: 219379 - DNA, 201 bp, Homo sapiens
tgtgtcaaaatctggcccgaacagtaagtgtgtacctcataactgaattccatttgtttgaatctgaataattctgctaatttgccaattttcaacttgtrcatttttcatgatttcatagttagaatggggtgatgaactcatcctcaacaggaatcttcttagcaaatgaggggagatgttcaatcatggaggtttagg

SEQ ID NO: 219380 - DNA, 201 bp, Homo sapiens
gagtgcagaggtgtgatctcagctcactgcaagctctgcctcccgggttcacgccattctcctgcctcagcctcccaagtagctgggactacaggtacccrccaccacgcccggctcattttttgtatttttttttttttttttttttagtagagacaggatttcaccatgttagccaggatggtctcaatatcctgacct

SEQ ID NO: 219381 - DNA, 201 bp, Homo sapiens
tttcaccatgttggccaggttggtctcgatctcttgacctcgtgatccacccgccttggcctcccaaagtgctgggattacgggcgtaagccaccacaccyggcttgatcgcagtttcttaataccatttctgtgccattttcgggaatgttgtgtgtggtgtggttcttggacttggccatgtctgcaccctaagccatg

SEQ ID NO: 219382 - DNA, 201 bp, Homo sapiens
ttattttgtagtatatttttctaagtggcttaaagtccaaagtcatatggggtaggttgcaaacaaaatatatttatgtttagaaatctaattgagtgttrtgtttatttttatgtataggccttgctattttggaagctacaagaaaaaaatagaggaaggaaggtttggtctttttagtggacatggctcagatatcta

SEQ ID NO: 219383 - DNA, 201 bp, Homo sapiens
ataaggtgttgaggaacaacaagggggccagtgtgatggaagcagtgcacagttacaggagggagataatggggggccaaatattagtgtgcctggtgggycattgtaaagattgtaccttttctctgaatgagttaggagctattgaaaattctgtgcagaggagtgacaagttctaggtttttcaagatcactccagct

SEQ ID NO: 219384 - DNA, 201 bp, Homo sapiens
tggtagtaaatgctaaggagaaaattaaggtaaggtgataggcagtggagttggagaaaattgcagttttaacttggttatcagggaggactttacacaartgtcaccttttcaatgaagacttgaaggaagcgagggattaagccattcagtgattcagcggaacagtctagtcagaggtaacagaagagcagaggccct

SEQ ID NO: 219385 - DNA, 201 bp, Homo sapiens
ggaagaaattgacggcatattatttggcacatttaagatggcttctaaatactttaaaaatgaatgcaacaagagggggttaaaaatctattgtatctctytattatatctcttaggttaaaatactcattttgaatgtgatatttttgttccatattaatttcacctatttgtttaacaactacttgaatgaaagctttg

SEQ ID NO: 219386 - DNA, 201 bp, Homo sapiens
tttttttgagacagagtcttgctctgtcgcccaggctggatggagtgcagtggcgcaatctcggctcactgcaacctctgcctcctgggttcaagtgattstcctgtctcagcctcctgagtagctaggattacaggtgcgcaccaccacgcctggctaatttttgtattttaatagagatggtgttgcaccatgttggcc

SEQ ID NO: 219387 - DNA, 201 bp, Homo sapiens
ctactagatcatttaatatttttatcataatttttttttttttttgagacagagtcttgctctgtcgcccaggctggatggagtgcagtggcgcaatctcrgctcactgcaacctctgcctcctgggttcaagtgattctcctgtctcagcctcctgagtagctaggattacaggtgcgcaccaccacgcctggctaattt

SEQ ID NO: 219388 - DNA, 201 bp, Homo sapiens
ttttaaaatatttcttctgtttcattctctctactctccttcttggactccaattacacattatattagaccatttgaaattgtcccacagaacttagacrtgctgttgtatacccttccccctctttttctctgtttcattttggatattttctattgatctgtcctcgggtttatcaatccttctgcttagtccatcta

SEQ ID NO: 219389 - DNA, 201 bp, Homo sapiens
ggacagattgaaccatcatttgtcttccgaacatttgacgaatttcaggaacttcacaataagctcagtattatttttccactttggaagttaccagggtwtgtattcatccttgtacattaatcctttttgtaggaaacaacttgttatcaaatgtaggtagaaagctttgtgttaacacttagtaagatattatcggcc

SEQ ID NO: 219390 - DNA, 201 bp, Homo sapiens
acaggcatgagccaccacacctggccaagcctgaacttttaactagctttcatcattaaatgaacctaaaacttttatgaagatcctctccgagttagctraactgtaaagtttgaggacacagtcttccataagaccactttcacttctgacaccaactgcaagtctgggggctggggaggttcccaaagtttcgataac

SEQ ID NO: 219391 - DNA, 201 bp, Homo sapiens
catatgtttctattacacctgcattattaatttatttatttattgagacaggggtctcgctctgttaccctggctggagtgcagtggtgcgatctccgctygctgcaacctctgcttcctgggctcaagctttcctgccacctcagcctcctgactagctgggactacaatcatgcaccaccacgctggctaatttttcta

SEQ ID NO: 219392 - DNA, 201 bp, Homo sapiens
cctgttctgatttagattgacccacaatgttggatttagcttggagaatataactttactgtatcagcaatattccccaaagagcatcttcaaacacatgkttaaacaaataataagaggatccatatgtttctattacacctgcattattaatttatttatttattgagacaggggtctcgctctgttaccctggctgga

SEQ ID NO: 219393 - DNA, 201 bp, Homo sapiens
aagaatttaatttcttctttcttgtgaacagattgaagaccaaatttccatataccaatcaccgcacaaacccaggctatttgttaagtccagtcacagcrcaaagaaacatatgcggagaaaatgctagtgtgaaggtctccattgacattgaaggatttcagctaccagttacttttacgtgtgatggtaggtttatgg

SEQ ID NO: 219394 - DNA, 201 bp, Homo sapiens
gatatggaaaattctacagaacaaaaggcctggtatcatcaacaaataaatagaaaaaaagagaaggagaccaaacaagagttaacaaactttttctgtaragggtgccagataaaagtagtttaggctttgcagaccatatagactctgtcacaaatgcaaaagcagtcgtagacagtacattaacaaatgagcatggct

SEQ ID NO: 219395 - DNA, 201 bp, Homo sapiens
ctttttaataaatggcaactttgtcttccatttgctcagaccaaaaccctggagtcatccttgatgtctcaagaaaaagatcttatacatttcacattcartctaattctggtcagctccaccttgaaaatacatttagaatgtgagcactttcatcattaccaaagctatactctagtcaactgcagtagtttcttacta

SEQ ID NO: 219396 - DNA, 201 bp, Homo sapiens
tttccaaagctgagagcacagctaaactttcaaaaaatacaaatatatatatataatatacaaatatagatttatagatcaataataactgttatgcatartagcagcaacagcttttccaggttctgtaatcatctgaacacaattatagagacatctagcaaaccccatttaaaaagggagaaaaggtaaaaaacaaaa

SEQ ID NO: 219397 - DNA, 201 bp, Homo sapiens
acaggcaacctacagaatgggagaaaatttttgcaatctactcagctgacaaagggctaatatccagaatctacaaagaactcaaacaaatttacaagaaaaaaacaaacaaccccatcaaaaagtgggtgaaggtcatgaacagacacttctcaaaagaagacatttatgtagccaacagacacatgaaaaaatgctcat

SEQ ID NO: 219398 - DNA, 201 bp, Homo sapiens
acaatggaaaaaattatatttaatgttcctagatcaatatgactgttaatttctgcacaatgccaactcaacacgataaaatgtaatacattttccaaagytgagagcacagctaaactttcaaaaaatacaaatatatatatataatatacaaatatagatttatagatcaataataactgttatgcatagtagcagcaa

SEQ ID NO: 219399 - DNA, 201 bp, Homo sapiens
caacctacagaatgggagaaaatttttgcaatctactcagctgacaaagggctaatatccagaatctacaaagaactcaaacaaatttacaagaaaaaaacaaacaaccccatcaaaaagtgggtgaaggtcatgaacagacacttctcaaaagaagacatttatgtagccaacagacacatgaaaaaatgctcatcatca

SEQ ID NO: 219400 - DNA, 201 bp, Homo sapiens
gatcatatttgttcgtataatgaaactcatgtagataagatctcacatacttaatacagtgaattacccccatacaatggaaaaaattatatttaatgttyctagatcaatatgactgttaatttctgcacaatgccaactcaacacgataaaatgtaatacattttccaaagctgagagcacagctaaactttcaaaaaa

SEQ ID NO: 219401 - DNA, 201 bp, Homo sapiens
aaagttatttatagagaaagaaggacattttataatgaagaaagagtcaattcatcaagaagatacaacaattataaaaactatatcattgaaagcctttyctctaagatcgggaataagacaaggacgcccactttcacaactgttattcaacacagtactgggagtcctagcttgagaaatcagacaagataaacaaat

SEQ ID NO: 219402 - DNA, 201 bp, Homo sapiens
aacacaattatagagacatctagcaaaccccatttaaaaagggagaaaaggtaaaaaacaaaaccccagaaaatagcaatgttctgtttttcttgtggtayttggcactattttttaaattagcttctgaatcatcatctggaaaaaaaattctggaataatatcactaaacacagatctgatgaagcactgtcactacta

SEQ ID NO: 219403 - DNA, 201 bp, Homo sapiens
agttctagcagccacaaaggtatctacacatgtccacatgtcccctagggtctggctggactaaaggcaaaactaaagcccagaagacagaccagtgcacyggatgcccgtaccgcgtgatggccaggaaggcccggctgtgcagctcctgcttgatggcgctttgcagacggtaggcgtgcccatggcatgaggcatccc

SEQ ID NO: 219404 - DNA, 201 bp, Homo sapiens
gtggtgagggggcgcaaccctctgccctgtcagccccacttctgcctgcaggccccgtcccctcggccatgggacccatccccagcccgcccacaccccgytcaacactcacccctcgcttggagccgctgctgcaattgaggcagcggccctccaagtacacgtaggagctgcggctcacttcgtacacggcctgtgcct

SEQ ID NO: 219405 - DNA, 201 bp, Homo sapiens
ctgcaggcagaaggggtggtgagggggcgcaaccctctgccctgtcagccccacttctgcctgcaggccccgtcccctcggccatgggacccatccccagyccgcccacaccccgctcaacactcacccctcgcttggagccgctgctgcaattgaggcagcggccctccaagtacacgtaggagctgcggctcacttcgt

SEQ ID NO: 219406 - DNA, 201 bp, Homo sapiens
tccagcaccagcgtcttgttgctgaacgtacgtgcagcccaccgctgcaggcagaaggggtggtgagggggcgcaaccctctgccctgtcagccccacttytgcctgcaggccccgtcccctcggccatgggacccatccccagcccgcccacaccccgctcaacactcacccctcgcttggagccgctgctgcaattgag

SEQ ID NO: 219407 - DNA, 201 bp, Homo sapiens
gaccctgcatcctgttcatccgctccacggttacgttgtagttcacggtgacgttgctcacgtggttggaggccgtcagctgcagggacaggcgtcagtgrgcccaggtggcaggtgagaggcctggccctgattggcgtccctccctccactcacccacagccatggcagcgtcctcgggcagcatgaagcagagcagaa

SEQ ID NO: 219408 - DNA, 201 bp, Homo sapiens
ccgcagcaccagtcgcatgcctgcactgcccgtggatgtggtggtctcatccagcaccagcgtcttgttgctgaacgtacgtgcagcccaccgctgcaggyagaaggggtggtgagggggcgcaaccctctgccctgtcagccccacttctgcctgcaggccccgtcccctcggccatgggacccatccccagcccgccca

SEQ ID NO: 219409 - DNA, 201 bp, Homo sapiens
acctgcagaccctgcatcctgttcatccgctccacggttacgttgtagttcacggtgacgttgctcacgtggttggaggccgtcagctgcagggacaggcrtcagtgagcccaggtggcaggtgagaggcctggccctgattggcgtccctccctccactcacccacagccatggcagcgtcctcgggcagcatgaagcag

SEQ ID NO: 219410 - DNA, 201 bp, Homo sapiens
agcacgcccgccgtcagtgctagcgtggcattgggggacagcacggccggcactgtggagacctgcagaccctgcatcctgttcatccgctccacggttaygttgtagttcacggtgacgttgctcacgtggttggaggccgtcagctgcagggacaggcgtcagtgagcccaggtggcaggtgagaggcctggccctgat

SEQ ID NO: 219411 - DNA, 201 bp, Homo sapiens
cccgccgcagcaccagtcgcatgcctgcactgcccgtggatgtggtggtctcatccagcaccagcgtcttgttgctgaacgtacgtgcagcccaccgctgyaggcagaaggggtggtgagggggcgcaaccctctgccctgtcagccccacttctgcctgcaggccccgtcccctcggccatgggacccatccccagcccg

SEQ ID NO: 219412 - DNA, 201 bp, Homo sapiens
ccagcacgcccgccgtcagtgctagcgtggcattgggggacagcacggccggcactgtggagacctgcagaccctgcatcctgttcatccgctccacggtkacgttgtagttcacggtgacgttgctcacgtggttggaggccgtcagctgcagggacaggcgtcagtgagcccaggtggcaggtgagaggcctggccctg

SEQ ID NO: 219413 - DNA, 201 bp, Homo sapiens
ccagtgggaagaggcggcaagagccccccagcggcgggcggttgggggacaggcggatggaggcgcagccctcctcctcgccagagcggcccagcaccgtsagcgtgaaggtgtatccctcgccgtcccgcagcacgccccgccgcagcaccagtcgcatgcctgcactgcccgtggatgtggtggtctcatccagcacca

SEQ ID NO: 219414 - DNA, 201 bp, Homo sapiens; identical to SEQ ID NO: 39373

SEQ ID NO: 219415 - DNA, 201 bp, Homo sapiens
acaggaaggccacctccacggccgagtccaccagcacgcccgccgtcagtgctagcgtggcattgggggacagcacggccggcactgtggagacctgcagrccctgcatcctgttcatccgctccacggttacgttgtagttcacggtgacgttgctcacgtggttggaggccgtcagctgcagggacaggcgtcagtgag

SEQ ID NO: 219416 - DNA, 201 bp, Homo sapiens
actgtccccctttccagatggggaaactgaggctcagagcccggagaccagggcccaccagcccaggctcacagcagcacccacccacggggcctgtgggyaccggcagggatccccgtgcaggccacctcccgtatggcgtgcccaggagtgtccggaggctgcccccagctcatgtccacctctgcatctgcagagctg

SEQ ID NO: 219417 - DNA, 201 bp, Homo sapiens
acccgtgcattcgaagtgcaccttggtggtgagggcgtgcacagcgcccagtgggaagaggcggcaagagccccccagcggcgggcggttgggggacaggsggatggaggcgcagccctcctcctcgccagagcggcccagcaccgtgagcgtgaaggtgtatccctcgccgtcccgcagcacgccccgccgcagcaccag

SEQ ID NO: 219418 - DNA, 201 bp, Homo sapiens
cactcacaggaaggccacctccacggccgagtccaccagcacgcccgccgtcagtgctagcgtggcattgggggacagcacggccggcactgtggagaccygcagaccctgcatcctgttcatccgctccacggttacgttgtagttcacggtgacgttgctcacgtggttggaggccgtcagctgcagggacaggcgtca

SEQ ID NO: 219419 - DNA, 201 bp, Homo sapiens
cccccacgcaggcctgcactcacccgtgcattcgaagtgcaccttggtggtgagggcgtgcacagcgcccagtgggaagaggcggcaagagccccccagcrgcgggcggttgggggacaggcggatggaggcgcagccctcctcctcgccagagcggcccagcaccgtgagcgtgaaggtgtatccctcgccgtcccgcag

SEQ ID NO: 219420 - DNA, 201 bp, Homo sapiens
cccgagtcactcacaggaaggccacctccacggccgagtccaccagcacgcccgccgtcagtgctagcgtggcattgggggacagcacggccggcactgtrgagacctgcagaccctgcatcctgttcatccgctccacggttacgttgtagttcacggtgacgttgctcacgtggttggaggccgtcagctgcagggaca

SEQ ID NO: 219421 - DNA, 201 bp, Homo sapiens
cagcatcctccgcgtcatgccagcctgagggacggtccccacggcatcacgggagggctccgtgacgtcacagagtcgggggatcccgctgctccccccamgcaggcctgcactcacccgtgcattcgaagtgcaccttggtggtgagggcgtgcacagcgcccagtgggaagaggcggcaagagccccccagcggcgggc

SEQ ID NO: 219422 - DNA, 201 bp, Homo sapiens
aaaccggcccccgagtcactcacaggaaggccacctccacggccgagtccaccagcacgcccgccgtcagtgctagcgtggcattgggggacagcacggcyggcactgtggagacctgcagaccctgcatcctgttcatccgctccacggttacgttgtagttcacggtgacgttgctcacgtggttggaggccgtcagct

SEQ ID NO: 219423 - DNA, 201 bp, Homo sapiens
gactgggggacactcacagctctgccagcgccgagaggttcgccaggagcccaacgtccagcgcccggagcaggttgtgggagacgtctctgaggagtgartggccgtgggtcagggccagagcccttagtaggccagaggccatccctgggcccatcccacacattgccagcatccccaagctatggcctcccacccttg

SEQ ID NO: 219424 - DNA, 201 bp, Homo sapiens
ctgggacaagagcctggtgcccaccccaaaccggcccccgagtcactcacaggaaggccacctccacggccgagtccaccagcacgcccgccgtcagtgcyagcgtggcattgggggacagcacggccggcactgtggagacctgcagaccctgcatcctgttcatccgctccacggttacgttgtagttcacggtgacgt

SEQ ID NO: 219425 - DNA, 201 bp, Homo sapiens
caaagaaccacaacttacatttcacttaaattaaataaattagcaaatattccttcttctaacgtagaaatcttgttgttgcttatatccctggaagagasgggggattcggcaaagctgacggaagcccccacagctgagcagcaagaggcggtgccgccagcccacccggagtgagccccgcatgctggcacgactggg

SEQ ID NO: 219426 - DNA, 201 bp, Homo sapiens
agggaaaccgaggctcagaaaagcaaccccgtgatgtgggggtccctcggctgaggctggggctgggacaagagcctggtgcccaccccaaaccggccccygagtcactcacaggaaggccacctccacggccgagtccaccagcacgcccgccgtcagtgctagcgtggcattgggggacagcacggccggcactgtgga

SEQ ID NO: 219427 - DNA, 201 bp, Homo sapiens
acagcaccgcctcccctgccccaaccaagccggcactggggggctccaagcaggtagtgaactgcccccaggatctggtctcaagcctggaaggggacacrgaccaactgggagggcagaagggatactgggggcctggggtccagccaggaccccacccaaagaaccacaacttacatttcacttaaattaaataaatta

SEQ ID NO: 219428 - DNA, 201 bp, Homo sapiens
ttctgcggggcaggggcaggtgttggggaccaggtctggtgggaagggtctatgccagccccccactggcaaccaggccctggagccaccctgacagcacygcctcccctgccccaaccaagccggcactggggggctccaagcaggtagtgaactgcccccaggatctggtctcaagcctggaaggggacacggaccaac

SEQ ID NO: 219429 - DNA, 201 bp, Homo sapiens
caaggggatgccaagcagaggctggccagccagggagccaggcccagcacacgtggctgcctcgggctgcaccacccgcacctgctgctcctccgcccatygcggcagccacgccaggccacagtcacactcaaacgggttcccactcaggtttctgcggggcaggggcaggtgttggggaccaggtctggtgggaagggt

SEQ ID NO: 219430 - DNA, 201 bp, Homo sapiens
gagcctggcacagacctggctctgggcagcgtctccataaaggccacctgttgtttttatctcccgaaagcgaacatgacaaggctttaaccccccacggmaatcccccctcacccctgttctcaggatagccttggaacccaatagcagagcgcctgaggcccttcatgaccccagcccacccgcgagcccacctcccac

SEQ ID NO: 219431 - DNA, 201 bp, Homo sapiens
gcccgcagtcgctgcatggcgcccgccgtcacctggtctttggtttggctggagagcatcagtgacagcagcacctggtacctgcgtacctgcttgtgcastgacagggaccggggtggcggcgggtcctgggtgattccctggccaggctccgccccccgccctcgacacaccctggtttgttgccctgggccacacttg

SEQ ID NO: 219432 - DNA, 201 bp, Homo sapiens
caggagcccaacgtccagcgcccggagcaggttgtgggagacgtctctgaggagtgagtggccgtgggtcagggccagagcccttagtaggccagaggccwtccctgggcccatcccacacattgccagcatccccaagctatggcctcccacccttgagctccccactcccagaggtcaggaggggcctttctgatggaa

SEQ ID NO: 219433 - DNA, 201 bp, Homo sapiens
ccactgggcgctcccacgaggaggttctcggcatcctgcactgggcctggggtggcgagtgcacagtgaggcgccgggccagggcccaggacaccaggacraacagactggggaccgagccgcccgaaaacccccccaccagcccctcctcctcagcccaggctccaccgcgggcgctcggcaggcccctaaccacagcca

SEQ ID NO: 219434 - DNA, 201 bp, Homo sapiens
gtggccctggcgacagcgccgcagcagcagggcgtacaccagcggggcgccagcatcctccgcgtcatgccagcctgagggacggtccccacggcatcacrggagggctccgtgacgtcacagagtcgggggatcccgctgctccccccacgcaggcctgcactcacccgtgcattcgaagtgcaccttggtggtgagggc

SEQ ID NO: 219435 - DNA, 201 bp, Homo sapiens
aaacccccccaccagcccctcctcctcagcccaggctccaccgcgggcgctcggcaggcccctaaccacagccagcgtctcaggcccctgcctggcccccsgcacacctccgggctgcagctcgcagacgtagctgtgcggcgctgagcacaggtcggtgttacaccacccggtgggcccgagccggacgcagtgctcggc

SEQ ID NO: 219436 - DNA, 201 bp, Homo sapiens
tgaaacccgggggcagcacggctccgtagctggagaggctgcccttgtagacacagaactcctcgcagtggccctggcgacagcgccgcagcagcagggcrtacaccagcggggcgccagcatcctccgcgtcatgccagcctgagggacggtccccacggcatcacgggagggctccgtgacgtcacagagtcgggggat

SEQ ID NO: 219437 - DNA, 201 bp, Homo sapiens
accgcgggcgctcggcaggcccctaaccacagccagcgtctcaggcccctgcctggccccccgcacacctccgggctgcagctcgcagacgtagctgtgcrgcgctgagcacaggtcggtgttacaccacccggtgggcccgagccggacgcagtgctcggctgtggctgggtgtggctccccgggcagccagttctggca

SEQ ID NO: 219438 - DNA, 201 bp, Homo sapiens
ggtcggtgttacaccacccggtgggcccgagccggacgcagtgctcggctgtggctgggtgtggctccccgggcagccagttctggcagctctccaggctraaggcctcgccctgcggcgctgggcccacctccaccccctgcacagtcgagaagccgatccacacgtctaggctcctgggggcgggtgtgggatggcagg

SEQ ID NO: 219439 - DNA, 201 bp, Homo sapiens
aggcccacctcgaagtgtggcctgaaacccgggggcagcacggctccgtagctggagaggctgcccttgtagacacagaactcctcgcagtggccctggcracagcgccgcagcagcagggcgtacaccagcggggcgccagcatcctccgcgtcatgccagcctgagggacggtccccacggcatcacgggagggctccg

SEQ ID NO: 219440 - DNA, 201 bp, Homo sapiens
gcctcagggctcctgtgcacccagttacctcccaacagacagggaaaccgaggctcagaaaagcaaccccgtgatgtgggggtccctcggctgaggctggrgctgggacaagagcctggtgcccaccccaaaccggcccccgagtcactcacaggaaggccacctccacggccgagtccaccagcacgcccgccgtcagtg

SEQ ID NO: 219441 - DNA, 201 bp, Homo sapiens
ggccaggcccacctcgaagtgtggcctgaaacccgggggcagcacggctccgtagctggagaggctgcccttgtagacacagaactcctcgcagtggcccwggcgacagcgccgcagcagcagggcgtacaccagcggggcgccagcatcctccgcgtcatgccagcctgagggacggtccccacggcatcacgggagggc

SEQ ID NO: 219442 - DNA, 201 bp, Homo sapiens
tgtgctgaggcctctcccggctcccgtgcagcctcagggctcctgtgcacccagttacctcccaacagacagggaaaccgaggctcagaaaagcaaccccstgatgtgggggtccctcggctgaggctggggctgggacaagagcctggtgcccaccccaaaccggcccccgagtcactcacaggaaggccacctccacgg

SEQ ID NO: 219443 - DNA, 201 bp, Homo sapiens
cgggatgttttcattccagggtgcttggcgggctgggctgccgtggccactgcagagctccagaaaagaacatgtgtgtctccctccaaagtatattcctygctggaaagcagatcccaggcagggtctcccccacgagcagggggagaggcaccccaaggtgggggagcgagggcagtggcagaaccaccccatacccta

SEQ ID NO: 219444 - DNA, 201 bp, Homo sapiens
gccccgggcctccattcagggcccacccggctgtgctgaggcctctcccggctcccgtgcagcctcagggctcctgtgcacccagttacctcccaacagayagggaaaccgaggctcagaaaagcaaccccgtgatgtgggggtccctcggctgaggctggggctgggacaagagcctggtgcccaccccaaaccggcccc

SEQ ID NO: 219445 - DNA, 201 bp, Homo sapiens
ttgagggcgaccacagcggctcccagctggtcctgcaccaccacggccaggcccacctcgaagtgtggcctgaaacccgggggcagcacggctccgtagcyggagaggctgcccttgtagacacagaactcctcgcagtggccctggcgacagcgccgcagcagcagggcgtacaccagcggggcgccagcatcctccgcg

SEQ ID NO: 219446 - DNA, 201 bp, Homo sapiens
ccgaggggtctggaaccgggaaggactcgttgtacggaggctggaactggtggagggcctgctccccatccccaaaggtccacctgccggggcggtgggasgcagtgagtgaaccgggacaggggtgggcggtggcggggcagggggtgcttgggacccagccgaggctccactctgcagtcacgccccgggcctccattc

SEQ ID NO: 219447 - DNA, 201 bp, Homo sapiens
ggagccccatcactgtccccctttccagatggggaaactgaggctcagagcccggagaccagggcccaccagcccaggctcacagcagcacccacccacgrggcctgtgggtaccggcagggatccccgtgcaggccacctcccgtatggcgtgcccaggagtgtccggaggctgcccccagctcatgtccacctctgcat

SEQ ID NO: 219448 - DNA, 201 bp, Homo sapiens
aggtgggggcaggaggtggcggggggccggagcagagggacaggcaggcaaaggaggcactggagggctgggccgccccacacaggcaccagccctgctcsgagagggctgcgaggccctggccggtggagaagcagaaggcgctgcaggcctctggctgaagcaggccttcgtgggcagctgaaaaggacactgctgcca

SEQ ID NO: 219449 - DNA, 201 bp, Homo sapiens
tgcaccaccacggccaggcccacctcgaagtgtggcctgaaacccgggggcagcacggctccgtagctggagaggctgcccttgtagacacagaactcctygcagtggccctggcgacagcgccgcagcagcagggcgtacaccagcggggcgccagcatcctccgcgtcatgccagcctgagggacggtccccacggcat

SEQ ID NO: 219450 - DNA, 201 bp, Homo sapiens
gtccccctttccagatggggaaactgaggctcagagcccggagaccagggcccaccagcccaggctcacagcagcacccacccacggggcctgtgggtacyggcagggatccccgtgcaggccacctcccgtatggcgtgcccaggagtgtccggaggctgcccccagctcatgtccacctctgcatctgcagagctgaca

SEQ ID NO: 219451 - DNA, 201 bp, Homo sapiens
tgctggaggagggtggggcccctacaggtgggggcaggaggtggcggggggccggagcagagggacaggcaggcaaaggaggcactggagggctgggccgmcccacacaggcaccagccctgctccgagagggctgcgaggccctggccggtggagaagcagaaggcgctgcaggcctctggctgaagcaggccttcgtgg

SEQ ID NO: 219452 - DNA, 201 bp, Homo sapiens
tggcgcgggtcagcaaggtaccaggggatgtgtcacacacacagcccacccccgtccagtcacgcacggacaccctgggcttccgagcaaacctgctcccrggtggtgtgaccacatggagccacagacacccagcaaggacacgcagcccgcacacccccggcaccccagacacagtgacctgcaccagggctcgaggtt

SEQ ID NO: 219453 - DNA, 201 bp, Homo sapiens
cctgcaccaccacggccaggcccacctcgaagtgtggcctgaaacccgggggcagcacggctccgtagctggagaggctgcccttgtagacacagaactcytcgcagtggccctggcgacagcgccgcagcagcagggcgtacaccagcggggcgccagcatcctccgcgtcatgccagcctgagggacggtccccacggc

SEQ ID NO: 219454 - DNA, 201 bp, Homo sapiens
ctcgaagtgtggcctgaaacccgggggcagcacggctccgtagctggagaggctgcccttgtagacacagaactcctcgcagtggccctggcgacagcgcygcagcagcagggcgtacaccagcggggcgccagcatcctccgcgtcatgccagcctgagggacggtccccacggcatcacgggagggctccgtgacgtca

SEQ ID NO: 219455 - DNA, 201 bp, Homo sapiens
gtgctccaccagcacctgggccaccgaggggtctggaaccgggaaggactcgttgtacggaggctggaactggtggagggcctgctccccatccccaaagktccacctgccggggcggtgggacgcagtgagtgaaccgggacaggggtgggcggtggcggggcagggggtgcttgggacccagccgaggctccactctgc

SEQ ID NO: 219456 - DNA, 201 bp, Homo sapiens
cggacaccctgggcttccgagcaaacctgctcccgggtggtgtgaccacatggagccacagacacccagcaaggacacgcagcccgcacacccccggcacyccagacacagtgacctgcaccagggctcgaggtttctctagggaacccacctcttagaatcatccagaaacaagtcactcttcatctgtccaacaaaggc

SEQ ID NO: 219457 - DNA, 201 bp, Homo sapiens
gcctgccgcagcagccctgggagcacactagcggtgagcccgtgcagccagactgtgagccccgttgcgctgccgttgggctctgggagggtgatggccaragacctacgagcagaggggggtggtgagcaggtggcagtctcgggggcgccctcccacggcctggctcacctgttgagggcgaccacagcggctcccagc

SEQ ID NO: 219458 - DNA, 201 bp, Homo sapiens
cccctcatccctcacctggggcagcgtaggtgtgcatgacattgtgctccaccagcacctgggccaccgaggggtctggaaccgggaaggactcgttgtayggaggctggaactggtggagggcctgctccccatccccaaaggtccacctgccggggcggtgggacgcagtgagtgaaccgggacaggggtgggcggtgg

SEQ ID NO: 219459 - DNA, 201 bp, Homo sapiens
cgtgctggaggagggtggggcccctacaggtgggggcaggaggtggcggggggccggagcagagggacaggcaggcaaaggaggcactggagggctgggcygccccacacaggcaccagccctgctccgagagggctgcgaggccctggccggtggagaagcagaaggcgctgcaggcctctggctgaagcaggccttcgt

SEQ ID NO: 219460 - DNA, 201 bp, Homo sapiens
ccggcaccccagacacagtgacctgcaccagggctcgaggtttctctagggaacccacctcttagaatcatccagaaacaagtcactcttcatctgtccarcaaaggcctgctgagaggtgcacagtgtcttgagtccaagctgcgccaaggcggcaggacccccagcccagcccaggacccccagtagagtcctcacctc

SEQ ID NO: 219461 - DNA, 201 bp, Homo sapiens
cagggccaacgagtactcgatgacgtgctggggatcggcctgccgcagcagccctgggagcacactagcggtgagcccgtgcagccagactgtgagccccrttgcgctgccgttgggctctgggagggtgatggccaaagacctacgagcagaggggggtggtgagcaggtggcagtctcgggggcgccctcccacggcct

SEQ ID NO: 219462 - DNA, 201 bp, Homo sapiens
aggcagtggccccctcaccccctcatccctcacctggggcagcgtaggtgtgcatgacattgtgctccaccagcacctgggccaccgaggggtctggaacygggaaggactcgttgtacggaggctggaactggtggagggcctgctccccatccccaaaggtccacctgccggggcggtgggacgcagtgagtgaaccgg

SEQ ID NO: 219463 - DNA, 201 bp, Homo sapiens
aggcagggaagacgtgctggaggagggtggggcccctacaggtgggggcaggaggtggcggggggccggagcagagggacaggcaggcaaaggaggcactrgagggctgggccgccccacacaggcaccagccctgctccgagagggctgcgaggccctggccggtggagaagcagaaggcgctgcaggcctctggctgaa

SEQ ID NO: 219464 - DNA, 201 bp, Homo sapiens
gggatttatctctggggcccgggatgagccctctgcaaagctccaggcaggggtacaggtcttggtcccaagcacgcatgcagcagatgtgacgtcccctsccaggctgcactcacctcgttcagcacggtgaccagggccaacgagtactcgatgacgtgctggggatcggcctgccgcagcagccctgggagcacacta

SEQ ID NO: 219465 - DNA, 201 bp, Homo sapiens
gcctggcccctccctcaccccagtaggggcctaagccatcagcccaggtgaggtcacagtgagggctgttggggaggaaggggggcagcttgactggggarctggggggaccccgtgctcagagcctgaaaggcagtggccccctcaccccctcatccctcacctggggcagcgtaggtgtgcatgacattgtgctccacc

SEQ ID NO: 219466 - DNA, 201 bp, Homo sapiens
gaggtccgtggggccccaccagggtggcccctggggaggcagggaagacgtgctggaggagggtggggcccctacaggtgggggcaggaggtggcgggggsccggagcagagggacaggcaggcaaaggaggcactggagggctgggccgccccacacaggcaccagccctgctccgagagggctgcgaggccctggccgg

SEQ ID NO: 219467 - DNA, 201 bp, Homo sapiens
cgcctggcccctccctcaccccagtaggggcctaagccatcagcccaggtgaggtcacagtgagggctgttggggaggaaggggggcagcttgactggggrgctggggggaccccgtgctcagagcctgaaaggcagtggccccctcaccccctcatccctcacctggggcagcgtaggtgtgcatgacattgtgctccac

SEQ ID NO: 219468 - DNA, 201 bp, Homo sapiens
gaggccagaggtccgtggggccccaccagggtggcccctggggaggcagggaagacgtgctggaggagggtggggcccctacaggtgggggcaggaggtgscggggggccggagcagagggacaggcaggcaaaggaggcactggagggctgggccgccccacacaggcaccagccctgctccgagagggctgcgaggccc

SEQ ID NO: 219469 - DNA, 201 bp, Homo sapiens
tccctgtccactccccccacgcctggcccctccctcaccccagtaggggcctaagccatcagcccaggtgaggtcacagtgagggctgttggggaggaagsggggcagcttgactggggagctggggggaccccgtgctcagagcctgaaaggcagtggccccctcaccccctcatccctcacctggggcagcgtaggtgt

SEQ ID NO: 219470 - DNA, 201 bp, Homo sapiens
tctccgaagtcccagcgtgtggcagtgacagggagcggggcagcgatgtggaaggctgctagctggccagaggccagaggtccgtggggccccaccagggkggcccctggggaggcagggaagacgtgctggaggagggtggggcccctacaggtgggggcaggaggtggcggggggccggagcagagggacaggcaggca

SEQ ID NO: 219471 - DNA, 201 bp, Homo sapiens
agggctgagccggcccccagggccagcacggccgtcacgtgatagcgcccaggcagcacatagcgatgcgaggcagccggcccagcggcatccacctcggsggagccgtctccgaagtcccagcgtgtggcagtgacagggagcggggcagcgatgtggaaggctgctagctggccagaggccagaggtccgtggggcccc

SEQ ID NO: 219472 - DNA, 201 bp, Homo sapiens
tccccgggcagccagttctggcagctctccaggctgaaggcctcgccctgcggcgctgggcccacctccaccccctgcacagtcgagaagccgatccacaygtctaggctcctgggggcgggtgtgggatggcagggggctcagggcactcctccatcctcccaccctcacagcagcccgctgggagccccatcactgtcc

SEQ ID NO: 219473 - DNA, 201 bp, Homo sapiens
aggacactggagtgtgcgttctggtgtactggacccagctggaccctagcaggaggcaggcaatgctcactgagggcccctggggggatgcgtgtgagaasagacgtatgtgtgggtgtgaggaccgcagctgccacgtaggcctgactcacagactcctgcagcccttagccagggcctgggtcaggaggctgagctggg

SEQ ID NO: 219474 - DNA, 201 bp, Homo sapiens
gatctcccaacctatggcccctcggggggtgggggcaggcacctggtgacccgggagaccaggaagcgctgcacggcgggactgtccaccattgccagggyggccccggcccaggcctgacactgctcctgcgcctgcagccaggccgccttctccaccaccaggcggtagcagtgcccgttgccagggaagatctccgtg

SEQ ID NO: 219475 - DNA, 201 bp, Homo sapiens
agggggacgaagatgggatggggcaaaggcgacgcggttggggggaggagggaggcagaggaaagggccgcacggggcgggcgggtggcatggggcacggrccgcggcacctgtgatgttgaggatgctgtctccgatggcggtgggcgtcacggtgcccgcggtggtctctgcctgcaggatgagcatcatggcctccag

SEQ ID NO: 219476 - DNA, 201 bp, Homo sapiens
gaaggtcggggtgctgcttcagggtcactgggatttatctctggggcccgggatgagccctctgcaaagctccaggcaggggtacaggtcttggtcccaascacgcatgcagcagatgtgacgtcccctcccaggctgcactcacctcgttcagcacggtgaccagggccaacgagtactcgatgacgtgctggggatcgg

SEQ ID NO: 219477 - DNA, 201 bp, Homo sapiens
cggaaggtcggggtgctgcttcagggtcactgggatttatctctggggcccgggatgagccctctgcaaagctccaggcaggggtacaggtcttggtcccmagcacgcatgcagcagatgtgacgtcccctcccaggctgcactcacctcgttcagcacggtgaccagggccaacgagtactcgatgacgtgctggggatc

SEQ ID NO: 219478 - DNA, 201 bp, Homo sapiens
gtgtggctgctgggagcggaaggtcggggtgctgcttcagggtcactgggatttatctctggggcccgggatgagccctctgcaaagctccaggcaggggwacaggtcttggtcccaagcacgcatgcagcagatgtgacgtcccctcccaggctgcactcacctcgttcagcacggtgaccagggccaacgagtactcga

SEQ ID NO: 219479 - DNA, 201 bp, Homo sapiens
aaagcagacgccggagagggcccggtgggtgtggctgctgggagcggaaggtcggggtgctgcttcagggtcactgggatttatctctggggcccgggatragccctctgcaaagctccaggcaggggtacaggtcttggtcccaagcacgcatgcagcagatgtgacgtcccctcccaggctgcactcacctcgttcagc

SEQ ID NO: 219480 - DNA, 201 bp, Homo sapiens
gcctccaagtgcagctgcactcggggcagcagagcagcaagagccaggcccggggagggcggggggcgcagttcaggggcccagcttccctgtccactccycccacgcctggcccctccctcaccccagtaggggcctaagccatcagcccaggtgaggtcacagtgagggctgttggggaggaaggggggcagcttgact

SEQ ID NO: 219481 - DNA, 201 bp, Homo sapiens
aggtgtagcagcactgagggctgcctggcgaggacggcaccgcctccaagtgcagctgcactcggggcagcagagcagcaagagccaggcccggggagggyggggggcgcagttcaggggcccagcttccctgtccactccccccacgcctggcccctccctcaccccagtaggggcctaagccatcagcccaggtgaggt

SEQ ID NO: 219482 - DNA, 201 bp, Homo sapiens
gggggatgaggatgggaattggggggaggggagggggacgaagatgggatggggcaaaggcgacgcggttggggggaggagggaggcagaggaaagggccscacggggcgggcgggtggcatggggcacgggccgcggcacctgtgatgttgaggatgctgtctccgatggcggtgggcgtcacggtgcccgcggtggtct

SEQ ID NO: 219483 - DNA, 201 bp, Homo sapiens
ggagcacaggtgtagcagcactgagggctgcctggcgaggacggcaccgcctccaagtgcagctgcactcggggcagcagagcagcaagagccaggcccgsggagggcggggggcgcagttcaggggcccagcttccctgtccactccccccacgcctggcccctccctcaccccagtaggggcctaagccatcagcccag

SEQ ID NO: 219484 - DNA, 201 bp, Homo sapiens
ggaagggggagggggaggagaatgggaattgggggagggggatgaggatgggaattggggggaggggagggggacgaagatgggatggggcaaaggcgacrcggttggggggaggagggaggcagaggaaagggccgcacggggcgggcgggtggcatggggcacgggccgcggcacctgtgatgttgaggatgctgtctc

SEQ ID NO: 219485 - DNA, 201 bp, Homo sapiens
caccgaggacgggcacacgagctccagggcggcaggtgccgcttccacctgcacgtctgtccccagcagggctgagccggcccccagggccagcacggccrtcacgtgatagcgcccaggcagcacatagcgatgcgaggcagccggcccagcggcatccacctcggcggagccgtctccgaagtcccagcgtgtggcagt

SEQ ID NO: 219486 - DNA, 201 bp, Homo sapiens
accagggctcgaggtttctctagggaacccacctcttagaatcatccagaaacaagtcactcttcatctgtccaacaaaggcctgctgagaggtgcacagkgtcttgagtccaagctgcgccaaggcggcaggacccccagcccagcccaggacccccagtagagtcctcacctcagcgtggaggcctgagaacgtgagga

SEQ ID NO: 219487 - DNA, 201 bp, Homo sapiens
aatagggaagggggagggggaggagaatgggaattgggggagggggatgaggatgggaattggggggaggggagggggacgaagatgggatggggcaaagrcgacgcggttggggggaggagggaggcagaggaaagggccgcacggggcgggcgggtggcatggggcacgggccgcggcacctgtgatgttgaggatgct

SEQ ID NO: 219488 - DNA, 201 bp, Homo sapiens
cacagcaagctgtcagcagcgcaggaggccggcaggaggccagcagatgcccacgactcccggggtgcagttacgtgctagacgctgtgtgatgcgggcaytgacccacaacactgagctgtttcttcatgggcaaaacagggtaagcacatgggccctcctgggcgggggctgcattgtggaaagcagacgccggagagg

SEQ ID NO: 219489 - DNA, 201 bp, Homo sapiens
ggttctcgaaggcattagatgccagcacggtcaggaggtactcacctgtggggacaggcccgagtggggcagccgcggcacccccacctgctccccacccrctcggcagaagccccccgcctgaggagcccggggtgaacggctgcacctgcggcccagccttaagggtcccaggctcccaagccacgtgcgggacggagc

SEQ ID NO: 219490 - DNA, 201 bp, Homo sapiens
atctgtccaacaaaggcctgctgagaggtgcacagtgtcttgagtccaagctgcgccaaggcggcaggacccccagcccagcccaggacccccagtagagycctcacctcagcgtggaggcctgagaacgtgaggaaggagctgtccagcacggacgagtccaggcagctgtcgatgtccagcacctgctgcccggcaggt

SEQ ID NO: 219491 - DNA, 201 bp, Homo sapiens
gccagcatcctccgcgtcatgccagcctgagggacggtccccacggcatcacgggagggctccgtgacgtcacagagtcgggggatcccgctgctcccccyacgcaggcctgcactcacccgtgcattcgaagtgcaccttggtggtgagggcgtgcacagcgcccagtgggaagaggcggcaagagccccccagcggcgg

SEQ ID NO: 219492 - DNA, 201 bp, Homo sapiens
tcgaggctctcgtcactctgcaccgaggacgggcacacgagctccagggcggcaggtgccgcttccacctgcacgtctgtccccagcagggctgagccggyccccagggccagcacggccgtcacgtgatagcgcccaggcagcacatagcgatgcgaggcagccggcccagcggcatccacctcggcggagccgtctccg

SEQ ID NO: 219493 - DNA, 201 bp, Homo sapiens
agagtctccgtgatgttcttgcgtatctgggctcggtgctgccgctcgtgcttgggctctgccgccacgtccagggcccgctcgtactggggcaggcaggsggcacagcaagctgtcagcagcgcaggaggccggcaggaggccagcagatgcccacgactcccggggtgcagttacgtgctagacgctgtgtgatgcggg

SEQ ID NO: 219494 - DNA, 201 bp, Homo sapiens
ggccctggggaggaaggggagtgggcagcagacactcacctcgggccggctcctcgcccagggccacgatgctgtaggcggcctccaggcctgaaccaccrcggttctggatgctgaggtcgaggctctcgtcactctgcaccgaggacgggcacacgagctccagggcggcaggtgccgcttccacctgcacgtctgtcc

SEQ ID NO: 219495 - DNA, 201 bp, Homo sapiens
gggcagggtgagcaggtggggccatcctaccatgcactgggccagcgcagcagcgatctgctggatgtcatccacagtgtggaccctcagggacaccagartctccgtgatgttcttgcgtatctgggctcggtgctgccgctcgtgcttgggctctgccgccacgtccagggcccgctcgtactggggcaggcagggggc

SEQ ID NO: 219496 - DNA, 201 bp, Homo sapiens
atggccctggggaggaaggggagtgggcagcagacactcacctcgggccggctcctcgcccagggccacgatgctgtaggcggcctccaggcctgaaccamcgcggttctggatgctgaggtcgaggctctcgtcactctgcaccgaggacgggcacacgagctccagggcggcaggtgccgcttccacctgcacgtctgt

SEQ ID NO: 219497 - DNA, 201 bp, Homo sapiens
gagtcattggcagcagagatgttgttggacgcggtgactgtcacaagataggagcctgggtctcggtagatgaacgtcacctcagggcccctggcacgggygggggcggcttcctcggtgccaaagtcccaggtgtagcggtaggggaacgggggccaggcacatgccaccagccaggcctcgtccccgagctgcacaaac

SEQ ID NO: 219498 - DNA, 201 bp, Homo sapiens
caggctctgccccatctggatggccctggggaggaaggggagtgggcagcagacactcacctcgggccggctcctcgcccagggccacgatgctgtaggcrgcctccaggcctgaaccaccgcggttctggatgctgaggtcgaggctctcgtcactctgcaccgaggacgggcacacgagctccagggcggcaggtgccg

SEQ ID NO: 219499 - DNA, 201 bp, Homo sapiens
cattcaggggcaccaccgtgcggcttgcattgacgacgagcccccgcacgcgccgcttcaccgtcacattgagccaggcctcgctgcggctcacctcattscagccggccaccctaacggtgaagtcacctgtgctgttgtaagcgtgggtgacctccggaccctcgagccacccaccgtcccccagatcccacaggtagc

SEQ ID NO: 219500 - DNA, 201 bp, Homo sapiens
ccggtgggaacgagggtgtcaacggtcagtgtgggcccaagacgggggtaccaggctctgccccatctggatggccctggggaggaaggggagtgggcagmagacactcacctcgggccggctcctcgcccagggccacgatgctgtaggcggcctccaggcctgaaccaccgcggttctggatgctgaggtcgaggctct

SEQ ID NO: 219501 - DNA, 201 bp, Homo sapiens
ggcgtgcagcggtcacagagcacccaggaatagcgcacatcactgccggcctccagcgacgtgctgaagctcacgctcccattcaggggcaccaccgtgcrgcttgcattgacgacgagcccccgcacgcgccgcttcaccgtcacattgagccaggcctcgctgcggctcacctcattccagccggccaccctaacggtg

SEQ ID NO: 219502 - DNA, 201 bp, Homo sapiens
tgactggcacctacttccagctaggagctgtcctagtcctcagggacagtgagtgctcacgaggtcattcccaggatgaacacacgagcccttcacacagyactgcaaaaactgccttgttctgacgcctgcgacgagactcactcccagagggtgcaaccagcacagccagtgagagcaggggaggccctgccaccccgc

SEQ ID NO: 219503 - DNA, 201 bp, Homo sapiens
ggccgccttctccaccaccaggcggtagcagtgcccgttgccagggaagatctccgtgtccgaggggcagagcgggtgcaccgctggagaccggtgggaaygagggtgtcaacggtcagtgtgggcccaagacgggggtaccaggctctgccccatctggatggccctggggaggaaggggagtgggcagcagacactcac

SEQ ID NO: 219504 - DNA, 201 bp, Homo sapiens
cagggctttggcaacggctggagccatggctgcggcaggtgtggctgcaggaaggtgagctggcagggggcgccccaagactctacctggccagggtaatkgcagcacacaccctgcccggaaccccacctgggggcagacacacaggccactgcagtggtgcttaggggccttcagggccaggcaggagtgggcattgga

SEQ ID NO: 219505 - DNA, 201 bp, Homo sapiens
gggccctgtggtcagcctggccccagcccacagtgacagcagggctttggcaacggctggagccatggctgcggcaggtgtggctgcaggaaggtgagctkgcagggggcgccccaagactctacctggccagggtaatggcagcacacaccctgcccggaaccccacctgggggcagacacacaggccactgcagtggtg

SEQ ID NO: 219506 - DNA, 201 bp, Homo sapiens
gtctctagggtccagaaggccctgtcctgacgcctcctctcctcgcaggagtctgactggaaggtgctgaagctggttctgggcaggctgcctgagtccckgcgctataaagtgctcatctttacttccccttgcagtgtggaccagctgtgctctgctctctgctccatggtaccatggccggcctggggttggggtggg

SEQ ID NO: 219507 - DNA, 201 bp, Homo sapiens
gcagaggacactggagtgtgcgttctggtgtactggacccagctggaccctagcaggaggcaggcaatgctcactgagggcccctggggggatgcgtgtgrgaagagacgtatgtgtgggtgtgaggaccgcagctgccacgtaggcctgactcacagactcctgcagcccttagccagggcctgggtcaggaggctgagc

SEQ ID NO: 219508 - DNA, 201 bp, Homo sapiens
ggctactgaagcaggtcagagaccgaggaacgccatggcaggaaggagcccaggctggaggctcagctcctcggccaagctgcccgtctgccctggggggstgaacccagtgccctggcaggcatgcggggcagggtgagcaggtggggccatcctaccatgcactgggccagcgcagcagcgatctgctggatgtcatcc

SEQ ID NO: 219509 - DNA, 201 bp, Homo sapiens
ctctttacaccctgggtcccccgagaggcaccctgcgttcacacaggacagaacggctgaggctactgaagcaggtcagagaccgaggaacgccatggcakgaaggagcccaggctggaggctcagctcctcggccaagctgcccgtctgccctggggggctgaacccagtgccctggcaggcatgcggggcagggtgagc

SEQ ID NO: 219510 - DNA, 201 bp, Homo sapiens
taagagatggtaggacccccagggatgggcgtgcagcggtcacagagcacccaggaatagcgcacatcactgccggcctccagcgacgtgctgaagctcaygctcccattcaggggcaccaccgtgcggcttgcattgacgacgagcccccgcacgcgccgcttcaccgtcacattgagccaggcctcgctgcggctcacc

SEQ ID NO: 219511 - DNA, 201 bp, Homo sapiens
gagggcacagagcagcatcttcttagtccctccccacatctgggcccctctttacaccctgggtcccccgagaggcaccctgcgttcacacaggacagaawggctgaggctactgaagcaggtcagagaccgaggaacgccatggcaggaaggagcccaggctggaggctcagctcctcggccaagctgcccgtctgccct

SEQ ID NO: 219512 - DNA, 201 bp, Homo sapiens
aagatgctgtcctgggcggagcccacctcgttctcagccgtgacgatgatattgaaggtgcccacggagcggaaggtgtaagagatggtaggacccccagrgatgggcgtgcagcggtcacagagcacccaggaatagcgcacatcactgccggcctccagcgacgtgctgaagctcacgctcccattcaggggcaccacc

SEQ ID NO: 219513 - DNA, 201 bp, Homo sapiens
ccctcctccaaggaccaagtgtatacgacaccactgccaccagccagctcggcactgagggtgacgcttgtgttgacggcagctgggttcggggaggcggycaccatcagccaccccacaggctccacgaagtccatggtgcagtcggcccaggcgctgcccagcatgttggtggcccgcagctgcacatggtaggtgccg

SEQ ID NO: 219514 - DNA, 201 bp, Homo sapiens
gcccctcctccaaggaccaagtgtatacgacaccactgccaccagccagctcggcactgagggtgacgcttgtgttgacggcagctgggttcggggaggcrgccaccatcagccaccccacaggctccacgaagtccatggtgcagtcggcccaggcgctgcccagcatgttggtggcccgcagctgcacatggtaggtgc

SEQ ID NO: 219515 - DNA, 201 bp, Homo sapiens
ggtttttgccccgcacgctcaccacgtggtctccgacgcgggggaagctgtgggagaaacggggcccggggagcacctcggggttggccccgccgacctgyaggcggaaggtgacagctgagccggcagccagcaggatctgaaaatggaccagctgcccgggcgccaccaccttgctgctggcccacagcaccaggccca

SEQ ID NO: 219516 - DNA, 201 bp, Homo sapiens
gcgggtcggttcctgaggaattggaagtgtcacgagatgtggccctcgttgggctggcgctcattggcctcccttgtgcctgtgcaggaggagctgattawctcagtggtcatctcgcagctctcccacatccccgaggataaagaccaccaggtccgaaagctggccacccagttgctggtggacctggcagagggctgc

SEQ ID NO: 219517 - DNA, 201 bp, Homo sapiens
ctaaccaccctggggtcctctgacatgcctagtcctgctacttgcccagacctgatgccagcaggcctgggcgctgctctcttgctacctggcctggggcmagggaggatgacaaggcctctggggtgatgagagtgcctggcagacagctgtgcccccagcaccggcccaaggccaagctcgcatccaagcagcagccgg

SEQ ID NO: 219518 - DNA, 201 bp, Homo sapiens
ctgcctgcaagccacgccacgcgtgtgtatgagatgctggtcagccacattcagctccactacaagcacagctacaccctgccaatcgcgagcagcatccrgctgcaggtatggtggctggggttgcgcagccagttcctgggggcccagccaggtatccccgtctcggcaggtgtggttcctggaagctgcagagacggc

SEQ ID NO: 219519 - DNA, 201 bp, Homo sapiens
ctttctcctcccacagggcctcctggcccggcgcctgcaggccccgccgtgcggctggggtccgtgccctactccctgctcttccgcgtcctgctgcagtrcttgaagcaggtgagtggggccgggcagggaccatccgtcccacgttgggccaggaggacagggagctgccacctgcctgctgggcctccctccctgtct

SEQ ID NO: 219520 - DNA, 201 bp, Homo sapiens
gtggatggatgttggcttgtcctcggaattccttctggtgctggtgaacttggtcaaattcaatagctgttacctcgacgagtacatcgcaaggatggttyagtaagaaaagaattgagatcctgttctgataatggtcctaagttcagctccgcagtgaataaagttgaaaccaccaaaaaaatagaggttgggctgggc

SEQ ID NO: 219521 - DNA, 201 bp, Homo sapiens
ggtgtcaacggtcagtgtgggcccaagacgggggtaccaggctctgccccatctggatggccctggggaggaaggggagtgggcagcagacactcacctcrggccggctcctcgcccagggccacgatgctgtaggcggcctccaggcctgaaccaccgcggttctggatgctgaggtcgaggctctcgtcactctgcacc

SEQ ID NO: 219522 - DNA, 201 bp, Homo sapiens
ctgctgagtggctacagtgatgcaggcgatgctctggggcaccgggtgtccatcctcccaaggtgctgtctgcaggggagggtgccagccaaaagccaccrggtagaaagaaaacaaggaccttgctaagatggggggtcatctgggcagatggggcccctgcctacctttgggggggcactggagtcatagcagtgctca

SEQ ID NO: 219523 - DNA, 201 bp, Homo sapiens
ctctggtggacgggggggccctgtggtcagcctggccccagcccacagtgacagcagggctttggcaacggctggagccatggctgcggcaggtgtggctkcaggaaggtgagctggcagggggcgccccaagactctacctggccagggtaatggcagcacacaccctgcccggaaccccacctgggggcagacacacag

SEQ ID NO: 219524 - DNA, 201 bp, Homo sapiens
ctggggtgtgcgcccagccccgcgcccaccggcccagccctcaccttgaccaaaagcaggaagagcagcgaggccgccaggccacgggctgcggagctcasctgcgccacctggtcgaagctagtgaagcggcgcgggcggccgcgcacgaaacgggtccactggcggtcagcggcacccagctgggcgaggcgtaccagt

SEQ ID NO: 219525 - DNA, 201 bp, Homo sapiens
tctccgtggcccccagctcctctctggccaggcccccagcagcccatgaaacagaaagcaaatttcaccagagacacccatggaagccctacgagaaacgscttccccccaagaacaaggccagggggccgcgtgtgccccacccgctgcacgcaccgtccagcagcgtatagttgagctgcagatgcagcccggccgcag

SEQ ID NO: 219526 - DNA, 201 bp, Homo sapiens
ccaggagctctggcagagctcggcataatgtcttgccaaagacggaccactggcgcacgaagcgtagctgctgggcagcctgcggacgagaaatctgtctkcttgcagccctggggtgtgcgcccagccccgcgcccaccggcccagccctcaccttgaccaaaagcaggaagagcagcgaggccgccaggccacgggctg

SEQ ID NO: 219527 - DNA, 201 bp, Homo sapiens
caaaaactgccttgttctgacgcctgcgacgagactcactcccagagggtgcaaccagcacagccagtgagagcaggggaggccctgccaccccgctgcgsccctcacctgagccccggccccagcctgtcttgacgaggatctcgtacttgaagcggccccgctgcccacagaaggggatggcgcggccccggctggcat

SEQ ID NO: 219528 - DNA, 201 bp, Homo sapiens
cgaggcggggaagcagaggaaggaagggaggatgcgaacaggaaggccaaggagctgctgggactgggcgtcaggcctcagggccccacggcctggggggrgcttcagggggaccccccgagcctgagatgcttgaccctcacttcctgcaccgtcgccacccccctcagccttctgaggtctctctcaggccactgccac

SEQ ID NO: 219529 - DNA, 201 bp, Homo sapiens
cccaccgtagtgctgctgcaggatggcgctggtctgcttgatgtatttcaccttgctctgaaagacaggggtgggttcagccttggaggcaagggcacagsccaacctgggaggatgcagcccccaggagacccacaggtggccagagctacctgcacctgctgaggacgtgtgcaagctcagcccccgccccccaggagg

SEQ ID NO: 219530 - DNA, 201 bp, Homo sapiens
gggggctgggtcagtgctgacagagggcgggcggggtgagctcttctccctaggaagccccccacatactcatacctaggcagccactcctccagggcggygcgggtctcctctggggacttggttgccttcttggtccacctcagcctgttggcgattctgtgcacatgcgtgtccactgctgctgggaggccaagcggg

SEQ ID NO: 219531 - DNA, 201 bp, Homo sapiens
cgtcacagagtcgggggatcccgctgctccccccacgcaggcctgcactcacccgtgcattcgaagtgcaccttggtggtgagggcgtgcacagcgcccartgggaagaggcggcaagagccccccagcggcgggcggttgggggacaggcggatggaggcgcagccctcctcctcgccagagcggcccagcaccgtgagc

SEQ ID NO: 219532 - DNA, 201 bp, Homo sapiens
gtcgggggatcccgctgctccccccacgcaggcctgcactcacccgtgcattcgaagtgcaccttggtggtgagggcgtgcacagcgcccagtgggaagasgcggcaagagccccccagcggcgggcggttgggggacaggcggatggaggcgcagccctcctcctcgccagagcggcccagcaccgtgagcgtgaaggtg

SEQ ID NO: 219533 - DNA, 201 bp, Homo sapiens
gcagcgccagccgcggcagcaccagccgaggccggctcacgtccacgccgggcagggccacacgcgctgggcgccccggccgctggcagctggcggtgcgrtacacctcccagcggtactcagtctggtaggtgacgcagtcgcgcaggtcaacgtgggcctccaagtagttgcgctgtgatcgccgcatcagcacctgca

SEQ ID NO: 219534 - DNA, 201 bp, Homo sapiens
gaagcgtgcacagccgcgtgcttgcttcttctgagttatctggcgtgctgctgtgcagtcgtccgtggcgtctgcttagcaaagtgccctcgttctttcaycattctggcttctgagtcttctctctttctccctggtcagtctagctaaggctgctcaagtgtgttgacccttcccgagcagcctttggtggacgccttt

SEQ ID NO: 219535 - DNA, 201 bp, Homo sapiens
cgcgggagcgcatgaggatgcgcatgagggcagaggtcaggttgtaggcctgggacgccaccatccgagatggtgactcggctcccagctctgagggctgyggtgcccgcacgtccgagctggccaggtggatgaggtctcctgcagacatgcgtgaggtcagtgcagagacagggaggtagagggagggtgggggcaggc

SEQ ID NO: 219536 - DNA, 201 bp, Homo sapiens
acaaacacaaagcagtagtgccccacaggcagcgccagccgcggcagcaccagccgaggccggctcacgtccacgccgggcagggccacacgcgctgggcrccccggccgctggcagctggcggtgcgatacacctcccagcggtactcagtctggtaggtgacgcagtcgcgcaggtcaacgtgggcctccaagtagttg

SEQ ID NO: 219537 - DNA, 201 bp, Homo sapiens
gcccgccagcgtcaggggctcctcgttgagcacgcgggagcgcatgaggatgcgcatgagggcagaggtcaggttgtaggcctgggacgccaccatccgaratggtgactcggctcccagctctgagggctgtggtgcccgcacgtccgagctggccaggtggatgaggtctcctgcagacatgcgtgaggtcagtgcaga

SEQ ID NO: 219538 - DNA, 201 bp, Homo sapiens
acacgacaaacacaaagcagtagtgccccacaggcagcgccagccgcggcagcaccagccgaggccggctcacgtccacgccgggcagggccacacgcgcygggcgccccggccgctggcagctggcggtgcgatacacctcccagcggtactcagtctggtaggtgacgcagtcgcgcaggtcaacgtgggcctccaagt

SEQ ID NO: 219539 - DNA, 201 bp, Homo sapiens
attggcctggatgctctgtgtcagtggcgtgtccccaaatgacacgacaaacacaaagcagtagtgccccacaggcagcgccagccgcggcagcaccagcygaggccggctcacgtccacgccgggcagggccacacgcgctgggcgccccggccgctggcagctggcggtgcgatacacctcccagcggtactcagtctg

SEQ ID NO: 219540 - DNA, 201 bp, Homo sapiens
ccaggttggggtcgtaggactcgctcccatccagcaccaggtcccgtgtgtctgaccacacgcggtatgagccaccctcaatgatgggcaccaggcgctcrggggccaccgtcacattggcctggatgctctgtgtcagtggcgtgtccccaaatgacacgacaaacacaaagcagtagtgccccacaggcagcgccagcc

SEQ ID NO: 219541 - DNA, 201 bp, Homo sapiens
agtggaaactgagcggcgtctggtcgccgtcctccaggttggggtcgtaggactcgctcccatccagcaccaggtcccgtgtgtctgaccacacgcggtakgagccaccctcaatgatgggcaccaggcgctcgggggccaccgtcacattggcctggatgctctgtgtcagtggcgtgtccccaaatgacacgacaaaca

SEQ ID NO: 219542 - DNA, 201 bp, Homo sapiens
gggtgtggacgggtgaggggcatggaggacggccctgccacgcactgacctgtgtcgaagccacacaggcccagtggaaactgagcggcgtctggtcgccrtcctccaggttggggtcgtaggactcgctcccatccagcaccaggtcccgtgtgtctgaccacacgcggtatgagccaccctcaatgatgggcaccaggc

SEQ ID NO: 219543 - DNA, 201 bp, Homo sapiens
ccccatgctgggacggggcccaccaggcactgaggacgggccagccctggtggcaagctgggtgttctctgggctcatgggtgtggacgggtgaggggcakggaggacggccctgccacgcactgacctgtgtcgaagccacacaggcccagtggaaactgagcggcgtctggtcgccgtcctccaggttggggtcgtagg

SEQ ID NO: 219544 - DNA, 201 bp, Homo sapiens
ccctctgccctgtcagccccacttctgcctgcaggccccgtcccctcggccatgggacccatccccagcccgcccacaccccgctcaacactcacccctcrcttggagccgctgctgcaattgaggcagcggccctccaagtacacgtaggagctgcggctcacttcgtacacggcctgtgccttgcaggacacacactcc

SEQ ID NO: 219545 - DNA, 201 bp, Homo sapiens
ccgtcccgcagcacgccccgccgcagcaccagtcgcatgcctgcactgcccgtggatgtggtggtctcatccagcaccagcgtcttgttgctgaacgtacrtgcagcccaccgctgcaggcagaaggggtggtgagggggcgcaaccctctgccctgtcagccccacttctgcctgcaggccccgtcccctcggccatggg

SEQ ID NO: 219546 - DNA, 201 bp, Homo sapiens
aagtactggcacagggacgtgtacaggcccacggacacctgcagcgccgaccagcggaagtggctggagaggttcagatggtaactccccgctgggtctcygctcctgggcagggaaggggtagcggacgtgagcccaggctccgccaggttggatgtcgcagtctcagagcccatacccggtccagtcccctcgctgcct

SEQ ID NO: 219547 - DNA, 201 bp, Homo sapiens
gcacagtgtcttgagtccaagctgcgccaaggcggcaggacccccagcccagcccaggacccccagtagagtcctcacctcagcgtggaggcctgagaacrtgaggaaggagctgtccagcacggacgagtccaggcagctgtcgatgtccagcacctgctgcccggcaggtgtggggctcgggctcccagccacctgcag

SEQ ID NO: 219548 - DNA, 201 bp, Homo sapiens
ctcccccgagagccggacactcacaggctgctgagcaggtccgtttccatgtgggtgtcttgggtaggggctgggctgctgaccccctcggcaaggacctrctggatcaggtcttcatctagaggtacaggaggcatagggtgggcccagctgcaagggtgagcttcagagccccctcctctcaccccagctcacctgatg

SEQ ID NO: 219549 - DNA, 201 bp, Homo sapiens
gctgtgcagctcctgcttgatggcgctttgcagacggtaggcgtgcccatggcatgaggcatccccatagctggccagcagggtcaccagcagaaaaagcrtgtacaccaggaggctctggtggacgggggggccctgtggtcagcctggccccagcccacagtgacagcagggctttggcaacggctggagccatggctg

SEQ ID NO: 219550 - DNA, 201 bp, Homo sapiens
acaaaggtatctacacatgtccacatgtcccctagggtctggctggactaaaggcaaaactaaagcccagaagacagaccagtgcaccggatgcccgtacygcgtgatggccaggaaggcccggctgtgcagctcctgcttgatggcgctttgcagacggtaggcgtgcccatggcatgaggcatccccatagctggccag

SEQ ID NO: 219551 - DNA, 201 bp, Homo sapiens
gagcagggctgatgccagagctccgctaaaggctgctctctcaacaagaggaacgatttaagtcttggggcacgccctgccagctcaccttcctgcagccrcacctgccgcagccgtgggggccccagctctgggctggactggttcccgtggacgtagggcagcagcacgtgggccatccatggccagagctcctcagac

SEQ ID NO: 219552 - DNA, 201 bp, Homo sapiens
gacgctgagggcggccagggcgcggccggccgccgggaactcgaggcgcagcgtgacggcggcgtgcagccccacggccgggctgtagcgcgtgagctccrggaacacagcgcggctcctgcgcagagggtgcgggtcagtaggagcgggtggcagggcgggagctgcggggaccgcgcagtgcaggcgtggctgaggggc

SEQ ID NO: 219553 - DNA, 201 bp, Homo sapiens
tgcggggaaggcgacaccagtgagggcgtacagctgagctgagctgagctaagacgccctccccggccgcgcagtcacctaccaggatggccagctgggcktaggctaccccgagcaccaccaggcccaaggtgacccccaggagctctggcagagctcggcataatgtcttgccaaagacggaccactggcgcacgaagc

SEQ ID NO: 219554 - DNA, 201 bp, Homo sapiens
gctaccccgagcaccaccaggcccaaggtgacccccaggagctctggcagagctcggcataatgtcttgccaaagacggaccactggcgcacgaagcgtasctgctgggcagcctgcggacgagaaatctgtctgcttgcagccctggggtgtgcgcccagccccgcgcccaccggcccagccctcaccttgaccaaaagc

SEQ ID NO: 219555 - DNA, 201 bp, Homo sapiens
ctcgcccgccagcgtcaggggctcctcgttgagcacgcgggagcgcatgaggatgcgcatgagggcagaggtcaggttgtaggcctgggacgccaccatcsgagatggtgactcggctcccagctctgagggctgtggtgcccgcacgtccgagctggccaggtggatgaggtctcctgcagacatgcgtgaggtcagtgc

SEQ ID NO: 219556 - DNA, 201 bp, Homo sapiens
ctccctgtgggggtgggggctgggtcagtgctgacagagggcgggcggggtgagctcttctccctaggaagccccccacatactcatacctaggcagccaytcctccagggcggcgcgggtctcctctggggacttggttgccttcttggtccacctcagcctgttggcgattctgtgcacatgcgtgtccactgctgctg

SEQ ID NO: 219557 - DNA, 201 bp, Homo sapiens
cttcccaagggagctggggaggggaccctgggtcctggttggccacacagcctctttaaagtgctgaagcccacagacagacagatgcccctgcctgctcyctggggaacctacgtgcagccattctgcctggccctcggccttgacagcggcagaaagtaatactgagcggtgtccactccgactccacggcccaccccc

SEQ ID NO: 219558 - DNA, 201 bp, Homo sapiens
gccctgggccacgatctcctcgcccgccagcgtcaggggctcctcgttgagcacgcgggagcgcatgaggatgcgcatgagggcagaggtcaggttgtagkcctgggacgccaccatccgagatggtgactcggctcccagctctgagggctgtggtgcccgcacgtccgagctggccaggtggatgaggtctcctgcaga

SEQ ID NO: 219559 - DNA, 201 bp, Homo sapiens
gtggaggagaggaggccacacaggtgaggctgaggggcaggaagggctgggcaggaagaggctgccccgacccctacggcacccacctgtaggcagagtcrccaacagccccgtaccacacggcgttggcgcccaggaagaggcagatgaggagaacgcagcaggtggccctctggatgcgagtgaaacggctacgaggcg

SEQ ID NO: 219560 - DNA, 201 bp, Homo sapiens
caggctccgcgggtccgagcgcttgccctgggccacgatctcctcgcccgccagcgtcaggggctcctcgttgagcacgcgggagcgcatgaggatgcgcrtgagggcagaggtcaggttgtaggcctgggacgccaccatccgagatggtgactcggctcccagctctgagggctgtggtgcccgcacgtccgagctggc

SEQ ID NO: 219561 - DNA, 201 bp, Homo sapiens
caccacacccggcccggccactgggacgtttctaagggactaactcagcctcttcacttcctatagatgtactgagattttcttctggagtgcatttcggragcgtgcacagccgcgtgcttgcttcttctgagttatctggcgtgctgctgtgcagtcgtccgtggcgtctgcttagcaaagtgccctcgttctttcacc

SEQ ID NO: 219562 - DNA, 201 bp, Homo sapiens
cagcaggctccgcgggtccgagcgcttgccctgggccacgatctcctcgcccgccagcgtcaggggctcctcgttgagcacgcgggagcgcatgaggatgsgcatgagggcagaggtcaggttgtaggcctgggacgccaccatccgagatggtgactcggctcccagctctgagggctgtggtgcccgcacgtccgagct

SEQ ID NO: 219563 - DNA, 201 bp, Homo sapiens
tagcacagcaggctccgcgggtccgagcgcttgccctgggccacgatctcctcgcccgccagcgtcaggggctcctcgttgagcacgcgggagcgcatgasgatgcgcatgagggcagaggtcaggttgtaggcctgggacgccaccatccgagatggtgactcggctcccagctctgagggctgtggtgcccgcacgtcc

SEQ ID NO: 219564 - DNA, 201 bp, Homo sapiens
cctggggcgccgccatagcacagcaggctccgcgggtccgagcgcttgccctgggccacgatctcctcgcccgccagcgtcaggggctcctcgttgagcaygcgggagcgcatgaggatgcgcatgagggcagaggtcaggttgtaggcctgggacgccaccatccgagatggtgactcggctcccagctctgagggctgt

SEQ ID NO: 219565 - DNA, 201 bp, Homo sapiens
aagtggccgaggggcgggcggcacccaccgtctggttggtggcctcctccttgcggccggccttccacacggtcaggctgaaggtgtactccacgccagcygccagccgctcccgtggaatggtgaccgtgctgctcccgcggggcccaaagttcagcgcacacccgccagcctccctctgcaggccgagaacaaggggcg

SEQ ID NO: 219566 - DNA, 201 bp, Homo sapiens
cagccaggccctggggcgccgccatagcacagcaggctccgcgggtccgagcgcttgccctgggccacgatctcctcgcccgccagcgtcaggggctcctygttgagcacgcgggagcgcatgaggatgcgcatgagggcagaggtcaggttgtaggcctgggacgccaccatccgagatggtgactcggctcccagctct

SEQ ID NO: 219567 - DNA, 201 bp, Homo sapiens
ggctgtccaaggcaagtggccgaggggcgggcggcacccaccgtctggttggtggcctcctccttgcggccggccttccacacggtcaggctgaaggtgtmctccacgccagccgccagccgctcccgtggaatggtgaccgtgctgctcccgcggggcccaaagttcagcgcacacccgccagcctccctctgcaggccg

SEQ ID NO: 219568 - DNA, 201 bp, Homo sapiens
gagcccacttgactggacccccacagcctcctcactaagcattttctgtggctctgcatgacccagggcctccacctggggaccacgtgatgcagcccacygaccacacaaggcacctcttcacatgagagcggaggaggaggggagagaggagaggggagtggagaaaaggggggagaggagaggggaggggagagaagg

SEQ ID NO: 219569 - DNA, 201 bp, Homo sapiens
ggatggagaagtggcagccaggccctggggcgccgccatagcacagcaggctccgcgggtccgagcgcttgccctgggccacgatctcctcgcccgccagygtcaggggctcctcgttgagcacgcgggagcgcatgaggatgcgcatgagggcagaggtcaggttgtaggcctgggacgccaccatccgagatggtgact

SEQ ID NO: 219570 - DNA, 201 bp, Homo sapiens
tggcttgaagactgtacgtggaactgtggcaggtttggaaggaagcaaagctgaagcaggctgtcgtgttacatagaatttgcatcagaaacagagagggragagcgtgcggcctccaccagcactaaaacacggaaaacagtagatgaccagggaggctgggctgtccaaggcaagtggccgaggggcgggcggcaccca

SEQ ID NO: 219571 - DNA, 201 bp, Homo sapiens
tcctcacctggctcccacccccagccctgcagctggagagcccacttgactggacccccacagcctcctcactaagcattttctgtggctctgcatgaccsagggcctccacctggggaccacgtgatgcagcccaccgaccacacaaggcacctcttcacatgagagcggaggaggaggggagagaggagaggggagtgg

SEQ ID NO: 219572 - DNA, 201 bp, Homo sapiens
aagcctcggggatggagaagtggcagccaggccctggggcgccgccatagcacagcaggctccgcgggtccgagcgcttgccctgggccacgatctcctcrcccgccagcgtcaggggctcctcgttgagcacgcgggagcgcatgaggatgcgcatgagggcagaggtcaggttgtaggcctgggacgccaccatccgag

SEQ ID NO: 219573 - DNA, 201 bp, Homo sapiens
tgtgtagcttttgccactagagcatatgtggcttgaagactgtacgtggaactgtggcaggtttggaaggaagcaaagctgaagcaggctgtcgtgttacrtagaatttgcatcagaaacagagaggggagagcgtgcggcctccaccagcactaaaacacggaaaacagtagatgaccagggaggctgggctgtccaagg

SEQ ID NO: 219574 - DNA, 201 bp, Homo sapiens
ccctcctctctacacgggtcctcacctggctcccacccccagccctgcagctggagagcccacttgactggacccccacagcctcctcactaagcattttytgtggctctgcatgacccagggcctccacctggggaccacgtgatgcagcccaccgaccacacaaggcacctcttcacatgagagcggaggaggagggga

SEQ ID NO: 219575 - DNA, 201 bp, Homo sapiens
ccactctggggcaccagcaggccccgcctgacagcagcaggagcagccaccacgggctcagggtcaccaagcctcctggccggtccagagaggggagcgtragggtgagaaccggcccaccacatccagcaacagggacatgggctggggacagtggctacctctggggtgggaaggggctcttcctcactgttggtattg

SEQ ID NO: 219576 - DNA, 201 bp, Homo sapiens
gccccactccttgcacacgccctcctctctacacgggtcctcacctggctcccacccccagccctgcagctggagagcccacttgactggacccccacagyctcctcactaagcattttctgtggctctgcatgacccagggcctccacctggggaccacgtgatgcagcccaccgaccacacaaggcacctcttcacatg

SEQ ID NO: 219577 - DNA, 201 bp, Homo sapiens
gcccactctggggcaccagcaggccccgcctgacagcagcaggagcagccaccacgggctcagggtcaccaagcctcctggccggtccagagaggggagcrtgagggtgagaaccggcccaccacatccagcaacagggacatgggctggggacagtggctacctctggggtgggaaggggctcttcctcactgttggtat

SEQ ID NO: 219578 - DNA, 201 bp, Homo sapiens
cctggccccactccttgcacacgccctcctctctacacgggtcctcacctggctcccacccccagccctgcagctggagagcccacttgactggacccccmcagcctcctcactaagcattttctgtggctctgcatgacccagggcctccacctggggaccacgtgatgcagcccaccgaccacacaaggcacctcttca

SEQ ID NO: 219579 - DNA, 201 bp, Homo sapiens
ccagggcctgggtcaggaggctgagctgggatggaacctgctcccacaccctcccctcagacgacccctctgggaagacccccaatcaggccagctgaggraagcagggactggggaacagacgcccactctggggcaccagcaggccccgcctgacagcagcaggagcagccaccacgggctcagggtcaccaagcctcc

SEQ ID NO: 219580 - DNA, 201 bp, Homo sapiens
gagctgcggggaaggcgacaccagtgagggcgtacagctgagctgagctgagctaagacgccctccccggccgcgcagtcacctaccaggatggccagctrggcgtaggctaccccgagcaccaccaggcccaaggtgacccccaggagctctggcagagctcggcataatgtcttgccaaagacggaccactggcgcacg

SEQ ID NO: 219581 - DNA, 201 bp, Homo sapiens
gggtgcgaggcatcggagccagcgctgggtgggggcacatccggggataccttggagcccctggaggagcgagagggcagcggctccatcccttcaaagcrgactttgtggcggaactgggggcggcacaggggctcagtcagtccggctgcaccctgggcagagcccagggcgtgtccctctcccccccactgggccgta

SEQ ID NO: 219582 - DNA, 201 bp, Homo sapiens
gcagtggtcagcgggcggcagctcagacctgctcaggacagggatgagaagccacctcctcagcagacaggacagagcccggtgccatctgacagaatgtyctagaatgctggatatatgggacatctgcaccgtccgtgatggcagcccctcgcgacgtgtgccactgaacacttgacagcagactggtgcagctaagga

SEQ ID NO: 219583 - DNA, 201 bp, Homo sapiens
gtgcctggcagacagctgtgcccccagcaccggcccaaggccaagctcgcatccaagcagcagccgggctgccataacgccaccacacctaccaagcgcascaggtgttgggggaggccagctctgggcgcaggcccctcagccctagtgaaaatagtgacatacaaaaatatacacattttaacaccatataaattactg

SEQ ID NO: 219584 - DNA, 201 bp, Homo sapiens
gcggccatgcccacagaagtggtacacagaagcaggcacagccagctccgagggccttgaggctgcctgggccatacagcacactcgcgcgtgcgcgcgcrcacacacacacacacacagtcaccttcctccaccctgggagccagcccccaggaggagtcttttcctctaaccaccctggggtcctctgacatgcctagt

SEQ ID NO: 219585 - DNA, 201 bp, Homo sapiens
ctgcaccacgtcactgaggttggccagggccccgctgaaagcctcggggatggagaagtggcagccaggccctggggcgccgccatagcacagcaggctcygcgggtccgagcgcttgccctgggccacgatctcctcgcccgccagcgtcaggggctcctcgttgagcacgcgggagcgcatgaggatgcgcatgagggc

SEQ ID NO: 219586 - DNA, 201 bp, Homo sapiens
acttcaggaggctgaggcaggaggatcacttgagctcaggagttggagacagtgagaccctgtctttacaaaaaattaaaaaatgacctagcctcaacttkgtcaggcgtggtggctcacgcctgtaatctcagcattttgggaggctgagatgggtggatcacgaggtcaggagttcaagaccagcctggctaagatggt

SEQ ID NO: 219587 - DNA, 201 bp, Homo sapiens
aggagcaggctgagcccgtgggccagggaggcacaccaggccggcagcaggcgcttccgcagaccctccaccagtcctggggaagcagagacagacctgtkagaggcagctcacagggaggggctaggggcatcccggggctacgcaagcacacctgtcctggacagcctcgctgcctggggctgttcccagttcaggcct

SEQ ID NO: 219588 - DNA, 201 bp, Homo sapiens
cctcccaggatactcatccggtttgccaccttccaacttggacggcggaagggcatacacagggcagaggacactggagtgtgcgttctggtgtactggasccagctggaccctagcaggaggcaggcaatgctcactgagggcccctggggggatgcgtgtgagaagagacgtatgtgtgggtgtgaggaccgcagctgc

SEQ ID NO: 219589 - DNA, 201 bp, Homo sapiens
ggtaaatggctcggaggtctcccagctcagcccctcctccaaggaccaagtgtatacgacaccactgccaccagccagctcggcactgagggtgacgcttktgttgacggcagctgggttcggggaggcggccaccatcagccaccccacaggctccacgaagtccatggtgcagtcggcccaggcgctgcccagcatgtt

SEQ ID NO: 219590 - DNA, 201 bp, Homo sapiens
tgaggccagccgctcgatggggatctgggcgccggcctgtgtctggaatgccatcgaggccaccttggtggagacggtgtagttgctgatatagccaaagrgaaagggattggagtccaccagaaagatgagctgcaccacgtcactgaggttggccagggccccgctgaaagcctcggggatggagaagtggcagccagg

SEQ ID NO: 219591 - DNA, 201 bp, Homo sapiens
cgagaaacgccttccccccaagaacaaggccagggggccgcgtgtgccccacccgctgcacgcaccgtccagcagcgtatagttgagctgcagatgcagcmcggccgcagggttgctgctgtccagggtgaccacagcaccgacggaggcctggggctggaccacaacggagttggcggagttggcggagctgcggtggcc

SEQ ID NO: 219592 - DNA, 201 bp, Homo sapiens
gatggccctcctgagcccaccctctgccacgggcctgaaaggccataggagcctctgcaccagagctggcacctgcttctccgtggcccccagctcctctytggccaggcccccagcagcccatgaaacagaaagcaaatttcaccagagacacccatggaagccctacgagaaacgccttccccccaagaacaaggccag

SEQ ID NO: 219593 - DNA, 201 bp, Homo sapiens
gtggcatggggcacgggccgcggcacctgtgatgttgaggatgctgtctccgatggcggtgggcgtcacggtgcccgcggtggtctctgcctgcaggatgmgcatcatggcctccagcttgtgcagcgtctgcttcaggcacgagcggcatacgagctccctgctgggcccctgtgtggagccagcagtgtccagccccgc

SEQ ID NO: 219594 - DNA, 201 bp, Homo sapiens
acgatggccctcctgagcccaccctctgccacgggcctgaaaggccataggagcctctgcaccagagctggcacctgcttctccgtggcccccagctcctytctggccaggcccccagcagcccatgaaacagaaagcaaatttcaccagagacacccatggaagccctacgagaaacgccttccccccaagaacaaggcc

SEQ ID NO: 219595 - DNA, 201 bp, Homo sapiens
tgaagaaggtgtagggccggtggtcagcaccctggagtgactctgggcggatcctcctgctagccgagcagttgtgctcattgggccggggctccgagtgyaggtagactgccaggtagggctcaggttcctcagacaggtagtggcctggggcagaacgcgcaggtcacacgcctgccgggaagctcaaccacccggggg

SEQ ID NO: 219596 - DNA, 201 bp, Homo sapiens
accacgttctggaaggtcagggactgcttgtcgttgatggtccaccggaagaccatgtccgagccggcctccaccacggggctgtacctctgcggggggamtggtgtcagcctgggctctgtggaggactctgcccttagcctgtcgcctcctggacacacctcccgtcgggctggagagtcccacgcggggcacagagga

SEQ ID NO: 219597 - DNA, 201 bp, Homo sapiens
cacacctcccgtcgggctggagagtcccacgcggggcacagaggagaggaggtgcccggggctctgcatgccatgggagccaagcccgggctgggacactsactgtccggctctccagccagccatgtagtactactaatgcctcaacctctctgtgcctcagtttccccatctgtaaagcaaacctagtaccagctacaa

SEQ ID NO: 219598 - DNA, 201 bp, Homo sapiens
tggccctggggaggaaggggagtgggcagcagacactcacctcgggccggctcctcgcccagggccacgatgctgtaggcggcctccaggcctgaaccacmgcggttctggatgctgaggtcgaggctctcgtcactctgcaccgaggacgggcacacgagctccagggcggcaggtgccgcttccacctgcacgtctgtc

SEQ ID NO: 219599 - DNA, 201 bp, Homo sapiens
tcccggcagagcctgctgggcacccccaccctctgcggggcagggcccggcccgggagtgatgccaccctgcctctcccctctccccacagagcaacagcragctcgccatcctgtccaatgagcatggctcctacaggtacacggagttcctgacgggcctgggccggctcatcgagctgaaggactgccagccggacaa

SEQ ID NO: 219600 - DNA, 201 bp, Homo sapiens
ttgccagctcaggctgggacaggccaccaacccccagggtccccctcctccaaaccccaggaccagagcctaagaggacaacacaaggcaggggcgggggytccactgctgtgccaagggcctggagaacacgggccttgctctccgctcagcagccaccagcgcccttctctcccggacagctcccgaggggctgctctc

SEQ ID NO: 219601 - DNA, 201 bp, Homo sapiens
agcccctggagtaatcaggaggtgccccagtgcaaggcacagagggcctcagcactggccccacaaacccatccggccctgctcaccctcagccgtcttcyacatcgccaccctgatgcccaccaaggacgtggacaagcaccgctgcgacaagaagcgccacctgggcaacgactttgtgtccattgtctacaatgactc

SEQ ID NO: 219602 - DNA, 201 bp, Homo sapiens
cgcaaatgtgagtgggggtgggtccaggcgtgagctggtgggacaggcccaggtgccacctgatagtgagctcaccccctgcctacgtccccagatggccycacaggtgcatcatagccgctccaaccccaccgatatctacccctccaagtggattgcccggctccgccacatcaagcggctccgccagcgggtagggaa

SEQ ID NO: 219603 - DNA, 201 bp, Homo sapiens
caggaccaaaacctggctggttgggaacaagcttgtcactgtgacgacaagcgtgggaaccgggacccggtcgttactaggcctggactcgggggagctgyagtccggcccggagtcgaggtgactgcaccttcctttcctccgcgcctgccagcctcgacaccggctgtcccgagcccaggcccacgtggcaccctcgta

SEQ ID NO: 219604 - DNA, 201 bp, Homo sapiens
gtcaggctgcgtggggatgcaggcggcgggttcaacgcgcagcacctccaggacgaagaccagcacgtgcaggctccgggccaggtggccggcggggctgsccgcacccacggtcactgtgcagttctgtgcccgcaggtacacatgctccactgttgcctccgggcccgacagcacggtgccgtcccccatgtcgaaggt

SEQ ID NO: 219605 - DNA, 201 bp, Homo sapiens
caggggcccctccgtggcctggccagccccccaaggaagctgtgtctctggcagttgcgctctaaggcatcaggcctaggggtcgctccagaatgcctgtyttccccgacgccaatcccaggcaggggccccggggtctgcgcctgctgtccctacactctcccacactctcctgtcattcagggatgcaggtgggaaagg

SEQ ID NO: 219606 - DNA, 201 bp, Homo sapiens
cagaaatgggagccaggggcccctccgtggcctggccagccccccaaggaagctgtgtctctggcagttgcgctctaaggcatcaggcctaggggtcgctscagaatgcctgtcttccccgacgccaatcccaggcaggggccccggggtctgcgcctgctgtccctacactctcccacactctcctgtcattcagggatg

SEQ ID NO: 219607 - DNA, 201 bp, Homo sapiens
accagaaatgggagccaggggcccctccgtggcctggccagccccccaaggaagctgtgtctctggcagttgcgctctaaggcatcaggcctaggggtcgstccagaatgcctgtcttccccgacgccaatcccaggcaggggccccggggtctgcgcctgctgtccctacactctcccacactctcctgtcattcaggga

SEQ ID NO: 219608 - DNA, 201 bp, Homo sapiens
cctgcccggaaccccacctgggggcagacacacaggccactgcagtggtgcttaggggccttcagggccaggcaggagtgggcattggagctgggccctgkcagggactggggcagcaagtggggggcgtggggtaggagggagaccgggcaaaggctgcagagcattgaacccctaagggccttctgaggtgaggaaagg

SEQ ID NO: 219609 - DNA, 201 bp, Homo sapiens
cagatgtgcttgtcaaagaagccacgctgcagctcagccaccagcaggcgccggaagcgcaaaagggctgcgtcgcctagaaggcagggagggccgcactkcaggaggccacggggcaggaccaccctgcccaacctcccacggagtgggaacatggaacgaggccttactcgcggccagcacctccttctccaccaggcc

SEQ ID NO: 219610 - DNA, 201 bp, Homo sapiens
taaacccatcgcccacagcctgaccagctgcccttacagcagtgcacagtctctcagggtgcaatgagccccccttcaaccctgcaaactatgattgggtytcaaccatccaacaagcatctctacaatctagagacgccagtgtgtctgtcccatgcaggtttatggcctaaaattaacttctggacaaggaaacatatg

SEQ ID NO: 219611 - DNA, 201 bp, Homo sapiens
actgtgttggccaggctggtcttggaactcctgacctcaagtgatctgcccgcctcggcctcccaaagtgctgggattacaggtgtgagccaccgcgcccrgccatcgttccattttaattaacttaaatacgagcagccacatgtggcctctggttcctgccacggactcgggagcaacccctcctggtcgcggcttatg

SEQ ID NO: 219612 - DNA, 201 bp, Homo sapiens
cctctcccgcccgcttgctgctgataaacccatcgcccacagcctgaccagctgcccttacagcagtgcacagtctctcagggtgcaatgagccccccttyaaccctgcaaactatgattgggtctcaaccatccaacaagcatctctacaatctagagacgccagtgtgtctgtcccatgcaggtttatggcctaaaatt

SEQ ID NO: 219613 - DNA, 201 bp, Homo sapiens
aagaggcaggtacccgcaagatggagacagccctgtcccccatgtacccagcatggtggcaccgcgggcagcccgcagtttcccatcaggggttcagactycacctcaaaagccactcgctttagccaggcgagaacacagcagagggcgtgagagactcacgggggctcgtgtgaggtcagggagcagagttttaaattc

SEQ ID NO: 219614 - DNA, 201 bp, Homo sapiens
gcccccagctcatgtccacctctgcatctgcagagctgacaggaacggccccaccggccggcgccacctgctcaccagggccggcccagctcccacctccytcctcctgagactccccagccgcaggctctgccccagtgcttcagagatctcccaacctatggcccctcggggggtgggggcaggcacctggtgacccgg

SEQ ID NO: 219615 - DNA, 201 bp, Homo sapiens
ggcccgcagagctcaccccggggaaatgaagaaggtgtagggccggtggtcagcaccctggagtgactctgggcggatcctcctgctagccgagcagttgygctcattgggccggggctccgagtgtaggtagactgccaggtagggctcaggttcctcagacaggtagtggcctggggcagaacgcgcaggtcacacgcc

SEQ ID NO: 219616 - DNA, 201 bp, Homo sapiens
agcacccacccacggggcctgtgggtaccggcagggatccccgtgcaggccacctcccgtatggcgtgcccaggagtgtccggaggctgcccccagctcaygtccacctctgcatctgcagagctgacaggaacggccccaccggccggcgccacctgctcaccagggccggcccagctcccacctccttcctcctgagac

SEQ ID NO: 219617 - DNA, 201 bp, Homo sapiens
tgctgacccatgatgccctgccctgccctgccaggctggcccgcagagctcaccccggggaaatgaagaaggtgtagggccggtggtcagcaccctggagkgactctgggcggatcctcctgctagccgagcagttgtgctcattgggccggggctccgagtgtaggtagactgccaggtagggctcaggttcctcagaca

SEQ ID NO: 219618 - DNA, 201 bp, Homo sapiens
ttcactgggcacaagcaacattaaggcccccaagttttttggcgagacccacagtgggcagggcaggcaaggcctccaggggcaggcaggagggcaggttwtagaacgtggggggccgactacctccacgggctcgtgcggggctgagaggccgtcctgctgtgccagaggcgtcaggggtccctgcaggtccccactggg

SEQ ID NO: 219619 - DNA, 201 bp, Homo sapiens
tcgctcgagaggaagactccggtggaaactgtccatggggggcaggacccctgacctgcctttcaggaataactcacacacgctcagagaaaaggcctggrggtaatgtgagtaaacgctttcctctctgcactctggattttcccaaccatcttcactgggcacaagcaacattaaggcccccaagttttttggcgagac

SEQ ID NO: 219620 - DNA, 201 bp, Homo sapiens
gggtagcggacgtgagcccaggctccgccaggttggatgtcgcagtctcagagcccatacccggtccagtcccctcgctgcctgccgtccccatggggccygtaacccaggcaatgctgacccatgatgccctgccctgccctgccaggctggcccgcagagctcaccccggggaaatgaagaaggtgtagggccggtggt

SEQ ID NO: 219621 - DNA, 201 bp, Homo sapiens
gacccccacaggcctggctcctgtcgctcgagaggaagactccggtggaaactgtccatggggggcaggacccctgacctgcctttcaggaataactcacmcacgctcagagaaaaggcctggaggtaatgtgagtaaacgctttcctctctgcactctggattttcccaaccatcttcactgggcacaagcaacattaag

SEQ ID NO: 219622 - DNA, 201 bp, Homo sapiens
ggttcagatggtaactccccgctgggtctctgctcctgggcagggaaggggtagcggacgtgagcccaggctccgccaggttggatgtcgcagtctcagarcccatacccggtccagtcccctcgctgcctgccgtccccatggggccagtaacccaggcaatgctgacccatgatgccctgccctgccctgccaggctgg

SEQ ID NO: 219623 - DNA, 201 bp, Homo sapiens
gactccccctacccgaacttcccaggaagaggggagggaaggagagcgagccatcagacccccacaggcctggctcctgtcgctcgagaggaagactccgrtggaaactgtccatggggggcaggacccctgacctgcctttcaggaataactcacacacgctcagagaaaaggcctggaggtaatgtgagtaaacgcttt

SEQ ID NO: 219624 - DNA, 201 bp, Homo sapiens
tacaggcccacggacacctgcagcgccgaccagcggaagtggctggagaggttcagatggtaactccccgctgggtctctgctcctgggcagggaaggggyagcggacgtgagcccaggctccgccaggttggatgtcgcagtctcagagcccatacccggtccagtcccctcgctgcctgccgtccccatggggccagta

SEQ ID NO: 219625 - DNA, 201 bp, Homo sapiens
cggggcagcggcctagagaggcggaccccgcagtgtccgggtcccgggccctcacccgcgcccactgcaacccgactccggagctccgagcatcccttagktttaagtcatggcgggtgcgaacgggtctctgctgcaggcggctccgtgacagctcctgcttcacatgggtagaggagagacggcaaacgtcggggctcc

SEQ ID NO: 219626 - DNA, 201 bp, Homo sapiens
gcgctgttttccaccaccacgtccaccacgtgctccccctcactgagccacggcagtgctaccactgagaacagggtatcgttggtctcccaggggcagcygggcacgaaggtggccaccagggcagggcagacattctcaaagcgggcgctgacactgcccccaggccagcgagccgtggccgtggcgttggcaccagag

SEQ ID NO: 219627 - DNA, 201 bp, Homo sapiens
ctccaggggcagcagcccctctgtccgccacaccatgtcctcctcgctgaagtactggcacagggacgtgtacaggcccacggacacctgcagcgccgacyagcggaagtggctggagaggttcagatggtaactccccgctgggtctctgctcctgggcagggaaggggtagcggacgtgagcccaggctccgccaggtt

SEQ ID NO: 219628 - DNA, 201 bp, Homo sapiens
ttcacggctcagacgcaggcccgggaataccatgacctggtgggcagggggccgcctcagctccacagaccccatcccagcctgaagcccagactcccccyacccgaacttcccaggaagaggggagggaaggagagcgagccatcagacccccacaggcctggctcctgtcgctcgagaggaagactccggtggaaactg

SEQ ID NO: 219629 - DNA, 201 bp, Homo sapiens
acagggtcactcacaggaaacacaaagcggacatggcttgggggcacgaagaggctggcgccgaaggcggtgaggtggcgggtgaggcagacggcctggcrgggcgaggtctcctccaggggcagcagcccctctgtccgccacaccatgtcctcctcgctgaagtactggcacagggacgtgtacaggcccacggacacc

SEQ ID NO: 219630 - DNA, 201 bp, Homo sapiens
ggaacggagaagaggaactctctccatagcgcatagggggccccgggtagccctggccctgacgtgcagccattggcgcaggcctgggggtggcaggaggygtccagcggcaagcagatgttggctccagggcaccagcgtccccctggcatgcacgcgggggccagctgggtcctgttgtccggggacctgctctcaggc

SEQ ID NO: 219631 - DNA, 201 bp, Homo sapiens
gtcacgtgcaagctgtgccttctcaggatagagccgagcccacccaggccctcctcgactctgcagaggctcccaggagcacagggtcactcacaggaaasacaaagcggacatggcttgggggcacgaagaggctggcgccgaaggcggtgaggtggcgggtgaggcagacggcctggcggggcgaggtctcctccaggg

SEQ ID NO: 219632 - DNA, 201 bp, Homo sapiens
ggtcaccagggagcatgaggacatcctggccgtggagggtgacctgtggagagggaggcagggctgcatcacgtcctcacggtcatggcccgtggaccccygcacgacggatgagggtggacacgcagggctccccgcttcgtcagccacacctcaaggagcctccccacagtgctcgtgacaaggacaggcaggacagtt

SEQ ID NO: 219633 - DNA, 201 bp, Homo sapiens
ggtcacgtgcaagctgtgccttctcaggatagagccgagcccacccaggccctcctcgactctgcagaggctcccaggagcacagggtcactcacaggaarcacaaagcggacatggcttgggggcacgaagaggctggcgccgaaggcggtgaggtggcgggtgaggcagacggcctggcggggcgaggtctcctccagg

SEQ ID NO: 219634 - DNA, 201 bp, Homo sapiens
ggggaggccctgccaccccgctgcgcccctcacctgagccccggccccagcctgtcttgacgaggatctcgtacttgaagcggccccgctgcccacagaargggatggcgcggccccggctggcatccaactggtccagcttgtgcaggatggcggccatgaccatgtaggtcaccaggcacacagcacatgtcagcatga

SEQ ID NO: 219635 - DNA, 201 bp, Homo sapiens
cctggaggtaatgtgagtaaacgctttcctctctgcactctggattttcccaaccatcttcactgggcacaagcaacattaaggcccccaagttttttggsgagacccacagtgggcagggcaggcaaggcctccaggggcaggcaggagggcaggttgtagaacgtggggggccgactacctccacgggctcgtgcgggg

SEQ ID NO: 219636 - DNA, 201 bp, Homo sapiens
ggaggagctgattaactcagtggtcatctcgcagctctcccacatccccgaggataaagaccaccaggtccgaaagctggccacccagttgctggtggacytggcagagggctgccacacacaccacttcaacagcctgctggacatcatcgagaaggtgagagccgttgtacccggggccgggtgctagcgtgccagagc

SEQ ID NO: 219637 - DNA, 201 bp, Homo sapiens
tggccaggctctgtgttcctccctgtgggctgtggctgccctggccaggccctcacctgggtgcccaccatcccctccctgtgcagtttcgtgttcctgcmgctctaccattcccccttctttggcgacgagtcaaacaagccaatcctgctgcccaatgaggtaggcgtggcctccctctcctgcatccgctggagctgt

SEQ ID NO: 219638 - DNA, 201 bp, Homo sapiens
aaaacccccccaccagcccctcctcctcagcccaggctccaccgcgggcgctcggcaggcccctaaccacagccagcgtctcaggcccctgcctggccccycgcacacctccgggctgcagctcgcagacgtagctgtgcggcgctgagcacaggtcggtgttacaccacccggtgggcccgagccggacgcagtgctcgg

SEQ ID NO: 219639 - DNA, 201 bp, Homo sapiens
tctcccacatccccgaggataaagaccaccaggtccgaaagctggccacccagttgctggtggacctggcagagggctgccacacacaccacttcaacagyctgctggacatcatcgagaaggtgagagccgttgtacccggggccgggtgctagcgtgccagagctccgtgggcagcaatggcctctgggccctctgtcc

SEQ ID NO: 219640 - DNA, 201 bp, Homo sapiens
aggtgctggacgccgtggtctgctacaactgcctgccggctgagagcctcccgctgttcatcgttaccctctgtcgcaccatcaacgtcaaggagctctgmgagccttgctggaaggtggggtttctgaaactgctctggaaggttcctgagagcacatggatgggacaagggccatcctgtctcccatgaatggttgtct

SEQ ID NO: 219641 - DNA, 201 bp, Homo sapiens
tgacctgttgaccacggtggaggagctgtgtgaccagaacgagttccacgggtctcaggagagatactttgaactggtggagagatgtgcggaccagaggyctgtgagaccccctcctgggtggggcctttgggctttggctggtggggaggggccgggtgctgggtgaagtgcagctttctgagcctcagaagccaaggg

SEQ ID NO: 219642 - DNA, 201 bp, Homo sapiens
gagtcgggctggcctgcgccaggcagacgggctggtgtggggctgtggccgggcactccccacccgccccagcaggctgccgtcccgcaggagcgagtccygaggcgccgtgcgcatcaaggtgctggacgtgctgtcctttgtgctgctcatcaacaggcagttctatgaggtgcgtgtccaggcggccgcagctggggg

SEQ ID NO: 219643 - DNA, 201 bp, Homo sapiens
ggacccagagtcgggctggcctgcgccaggcagacgggctggtgtggggctgtggccgggcactccccacccgccccagcaggctgccgtcccgcaggagygagtcccgaggcgccgtgcgcatcaaggtgctggacgtgctgtcctttgtgctgctcatcaacaggcagttctatgaggtgcgtgtccaggcggccgcag

SEQ ID NO: 219644 - DNA, 201 bp, Homo sapiens
gtgcctgtggtgctggacgtgggtctgagcaggtgggacgccgcctgtcctgggcctgcacgagcttggctctggctttcaccatcctcttcctgacaggmctttgacttcctgttgctgctgcgggccgactcactgcaccgcctgggcctgcccaacaaggatggagtcgtgcggttcagcccctactgcgtctgcgac

SEQ ID NO: 219645 - DNA, 201 bp, Homo sapiens
ggcaggaaggagcccaggctggaggctcagctcctcggccaagctgcccgtctgccctggggggctgaacccagtgccctggcaggcatgcggggcagggwgagcaggtggggccatcctaccatgcactgggccagcgcagcagcgatctgctggatgtcatccacagtgtggaccctcagggacaccagagtctccgtg

SEQ ID NO: 219646 - DNA, 201 bp, Homo sapiens
tcttctttaaggtcatcaaggattacccttccaacgaagaccttcacgaaaggctggaggttttcaaggccctcacagacaatgggagacacatcacctasttggaggaagagctgggtgggtgccaccttgggttggaggtttctctggccttgacgatcaagtgtaacctggatgggaaggacctggggctggggaggg

SEQ ID NO: 219647 - DNA, 201 bp, Homo sapiens
agccctcctcctcgccagagcggcccagcaccgtgagcgtgaaggtgtatccctcgccgtcccgcagcacgccccgccgcagcaccagtcgcatgcctgcrctgcccgtggatgtggtggtctcatccagcaccagcgtcttgttgctgaacgtacgtgcagcccaccgctgcaggcagaaggggtggtgagggggcgcaa

SEQ ID NO: 219648 - DNA, 201 bp, Homo sapiens
ccaccccgcccctcgggcttcctctgcacccgccaggtgacatcatcgccgctgtctgatgccctgcccccacgttctggttccctgcaaggatgggggamacagcagggcccaggcatctggcagcaggaccaccgagcggccctaagcccaggcaagagcacagagcagagtgcagggtcctctggggtcccaggccct

SEQ ID NO: 219649 - DNA, 201 bp, Homo sapiens
agccaggcctcgctgcggctcacctcattccagccggccaccctaacggtgaagtcacctgtgctgttgtaagcgtgggtgacctccggaccctcgagccrcccaccgtcccccagatcccacaggtagctggcggggcgcccacggcccacagcagagaacaggtacggctgctgcagctccagcccaagggagccattg

SEQ ID NO: 219650 - DNA, 201 bp, Homo sapiens
gagcccttctctgctccagcgagccgtggtctgactgcaggacaggttctgggtccctccctgtggccctgggttcactgaggccagcactgtggtgggcygtgccccaagggcagagctgccaccgtctctggctgcctgtggcactagcttgccaggctcggggggagcattcagcttgaggctggtggttttgcatca

SEQ ID NO: 219651 - DNA, 201 bp, Homo sapiens
gcagctgctgctccagctggtagacgtcctctgtggcctggttgagtcggtcaaactgggtgagcagggcctcgaacacggcttggaggcgggagggctcrggctcacaccttgtccccagccggcccaggctcacgctcagcccatccagctggctggaggaggtggaggggtgcgaggcatcggagccagcgctgggtg

SEQ ID NO: 219652 - DNA, 201 bp, Homo sapiens
ggctgtcgtgttacatagaatttgcatcagaaacagagaggggagagcgtgcggcctccaccagcactaaaacacggaaaacagtagatgaccagggaggytgggctgtccaaggcaagtggccgaggggcgggcggcacccaccgtctggttggtggcctcctccttgcggccggccttccacacggtcaggctgaaggt

SEQ ID NO: 219653 - DNA, 201 bp, Homo sapiens
acattgccagcatccccaagctatggcctcccacccttgagctccccactcccagaggtcaggaggggcctttctgatggaagacccaaatgaacactcayctggggaaaccaagccaggagaggcctgggggcctcagccctctgcacccatctcagccctatgccgagtgccacctggacctgtccacccagggccagg

SEQ ID NO: 219654 - DNA, 201 bp, Homo sapiens
aaatgtgagtgggggtgggtccaggcgtgagctggtgggacaggcccaggtgccacctgatagtgagctcaccccctgcctacgtccccagatggcctcayaggtgcatcatagccgctccaaccccaccgatatctacccctccaagtggattgcccggctccgccacatcaagcggctccgccagcgggtagggaatat

SEQ ID NO: 219655 - DNA, 201 bp, Homo sapiens
ggggagcattcagcttgaggctggtggttttgcatcaggtaagtggtggtcaccagtcctctgccctcttcttcagggggccatggtcttcgagttggcgycctggacgtgccggcctcccagttcctgggcagtgccacttctccaggaccacggactgcaccagccgcgaaacctgagaaggcctcagctggcacccgg

SEQ ID NO: 219656 - DNA, 201 bp, Homo sapiens
acctgcttctccgtggcccccagctcctctctggccaggcccccagcagcccatgaaacagaaagcaaatttcaccagagacacccatggaagccctacgrgaaacgccttccccccaagaacaaggccagggggccgcgtgtgccccacccgctgcacgcaccgtccagcagcgtatagttgagctgcagatgcagcccg

SEQ ID NO: 219657 - DNA, 201 bp, Homo sapiens
cctacgtccccagatggcctcacaggtgcatcatagccgctccaaccccaccgatatctacccctccaagtggattgcccggctccgccacatcaagcggytccgccagcgggtagggaatatggggctccctcagcggggtgtgctggctgcccaagctgtggggcgggtgtgtgggcagagcggttgccacgcctccca

SEQ ID NO: 219658 - DNA, 201 bp, Homo sapiens
ctgcagtccggcccggagtcgaggtgactgcaccttcctttcctccgcgcctgccagcctcgacaccggctgtcccgagcccaggcccacgtggcaccctygtaccagcctggggactaagtccaccctgtgcgtgggattctcttctcagctccagccccggggtgcatgtgagacagaccaaggaggcgccggccaagc

SEQ ID NO: 219659 - DNA, 201 bp, Homo sapiens
aattcatcccggcctccaggaggcagttgcagccaagcccatgttaacctgggcgggcagtttcttgagcctcttgggtcacagggtccccccgacaaaawgccggaagaccctaccccaaacgagagtgggagtggtgctgggagccagggaaccaagagccactccaggcaccgaagtcaggcgtccgcctgcgtccct

SEQ ID NO: 219660 - DNA, 201 bp, Homo sapiens
gagaggttcagatggtaactccccgctgggtctctgctcctgggcagggaaggggtagcggacgtgagcccaggctccgccaggttggatgtcgcagtctyagagcccatacccggtccagtcccctcgctgcctgccgtccccatggggccagtaacccaggcaatgctgacccatgatgccctgccctgccctgccagg

SEQ ID NO: 219661 - DNA, 201 bp, Homo sapiens
gtgaattcatcccggcctccaggaggcagttgcagccaagcccatgttaacctgggcgggcagtttcttgagcctcttgggtcacagggtccccccgacawaaagccggaagaccctaccccaaacgagagtgggagtggtgctgggagccagggaaccaagagccactccaggcaccgaagtcaggcgtccgcctgcgtc

SEQ ID NO: 219662 - DNA, 201 bp, Homo sapiens
gggtggcttcagaggggtcccccgtgatggaggcctgtagcctacccctggcagccccctcaccttcagtggctcccagccgaggaatgaggccaggaagstggcgctgctggacaggagccacgcaacactcacgcccggggggaagctcgcacccacccaccctgagacagccacagccacagccaccaggagcaggct

SEQ ID NO: 219663 - DNA, 201 bp, Homo sapiens
ccgaccagcggaagtggctggagaggttcagatggtaactccccgctgggtctctgctcctgggcagggaaggggtagcggacgtgagcccaggctccgcmaggttggatgtcgcagtctcagagcccatacccggtccagtcccctcgctgcctgccgtccccatggggccagtaacccaggcaatgctgacccatgatg

SEQ ID NO: 219664 - DNA, 201 bp, Homo sapiens
gggaagctcgcacccacccaccctgagacagccacagccacagccaccaggagcaggctgagcccgtgggccagggaggcacaccaggccggcagcaggcscttccgcagaccctccaccagtcctggggaagcagagacagacctgtgagaggcagctcacagggaggggctaggggcatcccggggctacgcaagcaca

SEQ ID NO: 219665 - DNA, 201 bp, Homo sapiens
gggctttggcaacggctggagccatggctgcggcaggtgtggctgcaggaaggtgagctggcagggggcgccccaagactctacctggccagggtaatggsagcacacaccctgcccggaaccccacctgggggcagacacacaggccactgcagtggtgcttaggggccttcagggccaggcaggagtgggcattggagc

SEQ ID NO: 219666 - DNA, 201 bp, Homo sapiens
tgcgccaaggcggcaggacccccagcccagcccaggacccccagtagagtcctcacctcagcgtggaggcctgagaacgtgaggaaggagctgtccagcayggacgagtccaggcagctgtcgatgtccagcacctgctgcccggcaggtgtggggctcgggctcccagccacctgcaggacgagggcagtggtcagcggg

SEQ ID NO: 219667 - DNA, 201 bp, Homo sapiens
agagctcctcagacctgccacagcatcagtcacacgctccagcccctactgccccatgcccgcctcgagtgagcggccaccagagacccagggaacatggytcccactgccctgctggccacggctagacctgggcttctcagccttatcctggggatgttctggggcagacagttgtctgtcatgggcccgtcctgtgca

SEQ ID NO: 219668 - DNA, 201 bp, Homo sapiens
cagatgcccctgcctgctctctggggaacctacgtgcagccattctgcctggccctcggccttgacagcggcagaaagtaatactgagcggtgtccactcygactccacggcccacccccgccaggaaggaggactaagtgctgctggggtggaccttgttcttggcccgaaggggtgtcctgctggggccagtggccagg

SEQ ID NO: 219669 - DNA, 201 bp, Homo sapiens
ggtgagctggcagggggcgccccaagactctacctggccagggtaatggcagcacacaccctgcccggaaccccacctgggggcagacacacaggccactkcagtggtgcttaggggccttcagggccaggcaggagtgggcattggagctgggccctggcagggactggggcagcaagtggggggcgtggggtaggaggg

SEQ ID NO: 219670 - DNA, 201 bp, Homo sapiens
cagagggatgccagtgtggcttccgcatgactttggaggaccgcattagtcgagtctgttaaccacagctttaaggaggactccacggccacacgggctcrtcagcataggggccctggggaggcgaggctagtatccagcagcctcagggctgtgccttttcctggagcctggggcgggtgatgtacaggaggccaggca

SEQ ID NO: 219671 - DNA, 201 bp, Homo sapiens
tcacgtccacgccgggcagggccacacgcgctgggcgccccggccgctggcagctggcggtgcgatacacctcccagcggtactcagtctggtaggtgacrcagtcgcgcaggtcaacgtgggcctccaagtagttgcgctgtgatcgccgcatcagcacctgcaggggcaggaccacgtccacctccggctcccggcagg

SEQ ID NO: 219672 - DNA, 201 bp, Homo sapiens
ggggccaccgtcacattggcctggatgctctgtgtcagtggcgtgtccccaaatgacacgacaaacacaaagcagtagtgccccacaggcagcgccagccrcggcagcaccagccgaggccggctcacgtccacgccgggcagggccacacgcgctgggcgccccggccgctggcagctggcggtgcgatacacctcccag

SEQ ID NO: 219673 - DNA, 201 bp, Homo sapiens
ccagttgtgcagctgcaggaagcgcagccggtcgcggctctcctccaggctcaggcccagctcctgcacgtagcccccgctgtcatacacggcacaggagscccaggaccatgccctgccggagaggggtggcgtgggtgccgcaccccagcccttccggcaccccggagccaggctggtcaggaggccgcggcactcctg

SEQ ID NO: 219674 - DNA, 201 bp, Homo sapiens
ccgtctgagagacgagctatgcagtcaggatcgcgggtggatgcacagtctcccacagtggtagcgatgctcacgtcacttgtggggccacgctactgtgyagaacgtgggctgcccaccctgactgactggcacctacttccagctaggagctgtcctagtcctcagggacagtgagtgctcacgaggtcattcccagga

SEQ ID NO: 219675 - DNA, 201 bp, Homo sapiens
aaagcccaccaggtagcccgaggagccagccagcaggacctgcccggggccgacgtccccagtaactgggctgctgccctcactgggaagccaggcctcamgccctgtgtgagcaccctgtctgcaggcacctgcctgggggctggtggtggagcctcggccatactcaccactaggactccctgcagtacacgggcctcg

SEQ ID NO: 219676 - DNA, 201 bp, Homo sapiens
cccgggcagcccagtccgagttgttgggcaccttcacggtgatggcgcgctctgaggccagccgctcgatggggatctgggcgccggcctgtgtctggaaygccatcgaggccaccttggtggagacggtgtagttgctgatatagccaaagggaaagggattggagtccaccagaaagatgagctgcaccacgtcactga

SEQ ID NO: 219677 - DNA, 201 bp, Homo sapiens
tcagagccgtgactttccaggaatttaaagcccaccaggtagcccgaggagccagccagcaggacctgcccggggccgacgtccccagtaactgggctgcygccctcactgggaagccaggcctcacgccctgtgtgagcaccctgtctgcaggcacctgcctgggggctggtggtggagcctcggccatactcaccacta

SEQ ID NO: 219678 - DNA, 201 bp, Homo sapiens
gccacggggagggtgctggcgcctccgtctgagagacgagctatgcagtcaggatcgcgggtggatgcacagtctcccacagtggtagcgatgctcacgtmacttgtggggccacgctactgtgcagaacgtgggctgcccaccctgactgactggcacctacttccagctaggagctgtcctagtcctcagggacagtga

SEQ ID NO: 219679 - DNA, 201 bp, Homo sapiens
ttgtagttcacggtgacgttgctcacgtggttggaggccgtcagctgcagggacaggcgtcagtgagcccaggtggcaggtgagaggcctggccctgattrgcgtccctccctccactcacccacagccatggcagcgtcctcgggcagcatgaagcagagcagaaggcagaggtgaaggtggagcccgcccccgccctgc

SEQ ID NO: 219680 - DNA, 201 bp, Homo sapiens
acagccacggggagggtgctggcgcctccgtctgagagacgagctatgcagtcaggatcgcgggtggatgcacagtctcccacagtggtagcgatgctcaygtcacttgtggggccacgctactgtgcagaacgtgggctgcccaccctgactgactggcacctacttccagctaggagctgtcctagtcctcagggacag

SEQ ID NO: 219681 - DNA, 201 bp, Homo sapiens
ggcagcttgactggggagctggggggaccccgtgctcagagcctgaaaggcagtggccccctcaccccctcatccctcacctggggcagcgtaggtgtgcrtgacattgtgctccaccagcacctgggccaccgaggggtctggaaccgggaaggactcgttgtacggaggctggaactggtggagggcctgctccccatc

SEQ ID NO: 219682 - DNA, 201 bp, Homo sapiens
actgaagaaacagccacggggagggtgctggcgcctccgtctgagagacgagctatgcagtcaggatcgcgggtggatgcacagtctcccacagtggtagygatgctcacgtcacttgtggggccacgctactgtgcagaacgtgggctgcccaccctgactgactggcacctacttccagctaggagctgtcctagtcct

SEQ ID NO: 219683 - DNA, 201 bp, Homo sapiens
agccatcagcccaggtgaggtcacagtgagggctgttggggaggaaggggggcagcttgactggggagctggggggaccccgtgctcagagcctgaaaggmagtggccccctcaccccctcatccctcacctggggcagcgtaggtgtgcatgacattgtgctccaccagcacctgggccaccgaggggtctggaaccggg

SEQ ID NO: 219684 - DNA, 201 bp, Homo sapiens
cgcgtcatgccagcctgagggacggtccccacggcatcacgggagggctccgtgacgtcacagagtcgggggatcccgctgctccccccacgcaggcctgyactcacccgtgcattcgaagtgcaccttggtggtgagggcgtgcacagcgcccagtgggaagaggcggcaagagccccccagcggcgggcggttggggga

SEQ ID NO: 219685 - DNA, 201 bp, Homo sapiens
aaaaaaagaaaaacgaaaacaaaaagggaatgccagaagggcaattccaatgaaaggaaaatggaggtactgaagaaacagccacggggagggtgctggcrcctccgtctgagagacgagctatgcagtcaggatcgcgggtggatgcacagtctcccacagtggtagcgatgctcacgtcacttgtggggccacgctact

SEQ ID NO: 219686 - DNA, 201 bp, Homo sapiens
agactccgtctctaaaaaaagaaaaacgaaaacaaaaagggaatgccagaagggcaattccaatgaaaggaaaatggaggtactgaagaaacagccacggkgagggtgctggcgcctccgtctgagagacgagctatgcagtcaggatcgcgggtggatgcacagtctcccacagtggtagcgatgctcacgtcacttgtg

SEQ ID NO: 219687 - DNA, 201 bp, Homo sapiens
caagctccgcctcccgggttcacgccattctcctgcctcagtctcccaaggagctgggactacaggcgcctgccactacgccgggctaatttttttgtacyttttattagagacagggtttcaccgttagccaggatggtctcgatctcctgaccccgtgatttgcctgcctggcctcccaaagtgctcggattacaggtg

SEQ ID NO: 219688 - DNA, 201 bp, Homo sapiens
tgccggtgagctcactccctcccaggatactcatccggtttgccaccttccaacttggacggcggaagggcatacacagggcagaggacactggagtgtgygttctggtgtactggacccagctggaccctagcaggaggcaggcaatgctcactgagggcccctggggggatgcgtgtgagaagagacgtatgtgtgggt

SEQ ID NO: 219689 - DNA, 201 bp, Homo sapiens
gtgacagacccaggtgacagtattttttttcttttttttttgagatggagtcttgctgtgtcacccaggctggagtgcagtggcgcaatctcagctcactscaagctccgcctcccgggttcacgccattctcctgcctcagtctcccaaggagctgggactacaggcgcctgccactacgccgggctaatttttttgtac

SEQ ID NO: 219690 - DNA, 201 bp, Homo sapiens
agccagtcattgaccaggaagaaggcgctgcgtgccgtctgcaggtccctgacgatgacgtgctgcaggaaccaggcagggctgagccctgcagaggcgcrggagggaggtcaggctcgcagggcgccccaatgcgggggcagaggggcagagcttggcagggtccgcacaaacctttgttgtcgtgccacactcggatct

SEQ ID NO: 219691 - DNA, 201 bp, Homo sapiens
gagaacacagcagagggcgtgagagactcacgggggctcgtgtgaggtcagggagcagagttttaaattcattttgtgaaatgagacagtggaatgagttrgcggagccactgtcagagccgtgactttccaggaatttaaagcccaccaggtagcccgaggagccagccagcaggacctgcccggggccgacgtccccag

SEQ ID NO: 219692 - DNA, 201 bp, Homo sapiens
ctcacctcgttcagcacggtgaccagggccaacgagtactcgatgacgtgctggggatcggcctgccgcagcagccctgggagcacactagcggtgagccsgtgcagccagactgtgagccccgttgcgctgccgttgggctctgggagggtgatggccaaagacctacgagcagaggggggtggtgagcaggtggcagtc

SEQ ID NO: 219693 - DNA, 201 bp, Homo sapiens
agaggctgccccgacccctacggcacccacctgtaggcagagtcgccaacagccccgtaccacacggcgttggcgcccaggaagaggcagatgaggagaaygcagcaggtggccctctggatgcgagtgaaacggctacgaggcggccggtcccatatggagagccagatgtgcttgtcaaagaagccacgctgcagctca

SEQ ID NO: 219694 - DNA, 201 bp, Homo sapiens
gcactgggccagcgcagcagcgatctgctggatgtcatccacagtgtggaccctcagggacaccagagtctccgtgatgttcttgcgtatctgggctcggygctgccgctcgtgcttgggctctgccgccacgtccagggcccgctcgtactggggcaggcagggggcacagcaagctgtcagcagcgcaggaggccggca

SEQ ID NO: 219695 - DNA, 201 bp, Homo sapiens
gcgtgcggttctcactgcccagggcgttgaaggcgcgcacctggatctccaacagccccgcggccacgggcgtgtaggtgacgtcgcggcccgacaggatraccagcgagtcgccctggaccttctgcagcgagaagtaccaggcgtaggcgacccgagagccgcgctgcacgcgggctgtgaagttcctctcagtgcccg

SEQ ID NO: 219696 - DNA, 201 bp, Homo sapiens
ccatggcaggaaggagcccaggctggaggctcagctcctcggccaagctgcccgtctgccctggggggctgaacccagtgccctggcaggcatgcggggcrgggtgagcaggtggggccatcctaccatgcactgggccagcgcagcagcgatctgctggatgtcatccacagtgtggaccctcagggacaccagagtctc

SEQ ID NO: 219697 - DNA, 201 bp, Homo sapiens
ctctgttgtgcacgtgctcccgcagagccgggctctgcctgggacttcggtcctgccggaccctctgcagcccccagcgtggtctgtttacccctgttcaytcactggcttgctcgtcctgggtgcctctgccaggccttgacacgtggccaagtagcaaggaaggcacagtgcctgccctcagggagctccggccggttt

SEQ ID NO: 219698 - DNA, 201 bp, Homo sapiens
agccgtgcatgcgttgagctttggcccttggtgataggtggctcggcccgccctacctggcaccctgaccctggtcacggcctctccctccagcaggatayagacgtccctcaccagtgccagcttggggtctgcagatgagaactccgtggcccaggctgacgatagcctgaaaaacctccacctggagctcacggaaac

SEQ ID NO: 219699 - DNA, 201 bp, Homo sapiens
ctgctgtttctgcggcccctgataaacgtgtggtgggcactgcgcgctcaggcgtgctactctcggtcccaagggtgactgggagggcgtcccacagcaarcaagcagctctgaccctgtgtgctggccgggctcgtgttccaggccatggcatgtccgaacgaggtggtgtcctatgagatcgtcctgtccatcaccagg

SEQ ID NO: 219700 - DNA, 201 bp, Homo sapiens
ccaggctcggggggagcattcagcttgaggctggtggttttgcatcaggtaagtggtggtcaccagtcctctgccctcttcttcagggggccatggtcttygagttggcgccctggacgtgccggcctcccagttcctgggcagtgccacttctccaggaccacggactgcaccagccgcgaaacctgagaaggcctcagc

SEQ ID NO: 219701 - DNA, 201 bp, Homo sapiens
agtagccgagatcagccttcagcacacgctgtgtgcggggatgaccctttctcttgtccgggcagggccagttcaactttgtccacgtgatcgtcaccccrctggactacgagtgcaacctggtgtccctgcagtgcaggaaaggtagggccgggtggggccctgcagtgcaggaaaggtagggccgggtggggccctgca

SEQ ID NO: 219702 - DNA, 201 bp, Homo sapiens
atggccaggctctgtgttcctccctgtgggctgtggctgccctggccaggccctcacctgggtgcccaccatcccctccctgtgcagtttcgtgttcctgyagctctaccattcccccttctttggcgacgagtcaaacaagccaatcctgctgcccaatgaggtaggcgtggcctccctctcctgcatccgctggagctg

SEQ ID NO: 219703 - DNA, 201 bp, Homo sapiens
acgccgtggtctgctacaactgcctgccggctgagagcctcccgctgttcatcgttaccctctgtcgcaccatcaacgtcaaggagctctgcgagccttgmtggaaggtggggtttctgaaactgctctggaaggttcctgagagcacatggatgggacaagggccatcctgtctcccatgaatggttgtctgattcttgg

SEQ ID NO: 219704 - DNA, 201 bp, Homo sapiens
gcagcgccgaccagcggaagtggctggagaggttcagatggtaactccccgctgggtctctgctcctgggcagggaaggggtagcggacgtgagcccaggytccgccaggttggatgtcgcagtctcagagcccatacccggtccagtcccctcgctgcctgccgtccccatggggccagtaacccaggcaatgctgaccc

SEQ ID NO: 219705 - DNA, 201 bp, Homo sapiens
cacccgccccagcaggctgccgtcccgcaggagcgagtcccgaggcgccgtgcgcatcaaggtgctggacgtgctgtcctttgtgctgctcatcaacaggyagttctatgaggtgcgtgtccaggcggccgcagctgggggctcagggctatttctccgtgggcgggctgtctctgttgtgcacgtgctcccgcagagccg

SEQ ID NO: 219706 - DNA, 201 bp, Homo sapiens
acacctgcagcgccgaccagcggaagtggctggagaggttcagatggtaactccccgctgggtctctgctcctgggcagggaaggggtagcggacgtgagyccaggctccgccaggttggatgtcgcagtctcagagcccatacccggtccagtcccctcgctgcctgccgtccccatggggccagtaacccaggcaatgc

SEQ ID NO: 219707 - DNA, 201 bp, Homo sapiens
ggcctttgacttcctgttgctgctgcgggccgactcactgcaccgcctgggcctgcccaacaaggatggagtcgtgcggttcagcccctactgcgtctgcractacatgtacgcgggacctcgcccacggcccatgaggctcagggcgtcagaggcgctggggctgtggtggcgctgtttgcatgtctgagggatgtccca

SEQ ID NO: 219708 - DNA, 201 bp, Homo sapiens
ggacacactgtcctgcggcgggagggggaggtgagtgggagatgtagattcggcgtcctcgcaaactgccgccgcttctcccccagctgactttgtcctgyagtggatggatgttggcttgtcctcggaattccttctggtgctggtgaacttggtcaaattcaatagctgttacctcgacgagtacatcgcaaggatggt

SEQ ID NO: 219709 - DNA, 201 bp, Homo sapiens
cccaggctgacgatagcctgaaaaacctccacctggagctcacggaaacctgtctggacatgatggctcgatacgtcttctccaacttcacggctgtcccsaagaggtccaggcggcactacagggctgggcgggcctgcgggagctccacgggcaagctgggtttcacgctccctgtcttctaggtctcctgtgggcgag

SEQ ID NO: 219710 - DNA, 201 bp, Homo sapiens
tggggtgtgcgcccagccccgcgcccaccggcccagccctcaccttgaccaaaagcaggaagagcagcgaggccgccaggccacgggctgcggagctcagstgcgccacctggtcgaagctagtgaagcggcgcgggcggccgcgcacgaaacgggtccactggcggtcagcggcacccagctgggcgaggcgtaccagtg

SEQ ID NO: 219711 - DNA, 201 bp, Homo sapiens
ccgggagctggaagttgctgtgagccaagatcatgccattgcactccagcctgggcaacagagtgagactccgtctctaaaaaaagaaaaacgaaaacaamaagggaatgccagaagggcaattccaatgaaaggaaaatggaggtactgaagaaacagccacggggagggtgctggcgcctccgtctgagagacgagcta

SEQ ID NO: 219712 - DNA, 201 bp, Homo sapiens
ctaccccgagcaccaccaggcccaaggtgacccccaggagctctggcagagctcggcataatgtcttgccaaagacggaccactggcgcacgaagcgtagstgctgggcagcctgcggacgagaaatctgtctgcttgcagccctggggtgtgcgcccagccccgcgcccaccggcccagccctcaccttgaccaaaagca

SEQ ID NO: 219713 - DNA, 201 bp, Homo sapiens
gccgtctgcaggtccctgacgatgacgtgctgcaggaaccaggcagggctgagccctgcagaggcgcaggagggaggtcaggctcgcagggcgccccaatscgggggcagaggggcagagcttggcagggtccgcacaaacctttgttgtcgtgccacactcggatcttccacacgctacccaggctgtgcggggtggcga

SEQ ID NO: 219714 - DNA, 201 bp, Homo sapiens
cggcagaaagtaatactgagcggtgtccactccgactccacggcccacccccgccaggaaggaggactaagtgctgctggggtggaccttgttcttggccygaaggggtgtcctgctggggccagtggccaggtccacaccccgactggcccgggcaaggcggctgggcagtgctggccgcaggcccggggatgggccacg

SEQ ID NO: 219715 - DNA, 201 bp, Homo sapiens
ccaccagcaggcgccggaagcgcaaaagggctgcgtcgcctagaaggcagggagggccgcactgcaggaggccacggggcaggaccaccctgcccaacctyccacggagtgggaacatggaacgaggccttactcgcggccagcacctccttctccaccaggcccccgttggcctccgtctccaccgaaagccagtcattg

SEQ ID NO: 219716 - DNA, 201 bp, Homo sapiens
tgcctggcagacagctgtgcccccagcaccggcccaaggccaagctcgcatccaagcagcagccgggctgccataacgccaccacacctaccaagcgcagsaggtgttgggggaggccagctctgggcgcaggcccctcagccctagtgaaaatagtgacatacaaaaatatacacattttaacaccatataaattactga

SEQ ID NO: 219717 - DNA, 201 bp, Homo sapiens
tcagcgggctcagcctggacacatgccccgtgctgtgtggaggagaggaggccacacaggtgaggctgaggggcaggaagggctgggcaggaagaggctgycccgacccctacggcacccacctgtaggcagagtcgccaacagccccgtaccacacggcgttggcgcccaggaagaggcagatgaggagaacgcagcagg

SEQ ID NO: 219718 - DNA, 201 bp, Homo sapiens
gtggcggccctaggcatggtgccgaggcccaggctccattcccagtactcccgggtccccagccccagcccaccttgctccgggacatccggaagagaaaraggatggccaggtagacgggatagacaaccacgctggacaccaggccaacagcgactgtgtcgacgctcagcgggctcagcctggacacatgccccgtgc

SEQ ID NO: 219719 - DNA, 201 bp, Homo sapiens
ttgcccaggctggtctcaaactcctggactcagatccgcccacctcggccacctgaagtgttgggattacaggcgtgagccaccacacccggcccggccaytgggacgtttctaagggactaactcagcctcttcacttcctatagatgtactgagattttcttctggagtgcatttcggaagcgtgcacagccgcgtgct

SEQ ID NO: 219720 - DNA, 201 bp, Homo sapiens
ctcctgacctcaagtgatctgcccgcctcggcctcccaaagtgctgggattacaggcgtgagccaccgcgcctggccctttttaatgttttatatagatgkggtcttgctatgttgcccaggctggtctcaaactcctggactcagatccgcccacctcggccacctgaagtgttgggattacaggcgtgagccaccacac

SEQ ID NO: 219721 - DNA, 201 bp, Homo sapiens
acgggagggctccgtgacgtcacagagtcgggggatcccgctgctccccccacgcaggcctgcactcacccgtgcattcgaagtgcaccttggtggtgagrgcgtgcacagcgcccagtgggaagaggcggcaagagccccccagcggcgggcggttgggggacaggcggatggaggcgcagccctcctcctcgccagagc

SEQ ID NO: 219722 - DNA, 201 bp, Homo sapiens
attggtgttaattcttccttaactgcttagaaaaattctatcgtgaaggctctgagcctgggcttttctttgtgggattttttttttttttttttggagayggagtcttgctccgttgcccaggatggagtgcagtggcgcaatctcggctcactgcaagctccgcctcctgggttcatgccattctcctgcctcagcctc

SEQ ID NO: 219723 - DNA, 201 bp, Homo sapiens
gtgtgcattcctaaggggtgcggcctcccgtttccgtatgaatgggaagcgttcccacctgctgtattcttggaaagagtctgtgaaggattggtgttaawtcttccttaactgcttagaaaaattctatcgtgaaggctctgagcctgggcttttctttgtgggattttttttttttttttttggagacggagtcttgct

SEQ ID NO: 219724 - DNA, 201 bp, Homo sapiens
ggttagtttgcatgtaacctcttgaggaccccacgtgtgcattcctaaggggtgcggcctcccgtttccgtatgaatgggaagcgttcccacctgctgtawtcttggaaagagtctgtgaaggattggtgttaattcttccttaactgcttagaaaaattctatcgtgaaggctctgagcctgggcttttctttgtgggat

SEQ ID NO: 219725 - DNA, 201 bp, Homo sapiens
cctgacctcaagtgatctgcccgcctcggcctcccaaagtgctgggattacaggtgtgagccaccgcgcccggccatcgttccattttaattaacttaaayacgagcagccacatgtggcctctggttcctgccacggactcgggagcaacccctcctggtcgcggcttatgcgccttctctgtgtgctgctggggttagt

SEQ ID NO: 219726 - DNA, 201 bp, Homo sapiens
tgggagcacactagcggtgagcccgtgcagccagactgtgagccccgttgcgctgccgttgggctctgggagggtgatggccaaagacctacgagcagagsggggtggtgagcaggtggcagtctcgggggcgccctcccacggcctggctcacctgttgagggcgaccacagcggctcccagctggtcctgcaccaccac

SEQ ID NO: 219727 - DNA, 201 bp, Homo sapiens
gtgacgtcccctcccaggctgcactcacctcgttcagcacggtgaccagggccaacgagtactcgatgacgtgctggggatcggcctgccgcagcagcccygggagcacactagcggtgagcccgtgcagccagactgtgagccccgttgcgctgccgttgggctctgggagggtgatggccaaagacctacgagcagagg

SEQ ID NO: 219728 - DNA, 201 bp, Homo sapiens
gtgctggcgcctccgtctgagagacgagctatgcagtcaggatcgcgggtggatgcacagtctcccacagtggtagcgatgctcacgtcacttgtggggcyacgctactgtgcagaacgtgggctgcccaccctgactgactggcacctacttccagctaggagctgtcctagtcctcagggacagtgagtgctcacgagg

SEQ ID NO: 219729 - DNA, 201 bp, Homo sapiens
cgtgaaagaattcaaggagagctctgcagccgaggccttccggtgccgcagcatcagtgtgtctgaacatgtggtccgcaggtagcgggactgtcgggtgsggggcacggaccctggagcttggccccgtgagcacctgggtggcagtgcatggggctgcttgcatgacctcatcgtctgcccgtgtcctccctggccagc

SEQ ID NO: 219730 - DNA, 201 bp, Homo sapiens
ggggcacggaccctggagcttggccccgtgagcacctgggtggcagtgcatggggctgcttgcatgacctcatcgtctgcccgtgtcctccctggccagcscagggggagccggtgacgaggggtggaaaggttgcattctgtccccaggccccgtatgagcacgggctggttgcacgcatccccaggccccctcggggtg

SEQ ID NO: 219731 - DNA, 201 bp, Homo sapiens
gggcgtgcagcggtcacagagcacccaggaatagcgcacatcactgccggcctccagcgacgtgctgaagctcacgctcccattcaggggcaccaccgtgsggcttgcattgacgacgagcccccgcacgcgccgcttcaccgtcacattgagccaggcctcgctgcggctcacctcattccagccggccaccctaacggt

SEQ ID NO: 219732 - DNA, 201 bp, Homo sapiens
gctgcccatggagctgacaggtgtctagcagtgcaaccaggcagtagccgagatcagccttcagcacacgctgtgtgcggggatgaccctttctcttgtcygggcagggccagttcaactttgtccacgtgatcgtcaccccgctggactacgagtgcaacctggtgtccctgcagtgcaggaaaggtagggccgggtggg

SEQ ID NO: 219733 - DNA, 201 bp, Homo sapiens
ggtcagtctagctaaggctgctcaagtgtgttgacccttcccgagcagcctttggtggacgcctttccctctggctgcagcactggaaagtggcggccctrggcatggtgccgaggcccaggctccattcccagtactcccgggtccccagccccagcccaccttgctccgggacatccggaagagaaaaaggatggccag

SEQ ID NO: 219734 - DNA, 201 bp, Homo sapiens
tgggggttgagccctgtgtgccacctgctggctgtgtagccctgggcaagctgctcggtctctctgagcctcaggagtcccccatgtaagtcaggatagcygggcgcctccatgtggagatgtagctcagggtggatgacagcatcaatgacccacagtgacagggacgtcaggtgcttcccacatgcccgcttgccctgt

SEQ ID NO: 219735 - DNA, 201 bp, Homo sapiens
ctgcagctcagccaccagcaggcgccggaagcgcaaaagggctgcgtcgcctagaaggcagggagggccgcactgcaggaggccacggggcaggaccaccytgcccaacctcccacggagtgggaacatggaacgaggccttactcgcggccagcacctccttctccaccaggcccccgttggcctccgtctccaccgaaa

SEQ ID NO: 219736 - DNA, 201 bp, Homo sapiens
cctgggcaagctgctcggtctctctgagcctcaggagtcccccatgtaagtcaggatagccgggcgcctccatgtggagatgtagctcagggtggatgacrgcatcaatgacccacagtgacagggacgtcaggtgcttcccacatgcccgcttgccctgtggcttggagagagggtgccatggcagcggggagaggtggc

SEQ ID NO: 219737 - DNA, 201 bp, Homo sapiens
tcaggcagggctctgtgtgccacagtcacagtcctttgagcggtcggtgcagctcctcgaccagatcccatcatacgacacccacaagatcgccgtcctgwatgttggagaaggccaggtgaggctgcggggccggcctaggtgcctggacagggccagctgggcctcagcctgcagtgggtagggagtctgggcccccaa

SEQ ID NO: 219738 - DNA, 201 bp, Homo sapiens
ctggcagtgacgggtttggacacactgtcctgcggcgggagggggaggtgagtgggagatgtagattcggcgtcctcgcaaactgccgccgcttctccccyagctgactttgtcctgcagtggatggatgttggcttgtcctcggaattccttctggtgctggtgaacttggtcaaattcaatagctgttacctcgacgag

SEQ ID NO: 219739 - DNA, 201 bp, Homo sapiens
accctttctcttgtccgggcagggccagttcaactttgtccacgtgatcgtcaccccgctggactacgagtgcaacctggtgtccctgcagtgcaggaaakgtagggccgggtggggccctgcagtgcaggaaaggtagggccgggtggggccctgcagtgtggcgccaagagccctgggcctggcgtgaccaccaagtct

SEQ ID NO: 219740 - DNA, 201 bp, Homo sapiens
gcctcggttttttgcacttcatgccctggggatgtttccctgctgccaggatggagtgccagcccccttctcatctcaggtttaatcagtacatcgtgtgwctggcccatcacgtcatagccatgtggttcatcaggtgccgcctgcccttccggaaggattttgtccctttcatcactaaggtgggctcagggccggtga

SEQ ID NO: 219741 - DNA, 201 bp, Homo sapiens
tgagaaggcctcagctggcacccgggttcctgtgcaggagaagacgaacctggcggcctatgtgcccctgctgacccagggctgggcggagatcctggtcyggaggcccacaggtactgggcggggctggcctgagcgccatctttctgccagtcacccacagagctgtggacactcaggggcgattgcagacttggccct

SEQ ID NO: 219742 - DNA, 201 bp, Homo sapiens
gctgtccctctggtcaggagaaggctggttctcggaggccacgtcagggccagggcctggcccagccccacatccagcagccccgtctgtgtcctcccagwctccgccgtggtcatggaggagggaagtccgggcgaggttcctgtgctggtggagcccccagggttggaggacgttgaggcagcgctaggcatggacagg

SEQ ID NO: 219743 - DNA, 201 bp, Homo sapiens
tccgactcggccccatcacgcaggggcaagagagtagagagggacgccttaaagagcagagccacagcctccaatgcagagaaagtgccaggcatcaaccscaggtgggcctcttgcttccgggcggggctcctgacacctctcctgcgggaacctggtgcctcacttgccccaggccgagcgggctggggtggggtcctc

SEQ ID NO: 219744 - DNA, 201 bp, Homo sapiens
tggtctgctacaactgcctgccggctgagagcctcccgctgttcatcgttaccctctgtcgcaccatcaacgtcaaggagctctgcgagccttgctggaasgtggggtttctgaaactgctctggaaggttcctgagagcacatggatgggacaagggccatcctgtctcccatgaatggttgtctgattcttggggtggc

SEQ ID NO: 219745 - DNA, 201 bp, Homo sapiens
ggtggtgtcctatgagatcgtcctgtccatcaccaggctcatcaagaagtataggaaggagctccaggtggtggcgtgggacattctgctgaacatcatckaacggctccttcagcagctccaggtggggtgggggcaggagctccggggagcaccgggaacccagacaggcaggctcggcccactcagaagatggtacct

SEQ ID NO: 219746 - DNA, 201 bp, Homo sapiens
ggggacacagcagggcccaggcatctggcagcaggaccaccgagcggccctaagcccaggcaagagcacagagcagagtgcagggtcctctggggtcccargcccttgctgccccacgcactcctcaccccagttcctgctatgagctggaagggtgggagccaggtgcacagggacagcctgatgggtgcccgagggcca

SEQ ID NO: 219747 - DNA, 201 bp, Homo sapiens
tcttttgacaggagtcctccctcctgaacctgatctcctatagagcgcagtccatccacccggccaaggacggctggattcagaacctgcaggcgctgatsgagagattcttcaggtagggggtcctctgtagccttgcctggcacctggagcctggccctgtctctgtctggggcccacccgggctgggtctcaggatgc

SEQ ID NO: 219748 - DNA, 201 bp, Homo sapiens
tccgtgacagctcctgcttcacatgggtagaggagagacggcaaacgtcggggctcccaggacttcgcggcggcagtcctaacccgtgcactgagtcgggyggggcgggcggcagcgtctgagtagagagctctctagaccaggcctggtgtctcccgggctttcctaggtgcctgtttgcgagctggtcagctgggctgt

SEQ ID NO: 219749 - DNA, 201 bp, Homo sapiens
catgagggccacgcttgctgctgccgccgggcacagcccagcaccagctcacattggtgcccgtggccagctgcccccaaaagggcacagaggacccggcygccacgaagctgcctccgggctcgctggccctgatgctgaggccactcacaggcacctgcacatccacttccacggtggcgttggctgagcccagcgggt

SEQ ID NO: 219750 - DNA, 201 bp, Homo sapiens
gcggtggcgcggcgcggggtaagtggcggtccccacggggcaagtggcggtccccacggggcagcggcctagagaggcggaccccgcagtgtccgggtccygggccctcacccgcgcccactgcaacccgactccggagctccgagcatcccttagttttaagtcatggcgggtgcgaacgggtctctgctgcaggcggct

SEQ ID NO: 219751 - DNA, 201 bp, Homo sapiens
tggtggctcacacctgtcatcccagcactctggcaggccgaggcaggcggatcacctgaggtcaggagttcgcctggctgacatggtgaaaaattaactgrgtgtggtggtgtgcacctgtactcccagctactcaggagaatcgcttaaggggaatggcttaaacccgggagctggaagttgctgtgagccaagatcatg

SEQ ID NO: 219752 - DNA, 201 bp, Homo sapiens
gccggcctcccagttcctgggcagtgccacttctccaggaccacggactgcaccagccgcgaaacctgagaaggcctcagctggcacccgggttcctgtgyaggagaagacgaacctggcggcctatgtgcccctgctgacccagggctgggcggagatcctggtccggaggcccacaggtactgggcggggctggcctga

SEQ ID NO: 219753 - DNA, 201 bp, Homo sapiens
ctggtggttttgcatcaggtaagtggtggtcaccagtcctctgccctcttcttcagggggccatggtcttcgagttggcgccctggacgtgccggcctccyagttcctgggcagtgccacttctccaggaccacggactgcaccagccgcgaaacctgagaaggcctcagctggcacccgggttcctgtgcaggagaagac

SEQ ID NO: 219754 - DNA, 201 bp, Homo sapiens
aagcagccgcagggcacaggcagggcaggcccaagtgccctccagctgggctggcaagtggggcagccatgacgaggcgttggcggagaggtacggggccyggggaccagggtggccgggagccggcgagcagtgcaggagggcgccagggccagcgtcgtgctgcaagccaacgaggtcaccagggagcatgaggacatc

SEQ ID NO: 219755 - DNA, 201 bp, Homo sapiens
cctgagcctcttcgggcccagtgcgtggtctgtctgttgctgccgggggactgatgatggggtttctggcagtgacgggtttggacacactgtcctgcggsgggagggggaggtgagtgggagatgtagattcggcgtcctcgcaaactgccgccgcttctcccccagctgactttgtcctgcagtggatggatgttggct

SEQ ID NO: 219756 - DNA, 201 bp, Homo sapiens
ctgctcagaagggccgtccactctcacaggctctcctgggtttcccccactcaggccttgtcctcagtctctgagcacaaggctgtctgccctgcaccgaktgcaggggtcgggcaggagctgtgtcatcccctgctctgcgccacccgctgtgccaggtcccgacacacagcagttgctccccatacgccgctctgcggt

SEQ ID NO: 219757 - DNA, 201 bp, Homo sapiens
acctggcaccctgaccctggtcacggcctctccctccagcaggatacagacgtccctcaccagtgccagcttggggtctgcagatgagaactccgtggccyaggctgacgatagcctgaaaaacctccacctggagctcacggaaacctgtctggacatgatggctcgatacgtcttctccaacttcacggctgtcccgaa

SEQ ID NO: 219758 - DNA, 201 bp, Homo sapiens
cctgtggagggcagccctccctcagagctgagccttcccccttccccgagcagctgcagggacagaggcctgcgctgggcaggctcccccggctgagaacrgggctccatagcccttgacgctgtgcagccacaaagcagagcctcagatgctagcttccgcctctgtctctagggtccagaaggccctgtcctgacgcct

SEQ ID NO: 219759 - DNA, 201 bp, Homo sapiens
tctactccttcatgtcccagctgctcagaagggccgtccactctcacaggctctcctgggtttcccccactcaggccttgtcctcagtctctgagcacaasgctgtctgccctgcaccgagtgcaggggtcgggcaggagctgtgtcatcccctgctctgcgccacccgctgtgccaggtcccgacacacagcagttgctc

SEQ ID NO: 219760 - DNA, 201 bp, Homo sapiens
gtgctgggcctccggtgtcaccaggacagagcctgtgtctgtgttgggatgtgggtgtgtgcacatcagcaggtggccttttctgagtgcctgtggtgctrgacgtgggtctgagcaggtgggacgccgcctgtcctgggcctgcacgagcttggctctggctttcaccatcctcttcctgacaggcctttgacttcctgt

SEQ ID NO: 219761 - DNA, 201 bp, Homo sapiens
gccacttctactccttcatgtcccagctgctcagaagggccgtccactctcacaggctctcctgggtttcccccactcaggccttgtcctcagtctctgakcacaaggctgtctgccctgcaccgagtgcaggggtcgggcaggagctgtgtcatcccctgctctgcgccacccgctgtgccaggtcccgacacacagcag

SEQ ID NO: 219762 - DNA, 201 bp, Homo sapiens
ggggacaccaggctctgtgagctccgaggcaagggagggaggaggctgtgggtgctgggcctccggtgtcaccaggacagagcctgtgtctgtgttgggaygtgggtgtgtgcacatcagcaggtggccttttctgagtgcctgtggtgctggacgtgggtctgagcaggtgggacgccgcctgtcctgggcctgcacgag

SEQ ID NO: 219763 - DNA, 201 bp, Homo sapiens
cctggtcggccacttctactccttcatgtcccagctgctcagaagggccgtccactctcacaggctctcctgggtttcccccactcaggccttgtcctcastctctgagcacaaggctgtctgccctgcaccgagtgcaggggtcgggcaggagctgtgtcatcccctgctctgcgccacccgctgtgccaggtcccgaca

SEQ ID NO: 219764 - DNA, 201 bp, Homo sapiens
gctctggtcccttgctagccgtaattagctttctgaaacccagtctccagagacagtcccgttctgagttcctggggttgggactaaagcataccaacatkggggcacagctcagcctgttcccaggggcagagggagcccccgcagaggcccagagcccagggacagagggaggcctttgcagaggcccagagcccaggg

SEQ ID NO: 219765 - DNA, 201 bp, Homo sapiens
gtgttcactagaggagagccacaagcagggattctgggtcaggtgcaggcctagggcttagtgtgcacttgtggttctgagactgtcccatgacttcctgycagcattccggcagctctagtgggactccctcctggtccaggtgaggccaccattgctgccctggcttgctgctgtcctctcagcccccagtctgtcacc

SEQ ID NO: 219766 - DNA, 201 bp, Homo sapiens
tccgccacatcaagcggctccgccagcgggtagggaatatggggctccctcagcggggtgtgctggctgcccaagctgtggggcgggtgtgtgggcagagyggttgccacgcctcccagacttactgcccaagccgcctctgccttcagatctgcgaggaagccgcctactccaaccccagcctacctctggtgcaccctc

SEQ ID NO: 219767 - DNA, 201 bp, Homo sapiens
gtgggagagcagtgagacctggacctctcatgctcagatctgctaagaggagagtgattgctacctctgcagcagctcatctgaaacgtgctggccgtacrctaccaaagataggtgtaaagaacaggtgtccttagccgggcgcagtggttcacgcctgtaatcccagcactttgggaggccaaggtggatggatcacct

SEQ ID NO: 219768 - DNA, 201 bp, Homo sapiens
tcaagcggctccgccagcgggtagggaatatggggctccctcagcggggtgtgctggctgcccaagctgtggggcgggtgtgtgggcagagcggttgccaygcctcccagacttactgcccaagccgcctctgccttcagatctgcgaggaagccgcctactccaaccccagcctacctctggtgcaccctccgtcccata

SEQ ID NO: 219769 - DNA, 201 bp, Homo sapiens
agcgggtagggaatatggggctccctcagcggggtgtgctggctgcccaagctgtggggcgggtgtgtgggcagagcggttgccacgcctcccagacttastgcccaagccgcctctgccttcagatctgcgaggaagccgcctactccaaccccagcctacctctggtgcaccctccgtcccatagcaaagcccctgcac

SEQ ID NO: 219770 - DNA, 201 bp, Homo sapiens
gatgggggacacagcagggcccaggcatctggcagcaggaccaccgagcggccctaagcccaggcaagagcacagagcagagtgcagggtcctctggggtyccaggcccttgctgccccacgcactcctcaccccagttcctgctatgagctggaagggtgggagccaggtgcacagggacagcctgatgggtgcccgagg

SEQ ID NO: 219771 - DNA, 201 bp, Homo sapiens
cccacacctggctatgaggtgggccagcggaagcgcctcatctcctcggtggaggacttcaccgagtttgtgtgaggccggggccctccctcctgcactgrccttggacggtattgcctgtcagtgaaataaataaagtcctgaccccagtgcacagacatagaggcacagattgcagtcagacagctcttttattgactt

SEQ ID NO: 219772 - DNA, 201 bp, Homo sapiens
tgcccagagccccacacacagcaggggtgacaggtgccaggactcggcaggacacagggtagagagcccagtcccagggcacagcaccaacagggcctggrccacgctccagagggagtccacacaggaagacacgagctgcggggaaggcgacaccagtgagggcgtacagctgagctgagctgagctaagacgccctcc

SEQ ID NO: 219773 - DNA, 201 bp, Homo sapiens
ctggggcttccccaccagctgccaggcctgccgggtggttcccatcctgtgcctgagtggagagggctatttaaaacccatctgagaaactgcggcccacrcgggtgccaaggggaagcggccccacccaccaagctgctttcaacagatccgcccaccaccatccagtgctcggcggggttggggagcagcctccccagg

SEQ ID NO: 219774 - DNA, 201 bp, Homo sapiens
cgttcccacctgctgtattcttggaaagagtctgtgaaggattggtgttaattcttccttaactgcttagaaaaattctatcgtgaaggctctgagcctgrgcttttctttgtgggattttttttttttttttttggagacggagtcttgctccgttgcccaggatggagtgcagtggcgcaatctcggctcactgcaagc

SEQ ID NO: 219775 - DNA, 201 bp, Homo sapiens
tatttttagtagagacggggtttcactgtgttggccaggctggtcttggaactcctgacctcaagtgatctgcccgcctcggcctcccaaagtgctgggaktacaggtgtgagccaccgcgcccggccatcgttccattttaattaacttaaatacgagcagccacatgtggcctctggttcctgccacggactcgggagc

SEQ ID NO: 219776 - DNA, 201 bp, Homo sapiens
gccctggggatgtttccctgctgccaggatggagtgccagcccccttctcatctcaggtttaatcagtacatcgtgtgtctggcccatcacgtcatagccrtgtggttcatcaggtgccgcctgcccttccggaaggattttgtccctttcatcactaaggtgggctcagggccggtgaaggctgtgtctctcggtaggcc

SEQ ID NO: 219777 - DNA, 201 bp, Homo sapiens
ccaggaagagtgcaaagccgtggggtggccgtacgcggggcacacgtgcgctcacaggcgtcacagccgggctctctaccagggtgtcatcttcatccggstgcagccgcttggccaccagtgagaagtacagggcttccagcaagacctggggagggggtggcttcagaggggtcccccgtgatggaggcctgtagccta

SEQ ID NO: 219778 - DNA, 201 bp, Homo sapiens
ggcccaagtgccctccagctgggctggcaagtggggcagccatgacgaggcgttggcggagaggtacggggcctggggaccagggtggccgggagccggcragcagtgcaggagggcgccagggccagcgtcgtgctgcaagccaacgaggtcaccagggagcatgaggacatcctggccgtggagggtgacctgtggaga

SEQ ID NO: 219779 - DNA, 201 bp, Homo sapiens; identical to SEQ ID NO: 39366

SEQ ID NO: 219780 - DNA, 201 bp, Homo sapiens
gcccggtgccatctgacagaatgtcctagaatgctggatatatgggacatctgcaccgtccgtgatggcagcccctcgcgacgtgtgccactgaacacttracagcagactggtgcagctaaggaacagagttttaaatttcatattttcttttttagatggagtctcgctgtcacccaggctggagtgcaatggcgcaat

SEQ ID NO: 219781 - DNA, 201 bp, Homo sapiens
cagagcccggtgccatctgacagaatgtcctagaatgctggatatatgggacatctgcaccgtccgtgatggcagcccctcgcgacgtgtgccactgaacrcttgacagcagactggtgcagctaaggaacagagttttaaatttcatattttcttttttagatggagtctcgctgtcacccaggctggagtgcaatggcg

SEQ ID NO: 219782 - DNA, 201 bp, Homo sapiens
agcctcttcgggcccagtgcgtggtctgtctgttgctgccgggggactgatgatggggtttctggcagtgacgggtttggacacactgtcctgcggcgggrgggggaggtgagtgggagatgtagattcggcgtcctcgcaaactgccgccgcttctcccccagctgactttgtcctgcagtggatggatgttggcttgtc

SEQ ID NO: 219783 - DNA, 201 bp, Homo sapiens
cggcactgctccagttgccggggccagggttcttggagagcacatcctcaccgctgtcccctctgctggtgacagcacgcagtggaagcactctggaaggyggtcgcggatctgttgcagccggagcggccgctggaggcccggcacgcggtgctggctctgctgaaggccatcgtgcaggggcaggtaaggcccagggcg

SEQ ID NO: 219784 - DNA, 201 bp, Homo sapiens
agctctgagccgttccctgtacgaagcctgtggtcatctcaggctgcaggagacacaggagatacgagctttggaggtggggctctcagtcacaagccccygttgttcctccctgtcctccgctcacggcactgctccagttgccggggccagggttcttggagagcacatcctcaccgctgtcccctctgctggtgacag

SEQ ID NO: 219785 - DNA, 201 bp, Homo sapiens
ggatgcgcagcgcgggaccgagcgtccgcagcccgcggcccgagcagttgacgcggcaggcggcgccgggcgctgggccgcagaggcaggggggctcgcarggcccgcagccgcgcccggggccccccgccagcgccccgagccacaggcccaggcccagggccagcgccaggcgggcgggcgcggcgggcggcatcgtta

SEQ ID NO: 219786 - DNA, 201 bp, Homo sapiens
agagagagtcctggtggtcctgggtttgaaggtcgtgtgttttgaagcacgcactctagagcagccgccccggcccctgctccgggacaagggtgctgtcytaggactgcgttttcacctcctgcgccgtggtgagctgcgtcctctctctgcagaccaagctgtacaccctgcctgcaagccacgccacgcgtgtgtatg

SEQ ID NO: 219787 - DNA, 201 bp, Homo sapiens
ctgagctgagctaagacgccctccccggccgcgcagtcacctaccaggatggccagctgggcgtaggctaccccgagcaccaccaggcccaaggtgacccycaggagctctggcagagctcggcataatgtcttgccaaagacggaccactggcgcacgaagcgtagctgctgggcagcctgcggacgagaaatctgtctg

SEQ ID NO: 219788 - DNA, 201 bp, Homo sapiens
gtgggaaggaagcctgggtgtcctctcctgtggggaggagctggggtaggacgggcgtgagccgtctccctctccaccaggtctccctgcaggtgctggaygccgtggtctgctacaactgcctgccggctgagagcctcccgctgttcatcgttaccctctgtcgcaccatcaacgtcaaggagctctgcgagccttgct

SEQ ID NO: 219789 - DNA, 201 bp, Homo sapiens
acatggatgggacaagggccatcctgtctcccatgaatggttgtctgattcttggggtggccagacaatggcctgttgagggacggccagtgtcattttcscaggcagttgagctgaggtcagggttttggtggcattttgagaaccctgctgcctctgtctttgggaggagatggtggcgagctggccggaccttgggtg

SEQ ID NO: 219790 - DNA, 201 bp, Homo sapiens
caggcagggctctgtgtgccacagtcacagtcctttgagcggtcggtgcagctcctcgaccagatcccatcatacgacacccacaagatcgccgtcctgtrtgttggagaaggccaggtgaggctgcggggccggcctaggtgcctggacagggccagctgggcctcagcctgcagtgggtagggagtctgggcccccaac

SEQ ID NO: 219791 - DNA, 201 bp, Homo sapiens
gagctgacaggtgtctagcagtgcaaccaggcagtagccgagatcagccttcagcacacgctgtgtgcggggatgaccctttctcttgtccgggcagggcyagttcaactttgtccacgtgatcgtcaccccgctggactacgagtgcaacctggtgtccctgcagtgcaggaaaggtagggccgggtggggccctgcagt

SEQ ID NO: 219792 - DNA, 201 bp, Homo sapiens
gactcggccccatcacgcaggggcaagagagtagagagggacgccttaaagagcagagccacagcctccaatgcagagaaagtgccaggcatcaaccccargtgggcctcttgcttccgggcggggctcctgacacctctcctgcgggaacctggtgcctcacttgccccaggccgagcgggctggggtggggtcctcgcc

SEQ ID NO: 219793 - DNA, 201 bp, Homo sapiens
gcttctggtcatccttcaggtgggtgttctgcacgaggcctctgctcccggggcgcgcatggctagcgtccaccagctgcatctgcgttgtgttggagtcygttccccagcgggacccacaccctccctggatttgctgagggtgcggtggtctcagcaggcagcagaaccttcctcctgctcttgtggagggatggatgc

SEQ ID NO: 219794 - DNA, 201 bp, Homo sapiens
ggagccaggggcccctccgtggcctggccagccccccaaggaagctgtgtctctggcagttgcgctctaaggcatcaggcctaggggtcgctccagaatgmctgtcttccccgacgccaatcccaggcaggggccccggggtctgcgcctgctgtccctacactctcccacactctcctgtcattcagggatgcaggtggg

SEQ ID NO: 219795 - DNA, 201 bp, Homo sapiens
gttccccagcgggacccacaccctccctggatttgctgagggtgcggtggtctcagcaggcagcagaaccttcctcctgctcttgtggagggatggatgcragaggccccgttgtacgccctgaccagagcttgtctctgtgctcctgagtcagggccggaaccatgtaccatcctcagcgtggcgcttgccctcgtcacc

SEQ ID NO: 219796 - DNA, 201 bp, Homo sapiens
agcacgcatgcagcagatgtgacgtcccctcccaggctgcactcacctcgttcagcacggtgaccagggccaacgagtactcgatgacgtgctggggatcrgcctgccgcagcagccctgggagcacactagcggtgagcccgtgcagccagactgtgagccccgttgcgctgccgttgggctctgggagggtgatggcca

SEQ ID NO: 219797 - DNA, 201 bp, Homo sapiens
tccagcctgggcgacagagcaagactcgatctcaaaaaaaaaaaaaaaaaaaaaaaaggtgtttgtggtagaaagtgttctcacggctgctgactcagaaycatgagcctgtgtgtaagtcctggccttctcttcaaaggtgatggcccgctccctctccccacccccggagctggaagaaagggatgtggccgcatactc

SEQ ID NO: 219798 - DNA, 201 bp, Homo sapiens
ccctgtgggctgtggctgccctggccaggccctcacctgggtgcccaccatcccctccctgtgcagtttcgtgttcctgcagctctaccattcccccttctttggcgacgagtcaaacaagccaatcctgctgcccaatgaggtaggcgtggcctccctctcctgcatccgctggagctgtgtggctcgggtgaatggtgg

SEQ ID NO: 219799 - DNA, 201 bp, Homo sapiens
tccctgtgggctgtggctgccctggccaggccctcacctgggtgcccaccatcccctccctgtgcagtttcgtgttcctgcagctctaccattcccccttctttggcgacgagtcaaacaagccaatcctgctgcccaatgaggtaggcgtggcctccctctcctgcatccgctggagctgtgtggctcgggtgaatggtg

SEQ ID NO: 219800 - DNA, 201 bp, Homo sapiens
gccattctcctgcctcagcctcccgagtagctgggaccacaggcgcccgccaccacgcctggccaatttttttgtatttctagtagagatggggtttcacygtgttagccaggatggtctcaatctcctgacctcgtgatctgcccgccttggcctcccaaagtgctgggattacaggcgtgagccaccgcgcccagccat

SEQ ID NO: 219801 - DNA, 201 bp, Homo sapiens
ctcctgcagcgcgagatggtctactgcctggagcagggcctcatccaccgctgtgccagccagtgcgtcgtggccttgtccatctgcagcgtggagatgcytgacatcatcatcaaggcgctgcctgttctggtggtgaagctcacgcacatctcagccacagccagcatggccgtcccactgctggagttcctgtccagt

SEQ ID NO: 219802 - DNA, 201 bp, Homo sapiens
gtagggcgccccacagccgcagtgcccagagccccacacacagcaggggtgacaggtgccaggactcggcaggacacagggtagagagcccagtcccaggrcacagcaccaacagggcctgggccacgctccagagggagtccacacaggaagacacgagctgcggggaaggcgacaccagtgagggcgtacagctgagct

SEQ ID NO: 219803 - DNA, 201 bp, Homo sapiens
ggggctgcggtggcatttctaggcctttccaggcagttgctttgcagctgggggtgaggtttggggccctttgtaggctttagtcttttttttttttttttgagaaggagttctgctctttctgcttggctgactgcaatctccgcctcccggattcaagtgattctattgcctcagactcctgagtagctgggattacag

SEQ ID NO: 219804 - DNA, 201 bp, Homo sapiens
gggggctgcggtggcatttctaggcctttccaggcagttgctttgcagctgggggtgaggtttggggccctttgtaggctttagtcttttttttttttttttgagaaggagttctgctctttctgcttggctgactgcaatctccgcctcccggattcaagtgattctattgcctcagactcctgagtagctgggattaca

SEQ ID NO: 219805 - DNA, 201 bp, Homo sapiens
catcctcccaccctcacagcagcccgctgggagccccatcactgtccccctttccagatggggaaactgaggctcagagcccggagaccagggcccaccascccaggctcacagcagcacccacccacggggcctgtgggtaccggcagggatccccgtgcaggccacctcccgtatggcgtgcccaggagtgtccggagg

SEQ ID NO: 219806 - DNA, 201 bp, Homo sapiens
ctacagcctcaacctgccaggctcacgtgatcctcctactttagcctctcaagtagctgggactacaggcatgcagcaccacgcctggctaagttttgtawtttttgtcgtgacagggtctcactgtgttgcccaggctagtctgaaactcctgggctgacgtgaccctctcccctctgccacccgaagtgctgagattac

SEQ ID NO: 219807 - DNA, 201 bp, Homo sapiens
gtcatctacaacaccaggacaataatagtacctgactcactggagtaatgtgaagcttaaatgaattatctcagtgcttagaatcgtatgtggccgggcgyggtggctcgcacccgtcatcccagcacttcgggaggccaaggcaggcggatcacctgaagtcaggagtttgagaccagcctgatcaacgtggtgaaaccc

SEQ ID NO: 219808 - DNA, 201 bp, Homo sapiens
  misc_feature (1)...(201): n = A,T,C or G
cacggacgagtccaggcagctgtcgatgtccagcacctgctgcccggcaggtgtggggctcgggctcccagccacctgcaggacgagggcagtggtcagcnggcggcagctcagacctgctcaggacagggatgagaagccacctcctcagcagacaggacagagcccggtgccatctgacagaatgtcctagaatgctgg

SEQ ID NO: 219809 - DNA, 201 bp, Homo sapiens
tactcacagcgctgtggcgtccgcggggatgcgcagcgcgggaccgagcgtccgcagcccgcggcccgagcagttgacgcggcaggcggcgccgggcgctrggccgcagaggcaggggggctcgcagggcccgcagccgcgcccggggccccccgccagcgccccgagccacaggcccaggcccagggccagcgccaggcg

SEQ ID NO: 219810 - DNA, 201 bp, Homo sapiens
tccaggcgttccttatttagcagggccgccgtgccgcgccggagcctcgccctgggagcgtcctggcccgcgtcctgcttcccgtcccgggccagggaacscgcccacgcccgcccgtcccgcggcctctcccgggtgccgctgggcccgctactcacagcgctgtggcgtccgcggggatgcgcagcgcgggaccgagcg

SEQ ID NO: 219811 - DNA, 201 bp, Homo sapiens
gagcccccgggtgggacgtctgtctccagacccggggtttttcggctccccggggccgtgccaaccgcggctccaggcgttccttatttagcagggccgcygtgccgcgccggagcctcgccctgggagcgtcctggcccgcgtcctgcttcccgtcccgggccagggaacgcgcccacgcccgcccgtcccgcggcctct

SEQ ID NO: 219812 - DNA, 201 bp, Homo sapiens
ccatgagcctgtgtgtaagtcctggccttctcttcaaaggtgatggcccgctccctctccccacccccggagctggaagaaagggatgtggccgcatactmggcctccttggaggatgtgaagacagccgtcctggggcttctggtcatccttcaggtgggtgttctgcacgaggcctctgctcccggggcgcgcatggct

SEQ ID NO: 219813 - DNA, 201 bp, Homo sapiens
accacccagcaaagccccaaggacacacggctcccctaaggaagggtggccacaggcgggagtgacccagaaacgttacaaaaccaaatgccagaacccayccaatgtttagcaagcctggggatgtgccacgtcccccagggatccagcacgcacccaaggagacactgtcccggcgaggagcctggagcctgggaaata

SEQ ID NO: 219814 - DNA, 201 bp, Homo sapiens
tatagggcagcagccaggcggggccagcagcgggactggggctgggggcagggcttatgcctgccagcccctgacacgcattgtgtctcgcagctgatgcsgaacctccttggcacccacctgggccacagcgccatctacaacatgtgccacctcatggaggacaggtgagtgtggtgggtggggcgcagggcagtggag

SEQ ID NO: 219815 - DNA, 201 bp, Homo sapiens
acgggtcttcaccccttcccagcacccttgccaatcctggagcaggagcagcaacagcagagggtgtggccaggcctggaggctgcccctccacacccgtmacaggtggggccacgtcccagggctgtgggcagcagggccagcctgccggcccgaggtagctgacacgtgtctcatgctgcagcgggtctgcccgccacc

SEQ ID NO: 219816 - DNA, 201 bp, Homo sapiens
tgctgagaggagccgtgttttttgtgggcatggctctctggggagcccaccggctctattctctcaggaactcgccgacatctgtgttgccatcattttascaggtaaggcggtttctgtgtgcagtgagctggcaggaacgggagagctcccctcacgcctgcccacccatcccactgggggtcctgctgcgggggctgc

SEQ ID NO: 219817 - DNA, 201 bp, Homo sapiens
gcaggggagggagctcccacctgttgtccagccagttgtgcagctgcaggaagcgcagccggtcgcggctctcctccaggctcaggcccagctcctgcacktagcccccgctgtcatacacggcacaggagccccaggaccatgccctgccggagaggggtggcgtgggtgccgcaccccagcccttccggcaccccggag

SEQ ID NO: 219818 - DNA, 201 bp, Homo sapiens
gaccttggacagcccggagctcaggaccatcgtccatgacctgttgaccacggtggaggagctgtgtgaccagaacgagttccacgggtctcaggagagakactttgaactggtggagagatgtgcggaccagaggcctgtgagaccccctcctgggtggggcctttgggctttggctggtggggaggggccgggtgctgg

SEQ ID NO: 219819 - DNA, 201 bp, Homo sapiens
ctgctgtcctctcagcccccagtctgtcacctggtgggagttaaagggacctgctggggtttgaggaagctctgagccgttccctgtacgaagcctgtggycatctcaggctgcaggagacacaggagatacgagctttggaggtggggctctcagtcacaagcccccgttgttcctccctgtcctccgctcacggcactg

SEQ ID NO: 219820 - DNA, 201 bp, Homo sapiens
cttttgacaggagtcctccctcctgaacctgatctcctatagagcgcagtccatccacccggccaaggacggctggattcagaacctgcaggcgctgatgkagagattcttcaggtagggggtcctctgtagccttgcctggcacctggagcctggccctgtctctgtctggggcccacccgggctgggtctcaggatgcc

SEQ ID NO: 219821 - DNA, 201 bp, Homo sapiens
agccggagcggccgctggaggcccggcacgcggtgctggctctgctgaaggccatcgtgcaggggcaggtaaggcccagggcgacgctgggatgggtgacktcaggctgcccactgactgtcctgtccctgctgggccgtgtttggactcctgcctcggtgagttgctgggcacagggtctaggggctgatgggctctgga

SEQ ID NO: 219822 - DNA, 201 bp, Homo sapiens
cctgcctgcaagccacgccacgcgtgtgtatgagatgctggtcagccacattcagctccactacaagcacagctacaccctgccaatcgcgagcagcatcyggctgcaggtatggtggctggggttgcgcagccagttcctgggggcccagccaggtatccccgtctcggcaggtgtggttcctggaagctgcagagacgg

SEQ ID NO: 219823 - DNA, 201 bp, Homo sapiens
cagccggagcggccgctggaggcccggcacgcggtgctggctctgctgaaggccatcgtgcaggggcaggtaaggcccagggcgacgctgggatgggtgaygtcaggctgcccactgactgtcctgtccctgctgggccgtgtttggactcctgcctcggtgagttgctgggcacagggtctaggggctgatgggctctgg

SEQ ID NO: 219824 - DNA, 201 bp, Homo sapiens
gcagccacaaagcagagcctcagatgctagcttccgcctctgtctctagggtccagaaggccctgtcctgacgcctcctctcctcgcaggagtctgactgraaggtgctgaagctggttctgggcaggctgcctgagtccctgcgctataaagtgctcatctttacttccccttgcagtgtggaccagctgtgctctgctc

SEQ ID NO: 219825 - DNA, 201 bp, Homo sapiens
tccccggccgcgcagtcacctaccaggatggccagctgggcgtaggctaccccgagcaccaccaggcccaaggtgacccccaggagctctggcagagctcrgcataatgtcttgccaaagacggaccactggcgcacgaagcgtagctgctgggcagcctgcggacgagaaatctgtctgcttgcagccctggggtgtgcg

SEQ ID NO: 219826 - DNA, 201 bp, Homo sapiens
gctgtggctgccctggccaggccctcacctgggtgcccaccatcccctccctgtgcagtttcgtgttcctgcagctctaccattcccccttctttggcgaygagtcaaacaagccaatcctgctgcccaatgaggtaggcgtggcctccctctcctgcatccgctggagctgtgtggctcgggtgaatggtggggggccca

SEQ ID NO: 219827 - DNA, 201 bp, Homo sapiens
ttcctgggcctgcgttcccagggcctccccagcccctctggctaccccgtgacctggccgctggggagaggtttcatgcctggatttggtcatcagctttsaggcccaaagacactggagcggctccgaggcgccccagaaggcttctccagaactgacttgcacctggccgtggttccagtgctgacagcattaatctct

SEQ ID NO: 219828 - DNA, 201 bp, Homo sapiens
acgtacgtgcagcccaccgctgcaggcagaaggggtggtgagggggcgcaaccctctgccctgtcagccccacttctgcctgcaggccccgtcccctcggscatgggacccatccccagcccgcccacaccccgctcaacactcacccctcgcttggagccgctgctgcaattgaggcagcggccctccaagtacacgtag

SEQ ID NO: 219829 - DNA, 201 bp, Homo sapiens
cggtggagcactcgaggttggcgaggggtaggcgaggctgcctctgctgcaagcgggtggggcctgaggtgtcctgtctcctgcagcgcgagatggtctastgcctggagcagggcctcatccaccgctgtgccagccagtgcgtcgtggccttgtccatctgcagcgtggagatgcctgacatcatcatcaaggcgctgc

SEQ ID NO: 219830 - DNA, 201 bp, Homo sapiens
ccggggccagggttcttggagagcacatcctcaccgctgtcccctctgctggtgacagcacgcagtggaagcactctggaaggcggtcgcggatctgttgyagccggagcggccgctggaggcccggcacgcggtgctggctctgctgaaggccatcgtgcaggggcaggtaaggcccagggcgacgctgggatgggtgac

SEQ ID NO: 219831 - DNA, 201 bp, Homo sapiens
tgcccttagcctgtcgcctcctggacacacctcccgtcgggctggagagtcccacgcggggcacagaggagaggaggtgcccggggctctgcatgccatgrgagccaagcccgggctgggacactcactgtccggctctccagccagccatgtagtactactaatgcctcaacctctctgtgcctcagtttccccatctgt

SEQ ID NO: 219832 - DNA, 201 bp, Homo sapiens
agggtgcggtggtctcagcaggcagcagaaccttcctcctgctcttgtggagggatggatgcaagaggccccgttgtacgccctgaccagagcttgtctcygtgctcctgagtcagggccggaaccatgtaccatcctcagcgtggcgcttgccctcgtcacccagcacagcacctgggaagtaagggtggccctccattc

SEQ ID NO: 219833 - DNA, 201 bp, Homo sapiens
tgcccggccactgtcaccagatggtggccagcgcatcacccactcatgggccaggatggcagaggagatccacagagacggctccagcaggaggccctcayagagatgccctggcctcagaagagccaacagaaagccgggaagggggacgtcgaggctcaggcttggcacaacctccccaaagctcccaaagactctcgg

SEQ ID NO: 219834 - DNA, 201 bp, Homo sapiens
tgcctgtcactgccaggcgcccggtgcctgccccgccgcatctggagtccaccagaggcccgaggccccctgccgagtggaggagcacacactgggggggkgtgtgcctctgtgcacatgtgtgcgtgtgcaggtgttgtgtgtgtctgtgaaaccacaatctgcccttggtttcccagctcaatggtggctctgcgtgct

SEQ ID NO: 219835 - DNA, 201 bp, Homo sapiens
atacccggtccagtcccctcgctgcctgccgtccccatggggccagtaacccaggcaatgctgacccatgatgccctgccctgccctgccaggctggcccrcagagctcaccccggggaaatgaagaaggtgtagggccggtggtcagcaccctggagtgactctgggcggatcctcctgctagccgagcagttgtgctca

SEQ ID NO: 219836 - DNA, 201 bp, Homo sapiens
cgagggggcgggacgctgccggggcggggccctacgagggggcgggacgctgccggggcggggccctgcgagggggcgggacgctgcgagggggcggggcsctgcgaggggtgagacgctgccggggcggggccccgcgagggggcgggacgctgccggtgggaggcgcggggtctggccggggacgggcgtaccgaggtg

SEQ ID NO: 219837 - DNA, 201 bp, Homo sapiens
cccacccaggccctcctcgactctgcagaggctcccaggagcacagggtcactcacaggaaacacaaagcggacatggcttgggggcacgaagaggctggygccgaaggcggtgaggtggcgggtgaggcagacggcctggcggggcgaggtctcctccaggggcagcagcccctctgtccgccacaccatgtcctcctcg

SEQ ID NO: 219838 - DNA, 201 bp, Homo sapiens
ggaagacacgagctgcggggaaggcgacaccagtgagggcgtacagctgagctgagctgagctaagacgccctccccggccgcgcagtcacctaccaggayggccagctgggcgtaggctaccccgagcaccaccaggcccaaggtgacccccaggagctctggcagagctcggcataatgtcttgccaaagacggaccac

SEQ ID NO: 219839 - DNA, 201 bp, Homo sapiens
ggctgaaggcctcgccctgcggcgctgggcccacctccaccccctgcacagtcgagaagccgatccacacgtctaggctcctgggggcgggtgtgggatgscagggggctcagggcactcctccatcctcccaccctcacagcagcccgctgggagccccatcactgtccccctttccagatggggaaactgaggctcaga

SEQ ID NO: 219840 - DNA, 201 bp, Homo sapiens
gcctcccagacttactgcccaagccgcctctgccttcagatctgcgaggaagccgcctactccaaccccagcctacctctggtgcaccctccgtcccatascaaagcccctgcacagactccagccgagcccacacctggctatgaggtgggccagcggaagcgcctcatctcctcggtggaggacttcaccgagtttgtg

SEQ ID NO: 219841 - DNA, 201 bp, Homo sapiens
taccattcccccttctttggcgacgagtcaaacaagccaatcctgctgcccaatgaggtaggcgtggcctccctctcctgcatccgctggagctgtgtggytcgggtgaatggtggggggcccagctctgctgctgggagctcaggcttgcagagggctctggcctaagctccctgtggcagcctgccgtgaccggcctgg

SEQ ID NO: 219842 - DNA, 201 bp, Homo sapiens
gggtccctaggccacaccctgctccccacccagctaccctgtgcgcctgtgccctgctgggggcctgggctctccgaggggcctgaggatggaggccccamgtccccgaggagggcggcctctggacaggcccctcattccgcgcggcagctcccaggcctggggaacgtaggtgtgtgagagcggcacccgggaaggacg

SEQ ID NO: 219843 - DNA, 201 bp, Homo sapiens
gctcggtgctgccgctcgtgcttgggctctgccgccacgtccagggcccgctcgtactggggcaggcagggggcacagcaagctgtcagcagcgcaggagrccggcaggaggccagcagatgcccacgactcccggggtgcagttacgtgctagacgctgtgtgatgcgggcactgacccacaacactgagctgtttcttc

SEQ ID NO: 219844 - DNA, 201 bp, Homo sapiens
cattcccccttctttggcgacgagtcaaacaagccaatcctgctgcccaatgaggtaggcgtggcctccctctcctgcatccgctggagctgtgtggctcrggtgaatggtggggggcccagctctgctgctgggagctcaggcttgcagagggctctggcctaagctccctgtggcagcctgccgtgaccggcctgggtg

SEQ ID NO: 219845 - DNA, 201 bp, Homo sapiens
cccctcggggggtgggggcaggcacctggtgacccgggagaccaggaagcgctgcacggcgggactgtccaccattgccagggcggccccggcccaggccygacactgctcctgcgcctgcagccaggccgccttctccaccaccaggcggtagcagtgcccgttgccagggaagatctccgtgtccgaggggcagagcgg

SEQ ID NO: 219846 - DNA, 201 bp, Homo sapiens
cctgggctctgtggaggactctgcccttagcctgtcgcctcctggacacacctcccgtcgggctggagagtcccacgcggggcacagaggagaggaggtgsccggggctctgcatgccatgggagccaagcccgggctgggacactcactgtccggctctccagccagccatgtagtactactaatgcctcaacctctctg

SEQ ID NO: 219847 - DNA, 201 bp, Homo sapiens
ctcacctggctcccacccccagccctgcagctggagagcccacttgactggacccccacagcctcctcactaagcattttctgtggctctgcatgacccasggcctccacctggggaccacgtgatgcagcccaccgaccacacaaggcacctcttcacatgagagcggaggaggaggggagagaggagaggggagtggag

SEQ ID NO: 219848 - DNA, 201 bp, Homo sapiens
ccggccggtacagctctccacgcaaggcgtggtagcgccagcggagaataacagcccccagccgtagggcgccccacagccgcagtgcccagagccccacwcacagcaggggtgacaggtgccaggactcggcaggacacagggtagagagcccagtcccagggcacagcaccaacagggcctgggccacgctccagaggg

SEQ ID NO: 219849 - DNA, 201 bp, Homo sapiens
gacaggaacggccccaccggccggcgccacctgctcaccagggccggcccagctcccacctccttcctcctgagactccccagccgcaggctctgccccastgcttcagagatctcccaacctatggcccctcggggggtgggggcaggcacctggtgacccgggagaccaggaagcgctgcacggcgggactgtccacca

SEQ ID NO: 219850 - DNA, 201 bp, Homo sapiens
tccaccacggggctgtacctctgcggggggaatggtgtcagcctgggctctgtggaggactctgcccttagcctgtcgcctcctggacacacctcccgtcrggctggagagtcccacgcggggcacagaggagaggaggtgcccggggctctgcatgccatgggagccaagcccgggctgggacactcactgtccggctct

SEQ ID NO: 219851 - DNA, 201 bp, Homo sapiens
tctgcagagctgacaggaacggccccaccggccggcgccacctgctcaccagggccggcccagctcccacctccttcctcctgagactccccagccgcagkctctgccccagtgcttcagagatctcccaacctatggcccctcggggggtgggggcaggcacctggtgacccgggagaccaggaagcgctgcacggcggg

SEQ ID NO: 219852 - DNA, 201 bp, Homo sapiens
tggggaaactgaggctcagagcccggagaccagggcccaccagcccaggctcacagcagcacccacccacggggcctgtgggtaccggcagggatccccgygcaggccacctcccgtatggcgtgcccaggagtgtccggaggctgcccccagctcatgtccacctctgcatctgcagagctgacaggaacggccccaccg

SEQ ID NO: 219853 - DNA, 201 bp, Homo sapiens
gggcgtgtccctctcccccccactgggccgtacccacctccttgaccttgctgaggcccatccagaggcgcagcctgcgcaggaacaactccaccatctcstagtcctggggctcccaggccggccggtacagctctccacgcaaggcgtggtagcgccagcggagaataacagcccccagccgtagggcgccccacagcc

SEQ ID NO: 219854 - DNA, 201 bp, Homo sapiens
tcgatctcaaaaaaaaaaaaaaaaaaaaaaaaggtgtttgtggtagaaagtgttctcacggctgctgactcagaaccatgagcctgtgtgtaagtcctggycttctcttcaaaggtgatggcccgctccctctccccacccccggagctggaagaaagggatgtggccgcatactcggcctccttggaggatgtgaagaca

SEQ ID NO: 219855 - DNA, 201 bp, Homo sapiens
agctgcccgggcgccaccaccttgctgctggcccacagcaccaggcccacgatgggctcctccgccgtgaggttgtacgtggctgagacccagctgactgygttggaggcattgagccggatggagaaggtgccagcatccgggaagaccatggtgacatgagggccacgcttgctgctgccgccgggcacagcccagcac

SEQ ID NO: 219856 - DNA, 201 bp, Homo sapiens
aggagctggacaggatccctggaaggggccccggggtctctgagtcgcgctcagcgggtgcttgtgctctctgcccagctgtgctgaagtcccgagggacrtgtccgctgcttgcgggtcggttcctgaggaattggaagtgtcacgagatgtggccctcgttgggctggcgctcattggcctcccttgtgcctgtgcagg

SEQ ID NO: 219857 - DNA, 201 bp, Homo sapiens
gaaaggttatgcccaccagagacccagggtcctgacggctggaggtccgcagtggggaaggtgggcagaggtgttgctcagatgtccccattcctgtttcstttgcacagaggggttttctggtgcgtcctggtccaccatggccaaaccaacaagcaaagattcaggcttgaaggagaagtttaagattctgttgggact

SEQ ID NO: 219858 - DNA, 201 bp, Homo sapiens
actggccccacaaacccatccggccctgctcaccctcagccgtcttccacatcgccaccctgatgcccaccaaggacgtggacaagcaccgctgcgacaaraagcgccacctgggcaacgactttgtgtccattgtctacaatgactccggtgaggacttcaagcttggcaccatcaaggtgagtgaggggccgtcagtga

SEQ ID NO: 219859 - DNA, 201 bp, Homo sapiens
aggacgtggacaagcaccgctgcgacaagaagcgccacctgggcaacgactttgtgtccattgtctacaatgactccggtgaggacttcaagcttggcacyatcaaggtgagtgaggggccgtcagtgaggctgggccccaggcaggtgcccactgctgtgtcccgggttggtggcaggtcctcctccctgagcttcggtc

SEQ ID NO: 219860 - DNA, 201 bp, Homo sapiens
ggagcagggcctcatccaccgctgtgccagccagtgcgtcgtggccttgtccatctgcagcgtggagatgcctgacatcatcatcaaggcgctgcctgttmtggtggtgaagctcacgcacatctcagccacagccagcatggccgtcccactgctggagttcctgtccagtgagtccccgccctgcctgcgcatgcaccc

SEQ ID NO: 219861 - DNA, 201 bp, Homo sapiens
gttggccagggccccgctgaaagcctcggggatggagaagtggcagccaggccctggggcgccgccatagcacagcaggctccgcgggtccgagcgcttgycctgggccacgatctcctcgcccgccagcgtcaggggctcctcgttgagcacgcgggagcgcatgaggatgcgcatgagggcagaggtcaggttgtaggc

SEQ ID NO: 219862 - DNA, 201 bp, Homo sapiens
gcgctcattggcctcccttgtgcctgtgcaggaggagctgattaactcagtggtcatctcgcagctctcccacatccccgaggataaagaccaccaggtcygaaagctggccacccagttgctggtggacctggcagagggctgccacacacaccacttcaacagcctgctggacatcatcgagaaggtgagagccgttgt

SEQ ID NO: 219863 - DNA, 201 bp, Homo sapiens
gacacagaactcctcgcagtggccctggcgacagcgccgcagcagcagggcgtacaccagcggggcgccagcatcctccgcgtcatgccagcctgagggayggtccccacggcatcacgggagggctccgtgacgtcacagagtcgggggatcccgctgctccccccacgcaggcctgcactcacccgtgcattcgaagtg

SEQ ID NO: 219864 - DNA, 201 bp, Homo sapiens
aggggcgggcggcacccaccgtctggttggtggcctcctccttgcggccggccttccacacggtcaggctgaaggtgtactccacgccagccgccagccgytcccgtggaatggtgaccgtgctgctcccgcggggcccaaagttcagcgcacacccgccagcctccctctgcaggccgagaacaaggggcgacgtggcct

SEQ ID NO: 219865 - DNA, 201 bp, Homo sapiens
tgagctgcgtcctctctctgcagaccaagctgtacaccctgcctgcaagccacgccacgcgtgtgtatgagatgctggtcagccacattcagctccactasaagcacagctacaccctgccaatcgcgagcagcatccggctgcaggtatggtggctggggttgcgcagccagttcctgggggcccagccaggtatccccg

SEQ ID NO: 219866 - DNA, 201 bp, Homo sapiens
agctgcgtcctctctctgcagaccaagctgtacaccctgcctgcaagccacgccacgcgtgtgtatgagatgctggtcagccacattcagctccactacawgcacagctacaccctgccaatcgcgagcagcatccggctgcaggtatggtggctggggttgcgcagccagttcctgggggcccagccaggtatccccgtc

SEQ ID NO: 219867 - DNA, 201 bp, Homo sapiens
ggcccacctcgaagtgtggcctgaaacccgggggcagcacggctccgtagctggagaggctgcccttgtagacacagaactcctcgcagtggccctggcgrcagcgccgcagcagcagggcgtacaccagcggggcgccagcatcctccgcgtcatgccagcctgagggacggtccccacggcatcacgggagggctccgt

SEQ ID NO: 219868 - DNA, 201 bp, Homo sapiens
gtgtcctatgagatcgtcctgtccatcaccaggctcatcaagaagtataggaaggagctccaggtggtggcgtgggacattctgctgaacatcatcgaacrgctccttcagcagctccaggtggggtgggggcaggagctccggggagcaccgggaacccagacaggcaggctcggcccactcagaagatggtaccttggg

SEQ ID NO: 219869 - DNA, 201 bp, Homo sapiens
cattgggccggggctccgagtgtaggtagactgccaggtagggctcaggttcctcagacaggtagtggcctggggcagaacgcgcaggtcacacgcctgcygggaagctcaaccacccgggggacacccacgatggccctcctgagcccaccctctgccacgggcctgaaaggccataggagcctctgcaccagagctggc

SEQ ID NO: 219870 - DNA, 201 bp, Homo sapiens
agatccggcgggcgcccggctgctcctgcggccttgcaggctgtgcagctgctgctccagctggtagacgtcctctgtggcctggttgagtcggtcaaackgggtgagcagggcctcgaacacggcttggaggcgggagggctcaggctcacaccttgtccccagccggcccaggctcacgctcagcccatccagctggct

SEQ ID NO: 219871 - DNA, 201 bp, Homo sapiens
tgggcggatcctcctgctagccgagcagttgtgctcattgggccggggctccgagtgtaggtagactgccaggtagggctcaggttcctcagacaggtagyggcctggggcagaacgcgcaggtcacacgcctgccgggaagctcaaccacccgggggacacccacgatggccctcctgagcccaccctctgccacgggcc

SEQ ID NO: 219872 - DNA, 201 bp, Homo sapiens
gtcgccacccccctcagccttctgaggtctctctcaggccactgccacccggcccccgttgccacaggcagggctcaccctccagaaaccgacggggtagrtgagcttgcccagcgtggcatcatctgtctgcaggatgctgtccaccgtcaggccccgcgcccgcagtcgctgcatggcgcccgccgtcacctggtcttt

SEQ ID NO: 219873 - DNA, 201 bp, Homo sapiens
ccacgggaagatccggcgggcgcccggctgctcctgcggccttgcaggctgtgcagctgctgctccagctggtagacgtcctctgtggcctggttgagtcrgtcaaactgggtgagcagggcctcgaacacggcttggaggcgggagggctcaggctcacaccttgtccccagccggcccaggctcacgctcagcccatcc

SEQ ID NO: 219874 - DNA, 201 bp, Homo sapiens
ccaatgaggtaggcgtggcctccctctcctgcatccgctggagctgtgtggctcgggtgaatggtggggggcccagctctgctgctgggagctcaggcttrcagagggctctggcctaagctccctgtggcagcctgccgtgaccggcctgggtggggcggcctcctgtggacgggcgtctggggctcaggcagggctctg

SEQ ID NO: 219875 - DNA, 201 bp, Homo sapiens
gccaggaaggaggactaagtgctgctggggtggaccttgttcttggcccgaaggggtgtcctgctggggccagtggccaggtccacaccccgactggcccrggcaaggcggctgggcagtgctggccgcaggcccggggatgggccacgggaagatccggcgggcgcccggctgctcctgcggccttgcaggctgtgcagc

SEQ ID NO: 219876 - DNA, 201 bp, Homo sapiens
caggtctatttggcctgctggaaggactgggggacccatggaggatgctgctcccaaactccaggtttcccaggggcctggccactgccggtgagctcacyccctcccaggatactcatccggtttgccaccttccaacttggacggcggaagggcatacacagggcagaggacactggagtgtgcgttctggtgtactgg

SEQ ID NO: 219877 - DNA, 201 bp, Homo sapiens
aggccacgtcagggccagggcctggcccagccccacatccagcagccccgtctgtgtcctcccagactccgccgtggtcatggaggagggaagtccgggcraggttcctgtgctggtggagcccccagggttggaggacgttgaggcagcgctaggcatggacaggcgcacggatgcctacagcagggtgagtgtggctca

SEQ ID NO: 219878 - DNA, 201 bp, Homo sapiens
gtcccctcggccatgggacccatccccagcccgcccacaccccgctcaacactcacccctcgcttggagccgctgctgcaattgaggcagcggccctccargtacacgtaggagctgcggctcacttcgtacacggcctgtgccttgcaggacacacactccaaggacacaatgggcacccggccactccggatcagcacc

SEQ ID NO: 219879 - DNA, 201 bp, Homo sapiens
ccagcgtcctccctgcccgctcggtggatggcagcagtaagcagagccctggggaggctcgcagggctgctgtccctctggtcaggagaaggctggttctyggaggccacgtcagggccagggcctggcccagccccacatccagcagccccgtctgtgtcctcccagactccgccgtggtcatggaggagggaagtccgg

SEQ ID NO: 219880 - DNA, 201 bp, Homo sapiens
gagactgtggcgcccccgctgctgtgcccgcagacgtgcccggcctcagccagctggagcgcaggcagcagagtgcaggccaggcccagacagcagcgggmtgttttcattccagggtgcttggcgggctgggctgccgtggccactgcagagctccagaaaagaacatgtgtgtctccctccaaagtatattccttgctg

SEQ ID NO: 219881 - DNA, 201 bp, Homo sapiens; identical to SEQ ID NO: 39374

SEQ ID NO: 219882 - DNA, 201 bp, Homo sapiens
gggccctgcagtgtggcgccaagagccctgggcctggcgtgaccaccaagtctccccagacatggagggccttgtggacaccagcgtggccaagatcgtgwctgaccgcaacctgcccttcgtggcccgccagatggccctgcacgcaaatgtgagtgggggtgggtccaggcgtgagctggtgggacaggcccaggtgcc

SEQ ID NO: 219883 - DNA, 201 bp, Homo sapiens
ggctgctggaatggatggtcttgtctgcctcagggatcagagtggggctcccggcagagcctgctgggcacccccaccctctgcggggcagggcccggccygggagtgatgccaccctgcctctcccctctccccacagagcaacagcgagctcgccatcctgtccaatgagcatggctcctacaggtacacggagttcct

SEQ ID NO: 219884 - DNA, 201 bp, Homo sapiens; identical to SEQ ID NO: 39378

SEQ ID NO: 219885 - DNA, 201 bp, Homo sapiens
ctgctggcacgatgacatcatgcaaggtacggcctggcgcctacccgctcctgctgccccaggcctcagggcacggctcccatccagtcctgctaccccaygccctggggcatggccctggcacccccacctgctccagctccccacgcctcaggttccgagcctaacagcgtgggcatggaggcagtgatggggctggtg

SEQ ID NO: 219886 - DNA, 201 bp, Homo sapiens
tgctggcacgatgacatcatgcaaggtacggcctggcgcctacccgctcctgctgccccaggcctcagggcacggctcccatccagtcctgctaccccacrccctggggcatggccctggcacccccacctgctccagctccccacgcctcaggttccgagcctaacagcgtgggcatggaggcagtgatggggctggtgg

SEQ ID NO: 219887 - DNA, 201 bp, Homo sapiens
cccaccctctgccacgggcctgaaaggccataggagcctctgcaccagagctggcacctgcttctccgtggcccccagctcctctctggccaggcccccarcagcccatgaaacagaaagcaaatttcaccagagacacccatggaagccctacgagaaacgccttccccccaagaacaaggccagggggccgcgtgtgcc

SEQ ID NO: 219888 - DNA, 201 bp, Homo sapiens
cagcagccctgggagcacactagcggtgagcccgtgcagccagactgtgagccccgttgcgctgccgttgggctctgggagggtgatggccaaagacctaygagcagaggggggtggtgagcaggtggcagtctcgggggcgccctcccacggcctggctcacctgttgagggcgaccacagcggctcccagctggtcctg

SEQ ID NO: 219889 - DNA, 201 bp, Homo sapiens
ttactcgcggccagcacctccttctccaccaggcccccgttggcctccgtctccaccgaaagccagtcattgaccaggaagaaggcgctgcgtgccgtctrcaggtccctgacgatgacgtgctgcaggaaccaggcagggctgagccctgcagaggcgcaggagggaggtcaggctcgcagggcgccccaatgcgggggc

SEQ ID NO: 219890 - DNA, 201 bp, Homo sapiens
gagaagtaccaggcgtaggcgacccgagagccgcgctgcacgcgggctgtgaagttcctctcagtgcccgtggcgatgccaggctcgcagcagttgggcayctgcagcccactcacggcctccagcaccacgatgcgcacctgcgcctgggcccagctcacgtggtttttgccccgcacgctcaccacgtggtctccgacg

SEQ ID NO: 219891 - DNA, 201 bp, Homo sapiens
gcaggggaggccctgccaccccgctgcgcccctcacctgagccccggccccagcctgtcttgacgaggatctcgtacttgaagcggccccgctgcccacasaaggggatggcgcggccccggctggcatccaactggtccagcttgtgcaggatggcggccatgaccatgtaggtcaccaggcacacagcacatgtcagca

SEQ ID NO: 219892 - DNA, 201 bp, Homo sapiens
ggcgtgagccaccacacccggcccggccactgggacgtttctaagggactaactcagcctcttcacttcctatagatgtactgagattttcttctggagtrcatttcggaagcgtgcacagccgcgtgcttgcttcttctgagttatctggcgtgctgctgtgcagtcgtccgtggcgtctgcttagcaaagtgccctcgt

SEQ ID NO: 219893 - DNA, 201 bp, Homo sapiens
actcctgacctcaagtgatctgcccgcctcggcctcccaaagtgctgggattacaggtgtgagccaccgcgcccggccatcgttccattttaattaacttwaatacgagcagccacatgtggcctctggttcctgccacggactcgggagcaacccctcctggtcgcggcttatgcgccttctctgtgtgctgctggggtt

SEQ ID NO: 219894 - DNA, 201 bp, Homo sapiens
ctgcctgcaggccccgtcccctcggccatgggacccatccccagcccgcccacaccccgctcaacactcacccctcgcttggagccgctgctgcaattgargcagcggccctccaagtacacgtaggagctgcggctcacttcgtacacggcctgtgccttgcaggacacacactccaaggacacaatgggcacccggcca

SEQ ID NO: 219895 - DNA, 201 bp, Homo sapiens
cgcgcccggccatcgttccattttaattaacttaaatacgagcagccacatgtggcctctggttcctgccacggactcgggagcaacccctcctggtcgcrgcttatgcgccttctctgtgtgctgctggggttagtttgcatgtaacctcttgaggaccccacgtgtgcattcctaaggggtgcggcctcccgtttccgt

SEQ ID NO: 219896 - DNA, 201 bp, Homo sapiens
gccccgtgtctgtgcccggccgccctgcggtgctcaccagccttctgaacgaggagctggacaggatccctggaaggggccccggggtctctgagtcgcgytcagcgggtgcttgtgctctctgcccagctgtgctgaagtcccgagggacatgtccgctgcttgcgggtcggttcctgaggaattggaagtgtcacgaga

SEQ ID NO: 219897 - DNA, 201 bp, Homo sapiens; identical to SEQ ID NO: 39372

SEQ ID NO: 219898 - DNA, 201 bp, Homo sapiens
gccgcacacggccttcccttgcagtggcctctttctcctccctgtaccagtccagctgccaaggacagctgcacaggagcgtttcctgggcaggtatcgcstctcagagggaagcggttggctgcagagcgccactctgcctcataggtgctgtgctcgtcgcctcatccgcccacccccatggtccgtctgcctccattg

SEQ ID NO: 219899 - DNA, 201 bp, Homo sapiens
cacgctccgccccgctgcaggctaaagtgcgtgggcgggaagcggtgggcagggtgccatctggctccgcccttctcctgtggtgtgggccaggcggcggsttcctcctcctgcagcagccacaggctccaccctgatccttcttccgcggtgtggatccttctcccgcgatctccgtgcgcggcccgagtcagtacccgc

SEQ ID NO: 219900 - DNA, 201 bp, Homo sapiens
cccaagcagcttgtagctagcactgggccccgtgcgcgcccctgccggccgctggccctgccctctctcctctgcaggcacggggcctgtgctctctgctygacctgtgtgtagcccctcctcctgctgacgtggccgcacacggccttcccttgcagtggcctctttctcctccctgtaccagtccagctgccaaggaca

SEQ ID NO: 219901 - DNA, 201 bp, Homo sapiens
ccaaggacagctgcacaggagcgtttcctgggcaggtatcgcctctcagagggaagcggttggctgcagagcgccactctgcctcataggtgctgtgctcrtcgcctcatccgcccacccccatggtccgtctgcctccattgccctggggagcaggtcccgactcgcatgaggacgtctgtgcagaatgtctttggcttg

SEQ ID NO: 219902 - DNA, 201 bp, Homo sapiens
gccgtcttccacatcgccaccctgatgcccaccaaggacgtggacaagcaccgctgcgacaagaagcgccacctgggcaacgactttgtgtccattgtctrcaatgactccggtgaggacttcaagcttggcaccatcaaggtgagtgaggggccgtcagtgaggctgggccccaggcaggtgcccactgctgtgtcccgg

SEQ ID NO: 219903 - DNA, 201 bp, Homo sapiens; identical to SEQ ID NO: 39375

SEQ ID NO: 219904 - DNA, 201 bp, Homo sapiens
atccggccctgctcaccctcagccgtcttccacatcgccaccctgatgcccaccaaggacgtggacaagcaccgctgcgacaagaagcgccacctgggcawcgactttgtgtccattgtctacaatgactccggtgaggacttcaagcttggcaccatcaaggtgagtgaggggccgtcagtgaggctgggccccaggcag

SEQ ID NO: 219905 - DNA, 201 bp, Homo sapiens
atggaagacccaaatgaacactcatctggggaaaccaagccaggagaggcctgggggcctcagccctctgcacccatctcagccctatgccgagtgccacmtggacctgtccacccagggccaggaagggcacggacccccaacccatcccacgcagggccaaggccccccatcccctgtccacagtcccccacagagcca

SEQ ID NO: 219906 - DNA, 201 bp, Homo sapiens
aagctatggcctcccacccttgagctccccactcccagaggtcaggaggggcctttctgatggaagacccaaatgaacactcatctggggaaaccaagccrggagaggcctgggggcctcagccctctgcacccatctcagccctatgccgagtgccacctggacctgtccacccagggccaggaagggcacggaccccca

SEQ ID NO: 219907 - DNA, 201 bp, Homo sapiens
acagcggctcccagctggtcctgcaccaccacggccaggcccacctcgaagtgtggcctgaaacccgggggcagcacggctccgtagctggagaggctgcycttgtagacacagaactcctcgcagtggccctggcgacagcgccgcagcagcagggcgtacaccagcggggcgccagcatcctccgcgtcatgccagcct

SEQ ID NO: 219908 - DNA, 201 bp, Homo sapiens
catcctgtccaatgagcatggctcctacaggtacacggagttcctgacgggcctgggccggctcatcgagctgaaggactgccagccggacaaggtgtacmtgggaggcctggacgtgtgtggtgaggacggccagttcacctactgctggcacgatgacatcatgcaaggtacggcctggcgcctacccgctcctgctgc

SEQ ID NO: 219909 - DNA, 201 bp, Homo sapiens
agctgggatggaacctgctcccacaccctcccctcagacgacccctctgggaagacccccaatcaggccagctgaggaaagcagggactggggaacagacrcccactctggggcaccagcaggccccgcctgacagcagcaggagcagccaccacgggctcagggtcaccaagcctcctggccggtccagagaggggagcg

SEQ ID NO: 219910 - DNA, 201 bp, Homo sapiens
accaggtcccgtgtgtctgaccacacgcggtatgagccaccctcaatgatgggcaccaggcgctcgggggccaccgtcacattggcctggatgctctgtgycagtggcgtgtccccaaatgacacgacaaacacaaagcagtagtgccccacaggcagcgccagccgcggcagcaccagccgaggccggctcacgtccacg

SEQ ID NO: 219911 - DNA, 201 bp, Homo sapiens
ccttctctcctctgcagcaccccatcgctgccgtgggcagagcagccgtgttggccttcagaggcgctgcacgggaccccggctcccctgaccaccctctycattaccgcagctctggccaggctgccgcacctctacaggaactttgccgcggagcagtatgccagtgtgttcgccatctccctgccgtacaccaacccc

SEQ ID NO: 219912 - DNA, 201 bp, Homo sapiens
ttcagaggcgctgcacgggaccccggctcccctgaccaccctctccattaccgcagctctggccaggctgccgcacctctacaggaactttgccgcggagyagtatgccagtgtgttcgccatctccctgccgtacaccaacccctccaagtgagtggtcgccccaggccctgtgcctcccagccgtggcccccgctaggc

SEQ ID NO: 219913 - DNA, 201 bp, Homo sapiens
ggcgcgggtcagcaaggtaccaggggatgtgtcacacacacagcccacccccgtccagtcacgcacggacaccctgggcttccgagcaaacctgctcccgsgtggtgtgaccacatggagccacagacacccagcaaggacacgcagcccgcacacccccggcaccccagacacagtgacctgcaccagggctcgaggttt

SEQ ID NO: 219914 - DNA, 201 bp, Homo sapiens
gacgtcacagagtcgggggatcccgctgctccccccacgcaggcctgcactcacccgtgcattcgaagtgcaccttggtggtgagggcgtgcacagcgccyagtgggaagaggcggcaagagccccccagcggcgggcggttgggggacaggcggatggaggcgcagccctcctcctcgccagagcggcccagcaccgtga

SEQ ID NO: 219915 - DNA, 201 bp, Homo sapiens
tcttggtcccaagcacgcatgcagcagatgtgacgtcccctcccaggctgcactcacctcgttcagcacggtgaccagggccaacgagtactcgatgacgwgctggggatcggcctgccgcagcagccctgggagcacactagcggtgagcccgtgcagccagactgtgagccccgttgcgctgccgttgggctctgggag

SEQ ID NO: 219916 - DNA, 201 bp, Homo sapiens
atccagcaacagggacatgggctggggacagtggctacctctggggtgggaaggggctcttcctcactgttggtattgctaggggactgtgtagcttttgycactagagcatatgtggcttgaagactgtacgtggaactgtggcaggtttggaaggaagcaaagctgaagcaggctgtcgtgttacatagaatttgcatc

SEQ ID NO: 219917 - DNA, 201 bp, Homo sapiens
ccagggtggccgggagccggcgagcagtgcaggagggcgccagggccagcgtcgtgctgcaagccaacgaggtcaccagggagcatgaggacatcctggcygtggagggtgacctgtggagagggaggcagggctgcatcacgtcctcacggtcatggcccgtggacccccgcacgacggatgagggtggacacgcagggc

SEQ ID NO: 219918 - DNA, 201 bp, Homo sapiens
cagggcactcctccatcctcccaccctcacagcagcccgctgggagccccatcactgtccccctttccagatggggaaactgaggctcagagcccggagascagggcccaccagcccaggctcacagcagcacccacccacggggcctgtgggtaccggcagggatccccgtgcaggccacctcccgtatggcgtgcccag

SEQ ID NO: 219919 - DNA, 201 bp, Homo sapiens
cctggggctcccaggccggccggtacagctctccacgcaaggcgtggtagcgccagcggagaataacagcccccagccgtagggcgccccacagccgcagygcccagagccccacacacagcaggggtgacaggtgccaggactcggcaggacacagggtagagagcccagtcccagggcacagcaccaacagggcctggg

SEQ ID NO: 219920 - DNA, 201 bp, Homo sapiens
agggcccggcccgggagtgatgccaccctgcctctcccctctccccacagagcaacagcgagctcgccatcctgtccaatgagcatggctcctacaggtasacggagttcctgacgggcctgggccggctcatcgagctgaaggactgccagccggacaaggtgtacctgggaggcctggacgtgtgtggtgaggacggcc

SEQ ID NO: 219921 - DNA, 201 bp, Homo sapiens
ctcccgtggaatggtgaccgtgctgctcccgcggggcccaaagttcagcgcacacccgccagcctccctctgcaggccgagaacaaggggcgacgtggccygagagccccatccagttttaaagcagagcccggcccaggagacagcgcgggagaccccctccccatgctgggacggggcccaccaggcactgaggacggg

SEQ ID NO: 219922 - DNA, 201 bp, Homo sapiens
taggccagaggccatccctgggcccatcccacacattgccagcatccccaagctatggcctcccacccttgagctccccactcccagaggtcaggaggggmctttctgatggaagacccaaatgaacactcatctggggaaaccaagccaggagaggcctgggggcctcagccctctgcacccatctcagccctatgccga

SEQ ID NO: 219923 - DNA, 201 bp, Homo sapiens
cgtgtgtctggcccatcacgtcatagccatgtggttcatcaggtgccgcctgcccttccggaaggattttgtccctttcatcactaaggtgggctcagggycggtgaaggctgtgtctctcggtaggccagggcttgctttgcccttggctgtccatggtcgggcagagtgacaggcaggtggagggcagtgggagggtgt

SEQ ID NO: 219924 - DNA, 201 bp, Homo sapiens
gtctctgaggagtgagtggccgtgggtcagggccagagcccttagtaggccagaggccatccctgggcccatcccacacattgccagcatccccaagctawggcctcccacccttgagctccccactcccagaggtcaggaggggcctttctgatggaagacccaaatgaacactcatctggggaaaccaagccaggagag

SEQ ID NO: 219925 - DNA, 201 bp, Homo sapiens
cgtgttggccttcagaggcgctgcacgggaccccggctcccctgaccaccctctccattaccgcagctctggccaggctgccgcacctctacaggaacttygccgcggagcagtatgccagtgtgttcgccatctccctgccgtacaccaacccctccaagtgagtggtcgccccaggccctgtgcctcccagccgtggcc

SEQ ID NO: 219926 - DNA, 201 bp, Homo sapiens
gagcaggttgtgggagacgtctctgaggagtgagtggccgtgggtcagggccagagcccttagtaggccagaggccatccctgggcccatcccacacattkccagcatccccaagctatggcctcccacccttgagctccccactcccagaggtcaggaggggcctttctgatggaagacccaaatgaacactcatctggg

SEQ ID NO: 219927 - DNA, 201 bp, Homo sapiens; identical to SEQ ID NO: 39302

SEQ ID NO: 219928 - DNA, 201 bp, Homo sapiens
cacgtccgtgtggccgtggccttctctcctctgcagcaccccatcgctgccgtgggcagagcagccgtgttggccttcagaggcgctgcacgggaccccgrctcccctgaccaccctctccattaccgcagctctggccaggctgccgcacctctacaggaactttgccgcggagcagtatgccagtgtgttcgccatctc

SEQ ID NO: 219929 - DNA, 201 bp, Homo sapiens; identical to SEQ ID NO: 39305

SEQ ID NO: 219930 - DNA, 201 bp, Homo sapiens; identical to SEQ ID NO: 39308

SEQ ID NO: 219931 - DNA, 201 bp, Homo sapiens
ccaaggcggcaggacccccagcccagcccaggacccccagtagagtcctcacctcagcgtggaggcctgagaacgtgaggaaggagctgtccagcacggaygagtccaggcagctgtcgatgtccagcacctgctgcccggcaggtgtggggctcgggctcccagccacctgcaggacgagggcagtggtcagcgggcggc

SEQ ID NO: 219932 - DNA, 201 bp, Homo sapiens
ggtaaggggaggtactggcctcaggccaaaggtgctgccgcctccgcagggaacaccagctggctgatgagcctggagaacccgctcagccctttctcctmggacatcaacaacatgcccctgcaggagctgtctaacgccctcatggcggctgagcgcttcaaggagcaccgggacacagccctgtacaagtcactgtcg

SEQ ID NO: 219933 - DNA, 201 bp, Homo sapiens
gggtggggcccctacaggtgggggcaggaggtggcggggggccggagcagagggacaggcaggcaaaggaggcactggagggctgggccgccccacacagkcaccagccctgctccgagagggctgcgaggccctggccggtggagaagcagaaggcgctgcaggcctctggctgaagcaggccttcgtgggcagctgaaa

SEQ ID NO: 219934 - DNA, 201 bp, Homo sapiens
agcgccgagaggttcgccaggagcccaacgtccagcgcccggagcaggttgtgggagacgtctctgaggagtgagtggccgtgggtcagggccagagcccytagtaggccagaggccatccctgggcccatcccacacattgccagcatccccaagctatggcctcccacccttgagctccccactcccagaggtcaggag

SEQ ID NO: 219935 - DNA, 201 bp, Homo sapiens
gggagcggggcagcgatgtggaaggctgctagctggccagaggccagaggtccgtggggccccaccagggtggcccctggggaggcagggaagacgtgctrgaggagggtggggcccctacaggtgggggcaggaggtggcggggggccggagcagagggacaggcaggcaaaggaggcactggagggctgggccgcccca

SEQ ID NO: 219936 - DNA, 201 bp, Homo sapiens
ccccacagctgagcagcaagaggcggtgccgccagcccacccggagtgagccccgcatgctggcacgactgggggacactcacagctctgccagcgccgaraggttcgccaggagcccaacgtccagcgcccggagcaggttgtgggagacgtctctgaggagtgagtggccgtgggtcagggccagagcccttagtaggc

SEQ ID NO: 219937 - DNA, 201 bp, Homo sapiens
ctggtgaagtaatgcgccctgttcacgcggctggacagcaccagcgccagggggaacgtgccgctccgcgtgaagttgtgtgtcaccgtcgggcacccccrcacggtcgtgttggaggagccatccccgaaggtccagtcgaagaggtagtgggccgggttcccggtgacgtaggccgtgagccgcgcgtcaggctgcgtg

SEQ ID NO: 219938 - DNA, 201 bp, Homo sapiens
cggtgggcccgagccggacgcagtgctcggctgtggctgggtgtggctccccgggcagccagttctggcagctctccaggctgaaggcctcgccctgcggsgctgggcccacctccaccccctgcacagtcgagaagccgatccacacgtctaggctcctgggggcgggtgtgggatggcagggggctcagggcactcctc

SEQ ID NO: 219939 - DNA, 201 bp, Homo sapiens
caggcagtccagctgtaggagacgttggtgccatccctaaccacggcctgcagctgtaccgtgtggttggtggggaagtagcggccaccgcccaccacctrcagcccctctatgagctgcaggacatagacgaagatgctgtcctgggcggagcccacctcgttctcagccgtgacgatgatattgaaggtgcccacggag

SEQ ID NO: 219940 - DNA, 201 bp, Homo sapiens
ggggttcagactccacctcaaaagccactcgctttagccaggcgagaacacagcagagggcgtgagagactcacgggggctcgtgtgaggtcagggagcakagttttaaattcattttgtgaaatgagacagtggaatgagttagcggagccactgtcagagccgtgactttccaggaatttaaagcccaccaggtagccc

SEQ ID NO: 219941 - DNA, 201 bp, Homo sapiens
ccgccgggcacagcccagcaccagctcacattggtgcccgtggccagctgcccccaaaagggcacagaggacccggccgccacgaagctgcctccgggctygctggccctgatgctgaggccactcacaggcacctgcacatccacttccacggtggcgttggctgagcccagcgggttccctgccgtcatggtgaccaag

SEQ ID NO: 219942 - DNA, 201 bp, Homo sapiens
gagggacggtccccacggcatcacgggagggctccgtgacgtcacagagtcgggggatcccgctgctccccccacgcaggcctgcactcacccgtgcattygaagtgcaccttggtggtgagggcgtgcacagcgcccagtgggaagaggcggcaagagccccccagcggcgggcggttgggggacaggcggatggaggcg

SEQ ID NO: 219943 - DNA, 201 bp, Homo sapiens
cgttggaggcattgagccggatggagaaggtgccagcatccgggaagaccatggtgacatgagggccacgcttgctgctgccgccgggcacagcccagcaycagctcacattggtgcccgtggccagctgcccccaaaagggcacagaggacccggccgccacgaagctgcctccgggctcgctggccctgatgctgaggc

SEQ ID NO: 219944 - DNA, 201 bp, Homo sapiens
cccagggcgttgaaggcgcgcacctggatctccaacagccccgcggccacgggcgtgtaggtgacgtcgcggcccgacaggatgaccagcgagtcgccctrgaccttctgcagcgagaagtaccaggcgtaggcgacccgagagccgcgctgcacgcgggctgtgaagttcctctcagtgcccgtggcgatgccaggctcg

SEQ ID NO: 219945 - DNA, 201 bp, Homo sapiens
cagcaccaggtcccgtgtgtctgaccacacgcggtatgagccaccctcaatgatgggcaccaggcgctcgggggccaccgtcacattggcctggatgctcygtgtcagtggcgtgtccccaaatgacacgacaaacacaaagcagtagtgccccacaggcagcgccagccgcggcagcaccagccgaggccggctcacgtc

SEQ ID NO: 219946 - DNA, 201 bp, Homo sapiens
cctcaggtaggagtgctcggccctgggctcatctgtgtcctgccctggcgacccatccccaaagtcccagtggtaggccacacgccgggggctggggctgrtggcggcctcaaactgcgccgagcggttggtgaagcaggggccgctctgcagggccacatactggacggcgtcctgaacctccagcaccagcgtgcggtt

SEQ ID NO: 219947 - DNA, 201 bp, Homo sapiens
cggcgtctggtcgccgtcctccaggttggggtcgtaggactcgctcccatccagcaccaggtcccgtgtgtctgaccacacgcggtatgagccaccctcartgatgggcaccaggcgctcgggggccaccgtcacattggcctggatgctctgtgtcagtggcgtgtccccaaatgacacgacaaacacaaagcagtagtg

SEQ ID NO: 219948 - DNA, 201 bp, Homo sapiens
gttcacctgcacgcggtagtccccaggcctcaggtaggagtgctcggccctgggctcatctgtgtcctgccctggcgacccatccccaaagtcccagtggyaggccacacgccgggggctggggctggtggcggcctcaaactgcgccgagcggttggtgaagcaggggccgctctgcagggccacatactggacggcgtc

SEQ ID NO: 219949 - DNA, 201 bp, Homo sapiens
ccagcaaggggatgccaagcagaggctggccagccagggagccaggcccagcacacgtggctgcctcgggctgcaccacccgcacctgctgctcctccgcmcatcgcggcagccacgccaggccacagtcacactcaaacgggttcccactcaggtttctgcggggcaggggcaggtgttggggaccaggtctggtgggaa

SEQ ID NO: 219950 - DNA, 201 bp, Homo sapiens
ggtgggggcaggaggtggcggggggccggagcagagggacaggcaggcaaaggaggcactggagggctgggccgccccacacaggcaccagccctgctcckagagggctgcgaggccctggccggtggagaagcagaaggcgctgcaggcctctggctgaagcaggccttcgtgggcagctgaaaaggacactgctgccac

SEQ ID NO: 219951 - DNA, 201 bp, Homo sapiens
gttggccaggctggtcttggaactcctgacctcaagtgatctgcccgcctcggcctcccaaagtgctgggattacaggtgtgagccaccgcgcccggccawcgttccattttaattaacttaaatacgagcagccacatgtggcctctggttcctgccacggactcgggagcaacccctcctggtcgcggcttatgcgcct

SEQ ID NO: 219952 - DNA, 201 bp, Homo sapiens
ggtttcactgtgttggccaggctggtcttggaactcctgacctcaagtgatctgcccgcctcggcctcccaaagtgctgggattacaggtgtgagccaccrcgcccggccatcgttccattttaattaacttaaatacgagcagccacatgtggcctctggttcctgccacggactcgggagcaacccctcctggtcgcgg

SEQ ID NO: 219953 - DNA, 201 bp, Homo sapiens
atgcgggcactgacccacaacactgagctgtttcttcatgggcaaaacagggtaagcacatgggccctcctgggcgggggctgcattgtggaaagcagacrccggagagggcccggtgggtgtggctgctgggagcggaaggtcggggtgctgcttcagggtcactgggatttatctctggggcccgggatgagccctctg

SEQ ID NO: 219954 - DNA, 201 bp, Homo sapiens
catgcccagctaattttttgtatttttagtagagacggggtttcactgtgttggccaggctggtcttggaactcctgacctcaagtgatctgcccgcctcsgcctcccaaagtgctgggattacaggtgtgagccaccgcgcccggccatcgttccattttaattaacttaaatacgagcagccacatgtggcctctggtt

SEQ ID NO: 219955 - DNA, 201 bp, Homo sapiens
ctacaggtgggggcaggaggtggcggggggccggagcagagggacaggcaggcaaaggaggcactggagggctgggccgccccacacaggcaccagccctrctccgagagggctgcgaggccctggccggtggagaagcagaaggcgctgcaggcctctggctgaagcaggccttcgtgggcagctgaaaaggacactgct

SEQ ID NO: 219956 - DNA, 201 bp, Homo sapiens
tctcagctcactgcaacctccacctcccgcgttcaggcgattgtcctggctcagcctcctgagtagctgggattacaggtgcctgccaccatgcccagctrattttttgtatttttagtagagacggggtttcactgtgttggccaggctggtcttggaactcctgacctcaagtgatctgcccgcctcggcctcccaaag

SEQ ID NO: 219957 - DNA, 201 bp, Homo sapiens
caggacgagggcagtggtcagcgggcggcagctcagacctgctcaggacagggatgagaagccacctcctcagcagacaggacagagcccggtgccatctkacagaatgtcctagaatgctggatatatgggacatctgcaccgtccgtgatggcagcccctcgcgacgtgtgccactgaacacttgacagcagactggtg

SEQ ID NO: 219958 - DNA, 201 bp, Homo sapiens
cagcccagcccaggacccccagtagagtcctcacctcagcgtggaggcctgagaacgtgaggaaggagctgtccagcacggacgagtccaggcagctgtcratgtccagcacctgctgcccggcaggtgtggggctcgggctcccagccacctgcaggacgagggcagtggtcagcgggcggcagctcagacctgctcagg

SEQ ID NO: 219959 - DNA, 201 bp, Homo sapiens
tgctggccagctcgcctgagctctggttcggcgccaccccagggaaccctcccagcagccatcaattagacaacgttaccatctctcatatacagagaagraaacggcggtgttaagagggcaaaggtcacacagctagggagcagggctgatgccagagctccgctaaaggctgctctctcaacaagaggaacgatttaa

SEQ ID NO: 219960 - DNA, 201 bp, Homo sapiens
tgggcagcagacactcacctcgggccggctcctcgcccagggccacgatgctgtaggcggcctccaggcctgaaccaccgcggttctggatgctgaggtcraggctctcgtcactctgcaccgaggacgggcacacgagctccagggcggcaggtgccgcttccacctgcacgtctgtccccagcagggctgagccggccc

SEQ ID NO: 219961 - DNA, 201 bp, Homo sapiens
gactgtccaccattgccagggcggccccggcccaggcctgacactgctcctgcgcctgcagccaggccgccttctccaccaccaggcggtagcagtgcccrttgccagggaagatctccgtgtccgaggggcagagcgggtgcaccgctggagaccggtgggaacgagggtgtcaacggtcagtgtgggcccaagacgggg

SEQ ID NO: 219962 - DNA, 201 bp, Homo sapiens
cggaagcgcaaaagggctgcgtcgcctagaaggcagggagggccgcactgcaggaggccacggggcaggaccaccctgcccaacctcccacggagtgggamcatggaacgaggccttactcgcggccagcacctccttctccaccaggcccccgttggcctccgtctccaccgaaagccagtcattgaccaggaagaaggc

SEQ ID NO: 219963 - DNA, 201 bp, Homo sapiens
cgatacacctcccagcggtactcagtctggtaggtgacgcagtcgcgcaggtcaacgtgggcctccaagtagttgcgctgtgatcgccgcatcagcacctrcaggggcaggaccacgtccacctccggctcccggcaggccagcacctggacggtcaccgtggcctgcgccacgaagaagctcaccaggttggaggcgttc

SEQ ID NO: 219964 - DNA, 201 bp, Homo sapiens
tgtgcgttctggtgtactggacccagctggaccctagcaggaggcaggcaatgctcactgagggcccctggggggatgcgtgtgagaagagacgtatgtgkgggtgtgaggaccgcagctgccacgtaggcctgactcacagactcctgcagcccttagccagggcctgggtcaggaggctgagctgggatggaacctgct

SEQ ID NO: 219965 - DNA, 201 bp, Homo sapiens
ccgctggcagctggcggtgcgatacacctcccagcggtactcagtctggtaggtgacgcagtcgcgcaggtcaacgtgggcctccaagtagttgcgctgtsatcgccgcatcagcacctgcaggggcaggaccacgtccacctccggctcccggcaggccagcacctggacggtcaccgtggcctgcgccacgaagaagct

SEQ ID NO: 219966 - DNA, 201 bp, Homo sapiens
ccccgctcaacactcacccctcgcttggagccgctgctgcaattgaggcagcggccctccaagtacacgtaggagctgcggctcacttcgtacacggcctrtgccttgcaggacacacactccaaggacacaatgggcacccggccactccggatcagcacctggcgtgggagtggggttacctccaacacaggtctattt

SEQ ID NO: 219967 - DNA, 201 bp, Homo sapiens
gcaatgctgacccatgatgccctgccctgccctgccaggctggcccgcagagctcaccccggggaaatgaagaaggtgtagggccggtggtcagcaccctrgagtgactctgggcggatcctcctgctagccgagcagttgtgctcattgggccggggctccgagtgtaggtagactgccaggtagggctcaggttcctca

SEQ ID NO: 219968 - DNA, 201 bp, Homo sapiens
ttccttatttagcagggccgccgtgccgcgccggagcctcgccctgggagcgtcctggcccgcgtcctgcttcccgtcccgggccagggaacgcgcccacrcccgcccgtcccgcggcctctcccgggtgccgctgggcccgctactcacagcgctgtggcgtccgcggggatgcgcagcgcgggaccgagcgtccgcagc

SEQ ID NO: 219969 - DNA, 201 bp, Homo sapiens
aggggcagagcttggcagggtccgcacaaacctttgttgtcgtgccacactcggatcttccacacgctacccaggctgtgcggggtggcgatccggaagawgtccaggctgttgcggtggaaggctctgtcgccgtccaggtgccggtggccgctccggctgtccaccccatacagcatgatgcccacgtgggccgtggta

SEQ ID NO: 219970 - DNA, 201 bp, Homo sapiens
ccccgagagccggacactcacaggctgctgagcaggtccgtttccatgtgggtgtcttgggtaggggctgggctgctgaccccctcggcaaggacctgctrgatcaggtcttcatctagaggtacaggaggcatagggtgggcccagctgcaagggtgagcttcagagccccctcctctcaccccagctcacctgatgctg

SEQ ID NO: 219971 - DNA, 201 bp, Homo sapiens
ctgctggacaggagccacgcaacactcacgcccggggggaagctcgcacccacccaccctgagacagccacagccacagccaccaggagcaggctgagccygtgggccagggaggcacaccaggccggcagcaggcgcttccgcagaccctccaccagtcctggggaagcagagacagacctgtgagaggcagctcacagg

SEQ ID NO: 219972 - DNA, 201 bp, Homo sapiens
tccagcaagacctggggagggggtggcttcagaggggtcccccgtgatggaggcctgtagcctacccctggcagccccctcaccttcagtggctcccagcygaggaatgaggccaggaagctggcgctgctggacaggagccacgcaacactcacgcccggggggaagctcgcacccacccaccctgagacagccacagcc

SEQ ID NO: 219973 - DNA, 201 bp, Homo sapiens
ggcaggggcacaggccgcacccaggctcacccgcagcatgccatgtagcctcttgaccttgcgggcttcttccttggccaggaagagtgcaaagccgtggrgtggccgtacgcggggcacacgtgcgctcacaggcgtcacagccgggctctctaccagggtgtcatcttcatccgggtgcagccgcttggccaccagtga

SEQ ID NO: 219974 - DNA, 201 bp, Homo sapiens
ggcaggtgccgcttccacctgcacgtctgtccccagcagggctgagccggcccccagggccagcacggccgtcacgtgatagcgcccaggcagcacatagmgatgcgaggcagccggcccagcggcatccacctcggcggagccgtctccgaagtcccagcgtgtggcagtgacagggagcggggcagcgatgtggaaggc

SEQ ID NO: 219975 - DNA, 201 bp, Homo sapiens
ggcaaaactaaagcccagaagacagaccagtgcaccggatgcccgtaccgcgtgatggccaggaaggcccggctgtgcagctcctgcttgatggcgctttrcagacggtaggcgtgcccatggcatgaggcatccccatagctggccagcagggtcaccagcagaaaaagcatgtacaccaggaggctctggtggacgggg

SEQ ID NO: 219976 - DNA, 201 bp, Homo sapiens
gccatgtgcgtgactatgtgcgtgactacatacaaggtaacctctatatgaccatttgttgataagttacaaaacaaccaagaaattgaggaatttttttktttttgagacggagtttcgctcttgttgcccaggctggagtgcagtggcgcgatctcggctcactacaaccttcacctaccaggttcaatcgattctcct

SEQ ID NO: 219977 - DNA, 201 bp, Homo sapiens
cagcagcacggtgagctgttccgtggctgcaagcagccgcagggcacaggcagggcaggcccaagtgccctccagctgggctggcaagtggggcagccatsacgaggcgttggcggagaggtacggggcctggggaccagggtggccgggagccggcgagcagtgcaggagggcgccagggccagcgtcgtgctgcaagcc

SEQ ID NO: 219978 - DNA, 201 bp, Homo sapiens
cccgcggaagcactgaatctggatttcacagagctttgggccggagatacctggggctggtcagcatgtagtgactacccctggatttccccatactctgtatttttaaaaccaaccagcaatttattcataaagatgccctcatgtgatggttatctgccttttgtaaatcaggaagttttcctttttgtttgagtccag

SEQ ID NO: 219979 - DNA, 201 bp, Homo sapiens
ccccgcggaagcactgaatctggatttcacagagctttgggccggagatacctggggctggtcagcatgtagtgactacccctggatttccccatactctgtatttttaaaaccaaccagcaatttattcataaagatgccctcatgtgatggttatctgccttttgtaaatcaggaagttttcctttttgtttgagtcca

SEQ ID NO: 219980 - DNA, 201 bp, Homo sapiens
caccagggcagggcagacattctcaaagcgggcgctgacactgcccccaggccagcgagccgtggccgtggcgttggcaccagagtccacctggagcaccraggctgagccgttggtgggcacgtagaggcggccgtcgcggggggcagggtagatgacccgcagcccagccactggggagaccacgtcaaagctgcagga

SEQ ID NO: 219981 - DNA, 201 bp, Homo sapiens
cagaccagtgcaccggatgcccgtaccgcgtgatggccaggaaggcccggctgtgcagctcctgcttgatggcgctttgcagacggtaggcgtgcccatgkcatgaggcatccccatagctggccagcagggtcaccagcagaaaaagcatgtacaccaggaggctctggtggacgggggggccctgtggtcagcctggcc

SEQ ID NO: 219982 - DNA, 201 bp, Homo sapiens
gcacgcgggggccagctgggtcctgttgtccggggacctgctctcaggctcgctgccgttctccggggtccctgtgaggaggggagggtgttggggccctsatttgcccacaggccaccgtcagagatgcccaactgcctgcaccagcaatcctggccttgctgtgaggacaggtctccccacctgggcagcactcccagc

SEQ ID NO: 219983 - DNA, 201 bp, Homo sapiens
gcagtgctggccgcaggcccggggatgggccacgggaagatccggcgggcgcccggctgctcctgcggccttgcaggctgtgcagctgctgctccagctgstagacgtcctctgtggcctggttgagtcggtcaaactgggtgagcagggcctcgaacacggcttggaggcgggagggctcaggctcacaccttgtcccca

SEQ ID NO: 219984 - DNA, 201 bp, Homo sapiens
ctcatctcctcggtggaggacttcaccgagtttgtgtgaggccggggccctccctcctgcactggccttggacggtattgcctgtcagtgaaataaataaagtcctgaccccagtgcacagacatagaggcacagattgcagtcagacagctcttttattgactttgtctgcttggtgcgggggttgggggggtgtcgagg

SEQ ID NO: 219985 - DNA, 201 bp, Homo sapiens
cctcatctcctcggtggaggacttcaccgagtttgtgtgaggccggggccctccctcctgcactggccttggacggtattgcctgtcagtgaaataaataaagtcctgaccccagtgcacagacatagaggcacagattgcagtcagacagctcttttattgactttgtctgcttggtgcgggggttgggggggtgtcgag

SEQ ID NO: 219986 - DNA, 201 bp, Homo sapiens; identical to SEQ ID NO: 39349

SEQ ID NO: 219987 - DNA, 201 bp, Homo sapiens
cacgcctcccagacttactgcccaagccgcctctgccttcagatctgcgaggaagccgcctactccaaccccagcctacctctggtgcaccctccgtcccmtagcaaagcccctgcacagactccagccgagcccacacctggctatgaggtgggccagcggaagcgcctcatctcctcggtggaggacttcaccgagttt

SEQ ID NO: 219988 - DNA, 201 bp, Homo sapiens
cctgtgggctgtggctgccctggccaggccctcacctgggtgcccaccatcccctccctgtgcagtttcgtgttcctgcagctctaccattcccccttctttggcgacgagtcaaacaagccaatcctgctgcccaatgaggtaggcgtggcctccctctcctgcatccgctggagctgtgtggctcgggtgaatggtggg

SEQ ID NO: 219989 - DNA, 201 bp, Homo sapiens
cgccgcagcagcagggcgtacaccagcggggcgccagcatcctccgcgtcatgccagcctgagggacggtccccacggcatcacgggagggctccgtgacstcacagagtcgggggatcccgctgctccccccacgcaggcctgcactcacccgtgcattcgaagtgcaccttggtggtgagggcgtgcacagcgcccagt

SEQ ID NO: 219990 - DNA, 201 bp, Homo sapiens
gctgcaggcagaaggggtggtgagggggcgcaaccctctgccctgtcagccccacttctgcctgcaggccccgtcccctcggccatgggacccatccccarcccgcccacaccccgctcaacactcacccctcgcttggagccgctgctgcaattgaggcagcggccctccaagtacacgtaggagctgcggctcacttcg

SEQ ID NO: 219991 - DNA, 201 bp, Homo sapiens
gaacgaggccttactcgcggccagcacctccttctccaccaggcccccgttggcctccgtctccaccgaaagccagtcattgaccaggaagaaggcgctgygtgccgtctgcaggtccctgacgatgacgtgctgcaggaaccaggcagggctgagccctgcagaggcgcaggagggaggtcaggctcgcagggcgcccca

SEQ ID NO: 219992 - DNA, 201 bp, Homo sapiens
ccagtcgcatgcctgcactgcccgtggatgtggtggtctcatccagcaccagcgtcttgttgctgaacgtacgtgcagcccaccgctgcaggcagaagggrtggtgagggggcgcaaccctctgccctgtcagccccacttctgcctgcaggccccgtcccctcggccatgggacccatccccagcccgcccacaccccgc

SEQ ID NO: 219993 - DNA, 201 bp, Homo sapiens
gtgttgcccaggctagtctgaaactcctgggctgacgtgaccctctcccctctgccacccgaagtgctgagattacaggtgtgagccaccgcacttggccrgaacacggccattttagttcccctccttagaggagtaaggccaggaatgagcctgtggtctgaaagccgtggctgttggttaatgtggagaagggaaggt

SEQ ID NO: 219994 - DNA, 201 bp, Homo sapiens
tgttgtcgtgccacactcggatcttccacacgctacccaggctgtgcggggtggcgatccggaagatgtccaggctgttgcggtggaaggctctgtcgccrtccaggtgccggtggccgctccggctgtccaccccatacagcatgatgcccacgtgggccgtggtacctgggaggcaagagggaggggtgggaggctcgg

SEQ ID NO: 219995 - DNA, 201 bp, Homo sapiens
gcgtagacgcccggggccctcgctctgctcaccccagcagatccggcgctgaataggcccacgtccccgagccattgtgaggactctcccagccaacgtcstaatcgctggtgctgaagcctcctgcggccgagcacgtgtggaccctggggccgggagggtctgggtagagtgctgaaacacacagagccccaggccggg

SEQ ID NO: 219996 - DNA, 201 bp, Homo sapiens
gcgtgaaggtgtatccctcgccgtcccgcagcacgccccgccgcagcaccagtcgcatgcctgcactgcccgtggatgtggtggtctcatccagcaccagygtcttgttgctgaacgtacgtgcagcccaccgctgcaggcagaaggggtggtgagggggcgcaaccctctgccctgtcagccccacttctgcctgcaggc

SEQ ID NO: 219997 - DNA, 201 bp, Homo sapiens
aagaggctggcgccgaaggcggtgaggtggcgggtgaggcagacggcctggcggggcgaggtctcctccaggggcagcagcccctctgtccgccacaccaygtcctcctcgctgaagtactggcacagggacgtgtacaggcccacggacacctgcagcgccgaccagcggaagtggctggagaggttcagatggtaactc

SEQ ID NO: 219998 - DNA, 201 bp, Homo sapiens
ctggggccagtggccaggtccacaccccgactggcccgggcaaggcggctgggcagtgctggccgcaggcccggggatgggccacgggaagatccggcggrcgcccggctgctcctgcggccttgcaggctgtgcagctgctgctccagctggtagacgtcctctgtggcctggttgagtcggtcaaactgggtgagcagg

SEQ ID NO: 219999 - DNA, 201 bp, Homo sapiens
tcggggctgggcgtggcgcggaggccacagatgggctcctccgccgtcacccgcaggctgaggttggcccggctggcgctgttttccaccaccacgtccaycacgtgctccccctcactgagccacggcagtgctaccactgagaacagggtatcgttggtctcccaggggcagccgggcacgaaggtggccaccagggca

SEQ ID NO: 220000 - DNA, 201 bp, Homo sapiens
gaagagacgtatgtgtgggtgtgaggaccgcagctgccacgtaggcctgactcacagactcctgcagcccttagccagggcctgggtcaggaggctgagcygggatggaacctgctcccacaccctcccctcagacgacccctctgggaagacccccaatcaggccagctgaggaaagcagggactggggaacagacgccc

SEQ ID NO: 220001 - DNA, 201 bp, Homo sapiens
cctcccagctgagcgcggcctccgcgccccgcccccgctggcgtctgcagagcccccgggtgggacgtctgtctccagacccggggtttttcggctccccsgggccgtgccaaccgcggctccaggcgttccttatttagcagggccgccgtgccgcgccggagcctcgccctgggagcgtcctggcccgcgtcctgcttc

SEQ ID NO: 220002 - DNA, 201 bp, Homo sapiens
ggcgaggtctcctccaggggcagcagcccctctgtccgccacaccatgtcctcctcgctgaagtactggcacagggacgtgtacaggcccacggacacctscagcgccgaccagcggaagtggctggagaggttcagatggtaactccccgctgggtctctgctcctgggcagggaaggggtagcggacgtgagcccaggc

SEQ ID NO: 220003 - DNA, 201 bp, Homo sapiens
tcccggggctacgcaagcacacctgtcctggacagcctcgctgcctggggctgttcccagttcaggcctgggctgggtggccccagctcccccagcctctrcagcgccagcgtctctgtcttctccccaggagtgctggacctgagggacatggtaggctgtgaattcatcccggcctccaggaggcagttgcagccaagc

SEQ ID NO: 220004 - DNA, 201 bp, Homo sapiens
gttgctcagatgtccccattcctgtttcgtttgcacagaggggttttctggtgcgtcctggtccaccatggccaaaccaacaagcaaagattcaggcttgwaggagaagtttaagattctgttgggactgggaacaccgaggccaaatcccaggtctgcagagggtaaacagacggagtttatcatcaccgcggaaatact

SEQ ID NO: 220005 - DNA, 201 bp, Homo sapiens
tcttgaccttgcgggcttcttccttggccaggaagagtgcaaagccgtggggtggccgtacgcggggcacacgtgcgctcacaggcgtcacagccgggctstctaccagggtgtcatcttcatccgggtgcagccgcttggccaccagtgagaagtacagggcttccagcaagacctggggagggggtggcttcagagggg

SEQ ID NO: 220006 - DNA, 201 bp, Homo sapiens
gtgctgaagctcacgctcccattcaggggcaccaccgtgcggcttgcattgacgacgagcccccgcacgcgccgcttcaccgtcacattgagccaggcctmgctgcggctcacctcattccagccggccaccctaacggtgaagtcacctgtgctgttgtaagcgtgggtgacctccggaccctcgagccacccaccgtcc

SEQ ID NO: 220007 - DNA, 201 bp, Homo sapiens
gtgagcgagaagcctttgccgctgccggccagggccgggcccctgtccctccaggcagtccagctgtaggagacgttggtgccatccctaaccacggcctrcagctgtaccgtgtggttggtggggaagtagcggccaccgcccaccacctgcagcccctctatgagctgcaggacatagacgaagatgctgtcctgggcg

SEQ ID NO: 220008 - DNA, 201 bp, Homo sapiens
gaaaatggaccagctgcccgggcgccaccaccttgctgctggcccacagcaccaggcccacgatgggctcctccgccgtgaggttgtacgtggctgagacycagctgactgcgttggaggcattgagccggatggagaaggtgccagcatccgggaagaccatggtgacatgagggccacgcttgctgctgccgccgggca

SEQ ID NO: 220009 - DNA, 201 bp, Homo sapiens
cagtctcgggggcgccctcccacggcctggctcacctgttgagggcgaccacagcggctcccagctggtcctgcaccaccacggccaggcccacctcgaaktgtggcctgaaacccgggggcagcacggctccgtagctggagaggctgcccttgtagacacagaactcctcgcagtggccctggcgacagcgccgcagca

SEQ ID NO: 220010 - DNA, 201 bp, Homo sapiens
tggtgagggcgtgcacagcgcccagtgggaagaggcggcaagagccccccagcggcgggcggttgggggacaggcggatggaggcgcagccctcctcctcrccagagcggcccagcaccgtgagcgtgaaggtgtatccctcgccgtcccgcagcacgccccgccgcagcaccagtcgcatgcctgcactgcccgtggatg

SEQ ID NO: 220011 - DNA, 201 bp, Homo sapiens
gggggatcccgctgctccccccacgcaggcctgcactcacccgtgcattcgaagtgcaccttggtggtgagggcgtgcacagcgcccagtgggaagaggcrgcaagagccccccagcggcgggcggttgggggacaggcggatggaggcgcagccctcctcctcgccagagcggcccagcaccgtgagcgtgaaggtgtat

SEQ ID NO: 220012 - DNA, 201 bp, Homo sapiens
agggtatcgttggtctcccaggggcagccgggcacgaaggtggccaccagggcagggcagacattctcaaagcgggcgctgacactgcccccaggccagcragccgtggccgtggcgttggcaccagagtccacctggagcaccaaggctgagccgttggtgggcacgtagaggcggccgtcgcggggggcagggtagatg

SEQ ID NO: 220013 - DNA, 201 bp, Homo sapiens
ctggcgacccatccccaaagtcccagtggtaggccacacgccgggggctggggctggtggcggcctcaaactgcgccgagcggttggtgaagcaggggccrctctgcagggccacatactggacggcgtcctgaacctccagcaccagcgtgcggttctcactgcccagggcgttgaaggcgcgcacctggatctccaaca

SEQ ID NO: 220014 - DNA, 201 bp, Homo sapiens
ggcagctggcggtgcgatacacctcccagcggtactcagtctggtaggtgacgcagtcgcgcaggtcaacgtgggcctccaagtagttgcgctgtgatcgycgcatcagcacctgcaggggcaggaccacgtccacctccggctcccggcaggccagcacctggacggtcaccgtggcctgcgccacgaagaagctcacca

SEQ ID NO: 220015 - DNA, 201 bp, Homo sapiens
gaggggcgggcggcacccaccgtctggttggtggcctcctccttgcggccggccttccacacggtcaggctgaaggtgtactccacgccagccgccagccrctcccgtggaatggtgaccgtgctgctcccgcggggcccaaagttcagcgcacacccgccagcctccctctgcaggccgagaacaaggggcgacgtggcc

SEQ ID NO: 220016 - DNA, 201 bp, Homo sapiens
tgggctgtccaaggcaagtggccgaggggcgggcggcacccaccgtctggttggtggcctcctccttgcggccggccttccacacggtcaggctgaaggtktactccacgccagccgccagccgctcccgtggaatggtgaccgtgctgctcccgcggggcccaaagttcagcgcacacccgccagcctccctctgcaggc

SEQ ID NO: 220017 - DNA, 201 bp, Homo sapiens
atgcactgggccagcgcagcagcgatctgctggatgtcatccacagtgtggaccctcagggacaccagagtctccgtgatgttcttgcgtatctgggctcrgtgctgccgctcgtgcttgggctctgccgccacgtccagggcccgctcgtactggggcaggcagggggcacagcaagctgtcagcagcgcaggaggccgg

SEQ ID NO: 220018 - DNA, 201 bp, Homo sapiens
tggtttttgccccgcacgctcaccacgtggtctccgacgcgggggaagctgtgggagaaacggggcccggggagcacctcggggttggccccgccgacctrcaggcggaaggtgacagctgagccggcagccagcaggatctgaaaatggaccagctgcccgggcgccaccaccttgctgctggcccacagcaccaggccc

SEQ ID NO: 220019 - DNA, 201 bp, Homo sapiens
acgccttccccccaagaacaaggccagggggccgcgtgtgccccacccgctgcacgcaccgtccagcagcgtatagttgagctgcagatgcagcccggccrcagggttgctgctgtccagggtgaccacagcaccgacggaggcctggggctggaccacaacggagttggcggagttggcggagctgcggtggccccgggc

SEQ ID NO: 220020 - DNA, 201 bp, Homo sapiens
ctcagtgcccgtggcgatgccaggctcgcagcagttgggcacctgcagcccactcacggcctccagcaccacgatgcgcacctgcgcctgggcccagctcwcgtggtttttgccccgcacgctcaccacgtggtctccgacgcgggggaagctgtgggagaaacggggcccggggagcacctcggggttggccccgccgac

SEQ ID NO: 220021 - DNA, 201 bp, Homo sapiens
agaaagcaaatttcaccagagacacccatggaagccctacgagaaacgccttccccccaagaacaaggccagggggccgcgtgtgccccacccgctgcacrcaccgtccagcagcgtatagttgagctgcagatgcagcccggccgcagggttgctgctgtccagggtgaccacagcaccgacggaggcctggggctggac

SEQ ID NO: 220022 - DNA, 201 bp, Homo sapiens
gtgaagttcctctcagtgcccgtggcgatgccaggctcgcagcagttgggcacctgcagcccactcacggcctccagcaccacgatgcgcacctgcgcctrggcccagctcacgtggtttttgccccgcacgctcaccacgtggtctccgacgcgggggaagctgtgggagaaacggggcccggggagcacctcggggttg

SEQ ID NO: 220023 - DNA, 201 bp, Homo sapiens
aagcaggggccgctctgcagggccacatactggacggcgtcctgaacctccagcaccagcgtgcggttctcactgcccagggcgttgaaggcgcgcacctrgatctccaacagccccgcggccacgggcgtgtaggtgacgtcgcggcccgacaggatgaccagcgagtcgccctggaccttctgcagcgagaagtaccag

SEQ ID NO: 220024 - DNA, 201 bp, Homo sapiens
tggcagctggcggtgcgatacacctcccagcggtactcagtctggtaggtgacgcagtcgcgcaggtcaacgtgggcctccaagtagttgcgctgtgatcrccgcatcagcacctgcaggggcaggaccacgtccacctccggctcccggcaggccagcacctggacggtcaccgtggcctgcgccacgaagaagctcacc

SEQ ID NO: 220025 - DNA, 201 bp, Homo sapiens
caccctcaatgatgggcaccaggcgctcgggggccaccgtcacattggcctggatgctctgtgtcagtggcgtgtccccaaatgacacgacaaacacaaakcagtagtgccccacaggcagcgccagccgcggcagcaccagccgaggccggctcacgtccacgccgggcagggccacacgcgctgggcgccccggccgct

SEQ ID NO: 220026 - DNA, 201 bp, Homo sapiens
gtagaaggtgacgggccggccggccaccaggacgccgtcactcacacccacagccacggagggcagggaggcgcgcacgctcacaggcacctgctgcgtcmggttctcgaaggcattagatgccagcacggtcaggaggtactcacctgtggggacaggcccgagtggggcagccgcggcacccccacctgctccccaccc

SEQ ID NO: 220027 - DNA, 201 bp, Homo sapiens
ccgctcaccgtgttgttgacctccaggcgcacgtggtaggtgcccctcgaggcataggtgtggttggcagccggctggctctgggtcaggacaggggagcygtccccgaagtcccacgtgtaaagaacacccccaggcgagggcagcgggtgcgggtagaaggtgacgggccggccggccaccaggacgccgtcactcaca

SEQ ID NO: 220028 - DNA, 201 bp, Homo sapiens
ccagcctgagggacggtccccacggcatcacgggagggctccgtgacgtcacagagtcgggggatcccgctgctccccccacgcaggcctgcactcacccrtgcattcgaagtgcaccttggtggtgagggcgtgcacagcgcccagtgggaagaggcggcaagagccccccagcggcgggcggttgggggacaggcggat

SEQ ID NO: 220029 - DNA, 201 bp, Homo sapiens
gctaagacgccctccccggccgcgcagtcacctaccaggatggccagctgggcgtaggctaccccgagcaccaccaggcccaaggtgacccccaggagctmtggcagagctcggcataatgtcttgccaaagacggaccactggcgcacgaagcgtagctgctgggcagcctgcggacgagaaatctgtctgcttgcagcc

SEQ ID NO: 220030 - DNA, 201 bp, Homo sapiens
taggccacacgcagtctctgtgctttccgcggacgcttcacggggctgtggcttttcctcgcttctgcaaaaagcaccacgcagtccctctggtggggccrcaggtgaaggtagggtaggggtgccatcccgcctgctagctcacccctcactcgttcatgccacaactgtccatcatctaatacacttggggtgctctgc

SEQ ID NO: 220031 - DNA, 201 bp, Homo sapiens
gcgtacagctgagctgagctgagctaagacgccctccccggccgcgcagtcacctaccaggatggccagctgggcgtaggctaccccgagcaccaccaggyccaaggtgacccccaggagctctggcagagctcggcataatgtcttgccaaagacggaccactggcgcacgaagcgtagctgctgggcagcctgcggacg

SEQ ID NO: 220032 - DNA, 201 bp, Homo sapiens
agcaccaggtcccgtgtgtctgaccacacgcggtatgagccaccctcaatgatgggcaccaggcgctcgggggccaccgtcacattggcctggatgctctrtgtcagtggcgtgtccccaaatgacacgacaaacacaaagcagtagtgccccacaggcagcgccagccgcggcagcaccagccgaggccggctcacgtcc

SEQ ID NO: 220033 - DNA, 201 bp, Homo sapiens
tccaagtgcagctgcactcggggcagcagagcagcaagagccaggcccggggagggcggggggcgcagttcaggggcccagcttccctgtccactcccccmacgcctggcccctccctcaccccagtaggggcctaagccatcagcccaggtgaggtcacagtgagggctgttggggaggaaggggggcagcttgactggg

SEQ ID NO: 220034 - DNA, 201 bp, Homo sapiens
agaggctggcgccgaaggcggtgaggtggcgggtgaggcagacggcctggcggggcgaggtctcctccaggggcagcagcccctctgtccgccacaccatrtcctcctcgctgaagtactggcacagggacgtgtacaggcccacggacacctgcagcgccgaccagcggaagtggctggagaggttcagatggtaactcc

SEQ ID NO: 220035 - DNA, 201 bp, Homo sapiens
tccgccgtggtcatggaggagggaagtccgggcgaggttcctgtgctggtggagcccccagggttggaggacgttgaggcagcgctaggcatggacaggcrcacggatgcctacagcagggtgagtgtggctcagagcctggaccctgctgacctcggggggctccttaggggaggcagggctctgcgtgggtgtgcctgc

SEQ ID NO: 220036 - DNA, 201 bp, Homo sapiens
atggaggcgcagccctcctcctcgccagagcggcccagcaccgtgagcgtgaaggtgtatccctcgccgtcccgcagcacgccccgccgcagcaccagtcrcatgcctgcactgcccgtggatgtggtggtctcatccagcaccagcgtcttgttgctgaacgtacgtgcagcccaccgctgcaggcagaaggggtggtga

SEQ ID NO: 220037 - DNA, 201 bp, Homo sapiens
gagcctcttgggtcacagggtccccccgacaaaaagccggaagaccctaccccaaacgagagtgggagtggtgctgggagccagggaaccaagagccactscaggcaccgaagtcaggcgtccgcctgcgtccctctcccgcccgcttgctgctgataaacccatcgcccacagcctgaccagctgcccttacagcagtgc

SEQ ID NO: 220038 - DNA, 201 bp, Homo sapiens
ccccaggctcagcggcattctgtccttacagatccctcccacggctgaactgtccccaggatgagatgccgggggtgacatgggcagcctcaggtcctccmgggacccacaggcaggcacagggatggagactccggcctcggaggctgaacgagggagatgagaaaggggagtctgcgatgtccttgcctacacagatgg

SEQ ID NO: 220039 - DNA, 201 bp, Homo sapiens
tcccagccaggcgctggctctcctgccctccccctgggctctgcccacagttggcgcgagggtgggtgaagcctgaggctggcagggccgggaagtcttgkggctgggccttctgccccacaggcgctcctgggccgggggagccggggtcggggaatgcaacagtgggactgaggagaacttccctgggtgtggggcagc

SEQ ID NO: 220040 - DNA, 201 bp, Homo sapiens
gagcaccctgtctgcaggcacctgcctgggggctggtggtggagcctcggccatactcaccactaggactccctgcagtacacgggcctcggggctgggcrtggcgcggaggccacagatgggctcctccgccgtcacccgcaggctgaggttggcccggctggcgctgttttccaccaccacgtccaccacgtgctcccc

SEQ ID NO: 220041 - DNA, 201 bp, Homo sapiens
ggggggaggggagggggacgaagatgggatggggcaaaggcgacgcggttggggggaggagggaggcagaggaaagggccgcacggggcgggcgggtggcrtggggcacgggccgcggcacctgtgatgttgaggatgctgtctccgatggcggtgggcgtcacggtgcccgcggtggtctctgcctgcaggatgagcatc

SEQ ID NO: 220042 - DNA, 201 bp, Homo sapiens
ggggatgtttccctgctgccaggatggagtgccagcccccttctcatctcaggtttaatcagtacatcgtgtgtctggcccatcacgtcatagccatgtgrttcatcaggtgccgcctgcccttccggaaggattttgtccctttcatcactaaggtgggctcagggccggtgaaggctgtgtctctcggtaggccagggc

SEQ ID NO: 220043 - DNA, 201 bp, Homo sapiens
gtcctgtctcctgcagcgcgagatggtctactgcctggagcagggcctcatccaccgctgtgccagccagtgcgtcgtggccttgtccatctgcagcgtgragatgcctgacatcatcatcaaggcgctgcctgttctggtggtgaagctcacgcacatctcagccacagccagcatggccgtcccactgctggagttcct

SEQ ID NO: 220044 - DNA, 201 bp, Homo sapiens
ggatttggtcatcagctttcaggcccaaagacactggagcggctccgaggcgccccagaaggcttctccagaactgacttgcacctggccgtggttccagwgctgacagcattaatctcttaccataactacctggacaaaaccaaacaggtaggaggtcagagcaggacaggcgagcttgatggggcctgggattcgagg

SEQ ID NO: 220045 - DNA, 201 bp, Homo sapiens
gaacgcgcaggtcacacgcctgccgggaagctcaaccacccgggggacacccacgatggccctcctgagcccaccctctgccacgggcctgaaaggccatmggagcctctgcaccagagctggcacctgcttctccgtggcccccagctcctctctggccaggcccccagcagcccatgaaacagaaagcaaatttcacca

SEQ ID NO: 220046 - DNA, 201 bp, Homo sapiens
ggtgagaaccggcccaccacatccagcaacagggacatgggctggggacagtggctacctctggggtgggaaggggctcttcctcactgttggtattgctrggggactgtgtagcttttgccactagagcatatgtggcttgaagactgtacgtggaactgtggcaggtttggaaggaagcaaagctgaagcaggctgtcg

SEQ ID NO: 220047 - DNA, 201 bp, Homo sapiens
gccctccagctgggctggcaagtggggcagccatgacgaggcgttggcggagaggtacggggcctggggaccagggtggccgggagccggcgagcagtgcrggagggcgccagggccagcgtcgtgctgcaagccaacgaggtcaccagggagcatgaggacatcctggccgtggagggtgacctgtggagagggaggcag

SEQ ID NO: 220048 - DNA, 201 bp, Homo sapiens; identical to SEQ ID NO: 39253

SEQ ID NO: 220049 - DNA, 201 bp, Homo sapiens
gcctggccccgtgccagctgccgcagattgctacccacaatggacgggtcactgagcaggtccggccaactgagcgttccctcgccggagggccagcacascagactgcaggtggcgcgggtcagcaaggtaccaggggatgtgtcacacacacagcccacccccgtccagtcacgcacggacaccctgggcttccgagca

SEQ ID NO: 220050 - DNA, 201 bp, Homo sapiens
aaggtggatcccttgagtccaggagttggagaccagcctggccaacatggcgagaccccgtttctacaaaaattagccaaaattagccaaactggctcacrcttgtagtcccaggtactcgagaggctgaggccggaggagcgtgtgagcccagtaggcagtggctgcgctgagccgtgattgtgccactgcactcccgcc

SEQ ID NO: 220051 - DNA, 201 bp, Homo sapiens
ggtactcagtctggtaggtgacgcagtcgcgcaggtcaacgtgggcctccaagtagttgcgctgtgatcgccgcatcagcacctgcaggggcaggaccacrtccacctccggctcccggcaggccagcacctggacggtcaccgtggcctgcgccacgaagaagctcaccaggttggaggcgttcacctgcacgcggtagt

SEQ ID NO: 220052 - DNA, 201 bp, Homo sapiens
ggccaccttggtggagacggtgtagttgctgatatagccaaagggaaagggattggagtccaccagaaagatgagctgcaccacgtcactgaggttggccrgggccccgctgaaagcctcggggatggagaagtggcagccaggccctggggcgccgccatagcacagcaggctccgcgggtccgagcgcttgccctgggc

SEQ ID NO: 220053 - DNA, 201 bp, Homo sapiens
cctctgcctgggcacaaagccctttctgaggtggcctcacagaagccagcctgtcttcagatcatggcgctgctaaggtcaggaatgccaggctgggccakggctgggcctcgggagctgcagggagaaaaggacccagcccgcctcagccccagatgtagcccttctcctgccaccagtgcctgggcaccctggccccta

SEQ ID NO: 220054 - DNA, 201 bp, Homo sapiens
ctgcgccgtggtgagctgcgtcctctctctgcagaccaagctgtacaccctgcctgcaagccacgccacgcgtgtgtatgagatgctggtcagccacattyagctccactacaagcacagctacaccctgccaatcgcgagcagcatccggctgcaggtatggtggctggggttgcgcagccagttcctgggggcccagcc

SEQ ID NO: 220055 - DNA, 201 bp, Homo sapiens
gaagtggctggagaggttcagatggtaactccccgctgggtctctgctcctgggcagggaaggggtagcggacgtgagcccaggctccgccaggttggatrtcgcagtctcagagcccatacccggtccagtcccctcgctgcctgccgtccccatggggccagtaacccaggcaatgctgacccatgatgccctgccctg

SEQ ID NO: 220056 - DNA, 201 bp, Homo sapiens
ggcgccggcctgtgtctggaatgccatcgaggccaccttggtggagacggtgtagttgctgatatagccaaagggaaagggattggagtccaccagaaagrtgagctgcaccacgtcactgaggttggccagggccccgctgaaagcctcggggatggagaagtggcagccaggccctggggcgccgccatagcacagcag

SEQ ID NO: 220057 - DNA, 201 bp, Homo sapiens
acagggacgtgtacaggcccacggacacctgcagcgccgaccagcggaagtggctggagaggttcagatggtaactccccgctgggtctctgctcctgggmagggaaggggtagcggacgtgagcccaggctccgccaggttggatgtcgcagtctcagagcccatacccggtccagtcccctcgctgcctgccgtcccca

SEQ ID NO: 220058 - DNA, 201 bp, Homo sapiens
catgggtcaggagggagaagggtcggggcagggagggcagggcaggctctggggtggggggtctgtgagtcagccacggctctgcccacgtctccccacgragcttcgagccacgcagagcagcacgttttgcagtacgccatcttttccaaaagccaccacctctcggcagcatcattaacccaaggcaggctgtggcct

SEQ ID NO: 220059 - DNA, 201 bp, Homo sapiens
gcggagctgcggtggccccgggcagcccagtccgagttgttgggcaccttcacggtgatggcgcgctctgaggccagccgctcgatggggatctgggcgcyggcctgtgtctggaatgccatcgaggccaccttggtggagacggtgtagttgctgatatagccaaagggaaagggattggagtccaccagaaagatgagc

SEQ ID NO: 220060 - DNA, 201 bp, Homo sapiens
agtccggctgcaccctgggcagagcccagggcgtgtccctctcccccccactgggccgtacccacctccttgaccttgctgaggcccatccagaggcgcarcctgcgcaggaacaactccaccatctcgtagtcctggggctcccaggccggccggtacagctctccacgcaaggcgtggtagcgccagcggagaataaca

SEQ ID NO: 220061 - DNA, 201 bp, Homo sapiens
cacgcaccgtccagcagcgtatagttgagctgcagatgcagcccggccgcagggttgctgctgtccagggtgaccacagcaccgacggaggcctggggctrgaccacaacggagttggcggagttggcggagctgcggtggccccgggcagcccagtccgagttgttgggcaccttcacggtgatggcgcgctctgaggcc

SEQ ID NO: 220062 - DNA, 201 bp, Homo sapiens
ttggtctcgctatgttgcccaggctggcctcaaactcctggcctcaagccatctgctctcctaaagtgctgggattacaggcgtgaggcaccgcgcccggstggacagtggttttgatttacgtttccctcatgactaatgaggccgaccatcttctcacacgctgttggccatctgtgcgtcttctttggagaaatctct

SEQ ID NO: 220063 - DNA, 201 bp, Homo sapiens
ctatttattggtctcgctatgttgcccaggctggcctcaaactcctggcctcaagccatctgctctcctaaagtgctgggattacaggcgtgaggcaccgsgcccggctggacagtggttttgatttacgtttccctcatgactaatgaggccgaccatcttctcacacgctgttggccatctgtgcgtcttctttggaga

SEQ ID NO: 220064 - DNA, 201 bp, Homo sapiens
ggggaagctcgcacccacccaccctgagacagccacagccacagccaccaggagcaggctgagcccgtgggccagggaggcacaccaggccggcagcaggygcttccgcagaccctccaccagtcctggggaagcagagacagacctgtgagaggcagctcacagggaggggctaggggcatcccggggctacgcaagcac

SEQ ID NO: 220065 - DNA, 201 bp, Homo sapiens
acaggcgccaccactaatatctatttattggtctcgctatgttgcccaggctggcctcaaactcctggcctcaagccatctgctctcctaaagtgctgggrttacaggcgtgaggcaccgcgcccggctggacagtggttttgatttacgtttccctcatgactaatgaggccgaccatcttctcacacgctgttggccat

SEQ ID NO: 220066 - DNA, 201 bp, Homo sapiens; identical to SEQ ID NO: 39277

SEQ ID NO: 220067 - DNA, 201 bp, Homo sapiens
ccgtcacctggtctttggtttggctggagagcatcagtgacagcagcacctggtacctgcgtacctgcttgtgcagtgacagggaccggggtggcggcggrtcctgggtgattccctggccaggctccgccccccgccctcgacacaccctggtttgttgccctgggccacacttgaggcatcagcctccccctgtggggt

SEQ ID NO: 220068 - DNA, 201 bp, Homo sapiens
ctaggcagccactcctccagggcggcgcgggtctcctctggggacttggttgccttcttggtccacctcagcctgttggcgattctgtgcacatgcgtgtmcactgctgctgggaggccaagcggggtgaacaggggcacactccaccagcctagcccgtgcccctccccgcccagaggcgagtctgccaccacccccgtg

SEQ ID NO: 220069 - DNA, 201 bp, Homo sapiens
ctcatctggggaaaccaagccaggagaggcctgggggcctcagccctctgcacccatctcagccctatgccgagtgccacctggacctgtccacccagggycaggaagggcacggacccccaacccatcccacgcagggccaaggccccccatcccctgtccacagtcccccacagagccaaggtctcccaaccctgtcca

SEQ ID NO: 220070 - DNA, 201 bp, Homo sapiens
agcaccagccgaggccggctcacgtccacgccgggcagggccacacgcgctgggcgccccggccgctggcagctggcggtgcgatacacctcccagcggtmctcagtctggtaggtgacgcagtcgcgcaggtcaacgtgggcctccaagtagttgcgctgtgatcgccgcatcagcacctgcaggggcaggaccacgtcc

SEQ ID NO: 220071 - DNA, 201 bp, Homo sapiens
ggggccaggccgctccgggagctcggccgcccgctcggacgctggcgctgcagtgcgggccccgccgcggctcctcctcctcctccccgcgcggcgcgggscggacggggcgagggggggcggggcgggtgcaggctccgcccccttcgccacagcgcgaccgggccagcgatgagggactggcatccggaggcttcaccc

SEQ ID NO: 220072 - DNA, 201 bp, Homo sapiens
tggggccctgcagtgtggcgccaagagccctgggcctggcgtgaccaccaagtctccccagacatggagggccttgtggacaccagcgtggccaagatcgkgtctgaccgcaacctgcccttcgtggcccgccagatggccctgcacgcaaatgtgagtgggggtgggtccaggcgtgagctggtgggacaggcccaggtg

SEQ ID NO: 220073 - DNA, 201 bp, Homo sapiens
agccacacaggcccagtggaaactgagcggcgtctggtcgccgtcctccaggttggggtcgtaggactcgctcccatccagcaccaggtcccgtgtgtctsaccacacgcggtatgagccaccctcaatgatgggcaccaggcgctcgggggccaccgtcacattggcctggatgctctgtgtcagtggcgtgtccccaaa

SEQ ID NO: 220074 - DNA, 201 bp, Homo sapiens
ccagggccagcgccaggcgggcgggcgcggcgggcggcatcgttagggcagcgcgcgcatggccccgccgtccccaggcccgcccgcgcgcggaggccgcrgctcaggcggggcccgcggacggcatggcgggcgcggggctggatggggctgcggccgcgacctgctgctgagcgacgcccgctcggggctcggggccag

SEQ ID NO: 220075 - DNA, 201 bp, Homo sapiens
tgacccatgatgccctgccctgccctgccaggctggcccgcagagctcaccccggggaaatgaagaaggtgtagggccggtggtcagcaccctggagtgastctgggcggatcctcctgctagccgagcagttgtgctcattgggccggggctccgagtgtaggtagactgccaggtagggctcaggttcctcagacaggt

SEQ ID NO: 220076 - DNA, 201 bp, Homo sapiens
ccctcagccgtcttccacatcgccaccctgatgcccaccaaggacgtggacaagcaccgctgcgacaagaagcgccacctgggcaacgactttgtgtccaytgtctacaatgactccggtgaggacttcaagcttggcaccatcaaggtgagtgaggggccgtcagtgaggctgggccccaggcaggtgcccactgctgtg

SEQ ID NO: 220077 - DNA, 201 bp, Homo sapiens
tccggccctgctcaccctcagccgtcttccacatcgccaccctgatgcccaccaaggacgtggacaagcaccgctgcgacaagaagcgccacctgggcaasgactttgtgtccattgtctacaatgactccggtgaggacttcaagcttggcaccatcaaggtgagtgaggggccgtcagtgaggctgggccccaggcagg

SEQ ID NO: 220078 - DNA, 201 bp, Homo sapiens
gcctggcggggcgaggtctcctccaggggcagcagcccctctgtccgccacaccatgtcctcctcgctgaagtactggcacagggacgtgtacaggcccasggacacctgcagcgccgaccagcggaagtggctggagaggttcagatggtaactccccgctgggtctctgctcctgggcagggaaggggtagcggacgtg

SEQ ID NO: 220079 - DNA, 201 bp, Homo sapiens
ggtgaggtggcgggtgaggcagacggcctggcggggcgaggtctcctccaggggcagcagcccctctgtccgccacaccatgtcctcctcgctgaagtacyggcacagggacgtgtacaggcccacggacacctgcagcgccgaccagcggaagtggctggagaggttcagatggtaactccccgctgggtctctgctcct

SEQ ID NO: 220080 - DNA, 201 bp, Homo sapiens
catccggccctgctcaccctcagccgtcttccacatcgccaccctgatgcccaccaaggacgtggacaagcaccgctgcgacaagaagcgccacctgggcmacgactttgtgtccattgtctacaatgactccggtgaggacttcaagcttggcaccatcaaggtgagtgaggggccgtcagtgaggctgggccccaggca

SEQ ID NO: 220081 - DNA, 201 bp, Homo sapiens
gcgccgaaggcggtgaggtggcgggtgaggcagacggcctggcggggcgaggtctcctccaggggcagcagcccctctgtccgccacaccatgtcctcctmgctgaagtactggcacagggacgtgtacaggcccacggacacctgcagcgccgaccagcggaagtggctggagaggttcagatggtaactccccgctggg

SEQ ID NO: 220082 - DNA, 201 bp, Homo sapiens
gggaaggggtagcggacgtgagcccaggctccgccaggttggatgtcgcagtctcagagcccatacccggtccagtcccctcgctgcctgccgtccccatrgggccagtaacccaggcaatgctgacccatgatgccctgccctgccctgccaggctggcccgcagagctcaccccggggaaatgaagaaggtgtagggcc

SEQ ID NO: 220083 - DNA, 201 bp, Homo sapiens
tcgaggccaccttggtggagacggtgtagttgctgatatagccaaagggaaagggattggagtccaccagaaagatgagctgcaccacgtcactgaggttrgccagggccccgctgaaagcctcggggatggagaagtggcagccaggccctggggcgccgccatagcacagcaggctccgcgggtccgagcgcttgccct

SEQ ID NO: 220084 - DNA, 201 bp, Homo sapiens
cagcagcgggatgttttcattccagggtgcttggcgggctgggctgccgtggccactgcagagctccagaaaagaacatgtgtgtctccctccaaagtatrttccttgctggaaagcagatcccaggcagggtctcccccacgagcagggggagaggcaccccaaggtgggggagcgagggcagtggcagaaccaccccat

SEQ ID NO: 220085 - DNA, 201 bp, Homo sapiens
ggcggcgccgggcgctgggccgcagaggcaggggggctcgcagggcccgcagccgcgcccggggccccccgccagcgccccgagccacaggcccaggcccwgggccagcgccaggcgggcgggcgcggcgggcggcatcgttagggcagcgcgcgcatggccccgccgtccccaggcccgcccgcgcgcggaggccgcagc

SEQ ID NO: 220086 - DNA, 201 bp, Homo sapiens
cccgggtgggacgtctgtctccagacccggggtttttcggctccccggggccgtgccaaccgcggctccaggcgttccttatttagcagggccgccgtgcygcgccggagcctcgccctgggagcgtcctggcccgcgtcctgcttcccgtcccgggccagggaacgcgcccacgcccgcccgtcccgcggcctctcccgg

SEQ ID NO: 220087 - DNA, 201 bp, Homo sapiens
gggcttggttgaggcaggcgtggcagcgagggtgcacaggcagacaggtctgctggccgaagcccaccaagagtccattgatctcgtgccacagctccctrtgggggtgggggctgggtcagtgctgacagagggcgggcggggtgagctcttctccctaggaagccccccacatactcatacctaggcagccactcctcc

SEQ ID NO: 220088 - DNA, 201 bp, Homo sapiens
ccagctcagtgcctgccccatgctcggacgtcctccagcggtgctccccaactacttagcctgttacaaggcgaggctcggggtcttggcttgacgttgcycttgccctcacccccacagccaggctgtggccacttttgttgctttagccattagagatggctcagctctgcccacaccctggcctcccacccatgctgc

SEQ ID NO: 220089 - DNA, 201 bp, Homo sapiens
cagccatccccacctctccgggtaccccgcagccccaggccgcatcccaattcctctccaattagcgactgtttgtcctcccagctgagcgcggcctccgsgccccgcccccgctggcgtctgcagagcccccgggtgggacgtctgtctccagacccggggtttttcggctccccggggccgtgccaaccgcggctccag

SEQ ID NO: 220090 - DNA, 201 bp, Homo sapiens
ggagaggcaccccaaggtgggggagcgagggcagtggcagaaccaccccataccctaggggacccagggaggggcttgcagatgcgggacccacatttggsagcggtgcccggccactgtcaccagatggtggccagcgcatcacccactcatgggccaggatggcagaggagatccacagagacggctccagcaggaggc

SEQ ID NO: 220091 - DNA, 201 bp, Homo sapiens
aatgagcatggctcctacaggtacacggagttcctgacgggcctgggccggctcatcgagctgaaggactgccagccggacaaggtgtacctgggaggccyggacgtgtgtggtgaggacggccagttcacctactgctggcacgatgacatcatgcaaggtacggcctggcgcctacccgctcctgctgccccaggcctc

SEQ ID NO: 220092 - DNA, 201 bp, Homo sapiens
tgcttggcgggctcccccgtggacaccctgttgactttgcacttccctcccgggccccgcacccccgaaccgaccaccgatcgaccggcaccgctgttgcytcgtaagccatagcgcatgcgcgctctcaggataaacaggccctgcctgggacccacacgcctctgtcttttctgagcctcctccccgtggggtgagagg

SEQ ID NO: 220093 - DNA, 201 bp, Homo sapiens
acaccaaagctttattcaacaggcgtggcttcctgaagcgtaaagccacttcacagacggtggccacagcggcacctcggccagagccatgcggccatcaragaccctgggcggccgggcagagggcttggttgaggcaggcgtggcagcgagggtgcacaggcagacaggtctgctggccgaagcccaccaagagtccat

SEQ ID NO: 220094 - DNA, 201 bp, Homo sapiens
gccatagcacagcaggctccgcgggtccgagcgcttgccctgggccacgatctcctcgcccgccagcgtcaggggctcctcgttgagcacgcgggagcgcrtgaggatgcgcatgagggcagaggtcaggttgtaggcctgggacgccaccatccgagatggtgactcggctcccagctctgagggctgtggtgcccgcac

SEQ ID NO: 220095 - DNA, 201 bp, Homo sapiens
cagaaagcaaatttcaccagagacacccatggaagccctacgagaaacgccttccccccaagaacaaggccagggggccgcgtgtgccccacccgctgcaygcaccgtccagcagcgtatagttgagctgcagatgcagcccggccgcagggttgctgctgtccagggtgaccacagcaccgacggaggcctggggctgga

SEQ ID NO: 220096 - DNA, 201 bp, Homo sapiens
gaacccggagcccctgtactcccacagctgtgacgttccctgggcatgggcttgccccagcgctggcctcattcctgcctcaaccagaaggaagagctggsttccgcctctgcctgggcacaaagccctttctgaggtggcctcacagaagccagcctgtcttcagatcatggcgctgctaaggtcaggaatgccaggctg

SEQ ID NO: 220097 - DNA, 201 bp, Homo sapiens
catccctctccactcccacccttcacagcctgtgtgggcaggtgctgcactgaccttacgctcctgatgggcacactgaggctcaaggggccctcctcctyccccaacaccatcccccaaacacctccccgggcagccagcagggtccagtgtgtcaatggaggaagccaaggtaggaagagggatggtgggggggggggc

SEQ ID NO: 220098 - DNA, 201 bp, Homo sapiens
cctgctcacattccgtctctctggggaacacttttagagcctacatggaggacgcgcccctgctgagaggagccgtgttttttgtgggcatggctctctgrggagcccaccggctctattctctcaggaactcgccgacatctgtgttgccatcattttaccaggtaaggcggtttctgtgtgcagtgagctggcaggaac

SEQ ID NO: 220099 - DNA, 201 bp, Homo sapiens
ggcacagacctggctctgggcagcgtctccataaaggccacctgttgtttttatctcccgaaagcgaacatgacaaggctttaaccccccacggcaatccsccctcacccctgttctcaggatagccttggaacccaatagcagagcgcctgaggcccttcatgaccccagcccacccgcgagcccacctcccaccctgcc

SEQ ID NO: 220100 - DNA, 201 bp, Homo sapiens
cgtctccctctccaccaggtctccctgcaggtgctggacgccgtggtctgctacaactgcctgccggctgagagcctcccgctgttcatcgttaccctctrtcgcaccatcaacgtcaaggagctctgcgagccttgctggaaggtggggtttctgaaactgctctggaaggttcctgagagcacatggatgggacaaggg

SEQ ID NO: 220101 - DNA, 201 bp, Homo sapiens
tccagctccccccgctcgcccagtggcctccggccccgaggttacaccatctccgactcggccccatcacgcaggggcaagagagtagagagggacgcctwaaagagcagagccacagcctccaatgcagagaaagtgccaggcatcaaccccaggtgggcctcttgcttccgggcggggctcctgacacctctcctgcgg

SEQ ID NO: 220102 - DNA, 201 bp, Homo sapiens
ttcttggagagcacatcctcaccgctgtcccctctgctggtgacagcacgcagtggaagcactctggaaggcggtcgcggatctgttgcagccggagcggmcgctggaggcccggcacgcggtgctggctctgctgaaggccatcgtgcaggggcaggtaaggcccagggcgacgctgggatgggtgacgtcaggctgccc

SEQ ID NO: 220103 - DNA, 201 bp, Homo sapiens
gctgctgcaggagcctcggcaacctcacacatccatggcggaccctgggacagggccctgctcacattccgtctctctggggaacacttttagagcctacrtggaggacgcgcccctgctgagaggagccgtgttttttgtgggcatggctctctggggagcccaccggctctattctctcaggaactcgccgacatctgt

SEQ ID NO: 220104 - DNA, 201 bp, Homo sapiens
tgcatctgcagagctgacaggaacggccccaccggccggcgccacctgctcaccagggccggcccagctcccacctccttcctcctgagactccccagccscaggctctgccccagtgcttcagagatctcccaacctatggcccctcggggggtgggggcaggcacctggtgacccgggagaccaggaagcgctgcacgg

SEQ ID NO: 220105 - DNA, 201 bp, Homo sapiens
ctctgcatctgcagagctgacaggaacggccccaccggccggcgccacctgctcaccagggccggcccagctcccacctccttcctcctgagactccccasccgcaggctctgccccagtgcttcagagatctcccaacctatggcccctcggggggtgggggcaggcacctggtgacccgggagaccaggaagcgctgca

SEQ ID NO: 220106 - DNA, 201 bp, Homo sapiens
atggcagggggctcagggcactcctccatcctcccaccctcacagcagcccgctgggagccccatcactgtccccctttccagatggggaaactgaggctyagagcccggagaccagggcccaccagcccaggctcacagcagcacccacccacggggcctgtgggtaccggcagggatccccgtgcaggccacctcccgt

SEQ ID NO: 220107 - DNA, 201 bp, Homo sapiens
cccatgaaacagaaagcaaatttcaccagagacacccatggaagccctacgagaaacgccttccccccaagaacaaggccagggggccgcgtgtgccccamccgctgcacgcaccgtccagcagcgtatagttgagctgcagatgcagcccggccgcagggttgctgctgtccagggtgaccacagcaccgacggaggcct

SEQ ID NO: 220108 - DNA, 201 bp, Homo sapiens
tgactttgcacttccctcccgggccccgcacccccgaaccgaccaccgatcgaccggcaccgctgttgcctcgtaagccatagcgcatgcgcgctctcagrataaacaggccctgcctgggacccacacgcctctgtcttttctgagcctcctccccgtggggtgagaggggtggagggatgaggctgtttcagggagccc

SEQ ID NO: 220109 - DNA, 201 bp, Homo sapiens
cagtcgagaagccgatccacacgtctaggctcctgggggcgggtgtgggatggcagggggctcagggcactcctccatcctcccaccctcacagcagcccrctgggagccccatcactgtccccctttccagatggggaaactgaggctcagagcccggagaccagggcccaccagcccaggctcacagcagcacccaccc

SEQ ID NO: 220110 - DNA, 201 bp, Homo sapiens
cctgcacagtcgagaagccgatccacacgtctaggctcctgggggcgggtgtgggatggcagggggctcagggcactcctccatcctcccaccctcacagsagcccgctgggagccccatcactgtccccctttccagatggggaaactgaggctcagagcccggagaccagggcccaccagcccaggctcacagcagcac

SEQ ID NO: 220111 - DNA, 201 bp, Homo sapiens
tctcactgtccgagccctcataggccacacgcagtctctgtgctttccgcggacgcttcacggggctgtggcttttcctcgcttctgcaaaaagcaccacrcagtccctctggtggggccacaggtgaaggtagggtaggggtgccatcccgcctgctagctcacccctcactcgttcatgccacaactgtccatcatcta

SEQ ID NO: 220112 - DNA, 201 bp, Homo sapiens
caccccctgcacagtcgagaagccgatccacacgtctaggctcctgggggcgggtgtgggatggcagggggctcagggcactcctccatcctcccaccctyacagcagcccgctgggagccccatcactgtccccctttccagatggggaaactgaggctcagagcccggagaccagggcccaccagcccaggctcacagc

SEQ ID NO: 220113 - DNA, 201 bp, Homo sapiens
actgtcataataaactccaaactctatcctggcatcaaagctcctgccaccctggctggcatcaccacctgcctgctcccagctgcaccagttcctcctgmcatagtctggactacccctggggtccctgggtgcctatgggaatccaactctggccaattctgcagaagtcccagcgggactagcgcagaggccctgtcc

SEQ ID NO: 220114 - DNA, 201 bp, Homo sapiens
accctggctggcatcaccacctgcctgctcccagctgcaccagttcctcctgccatagtctggactacccctggggtccctgggtgcctatgggaatccarctctggccaattctgcagaagtcccagcgggactagcgcagaggccctgtccgtgtccctcactgctcactgcagtgcttggcccccagcaggtcctcaa

SEQ ID NO: 220115 - DNA, 201 bp, Homo sapiens
cccctcctcctcagcccaggctccaccgcgggcgctcggcaggcccctaaccacagccagcgtctcaggcccctgcctggccccccgcacacctccgggcygcagctcgcagacgtagctgtgcggcgctgagcacaggtcggtgttacaccacccggtgggcccgagccggacgcagtgctcggctgtggctgggtgtgg

SEQ ID NO: 220116 - DNA, 201 bp, Homo sapiens
gctggagtgcagtggcacaatctctgctcgctgctacctctgcctcccagtttcaagtggttctcctgcctcagcctcctgagtagctgggactacagacrcgtgccaccacacccatttaatttttgtatttttagtagagatggagtttcactatcttggccaggctggtcttgaactgctgacctcaggtgatctgcc

SEQ ID NO: 220117 - DNA, 201 bp, Homo sapiens
ccagcccctcctcctcagcccaggctccaccgcgggcgctcggcaggcccctaaccacagccagcgtctcaggcccctgcctggccccccgcacacctccrggctgcagctcgcagacgtagctgtgcggcgctgagcacaggtcggtgttacaccacccggtgggcccgagccggacgcagtgctcggctgtggctgggt

SEQ ID NO: 220118 - DNA, 201 bp, Homo sapiens
agttggcgcgagggtgggtgaagcctgaggctggcagggccgggaagtcttggggctgggccttctgccccacaggcgctcctgggccgggggagccgggstcggggaatgcaacagtgggactgaggagaacttccctgggtgtggggcagctcccggggccctcccaatccacagcagagggaatggccccagacaaac

SEQ ID NO: 220119 - DNA, 201 bp, Homo sapiens
tcctcgcagtggccctggcgacagcgccgcagcagcagggcgtacaccagcggggcgccagcatcctccgcgtcatgccagcctgagggacggtccccacrgcatcacgggagggctccgtgacgtcacagagtcgggggatcccgctgctccccccacgcaggcctgcactcacccgtgcattcgaagtgcaccttggtg

SEQ ID NO: 220120 - DNA, 201 bp, Homo sapiens
gcacccacctgcccacatgaggtcaccctgtgccctgttgcacacttgaggggcctggcattcggaatcttgccagctcaggctgggacaggccaccaacycccagggtccccctcctccaaaccccaggaccagagcctaagaggacaacacaaggcaggggcgggggctccactgctgtgccaagggcctggagaacac

SEQ ID NO: 220121 - DNA, 201 bp, Homo sapiens
caccccaccttccagaactctcccagcggcggccccaggtgtgtacagaacagcacccacctgcccacatgaggtcaccctgtgccctgttgcacacttgrggggcctggcattcggaatcttgccagctcaggctgggacaggccaccaacccccagggtccccctcctccaaaccccaggaccagagcctaagaggaca

SEQ ID NO: 220122 - DNA, 201 bp, Homo sapiens
tcctttctagtcgtcctcagtctccagccaggaggagaagtcgctccacgcggaggagctggttggcaggggcatccccatcgagcgagtcgtctcctcgkagggtggccggccctctgtggacctctccttccagccctcgcagcccctgagcaagtccagctcctctcccgagctgcagactctgcaggacatcctcgg

SEQ ID NO: 220123 - DNA, 201 bp, Homo sapiens
gccctttctcctcggacatcaacaacatgcccctgcaggagctgtctaacgccctcatggcggctgagcgcttcaaggagcaccgggacacagccctgtasaagtcactgtcggtgccggcagccagcacggccaaaccccctcctctgcctcgctccaacacaggtgagtggcatggcgggccttggcacgggctctgct

SEQ ID NO: 220124 - DNA, 201 bp, Homo sapiens
caaatgtcacagggcgtagttacccaaacccagacaccgcagcccctgtgcatgcaggccctgtggtgtggcctgtggctccggggcaccgcacctgcacygcatgccactgcactgaatcctgcaggcagctgcagtgcaacggcagggccgtgtggacctcagcacacctgagcataggagggcatggcagagcccggg

SEQ ID NO: 220125 - DNA, 201 bp, Homo sapiens
aacccaagcctccgacctggtcagcccgaagcactgtccgagcaagggacggccaagggttgaggaagccgggagggtgagggccacgcgctctgtgtggmtgcggagtctgagctgccgtcagaaatccccgcggaagcactgaatctggatttcacagagctttgggccggagatacctggggctggtcagcatgtagt

SEQ ID NO: 220126 - DNA, 201 bp, Homo sapiens
tgctgatcctgtggcttttgtctttagggcgagcgtttgggggtcctcagagccctcttctttaaggtcatcaaggattacccttccaacgaagaccttcrcgaaaggctggaggttttcaaggccctcacagacaatgggagacacatcacctacttggaggaagagctgggtgggtgccaccttgggttggaggtttct

SEQ ID NO: 220127 - DNA, 201 bp, Homo sapiens
atgggtggatcacgaggtcaggagttcaagaccagcctggctaagatggtgaaacctcctctctactaaaacacacacacaaaaaattagccggctgtggyggcgggcgcctgtaatcttagctacttgggaggctgaggcagataactgcttgaacgtgggaggcagactttgcagtgagccgagatcatgcgactgcac

SEQ ID NO: 220128 - DNA, 201 bp, Homo sapiens
ggacccagctggaccctagcaggaggcaggcaatgctcactgagggcccctggggggatgcgtgtgagaagagacgtatgtgtgggtgtgaggaccgcagytgccacgtaggcctgactcacagactcctgcagcccttagccagggcctgggtcaggaggctgagctgggatggaacctgctcccacaccctcccctcag

SEQ ID NO: 220129 - DNA, 201 bp, Homo sapiens
gagaagaggtacagaggcagcgaagacacgttgagggggaggacgagaccaactgcgagacgccgagtcccgggctctcaggacgctctcccgtacctgcrccctcgtcagcccatcaccgaaagaacggcctgacccagggtcacactgcactgaatgcttcctgttttgctgtctctcggaggataaaagacactcttg

SEQ ID NO: 220130 - DNA, 201 bp, Homo sapiens
ggccaaaggtgctgccgcctccgcagggaacaccagctggctgatgagcctggagaacccgctcagccctttctcctcggacatcaacaacatgcccctgyaggagctgtctaacgccctcatggcggctgagcgcttcaaggagcaccgggacacagccctgtacaagtcactgtcggtgccggcagccagcacggccaa

SEQ ID NO: 220131 - DNA, 201 bp, Homo sapiens
aggagtgctggacctgagggacatggtaggctgtgaattcatcccggcctccaggaggcagttgcagccaagcccatgttaacctgggcgggcagtttctkgagcctcttgggtcacagggtccccccgacaaaaagccggaagaccctaccccaaacgagagtgggagtggtgctgggagccagggaaccaagagccact

SEQ ID NO: 220132 - DNA, 201 bp, Homo sapiens
gggctacgcaagcacacctgtcctggacagcctcgctgcctggggctgttcccagttcaggcctgggctgggtggccccagctcccccagcctctgcagcrccagcgtctctgtcttctccccaggagtgctggacctgagggacatggtaggctgtgaattcatcccggcctccaggaggcagttgcagccaagcccatg

SEQ ID NO: 220133 - DNA, 201 bp, Homo sapiens
agatcgtcctgtccatcaccaggctcatcaagaagtataggaaggagctccaggtggtggcgtgggacattctgctgaacatcatcgaacggctccttcarcagctccaggtggggtgggggcaggagctccggggagcaccgggaacccagacaggcaggctcggcccactcagaagatggtaccttgggccccatctct

SEQ ID NO: 220134 - DNA, 201 bp, Homo sapiens
tctcttgctacctggcctggggcaagggaggatgacaaggcctctggggtgatgagagtgcctggcagacagctgtgcccccagcaccggcccaaggccawgctcgcatccaagcagcagccgggctgccataacgccaccacacctaccaagcgcagcaggtgttgggggaggccagctctgggcgcaggcccctcagcc

SEQ ID NO: 220135 - DNA, 201 bp, Homo sapiens
ccttggacggtattgcctgtcagtgaaataaataaagtcctgaccccagtgcacagacatagaggcacagattgcagtcagacagctcttttattgacttygtctgcttggtgcgggggttgggggggtgtcgaggctctagaagcggccatgcccacagaagtggtacacagaagcaggcacagccagctccgagggcct

SEQ ID NO: 220136 - DNA, 201 bp, Homo sapiens
ccagcctgggcgacagagcaagactcgatctcaaaaaaaaaaaaaaaaaaaaaaaaggtgtttgtggtagaaagtgttctcacggctgctgactcagaacyatgagcctgtgtgtaagtcctggccttctcttcaaaggtgatggcccgctccctctccccacccccggagctggaagaaagggatgtggccgcatactcg

SEQ ID NO: 220137 - DNA, 201 bp, Homo sapiens
gacaagggtgctgtcttaggactgcgttttcacctcctgcgccgtggtgagctgcgtcctctctctgcagaccaagctgtacaccctgcctgcaagccacrccacgcgtgtgtatgagatgctggtcagccacattcagctccactacaagcacagctacaccctgccaatcgcgagcagcatccggctgcaggtatggtg

SEQ ID NO: 220138 - DNA, 201 bp, Homo sapiens
agcgagggcagtggcagaaccaccccataccctaggggacccagggaggggcttgcagatgcgggacccacatttggcagcggtgcccggccactgtcacsagatggtggccagcgcatcacccactcatgggccaggatggcagaggagatccacagagacggctccagcaggaggccctcatagagatgccctggcctc

SEQ ID NO: 220139 - DNA, 201 bp, Homo sapiens
agtgcccagagccccacacacagcaggggtgacaggtgccaggactcggcaggacacagggtagagagcccagtcccagggcacagcaccaacagggcctrggccacgctccagagggagtccacacaggaagacacgagctgcggggaaggcgacaccagtgagggcgtacagctgagctgagctgagctaagacgccct

SEQ ID NO: 220140 - DNA, 201 bp, Homo sapiens
gtgacagtgaagggcagggcctcacctcggctgctccttgtgagttgtgggccccgtgtctgtgcccggccgccctgcggtgctcaccagccttctgaacraggagctggacaggatccctggaaggggccccggggtctctgagtcgcgctcagcgggtgcttgtgctctctgcccagctgtgctgaagtcccgagggac

SEQ ID NO: 220141 - DNA, 201 bp, Homo sapiens
atctgcccgctttggcctcccaaagtgctgggattacaggcatgagccatcgcacatgggctaggtcgttatcttttatgtgtgtttgtgtctttgtcacrcatgcctggcattgtgttttgcccatgagtaaatgctgaatttttgcacttgtaaagttttctacttagaaacaactaaaacgttcatcaactgatgaat

SEQ ID NO: 220142 - DNA, 201 bp, Homo sapiens
cagagtgcaggccaggcccagacagcagcgggatgttttcattccagggtgcttggcgggctgggctgccgtggccactgcagagctccagaaaagaacaygtgtgtctccctccaaagtatattccttgctggaaagcagatcccaggcagggtctcccccacgagcagggggagaggcaccccaaggtgggggagcgag

SEQ ID NO: 220143 - DNA, 201 bp, Homo sapiens
attgggcgacctcacggacatagaaatatttattttgggcaaacattgccagactttcctgatgacttgtggacaggacaggaagtggtcattttgggagygcaggttgctggtagagcacctgagggctctgcccttgccttgcccagcatttgtgtgtgggagagcagtgagacctggacctctcatgctcagatctgc

SEQ ID NO: 220144 - DNA, 201 bp, Homo sapiens
ccctctcccccccactgggccgtacccacctccttgaccttgctgaggcccatccagaggcgcagcctgcgcaggaacaactccaccatctcgtagtcctrgggctcccaggccggccggtacagctctccacgcaaggcgtggtagcgccagcggagaataacagcccccagccgtagggcgccccacagccgcagtgcc

SEQ ID NO: 220145 - DNA, 201 bp, Homo sapiens
tcggcatcctgcactgggcctggggtggcgagtgcacagtgaggcgccgggccagggcccaggacaccaggacgaacagactggggaccgagccgcccgaraacccccccaccagcccctcctcctcagcccaggctccaccgcgggcgctcggcaggcccctaaccacagccagcgtctcaggcccctgcctggcccccc

SEQ ID NO: 220146 - DNA, 201 bp, Homo sapiens
acgcaggcccgggaataccatgacctggtgggcagggggccgcctcagctccacagaccccatcccagcctgaagcccagactccccctacccgaacttcscaggaagaggggagggaaggagagcgagccatcagacccccacaggcctggctcctgtcgctcgagaggaagactccggtggaaactgtccatggggggc

SEQ ID NO: 220147 - DNA, 201 bp, Homo sapiens
ggctgcctgcaggacaggtgccggccaggtgcctaccgtcaggtttcctgtctgaggtgacgtggccggcagccaagtgtgcacacgtctcctccgagccrctctctgctgggggtggggaacgcccaggagtctggtgatgtcggcgtctcccagcctcgggttgggccctgagtgtacggcatacacacttctgctgcc

SEQ ID NO: 220148 - DNA, 201 bp, Homo sapiens
aacacccagcaccgagagcagtggctggcgcacagcaggcacctgagtgcttgttgggtgggtgggacccccagggaggatgagccatgcgtgttattgaygtcatagagtgactagaccacagcccgtggtggctcggccatccaggcagtgctgccgggactgagctcggtgctccctgcaggatgatctgtctgctgt

SEQ ID NO: 220149 - DNA, 201 bp, Homo sapiens
tgcccaactgcctgcaccagcaatcctggccttgctgtgaggacaggtctccccacctgggcagcactcccagcccagtgctgcgtccgtctccggccagscgactgacccaggccggcccccaggcaggccccacccaatccacccccaggacacctggaatgagctggtgtctctggaacccctgctctgtccacctaa

SEQ ID NO: 220150 - DNA, 201 bp, Homo sapiens
cgttctccggggtccctgtgaggaggggagggtgttggggccctgatttgcccacaggccaccgtcagagatgcccaactgcctgcaccagcaatcctggycttgctgtgaggacaggtctccccacctgggcagcactcccagcccagtgctgcgtccgtctccggccagccgactgacccaggccggcccccaggcagg

SEQ ID NO: 220151 - DNA, 201 bp, Homo sapiens
cccgtctgggtcctgactgtgctggagcatgtagaaacccctcctgggcgccccacctgctgtttctgcggcccctgataaacgtgtggtgggcactgcgsgctcaggcgtgctactctcggtcccaagggtgactgggagggcgtcccacagcaagcaagcagctctgaccctgtgtgctggccgggctcgtgttccagg

SEQ ID NO: 220152 - DNA, 201 bp, Homo sapiens
gtggccaggcctggaggctgcccctccacacccgtcacaggtggggccacgtcccagggctgtgggcagcagggccagcctgccggcccgaggtagctgasacgtgtctcatgctgcagcgggtctgcccgccacccgggcgtgtgaaccccaggtcgggccccctcgccctggagcctcggcccctcaggggtgttccca

SEQ ID NO: 220153 - DNA, 201 bp, Homo sapiens
ctgctctcaggctcgctgccgttctccggggtccctgtgaggaggggagggtgttggggccctgatttgcccacaggccaccgtcagagatgcccaactgyctgcaccagcaatcctggccttgctgtgaggacaggtctccccacctgggcagcactcccagcccagtgctgcgtccgtctccggccagccgactgaccc

SEQ ID NO: 220154 - DNA, 201 bp, Homo sapiens
cgggcggcagctcagacctgctcaggacagggatgagaagccacctcctcagcagacaggacagagcccggtgccatctgacagaatgtcctagaatgctrgatatatgggacatctgcaccgtccgtgatggcagcccctcgcgacgtgtgccactgaacacttgacagcagactggtgcagctaaggaacagagtttta

SEQ ID NO: 220155 - DNA, 201 bp, Homo sapiens
cccctcctgggcgccccacctgctgtttctgcggcccctgataaacgtgtggtgggcactgcgcgctcaggcgtgctactctcggtcccaagggtgactgrgagggcgtcccacagcaagcaagcagctctgaccctgtgtgctggccgggctcgtgttccaggccatggcatgtccgaacgaggtggtgtcctatgagat

SEQ ID NO: 220156 - DNA, 201 bp, Homo sapiens
agggtgtggccaggcctggaggctgcccctccacacccgtcacaggtggggccacgtcccagggctgtgggcagcagggccagcctgccggcccgaggtakctgacacgtgtctcatgctgcagcgggtctgcccgccacccgggcgtgtgaaccccaggtcgggccccctcgccctggagcctcggcccctcaggggtgt

SEQ ID NO: 220157 - DNA, 201 bp, Homo sapiens
ccgcgggaacggagaagaggaactctctccatagcgcatagggggccccgggtagccctggccctgacgtgcagccattggcgcaggcctgggggtggcargaggcgtccagcggcaagcagatgttggctccagggcaccagcgtccccctggcatgcacgcgggggccagctgggtcctgttgtccggggacctgctct

SEQ ID NO: 220158 - DNA, 201 bp, Homo sapiens
tcctgtctctactaaaaatataaaaattagctgcacgtggtggcgggcacctgcaatcccagctgctcaggaggctgaggcaggagaatcgcttgaacctrggaggtgaaggttgcagtgagccaagattctgccactgcactccagcctggacgacagagcaagactctgtctcaaaaagaaaaaaaaaaagggccgggc

SEQ ID NO: 220159 - DNA, 201 bp, Homo sapiens
tgagcttcagcagccagggagccacaagtggagaggcacctgcgtgagccccccaggaaggctactggtgacacccagacagcaacgctcttggacccttraacacctgccagcagctgtgatctgtgtccttcacctctcccagcttgacccctcttccctggggaaaacccagccgtctccccgaggaggagtttgcag

SEQ ID NO: 220160 - DNA, 201 bp, Homo sapiens
cggctctgcccacgtctccccacgaagcttcgagccacgcagagcagcacgttttgcagtacgccatcttttccaaaagccaccacctctcggcagcatcmttaacccaaggcaggctgtggcctcagaagccccggctgtcctccacctggaactggacacagctgtccctgctgagcttcagcagccagggagccacaa

SEQ ID NO: 220161 - DNA, 201 bp, Homo sapiens
cccagaccctgggcagcagacaggaaggtggcctgaggagatgcagggaacagacccaggtcagggccacacaccgagtactgcgcggggggccccgcggsaacggagaagaggaactctctccatagcgcatagggggccccgggtagccctggccctgacgtgcagccattggcgcaggcctgggggtggcaggaggcg

SEQ ID NO: 220162 - DNA, 201 bp, Homo sapiens
ccaagcttgtcgggaggagtacacccccatggggggcaggacggtgccccagccccgggacacaaggggtccccagcgccgagcgtccgatctggaaggcrggaggagttaggaccatcctagcgtgggacccagcgggctccttagcggctgctggggcaccactgggtggagaaggaagtcccaggtgtgtggccacag

SEQ ID NO: 220163 - DNA, 201 bp, Homo sapiens
gggccaggatgtgctcccagggaagctgaagccaagcttgtcgggaggagtacacccccatggggggcaggacggtgccccagccccgggacacaaggggyccccagcgccgagcgtccgatctggaaggcgggaggagttaggaccatcctagcgtgggacccagcgggctccttagcggctgctggggcaccactgggt

SEQ ID NO: 220164 - DNA, 201 bp, Homo sapiens
tgagctggaagggtgggagccaggtgcacagggacagcctgatgggtgcccgagggccaggatgtgctcccagggaagctgaagccaagcttgtcgggagragtacacccccatggggggcaggacggtgccccagccccgggacacaaggggtccccagcgccgagcgtccgatctggaaggcgggaggagttaggacca

SEQ ID NO: 220165 - DNA, 201 bp, Homo sapiens
ctgctatgagctggaagggtgggagccaggtgcacagggacagcctgatgggtgcccgagggccaggatgtgctcccagggaagctgaagccaagcttgtygggaggagtacacccccatggggggcaggacggtgccccagccccgggacacaaggggtccccagcgccgagcgtccgatctggaaggcgggaggagtta

SEQ ID NO: 220166 - DNA, 201 bp, Homo sapiens
cctgggggtggcaggaggcgtccagcggcaagcagatgttggctccagggcaccagcgtccccctggcatgcacgcgggggccagctgggtcctgttgtcyggggacctgctctcaggctcgctgccgttctccggggtccctgtgaggaggggagggtgttggggccctgatttgcccacaggccaccgtcagagatgcc

SEQ ID NO: 220167 - DNA, 201 bp, Homo sapiens
tcacgctccctgtcttctaggtctcctgtgggcgagttcctcctagcgggtggcaggaccaaaacctggctggttgggaacaagcttgtcactgtgacgasaagcgtgggaaccgggacccggtcgttactaggcctggactcgggggagctgcagtccggcccggagtcgaggtgactgcaccttcctttcctccgcgcc

SEQ ID NO: 220168 - DNA, 201 bp, Homo sapiens
cgtgcagccattggcgcaggcctgggggtggcaggaggcgtccagcggcaagcagatgttggctccagggcaccagcgtccccctggcatgcacgcggggrccagctgggtcctgttgtccggggacctgctctcaggctcgctgccgttctccggggtccctgtgaggaggggagggtgttggggccctgatttgcccac

SEQ ID NO: 220169 - DNA, 201 bp, Homo sapiens; identical to SEQ ID NO: 39307

SEQ ID NO: 220170 - DNA, 201 bp, Homo sapiens
cgggcctgcgggagctccacgggcaagctgggtttcacgctccctgtcttctaggtctcctgtgggcgagttcctcctagcgggtggcaggaccaaaaccyggctggttgggaacaagcttgtcactgtgacgacaagcgtgggaaccgggacccggtcgttactaggcctggactcgggggagctgcagtccggcccgga

SEQ ID NO: 220171 - DNA, 201 bp, Homo sapiens
tggtgggacaggcccaggtgccacctgatagtgagctcaccccctgcctacgtccccagatggcctcacaggtgcatcatagccgctccaaccccaccgayatctacccctccaagtggattgcccggctccgccacatcaagcggctccgccagcgggtagggaatatggggctccctcagcggggtgtgctggctgccc

SEQ ID NO: 220172 - DNA, 201 bp, Homo sapiens
gccagatggccctgcacgcaaatgtgagtgggggtgggtccaggcgtgagctggtgggacaggcccaggtgccacctgatagtgagctcaccccctgcctmcgtccccagatggcctcacaggtgcatcatagccgctccaaccccaccgatatctacccctccaagtggattgcccggctccgccacatcaagcggctcc

SEQ ID NO: 220173 - DNA, 201 bp, Homo sapiens
gcgtgggcatggaggcagtgatggggctggtggctttgcgtcccaaagccctgcccctggggagagccgaggaccactggccaggcaccagaggacgtggyccccgcaggcccccagagcccctggagtaatcaggaggtgccccagtgcaaggcacagagggcctcagcactggccccacaaacccatccggccctgctc

SEQ ID NO: 220174 - DNA, 201 bp, Homo sapiens
cagcttggggtctgcagatgagaactccgtggcccaggctgacgatagcctgaaaaacctccacctggagctcacggaaacctgtctggacatgatggctygatacgtcttctccaacttcacggctgtcccgaagaggtccaggcggcactacagggctgggcgggcctgcgggagctccacgggcaagctgggtttcac

SEQ ID NO: 220175 - DNA, 201 bp, Homo sapiens
ggcatagggtgggcccagctgcaagggtgagcttcagagccccctcctctcaccccagctcacctgatgctgagaaggatttggcaggcgagtaggggctrgccagggagaagccgtcctcctctgggcccagcccatggcccgcctggccccgtgccagctgccgcagattgctacccacaatggacgggtcactgagca

SEQ ID NO: 220176 - DNA, 201 bp, Homo sapiens
gagcccatacccggtccagtcccctcgctgcctgccgtccccatggggccagtaacccaggcaatgctgacccatgatgccctgccctgccctgccaggcyggcccgcagagctcaccccggggaaatgaagaaggtgtagggccggtggtcagcaccctggagtgactctgggcggatcctcctgctagccgagcagttg

SEQ ID NO: 220177 - DNA, 201 bp, Homo sapiens
cggatgcctacagcagggtgagtgtggctcagagcctggaccctgctgacctcggggggctccttaggggaggcagggctctgcgtgggtgtgcctgcacyctgggaactggctctgaacttgggggagatgttcttccacatccctcgtgcacagacggtctgcactttgcagccatccacctgggccggccctggctgc

SEQ ID NO: 220178 - DNA, 201 bp, Homo sapiens
cgactcgcatgaggacgtctgtgcagaatgtctttggcttggccagcgggatccccttgacttggtccctttgtggctgagccctgttcccacgctgtgcragcactcccggcccagcttcaggcctgaggggtgggggtggcctgagtctccatggtgacatcagctgagctgcagactctgatgggtggcagctgttta

SEQ ID NO: 220179 - DNA, 201 bp, Homo sapiens
ggcgcccgccaccacgcctggccaatttttttgtatttctagtagagatggggtttcactgtgttagccaggatggtctcaatctcctgacctcgtgatcygcccgccttggcctcccaaagtgctgggattacaggcgtgagccaccgcgcccagccatttgggggtaacttgtaagtctccagaggtgagctgtgaggg

SEQ ID NO: 220180 - DNA, 201 bp, Homo sapiens
tcccgggagctgggctctctggggcgttggggctccttcctcacccgatagtctgaggatagccagaccccccaaacaaggcttgaataactctccacccrtgaaagaattcaaggagagctctgcagccgaggccttccggtgccgcagcatcagtgtgtctgaacatgtggtccgcaggtagcgggactgtcgggtggg

SEQ ID NO: 220181 - DNA, 201 bp, Homo sapiens
gctgcctctgctgcaagcgggtggggcctgaggtgtcctgtctcctgcagcgcgagatggtctactgcctggagcagggcctcatccaccgctgtgccagmcagtgcgtcgtggccttgtccatctgcagcgtggagatgcctgacatcatcatcaaggcgctgcctgttctggtggtgaagctcacgcacatctcagcca

SEQ ID NO: 220182 - DNA, 201 bp, Homo sapiens
ccattctcctgcctcagcctcccgagtagctgggaccacaggcgcccgccaccacgcctggccaatttttttgtatttctagtagagatggggtttcactrtgttagccaggatggtctcaatctcctgacctcgtgatctgcccgccttggcctcccaaagtgctgggattacaggcgtgagccaccgcgcccagccatt

SEQ ID NO: 220183 - DNA, 201 bp, Homo sapiens
gcacaggagcgtttcctgggcaggtatcgcctctcagagggaagcggttggctgcagagcgccactctgcctcataggtgctgtgctcgtcgcctcatccrcccacccccatggtccgtctgcctccattgccctggggagcaggtcccgactcgcatgaggacgtctgtgcagaatgtctttggcttggccagcgggatc

SEQ ID NO: 220184 - DNA, 201 bp, Homo sapiens
tgagggcctccagcccccattgccacccctcactgtctgggtgtgctcactctgccagggcctgcggtccaatgtcctcttgtcttttgatgacaccccckagaaggacagcttcagggcccggagtactagtctcaacgagagacccaagaggtacggcctgcgggggtgtgcctggagtcggtgtggggtggggaagga

SEQ ID NO: 220185 - DNA, 201 bp, Homo sapiens
ggacagtgagtgctcacgaggtcattcccaggatgaacacacgagcccttcacacagcactgcaaaaactgccttgttctgacgcctgcgacgagactcaytcccagagggtgcaaccagcacagccagtgagagcaggggaggccctgccaccccgctgcgcccctcacctgagccccggccccagcctgtcttgacgag

SEQ ID NO: 220186 - DNA, 201 bp, Homo sapiens
gtgtgggcagagcggttgccacgcctcccagacttactgcccaagccgcctctgccttcagatctgcgaggaagccgcctactccaaccccagcctacctytggtgcaccctccgtcccatagcaaagcccctgcacagactccagccgagcccacacctggctatgaggtgggccagcggaagcgcctcatctcctcggt

SEQ ID NO: 220187 - DNA, 201 bp, Homo sapiens
gcagcaggcacacctgtggggggcgcggtcaggagggcgggagggacgctgccggggcggggccctgcgagggggcgggacgctgccggggcggggccctrcgagggggcgggacgctgccggggcggggccctgcgagggggcgggacgctgcgagggggcggggcgctgcgaggggtgagacgctgccggggcggggcc

SEQ ID NO: 220188 - DNA, 201 bp, Homo sapiens
agcagcatgtaagggttctgatttatctttttttttttttttttttttttttgatacagtctcactctgtcgcccaggctggagtggagtgcagtggcgcratcttggctcactgcaaccttcgcctcttgggttcaggcgattctcctacctcagcctcctgagcatctcgtattacaggcacctgccaacatactcggc

SEQ ID NO: 220189 - DNA, 201 bp, Homo sapiens
cagagtcgccaacagccccgtaccacacggcgttggcgcccaggaagaggcagatgaggagaacgcagcaggtggccctctggatgcgagtgaaacggctmcgaggcggccggtcccatatggagagccagatgtgcttgtcaaagaagccacgctgcagctcagccaccagcaggcgccggaagcgcaaaagggctgcgt

SEQ ID NO: 220190 - DNA, 201 bp, Homo sapiens
gtggcgcgatcttggctcactgcaaccttcgcctcttgggttcaggcgattctcctacctcagcctcctgagcatctcgtattacaggcacctgccaacayactcggctaattttttgtattattagtagaaactgggtttcaccatgttggccaggctggtcttgaactcctgacctcaggtgatcctcccgccttggcc

SEQ ID NO: 220191 - DNA, 201 bp, Homo sapiens
ggaagcgttcccacctgctgtattcttggaaagagtctgtgaaggattggtgttaattcttccttaactgcttagaaaaattctatcgtgaaggctctgascctgggcttttctttgtgggattttttttttttttttttggagacggagtcttgctccgttgcccaggatggagtgcagtggcgcaatctcggctcactg

SEQ ID NO: 220192 - DNA, 201 bp, Homo sapiens
gctgggagagaggaagaggaggcacagctcgtgccaagggcccaggcgagagcttctcccactgggagagggccgagggcactgcagaggtcggaggtcakaggtggcaaggacgtgggaggggcctgcaggctgggtgtgtctggtgcacagacccagaccctgggcagcagacaggaaggtggcctgaggagatgcagg

SEQ ID NO: 220193 - DNA, 201 bp, Homo sapiens
gagggaaggaaagaggttctgttgcccttacttggaactccagccctggaggcctgagggtctgggctgcagaactgagatatttcctagttgaggcagastcctggttctggctgctttcatttctttatttttttgagatagagtctcaccactatgtcacccaggctggagtgcagcggcacgatctcacctcactgc

SEQ ID NO: 220194 - DNA, 201 bp, Homo sapiens
agacctggcagacaggaaggagcagctgtgctgggagagaggaagaggaggcacagctcgtgccaagggcccaggcgagagcttctcccactgggagaggsccgagggcactgcagaggtcggaggtcagaggtggcaaggacgtgggaggggcctgcaggctgggtgtgtctggtgcacagacccagaccctgggcagca

SEQ ID NO: 220195 - DNA, 201 bp, Homo sapiens
ggcaagaaggctccccagcccctttgccccctttcctgggcctgcgttcccagggcctccccagcccctctggctaccccgtgacctggccgctggggagrggtttcatgcctggatttggtcatcagctttcaggcccaaagacactggagcggctccgaggcgccccagaaggcttctccagaactgacttgcacctgg

SEQ ID NO: 220196 - DNA, 201 bp, Homo sapiens
tgcaggagggcgccagggccagcgtcgtgctgcaagccaacgaggtcaccagggagcatgaggacatcctggccgtggagggtgacctgtggagagggagscagggctgcatcacgtcctcacggtcatggcccgtggacccccgcacgacggatgagggtggacacgcagggctccccgcttcgtcagccacacctcaag

SEQ ID NO: 220197 - DNA, 201 bp, Homo sapiens
tggtggcgggcgcctgtagtcccagctacttgggaggctgaggcaggagaatggcgtgaacccagggggtggagcttgcagtgagccgggatcgcgccacygcactccagcctgggcgacagagccagactcatctcaaaaaaaaaaaaaaaaaaaaaaaaagaggtgcggaagcctttcctcacggatcacacaaatggt

SEQ ID NO: 220198 - DNA, 201 bp, Homo sapiens
atagcgcccaggcagccgcagtccagggttgggcctcaagcccagcagcacggtgagctgttccgtggctgcaagcagccgcagggcacaggcagggcagscccaagtgccctccagctgggctggcaagtggggcagccatgacgaggcgttggcggagaggtacggggcctggggaccagggtggccgggagccggcga

SEQ ID NO: 220199 - DNA, 201 bp, Homo sapiens
cgcggagcagtatgccagtgtgttcgccatctccctgccgtacaccaacccctccaagtgagtggtcgccccaggccctgtgcctcccagccgtggccccsgctaggccttgcggcagaaagccccggcagcctttgtccccaaggcctgagcgcctcggttttttgcacttcatgccctggggatgtttccctgctgcca

SEQ ID NO: 220200 - DNA, 201 bp, Homo sapiens
gcggccctaagcccaggcaagagcacagagcagagtgcagggtcctctggggtcccaggcccttgctgccccacgcactcctcaccccagttcctgctatragctggaagggtgggagccaggtgcacagggacagcctgatgggtgcccgagggccaggatgtgctcccagggaagctgaagccaagcttgtcgggagga

SEQ ID NO: 220201 - DNA, 201 bp, Homo sapiens
acgtcaaagctgcaggagaggttgtgcctggacacgccattgcccacctctgcccggacctcatagcgcccaggcagccgcagtccagggttgggcctcargcccagcagcacggtgagctgttccgtggctgcaagcagccgcagggcacaggcagggcaggcccaagtgccctccagctgggctggcaagtggggcagc

SEQ ID NO: 220202 - DNA, 201 bp, Homo sapiens
cgctgtctgatgccctgcccccacgttctggttccctgcaaggatgggggacacagcagggcccaggcatctggcagcaggaccaccgagcggccctaagsccaggcaagagcacagagcagagtgcagggtcctctggggtcccaggcccttgctgccccacgcactcctcaccccagttcctgctatgagctggaaggg

SEQ ID NO: 220203 - DNA, 201 bp, Homo sapiens
cagccactggggagaccacgtcaaagctgcaggagaggttgtgcctggacacgccattgcccacctctgcccggacctcatagcgcccaggcagccgcagyccagggttgggcctcaagcccagcagcacggtgagctgttccgtggctgcaagcagccgcagggcacaggcagggcaggcccaagtgccctccagctggg

SEQ ID NO: 220204 - DNA, 201 bp, Homo sapiens
cgcagcccagccactggggagaccacgtcaaagctgcaggagaggttgtgcctggacacgccattgcccacctctgcccggacctcatagcgcccaggcakccgcagtccagggttgggcctcaagcccagcagcacggtgagctgttccgtggctgcaagcagccgcagggcacaggcagggcaggcccaagtgccctcc

SEQ ID NO: 220205 - DNA, 201 bp, Homo sapiens
aggccagtgccagccaggacaacctctgggacaatgggatgtcggctccaacgaccaatttacaagaaacacaaagcacacactcacagcaccacggaggwgacaccatggaggtggcacccccaagacacagcgagaaatccaggctgcaggagccagtttcttcaacaaattgcacaaggaaaaagagaggaagggaag

SEQ ID NO: 220206 - DNA, 201 bp, Homo sapiens
tgctgtgcagagtctgctcgggtagctcagcactgctggctctgccccacaggcattcagggacttgctaagcctcggctgttctcccggtggagcactcraggttggcgaggggtaggcgaggctgcctctgctgcaagcgggtggggcctgaggtgtcctgtctcctgcagcgcgagatggtctactgcctggagcagg

SEQ ID NO: 220207 - DNA, 201 bp, Homo sapiens
cctgagctgatgacatctacacctaggccagtgccagccaggacaacctctgggacaatgggatgtcggctccaacgaccaatttacaagaaacacaaagsacacactcacagcaccacggaggtgacaccatggaggtggcacccccaagacacagcgagaaatccaggctgcaggagccagtttcttcaacaaattgca

SEQ ID NO: 220208 - DNA, 201 bp, Homo sapiens
agtgctaccactgagaacagggtatcgttggtctcccaggggcagccgggcacgaaggtggccaccagggcagggcagacattctcaaagcgggcgctgasactgcccccaggccagcgagccgtggccgtggcgttggcaccagagtccacctggagcaccaaggctgagccgttggtgggcacgtagaggcggccgtcg

SEQ ID NO: 220209 - DNA, 201 bp, Homo sapiens
gcagacccaggtgacccccagccagggtgagtggcaaccagcaccagaagtggcctttagagcagggggccctgagctgatgacatctacacctaggccastgccagccaggacaacctctgggacaatgggatgtcggctccaacgaccaatttacaagaaacacaaagcacacactcacagcaccacggaggtgacacc

SEQ ID NO: 220210 - DNA, 201 bp, Homo sapiens
ggcgctgttttccaccaccacgtccaccacgtgctccccctcactgagccacggcagtgctaccactgagaacagggtatcgttggtctcccaggggcagscgggcacgaaggtggccaccagggcagggcagacattctcaaagcgggcgctgacactgcccccaggccagcgagccgtggccgtggcgttggcaccaga

SEQ ID NO: 220211 - DNA, 201 bp, Homo sapiens
gaacagacgcccactctggggcaccagcaggccccgcctgacagcagcaggagcagccaccacgggctcagggtcaccaagcctcctggccggtccagagwggggagcgtgagggtgagaaccggcccaccacatccagcaacagggacatgggctggggacagtggctacctctggggtgggaaggggctcttcctcact

SEQ ID NO: 220212 - DNA, 201 bp, Homo sapiens
cacagatgggctcctccgccgtcacccgcaggctgaggttggcccggctggcgctgttttccaccaccacgtccaccacgtgctccccctcactgagccayggcagtgctaccactgagaacagggtatcgttggtctcccaggggcagccgggcacgaaggtggccaccagggcagggcagacattctcaaagcgggcgc

SEQ ID NO: 220213 - DNA, 201 bp, Homo sapiens
gcagcagacccaggtgacccccagccagggtgagtggcaaccagcaccagaagtggcctttagagcagggggccctgagctgatgacatctacacctaggycagtgccagccaggacaacctctgggacaatgggatgtcggctccaacgaccaatttacaagaaacacaaagcacacactcacagcaccacggaggtgac

SEQ ID NO: 220214 - DNA, 201 bp, Homo sapiens
gcaggggtgggggcaggtcagccgaggaccccagagccccccggctccccgcccatcccactgtgaaccaggcctgggggtgccatggacacttcttccaygccagcaggcagccctgcctgtcaccggttctggccatgcactccctgcgtgccaggctccaggctggctccttctcccggccctcaccccagcccaagg

SEQ ID NO: 220215 - DNA, 201 bp, Homo sapiens
ctgtgtcgaagccacacaggcccagtggaaactgagcggcgtctggtcgccgtcctccaggttggggtcgtaggactcgctcccatccagcaccaggtccygtgtgtctgaccacacgcggtatgagccaccctcaatgatgggcaccaggcgctcgggggccaccgtcacattggcctggatgctctgtgtcagtggcgt

SEQ ID NO: 220216 - DNA, 201 bp, Homo sapiens
atgaggtctgtgtgaccgtaggcactgcctcctcgcctgtaaacagatggtcactgcaccttcctcttatgggatgttctggggatcatatgaggcagttstcgcagagtgctgagatcgtacctggcagctggtgtggggctacggtgttgttttgcccttgcaccctttcggggccactcccctgctcactgcattcca

SEQ ID NO: 220217 - DNA, 201 bp, Homo sapiens
ctggctggcatcaccacctgcctgctcccagctgcaccagttcctcctgccatagtctggactacccctggggtccctgggtgcctatgggaatccaactytggccaattctgcagaagtcccagcgggactagcgcagaggccctgtccgtgtccctcactgctcactgcagtgcttggcccccagcaggtcctcaacgg

SEQ ID NO: 220218 - DNA, 201 bp, Homo sapiens
taataaactccaaactctatcctggcatcaaagctcctgccaccctggctggcatcaccacctgcctgctcccagctgcaccagttcctcctgccatagtytggactacccctggggtccctgggtgcctatgggaatccaactctggccaattctgcagaagtcccagcgggactagcgcagaggccctgtccgtgtccc

SEQ ID NO: 220219 - DNA, 201 bp, Homo sapiens
ccgtggcctggccagccccccaaggaagctgtgtctctggcagttgcgctctaaggcatcaggcctaggggtcgctccagaatgcctgtcttccccgacgscaatcccaggcaggggccccggggtctgcgcctgctgtccctacactctcccacactctcctgtcattcagggatgcaggtgggaaagggcaaggccccg

SEQ ID NO: 220220 - DNA, 201 bp, Homo sapiens
tggtgacaatccctagtcctcgctctcaggatccagggaccagaaatgggagccaggggcccctccgtggcctggccagccccccaaggaagctgtgtctstggcagttgcgctctaaggcatcaggcctaggggtcgctccagaatgcctgtcttccccgacgccaatcccaggcaggggccccggggtctgcgcctgct

SEQ ID NO: 220221 - DNA, 201 bp, Homo sapiens
cgggtgtccatcctcccaaggtgctgtctgcaggggagggtgccagccaaaagccaccgggtagaaagaaaacaaggaccttgctaagatggggggtcatytgggcagatggggcccctgcctacctttgggggggcactggagtcatagcagtgctcagtccccagatggtccacaggtgcatcctttttgttcctcatg

SEQ ID NO: 220222 - DNA, 201 bp, Homo sapiens
gcgcctccctccccaccctcctcccccattcccccagcgcctccctccctaccattcccctcctgtccccgcagagcctccctccccaccctccccctttmtccccccagcacctccctccccaccccacctgctgaggggatactcttcctcctccctcctcagtccttacctccccactctgccctcatctcattccag

SEQ ID NO: 220223 - DNA, 201 bp, Homo sapiens
gggtctgtctgcacccaactgccaagaagcctccggtgctaggaagagacaccaggacctgggaaaaggattcaaggagggccctccccccagtgcctccmtccccaccctcccctcttctccctctcaaccctcccctcttctccccgcagcacctccctctccaccctccccccatcctcccagcgcctccctccccac

SEQ ID NO: 220224 - DNA, 201 bp, Homo sapiens
gggcgggagggacgctgccggggcggggccctgcgagggggcgggacgctgccggggcggggccctacgagggggcgggacgctgccggggcggggccctrcgagggggcgggacgctgcgagggggcggggcgctgcgaggggtgagacgctgccggggcggggccccgcgagggggcgggacgctgccggtgggaggcg

SEQ ID NO: 220225 - DNA, 201 bp, Homo sapiens
gtcgtaggactcgctcccatccagcaccaggtcccgtgtgtctgaccacacgcggtatgagccaccctcaatgatgggcaccaggcgctcgggggccaccrtcacattggcctggatgctctgtgtcagtggcgtgtccccaaatgacacgacaaacacaaagcagtagtgccccacaggcagcgccagccgcggcagcac

SEQ ID NO: 220226 - DNA, 201 bp, Homo sapiens
gagggcaggggagggagctcccacctgttgtccagccagttgtgcagctgcaggaagcgcagccggtcgcggctctcctccaggctcaggcccagctcctrcacgtagcccccgctgtcatacacggcacaggagccccaggaccatgccctgccggagaggggtggcgtgggtgccgcaccccagcccttccggcacccc

SEQ ID NO: 220227 - DNA, 201 bp, Homo sapiens
atccggtttgccaccttccaacttggacggcggaagggcatacacagggcagaggacactggagtgtgcgttctggtgtactggacccagctggaccctarcaggaggcaggcaatgctcactgagggcccctggggggatgcgtgtgagaagagacgtatgtgtgggtgtgaggaccgcagctgccacgtaggcctgact

SEQ ID NO: 220228 - DNA, 201 bp, Homo sapiens
catccggtttgccaccttccaacttggacggcggaagggcatacacagggcagaggacactggagtgtgcgttctggtgtactggacccagctggaccctrgcaggaggcaggcaatgctcactgagggcccctggggggatgcgtgtgagaagagacgtatgtgtgggtgtgaggaccgcagctgccacgtaggcctgac

SEQ ID NO: 220229 - DNA, 201 bp, Homo sapiens
gatgctgctcccaaactccaggtttcccaggggcctggccactgccggtgagctcactccctcccaggatactcatccggtttgccaccttccaacttggrcggcggaagggcatacacagggcagaggacactggagtgtgcgttctggtgtactggacccagctggaccctagcaggaggcaggcaatgctcactgagg

SEQ ID NO: 220230 - DNA, 201 bp, Homo sapiens
ggaggatgctgctcccaaactccaggtttcccaggggcctggccactgccggtgagctcactccctcccaggatactcatccggtttgccaccttccaacytggacggcggaagggcatacacagggcagaggacactggagtgtgcgttctggtgtactggacccagctggaccctagcaggaggcaggcaatgctcact

SEQ ID NO: 220231 - DNA, 201 bp, Homo sapiens
gggcctcggggctgggcgtggcgcggaggccacagatgggctcctccgccgtcacccgcaggctgaggttggcccggctggcgctgttttccaccaccacrtccaccacgtgctccccctcactgagccacggcagtgctaccactgagaacagggtatcgttggtctcccaggggcagccgggcacgaaggtggccacca

SEQ ID NO: 220232 - DNA, 201 bp, Homo sapiens
acacaatgggcacccggccactccggatcagcacctggcgtgggagtggggttacctccaacacaggtctatttggcctgctggaaggactgggggacccrtggaggatgctgctcccaaactccaggtttcccaggggcctggccactgccggtgagctcactccctcccaggatactcatccggtttgccaccttccaa

SEQ ID NO: 220233 - DNA, 201 bp, Homo sapiens
tgccctcactgggaagccaggcctcacgccctgtgtgagcaccctgtctgcaggcacctgcctgggggctggtggtggagcctcggccatactcaccactrggactccctgcagtacacgggcctcggggctgggcgtggcgcggaggccacagatgggctcctccgccgtcacccgcaggctgaggttggcccggctggc

SEQ ID NO: 220234 - DNA, 201 bp, Homo sapiens
ggcaagctgggtgttctctgggctcatgggtgtggacgggtgaggggcatggaggacggccctgccacgcactgacctgtgtcgaagccacacaggcccastggaaactgagcggcgtctggtcgccgtcctccaggttggggtcgtaggactcgctcccatccagcaccaggtcccgtgtgtctgaccacacgcggtatg

SEQ ID NO: 220235 - DNA, 201 bp, Homo sapiens
cacactccaaggacacaatgggcacccggccactccggatcagcacctggcgtgggagtggggttacctccaacacaggtctatttggcctgctggaaggwctgggggacccatggaggatgctgctcccaaactccaggtttcccaggggcctggccactgccggtgagctcactccctcccaggatactcatccggttt

SEQ ID NO: 220236 - DNA, 201 bp, Homo sapiens
gcagagggcgtgagagactcacgggggctcgtgtgaggtcagggagcagagttttaaattcattttgtgaaatgagacagtggaatgagttagcggagccrctgtcagagccgtgactttccaggaatttaaagcccaccaggtagcccgaggagccagccagcaggacctgcccggggccgacgtccccagtaactgggc

SEQ ID NO: 220237 - DNA, 201 bp, Homo sapiens
cagacggcctggcggggcgaggtctcctccaggggcagcagcccctctgtccgccacaccatgtcctcctcgctgaagtactggcacagggacgtgtacargcccacggacacctgcagcgccgaccagcggaagtggctggagaggttcagatggtaactccccgctgggtctctgctcctgggcagggaaggggtagcg

SEQ ID NO: 220238 - DNA, 201 bp, Homo sapiens
gtggaatggtgaccgtgctgctcccgcggggcccaaagttcagcgcacacccgccagcctccctctgcaggccgagaacaaggggcgacgtggcctgagarccccatccagttttaaagcagagcccggcccaggagacagcgcgggagaccccctccccatgctgggacggggcccaccaggcactgaggacgggccagc

SEQ ID NO: 220239 - DNA, 201 bp, Homo sapiens
agcggccctccaagtacacgtaggagctgcggctcacttcgtacacggcctgtgccttgcaggacacacactccaaggacacaatgggcacccggccactscggatcagcacctggcgtgggagtggggttacctccaacacaggtctatttggcctgctggaaggactgggggacccatggaggatgctgctcccaaact

SEQ ID NO: 220240 - DNA, 201 bp, Homo sapiens
gctttagccaggcgagaacacagcagagggcgtgagagactcacgggggctcgtgtgaggtcagggagcagagttttaaattcattttgtgaaatgagacrgtggaatgagttagcggagccactgtcagagccgtgactttccaggaatttaaagcccaccaggtagcccgaggagccagccagcaggacctgcccgggg

SEQ ID NO: 220241 - DNA, 201 bp, Homo sapiens
aagccggggcggcctccatccctgaacacccgcccagcccctgccagcctccagccctgctcctcccaccggagctccgctcccacaggagcctacccggsgcaggagagacgcacacacaggctgcccggtggggcccggggccagggcaagagcttgagaagggaaccaacaaagaaggggaccagaggccaccccagc

SEQ ID NO: 220242 - DNA, 201 bp, Homo sapiens
cccctcgcttggagccgctgctgcaattgaggcagcggccctccaagtacacgtaggagctgcggctcacttcgtacacggcctgtgccttgcaggacacwcactccaaggacacaatgggcacccggccactccggatcagcacctggcgtgggagtggggttacctccaacacaggtctatttggcctgctggaaggac

SEQ ID NO: 220243 - DNA, 201 bp, Homo sapiens
aggggttcagactccacctcaaaagccactcgctttagccaggcgagaacacagcagagggcgtgagagactcacgggggctcgtgtgaggtcagggagcrgagttttaaattcattttgtgaaatgagacagtggaatgagttagcggagccactgtcagagccgtgactttccaggaatttaaagcccaccaggtagcc

SEQ ID NO: 220244 - DNA, 201 bp, Homo sapiens
caggtgcctccgcctagacttgctcttcccagcaatgaccacccggcagccagccccaagccggggcggcctccatccctgaacacccgcccagcccctgycagcctccagccctgctcctcccaccggagctccgctcccacaggagcctacccggcgcaggagagacgcacacacaggctgcccggtggggcccggggc

SEQ ID NO: 220245 - DNA, 201 bp, Homo sapiens
agggtcaccaagcctcctggccggtccagagaggggagcgtgagggtgagaaccggcccaccacatccagcaacagggacatgggctggggacagtggctrcctctggggtgggaaggggctcttcctcactgttggtattgctaggggactgtgtagcttttgccactagagcatatgtggcttgaagactgtacgtgga

SEQ ID NO: 220246 - DNA, 201 bp, Homo sapiens
aacctctctgtgcctcagtttccccatctgtaaagcaaacctagtaccagctacaaagagtccacctctctctgagtcttctcagaccctcccggcgctcytgccccagctcctcacccagagagctcggagcagtgaggggaggcacctacactggcttacagaacccaggacaggctgcacaggtcacgccatttctga

SEQ ID NO: 220247 - DNA, 201 bp, Homo sapiens
tccccaggtgtcaccctccccacgagtgacccagcaggtgcctccgcctagacttgctcttcccagcaatgaccacccggcagccagccccaagccggggsggcctccatccctgaacacccgcccagcccctgccagcctccagccctgctcctcccaccggagctccgctcccacaggagcctacccggcgcaggagag

SEQ ID NO: 220248 - DNA, 201 bp, Homo sapiens
cgtgttggttgaacgcgggctccagtgataacggagccctcgagggtggccctccttctgctgagggctcatggaggccttggtgacaatccctagtcctygctctcaggatccagggaccagaaatgggagccaggggcccctccgtggcctggccagccccccaaggaagctgtgtctctggcagttgcgctctaaggc

SEQ ID NO: 220249 - DNA, 201 bp, Homo sapiens
cacccctcctggtcccacgcactcccagtagtgctcctggcacagggactatggctccgcaggtctgcacaccacccccctgctccccaggaccccgaggyctcacctcctgccacgggcctctacttccccaggtgtcaccctccccacgagtgacccagcaggtgcctccgcctagacttgctcttcccagcaatgacc

SEQ ID NO: 220250 - DNA, 201 bp, Homo sapiens
gagccggcctccaccacggggctgtacctctgcggggggaatggtgtcagcctgggctctgtggaggactctgcccttagcctgtcgcctcctggacacamctcccgtcgggctggagagtcccacgcggggcacagaggagaggaggtgcccggggctctgcatgccatgggagccaagcccgggctgggacactcactg

SEQ ID NO: 220251 - DNA, 201 bp, Homo sapiens
gggctcttcctagaagacacaggcctctcctaggctctcctgacagaggccctacccctgcccccgagtcaccttgccccttggggactctctctgggcarctccctgtgggagctttgaaacctggcttcaatgtcacctgcactgggggtccttccaggccagccccctccccatcatccatctctgtccttggagaat

SEQ ID NO: 220252 - DNA, 201 bp, Homo sapiens
ccccgcccacctactgagagcttgaagaccgccgcgctctgataaatgacattgaagaccacgttctggaaggtcagggactgcttgtcgttgatggtccrccggaagaccatgtccgagccggcctccaccacggggctgtacctctgcggggggaatggtgtcagcctgggctctgtggaggactctgcccttagcctg

SEQ ID NO: 220253 - DNA, 201 bp, Homo sapiens
ccatggcagcgtcctcgggcagcatgaagcagagcagaaggcagaggtgaaggtggagcccgcccccgccctgccccgccccatcccctcccctccccacycccgcccacctactgagagcttgaagaccgccgcgctctgataaatgacattgaagaccacgttctggaaggtcagggactgcttgtcgttgatggtcca

SEQ ID NO: 220254 - DNA, 201 bp, Homo sapiens
ctaataaagaaactaccgtttctcacgcaggcacgttctgaacgcccgagtgcgggagccacgtaagacccggctcagggaccccgggtgaggccagctgsacatgcaggatgcaggtcctcaccactgcctccgctcggctgccagggctcttcctagaagacacaggcctctcctaggctctcctgacagaggccctac

SEQ ID NO: 220255 - DNA, 201 bp, Homo sapiens
aaaaagaagaaaaggaaactgggtgtggtggcttatgcctgtaaacccagtgctttgggaaggccaggagtttgagaccaggatggacagcatagcaagaycccatctctacaaggaaaaaaagaatcagccaggcatggtagtgtgtaactgtagttccagctactcggggggctgaggaggaaggatcgcttgagccag

SEQ ID NO: 220256 - DNA, 201 bp, Homo sapiens
acgttgtagttcacggtgacgttgctcacgtggttggaggccgtcagctgcagggacaggcgtcagtgagcccaggtggcaggtgagaggcctggccctgmttggcgtccctccctccactcacccacagccatggcagcgtcctcgggcagcatgaagcagagcagaaggcagaggtgaaggtggagcccgcccccgccc

SEQ ID NO: 220257 - DNA, 201 bp, Homo sapiens
ccacatttttgtccacaagtttggcgagtttgcatccgcgtctaataaagaaactaccgtttctcacgcaggcacgttctgaacgcccgagtgcgggagcmacgtaagacccggctcagggaccccgggtgaggccagctggacatgcaggatgcaggtcctcaccactgcctccgctcggctgccagggctcttcctaga

SEQ ID NO: 220258 - DNA, 201 bp, Homo sapiens
aaaattagaaaacaaactacaatctcagaaaagcactagcaacttacacgacatactaaaggccaaaaataccctcctgacacacagctaataaagaaaamgtcaactattccagttaaaaagaagaaaaggaaactgggtgtggtggcttatgcctgtaaacccagtgctttgggaaggccaggagtttgagaccaggat

SEQ ID NO: 220259 - DNA, 201 bp, Homo sapiens
cccctgccggcaatcgcgtacaggagtgagcgtgtgacttcttgtccacatttttgtccacaagtttggcgagtttgcatccgcgtctaataaagaaactrccgtttctcacgcaggcacgttctgaacgcccgagtgcgggagccacgtaagacccggctcagggaccccgggtgaggccagctggacatgcaggatgca

SEQ ID NO: 220260 - DNA, 201 bp, Homo sapiens
gaccagccgacctaactccatctaaaatacacaacttctacgcaaaatataaataaaattagaaaacaaactacaatctcagaaaagcactagcaacttasacgacatactaaaggccaaaaataccctcctgacacacagctaataaagaaaacgtcaactattccagttaaaaagaagaaaaggaaactgggtgtggtg

SEQ ID NO: 220261 - DNA, 201 bp, Homo sapiens
ccttcccccacccctgccggcaatcgcgtacaggagtgagcgtgtgacttcttgtccacatttttgtccacaagtttggcgagtttgcatccgcgtctaakaaagaaactaccgtttctcacgcaggcacgttctgaacgcccgagtgcgggagccacgtaagacccggctcagggaccccgggtgaggccagctggacat

SEQ ID NO: 220262 - DNA, 201 bp, Homo sapiens; identical to SEQ ID NO: 39379

SEQ ID NO: 220263 - DNA, 201 bp, Homo sapiens
ccccatcccttcccccacccctgccggcaatcgcgtacaggagtgagcgtgtgacttcttgtccacatttttgtccacaagtttggcgagtttgcatccgygtctaataaagaaactaccgtttctcacgcaggcacgttctgaacgcccgagtgcgggagccacgtaagacccggctcagggaccccgggtgaggccagc

SEQ ID NO: 220264 - DNA, 201 bp, Homo sapiens
ttgttgaatcatagtgttccctgtatgatctggatgcaagccgatactgcatggatgacctgcaggtgctctctgtctccacagtcgcctctgcagtgggmgctcgggtgccccacattcccaactgctgcagacacaaccaaagcctccccatcccttcccccacccctgccggcaatcgcgtacaggagtgagcgtgtg

SEQ ID NO: 220265 - DNA, 201 bp, Homo sapiens
ctctcctaaagtgctgggattacaggcgtgaggcaccgcgcccggctggacagtggttttgatttacgtttccctcatgactaatgaggccgaccatcttytcacacgctgttggccatctgtgcgtcttctttggagaaatctctgttcagatcctgtgatttttttttttttttttttttttttttgagacagggtctt

SEQ ID NO: 220266 - DNA, 201 bp, Homo sapiens
catccaactggtccagcttgtgcaggatggcggccatgaccatgtaggtcaccaggcacacagcacatgtcagcatgacgatgtagtttacatccgctgtyggctcctgtgaggacacagccgccgggcccaggaggtcacgtgcaagctgtgccttctcaggatagagccgagcccacccaggccctcctcgactctgca

SEQ ID NO: 220267 - DNA, 201 bp, Homo sapiens
ggagggcggcctctggacaggcccctcattccgcgcggcagctcccaggcctggggaacgtaggtgtgtgagagcggcacccgggaaggacgcctggcctytggctcagccctgcttggcgggctcccccgtggacaccctgttgactttgcacttccctcccgggccccgcacccccgaaccgaccaccgatcgaccggc

SEQ ID NO: 220268 - DNA, 201 bp, Homo sapiens
tcccccctcccccgagagccggacactcacaggctgctgagcaggtccgtttccatgtgggtgtcttgggtaggggctgggctgctgaccccctcggcaakgacctgctggatcaggtcttcatctagaggtacaggaggcatagggtgggcccagctgcaagggtgagcttcagagccccctcctctcaccccagctcac

SEQ ID NO: 220269 - DNA, 201 bp, Homo sapiens
gctgctgagaatagacttcatcatgtgcttcagaagaaagaggtacgagtgagcagttgcctttgattagtgcctgtttccctttcccgactgcatggcamggagcagctggacctgtgggtcccgcaccacttccccttctccaggacctaacatcaaaggcgggccttggagcaatagatggaggagtttgctgaggcg

SEQ ID NO: 220270 - DNA, 201 bp, Homo sapiens
taaaaacctcacaggggcagatgccattgccacaggtcactatgcaagaacttccctggaagatgaagaagtctttgagcagaagcacgttaagaagcccraagggcttttcagaaatcggtttgaagttagaaatggtaagttcatgtgcccaggtcagagccaaattcttgtgaacagattgaaatctttggaggaatg

SEQ ID NO: 220271 - DNA, 201 bp, Homo sapiens
agctggcgaagttgggcgactggcggatgcaggccttgcggcacgtcgtgtgcgccctgtccggcggcgtggacagcgccgtggccgcgctgctgctgagkcggagaggtgaggcgtccgaggctcccgccccccgccgagcgaatgtgtccccggaaacctgtccccgtccgtcgtggcgttgtgcacgtctcctccctc

SEQ ID NO: 220272 - DNA, 201 bp, Homo sapiens
gatgaatttctgtgggtagaacacttcgagcggtgccagcaccgttacctgtgtgtgtgtgtgctggtaggacagttgttcccagggaccacactgaggcyggccttggggccaggtgcccctcggcgtccccaccttcacattccattctgcaggccccccggacagaccacccagccctgtacagggacctgctgagga

SEQ ID NO: 220273 - DNA, 201 bp, Homo sapiens
tgtgggggtgagcccggggaggactgtactgctctgcaccctgccagggcacccgggttacagaggaaggggctgaggcccaggagtagggtgtgctcggstcacacagctggtgagggcagagtgccaccagccctgccctgggggctcctcccacagtgacaactgtgagaggatttccactctggtgtcaccaaccag

SEQ ID NO: 220274 - DNA, 201 bp, Homo sapiens; identical to SEQ ID NO: 39739

SEQ ID NO: 220275 - DNA, 201 bp, Homo sapiens
gtggttgcaggtagagggcctgagtcagacttgaacctgcagcattcactgtcatgggctcggatctcacccctgcctcttgcccactctgacatggtacytccttcctgggccttagtctcctcatctgtaaaatggggattcaaaggcccggcgggtgatgagatgaatttctgtgggtagaacacttcgagcggtgcc

SEQ ID NO: 220276 - DNA, 201 bp, Homo sapiens
cagtctcccctctgtaacgtggggagaattctccctctcacggctaacgtgggaatcggcagatggaaaacactagctacgcagagtgtgtactgtacacrtggctctgccaagccaggaagggtaggtgtgctgtctgaccgtcacggcatgtggcgtgctctgagtgtaactcgaaaggagaagtttatgagaaagatt

SEQ ID NO: 220277 - DNA, 201 bp, Homo sapiens
cctttcctgggactggccatggtggcaggagagttttaaggtattcattaggctgagttgtatgctggtctcttaatcatccctgaaccccgatacacagrtacagtttctccaattttatgaaagaggacagcgacgcccagagcttgggtggctcatccggtggagagggcatggcctcagtgccaaggatggtgccca

SEQ ID NO: 220278 - DNA, 201 bp, Homo sapiens; identical to SEQ ID NO: 39741

SEQ ID NO: 220279 - DNA, 201 bp, Homo sapiens
ctgatgccagggtctctcccctacagtttgctgtgttctacaagggggacgagtgcctgggcagcgggaagatcctgcggctggggccgtctgcctacacrctccagaagggccagcgcagagctgggatggccactgagagccccagtgacagcccagaagatggtccaggcctgagtcccttgctctgacagagatgga

SEQ ID NO: 220280 - DNA, 201 bp, Homo sapiens
caggctggggctctggctgctggagcatctgctggctggtggggtggcccgagttccccttcaccgcccccagggagggtttcccacctcagagtacaccraggggacctgcagagggggctgtcgggacagcgtggaataaacattatttcaaggacacatagtctgatcgctgcttccactggggcccagggggctcca

SEQ ID NO: 220281 - DNA, 201 bp, Homo sapiens
ccgtgtcctgtgcctgccctgagcgaggcctgggggtgctgggagcagatgcaggcaggccccggcgtgttgggctgaagcaagtgtgtacactgccccgyagtgtcctgctgcgtccagggcccaggctggtgccctgcccttcccctctaagcaggggtttttgaccccgtgggctggtgctcctttctccctgggggc

SEQ ID NO: 220282 - DNA, 201 bp, Homo sapiens
gacatggtacttccttcctgggccttagtctcctcatctgtaaaatggggattcaaaggcccggcgggtgatgagatgaatttctgtgggtagaacacttygagcggtgccagcaccgttacctgtgtgtgtgtgtgctggtaggacagttgttcccagggaccacactgaggccggccttggggccaggtgcccctcggc

SEQ ID NO: 220283 - DNA, 201 bp, Homo sapiens
taaaaaccgtggaatcatggtgttacatcctcgccctgctgaacagtgccgggcattttcccgtgttagtaaacattctctgtaaggacccccattgttayggcagtgcattgtcattcacttcacattctcccagtgttgaacattttggttcttttttttttttttttcctcctgagacagcatcttgctctgttgccc

SEQ ID NO: 220284 - DNA, 201 bp, Homo sapiens
atgtggaaaaacatgagtttttatgaacttctagggggactgagaagtaggaaaacagtttggtgcctgctaaagtggaagatatccaaggaacctctgaycctgtgcagatctgtgatatgtctgcaaaacacaaacctcttgatcagcactggttttttttttaacccttgttgattaatagagagttttaggttaaat

SEQ ID NO: 220285 - DNA, 201 bp, Homo sapiens
tttctgtaggttggttcctgtataccttgggccagagagcaaacataggtggcctgagagagccctggtacgtggtggagaaggacagcgtcaagggtgaygtgtttgtggtgagtgggccggcctctgagacagcactggggctggttctggcagggccagcagtgcttccagaccagggcttgagaaggcctccagcag

SEQ ID NO: 220286 - DNA, 201 bp, Homo sapiens
gtccagatgagggaacggcagtgcaaaggccttgaggcgaggagaagccagggagccgctgtgggggtgcctgcctgtggccccagctcctcaggaggatygagcgcacccaggagtttgaggacagcctgggcaacacagcgaaactcgtctcaaaaagagagaacccggagtgttggcggaactaggatgaagcccgtg

SEQ ID NO: 220287 - DNA, 201 bp, Homo sapiens
ttcaggggccagtgcggtgggagctgttgctccttcgtgtctcttcctggtaatggaaacggccatacctttcatcagagccatcttccctgaagagcacrcccaccgcccgtcctcctctcctcttgttttccgtttccggtgtcgctctgtggtgggagccgcagggatggaagggcagtcttgagagacacaaaccag

SEQ ID NO: 220288 - DNA, 201 bp, Homo sapiens
gacgtgtttgtggtgagtgggccggcctctgagacagcactggggctggttctggcagggccagcagtgcttccagaccagggcttgagaaggcctccagmagccgtggcttcctggaggctgtgactaactctgttcctgtccttggtcccctgcctttcctgggactggccatggtggcaggagagttttaaggtattc

SEQ ID NO: 220289 - DNA, 201 bp, Homo sapiens
gggccaggtgcccctcggcgtccccaccttcacattccattctgcaggccccccggacagaccacccagccctgtacagggacctgctgaggaccagccgygtgcactggattgcggaggagcctcccgcagcactggtccgggacaagatgatggagtgccacttccgattccgccaccagatggcactaggtgactgac

SEQ ID NO: 220290 - DNA, 201 bp, Homo sapiens
ttctgggaacacataaaggtgaggtgcagactctgccacttgtcatctgaaatgcctagagctgtggcgtttcagctctgggagactagaccagagttccygtcgtcccttccacttggctggagaattgtagaaggctctgtggggcggccgggggcgggcacggcctagggtggaacagttgccttgatggtggctggg

SEQ ID NO: 220291 - DNA, 201 bp, Homo sapiens
ccttgtggtgcctactgctctgccctaggtgaaccctcccaggtcacagaaacatgagtaggtgggaggtggggcagccaggcagaaggtggtgtgggcascaggccagcagcgctaaggctgcccccgctccaacctccagcgggctccaccgtcctgccagcctcagggcctgtgcatcggccagtggaggaagcgggg

SEQ ID NO: 220292 - DNA, 201 bp, Homo sapiens
gtttcatcatgttggccaggctggtctcaaactcctgacctcaagtgatccacccacatcggcctcctaaaagtgctgggatgacaggcgtgagccgctgygcctggcccaaatatctggaatttttacacaatgaaaaggttctggattcatatgcaccttgttaggctctttggctttgtgtaatatgaaaagaagaaa

SEQ ID NO: 220293 - DNA, 201 bp, Homo sapiens
tgcccatctaggctgtggcaggcctactagggaatggacaaaaagttccggcacgttccactggctgagggagcatgggacacggacagctcagctgcacrtccgtaaaccgtcccttccacggccaccctgggcatggggaggggcgggggtgtttgtggagaaaaaccagcaccgcagaagtacaaattcaaaaatctt

SEQ ID NO: 220294 - DNA, 201 bp, Homo sapiens
gtgcagactctgccacttgtcatctgaaatgcctagagctgtggcgtttcagctctgggagactagaccagagttcctgtcgtcccttccacttggctggmgaattgtagaaggctctgtggggcggccgggggcgggcacggcctagggtggaacagttgccttgatggtggctgggtgcacttccagatgtggcctcag

SEQ ID NO: 220295 - DNA, 201 bp, Homo sapiens
cagggttttagtgagaccctcacggccactccccactcctgaccccataagccctgtgagcctacacagagacggtggctcctgagccgtagtggcagagwataacaccttgtcgggtggcccatgcagcaggttataaacaaatgttcgatgactgacgttctcctgttttgcagaaaattatagttttggtatgacaag

SEQ ID NO: 220296 - DNA, 201 bp, Homo sapiens
gacagcactggggctggttctggcagggccagcagtgcttccagaccagggcttgagaaggcctccagcagccgtggcttcctggaggctgtgactaactstgttcctgtccttggtcccctgcctttcctgggactggccatggtggcaggagagttttaaggtattcattaggctgagttgtatgctggtctcttaatc

SEQ ID NO: 220297 - DNA, 201 bp, Homo sapiens
ctggaccgaggtctgggggcggccctggaatctgctttaataagcacttcagctgtgctggtggtgtggggggttgtcagggtctttctttgagaaaaggkgtgatgcggcttagggactgatgtgtgtgggagaccagagaggagaggagtcagcagtagtttcaagatcaaggctgggtggctggggaaagctggttta

SEQ ID NO: 220298 - DNA, 201 bp, Homo sapiens
gttgttttgggtactatatgaagccttcttcagcagtcatttgccctgtctttcattacattcagcctacctaaacgaaccagctttctcatacagggtckgcacctgtgtagtttgctaaggtggtgtagggctaaagttggcctttccaatatttgggtgaatattttgttacaatcgaaaaggtagaaaataggtcat

SEQ ID NO: 220299 - DNA, 201 bp, Homo sapiens
tgggtgccccaggcctctcctctcctgttcagcagcagcagcagcagcaaaaccctgctcccctgggagctcagtgcctggtgctccgagcacaggccagsccccataggggagcactctgcccctgcctgccctcggctggctccctgtggcacccctgatgccagggtctctcccctacagtttgctgtgttctacaag

SEQ ID NO: 220300 - DNA, 201 bp, Homo sapiens
agcattcctcgggcccggcgctgaaatgagcacttgtttaacttcacctgtgtggctccccgcgggaggcctcattcacagagtcacgtttgtggagctckgctttgcgccatctttggctcctgaccttgggcaagtgaattaagccgtcccctgtaaaattcggctaacacctgcctcacggggtgactggagggatta

SEQ ID NO: 220301 - DNA, 201 bp, Homo sapiens
cctgtccggcggcgtggacagcgccgtggccgcgctgctgctgaggcggagaggtgaggcgtccgaggctcccgccccccgccgagcgaatgtgtccccgraaacctgtccccgtccgtcgtggcgttgtgcacgtctcctccctccctgggccgctggttgcgcgcgggtcggcaggaggataccccgtcctctgacttt

SEQ ID NO: 220302 - DNA, 201 bp, Homo sapiens
ttgcggcacgtcgtgtgcgccctgtccggcggcgtggacagcgccgtggccgcgctgctgctgaggcggagaggtgaggcgtccgaggctcccgccccccsccgagcgaatgtgtccccggaaacctgtccccgtccgtcgtggcgttgtgcacgtctcctccctccctgggccgctggttgcgcgcgggtcggcaggagg

SEQ ID NO: 220303 - DNA, 201 bp, Homo sapiens
  misc_feature (1)...(201): n = A,T,C or G
cggccggggcgggacttccggcaaggcgcggaagcggcggtagctgcagctggcgaagttgggcgactggcggatgcaggccttgcggcacgtcgtgtgcnccctgtccggcggcgtggacagcgccgtggccgcgctgctgctgaggcggagaggtgaggcgtccgaggctcccgccccccgccgagcgaatgtgtcccc

SEQ ID NO: 220304 - DNA, 201 bp, Homo sapiens; identical to SEQ ID NO: 39745

SEQ ID NO: 220305 - DNA, 201 bp, Homo sapiens
gaagcacgttaagaagcccgaagggcttttcagaaatcggtttgaagttagaaatggtaagttcatgtgcccaggtcagagccaaattcttgtgaacagaktgaaatctttggaggaatgacagtgggttgtgcctgaggatcactgccacccctccctctgtgctccagagtagcttgtatgggattcacatttgaaaag

SEQ ID NO: 220306 - DNA, 201 bp, Homo sapiens
ggctggattgcagtggtgcgatcatgactcactgcagcctcgacctcctgggctcaagagattctcccaccccaggctcctgagtagcttggaccacaggyatgccaccatggtggctaattttttgtggagatggtgtcacaactgtattgtccaggctggtctcagatttctggccttaagcagtcctcctgcctcggc

SEQ ID NO: 220307 - DNA, 201 bp, Homo sapiens
atcaaatttagttgcttttttcattatgctgtggataatcttggtaagtaatttgggtttaaaacatttttttttttaaagacagggtctcgctctgtcamccaggctggattgcagtggtgcgatcatgactcactgcagcctcgacctcctgggctcaagagattctcccaccccaggctcctgagtagcttggaccac

SEQ ID NO: 220308 - DNA, 201 bp, Homo sapiens
aggaattggtgacgcgcacacagttccatcttcgcctccatggagcccgcccgcgagtgggggacacaggcaggaggccaatcagtgtaaacctagaaaaygtctacggagggaggtgtaggaccctgggtgggaagcaccagtggggtctgagagtagggaatggagatgccaaaaacggcctcaaaagaagtcacatgg

SEQ ID NO: 220309 - DNA, 201 bp, Homo sapiens
ctgcccctatgtggtaggcagctttccccacagccttagcagctggtggggtgctcttgggatggcctgcctgccaggtgagtgccaggcagtgtgatgcrgccccgagacccctggaggggcaggtgctgtgccgccgtctgcacactcatgtgccctgtcacccgcttgcccggcacagactcgttcggtgccatctgt

SEQ ID NO: 220310 - DNA, 201 bp, Homo sapiens
tcccctacagtttgctgtgttctacaagggggacgagtgcctgggcagcgggaagatcctgcggctggggccgtctgcctacacgctccagaagggccagygcagagctgggatggccactgagagccccagtgacagcccagaagatggtccaggcctgagtcccttgctctgacagagatggatctgctagaaggaacc

SEQ ID NO: 220311 - DNA, 201 bp, Homo sapiens
aaaaggtgtgatgcggcttagggactgatgtgtgtgggagaccagagaggagaggagtcagcagtagtttcaagatcaaggctgggtggctggggaaagcyggtttaggggattcctcatgagtactgtagagtttgaggggacaacagggaatccaagtgagcttacacttcacctgccagcacagctttttcagaacgt

SEQ ID NO: 220312 - DNA, 201 bp, Homo sapiens
gaagcccgtgggagggccttggggatggagggcgagggcgctgtgggatgagcctcacctcttcaggggccagtgcggtgggagctgttgctccttcgtgtctcttcctggtaatggaaacggccatacctttcatcagagccatcttccctgaagagcacgcccaccgcccgtcctcctctcctcttgttttccgtttcc

SEQ ID NO: 220313 - DNA, 201 bp, Homo sapiens
aagcccgtgggagggccttggggatggagggcgagggcgctgtgggatgagcctcacctcttcaggggccagtgcggtgggagctgttgctccttcgtgtctcttcctggtaatggaaacggccatacctttcatcagagccatcttccctgaagagcacgcccaccgcccgtcctcctctcctcttgttttccgtttccg

SEQ ID NO: 220314 - DNA, 201 bp, Homo sapiens
ggctaggggtagtctgtctaagtgaacagaaggacattgttgaaagtgaagtatcattatttttattcctgcatcgtcttttgttctttattcttggcagyggtaaaactcctccaggcagctgacagctttaaagaccagaccttctttctcagccaggtttcccaggatgccctgaggagaaccatcttccctctgggg

SEQ ID NO: 220315 - DNA, 201 bp, Homo sapiens
tcgtcttttgttctttattcttggcagcggtaaaactcctccaggcagctgacagctttaaagaccagaccttctttctcagccaggtttcccaggatgcyctgaggagaaccatcttccctctggggggattaacgaaagagtttgtaaagaaaatcgctgctgagaatagacttcatcatgtgcttcagaagaaagagg

SEQ ID NO: 220316 - DNA, 201 bp, Homo sapiens
ggccaggcacagaggcacaggagcacagcgtgtggggaacttctcagagctcagaaatcactgccgttttaccgaaggttgatttatgtattctctttaaytgaccttcccgcccgcaggttaccaggtgacaggggtgtttatgaagaactgggactcactggatgaacatggggtctgtactgccgacaaagactgtga

SEQ ID NO: 220317 - DNA, 201 bp, Homo sapiens
catccctttccatcaagtgtcctacgtaaaggagtattggaatgatgtgttcaggtgagtgcgggtcacagcacaaaggaagcttcctcacactgtggatscttgcagtggaaggatccggtaaccagccagaccgacgcctgtgctgcagcccagcgctctccctccacggtggtgctgaagactgcaagaggcctcagc

SEQ ID NO: 220318 - DNA, 201 bp, Homo sapiens; identical to SEQ ID NO: 39748

SEQ ID NO: 220319 - DNA, 201 bp, Homo sapiens
gtaaagaaaatcgctgctgagaatagacttcatcatgtgcttcagaagaaagaggtacgagtgagcagttgcctttgattagtgcctgtttccctttcccractgcatggcacggagcagctggacctgtgggtcccgcaccacttccccttctccaggacctaacatcaaaggcgggccttggagcaatagatggaggag

SEQ ID NO: 220320 - DNA, 201 bp, Homo sapiens
tcttcctagtgagttacaccattgctgggcctgctctgggctgccctcccagcatctgccttcatgatgaggcgtgacatgtgggctgtaacttgttgccyagcctcatggagaaactgtctttctgtaggttggttcctgtataccttgggccagagagcaaacataggtggcctgagagagccctggtacgtggtggag

SEQ ID NO: 220321 - DNA, 201 bp, Homo sapiens; identical to SEQ ID NO: 39783

SEQ ID NO: 220322 - DNA, 201 bp, Homo sapiens; identical to SEQ ID NO: 39785

SEQ ID NO: 220323 - DNA, 201 bp, Homo sapiens; identical to SEQ ID NO: 39784

SEQ ID NO: 220324 - DNA, 201 bp, Homo sapiens; identical to SEQ ID NO: 39787

SEQ ID NO: 220325 - DNA, 201 bp, Homo sapiens; identical to SEQ ID NO: 39786

SEQ ID NO: 220326 - DNA, 201 bp, Homo sapiens
atggagaagtgaaccctggagcttcccaatggtgagataccaaatagttcaagaactagtaaagaagactacggaggaatagctagaagctaaatgaagaragtatctcaaacaggaaggagtgatctgttaatgtgttaggaaagttgagttcttaggattaagcattgggtagagcaagatttgggaccttgactttga

SEQ ID NO: 220327 - DNA, 201 bp, Homo sapiens
agtcatgaaaacatgcatagaaatgatcatataaacttgcaagaaattgaatgtcttgctatcaaaggaaaggatggaggtgtaagagactgaggtagaaygtgagaagctctgtatatattgtattttccttaaaaatatatatttaaactcgcatttcttgtttttcaaatgttcactctaatgaaaattcttttattt

SEQ ID NO: 220328 - DNA, 201 bp, Homo sapiens
cagtagacagaaaaagcataatgcaggaaacagagggatattgctgaagccatagacctgggacacaaatagaagggttagttttaaagataggcccacamacagctcattagtaacagcaggatgaagggcagattatggagttccagatgtttgtagtccagtagataggaggagcatgtcaaatttttgtgatatttt

SEQ ID NO: 220329 - DNA, 201 bp, Homo sapiens
taaagaagactacggaggaatagctagaagctaaatgaagaaagtatctcaaacaggaaggagtgatctgttaatgtgttaggaaagttgagttcttaggrttaagcattgggtagagcaagatttgggaccttgactttgacgaacttggtggatgtcaggagtaagaggaggtattcaagagaatgttggagaggaatt

SEQ ID NO: 220330 - DNA, 201 bp, Homo sapiens
ggtagggaaagtaagaacactagagataggaattagaagcatggagaagtgaaccctggagcttcccaatggtgagataccaaatagttcaagaactagtraagaagactacggaggaatagctagaagctaaatgaagaaagtatctcaaacaggaaggagtgatctgttaatgtgttaggaaagttgagttcttaggat

SEQ ID NO: 220331 - DNA, 201 bp, Homo sapiens
caggatgaagggcagattatggagttccagatgtttgtagtccagtagataggaggagcatgtcaaatttttgtgatattttctcagtgaaacaggaagcragctcataaagagggaggaagtcacgaaggagtaaggaaggaaaaggagatgtaaaatgaatagataggagtgtaggaaagtaagcatactcttaggaaa

SEQ ID NO: 220332 - DNA, 201 bp, Homo sapiens
aggatgaagggcagattatggagttccagatgtttgtagtccagtagataggaggagcatgtcaaatttttgtgatattttctcagtgaaacaggaagcamgctcataaagagggaggaagtcacgaaggagtaaggaaggaaaaggagatgtaaaatgaatagataggagtgtaggaaagtaagcatactcttaggaaat

SEQ ID NO: 220333 - DNA, 201 bp, Homo sapiens
acaggaaatattacacacacacacacacacacacacacacacacacacacacagcattgaaaatgcatcaggaaagatataccctgtacccaacatgcacraggtctaagcaatgaagaaaatctaggaaatcaaataagaccagaacatctatgactaatatataaatacttgaggcagttatatccatttaaaaggtgt

SEQ ID NO: 220334 - DNA, 201 bp, Homo sapiens
ctttaagtatccatggtggttcctggaacaaattcctcatggatatggagggaggaggaatcactgtaattaaacaaatcatcactttaaaacttaaaacyttttgcatgttgaatacagtcatgcaccacataaatgatggtggtcccattaagtttattatgccatatttttatcggaagtttcctatgtttaagtgta

SEQ ID NO: 220335 - DNA, 201 bp, Homo sapiens
ttttggagttttattaacatactataaacttgcatcaataatgctttaaatttctacctctctgtaagtcacactgaagtagaaactttgttttctaggtkcgtatttatgtggatgctgtaattaatcatatgtgtggtaacgctgtgagtgcaggaacaagcagtacctgtggaagttacttcaaccctggaagtaggg

SEQ ID NO: 220336 - DNA, 201 bp, Homo sapiens
gctttaaatttctacctctctgtaagtcacactgaagtagaaactttgttttctaggttcgtatttatgtggatgctgtaattaatcatatgtgtggtaaygctgtgagtgcaggaacaagcagtacctgtggaagttacttcaaccctggaagtagggactttccagcagtcccatattctggatgggatttcaatgatg

SEQ ID NO: 220337 - DNA, 201 bp, Homo sapiens
ttaaaacttaaaaccttttgcatgttgaatacagtcatgcaccacataaatgatggtggtcccattaagtttattatgccatatttttatcggaagtttcmtatgtttaagtgtatttagatacacaagtacactgtgttacagttgcctatagtattcagtaaaataacatgctttacaggtttgtagtctaggagaaat

SEQ ID NO: 220338 - DNA, 201 bp, Homo sapiens
tcaggagaaaaatgaggttttatgaatcaatcataacatttttacctcaacaggtcagagattgtcgtctgactggtcttcttgatcttgcactggagaargattacgtgcgttctaagattgccgaatatatgaaccatctcattgacattggtgttgcagggttcagacttgatgcttccaagcacatgtggcctggag

SEQ ID NO: 220339 - DNA, 201 bp, Homo sapiens
tgattgcttaaatttgcactggaaagacttcaaaaaacagtgatatattaggacaatatatttccagtacatgacaaatgataacaacataagaactcgamacactcaataaaaaacaaaaaataaagcaaaactagatgggaaaaggaagaagcaaatttcaagagaaaactcaaaaggccaaaaaatgtgaaatgatgt

SEQ ID NO: 220340 - DNA, 201 bp, Homo sapiens
ggttttatgaatcaatcataacatttttacctcaacaggtcagagattgtcgtctgactggtcttcttgatcttgcactggagaaggattacgtgcgttcyaagattgccgaatatatgaaccatctcattgacattggtgttgcagggttcagacttgatgcttccaagcacatgtggcctggagacataaaggcaattt

SEQ ID NO: 220341 - DNA, 201 bp, Homo sapiens
tgcactggaaagacttcaaaaaacagtgatatattaggacaatatatttccagtacatgacaaatgataacaacataagaactcgaaacactcaataaaamacaaaaaataaagcaaaactagatgggaaaaggaagaagcaaatttcaagagaaaactcaaaaggccaaaaaatgtgaaatgatgttcagccttgctagt

SEQ ID NO: 220342 - DNA, 201 bp, Homo sapiens
catttttacctcaacaggtcagagattgtcgtctgactggtcttcttgatcttgcactggagaaggattacgtgcgttctaagattgccgaatatatgaaycatctcattgacattggtgttgcagggttcagacttgatgcttccaagcacatgtggcctggagacataaaggcaattttggacaaactgcataatctaa

SEQ ID NO: 220343 - DNA, 201 bp, Homo sapiens
atgttcagccttgctagtaattgggaaaaacacaaatcatttttttttttttttttttgagatggagtctccctctgtcacccacgctggagtgcattggygtgatctgggctcactgccagctccacctaccaccttcaggccgccattcccctgcctcaggctccagagtagctgggactacaggggcccaccaccatg

SEQ ID NO: 220344 - DNA, 201 bp, Homo sapiens
ttttttttttttttgagatggagtctccctctgtcacccacgctggagtgcattggcgtgatctgggctcactgccagctccacctaccaccttcaggccrccattcccctgcctcaggctccagagtagctgggactacaggggcccaccaccatgcctggctagttttttgtgtttttagtagagacagggtttcacca

SEQ ID NO: 220345 - DNA, 201 bp, Homo sapiens
acatgcccaaaacacctaatggagacaggatagtctcttcaataaatagcgttggaattattggaggcccacatgcaaaagaatgaaattggagtgttatkctatgcacaggaataaattgaaaattgaaaaggaatttaaacataacatctgaaaccaaagaatccctagaagaaaacaggggaaatcctccataacatt

SEQ ID NO: 220346 - DNA, 201 bp, Homo sapiens
aggagctccaggtttgttccaaacagtagcgagacaaacagatcaaggatgaaatatataaaatagtaggcaaaacgtaaacaacatgtgtaaggcaatcrattctatataactcagcaactcctagggttcttatcaaataaaatcactgatgtgtcataacttctaaactaaaaacaacacaaatgcccattcacagta

SEQ ID NO: 220347 - DNA, 201 bp, Homo sapiens
tacttgtctggcattgagttttattgggcttttggttttttggaagtagggtatttatcccaatttagaaaatttgtatccttgccataatacagtcttcyatttttgtacccccaaatctttcatctgtcagaacatcactcaaaggtgaaaatatttcccacataaaattattctgttcctttaatgaaatgagtttca

SEQ ID NO: 220348 - DNA, 201 bp, Homo sapiens
gtgatggagtaagattaaaatatatatatatacatttttacataagaaattttattttaatttttttgtaaattagaaaatagcaattaatatggtatttrtataccagaatctttgaatatctaaaatttaagaagatgtgagcaatttcatgaaacttttcaaagcttagaaaaaggtagctatgtaaaataacaatgt

SEQ ID NO: 220349 - DNA, 201 bp, Homo sapiens
aaaaacagtgatatattaggacaatatatttccagtacatgacaaatgataacaacataagaactcgaaacactcaataaaaaacaaaaaataaagcaaawctagatgggaaaaggaagaagcaaatttcaagagaaaactcaaaaggccaaaaaatgtgaaatgatgttcagccttgctagtaattgggaaaaacacaaa

SEQ ID NO: 220350 - DNA, 201 bp, Homo sapiens
tccgaaagtgctgggattacaggagtgagacacgtgcccgacccaaatcatttttaatctattagtcaaaaattagagctatgataatattaatttttggkgggagtgtggcaaaaggtactataatatactgctactagagagtaaaaattgataaattttgtaagggcaattttgcacaatatgaaaatataaaaatat

SEQ ID NO: 220351 - DNA, 201 bp, Homo sapiens
actagagagtaaaaattgataaattttgtaagggcaattttgcacaatatgaaaatataaaaatatgcttcatgtttaccatacatttatctagcatacasaattacccatgtgtaaacatgtatacagatgttcattataacacttcttataaaaacaaaatatttggaaataaatgttcatattaataaggcgcatacc

SEQ ID NO: 220352 - DNA, 201 bp, Homo sapiens; identical to SEQ ID NO: 39767

SEQ ID NO: 220353 - DNA, 201 bp, Homo sapiens
atattttatataaaggacttgagtaattattactttaagtatccatggtggttcctggaacaaattcctcatggatatggagggaggaggaatcactgtarttaaacaaatcatcactttaaaacttaaaaccttttgcatgttgaatacagtcatgcaccacataaatgatggtggtcccattaagtttattatgccata

SEQ ID NO: 220354 - DNA, 201 bp, Homo sapiens
ttttgtaagggcaattttgcacaatatgaaaatataaaaatatgcttcatgtttaccatacatttatctagcatacagaattacccatgtgtaaacatgtrtacagatgttcattataacacttcttataaaaacaaaatatttggaaataaatgttcatattaataaggcgcataccgtatgatcttagtccagttagaa

SEQ ID NO: 220355 - DNA, 201 bp, Homo sapiens
aggagggaggatcacttaaagtccaggagtttgaggctgcagtgaaccatgattgcatctccacactccagcctgggtgacatagggccacctcaacaacmaccaccaccaaagctatcattaatacattgttcctctgtctctcttcccatcctccttaccacttagtcttaaatctaatcttattaaacaatatctaag

SEQ ID NO: 220356 - DNA, 201 bp, Homo sapiens
acgttatctaccagagcaccgtgggctgttacttaccttgagttggaaggggttcgcatttatacctgtaaaagtattcatccttttaatttatgtaaagwttttttgtatgccattctggatctttaaagagatgacaacaaattttggttttctactgttatgtgagaacattaggccccagcaacaggtcactgttta

SEQ ID NO: 220357 - DNA, 201 bp, Homo sapiens
agtttttttgtatgccattctggatctttaaagagatgacaacaaattttggttttctactgttatgtgagaacattaggccccagcaacaggtcactgtktaaggaaaaataaaagtgctgccagaacctaagaaaaacattaatatctaaaaggtcatttagatgatttccatgagagactttttgatgttctttacct

SEQ ID NO: 220358 - DNA, 201 bp, Homo sapiens
agtgctgccagaacctaagaaaaacattaatatctaaaaggtcatttagatgatttccatgagagactttttgatgttctttacctgttaggattattatkgataatccttttcagattatgaataaacagtttgccctcaagtatttattcatgctaatatttactttgtaaaatgtgcttcttacaggaatataaatag

SEQ ID NO: 220359 - DNA, 201 bp, Homo sapiens
catgtaggtgtttagttcacattactttcctttcacagttgatttttgatcttgtaggaaaataattataagatatcatgaaatattttggagttttattmacatactataaacttgcatcaataatgctttaaatttctacctctctgtaagtcacactgaagtagaaactttgttttctaggttcgtatttatgtggat

SEQ ID NO: 220360 - DNA, 201 bp, Homo sapiens
tgatttttgatcttgtaggaaaataattataagatatcatgaaatattttggagttttattaacatactataaacttgcatcaataatgctttaaatttcyacctctctgtaagtcacactgaagtagaaactttgttttctaggttcgtatttatgtggatgctgtaattaatcatatgtgtggtaacgctgtgagtgca

SEQ ID NO: 220361 - DNA, 201 bp, Homo sapiens
atatcatgaaatattttggagttttattaacatactataaacttgcatcaataatgctttaaatttctacctctctgtaagtcacactgaagtagaaactytgttttctaggttcgtatttatgtggatgctgtaattaatcatatgtgtggtaacgctgtgagtgcaggaacaagcagtacctgtggaagttacttcaac

SEQ ID NO: 220362 - DNA, 201 bp, Homo sapiens
gatgggaaaaggaagaagcaaatttcaagagaaaactcaaaaggccaaaaaatgtgaaatgatgttcagccttgctagtaattgggaaaaacacaaatcatttttttttttttttttttgagatggagtctccctctgtcacccacgctggagtgcattggcgtgatctgggctcactgccagctccacctaccaccttca

SEQ ID NO: 220363 - DNA, 201 bp, Homo sapiens; identical to SEQ ID NO: 39788

SEQ ID NO: 220364 - DNA, 201 bp, Homo sapiens
agcaattactctaatacaattaaacacaatgttccttatggccatctgctaaaatatcattattgtaaaatattttaaaattttgttttatcacgtaattrttcaaacagttcttaagtattagagatatattaaaatatcttcaaatttaaaaaaataaaaatatggccgggcgcagtggctcacgcctgtaacgccagc

SEQ ID NO: 220365 - DNA, 201 bp, Homo sapiens
atgggatgcagggctggcttccctgccaacgcctggcgctgatggattcttcccgcattgctgggaagggcagactgaggcgctgacaaaagaagagttgyagctggtcataagtgacagcatcctctgttcactcgattggtcagttgtagcttcatccaggagatggtcatggggttcctgctgcataccaagctctag

SEQ ID NO: 220366 - DNA, 201 bp, Homo sapiens
caccatctttttgcccctttctttctcctttgctgcagaacctttgtgtaaatgaagacgtgaaaagcctaggttctgtgcagcttatcaacgaccgctgygtggacatgcagagaagcaggcacggtagccactgggaccgtggtgtagccgcaggtggtctggagagagtgaggcaggggtggcagtgactgaagacca

SEQ ID NO: 220367 - DNA, 201 bp, Homo sapiens
gcccgagatgatgaagagcaaatatccgccctggggcctcagaggggtccagcttgctggagggagggcagagaggagagcagcctgccatgagtcccgargcttccgactgaagacttgggttgggggtgctgagcccctttctcctttttacatttccctacccacagacctgagcggccatgggaggttggggttggc

SEQ ID NO: 220368 - DNA, 201 bp, Homo sapiens
cccattgctgggaatggccagggctcagcaccagcgctcagcagatgctcagtgcgttttgctgagtttgctgagggaagactgttttctgttctctctcwcacacacagagtggatgaggatgaggatgacctggaggaagaacacataactaaggtaacacgagtgtcctcagctggtgctgtgctgggggtatagact

SEQ ID NO: 220369 - DNA, 201 bp, Homo sapiens
gagtttgctgagggaagactgttttctgttctctctctcacacacagagtggatgaggatgaggatgacctggaggaagaacacataactaaggtaacacragtgtcctcagctggtgctgtgctgggggtatagactgggctgtgcacccctggggaggaggctggagtcacttggctacttctcaccctcctctccaca

SEQ ID NO: 220370 - DNA, 201 bp, Homo sapiens
tctcacacacagagtggatgaggatgaggatgacctggaggaagaacacataactaaggtaacacgagtgtcctcagctggtgctgtgctgggggtatagrctgggctgtgcacccctggggaggaggctggagtcacttggctacttctcaccctcctctccacaaaggaggagcttccagcacttggactccgttgctt

SEQ ID NO: 220371 - DNA, 201 bp, Homo sapiens
atcatttttcttcctgcaggggaagtccttaagtcttatttgtggggccctctcttggctccgtgactttgaacagaagaagcgtgaagaagaggcacgaytccttgaaactggaactggccccttacatgatgagaaagatgaatccctgtgtctgtcttcttcctgcgaaggggctgcaggcaccccgaggcctgctgg

SEQ ID NO: 220372 - DNA, 201 bp, Homo sapiens
ccctgcgtgggcctctgagaggcaggcagcactttggttcccacctctggcccgggctgtggcggggtggagctgcatgccattcatgtcctaggcacatsatggtgtgtgctgcacacagacctggaaggctggggactgaccgctggctctgaggcctggggccgtggccagcctgctctctgggaaaggatttgtagc

SEQ ID NO: 220373 - DNA, 201 bp, Homo sapiens
agctctgccaggcccattcccagctgctgcagtacgtggagcgatacgggtgagatgtgaccctctgaggtagtgggacagtcccttggtggccccctgcrtgggcctctgagaggcaggcagcactttggttcccacctctggcccgggctgtggcggggtggagctgcatgccattcatgtcctaggcacatcatggtg

SEQ ID NO: 220374 - DNA, 201 bp, Homo sapiens
tcggctgcttgctcagagcctggtttgtgttctttccccagctctgccaggcccattcccagctgctgcagtacgtggagcgatacgggtgagatgtgacyctctgaggtagtgggacagtcccttggtggccccctgcgtgggcctctgagaggcaggcagcactttggttcccacctctggcccgggctgtggcggggt

SEQ ID NO: 220375 - DNA, 201 bp, Homo sapiens
ttctgtgcatggggacactggagcccagaaaagttaagtgactcatattttctcaccaagcgtgggtgatggagccattcagttttccgatattttatttyttatatgagtattcctttaactggaaactttcctaacaacaaacacctaaagatgtgcagagttgcttttatttttgttaccccagctccacgccttaac

SEQ ID NO: 220376 - DNA, 201 bp, Homo sapiens; identical to SEQ ID NO: 39808

SEQ ID NO: 220377 - DNA, 201 bp, Homo sapiens
aggtcttttcccaacccggtggaaactagcagggagattccatacttgaggaattcagcctcttgctttttctctgacccacagtggacactggaggaaamcttcccttccttcccttttctcttagctcccaccagcctaagggctgtggaaacccgtaccttttgtctgcagccagccccctctcctccctttggtggc

SEQ ID NO: 220378 - DNA, 201 bp, Homo sapiens
gccacaactttgtcctgctcgtccaggccttgggagacgctgggtctgtgacaggctgaaccgtgtgaggagcagccccctccctgacctggccggcccakcactggaaggcaaaggagaggtggcggggcaggtccacatgtgttggtaggatgtcatttagctggcaccatctttttgcccctttctttctcctttgct

SEQ ID NO: 220379 - DNA, 201 bp, Homo sapiens
tgcacaagtcaaggcggtgacctcatcggaggctgaccatggctttccagtgcatcgggggaccccgctatgacagagtgcctcatttccctgcacctcayctgcccccatgctcctgagtccctccagccctggatgccagcagccagttctgtaagccagggagatggcatgtgtgaggcagaagtcccctcaggattg

SEQ ID NO: 220380 - DNA, 201 bp, Homo sapiens; identical to SEQ ID NO: 39810

SEQ ID NO: 220381 - DNA, 201 bp, Homo sapiens
gcctcccctccccgggccagggcctgctgtgaggtaaagggacttggatggttcctccagacacctgggccaagagttcctccggaggtggggcttgatasagggtgcacaagtcaaggcggtgacctcatcggaggctgaccatggctttccagtgcatcgggggaccccgctatgacagagtgcctcatttccctgcac

SEQ ID NO: 220382 - DNA, 201 bp, Homo sapiens; identical to SEQ ID NO: 39811

SEQ ID NO: 220383 - DNA, 201 bp, Homo sapiens; identical to SEQ ID NO: 39812

SEQ ID NO: 220384 - DNA, 201 bp, Homo sapiens
ccctccctgacctggccggcccagcactggaaggcaaaggagaggtggcggggcaggtccacatgtgttggtaggatgtcatttagctggcaccatctttytgcccctttctttctcctttgctgcagaacctttgtgtaaatgaagacgtgaaaagcctaggttctgtgcagcttatcaacgaccgctgcgtggacatgc

SEQ ID NO: 220385 - DNA, 201 bp, Homo sapiens
tcactcttgccttagaggagtagagagagggtattctggtcagccttcctttttccctttggggatgtgtgtgacacactccctcccctcccaccaacaasccaccctccccaagtggggaccctttgccacgggagatggtcacccatgtccaaagattggccaaccccccaaaagcggttgattagaggctggatatga

SEQ ID NO: 220386 - DNA, 201 bp, Homo sapiens
gctagatttattactgtagtcggacacactcccagctggcccagtttgtgcatgaggtgaagaagagcccctttggcaaggatgttcggctggtctccctyggctcccggcaggtaaacagtagccagtatttccaccaggggccatcctgctcctttcgccacaactttgtcctgctcgtccaggccttgggagacgctg

SEQ ID NO: 220387 - DNA, 201 bp, Homo sapiens
gtttgtgcatgaggtgaagaagagcccctttggcaaggatgttcggctggtctcccttggctcccggcaggtaaacagtagccagtatttccaccaggggycatcctgctcctttcgccacaactttgtcctgctcgtccaggccttgggagacgctgggtctgtgacaggctgaaccgtgtgaggagcagccccctccct

SEQ ID NO: 220388 - DNA, 201 bp, Homo sapiens
ctgggtctgtgacaggctgaaccgtgtgaggagcagccccctccctgacctggccggcccagcactggaaggcaaaggagaggtggcggggcaggtccacrtgtgttggtaggatgtcatttagctggcaccatctttttgcccctttctttctcctttgctgcagaacctttgtgtaaatgaagacgtgaaaagcctagg

SEQ ID NO: 220389 - DNA, 201 bp, Homo sapiens
cctgacctggccggcccagcactggaaggcaaaggagaggtggcggggcaggtccacatgtgttggtaggatgtcatttagctggcaccatctttttgccyctttctttctcctttgctgcagaacctttgtgtaaatgaagacgtgaaaagcctaggttctgtgcagcttatcaacgaccgctgcgtggacatgcagaga

SEQ ID NO: 220390 - DNA, 201 bp, Homo sapiens; identical to SEQ ID NO: 39803

SEQ ID NO: 220391 - DNA, 201 bp, Homo sapiens; identical to SEQ ID NO: 39804

SEQ ID NO: 220392 - DNA, 201 bp, Homo sapiens
agggagatggcatgtgtgaggcagaagtcccctcaggattggattttgtcattactgaagttgtctggaggggactgaattgaggaatgctcaagatcagygcaggctcctcctgctgccctatcatgcgccatgcatggcaccaggtgtctctggtcttcacgctgactctgccatgggtgtggtgttcctgttttacat

SEQ ID NO: 220393 - DNA, 201 bp, Homo sapiens
tctgctagatttattactgtagtcggacacactcccagctggcccagtttgtgcatgaggtgaagaagagcccctttggcaaggatgttcggctggtctcycttggctcccggcaggtaaacagtagccagtatttccaccaggggccatcctgctcctttcgccacaactttgtcctgctcgtccaggccttgggagacg

SEQ ID NO: 220394 - DNA, 201 bp, Homo sapiens
tcgggggaccccgctatgacagagtgcctcatttccctgcacctcatctgcccccatgctcctgagtccctccagccctggatgccagcagccagttctgyaagccagggagatggcatgtgtgaggcagaagtcccctcaggattggattttgtcattactgaagttgtctggaggggactgaattgaggaatgctcaag

SEQ ID NO: 220395 - DNA, 201 bp, Homo sapiens
aggatgtatcaaccctattttgcagatgaggaaagcaagggtcagagaggttagacaactcttccagagtcacacagctgggaagtagcagctccaggagyagaagctggggccgcttcctggtgcaccgatggtctgcaggtgtttgtggaaactcgggggcctccggggcgaccttgaggacatggacaaggctaagca

SEQ ID NO: 220396 - DNA, 201 bp, Homo sapiens
aataaaatcgagttgacatgaatgagcagatgctgcctcgttgcagtctggtagtgtaattccaggctgcgcatgtggacttcgacttctgcccctgcccrgggcagagaccaccgtgttgctttatgcctcgctggtgagagggggtcataaacagtttgtgctccatgaacccttcctgcccacctccgaggtcatgtt

SEQ ID NO: 220397 - DNA, 201 bp, Homo sapiens
tgatgttcccagagctgacccagtgtttggcataggggtgtgctcaataaaatcgagttgacatgaatgagcagatgctgcctcgttgcagtctggtagtrtaattccaggctgcgcatgtggacttcgacttctgcccctgcccagggcagagaccaccgtgttgctttatgcctcgctggtgagagggggtcataaaca

SEQ ID NO: 220398 - DNA, 201 bp, Homo sapiens; identical to SEQ ID NO: 39809

SEQ ID NO: 220399 - DNA, 201 bp, Homo sapiens
tgtgcagagttgcttttatttttgttaccccagctccacgccttaaccctcactttgaaataggatgtatcaaccctattttgcagatgaggaaagcaagrgtcagagaggttagacaactcttccagagtcacacagctgggaagtagcagctccaggagcagaagctggggccgcttcctggtgcaccgatggtctgca

SEQ ID NO: 220400 - DNA, 201 bp, Homo sapiens
acctcctctcaaaaacagacagagtggtgtcttccagagtgattagtttgcttaaaaaaaaaaaaacaaaacaaaacacaaaccgtaagcactggcgctcrtgactgatcatcctgtatccacgcacgagctgcacgaaggccgcgcggtcactctggctccctgttggcgagtacctgggatttcttgctcagcattttg

SEQ ID NO: 220401 - DNA, 201 bp, Homo sapiens
caagacctcctctcaaaaacagacagagtggtgtcttccagagtgattagtttgcttaaaaaaaaaaaaacaaaacaaaacacaaaccgtaagcactggcrctcatgactgatcatcctgtatccacgcacgagctgcacgaaggccgcgcggtcactctggctccctgttggcgagtacctgggatttcttgctcagcat

SEQ ID NO: 220402 - DNA, 201 bp, Homo sapiens
gctagctcagcttcaggccatgggatgcagggctggcttccctgccaacgcctggcgctgatggattcttcccgcattgctgggaagggcagactgaggcrctgacaaaagaagagttgtagctggtcataagtgacagcatcctctgttcactcgattggtcagttgtagcttcatccaggagatggtcatggggttcct

SEQ ID NO: 220403 - DNA, 201 bp, Homo sapiens
tcagctgctctgttttgctcacgcacctgcttgtgcttctgttgttgcctcctctccctggctgggctcgagctgcttcagggcaggaaccacgtctttayagtttgatgttcccagagctgacccagtgtttggcataggggtgtgctcaataaaatcgagttgacatgaatgagcagatgctgcctcgttgcagtctgg

SEQ ID NO: 220404 - DNA, 201 bp, Homo sapiens
caccctgccctcctcccttggcagatgtcttcctctcctttaaggcctggctcaggtgtcgtcttggtggcttcgggtgtcagctgctctgttttgctcaygcacctgcttgtgcttctgttgttgcctcctctccctggctgggctcgagctgcttcagggcaggaaccacgtctttatagtttgatgttcccagagctg

SEQ ID NO: 220405 - DNA, 201 bp, Homo sapiens
tataaatccttttaacattttccagtctaaaagttttgtggtcttattacaggatgtagaaaacagtgggcctcagttattcttttgctgttgtgccggartataccacggttgtttttgaaagataactttgaccatacccttaggaacttcctcagctcactttcaaatggagggcactggctttctaaccattgtgtc

SEQ ID NO: 220406 - DNA, 201 bp, Homo sapiens
tattactgtagtcggacacactcccagctggcccagtttgtgcatgaggtgaagaagagcccctttggcaaggatgttcggctggtctcccttggctcccrgcaggtaaacagtagccagtatttccaccaggggccatcctgctcctttcgccacaactttgtcctgctcgtccaggccttgggagacgctgggtctgtg

SEQ ID NO: 220407 - DNA, 201 bp, Homo sapiens
ttttaaacagaaggaagaactgctaatgtagcagatgaaaagtagtatctcactgttatttggtgggtgcagtttcactatttccttgctacttctttaayttgagtgactttggaaacgggatatcactagtggaaaattctgtataatccagaaaaaaatgtaaggttttaaaagattcagggaactaagtaaccattt

SEQ ID NO: 220408 - DNA, 201 bp, Homo sapiens
ccctaacttacacctacctgcagcacgtgagaatactgtcttctctgccacaacttctcttgatttttaaacagaaggaagaactgctaatgtagcagatsaaaagtagtatctcactgttatttggtgggtgcagtttcactatttccttgctacttctttaatttgagtgactttggaaacgggatatcactagtggaa

SEQ ID NO: 220409 - DNA, 201 bp, Homo sapiens; identical to SEQ ID NO: 39819

SEQ ID NO: 220410 - DNA, 201 bp, Homo sapiens; identical to SEQ ID NO: 39798

SEQ ID NO: 220411 - DNA, 201 bp, Homo sapiens; identical to SEQ ID NO: 39801

SEQ ID NO: 220412 - DNA, 201 bp, Homo sapiens
gatgtccaagatcaatgtggggaggacacaactgagcccacaacaatagtctgtactcagtaatgagtgataattggggactgaagaaaatgaacacgttragaactaatatgttcctgaagtgctttcacaactctaacctcgttttatgagcgtgagctttgctgtcctggtgtgtgccttggcactgggaggtgatgg

SEQ ID NO: 220413 - DNA, 201 bp, Homo sapiens
tccagtgaaattctgtgcatggggacactggagcccagaaaagttaagtgactcatattttctcaccaagcgtgggtgatggagccattcagttttccgayattttattttttatatgagtattcctttaactggaaactttcctaacaacaaacacctaaagatgtgcagagttgcttttatttttgttaccccagctcc

SEQ ID NO: 220414 - DNA, 201 bp, Homo sapiens
cccgggccagggcctgctgtgaggtaaagggacttggatggttcctccagacacctgggccaagagttcctccggaggtggggcttgatagagggtgcacragtcaaggcggtgacctcatcggaggctgaccatggctttccagtgcatcgggggaccccgctatgacagagtgcctcatttccctgcacctcatctgcc

SEQ ID NO: 220415 - DNA, 201 bp, Homo sapiens
caagagttcctccggaggtggggcttgatagagggtgcacaagtcaaggcggtgacctcatcggaggctgaccatggctttccagtgcatcgggggacccygctatgacagagtgcctcatttccctgcacctcatctgcccccatgctcctgagtccctccagccctggatgccagcagccagttctgtaagccagggag

SEQ ID NO: 220416 - DNA, 201 bp, Homo sapiens
cttgatagagggtgcacaagtcaaggcggtgacctcatcggaggctgaccatggctttccagtgcatcgggggaccccgctatgacagagtgcctcatttycctgcacctcatctgcccccatgctcctgagtccctccagccctggatgccagcagccagttctgtaagccagggagatggcatgtgtgaggcagaagtc

SEQ ID NO: 220417 - DNA, 201 bp, Homo sapiens
cctatcatgcgccatgcatggcaccaggtgtctctggtcttcacgctgactctgccatgggtgtggtgttcctgttttacattggaaacttggagattcaragatggtcaagctctgtcctgaggtcatgcagctcatgagtgtggagctggggtgtgcccactggtttctgactgtgaaaacccccacgacatcccacca

SEQ ID NO: 220418 - DNA, 201 bp, Homo sapiens
ccaagcgtgggtgatggagccattcagttttccgatattttattttttatatgagtattcctttaactggaaactttcctaacaacaaacacctaaagatstgcagagttgcttttatttttgttaccccagctccacgccttaaccctcactttgaaataggatgtatcaaccctattttgcagatgaggaaagcaaggg

SEQ ID NO: 220419 - DNA, 201 bp, Homo sapiens
accaagcgtgggtgatggagccattcagttttccgatattttattttttatatgagtattcctttaactggaaactttcctaacaacaaacacctaaagaygtgcagagttgcttttatttttgttaccccagctccacgccttaaccctcactttgaaataggatgtatcaaccctattttgcagatgaggaaagcaagg

SEQ ID NO: 220420 - DNA, 201 bp, Homo sapiens
taatttgagtgactttggaaacgggatatcactagtggaaaattctgtataatccagaaaaaaatgtaaggttttaaaagattcagggaactaagtaaccrtttgcacagcagctaaatgctcaccagcatacctgctgagctgtgtgggcactggcagagaaactgaggaaagctgccaggccccatggtgtcccaggcc

SEQ ID NO: 220421 - DNA, 201 bp, Homo sapiens
gtgtgtcctgtgacatcctggccaccacatctgtgggagggtaactgcaagaccagagaccctccgtggatattcctgaaggttcatccccggccttcacrgtctgtctgcagggcgccttctgacgccacctccagccgccatccaccagacgccagcttccccgctgccctgaacttcctccagcgcaccaggccttcc

SEQ ID NO: 220422 - DNA, 201 bp, Homo sapiens
atattaaaggaacaaagtgctccttcaggtctgggcaagagccgtggatcctgtaggtcagcttccggggcttcccatgccctcacgtttcaggagataaygtgagcctcagaggacctgagttctgaatagaaaatttttgctcttcatttcttcacacacccagcctctcagtgagctcctgctggctttgtccagcat

SEQ ID NO: 220423 - DNA, 201 bp, Homo sapiens; identical to SEQ ID NO: 39814

SEQ ID NO: 220424 - DNA, 201 bp, Homo sapiens; identical to SEQ ID NO: 39816

SEQ ID NO: 220425 - DNA, 201 bp, Homo sapiens
taagtaaccatttgcacagcagctaaatgctcaccagcatacctgctgagctgtgtgggcactggcagagaaactgaggaaagctgccaggccccatggtktcccaggccttccctcccgtctgtttgcctttagagcaagattagtgctataggcatttatacacaaataccataatatggcccaaaatctttacaattt

SEQ ID NO: 220426 - DNA, 201 bp, Homo sapiens
tatggcccaaaatctttacaatttttgaatttttaaagtactttgaccatattttgcttttatgttaatagtattccagtgaaattctgtgcatggggacrctggagcccagaaaagttaagtgactcatattttctcaccaagcgtgggtgatggagccattcagttttccgatattttattttttatatgagtattcct

SEQ ID NO: 220427 - DNA, 201 bp, Homo sapiens
tccgccctggggcctcagaggggtccagcttgctggagggagggcagagaggagagcagcctgccatgagtcccgaggcttccgactgaagacttgggttkggggtgctgagcccctttctcctttttacatttccctacccacagacctgagcggccatgggaggttggggttggcatttgcctgggggagtttctgagc

SEQ ID NO: 220428 - DNA, 201 bp, Homo sapiens
aaggcagagaacttgagtggagatggaggtggtgaatattaaaggaacaaagtgctccttcaggtctgggcaagagccgtggatcctgtaggtcagcttcyggggcttcccatgccctcacgtttcaggagataacgtgagcctcagaggacctgagttctgaatagaaaatttttgctcttcatttcttcacacacccag

SEQ ID NO: 220429 - DNA, 201 bp, Homo sapiens
ctcccttagagcccgtggggacaaggcagagaacttgagtggagatggaggtggtgaatattaaaggaacaaagtgctccttcaggtctgggcaagagccrtggatcctgtaggtcagcttccggggcttcccatgccctcacgtttcaggagataacgtgagcctcagaggacctgagttctgaatagaaaatttttgct

SEQ ID NO: 220430 - DNA, 201 bp, Homo sapiens
cttggggctgtggtgctttccaggtgtgtgaagttaaaacattttagggccatacggtagatagtacctgccacatagttgtcttggtcagccccggctgycatgacaaaataccataaactgggtggcttagacacagaaatgtgttttctcacagtcccagaggcttgggatgtccaagatcaatgtggggaggacaca

SEQ ID NO: 220431 - DNA, 201 bp, Homo sapiens
caggtccacatgtgttggtaggatgtcatttagctggcaccatctttttgcccctttctttctcctttgctgcagaacctttgtgtaaatgaagacgtgaraagcctaggttctgtgcagcttatcaacgaccgctgcgtggacatgcagagaagcaggcacggtagccactgggaccgtggtgtagccgcaggtggtctg

SEQ ID NO: 220432 - DNA, 201 bp, Homo sapiens
cagaacagtgagctggataattaaagaagctttttcctgcttcttgggcccagtttccatttcttccttttttctgtttttcctggctattctagtgctartttccttcctttcctttcctaggctggtcttagagcatcctctcctatgtacagccagaccttctttcaagcttttattaaaatggggaaaggtcatttg

SEQ ID NO: 220433 - DNA, 201 bp, Homo sapiens
aagatggtcaagctctgtcctgaggtcatgcagctcatgagtgtggagctggggtgtgcccactggtttctgactgtgaaaacccccacgacatcccaccrgctctactgacctgtgcctgggctgaattgaggctgggatgtgatggtggccttgaaccatcactctttgtagactccaggtcttttcccaacccggtgg

SEQ ID NO: 220434 - DNA, 201 bp, Homo sapiens
ggggtgtgcccactggtttctgactgtgaaaacccccacgacatcccaccagctctactgacctgtgcctgggctgaattgaggctgggatgtgatggtgrccttgaaccatcactctttgtagactccaggtcttttcccaacccggtggaaactagcagggagattccatacttgaggaattcagcctcttgctttttc

SEQ ID NO: 220435 - DNA, 201 bp, Homo sapiens
ctgtgcctgggctgaattgaggctgggatgtgatggtggccttgaaccatcactctttgtagactccaggtcttttcccaacccggtggaaactagcaggsagattccatacttgaggaattcagcctcttgctttttctctgacccacagtggacactggaggaaaacttcccttccttcccttttctcttagctcccac

SEQ ID NO: 220436 - DNA, 201 bp, Homo sapiens
tgtgatggtggccttgaaccatcactctttgtagactccaggtcttttcccaacccggtggaaactagcagggagattccatacttgaggaattcagcctyttgctttttctctgacccacagtggacactggaggaaaacttcccttccttcccttttctcttagctcccaccagcctaagggctgtggaaacccgtacc

SEQ ID NO: 220437 - DNA, 201 bp, Homo sapiens
gtaccttttgtctgcagccagccccctctcctccctttggtggcttcctgtgtgtccagggccagcatcttctaggtgaatctaagatgtcagtaccttarccctcggctgcttgctcagagcctggtttgtgttctttccccagctctgccaggcccattcccagctgctgcagtacgtggagcgatacgggtgagatgt

SEQ ID NO: 220438 - DNA, 201 bp, Homo sapiens; identical to SEQ ID NO: 39815

SEQ ID NO: 220439 - DNA, 201 bp, Homo sapiens
ccttttgtctgcagccagccccctctcctccctttggtggcttcctgtgtgtccagggccagcatcttctaggtgaatctaagatgtcagtaccttagccytcggctgcttgctcagagcctggtttgtgttctttccccagctctgccaggcccattcccagctgctgcagtacgtggagcgatacgggtgagatgtgac

SEQ ID NO: 220440 - DNA, 201 bp, Homo sapiens
gctgaggccacaagcctcggcagtggagagctgggctagaactcagccggcctggctctagatctcaggctctgaggcagctgactgcactgggtaacctktgaggtgccaaccgtcaaggcgtccttagcctgagctttccttctcccataaagcctctgttggtccagactcaaggtttccacttgatgagccatgagc

SEQ ID NO: 220441 - DNA, 201 bp, Homo sapiens
cagccaggcctatgtgaatggggcgtggtgtgctttgtctctggcatgtggggaggtgggtactggtgctgagacttcttcctccctcaccacctccactrcccctgtccagaggcaggaagaagaagaaagagagaatctcctccgcctcagcagggagatgctagagacaggcccggaggctgagcggctggagcagct

SEQ ID NO: 220442 - DNA, 201 bp, Homo sapiens
catccggctgcaggaccaggtggtgatcatcgacgaggcgcacaacctgatcgacaccatcacgggcatgcacagcgtggaggtcagcggctcccaggtgygtgggcctcccctccccgggccagggcctgctgtgaggtaaagggacttggatggttcctccagacacctgggccaagagttcctccggaggtggggctt

SEQ ID NO: 220443 - DNA, 201 bp, Homo sapiens
tagccagtatttccaccaggggccatcctgctcctttcgccacaactttgtcctgctcgtccaggccttgggagacgctgggtctgtgacaggctgaaccrtgtgaggagcagccccctccctgacctggccggcccagcactggaaggcaaaggagaggtggcggggcaggtccacatgtgttggtaggatgtcatttag

SEQ ID NO: 220444 - DNA, 201 bp, Homo sapiens
gggcctgctgtgaggtaaagggacttggatggttcctccagacacctgggccaagagttcctccggaggtggggcttgatagagggtgcacaagtcaaggyggtgacctcatcggaggctgaccatggctttccagtgcatcgggggaccccgctatgacagagtgcctcatttccctgcacctcatctgcccccatgctc

SEQ ID NO: 220445 - DNA, 201 bp, Homo sapiens
gcagagacgtgggagaagaaagctgcaaaagtcattataagcaacacccttgatcttaggggtgctggtctgtgagaagagagctctaagccttttgtagmggcattagaaaggtatcggagccacggtgaaatgcaggggagattgggtttaggggctttcctggtctgcattctgctacagccgttaaatgccgctaga

SEQ ID NO: 220446 - DNA, 201 bp, Homo sapiens
atcctgctcctttcgccacaactttgtcctgctcgtccaggccttgggagacgctgggtctgtgacaggctgaaccgtgtgaggagcagccccctccctgrcctggccggcccagcactggaaggcaaaggagaggtggcggggcaggtccacatgtgttggtaggatgtcatttagctggcaccatctttttgccccttt

SEQ ID NO: 220447 - DNA, 201 bp, Homo sapiens
tctccagccaggcagccaggcctatgtgaatggggcgtggtgtgctttgtctctggcatgtggggaggtgggtactggtgctgagacttcttcctccctcmccacctccactacccctgtccagaggcaggaagaagaagaaagagagaatctcctccgcctcagcagggagatgctagagacaggcccggaggctgagcg

SEQ ID NO: 220448 - DNA, 201 bp, Homo sapiens
ggtggtgatcatcgacgaggcgcacaacctgatcgacaccatcacgggcatgcacagcgtggaggtcagcggctcccaggtgtgtgggcctcccctccccrggccagggcctgctgtgaggtaaagggacttggatggttcctccagacacctgggccaagagttcctccggaggtggggcttgatagagggtgcacaagt

SEQ ID NO: 220449 - DNA, 201 bp, Homo sapiens; identical to SEQ ID NO: 39792

SEQ ID NO: 220450 - DNA, 201 bp, Homo sapiens
accgctcacttgttatttgccaggtaatcctctaatccagaggatttggccttttgtgtgtgttaatgtcctgcttgcaccagctctatgaggaaggtgcygctgttgtcatttccatttctgcactcgtggaaacaagcgtagtgaggccagcctgagccacagagctgcaggtaggggaggcagctggaaccctggcgc

SEQ ID NO: 220451 - DNA, 201 bp, Homo sapiens
tgcccacctccgaggtcatgtttctgctccctctcttctcccttagagcccgtggggacaaggcagagaacttgagtggagatggaggtggtgaatattaraggaacaaagtgctccttcaggtctgggcaagagccgtggatcctgtaggtcagcttccggggcttcccatgccctcacgtttcaggagataacgtgagc

SEQ ID NO: 220452 - DNA, 201 bp, Homo sapiens
acttctgcccctgcccagggcagagaccaccgtgttgctttatgcctcgctggtgagagggggtcataaacagtttgtgctccatgaacccttcctgcccrcctccgaggtcatgtttctgctccctctcttctcccttagagcccgtggggacaaggcagagaacttgagtggagatggaggtggtgaatattaaaggaa

SEQ ID NO: 220453 - DNA, 201 bp, Homo sapiens
cagggcagaagcgaggggaggatggagggacacaatgcagatttacagcctggtgggtacggcctttgtcctctccatgtctattgtcactcttgaggtcyaagcctctactgcactgcctggtttactgcacaacccaacttggctgcttgcttctggtctctccccaccaaaccatccttcacactgcttccagcttaa

SEQ ID NO: 220454 - DNA, 201 bp, Homo sapiens
ggagggagaggcgcaggcgggaaccggggctgcgctcggcgcttgcgggccagcgcgagttcccggtgggcgtgggctcggcgggccccgcactcggagcrgccggcccgccagccccgggcagtgaggggtttagtacctgggccagcagctgccgtgctccatttctcgccgggccttagctgcctccccgcggggcag

SEQ ID NO: 220455 - DNA, 201 bp, Homo sapiens
ccctcaccacctccactacccctgtccagaggcaggaagaagaagaaagagagaatctcctccgcctcagcagggagatgctagagacaggcccggaggcygagcggctggagcagctggagtctggggaggaggagctggtcctcgccgaatacgagagtgatgaggagaaaaaggtggcgagcaggtgagacagaggcg

SEQ ID NO: 220456 - DNA, 201 bp, Homo sapiens
gagacgtgggagaagaaagctgcaaaagtcattataagcaacacccttgatcttaggggtgctggtctgtgagaagagagctctaagccttttgtagaggyattagaaaggtatcggagccacggtgaaatgcaggggagattgggtttaggggctttcctggtctgcattctgctacagccgttaaatgccgctagatgg

SEQ ID NO: 220457 - DNA, 201 bp, Homo sapiens
ctgagggaaatggtacatatggggctttcctaaaaatatgggatccatccatttgtcagcaatgtcattctatcctatcccagggcctttcaagattttgrtgaaaactaatagatcccatattccagaataatgctattaataattttattattattacttaatgatagcaaaaagttagctaactccaaccgctcactt

SEQ ID NO: 220458 - DNA, 201 bp, Homo sapiens
aatgctgcctggaactctttgccatttactttctatcaaaagctgagggaaatggtacatatggggctttcctaaaaatatgggatccatccatttgtcarcaatgtcattctatcctatcccagggcctttcaagattttggtgaaaactaatagatcccatattccagaataatgctattaataattttattattatta

SEQ ID NO: 220459 - DNA, 201 bp, Homo sapiens
aaatctttggtgtctctttctcttttatgaggacaagggctgctcccttatggctgctccgttatgacctcctttacccttgaaggccagatctgtagtasagtcacatggcagggttaggatttcaacatatgtttgtttgttaagatgggcagtctcactatgtggcccaggctggtctcaaactcaagcgatcctccc

SEQ ID NO: 220460 - DNA, 201 bp, Homo sapiens
ttacggtagatgagacggctttcttaccaactcttttccctcccgttccccatccttcaaatataattctaagttttagtctctgctgagtgaaccagtgygttatgattatgttttgaacataattttgtcttgaacaatatgtcttaatattctgttttttctagttaataattgcccttttaaagttagtttagtttt

SEQ ID NO: 220461 - DNA, 201 bp, Homo sapiens
gtgtttggcataggggtgtgctcaataaaatcgagttgacatgaatgagcagatgctgcctcgttgcagtctggtagtgtaattccaggctgcgcatgtgracttcgacttctgcccctgcccagggcagagaccaccgtgttgctttatgcctcgctggtgagagggggtcataaacagtttgtgctccatgaacccttc

SEQ ID NO: 220462 - DNA, 201 bp, Homo sapiens
tgtcttggtcagccccggctgccatgacaaaataccataaactgggtggcttagacacagaaatgtgttttctcacagtcccagaggcttgggatgtccargatcaatgtggggaggacacaactgagcccacaacaatagtctgtactcagtaatgagtgataattggggactgaagaaaatgaacacgttaagaactaa

SEQ ID NO: 220463 - DNA, 201 bp, Homo sapiens
agaaatgagatctcactatgctgctcaggccggtggtcttaaacccctaggctcaagcaatcctccctccttggcctcccatagtgctgagattacaggcrtgagccactgtacctgacccctttcaccttgtttagcctgacaacccatcttctccctctcaggtctttccatctcagtcttctgcactccaggcttctg

SEQ ID NO: 220464 - DNA, 201 bp, Homo sapiens
gggcgtggtggcgggcgcctgtagtcccagctactcgggaggctgaggcaggagaatggtgtgaacccgggaggcggagcgtgcagtgagccgagattgcrccactgcactccagcctgggcgacagagtgagactctgtctcgaaaaaaaaaaaaaaaaagatagggacgtgtatgttaacttgcgctatccaaacaaca

SEQ ID NO: 220465 - DNA, 201 bp, Homo sapiens
ctggtgacgttcctggagctgtcttgaagtccgagctgccttgcagctcgtagtctgcctctgtttttggctttcccagatagtttcaattcttactctcmgtttgtgaacctcccttcagtgaacctcccttcacttatgctggattctcttgcaactggatgagcttcactaaagcagagtcatttggacctggattcg

SEQ ID NO: 220466 - DNA, 201 bp, Homo sapiens
gtgtgaacccgggaggcggagcgtgcagtgagccgagattgcgccactgcactccagcctgggcgacagagtgagactctgtctcgaaaaaaaaaaaaaaraagatagggacgtgtatgttaacttgcgctatccaaacaacaagctgtgcttatggtcctctgcctgtgcgtcatgattttccaggacttcacaacggga

SEQ ID NO: 220467 - DNA, 201 bp, Homo sapiens
cttcagtgaacctcccttcacttatgctggattctcttgcaactggatgagcttcactaaagcagagtcatttggacctggattcgaatccctggttttcsactttttagctgtgactttgagcaattatttaatttctgtaagcatcagtatccagtagctgtatccttatagtgttgtacagattaaatgagataataa

SEQ ID NO: 220468 - DNA, 201 bp, Homo sapiens
aagaagagcccctttggcaaggatgttcggctggtctcccttggctcccggcaggtaaacagtagccagtatttccaccaggggccatcctgctcctttcsccacaactttgtcctgctcgtccaggccttgggagacgctgggtctgtgacaggctgaaccgtgtgaggagcagccccctccctgacctggccggcccag

SEQ ID NO: 220469 - DNA, 201 bp, Homo sapiens
cccgggaggcggagcgtgcagtgagccgagattgcgccactgcactccagcctgggcgacagagtgagactctgtctcgaaaaaaaaaaaaaaaaagatarggacgtgtatgttaacttgcgctatccaaacaacaagctgtgcttatggtcctctgcctgtgcgtcatgattttccaggacttcacaacgggataaagtg

SEQ ID NO: 220470 - DNA, 201 bp, Homo sapiens
acaacttaacagcagccgtactagcttttcctgtttgcctatccagagattttcatagtttgaagttgggcagagtagtctctgtttatctgagtaatagycacttcctctattaaagtcttttttttttttttttgagacggagtctcgctgtgtcgcccaggccagagtgcagtgggacgatctcggctcactgcaagc

SEQ ID NO: 220471 - DNA, 201 bp, Homo sapiens
atatgtcttaatattctgttttttctagttaataattgcccttttaaagttagtttagtttttaatatacctatgccagttcctcccacatcatccagtgrcctctcaatatgattttccatacagataactcctgtcttagtcggccaggactgccatagtaaaataccatagactgggtgacttaacaggaatttattt

SEQ ID NO: 220472 - DNA, 201 bp, Homo sapiens
ttaatattctgttttttctagttaataattgcccttttaaagttagtttagtttttaatatacctatgccagttcctcccacatcatccagtgacctctcratatgattttccatacagataactcctgtcttagtcggccaggactgccatagtaaaataccatagactgggtgacttaacaggaatttattttctcacc

SEQ ID NO: 220473 - DNA, 201 bp, Homo sapiens
gtagaaatgagatctcactatgctgctcaggccggtggtcttaaacccctaggctcaagcaatcctccctccttggcctcccatagtgctgagattacagkcatgagccactgtacctgacccctttcaccttgtttagcctgacaacccatcttctccctctcaggtctttccatctcagtcttctgcactccaggcttc

SEQ ID NO: 220474 - DNA, 201 bp, Homo sapiens
tcctctgctcagcctttaattgtcgatgtttctggttctatagcttcatcttcttgtgtgcagtctctgtgaatgtaccctgtggctttattacctttgayattcttctgtcttctaaatcatctcctgaatagagtgttttctcctgtcctgggtgtcccgcagcccatagaagcagccatgctgtgggacaccctgagt

SEQ ID NO: 220475 - DNA, 201 bp, Homo sapiens
ctgtgccttgtgtaatactgcagttccgggagtcctccaacctggaatgcatgctttgcggggatctatgatgccctcgaattgtatgttacatgtgaacytgtgagcattttctaggggctctgcacctttgtgtcctcagctctgagccccatgcttgctgcaaccagcaggtgttcagagtgaatgaatttgcttatc

SEQ ID NO: 220476 - DNA, 201 bp, Homo sapiens
gtgacacactccctcccctcccaccaacaacccaccctccccaagtggggaccctttgccacgggagatggtcacccatgtccaaagattggccaaccccscaaaagcggttgattagaggctggatatgactcgtggaaggagctgcctttggggcattcccttgaacttctggagctgtgggtgacttgggaatccctg

SEQ ID NO: 220477 - DNA, 201 bp, Homo sapiens
ttaaacatagctctgtggtctgagaaaaattaggctgaagtcattggtgcctacctattacggtagatgagacggctttcttaccaactcttttccctccsgttccccatccttcaaatataattctaagttttagtctctgctgagtgaaccagtgtgttatgattatgttttgaacataattttgtcttgaacaatatg

SEQ ID NO: 220478 - DNA, 201 bp, Homo sapiens
tttgattacccttcttgtaataattcctctacctctgtagtcatgtttttcttttttcattttttcttgtccccagaatgtctaacaaaacagccaaatayacctctgtgaagacagagggtaaaataatgctagttctgtgagttctctcttcttgtgcaaatccataaactgccaccaatctgtagtcattttaattgc

SEQ ID NO: 220479 - DNA, 201 bp, Homo sapiens
ctattacgggagccgccttgccatccctgcagcccaggtgagggccctgcagggccagaaagccgctcttgactctcactgtggtctaggccatgaggggsgtcctcatcacactgtagtttgggggatgccccccaccgtggtcaggttgatggcaccttaacccattctctcctgatgcgtgagttggaggaggcgcgt

SEQ ID NO: 220480 - DNA, 201 bp, Homo sapiens
cacagcgtggaggtcagcggctcccaggtgtgtgggcctcccctccccgggccagggcctgctgtgaggtaaagggacttggatggttcctccagacaccygggccaagagttcctccggaggtggggcttgatagagggtgcacaagtcaaggcggtgacctcatcggaggctgaccatggctttccagtgcatcggggg

SEQ ID NO: 220481 - DNA, 201 bp, Homo sapiens
gcgcacaacctgatcgacaccatcacgggcatgcacagcgtggaggtcagcggctcccaggtgtgtgggcctcccctccccgggccagggcctgctgtgasgtaaagggacttggatggttcctccagacacctgggccaagagttcctccggaggtggggcttgatagagggtgcacaagtcaaggcggtgacctcatcg

SEQ ID NO: 220482 - DNA, 201 bp, Homo sapiens
cataaatcatgtaactgttgatgataccccaggaaggtgagcctttggttataaatccttttaacattttccagtctaaaagttttgtggtcttattacasgatgtagaaaacagtgggcctcagttattcttttgctgttgtgccggagtataccacggttgtttttgaaagataactttgaccatacccttaggaactt

SEQ ID NO: 220483 - DNA, 201 bp, Homo sapiens
cctggtgagcctcatttcttggggggcaggattatgtccaggcagggttgctctgcttggaggctcatgggtgcgtggtcagggccttggtctcccctccrtgaccctcactggctatgtgctcccgtacagaagctgggctgtgagtggttgaggcgtggatcctaggagtcgacctctctccagccaggcagccaggcc

SEQ ID NO: 220484 - DNA, 201 bp, Homo sapiens
gctgcaaatggatctgatggagagcgtgtggctttgggaggagtgtgccgccttccgcagtgagcagcgaggctgggaccggcagggatgaggtcccgggwggggatgcggcagcccttgagtgctggccggggaaggagagatgcccccagtgaggaggcgccgggctgagtggcccagactccttaggagaggcctggt

SEQ ID NO: 220485 - DNA, 201 bp, Homo sapiens
tccctggctgggctcgagctgcttcagggcaggaaccacgtctttatagtttgatgttcccagagctgacccagtgtttggcataggggtgtgctcaatamaatcgagttgacatgaatgagcagatgctgcctcgttgcagtctggtagtgtaattccaggctgcgcatgtggacttcgacttctgcccctgcccagggc

SEQ ID NO: 220486 - DNA, 201 bp, Homo sapiens
tgacccagtgtttggcataggggtgtgctcaataaaatcgagttgacatgaatgagcagatgctgcctcgttgcagtctggtagtgtaattccaggctgcscatgtggacttcgacttctgcccctgcccagggcagagaccaccgtgttgctttatgcctcgctggtgagagggggtcataaacagtttgtgctccatga

SEQ ID NO: 220487 - DNA, 201 bp, Homo sapiens
tttgtctgcagccagccccctctcctccctttggtggcttcctgtgtgtccagggccagcatcttctaggtgaatctaagatgtcagtaccttagccctcrgctgcttgctcagagcctggtttgtgttctttccccagctctgccaggcccattcccagctgctgcagtacgtggagcgatacgggtgagatgtgaccct

SEQ ID NO: 220488 - DNA, 201 bp, Homo sapiens
ggtgtgctcaataaaatcgagttgacatgaatgagcagatgctgcctcgttgcagtctggtagtgtaattccaggctgcgcatgtggacttcgacttctgsccctgcccagggcagagaccaccgtgttgctttatgcctcgctggtgagagggggtcataaacagtttgtgctccatgaacccttcctgcccacctccga

SEQ ID NO: 220489 - DNA, 201 bp, Homo sapiens
tggagaaccggcctgggttactcagtttgtgcagaagaaagaagagagggacctggtggaccgactaaaggtgagacctggggtatccggaagtgggagtrctggaggaaacagggcttcagcgattgttctggggcgattccgagactcaggcagtgcatgctcccctgccgttgccgtgcctctcagctcttccctcag

SEQ ID NO: 220490 - DNA, 201 bp, Homo sapiens
ggggcaggtccacatgtgttggtaggatgtcatttagctggcaccatctttttgcccctttctttctcctttgctgcagaacctttgtgtaaatgaagacrtgaaaagcctaggttctgtgcagcttatcaacgaccgctgcgtggacatgcagagaagcaggcacggtagccactgggaccgtggtgtagccgcaggtgg

SEQ ID NO: 220491 - DNA, 201 bp, Homo sapiens
tgggcctcccctccccgggccagggcctgctgtgaggtaaagggacttggatggttcctccagacacctgggccaagagttcctccggaggtggggcttgmtagagggtgcacaagtcaaggcggtgacctcatcggaggctgaccatggctttccagtgcatcgggggaccccgctatgacagagtgcctcatttccctg

SEQ ID NO: 220492 - DNA, 201 bp, Homo sapiens
aggtcagcggctcccaggtgtgtgggcctcccctccccgggccagggcctgctgtgaggtaaagggacttggatggttcctccagacacctgggccaagarttcctccggaggtggggcttgatagagggtgcacaagtcaaggcggtgacctcatcggaggctgaccatggctttccagtgcatcgggggaccccgctat

SEQ ID NO: 220493 - DNA, 201 bp, Homo sapiens
tggaaactttcctaacaacaaacacctaaagatgtgcagagttgcttttatttttgttaccccagctccacgccttaaccctcactttgaaataggatgtrtcaaccctattttgcagatgaggaaagcaagggtcagagaggttagacaactcttccagagtcacacagctgggaagtagcagctccaggagcagaagct

SEQ ID NO: 220494 - DNA, 201 bp, Homo sapiens
tggggaggaggagctggtcctcgccgaatacgagagtgatgaggagaaaaaggtggcgagcaggtgagacagaggcgatagcactaccctgccccaggccrggggacacccttgaagacagctctttccctcatgccacagatgccatgaagcacctggcaagaggcatggtggcctctgccctctgctctaagccgggtc

SEQ ID NO: 220495 - DNA, 201 bp, Homo sapiens
acgaggcgcacaacctgatcgacaccatcacgggcatgcacagcgtggaggtcagcggctcccaggtgtgtgggcctcccctccccgggccagggcctgcygtgaggtaaagggacttggatggttcctccagacacctgggccaagagttcctccggaggtggggcttgatagagggtgcacaagtcaaggcggtgacct

SEQ ID NO: 220496 - DNA, 201 bp, Homo sapiens; identical to SEQ ID NO: 39813

SEQ ID NO: 220497 - DNA, 201 bp, Homo sapiens
gtggacttcgacttctgcccctgcccagggcagagaccaccgtgttgctttatgcctcgctggtgagagggggtcataaacagtttgtgctccatgaaccsttcctgcccacctccgaggtcatgtttctgctccctctcttctcccttagagcccgtggggacaaggcagagaacttgagtggagatggaggtggtgaat

SEQ ID NO: 220498 - DNA, 201 bp, Homo sapiens
gcccagggcagagaccaccgtgttgctttatgcctcgctggtgagagggggtcataaacagtttgtgctccatgaacccttcctgcccacctccgaggtcrtgtttctgctccctctcttctcccttagagcccgtggggacaaggcagagaacttgagtggagatggaggtggtgaatattaaaggaacaaagtgctcct

SEQ ID NO: 220499 - DNA, 201 bp, Homo sapiens
ttactcttctgatagcccaagacaattgtattctgctttgttagaaaggaatttcgaggtgaacaaaaatgttttctttttatgtgatgttgccataggtrgcgtgtgcctgtcagatggttttgtgttttctgaggagcatagactagtagagctagctcagcttcaggccatgggatgcagggctggcttccctgccaa

SEQ ID NO: 220500 - DNA, 201 bp, Homo sapiens
ggataatgagctgcagtatgtggaccaacttctgaaagaggatgtgagaaataactctgtctggaaccaaagatacttcgttatttctaacaccactggcwacaatgatcgtgctgtattggagagagaagtccagttagtaatctccttcacttgctcattcgttacaaacatgtttgcatgcctaccatatctcaggca

SEQ ID NO: 220501 - DNA, 201 bp, Homo sapiens
cactgctgccttgagctcctgagctgaaggaatcctcccacctcagcctgcgagtagctgggactacaggcatgtgccactgcatccagctaattgttaarattttttgtagcgatgaggtctcactatgttgcccagactggtcttgatctcctggcctcaagcagtcttcccgctttgatctctgaaagtgctgggatt

SEQ ID NO: 220502 - DNA, 201 bp, Homo sapiens
aatttcatcaattttattttctaactctcgtatggatttttaaagatttctgcattcatttttaatttgggggagctgtttttttgttctgtgaatatgcttttttttttttgagacagagtctcgctcagttgcccaggctggagtgcagtggctcgatctctgctcactgcaagctctgcctcctgggttcacgccatt

SEQ ID NO: 220503 - DNA, 201 bp, Homo sapiens
ttttttttaactctaagcatacacagatagatgtacataattatttttgtcatttttttctttttattataaaagtaatgcaatgtagttatgggggggggaaattgtactaaattctataaagtaaaaagtcaaagtcttttactgttcttcatcccacatcccattttccagagtgagctataattgggtgaatttttc

SEQ ID NO: 220504 - DNA, 201 bp, Homo sapiens
tgtatgtaatggatgtgaggtagccgaagtttggttcagtaagcagggaatacagtcgttccatcagagctggtctgcacactcacattatcttgctatcmctgtaaccaactaatgccaaaagaacggttttgtaataaaattatagctgtatctaaaaacaatgccatagaagtttgattttttaatagcattgaacta

SEQ ID NO: 220505 - DNA, 201 bp, Homo sapiens
tgcctgtgctctataaatggaacaacaaagcctggatgacagcacatctgtttacagcatggtttactgaatattttaagccctctttgaggtctgttgttcagaaaaatttcttggaaaatatgattgttcatggacaacggacctcatcacccaagagctctaatggagatgtgcaaggagatgctgttttcatgcctg

SEQ ID NO: 220506 - DNA, 201 bp, Homo sapiens
tgttagctaacctttataatctctttggatgtagtaaatttttagtattttttagattgaatttgtatcatatttgctagcaaattgagtataaagagtarcatatttttactacagatgtattattttaactaacaaaggcatattatacatttttttcatatataaactttggaataggattttacagtaacttaagtt

SEQ ID NO: 220507 - DNA, 201 bp, Homo sapiens
ctgcctgtgctctataaatggaacaacaaagcctggatgacagcacatctgtttacagcatggtttactgaatattttaagccctctttgaggtctgttgttcagaaaaatttcttggaaaatatgattgttcatggacaacggacctcatcacccaagagctctaatggagatgtgcaaggagatgctgttttcatgcct

SEQ ID NO: 220508 - DNA, 201 bp, Homo sapiens
tgagatctctaaaaaatatttcatgacatatatattaaaaacgtggtaaaattttagttttaaacgttagttttaaacatgaattataaacattcatggcytgtatgtcattggcattgactgtactagagcttcttaaatgaaggagtagaggacccttctttgtccccaaccgatcacagattggatgtattttactgt

SEQ ID NO: 220509 - DNA, 201 bp, Homo sapiens
tctgcctgtgctctataaatggaacaacaaagcctggatgacagcacatctgtttacagcatggtttactgaatattttaagccctctttgaggtctgttgttcagaaaaatttcttggaaaatatgattgttcatggacaacggacctcatcacccaagagctctaatggagatgtgcaaggagatgctgttttcatgcc

SEQ ID NO: 220510 - DNA, 201 bp, Homo sapiens
aatttccatgccattttttaatgatagctaaagattatgtaaattctcctatttcagtgactagggatttgttgggacgtaagtagagcttagactgtttycccaaggttgctttaccaataaatggaaagtttccttcttttagctgatgtttccttcaaaaggaaaatcttccatattatttaaaggaaatattttatg

SEQ ID NO: 220511 - DNA, 201 bp, Homo sapiens
ccattttgacagggaatcacatcacagtttactagtcatcttgctttggaatataagaaatacattcttgtgttgatttttcatttttattctttgcctawgtaatttccatgccattttttaatgatagctaaagattatgtaaattctcctatttcagtgactagggatttgttgggacgtaagtagagcttagactgt

SEQ ID NO: 220512 - DNA, 201 bp, Homo sapiens
gctactagccacatatggctatttaagtttcaatcggtatgattataaaaaattaaaaatacaattatttcattgcacatgtcctattttgggcgttcagkacgtacatgtggctagtgactaccatattggacagcacatacaaaacatttgcatcatcactggcagttttattgaacattattcgtctaaagattgaca

SEQ ID NO: 220513 - DNA, 201 bp, Homo sapiens
ttctcgtgcctcagccttctgagtagctgggattacaggcatgtgtcaccatgcccagctaatttttgtatttttagtagagatggggtttcaccatgttrgtcaggctggtcttgagcttctgacctcaagtgatcctcccacctcggcctcccaaggtgctgagattacaggcctgagccactgctcaaattcaacttt

SEQ ID NO: 220514 - DNA, 201 bp, Homo sapiens
gctttggagctatcccagcctgatagcctcccagtttattttatcaatgtgcatatgtgtatgttttatgtgtgtgtgtgtgtgtgtgtgtgtgtgtgtgtaagataatgtattatatatatacatttgtatacatatttaatatgttaccattttgttttaaatttgaaattatttggaagcttggttttttttttgaga

SEQ ID NO: 220515 - DNA, 201 bp, Homo sapiens
ggctttggagctatcccagcctgatagcctcccagtttattttatcaatgtgcatatgtgtatgttttatgtgtgtgtgtgtgtgtgtgtgtgtgtgtgtgtaagataatgtattatatatatacatttgtatacatatttaatatgttaccattttgttttaaatttgaaattatttggaagcttggttttttttttgag

SEQ ID NO: 220516 - DNA, 201 bp, Homo sapiens
atacagttaatactatataaccgttaagaggatttagatctattataacatgaacagatctcagaaacaatgttgagttaaaaaagtcaaagtttgagaawcttcgagcatgacaatatgttgtttataattttttttttttgagatggagtttcgctcttgttgcccaggctggagtgcaatggcatgatcttggctcac

SEQ ID NO: 220517 - DNA, 201 bp, Homo sapiens
tgtcttgatattatattaggtattaagatatatgaagagctccatacatttcatatgggatttttcgaatgtttagccattttggaaagtagtttggtatmtctgttaaaactggaaaatgcacttatcttacaacctagcagtgtgttgcttctaatttaatattgggttcattctggcacatggcatgagaagatatgc

SEQ ID NO: 220518 - DNA, 201 bp, Homo sapiens
tagcagaattggaattcacaactatgtagcaagatagatgacaaatttctgtctaataaaaatctgaatgacttaagatgagttaattttgtgtttttttwatgtgtgtgtgtgatttagctttatgattaaaagttttattttgcccaaagactggacatattctaaataataaacgttacagtatagtagataatagct

SEQ ID NO: 220519 - DNA, 201 bp, Homo sapiens
tgagctatgctcacgccaccacagtccatcctgggcaacaaaatgagaccctgtctcaaaagaaaaaaaattaaaagtgaaatacacacacacacacacamtactactcaccagtcaaaagaaatgaatgatccataccggcaacaacttggatggatctcaagggtatgatccttagtggaaggggaagtctcaggtttc

SEQ ID NO: 220520 - DNA, 201 bp, Homo sapiens
tgcactgtagtctggacgacaagagcaaaactctgtctcaaaaaaaaaaaaaattaactttgtgaattcttacatacaccatggttagaaaccctaaaggraaagataagtttgacctgtcaaccgtttatagacaaatatatcaatttaaaacttacacagcagaagaaaccatgagcaagttaaaaagcaagcagcagt

SEQ ID NO: 220521 - DNA, 201 bp, Homo sapiens
tggtataaatgatacacaggccaataaaatatctttataggtatagtgacattatacattatagtgctaattttaagtaagatggtcctaatgtagttgtktgctctatctctagttagagatgtttatgattacttccgagctgtcctgcagcgtgatgaaagaagtgaacgagcttttaagctaacccgggatgctatt

SEQ ID NO: 220522 - DNA, 201 bp, Homo sapiens
aacactttgggaggcccaggcaagtggatcccgtgaggccaggagttcacgactagcctggcaacatggcaaaaccccgtctctacaaaaaatacaaaaaatgagacgagcgtagtggcgcatgcttgtgttcgcagctactcaggaggctgaggcaggagaatcacttgagcccaagaggtggaggctgtggtgagctat

SEQ ID NO: 220523 - DNA, 201 bp, Homo sapiens
gattgacagtagttagcggtaacaaagcattttaaaaattgaatatgaagagttttcaaaatgcaaacgtttagccttttcagaggcagatcactggcttyctgttgccaaatagaaacagaaataattacccaagaatctaaaagagcttcctatacttaggatttattttccttttaagatgggtaaaagaagtattta

SEQ ID NO: 220524 - DNA, 201 bp, Homo sapiens
tgcttgaacctgagaggtggaggttgcagtgagccacgatcacgccattgcactgtagtctggacgacaagagcaaaactctgtctcaaaaaaaaaaaaaattaactttgtgaattcttacatacaccatggttagaaaccctaaaggaaaagataagtttgacctgtcaaccgtttatagacaaatatatcaatttaaaa

SEQ ID NO: 220525 - DNA, 201 bp, Homo sapiens
ttgcagtgagctgagattgcgccattgcactccagcctgggggacaatgcactccagcctggggaacaagagcgagacttcgtctcaaaaaaaaaaaaaaacaaaaaaactcctctgttgacaacttgcaacttgtcatagctacttgccagtgtagcagtaaattcagttctgcccactcatttgtagaatgagaagctg

SEQ ID NO: 220526 - DNA, 201 bp, Homo sapiens
agttcctgaactccactaggaactttcacaaaaatgttactttccttaatgcgtttatttttatgatcacctgtaaaatcggggactatcataggagatthttttttgctgttaccaaataagaaaactccattatcttttttataatgtcccctactttcaaattatttataagttttttttatcattttcctcttttaa

SEQ ID NO: 220527 - DNA, 201 bp, Homo sapiens
catgcacacacgtaagcagtaagcatacagttatacataaatagtccatgctttttgtggctgaggcactagggcattattagggtggcggccacagccakttgactttattttgcttgttggtataaatgatacacaggccaataaaatatctttataggtatagtgacattatacattatagtgctaattttaagtaag

SEQ ID NO: 220528 - DNA, 201 bp, Homo sapiens; identical to SEQ ID NO: 39830

SEQ ID NO: 220529 - DNA, 201 bp, Homo sapiens; identical to SEQ ID NO: 39838

SEQ ID NO: 220530 - DNA, 201 bp, Homo sapiens; identical to SEQ ID NO: 39839

SEQ ID NO: 220531 - DNA, 201 bp, Homo sapiens; identical to SEQ ID NO: 39840

SEQ ID NO: 220532 - DNA, 201 bp, Homo sapiens; identical to SEQ ID NO: 39841

SEQ ID NO: 220533 - DNA, 201 bp, Homo sapiens; identical to SEQ ID NO: 39842

SEQ ID NO: 220534 - DNA, 201 bp, Homo sapiens
tacagactctttactttaggacatggcataacccccagagggtaatgatattgagaaagctttgccattggaaacacaatttcatagacaagaagagaagrttatgttcacattacttttcatgcttcacatggcaagaacattccgctctttaatgttaggattcataactttccctaaatactctgtgctctgttgtct

SEQ ID NO: 220535 - DNA, 201 bp, Homo sapiens; identical to SEQ ID NO: 39843

SEQ ID NO: 220536 - DNA, 201 bp, Homo sapiens
tgatattgagaaagctttgccattggaaacacaatttcatagacaagaagagaagattatgttcacattacttttcatgcttcacatggcaagaacattcygctctttaatgttaggattcataactttccctaaatactctgtgctctgttgtctaaatggtaacaccaagaatcatcacttttcctccataataggatg

SEQ ID NO: 220537 - DNA, 201 bp, Homo sapiens; identical to SEQ ID NO: 39844

SEQ ID NO: 220538 - DNA, 201 bp, Homo sapiens; identical to SEQ ID NO: 39845

SEQ ID NO: 220539 - DNA, 201 bp, Homo sapiens; identical to SEQ ID NO: 39846

SEQ ID NO: 220540 - DNA, 201 bp, Homo sapiens; identical to SEQ ID NO: 39847

SEQ ID NO: 220541 - DNA, 201 bp, Homo sapiens; identical to SEQ ID NO: 39848

SEQ ID NO: 220542 - DNA, 201 bp, Homo sapiens; identical to SEQ ID NO: 39849

SEQ ID NO: 220543 - DNA, 201 bp, Homo sapiens; identical to SEQ ID NO: 39850

SEQ ID NO: 220544 - DNA, 201 bp, Homo sapiens
attttttctctatctaaactcactccatctcttaataacatcatctaggtcgaggccgacgtcgcttccggagcagcatggcggccactgaggaggagagrctagcagggagcggtgagggagagcggctggatttcttgcgggatctgcacgtgcgatttttccagcgctgcctcgaggttttgccggagcgctgttctt

SEQ ID NO: 220545 - DNA, 201 bp, Homo sapiens; identical to SEQ ID NO: 39852

SEQ ID NO: 220546 - DNA, 201 bp, Homo sapiens; identical to SEQ ID NO: 39853

SEQ ID NO: 220547 - DNA, 201 bp, Homo sapiens; identical to SEQ ID NO: 39854

SEQ ID NO: 220548 - DNA, 201 bp, Homo sapiens; identical to SEQ ID NO: 39855

SEQ ID NO: 220549 - DNA, 201 bp, Homo sapiens; identical to SEQ ID NO: 39856

SEQ ID NO: 220550 - DNA, 201 bp, Homo sapiens
tcttaataacatcatctaggtcgaggccgacgtcgcttccggagcagcatggcggccactgaggaggagaggctagcagggagcggtgagggagagcggckggatttcttgcgggatctgcacgtgcgatttttccagcgctgcctcgaggttttgccggagcgctgttcttcacttgagacaagcaggtctttcccacag

SEQ ID NO: 220551 - DNA, 201 bp, Homo sapiens; identical to SEQ ID NO: 39858

SEQ ID NO: 220552 - DNA, 201 bp, Homo sapiens; identical to SEQ ID NO: 39859

SEQ ID NO: 220553 - DNA, 201 bp, Homo sapiens
gagggaggagacgtgcacaacgccacgacggacggggacaggtttccggggacacattcgctcggcggggggcgggagcctcggacgcctcacctctccgmctcagcagcagcgcggccacggcgctgtccacgccgccggacagggcgcacacgacgtgccgcaaggcctgcatccgccagtcgcccaacttcgccagct

SEQ ID NO: 220554 - DNA, 201 bp, Homo sapiens
gtctgtctgtagagagttaaagtcagatcactctgtctggcctgggtaccaaggagagcctggctgcactgaagccgcaccggggaggggaagggcacagsggggaggagccccagcagcgggattggggccacaggccaaaggctgggctcacccccagggcctgaatggagacaactgaggcacagcttggttacagat

SEQ ID NO: 220555 - DNA, 201 bp, Homo sapiens
atgacctattttctaccttttcgattgtaacaaaatattcacccaaatattggaaaggccaactttagccctacaccaccttagcaaactacacaggtgcmgaccctgtatgagaaagctggttcgtttaggtaggctgaatgtaatgaaagacagggcaaatgactgctgaagaaggcttcatatagtacccaaaacaac

SEQ ID NO: 220556 - DNA, 201 bp, Homo sapiens
taatccctccagtcaccccgtgaggcaggtgttagccgaattttacaggggacggcttaattcacttgcccaaggtcaggagccaaagatggcgcaaagcmgagctccacaaacgtgactctgtgaatgaggcctcccgcggggagccacacaggtgaagttaaacaagtgctcatttcagcgccgggcccgaggaatgct

SEQ ID NO: 220557 - DNA, 201 bp, Homo sapiens
aaagtcagaggacggggtatcctcctgccgacccgcgcgcaaccagcggcccagggagggaggagacgtgcacaacgccacgacggacggggacaggtttycggggacacattcgctcggcggggggcgggagcctcggacgcctcacctctccgcctcagcagcagcgcggccacggcgctgtccacgccgccggacagg

SEQ ID NO: 220558 - DNA, 201 bp, Homo sapiens
cctcctgccgacccgcgcgcaaccagcggcccagggagggaggagacgtgcacaacgccacgacggacggggacaggtttccggggacacattcgctcggsggggggcgggagcctcggacgcctcacctctccgcctcagcagcagcgcggccacggcgctgtccacgccgccggacagggcgcacacgacgtgccgcaa

SEQ ID NO: 220559 - DNA, 201 bp, Homo sapiens
  misc_feature (1)...(201): n = A,T,C or G
ggggacacattcgctcggcggggggcgggagcctcggacgcctcacctctccgcctcagcagcagcgcggccacggcgctgtccacgccgccggacagggngcacacgacgtgccgcaaggcctgcatccgccagtcgcccaacttcgccagctgcagctaccgccgcttccgcgccttgccggaagtcccgccccggccg

SEQ ID NO: 220560 - DNA, 201 bp, Homo sapiens
ttttttcctgctctttcatctcagaacctgaggacccagacacggagcggtcggccttcatggagcgggatgctgggagcgggctggtgatgcgcctccgygagcggccagccctgctggtcagcagcacaggctggacaggtctgcacgacccctagaacacttgggcttggtgtgacgggcacctggccaacctgtgtt

SEQ ID NO: 220561 - DNA, 201 bp, Homo sapiens
caggccctcataaaacaatgagtgctgaaagttccagccttcttggtgggttctcagcaccccgtcgtgagccacaccctgccccagggaaatcagggtcrccctgctgctacccctaggccagtgccccttctgaagtgccccaggctggcacccctatacttagatctcttcaacctcctcatgaaaaccttcttgccc

SEQ ID NO: 220562 - DNA, 201 bp, Homo sapiens
tctcagttcatgcaacctccgcctcctgggttcaagcgattctcccacctcagcctcccgagtagattacgggattacaggagcccgccacaacacctggyttatttttgtatttttagtagaaacagggtttcaccgtgttggccaggctggtcttgaactcctgacttcaagtgatcctcctgccttggcctccctaag

SEQ ID NO: 220563 - DNA, 201 bp, Homo sapiens
agcgggatgctgggagcgggctggtgatgcgcctccgcgagcggccagccctgctggtcagcagcacaggctggacaggtctgcacgacccctagaacacytgggcttggtgtgacgggcacctggccaacctgtgttctcctcacccctgccagtcctgcatgcccccaccccgccacagtctcaatgagaaggggaggg

SEQ ID NO: 220564 - DNA, 201 bp, Homo sapiens
aatgcagggctgtgcgtcaggggtcagagtgcacacacccctgcaggtctaggggctcctgcgttgcttctggaagggcctggatgggacctgactggagmggccgaggggtggagcttctgggaaagggatccctcctcggggggagtgtcttgggcctgaggccaattggcagggacagagacgagtccatggcagtat

SEQ ID NO: 220565 - DNA, 201 bp, Homo sapiens
tcgctccgttgcctaggctggagtgcacgatctcagttcatgcaacctccgcctcctgggttcaagcgattctcccacctcagcctcccgagtagattacrggattacaggagcccgccacaacacctggtttatttttgtatttttagtagaaacagggtttcaccgtgttggccaggctggtcttgaactcctgacttc

SEQ ID NO: 220566 - DNA, 201 bp, Homo sapiens
cgttgcttctggaagggcctggatgggacctgactggagcggccgaggggtggagcttctgggaaagggatccctcctcggggggagtgtcttgggcctgrggccaattggcagggacagagacgagtccatggcagtatctgctcttctctgtgaaggcaaagggcctccgagggagtattacagccgcctcatccacca

SEQ ID NO: 220567 - DNA, 201 bp, Homo sapiens
cgcctcctgggttcaagcgattctcccacctcagcctcccgagtagattacgggattacaggagcccgccacaacacctggtttatttttgtatttttagyagaaacagggtttcaccgtgttggccaggctggtcttgaactcctgacttcaagtgatcctcctgccttggcctccctaagtgctgggattccaggcgtg

SEQ ID NO: 220568 - DNA, 201 bp, Homo sapiens
cttccagcctggcacacaggcaggccctcataaaacaatgagtgctgaaagttccagccttcttggtgggttctcagcaccccgtcgtgagccacaccctrccccagggaaatcagggtcgccctgctgctacccctaggccagtgccccttctgaagtgccccaggctggcacccctatacttagatctcttcaacctcc

SEQ ID NO: 220569 - DNA, 201 bp, Homo sapiens
cagtatctgctcttctctgtgaaggcaaagggcctccgagggagtattacagccgcctcatccaccagaagcatttccagcacatccaggtctgcaccccytggctggaggccgaggactacccccgcttctaggtgagaggccagcaggaggctcagggaggaggcggggccttaagcagggggaacaggggtgggcggg

SEQ ID NO: 220570 - DNA, 201 bp, Homo sapiens
caccgtgttggccaggctggtcttgaactcctgacttcaagtgatcctcctgccttggcctccctaagtgctgggattccaggcgtgacccatcacgcctrgccccagctagtctttagaaatgttaagctgtttcactttattttcacactgacagctggtttgtagtgggtgtgctgtggttttttattattattatta

SEQ ID NO: 220571 - DNA, 201 bp, Homo sapiens
acatccaggtctgcaccccttggctggaggccgaggactacccccgcttctaggtgagaggccagcaggaggctcagggaggaggcggggccttaagcagsgggaacaggggtgggcgggatgtactttttctgaaaatgtggctctggaggccacttggggacaggacctgggctctggctgaactcccgggaggaggct

SEQ ID NO: 220572 - DNA, 201 bp, Homo sapiens
gtccatggcagtatctgctcttctctgtgaaggcaaagggcctccgagggagtattacagccgcctcatccaccagaagcatttccagcacatccaggtcwgcaccccttggctggaggccgaggactacccccgcttctaggtgagaggccagcaggaggctcagggaggaggcggggccttaagcagggggaacagggg

SEQ ID NO: 220573 - DNA, 201 bp, Homo sapiens
tgtgggagggcagtggctttgggaggtacagggacgatgtgtgaaacagcgtcgcctctcccagtgagatggttctcctttgcctccgtctctttccccgytgacttctccaagtggggagtcgtggcttggtcctgatgcgtctctagagccacatcttccagcttcgagtgagcagagcagttggaggctgagggcctt

SEQ ID NO: 220574 - DNA, 201 bp, Homo sapiens
cagaaaccacaccccctgttccaacccccagcctggcttgagcatgggttgttggggggagcccaggtgggcaccccaggggtctggtgtcttctccaggsagctctcaggctcccttggttctctctgcagtttacatgagctggtgaaacatgaagaaaatggcctggtctttgaggactcagaggaactggcagctca

SEQ ID NO: 220575 - DNA, 201 bp, Homo sapiens; identical to SEQ ID NO: 39871

SEQ ID NO: 220576 - DNA, 201 bp, Homo sapiens
ggagggcagtggctttgggaggtacagggacgatgtgtgaaacagcgtcgcctctcccagtgagatggttctcctttgcctccgtctctttccccgttgayttctccaagtggggagtcgtggcttggtcctgatgcgtctctagagccacatcttccagcttcgagtgagcagagcagttggaggctgagggccttttcc

SEQ ID NO: 220577 - DNA, 201 bp, Homo sapiens
agtcttgtttgctgttgtaaccttagcacccagcaacaatattagagaaagcaagcccaggcctcagatggcaggggtggcctggtgctgctgatgtggcygggcaccccaacctttgggagcctgcaggccttgccatggcaggagatgcccgtcctgggtcccgggcctgctctgtggcctctcacaggcttttttcct

SEQ ID NO: 220578 - DNA, 201 bp, Homo sapiens; identical to SEQ ID NO: 39868

SEQ ID NO: 220579 - DNA, 201 bp, Homo sapiens
ttgcctccgtctctttccccgttgacttctccaagtggggagtcgtggcttggtcctgatgcgtctctagagccacatcttccagcttcgagtgagcagarcagttggaggctgagggccttttcctggcaggactctccagttagtctttgttttagacagtctcgctccgttgcctaggctggagtgcacgatctcagt

SEQ ID NO: 220580 - DNA, 201 bp, Homo sapiens; identical to SEQ ID NO: 39870

SEQ ID NO: 220581 - DNA, 201 bp, Homo sapiens
gtggggagtcgtggcttggtcctgatgcgtctctagagccacatcttccagcttcgagtgagcagagcagttggaggctgagggccttttcctggcaggaytctccagttagtctttgttttagacagtctcgctccgttgcctaggctggagtgcacgatctcagttcatgcaacctccgcctcctgggttcaagcgatt

SEQ ID NO: 220582 - DNA, 201 bp, Homo sapiens
tttagacagtctcgctccgttgcctaggctggagtgcacgatctcagttcatgcaacctccgcctcctgggttcaagcgattctcccacctcagcctcccragtagattacgggattacaggagcccgccacaacacctggtttatttttgtatttttagtagaaacagggtttcaccgtgttggccaggctggtcttgaa

SEQ ID NO: 220583 - DNA, 201 bp, Homo sapiens
tacccccgcttctaggtgagaggccagcaggaggctcagggaggaggcggggccttaagcagggggaacaggggtgggcgggatgtactttttctgaaaakgtggctctggaggccacttggggacaggacctgggctctggctgaactcccgggaggaggctacttcctggtgtgccagcccctccctgccaggtggccc

SEQ ID NO: 220584 - DNA, 201 bp, Homo sapiens
ctctttccccgttgacttctccaagtggggagtcgtggcttggtcctgatgcgtctctagagccacatcttccagcttcgagtgagcagagcagttggagkctgagggccttttcctggcaggactctccagttagtctttgttttagacagtctcgctccgttgcctaggctggagtgcacgatctcagttcatgcaacc

SEQ ID NO: 220585 - DNA, 201 bp, Homo sapiens
aggccaggaaggattcttccctagaaccttcaaaggcagcacagccctgccaacacctgcattcagactctggcctccagaactgtgagaggatgaatttstgtggttttcagccaccccagcttaggaaatgggttgcagcagactgggaataagagaggcagccagtcagcctccgtggaattcccaggcagcttgcag

SEQ ID NO: 220586 - DNA, 201 bp, Homo sapiens
accccgccatgtttgcagcccgaggccagctggctgcaaatgcagggctgtgcgtcaggggtcagagtgcacacacccctgcaggtctaggggctcctgckttgcttctggaagggcctggatgggacctgactggagcggccgaggggtggagcttctgggaaagggatccctcctcggggggagtgtcttgggcctgag

SEQ ID NO: 220587 - DNA, 201 bp, Homo sapiens
atatttatgaggtacaaagtaattttatgatttatgaatacaacattgcataattaagtcaagctgattaacctgttcaccactggaaacaattgcaaatmattatcattttttctggtgaaaacatctgaaatttactcagtgattttgaaatgtgcagtactttttgttgttgttgtagaaatgaggtctcactatgtt

SEQ ID NO: 220588 - DNA, 201 bp, Homo sapiens
aattgacaaattgtagatatatatttatgaggtacaaagtaattttatgatttatgaatacaacattgcataattaagtcaagctgattaacctgttcacyactggaaacaattgcaaataattatcattttttctggtgaaaacatctgaaatttactcagtgattttgaaatgtgcagtactttttgttgttgttgtag

SEQ ID NO: 220589 - DNA, 201 bp, Homo sapiens
cttaatattatttacagtttttttttcccttttctgtgggctttatctgactggaaattctttttaaattttttattttttaaattgacaaattgtagatrtatatttatgaggtacaaagtaattttatgatttatgaatacaacattgcataattaagtcaagctgattaacctgttcaccactggaaacaattgcaaa

SEQ ID NO: 220590 - DNA, 201 bp, Homo sapiens
tatagcagtggtaatagttgagatttgcctgtttgaccacttgcagggcaccgtgccagattccccatgtgcgatgttcctcgcagtcgtgacacccatcstaggagagtggcattagcacccctccatgcaagcggatggtgcaggctgggtcgcctgggcacagcgccttaccatttccctggcttagtgtagttatca

SEQ ID NO: 220591 - DNA, 201 bp, Homo sapiens
ttacctgtaattttgcattccaaaagtttaataatgactacatttatttcacaatttgagaatcagttatacacaagatatagttctaagcacatactccyctaaatatgatttgtttgtacagtagaccaaataagtatgttcagcttagaatatgctctttatggtcatgtgtacaataaataaattatcttaaaacat

SEQ ID NO: 220592 - DNA, 201 bp, Homo sapiens
acagatatctgctgtgtgctggaaaaattacctgtaattttgcattccaaaagtttaataatgactacatttatttcacaatttgagaatcagttatacayaagatatagttctaagcacatactcctctaaatatgatttgtttgtacagtagaccaaataagtatgttcagcttagaatatgctctttatggtcatgtg

SEQ ID NO: 220593 - DNA, 201 bp, Homo sapiens
gactaccagtttaggtagcccagtactcaatatttgccaatttctagaattaaaaacatgtatgaatcactggttaactagaaatttaaaatgaaaatgtktcttctttagcccaggcaatatcacttgcattcatttctatcccctccctgtccctgttctgttggctctggggcttcttccactaagctggtactttct

SEQ ID NO: 220594 - DNA, 201 bp, Homo sapiens; identical to SEQ ID NO: 39891

SEQ ID NO: 220595 - DNA, 201 bp, Homo sapiens
taaaaggaacataaaaaagccttctggaaagtgtacagaaattcattgcagggtgatttttgtcttgtgaaatcatagttactgttattagcaggtttttwtaacgttttatattcatttttcatggtgttctgatgtacaagctgcttcaagtgtttttggacatagcttggatgtaaaatgtaaaaagtggatattttc

SEQ ID NO: 220596 - DNA, 201 bp, Homo sapiens; identical to SEQ ID NO: 39880

SEQ ID NO: 220597 - DNA, 201 bp, Homo sapiens; identical to SEQ ID NO: 39881

SEQ ID NO: 220598 - DNA, 201 bp, Homo sapiens; identical to SEQ ID NO: 39885

SEQ ID NO: 220599 - DNA, 201 bp, Homo sapiens
ttaatctcagaattctttaaaagagctctccctggggctcccattacttacttgtgactcccagtggaaatcgtacccagcccctcgagaggggctgaatmtgttgggagtgggagggtagaaaaaatgctgcagcttcttgtgggtatccttcacacacaaacacccagtgccccaagcactgtgcagtcaaacatcaac

SEQ ID NO: 220600 - DNA, 201 bp, Homo sapiens
gtacccagcccctcgagaggggctgaatctgttgggagtgggagggtagaaaaaatgctgcagcttcttgtgggtatccttcacacacaaacacccagtgycccaagcactgtgcagtcaaacatcaaccccactcagactttcctccttgggattgagaagcaatggattatagagaaagaaaggtggattagcactcca

SEQ ID NO: 220601 - DNA, 201 bp, Homo sapiens
attgagaagcaatggattatagagaaagaaaggtggattagcactccaaaactttgaagagtaattgaccaagacccccaaagccaaagctgtgggcatcsccacttccagtataccctgtaccaacacgtaatggctactagatacaggggcactagtacctacctgtctgcttggctacctgccctctttgcagaagtg

SEQ ID NO: 220602 - DNA, 201 bp, Homo sapiens
cgtaatggctactagatacaggggcactagtacctacctgtctgcttggctacctgccctctttgcagaagtggtgaagggaatcactcaacctcagaaarggaaaatggctttctcattttcagattgaaagaggttggcagtgggtgaggagaataacaggtaaggatctcttttaatatacccatttgaagccaaaac

SEQ ID NO: 220603 - DNA, 201 bp, Homo sapiens
tttgcagaagtggtgaagggaatcactcaacctcagaaagggaaaatggctttctcattttcagattgaaagaggttggcagtgggtgaggagaataacargtaaggatctcttttaatatacccatttgaagccaaaacctctgtttagacatacggtattttgaacctggtgattattcattgcccatgtttgtgaatt

SEQ ID NO: 220604 - DNA, 201 bp, Homo sapiens
ttacatgccattactttgtaatacttgttatagcagtggtaatagttgagatttgcctgtttgaccacttgcagggcaccgtgccagattccccatgtgcratgttcctcgcagtcgtgacacccatcctaggagagtggcattagcacccctccatgcaagcggatggtgcaggctgggtcgcctgggcacagcgcctta

SEQ ID NO: 220605 - DNA, 201 bp, Homo sapiens
cggaacatgtcttttgttatacacacacagtttctgactcatgtcattccatgacttatgataaaatggacattttgtttacactgttgtgtggaaggagrggtctggtttctaatttttaataacatctatttctagaatattaggcttgccatttgaatgcttctgtttgatttatgaatatcattggttccagcagtt

SEQ ID NO: 220606 - DNA, 201 bp, Homo sapiens
tgggttccatccagcggaacatgtcttttgttatacacacacagtttctgactcatgtcattccatgacttatgataaaatggacattttgtttacactgttgtgtggaaggaggggtctggtttctaatttttaataacatctatttctagaatattaggcttgccatttgaatgcttctgtttgatttatgaatatcat

SEQ ID NO: 220607 - DNA, 201 bp, Homo sapiens
ctgggttccatccagcggaacatgtcttttgttatacacacacagtttctgactcatgtcattccatgacttatgataaaatggacattttgtttacactgttgtgtggaaggaggggtctggtttctaatttttaataacatctatttctagaatattaggcttgccatttgaatgcttctgtttgatttatgaatatca

SEQ ID NO: 220608 - DNA, 201 bp, Homo sapiens
gtgagctgagatggtgccactgcactccagcctggacaacagagcaagactccatctcaaaaaaaaaagggggggttgggggagctcagcatgggttcacrcttgtaatttcagcactttgggaggctgaagtgggatcacctgaggccaggagtccacaagcagcctgggtgacgtaaggagaccccatctatacaaaat

SEQ ID NO: 220609 - DNA, 201 bp, Homo sapiens
aatgggtgtagctgggaaagaaaacttaactttacaaacaagaattcctgggttccatccagcggaacatgtcttttgttatacacacacagtttctgacycatgtcattccatgacttatgataaaatggacattttgtttacactgttgtgtggaaggaggggtctggtttctaatttttaataacatctatttctaga

SEQ ID NO: 220610 - DNA, 201 bp, Homo sapiens
tcactgtttagcagttgagctctctaaatgggtgtagctgggaaagaaaacttaactttacaaacaagaattcctgggttccatccagcggaacatgtctyttgttatacacacacagtttctgactcatgtcattccatgacttatgataaaatggacattttgtttacactgttgtgtggaaggaggggtctggtttct

SEQ ID NO: 220611 - DNA, 201 bp, Homo sapiens; identical to SEQ ID NO: 39882

SEQ ID NO: 220612 - DNA, 201 bp, Homo sapiens; identical to SEQ ID NO: 39883

SEQ ID NO: 220613 - DNA, 201 bp, Homo sapiens
aactgcttctcttcactgtttagcagttgagctctctaaatgggtgtagctgggaaagaaaacttaactttacaaacaagaattcctgggttccatccagyggaacatgtcttttgttatacacacacagtttctgactcatgtcattccatgacttatgataaaatggacattttgtttacactgttgtgtggaaggagg

SEQ ID NO: 220614 - DNA, 201 bp, Homo sapiens
aactagaaatttaaaatgaaaatgtttcttctttagcccaggcaatatcacttgcattcatttctatcccctccctgtccctgttctgttggctctggggsttcttccactaagctggtactttctttatagctcctcctgtgcttccattcactaaacctttattggttcatagcctacagaaaatgcctgtggtgtgag

SEQ ID NO: 220615 - DNA, 201 bp, Homo sapiens
tgtcttattggagattgttttgtctcaagtattgctgcagagtattttattaatgggtgcactttaaaattttttgtttttcagactaccagtttaggtakcccagtactcaatatttgccaatttctagaattaaaaacatgtatgaatcactggttaactagaaatttaaaatgaaaatgtttcttctttagcccaggc

SEQ ID NO: 220616 - DNA, 201 bp, Homo sapiens
gtccttcacattctccagttgtgctaatttttcccaatccattgagttaagtagagtaccttcctttttgcagtcatattcttacttttttttttttttttaatttttttgagacagtctcaaactgttgcccaggctggaatgcagtggtacaatctcagctctctgtaacctccgccttagccttgtgagtatgggact

SEQ ID NO: 220617 - DNA, 201 bp, Homo sapiens
tacatcttatttaaatacggaaatgtgttgcccttatgcctttttatttcatggaagccaaatgcgtcttttctcccaaagtatactagaaaatgaagacscttggtaatggtagtgatctgtacatcagatttcagtctttctgtcacttgcgtgtatgaatccatttagcaagtttgcttttggcagtaaagccccacg

SEQ ID NO: 220618 - DNA, 201 bp, Homo sapiens
aagtgtttttggacatagcttggatgtaaaatgtaaaaagtggatattttcaatttgtagctttcttttttgaagcttacttaagtttgttctaaatatawccccttctttctcacccaccccaacacatttttttaaaaacaccaccaggtatccgttacagcactgatgtgagtgtagatgaagtaaaagctttggctt

SEQ ID NO: 220619 - DNA, 201 bp, Homo sapiens
aaatggctttctcattttcagattgaaagaggttggcagtgggtgaggagaataacaggtaaggatctcttttaatatacccatttgaagccaaaacctcwgtttagacatacggtattttgaacctggtgattattcattgcccatgtttgtgaattatcagaaagcagaattcttgccaggcatagtggctcatgcctg

SEQ ID NO: 220620 - DNA, 201 bp, Homo sapiens; identical to SEQ ID NO: 39884

SEQ ID NO: 220621 - DNA, 201 bp, Homo sapiens
ctggagtaagaatcctactgactactaacaaatataaaataaataaatttggtatttttcacgcacgtgttttaacagtgaaggattattatgtattttarttattttaagcttcagagaaataggaagaattgaaaagcaagcattagattgaactatatgggagtccaagagtttgagaccaacctggggaacatagtg

SEQ ID NO: 220622 - DNA, 201 bp, Homo sapiens
gtatacacctataatcccagctacctgggaggcacgcttgagcccaggaggttgaggctgcagtgagctgtggttgcaccacagcactccagcctgggcartagagtgagaccctgtctcaaaacaaaaaaaaagtaagaatgaagaggtaaatgaaccaggacaaaaacaccaagccccagtgtttgtgttttacatggt

SEQ ID NO: 220623 - DNA, 201 bp, Homo sapiens
cactccagcctgggtgacagaccacgactctgtctgtataagtttttgggttacagttatagtttgggactacttttgattctacttttttttttttttttctgttagcaatatcttgatctcttgttatttttttgtagtgtctgttcaagagagtttagaaagaaaatttggaaagcatggtggaactattcccattgt

SEQ ID NO: 220624 - DNA, 201 bp, Homo sapiens
accagcctggacaacatggggaaaccctgtctttccaaaaaatacaaaaattagccaagcgtggtggtatacacctataatcccagctacctgggaggcaygcttgagcccaggaggttgaggctgcagtgagctgtggttgcaccacagcactccagcctgggcagtagagtgagaccctgtctcaaaacaaaaaaaaag

SEQ ID NO: 220625 - DNA, 201 bp, Homo sapiens
gtatttctgcacctttacagatttgagtgagcatcacttaacatgtttttatcagagatcttactgtagccgtcagtagtagtatagtcagtgattcctgytattgcctgtaagctaatttattagcctaaacctttaatttcctatgatctgaggaactgaaagctaaggcctaaaaccttatatgtgctgaatgtcgaa

SEQ ID NO: 220626 - DNA, 201 bp, Homo sapiens
agagaaacaatagcgttcagtttgtctgaaggtaaggcatatttataaaggtaatagaaagtaagagtgagggctggatgcagtggctcattcccataatyccagcactttgggtggccaaggcaggtggatcacttgagcccaggagttcgagaccagcctggacaacatggggaaaccctgtctttccaaaaaatacaa

SEQ ID NO: 220627 - DNA, 201 bp, Homo sapiens
cctaaatagaaaaagccttagatggaattgggtgggatgggaaggagtgttaattaagtgtgaaattcctgatactggctaaaatatatttgcgatatttraagtccagtctaccttggtattgaaattaaggtcttaggttcattttcagcttttacgaaaaccatcatcttctaatttctttgtcttatttttgtgcat

SEQ ID NO: 220628 - DNA, 201 bp, Homo sapiens
ttctgcacctttacagatttgagtgagcatcacttaacatgtttttatcagagatcttactgtagccgtcagtagtagtatagtcagtgattcctgttatkgcctgtaagctaatttattagcctaaacctttaatttcctatgatctgaggaactgaaagctaaggcctaaaaccttatatgtgctgaatgtcgaataat

SEQ ID NO: 220629 - DNA, 201 bp, Homo sapiens
cataagcagataaggtatggaaataatgtaatacaacagtggagattatgaattctgaaataagactttctagaggagatatttgggctagaccttgaaartgggtagaatatgaacatttagagatttggaggataagaggaagagaaacaatagcgttcagtttgtctgaaggtaaggcatatttataaaggtaataga

SEQ ID NO: 220630 - DNA, 201 bp, Homo sapiens
tggaggttgcgatgagccaagatctcaccattgcactccagcctgagcaacaagagtgaaactccgtctcaaaaacaaacaaacaaacaaaaaaaaaaaaacagaaaatatagtatattttattgtattttctaggaacagaaagctgaaaaagtgagtcttgtctctattggtaaaagtataccttaaatacattcatac

SEQ ID NO: 220631 - DNA, 201 bp, Homo sapiens
aaacatacagcaagtaaatgccagagggagaaattattatgtaatgttgtatgtgtctgcattttatagtgaaacatttaatgaatatttctatgactttrattagctacctaaatgagatctaaagttttctagccatggtaacttggttattacagagacttacaaggatctttgtgttcgagaagaatttttcttaaa

SEQ ID NO: 220632 - DNA, 201 bp, Homo sapiens
ttatctctaattgcatgttagtgaaatgaggtcaagagaggctaaactgattaacctctggtcgcacactcagaaatcctatggagtggcttatatctgtygtgcatagctaacttccaaacatacagcaagtaaatgccagagggagaaattattatgtaatgttgtatgtgtctgcattttatagtgaaacatttaatg

SEQ ID NO: 220633 - DNA, 201 bp, Homo sapiens
cctgggaggtggaggttgcgatgagccaagatctcaccattgcactccagcctgagcaacaagagtgaaactccgtctcaaaaacaaacaaacaaacaaaaaaaaaaaaacagaaaatatagtatattttattgtattttctaggaacagaaagctgaaaaagtgagtcttgtctctattggtaaaagtataccttaaata

SEQ ID NO: 220634 - DNA, 201 bp, Homo sapiens
attttctgattttcttgtatatgtatgtattttcctattatttgacttttttgaacaacttcaaattgagtatatttgaacgagagtaggcattcaaaagkgctaggctttccctgcctttcagaactttgaggtatatgtcacatcattttgtccttcacattctccagttgtgctaatttttcccaatccattgagtta

SEQ ID NO: 220635 - DNA, 201 bp, Homo sapiens
gggaagagaaaaaaattataagtgggaacatgttatacatgctgtatgaaacctgcctttttccatatgtatgttcatgataattccaagtaatttacatrgatataagttaccctttttaatggctgtttagtactttgcataggtataccatatttcatttaattggcatacaagataattaggttgtttttattttta

SEQ ID NO: 220636 - DNA, 201 bp, Homo sapiens
tgaacctgggaggtggaggttgcgatgagccaagatctcaccattgcactccagcctgagcaacaagagtgaaactccgtctcaaaaacaaacaaacaaacaaaaaaaaaaaaacagaaaatatagtatattttattgtattttctaggaacagaaagctgaaaaagtgagtcttgtctctattggtaaaagtatacctta

SEQ ID NO: 220637 - DNA, 201 bp, Homo sapiens
catgagccaccatgcctaactgtctaagactttgggatacaaaaatataatttactttcctccatttctggaataaaacatctcttccttcctccttctastttctgttctgtgcccctgtttgatctctgttggtcctgttcaccttcagccttctctgctgaaggaggaaaggcttggttttataaaaagtgacaatat

SEQ ID NO: 220638 - DNA, 201 bp, Homo sapiens
cccgggcgtggtggcgggcgcctgtagtcccagctacttgggaggctgaggcaggagaatggcgtgaacccaggaggcggagcttgcagtgagccgagatygcgccactgcactccagcctgggccacagagtgagactgtctcaaaaaaaaagaaaagcctggcatgttaactcacaagcaaataaattccatattcact

SEQ ID NO: 220639 - DNA, 201 bp, Homo sapiens
gcgatcttggctcactgcaacaccccccacctccattcaagcgattctcctgcctcagcctccggagtagctgggattacagacatgtgccaccacgcccrgctaatttttgtatttttagtaaaggcagggtttcaccatgttggtcaggctggtctcaaactcctgacctcgtgatccgccctcctcagcctcccaagg

SEQ ID NO: 220640 - DNA, 201 bp, Homo sapiens
ttgtttttatttttactgtgtttgagaggagtatttctgcacctttacagatttgagtgagcatcacttaacatgtttttatcagagatcttactgtagcmgtcagtagtagtatagtcagtgattcctgttattgcctgtaagctaatttattagcctaaacctttaatttcctatgatctgaggaactgaaagctaagg

SEQ ID NO: 220641 - DNA, 201 bp, Homo sapiens
aacacctgagctcaagttcttctgcctcagcctcccaatgtgctaggactacaggcatgagccaccatgcctaactgtctaagactttgggatacaaaaayataatttactttcctccatttctggaataaaacatctcttccttcctccttctagtttctgttctgtgcccctgtttgatctctgttggtcctgttcacc

SEQ ID NO: 220642 - DNA, 201 bp, Homo sapiens
aatagtttaactttttttttttttttttttgaaacagagtcttactctgtcgcccaggctagagtgcactggcgcgatcttggctcactgcaacacccccsacctccattcaagcgattctcctgcctcagcctccggagtagctgggattacagacatgtgccaccacgcccggctaatttttgtatttttagtaaaggc

SEQ ID NO: 220643 - DNA, 201 bp, Homo sapiens
tgtgttttgtagctctgtatgtcaccttaagagtggtagtgagttaattgtccttaattttttagaaagcattccaagaaacaaattaggaaagagagaaactgacttgatggtggaggccctgagtcatatcccagctctgaaaatagctatctgtaaccttggccatcttctctggtccttagtttcctcatcagtaaa

SEQ ID NO: 220644 - DNA, 201 bp, Homo sapiens
tgaagtccatgtatatacactctcttcccactacaatataaagtctgtgagaacagaattttgattttattctctactatgtcccctagtacctggaagaktatgtactcagtaagtgtccaaactatatcagtgacccattttaagtttttatcgggcatatgtgttttgtagctctgtatgtcaccttaagagtggtag

SEQ ID NO: 220645 - DNA, 201 bp, Homo sapiens
aaacaaaagaaaaaaagaggctgggatttttataggaatttcattgaatctgtacactaatttgtggagtattgccatcttccccaccctccccaaaaagrttttgtcctttcacccaggctggagtaccagacagcagtcactgcaaccttgacctcctgggctcaagcaatcctctcacctcaccctcccaagtagcta

SEQ ID NO: 220646 - DNA, 201 bp, Homo sapiens
caatgctttacataatactaaattatctatatacaaacataaatgcatgatttttattctctttaaaattcaccatttaaatggaatataattatatttarattaatcttaattaagatttagtgtatttttcagtggggaattaatagaatgggaatttgagccctagttctactatcttgtttttataacctacttttt

SEQ ID NO: 220647 - DNA, 201 bp, Homo sapiens
gggagcttccgcatctacccagctcctggtacctgtacccagtcctgtgtcatctctcttcgaatagatcagctctttgtgctttcatttcttaggtccakttcttgttgtgggcattggatggtttttcctcagatacactgctctagcaagtctgctcctctctcctacatcagcagtttccctctgagtcattcccct

SEQ ID NO: 220648 - DNA, 201 bp, Homo sapiens
ttgggattgagaagcaatggattatagagaaagaaaggtggattagcactccaaaactttgaagagtaattgaccaagacccccaaagccaaagctgtggscatccccacttccagtataccctgtaccaacacgtaatggctactagatacaggggcactagtacctacctgtctgcttggctacctgccctctttgcag

SEQ ID NO: 220649 - DNA, 201 bp, Homo sapiens
ttaaattgacgtcttggcccagaaagctttgaagcctaggaggtaggcaaagggagttttttctctcactcctcggcaaaccttcaaatttgatgttattwatctgttatttcctgactgcccattccacagagagtgtcagattgaggctcagacctgagcctgaaccctgatcctgtcacatgtgtgtttagcatcagc

SEQ ID NO: 220650 - DNA, 201 bp, Homo sapiens
gttctgtgcccctgtttgatctctgttggtcctgttcaccttcagccttctctgctgaaggaggaaaggcttggttttataaaaagtgacaatattcagaycacataagatccttcttgcttcattttggcttaaatattttaagattttctgattttcttgtatatgtatgtattttcctattatttgacttttttgaac

SEQ ID NO: 220651 - DNA, 201 bp, Homo sapiens
caccatgcccagctaatttttgtattttcagtaaagatggggtttcaccatgttggccaagctggtctcaaactcctgacctcaagtgatctgcccagctyggcctcccaaagtgctgggattataggcgtgagccaccacatctggcccctacataaatctcttcgtgtcccttagaatgtagttaagacttattttcag

SEQ ID NO: 220652 - DNA, 201 bp, Homo sapiens
cccagtatggagtagttagccaaactggattgtagctccatgtgccactatgttatagctacgggagtctaccttactatagaatttggtataagcaaaasttattttgactgcttgatccctactttaaggcctcaaccacagtttgagtccagttttcctaatttcttcttgggttcagattctatctgcttggattta

SEQ ID NO: 220653 - DNA, 201 bp, Homo sapiens
aaggcttggttttataaaaagtgacaatattcagatcacataagatccttcttgcttcattttggcttaaatattttaagattttctgattttcttgtatrtgtatgtattttcctattatttgacttttttgaacaacttcaaattgagtatatttgaacgagagtaggcattcaaaagtgctaggctttccctgccttt

SEQ ID NO: 220654 - DNA, 201 bp, Homo sapiens
ttaatagccttcataatttttaaaaggtctttcctcttcccctaaatctcaaacacattttatagtcttgaatggtttcagactttattcagtcatatttrtcacccatatctgcaatatctccagcttaattttatcagacttgacaagtacctaataattccaaaggtcaaaaagtgattcattggaatactgaaagaa

SEQ ID NO: 220655 - DNA, 201 bp, Homo sapiens
agatggggtggctgccaggcggaggggctcctcactcctcagacggggcggctgccaggcggaggggctcctcacttctcagacggggcggttgccgggcrgagggtctcctcccttctcagatggggcggctgggcagagacgctcctcacctcccagacggggtcgcggccgggcagaggcgctcctcacatcccagac

SEQ ID NO: 220656 - DNA, 201 bp, Homo sapiens
tttacataatactaaattatctatatacaaacataaatgcatgatttttattctctttaaaattcaccatttaaatggaatataattatatttaaattaaycttaattaagatttagtgtatttttcagtggggaattaatagaatgggaatttgagccctagttctactatcttgtttttataacctacttttttgatcc

SEQ ID NO: 220657 - DNA, 201 bp, Homo sapiens
aatgctttacataatactaaattatctatatacaaacataaatgcatgatttttattctctttaaaattcaccatttaaatggaatataattatatttaarttaatcttaattaagatttagtgtatttttcagtggggaattaatagaatgggaatttgagccctagttctactatcttgtttttataacctactttttt

SEQ ID NO: 220658 - DNA, 201 bp, Homo sapiens
ctcccaaagtgctgggattacaggcataagccactgccccggcctagttggaattgttgtttgaggtaacaagcttatttaatcctaaagcaagcataatmcttttgtagttacctctagaaagattcaggaccaatttgtcatttgtacattgggagaaaaggagtggttaaacaaagttgtgctgacctccagcagagg

SEQ ID NO: 220659 - DNA, 201 bp, Homo sapiens
taaaagctttggcttctctgatgacatacaagtgtgcagtggttggtaagtgatcgcctttcttgctgcctaatgagaactctggggaaatatgtttacamacatgttactgttaagatgctgtagaaatataccttatcagaactgattttttttcaagttgtaatctttaagacctgcatcatttttcaattagtctaa

SEQ ID NO: 220660 - DNA, 201 bp, Homo sapiens
gggttcaagcaattctcttgtctcagcctcccaagtagctgagattacaggcatgtgccaccacacccagctgatttttgtatttttactggagatggggytttgccatgttggtcaggctgggcttgaactcctgacatcaggtgatccacccatctcggactcccaaactgctggtattacagataggagccactgtgc

SEQ ID NO: 220661 - DNA, 201 bp, Homo sapiens
ttctgatgtacaagctgcttcaagtgtttttggacatagcttggatgtaaaatgtaaaaagtggatattttcaatttgtagctttcttttttgaagcttayttaagtttgttctaaatataaccccttctttctcacccaccccaacacatttttttaaaaacaccaccaggtatccgttacagcactgatgtgagtgtag

SEQ ID NO: 220662 - DNA, 201 bp, Homo sapiens
atttttgtcttgtgaaatcatagttactgttattagcaggtttttttaacgttttatattcatttttcatggtgttctgatgtacaagctgcttcaagtgyttttggacatagcttggatgtaaaatgtaaaaagtggatattttcaatttgtagctttcttttttgaagcttacttaagtttgttctaaatataacccct

SEQ ID NO: 220663 - DNA, 201 bp, Homo sapiens
acaaaatttctagcctgagagactggtagaaaaaaatggtggtatcagggacagatggggttattaaggaaaaggattggatttttaaaataaagaagatstggtgtaaaattatccttagggaaattggaaatccaggcacgtacttctctccatcatgcccttgaatagtgcagtccctctgcctgtccatgcctcact

SEQ ID NO: 220664 - DNA, 201 bp, Homo sapiens
gtgaggagaataacaggtaaggatctcttttaatatacccatttgaagccaaaacctctgtttagacatacggtattttgaacctggtgattattcattgmccatgtttgtgaattatcagaaagcagaattcttgccaggcatagtggctcatgcctgtaatcccagcactttgggaagccaaggtgggaggatcacttg

SEQ ID NO: 220665 - DNA, 201 bp, Homo sapiens
catgggaaccccctggttggtagccaagttggacagaagtgtgggtgccctgggcacccaagacttggaactggcatctgaagtagggaacagtcttgtgmgactgagcccttgagctgtggggtctgtgctaaccctggtagtcagtgtcataactgaattgcaggacacccagtttgtatctgcagagaactggagaac

SEQ ID NO: 220666 - DNA, 201 bp, Homo sapiens
cagtataccctgtaccaacacgtaatggctactagatacaggggcactagtacctacctgtctgcttggctacctgccctctttgcagaagtggtgaaggsaatcactcaacctcagaaagggaaaatggctttctcattttcagattgaaagaggttggcagtgggtgaggagaataacaggtaaggatctcttttaata

SEQ ID NO: 220667 - DNA, 201 bp, Homo sapiens
tgcggcatagtctttgtaattagcttgacagtaagtgcgtgacatgtgtgttttgtacctttccttttcattacattctaaaactggagtaagaatcctastgactactaacaaatataaaataaataaatttggtatttttcacgcacgtgttttaacagtgaaggattattatgtattttaattattttaagcttcaga

SEQ ID NO: 220668 - DNA, 201 bp, Homo sapiens
agcttttctttcttttttaaattttaagagtcagaatattcgtatattaattcggcatgtatttgagtgcctaatatatgccattttctatgttaggaacmaggaattaaagcagtgaacataacaaagtctgccctcgtggtgctaacttgccaggtagggaagccagataataaacacatgtataatgcaaagtcagta

SEQ ID NO: 220669 - DNA, 201 bp, Homo sapiens
taaatatgatttgtttgtacagtagaccaaataagtatgttcagcttagaatatgctctttatggtcatgtgtacaataaataaattatcttaaaacattrtcaatattaaggttgatgttttcagaaacatgtaagaaagctagcttttaaaattgactagggaagttctctcaaactgccagtccatgagatattgtat

SEQ ID NO: 220670 - DNA, 201 bp, Homo sapiens
tggggtttagtgcagtgacctgagcgtagctcactgcagcctgcaactcctgggctcaagtgactctcctgccccagcctcctgagcatcttcgactacaygcacatgcccccacgcccaactcaatttttttttttttttaagatacaaatgattcatcttaatattatttacagtttttttttcccttttctgtgggct

SEQ ID NO: 220671 - DNA, 201 bp, Homo sapiens
catattcaaacagctttgcatataaaactcagcatagatgatatctctagaggtccatttattctaattgctaaggaaatgaaataacctttttcccctayacccaactccgaagacctgaaataacattttaaacagttttccatcaaaagaggtttgaagactttggtgtttaagagattaatgtgttagccagaacaa

SEQ ID NO: 220672 - DNA, 201 bp, Homo sapiens
attttgcattccaaaagtttaataatgactacatttatttcacaatttgagaatcagttatacacaagatatagttctaagcacatactcctctaaatatratttgtttgtacagtagaccaaataagtatgttcagcttagaatatgctctttatggtcatgtgtacaataaataaattatcttaaaacattatcaatat

SEQ ID NO: 220673 - DNA, 201 bp, Homo sapiens
caggcactcaccgccacgcccggctaatttttgtatttttaatagagacggggtttcaccatgttggccaggatagccttgatctcctgacctcatgatcygcctgcctcagcctcccaaagtgctgggattacaggcgtgagccactgtgcccagccaataatatttttttaagtgtgattttaaaactccactgtcgat

SEQ ID NO: 220674 - DNA, 201 bp, Homo sapiens
gtctctgccacgtgactgttcttcttttctatttattttacccaataattaggcttttacaatgtaagtaataaagagaaaaatctctagtatcactttaragcacattgattcataaatagcccataaattttgtactcagcaacccataaaatacacatgcatgattcacataatcaaatagtaacgaaagttacaaaa

SEQ ID NO: 220675 - DNA, 201 bp, Homo sapiens
caatatctccagcttaattttatcagacttgacaagtacctaataattccaaaggtcaaaaagtgattcattggaatactgaaagaaaacacagcttaaaytctagtaatttgatttatttgcttaatgtgcaaaagcctcattgacccaggatgcagttaaattgacgtcttggcccagaaagctttgaagcctaggagg

SEQ ID NO: 220676 - DNA, 201 bp, Homo sapiens
ctttgggaaagaattgagtctcagaaaagaaaataatattttgtctcatgaaacttagaccaaaaatgcacaatgtctttctggatattaactctcccatrtattatatccagagttttattctgtgatgtaatattcacagaatataatctacattttttttttctttttttgagagggagtctcgctccgtcgccgagg

SEQ ID NO: 220677 - DNA, 201 bp, Homo sapiens
cagatttcagtctttctgtcacttgcgtgtatgaatccatttagcaagtttgcttttggcagtaaagccccacgtgcaggaagacaaacagctgctcactyattatccaaagtatactttgtaagaattagggcatcaaaaattggatcctaagcaccaatatatattaaagttcagtacaacttgtagtgtttaagtaca

SEQ ID NO: 220678 - DNA, 201 bp, Homo sapiens
ataacctaatatagaaatacagtaagtataggtaactctaaaacttgactagatttggcctgtctttgataataaaaggcatttgggcctttgatgtgccrcatacccagcactactgtgaacttgtgcatccttacatggagtctgttaacgtaagttaatatgagttaactatctcgctcacacttttataggagtgcc

SEQ ID NO: 220679 - DNA, 201 bp, Homo sapiens; identical to SEQ ID NO: 39886

SEQ ID NO: 220680 - DNA, 201 bp, Homo sapiens; identical to SEQ ID NO: 39887

SEQ ID NO: 220681 - DNA, 201 bp, Homo sapiens; identical to SEQ ID NO: 39888

SEQ ID NO: 220682 - DNA, 201 bp, Homo sapiens; identical to SEQ ID NO: 39889

SEQ ID NO: 220683 - DNA, 201 bp, Homo sapiens
gggtacattgtgtcttattggagattgttttgtctcaagtattgctgcagagtattttattaatgggtgcactttaaaattttttgtttttcagactaccrgtttaggtagcccagtactcaatatttgccaatttctagaattaaaaacatgtatgaatcactggttaactagaaatttaaaatgaaaatgtttcttctt

SEQ ID NO: 220684 - DNA, 201 bp, Homo sapiens; identical to SEQ ID NO: 39890

SEQ ID NO: 220685 - DNA, 201 bp, Homo sapiens
ctttgggaggccaaggtgggcagatcacgaggtcaagagatcaagaccatcctggccaacatggtgaaacccggtctccgctaaaaataggaaaattagcrgggtgtggtggtacacgcctgtagtcccagctactctggaggctgacgcaggagaatcacttgaacccgggaggtggagcttgcagtgagccgagattgc

SEQ ID NO: 220686 - DNA, 201 bp, Homo sapiens
ctgtccctgttctgttggctctggggcttcttccactaagctggtactttctttatagctcctcctgtgcttccattcactaaacctttattggttcatakcctacagaaaatgcctgtggtgtgagaggtaatttgtgaaactgcttctcttcactgtttagcagttgagctctctaaatgggtgtagctgggaaagaaa

SEQ ID NO: 220687 - DNA, 201 bp, Homo sapiens
tacctcaaatgatctgcccacctcagcctcccaaagtgctgggattacacgcgtgagccaccacgcccagcctaaagtgtgtactttttcttagctcctayatgcagtgctccttcccatgctgaatgtctgaatttttatctgagacgtagtatttcaggtggtcattacttgtgggtggtcattgagagttcctccctg

SEQ ID NO: 220688 - DNA, 201 bp, Homo sapiens
ttaaaaatctaagatgatatttgcctactttatacaaaacagtacattgatgctgctaaagcaattaaagtataatttttctggtttttttttttttttttggagacggagtctcactctctgtcgcccaggctgaagtgcaatggtgcaatctccactcattgcaacctcggtctcccaggtttaagcgattctcctgcc

SEQ ID NO: 220689 - DNA, 201 bp, Homo sapiens
ctagctgatttttgtatatttagtagagacagggttttgccatgttggtcaggctggtctcgaactcccgacctcatgtgatcagcccacctcggcctccyaaagtgctgggattacaggcgtgagccaccgtgcctggcagacagacagtcttgatgtgggaacagagaaggctggataggagttggataaggccatttc

SEQ ID NO: 220690 - DNA, 201 bp, Homo sapiens
agaatcgcttgagtccgggaggtggaagttgcagtgagctgagatggtgccactgcactccagcctggacaacagagcaagactccatctcaaaaaaaaaagggggggttgggggagctcagcatgggttcacgcttgtaatttcagcactttgggaggctgaagtgggatcacctgaggccaggagtccacaagcagcct

SEQ ID NO: 220691 - DNA, 201 bp, Homo sapiens
agtccgcccaccttggcctcccaaagtgctaggattacaggtgtgagccactgtgccctggcctagaaagatttttttaagaaatagtgaccaggccaggygcagtggctaacatggtgaaaccccatctttactaaaaataccaaaaattagcaggtgggcaaggtggtgggcgcctgtagtcccagctactggggaggc

SEQ ID NO: 220692 - DNA, 201 bp, Homo sapiens
tatacagatatctgctgtgtgctggaaaaattacctgtaattttgcattccaaaagtttaataatgactacatttatttcacaatttgagaatcagttatrcacaagatatagttctaagcacatactcctctaaatatgatttgtttgtacagtagaccaaataagtatgttcagcttagaatatgctctttatggtcat

SEQ ID NO: 220693 - DNA, 201 bp, Homo sapiens
tttgagtcctttcatgataggtatggaggcttatggtaagttatttaaaacttaacatgtatgtcaaatatttttgtggccatagcttttctttctttttwaaattttaagagtcagaatattcgtatattaattcggcatgtatttgagtgcctaatatatgccattttctatgttaggaaccaggaattaaagcagtga

SEQ ID NO: 220694 - DNA, 201 bp, Homo sapiens
atctattattatttactgtattcaccatgctgtgcaatctatctcgaagaaacttattccttctaattgaggctttgtaccctttgaccatcatctccccrtcacccccattcccagttttgtatactttgagtcctttcatgataggtatggaggcttatggtaagttatttaaaacttaacatgtatgtcaaatatttt

SEQ ID NO: 220695 - DNA, 201 bp, Homo sapiens
ccagaaggaaacagtggaatcttgatgacataatgcaagggaagaccggagtcaatgcagtgttaaagacgccctcagcctctgggatgtcattgtttagygcttaagggaagactatagaaagcactgatactgatttaaaatgagatatttctctgccttcactgggggaaaaaatgtttctgacttattttgctgtgc

SEQ ID NO: 220696 - DNA, 201 bp, Homo sapiens
agtgttgggattacaagcatgaactaccatgttgggccaaatgtataatctattattatttactgtattcaccatgctgtgcaatctatctcgaagaaacktattccttctaattgaggctttgtaccctttgaccatcatctccccgtcacccccattcccagttttgtatactttgagtcctttcatgataggtatgga

SEQ ID NO: 220697 - DNA, 201 bp, Homo sapiens
ttcttctgcctcagcctcccaatgtgctaggactacaggcatgagccaccatgcctaactgtctaagactttgggatacaaaaatataatttactttcctycatttctggaataaaacatctcttccttcctccttctagtttctgttctgtgcccctgtttgatctctgttggtcctgttcaccttcagccttctctgct

SEQ ID NO: 220698 - DNA, 201 bp, Homo sapiens
tttgtagtcccactctagtcttagaaacacagaatatattaggtgattgagatttttttaaatgctttggataatccctatgaaattctgtctttccctcktaaacatattttaacacgttcttcttacctctccccactaacctgtcttctctcccattggttctttgccaaaaaaaaaaacctcatctgcctctctcca

SEQ ID NO: 220699 - DNA, 201 bp, Homo sapiens
cagtgttgggattacaagcatgaactaccatgttgggccaaatgtataatctattattatttactgtattcaccatgctgtgcaatctatctcgaagaaayttattccttctaattgaggctttgtaccctttgaccatcatctccccgtcacccccattcccagttttgtatactttgagtcctttcatgataggtatgg

SEQ ID NO: 220700 - DNA, 201 bp, Homo sapiens
aatttattatcttcaggaatttgaaaggctttctggattggggaagattacatagctatgaaagcccttaaatattttagtttgcttaataaacagtatactaaacagatgatcagcaaaatttgggtactatagccttccatgctttgtgttcaagacatccccagatctatctacccatttatcacccttgtttgcaga

SEQ ID NO: 220701 - DNA, 201 bp, Homo sapiens
gttggaggtggattggctgagaagcacagaggatgttgggctagacccatgtctcagtaaacctggttctgtggtctttcagttatgcccgctgacttatraggatttttagaaatcctctctgtaccggaaaaaacttgagcggtgctggtgttcccagcaggggggacaaaggttgtttttaaagatttactaaatttg

SEQ ID NO: 220702 - DNA, 201 bp, Homo sapiens
agccttccagtgttgggattacaagcatgaactaccatgttgggccaaatgtataatctattattatttactgtattcaccatgctgtgcaatctatctcmaagaaacttattccttctaattgaggctttgtaccctttgaccatcatctccccgtcacccccattcccagttttgtatactttgagtcctttcatgata

SEQ ID NO: 220703 - DNA, 201 bp, Homo sapiens
gaggaacgtgggggtcctcaagagagtgtctcatgccctacaaggtgtggggctgacctttatgggcttcttcaactaaagaggggtatattcatgaagaktccaggaaaaggtaaagatttctcaagaccgtggtgccacaatttacacccaaatacaggtgttcctggagccgtcttggcactggtgggtgtacggttt

SEQ ID NO: 220704 - DNA, 201 bp, Homo sapiens
cccatatgggaggccgcggcgggcagatcactcgagaccagcctggccaacatattgaaaccccgtctccactaaaaatacaaaaattagtcgggcgtgayggcgcacgcgtgtagtcccagctgctcgggaggctgaggcaggagaatcgcttgaacccgggaggcggaggttgcagtgagcccagatcgccccactgca

SEQ ID NO: 220705 - DNA, 201 bp, Homo sapiens
gatccctcccacagtggacctaggaaaccctcagctcagagaacaaccctgcattccccacacagcacccacaatcagccactgcgggcgaggagggcacraggccaggttcccaagagctcaggtgagtgacacagtggaacggcccagggcgccctcaccctgctcagcttgtggctctaacattccagaagctgaggc

SEQ ID NO: 220706 - DNA, 201 bp, Homo sapiens
ccatatgggaggccgcggcgggcagatcactcgagaccagcctggccaacatattgaaaccccgtctccactaaaaatacaaaaattagtcgggcgtgatrgcgcacgcgtgtagtcccagctgctcgggaggctgaggcaggagaatcgcttgaacccgggaggcggaggttgcagtgagcccagatcgccccactgcac

SEQ ID NO: 220707 - DNA, 201 bp, Homo sapiens
ttcagtgtagacctaagaaagctagagggtgggtcctcacaggcccacaaaatttggtggcggtgggatcacggctggtggagcatgccttgctccagatyggggtgtgacgcattgatgcagattatattactatagaatatgatggtctcagggaccaggcaggactttggcttctgagcagggttcagctcctgactt

SEQ ID NO: 220708 - DNA, 201 bp, Homo sapiens
cctgaaaaaggcccacgggaaaataaaggagatcccagttcaaggccatagcagctgcaatgaccgtgaaccaatcgtgggacagggaaggaaccgacctrctgttcagaaaatccacgcctggggccccggggccaacacaggaacaaaatgcaaggggacccgtgaccctggggggcagagcaggtggaatctgaggtt

SEQ ID NO: 220709 - DNA, 201 bp, Homo sapiens
gtacagcggtgaaggggtaggggaccagaatgctatttaatcctcaaaaaactagtgagattgttctctttttcttttcttcttcttcttcttcttcttcttttttttttttttttttttttttgagacagagtcttgttttattgcccagcctggagtgtgcagtggcctgatctcagctcattgaaacctccatcttca

SEQ ID NO: 220710 - DNA, 201 bp, Homo sapiens
aaaatttcaaaatgtccaaatgttcaacttttcacaaaatgtttggaaggtagagaaaagtaaccaatagacccactattgtaactggattgtttttgtgmattgttatagtttttgaaaaaataattgttctgctataacttttatattctgctattctcacatcatatttatcattcctttaaaattttctagttttag

SEQ ID NO: 220711 - DNA, 201 bp, Homo sapiens
cttaactcctggactcaagcaatctgcctgcctcggcctcccaaagtgctgggattacaggcttgagccacggcacctgtctatgttctcttttcactgtmggatcagagggtcatattgatggatgatagtgatggttactttgcattttggaatggtaaacttaaacatgaactgttatacagtactctactgaatctt

SEQ ID NO: 220712 - DNA, 201 bp, Homo sapiens
gctggggttgagtcttctgcccctgcaggtggtctatgttgcccgcaacgcaaaggatgtggcagtttcctactaccacttctaccacatggccaaggtgyaccctgagcctgggacctgggacagcttcctggagaagttcatggtcggagaaggtgggtttgatgggaggaaggaaagtgtggagccaaggggtggtgg

SEQ ID NO: 220713 - DNA, 201 bp, Homo sapiens
gttgagtcttctgcccctgcaggtggtctatgttgcccgcaacgcaaaggatgtggcagtttcctactaccacttctaccacatggccaaggtgcaccctsagcctgggacctgggacagcttcctggagaagttcatggtcggagaaggtgggtttgatgggaggaaggaaagtgtggagccaaggggtggtggctacaa

SEQ ID NO: 220714 - DNA, 201 bp, Homo sapiens
tacggatcctggtaccagcacgtgcaggagtggtgggagctgagccgcacccaccctgttctctacctcttctatgaagacatgaaggaggtgagaccacstgcgatgcttccctccatgtgactcctgggggcaggcacctcacagggacccgccaaggccacccagccccctccctgggcagcccccacagcaggacca

SEQ ID NO: 220715 - DNA, 201 bp, Homo sapiens
tcctggtaccagcacgtgcaggagtggtgggagctgagccgcacccaccctgttctctacctcttctatgaagacatgaaggaggtgagaccacgtgcgawgcttccctccatgtgactcctgggggcaggcacctcacagggacccgccaaggccacccagccccctccctgggcagcccccacagcaggaccagattcc

SEQ ID NO: 220716 - DNA, 201 bp, Homo sapiens
tttacttttcctgaatcagtaatccgagcctccactgaggggccctctgctgctcagaacccgaaaagggagattcaaaagatcctggagtttgtggggcrctccctgccagaggagaccgtggacttcatggttcagcacacgtcgttcaaggagatgaagaagaaccctatgaccaactacaccaccgtcccccaggag

SEQ ID NO: 220717 - DNA, 201 bp, Homo sapiens
taatccgagcctccactgaggggccctctgctgctcagaacccgaaaagggagattcaaaagatcctggagtttgtggggcgctccctgccagaggagacygtggacttcatggttcagcacacgtcgttcaaggagatgaagaagaaccctatgaccaactacaccaccgtcccccaggagttcatggaccacagcatct

SEQ ID NO: 220718 - DNA, 201 bp, Homo sapiens
tggagaagttcatggtcggagaaggtgggtttgatgggaggaaggaaagtgtggagccaaggggtggtggctacaacgcacagcaaccctgtgttggcacyccttgcctgcttctccagtgtcctacggatcctggtaccagcacgtgcaggagtggtgggagctgagccgcacccaccctgttctctacctcttctatga

SEQ ID NO: 220719 - DNA, 201 bp, Homo sapiens; identical to SEQ ID NO: 39934

SEQ ID NO: 220720 - DNA, 201 bp, Homo sapiens
ctccactgaggggccctctgctgctcagaacccgaaaagggagattcaaaagatcctggagtttgtggggcgctccctgccagaggagaccgtggacttcrtggttcagcacacgtcgttcaaggagatgaagaagaaccctatgaccaactacaccaccgtcccccaggagttcatggaccacagcatctcccccttcat

SEQ ID NO: 220721 - DNA, 201 bp, Homo sapiens
tgaggggccctctgctgctcagaacccgaaaagggagattcaaaagatcctggagtttgtggggcgctccctgccagaggagaccgtggacttcatggttsagcacacgtcgttcaaggagatgaagaagaaccctatgaccaactacaccaccgtcccccaggagttcatggaccacagcatctcccccttcatgaggaa

SEQ ID NO: 220722 - DNA, 201 bp, Homo sapiens
agggagattcaaaagatcctggagtttgtggggcgctccctgccagaggagaccgtggacttcatggttcagcacacgtcgttcaaggagatgaagaagamccctatgaccaactacaccaccgtcccccaggagttcatggaccacagcatctcccccttcatgaggaaaggtgggtgctggccagcacgggggtttggg

SEQ ID NO: 220723 - DNA, 201 bp, Homo sapiens; identical to SEQ ID NO: 39939

SEQ ID NO: 220724 - DNA, 201 bp, Homo sapiens
tgagtcttctgcccctgcaggtggtctatgttgcccgcaacgcaaaggatgtggcagtttcctactaccacttctaccacatggccaaggtgcaccctgascctgggacctgggacagcttcctggagaagttcatggtcggagaaggtgggtttgatgggaggaaggaaagtgtggagccaaggggtggtggctacaacg

SEQ ID NO: 220725 - DNA, 201 bp, Homo sapiens; identical to SEQ ID NO: 39942

SEQ ID NO: 220726 - DNA, 201 bp, Homo sapiens
tgaagcggggcccttgtgttgccccaaccctggctgttggctaagagcccacgtgatctgcctgtgagaggagttccttccggaagaaccagggcagcttytgcccctagagggccaatgccctagctgagtgcagtcccccggccccagcctggtccagctttgggaagagggtgcccagttgtgcaatccaggccgggg

SEQ ID NO: 220727 - DNA, 201 bp, Homo sapiens; identical to SEQ ID NO: 39944

SEQ ID NO: 220728 - DNA, 201 bp, Homo sapiens
cccaccctctcccaggtggcagtccccaccttggccagcgaggtcgtgccctcagcctgctcacctcccatctccctccctctccaggcactacctgggtragccagattctggacatgatctaccagggtggtgacctggagaagtgtcaccgagctcccatcttcatgcgggtgcccttccttgagttcaaagccccag

SEQ ID NO: 220729 - DNA, 201 bp, Homo sapiens
gctcctgacttggccctaccggtgccgtgagatctcaaacaagtcagcctctaagcctcaggttcctcctttgccaatccaagagatgagctggcctgggrcaggctgtgtggtgatggtgctggggttgagtcttctgcccctgcaggtggtctatgttgcccgcaacgcaaaggatgtggcagtttcctactaccactt

SEQ ID NO: 220730 - DNA, 201 bp, Homo sapiens
cccaagagctcaggtgagtgacacagtggaacggcccagggcgccctcaccctgctcagcttgtggctctaacattccagaagctgaggcctctggcatcyctgccctttccccatggatatcccatttcagacaaccctggcctgcgtgaatccccctcccttcccttgtttgtttgtttttttccccggggaggccagg

SEQ ID NO: 220731 - DNA, 201 bp, Homo sapiens
ctccagctttgctccctgccttcctcccccaggcatggctggggactggaagaccaccttcaccgtggcgcagaatgagcgcttcgatgcggactatgcgragaagatggcaggctgcagcctcagcttccgctctgagctgtgagaggggctcctggagtcactgcagagggagtgtgcgaatcaaacctgaccaagcgg

SEQ ID NO: 220732 - DNA, 201 bp, Homo sapiens
atggccaaggtgcaccctgagcctgggacctgggacagcttcctggagaagttcatggtcggagaaggtgggtttgatgggaggaaggaaagtgtggagcyaaggggtggtggctacaacgcacagcaaccctgtgttggcaccccttgcctgcttctccagtgtcctacggatcctggtaccagcacgtgcaggagtggt

SEQ ID NO: 220733 - DNA, 201 bp, Homo sapiens
tggtgctggggttgagtcttctgcccctgcaggtggtctatgttgcccgcaacgcaaaggatgtggcagtttcctactaccacttctaccacatggccaargtgcaccctgagcctgggacctgggacagcttcctggagaagttcatggtcggagaaggtgggtttgatgggaggaaggaaagtgtggagccaaggggtg

SEQ ID NO: 220734 - DNA, 201 bp, Homo sapiens
aagtgctgggattacaggagtgagccaccgtgccaggccttctccaggctcttggcaccttagccagaaacaatttaaggacaagtgcaaaagtcatgaaygtaggcagatttcctgcagagtaaagggactcactgaagaagaggaacgtgggggtcctcaagagagtgtctcatgccctacaaggtgtggggctgacct

SEQ ID NO: 220735 - DNA, 201 bp, Homo sapiens
gtggagccaaggggtggtggctacaacgcacagcaaccctgtgttggcaccccttgcctgcttctccagtgtcctacggatcctggtaccagcacgtgcargagtggtgggagctgagccgcacccaccctgttctctacctcttctatgaagacatgaaggaggtgagaccacgtgcgatgcttccctccatgtgactcc

SEQ ID NO: 220736 - DNA, 201 bp, Homo sapiens; identical to SEQ ID NO: 39953

SEQ ID NO: 220737 - DNA, 201 bp, Homo sapiens; identical to SEQ ID NO: 39952

SEQ ID NO: 220738 - DNA, 201 bp, Homo sapiens
ctccagccttgtctcatcttctgcggcggggactgtctgcctcttgctctgatgaccaagaacgtaagactcttcagtgtagacctaagaaagctagaggrtgggtcctcacaggcccacaaaatttggtggcggtgggatcacggctggtggagcatgccttgctccagattggggtgtgacgcattgatgcagattata

SEQ ID NO: 220739 - DNA, 201 bp, Homo sapiens
gcttcctggagaagttcatggtcggagaaggtgggtttgatgggaggaaggaaagtgtggagccaaggggtggtggctacaacgcacagcaaccctgtgtyggcaccccttgcctgcttctccagtgtcctacggatcctggtaccagcacgtgcaggagtggtgggagctgagccgcacccaccctgttctctacctctt

SEQ ID NO: 220740 - DNA, 201 bp, Homo sapiens
ggagtttgtggggcgctccctgccagaggagaccgtggacttcatggttcagcacacgtcgttcaaggagatgaagaagaaccctatgaccaactacaccmccgtcccccaggagttcatggaccacagcatctcccccttcatgaggaaaggtgggtgctggccagcacgggggtttggggcgggtgggagcagcagctg

SEQ ID NO: 220741 - DNA, 201 bp, Homo sapiens
cccccaggcatggctggggactggaagaccaccttcaccgtggcgcagaatgagcgcttcgatgcggactatgcggagaagatggcaggctgcagcctcascttccgctctgagctgtgagaggggctcctggagtcactgcagagggagtgtgcgaatcaaacctgaccaagcggctcaagaataaaatatgaattgagg

SEQ ID NO: 220742 - DNA, 201 bp, Homo sapiens; identical to SEQ ID NO: 39923

SEQ ID NO: 220743 - DNA, 201 bp, Homo sapiens; identical to SEQ ID NO: 39924

SEQ ID NO: 220744 - DNA, 201 bp, Homo sapiens
cggatgttgcagtgagccaagatcatgccacttcactccagcctgggcataagagcaaaactctgtcttgaaaataaataaataattaaattaaattaagktattatttgacctgggctcggtggcttatgcctgtaatctcagcacttcagcctggcagatcacttgaggtcaggagttcaagaccagcctggccagcat

SEQ ID NO: 220745 - DNA, 201 bp, Homo sapiens
gccttctccaggctcttggcaccttagccagaaacaatttaaggacaagtgcaaaagtcatgaacgtaggcagatttcctgcagagtaaagggactcactsaagaagaggaacgtgggggtcctcaagagagtgtctcatgccctacaaggtgtggggctgacctttatgggcttcttcaactaaagaggggtatattcat

SEQ ID NO: 220746 - DNA, 201 bp, Homo sapiens
atttcttggaagtcttgggagattcacctttactcagatggttgtttacctgtctcgtgcacagcttgaccttggactttaaagtgaggataaagaacgasgaggatggggggatgccccccttccacggggccctgtggcttccaaacctcggcctcctctggtctcttgtctgtggagcctccttcaaacccagggaaa

SEQ ID NO: 220747 - DNA, 201 bp, Homo sapiens
cctcccctctcttgcctgggtcaattagagagagcttgtctgttggctgcctggcagggtggagttcaggggcaggtcaggagcccagtgacagctcggaaaaaaaaaaaaaaaaaaaaaaaaaacagaaaaaaaaaacctacaaaaacaaacccaccattgggcctttcccctttcattcttctgttttctacacagcaa

SEQ ID NO: 220748 - DNA, 201 bp, Homo sapiens
atccctgccctttccccatggatatcccatttcagacaaccctggcctgcgtgaatccccctcccttcccttgtttgtttgtttttttccccggggaggcyaggtcttgctgtcacccaggctggagtgctgtgggatcctggccactgcagccttgaattcctgggctcaagtgattctcttgcctcagcctctggagta

SEQ ID NO: 220749 - DNA, 201 bp, Homo sapiens; identical to SEQ ID NO: 39925

SEQ ID NO: 220750 - DNA, 201 bp, Homo sapiens
cttccggaagcaaatctaagtccagccccggctccagatccctcccacagtggacctaggaaaccctcagctcagagaacaaccctgcattccccacacarcacccacaatcagccactgcgggcgaggagggcacgaggccaggttcccaagagctcaggtgagtgacacagtggaacggcccagggcgccctcaccctg

SEQ ID NO: 220751 - DNA, 201 bp, Homo sapiens
gcacctaccccaagtccggtaagtgaggagggccacccaccctctcccaggtggcagtccccaccttggccagcgaggtcgtgccctcagcctgctcaccycccatctccctccctctccaggcactacctgggtaagccagattctggacatgatctaccagggtggtgacctggagaagtgtcaccgagctcccatctt

SEQ ID NO: 220752 - DNA, 201 bp, Homo sapiens
ttggccagcgaggtcgtgccctcagcctgctcacctcccatctccctccctctccaggcactacctgggtaagccagattctggacatgatctaccagggyggtgacctggagaagtgtcaccgagctcccatcttcatgcgggtgcccttccttgagttcaaagccccagggattccctcaggtgtgtgagtgtgtcctg

SEQ ID NO: 220753 - DNA, 201 bp, Homo sapiens
gctccagattggggtgtgacgcattgatgcagattatattactatagaatatgatggtctcagggaccaggcaggactttggcttctgagcagggttcagmtcctgacttggccctaccggtgccgtgagatctcaaacaagtcagcctctaagcctcaggttcctcctttgccaatccaagagatgagctggcctgggac

SEQ ID NO: 220754 - DNA, 201 bp, Homo sapiens
gtcgtgccctcagcctgctcacctcccatctccctccctctccaggcactacctgggtaagccagattctggacatgatctaccagggtggtgacctggaraagtgtcaccgagctcccatcttcatgcgggtgcccttccttgagttcaaagccccagggattccctcaggtgtgtgagtgtgtcctgggtgcaagggga

SEQ ID NO: 220755 - DNA, 201 bp, Homo sapiens
tgggtaagccagattctggacatgatctaccagggtggtgacctggagaagtgtcaccgagctcccatcttcatgcgggtgcccttccttgagttcaaagycccagggattccctcaggtgtgtgagtgtgtcctgggtgcaaggggagtggaggaagacagggctggggcttcagctcaccagaccttccctgacccact

SEQ ID NO: 220756 - DNA, 201 bp, Homo sapiens
ttcatggtcggagaaggtgggtttgatgggaggaaggaaagtgtggagccaaggggtggtggctacaacgcacagcaaccctgtgttggcaccccttgccygcttctccagtgtcctacggatcctggtaccagcacgtgcaggagtggtgggagctgagccgcacccaccctgttctctacctcttctatgaagacatga

SEQ ID NO: 220757 - DNA, 201 bp, Homo sapiens
cctgaccaacatggtgaaaccccgtctgtaatagaaatacaaaaattagtcgggcatggtggcacgtgcctgtaattacagctactcaaaaggctgaggcrggagaattgcttgaaagatggggcagggggcagcggcagaggttgcagtgagccaaatcgggccattgcactcctggtgagaccggaagggtctctgtgc

SEQ ID NO: 220758 - DNA, 201 bp, Homo sapiens
acaggcctggctggcctgggcggtttccacatgtgaggggctgaggggctcaaggaggggagcatctccactgggtggaggctgggggtcccagcaggaartggtgagacaaagggcgctggctggcagggagacagcacaggaaggtcctagagcttcctcagtgcagctggactctcctggagaccttcacacaccctg

SEQ ID NO: 220759 - DNA, 201 bp, Homo sapiens
gtcccgctcatcaagtactttgcagaggcactggggcccctgcagagcttccaggcccggcctgatgacctgctcatcagcacctaccccaagtccggtargtgaggagggccacccaccctctcccaggtggcagtccccaccttggccagcgaggtcgtgccctcagcctgctcacctcccatctccctccctctccag

SEQ ID NO: 220760 - DNA, 201 bp, Homo sapiens
gttcaaggagatgaagaagaaccctatgaccaactacaccaccgtcccccaggagttcatggaccacagcatctcccccttcatgaggaaaggtgggtgcyggccagcacgggggtttggggcgggtgggagcagcagctgcagcctccccataggcacttggggcctcccctgggatgagactccagctttgctccctgc

SEQ ID NO: 220761 - DNA, 201 bp, Homo sapiens
ggagggccacccaccctctcccaggtggcagtccccaccttggccagcgaggtcgtgccctcagcctgctcacctcccatctccctccctctccaggcacyacctgggtaagccagattctggacatgatctaccagggtggtgacctggagaagtgtcaccgagctcccatcttcatgcgggtgcccttccttgagttca

SEQ ID NO: 220762 - DNA, 201 bp, Homo sapiens
ttgtcactgctgtagaacaaagtcctgcacagagacgatagccaagaaatagttaataaaataatggaaaacgggtgccttctactgagcacccgctaatwgtgagtgagtagaggacttgccctggggacattcagtgacctgctgggtgttgctgagctgtgaggaagttcaggtctggctgcagtggtgaggctgtga

SEQ ID NO: 220763 - DNA, 201 bp, Homo sapiens
tacaggcgtgtgccaccaggcttgactaattttctatttttagtagagacaaggtttctccatgttggtcaggctggtctcaaactcccgacttcaggtgrtctgcctgcctcggcctcccaaagtgctgggattacaggagtgagccaccgtgccaggccttctccaggctcttggcaccttagccagaaacaatttaag

SEQ ID NO: 220764 - DNA, 201 bp, Homo sapiens; identical to SEQ ID NO: 39940

SEQ ID NO: 220765 - DNA, 201 bp, Homo sapiens
agatgagctggcctgggacaggctgtgtggtgatggtgctggggttgagtcttctgcccctgcaggtggtctatgttgcccgcaacgcaaaggatgtggcrgtttcctactaccacttctaccacatggccaaggtgcaccctgagcctgggacctgggacagcttcctggagaagttcatggtcggagaaggtgggtttg

SEQ ID NO: 220766 - DNA, 201 bp, Homo sapiens; identical to SEQ ID NO: 39945

SEQ ID NO: 220767 - DNA, 201 bp, Homo sapiens; identical to SEQ ID NO: 39948

SEQ ID NO: 220768 - DNA, 201 bp, Homo sapiens
agcagctgcagcctccccataggcacttggggcctcccctgggatgagactccagctttgctccctgccttcctcccccaggcatggctggggactggaaraccaccttcaccgtggcgcagaatgagcgcttcgatgcggactatgcggagaagatggcaggctgcagcctcagcttccgctctgagctgtgagaggggc

SEQ ID NO: 220769 - DNA, 201 bp, Homo sapiens
agatggggtcttgcaatgctgcaccaggttggtctccaactcctggcctcagcctccctagggtctgggattataggtgggagccaccctgcctaggcctstgcttttgctgagtcatcagagttttgttcattcccacagcagctctggcccctagtagcagctcagttcctcaatgggccgtgtttgtcctggagccca

SEQ ID NO: 220770 - DNA, 201 bp, Homo sapiens
ttgaacccgggagaaggaggttgtggtgagccagagatcccaccattgcattccagcctgagcaacaagagcaaaactcacaaaaataaataaataaataratatataaataaaaataaaactgtggcacctgtggtggctcactgctgtaatgccagcactttgggaggccaaattgggtggatcacttgagctcaggag

SEQ ID NO: 220771 - DNA, 201 bp, Homo sapiens
gggtggatcacttgagctcaggagttacagaccagcccgggaaacatggggagtctccatctctataaaaatgcaaaatatcagcagggcatggtggcatrgcgctgtagttccagctactggaaagtctgaggttggaggattgcttgagcctggaaggtcaaggttgcagtgagttattatcactccagtgcactccaa

SEQ ID NO: 220772 - DNA, 201 bp, Homo sapiens
tcaccggctaggtgctttatgactctcgttagtctctcccaccccaacctttgcactacattgcccgagggcagctcttgtcactgctgtagaacaaagtmctgcacagagacgatagccaagaaatagttaataaaataatggaaaacgggtgccttctactgagcacccgctaattgtgagtgagtagaggacttgccc

SEQ ID NO: 220773 - DNA, 201 bp, Homo sapiens
ccatctctataaaaatgcaaaatatcagcagggcatggtggcatagcgctgtagttccagctactggaaagtctgaggttggaggattgcttgagcctggraggtcaaggttgcagtgagttattatcactccagtgcactccaacttgggcgacagaaaaaaagaaagaccacggtccttttttttttttttttttttga

SEQ ID NO: 220774 - DNA, 201 bp, Homo sapiens
ccaacttgggcgacagaaaaaaagaaagaccacggtccttttttttttttttttttttgagactctctgtctcaaaaataaataaataaaataaaataaartaaaataaatcccacaataaaaagaaaaagcaaaggtccaggtgtggggcatgtgaatccagggaaggaggccctggctcagcccagctttggtcctgtt

SEQ ID NO: 220775 - DNA, 201 bp, Homo sapiens
ctttggcttctgagcagggttcagctcctgacttggccctaccggtgccgtgagatctcaaacaagtcagcctctaagcctcaggttcctcctttgccaawccaagagatgagctggcctgggacaggctgtgtggtgatggtgctggggttgagtcttctgcccctgcaggtggtctatgttgcccgcaacgcaaaggat

SEQ ID NO: 220776 - DNA, 201 bp, Homo sapiens
gtcctgttcttctgggaaagtcgcctcacttcctccagccttgtctcatcttctgcggcggggactgtctgcctcttgctctgatgaccaagaacgtaagrctcttcagtgtagacctaagaaagctagagggtgggtcctcacaggcccacaaaatttggtggcggtgggatcacggctggtggagcatgccttgctcca

SEQ ID NO: 220777 - DNA, 201 bp, Homo sapiens
caagaacgtaagactcttcagtgtagacctaagaaagctagagggtgggtcctcacaggcccacaaaatttggtggcggtgggatcacggctggtggagcrtgccttgctccagattggggtgtgacgcattgatgcagattatattactatagaatatgatggtctcagggaccaggcaggactttggcttctgagcagg

SEQ ID NO: 220778 - DNA, 201 bp, Homo sapiens
ggtcctcacaggcccacaaaatttggtggcggtgggatcacggctggtggagcatgccttgctccagattggggtgtgacgcattgatgcagattatattrctatagaatatgatggtctcagggaccaggcaggactttggcttctgagcagggttcagctcctgacttggccctaccggtgccgtgagatctcaaacaa

SEQ ID NO: 220779 - DNA, 201 bp, Homo sapiens
gactatgcttcgaagaagacaatgattcttacctattttttgtttaaacacatgttatagactttgcttgataataacatctttttttatctcctaatcaycccataagtaagaaaaaatgatctgtacttagaaaatgaattacagagtggttacatagctttcctggggaaatcattcaatttattagcaaatctggat

SEQ ID NO: 220780 - DNA, 201 bp, Homo sapiens
aataactttttattaaaatagtttttcaatttttaaaggtttggataaattgagggtttattatgtctacatttatgtatttaaaaagttatcctcacttrggctttctcctataaaacatgtcatatagaataggtttttggacaaagtttaatctattcatttattaatttctgtaccaaaatatctgttgggtagtta

SEQ ID NO: 220781 - DNA, 201 bp, Homo sapiens
tttgtttgttgcttttctgagacagggttttgctctgttgcccaggctggagtgctgtggtgcaatcttggctcattgttgcctctacctcctgggctcargcagtcctctcaccacagccacccaagtagctggcacaacaggtgcacaccactgtgcctggctaatttttttgtattttttgaggagacggagttttgc

SEQ ID NO: 220782 - DNA, 201 bp, Homo sapiens
aagctaatttgtactggaagtgttcacctttagtgctcagctgtcaagactgtacatgccatattttgtgggaggtttaattaaatttaattaaaatggawtttttttcttaagcaagtattggaagagtacattaaaagaagtataagccatttatgtatatcctaaaaccagaaaaaaaccacaaacccttattttatt

SEQ ID NO: 220783 - DNA, 201 bp, Homo sapiens
gggtcagggacccacttgaggaggcagtctgcccgttctcagatctccagctgcgtgctgggagaaccactgctctcttcaaagctgtcagacagggacayttaagtctgcagaggttactgctgtctttttgtttgtctgtgccctgcccccagagatggagcctacagaggcaggcaggcctccttgagctgtggtggg

SEQ ID NO: 220784 - DNA, 201 bp, Homo sapiens
gcccctgtgtctgtctgtacatccaatcctatccctctttttcctttctgcagcagatatatgatgcttgggatgtaaaaagaatgagcattgtttgctcytatattgaccctgacgagttttggaataggaaggatcgttacttcttacgtttgattttttagataaactggcaatcaaaagggttaagtgatttgccca

SEQ ID NO: 220785 - DNA, 201 bp, Homo sapiens
ggggtcagggacccacttgaggaggcagtctgcccgttctcagatctccagctgcgtgctgggagaaccactgctctcttcaaagctgtcagacagggacmtttaagtctgcagaggttactgctgtctttttgtttgtctgtgccctgcccccagagatggagcctacagaggcaggcaggcctccttgagctgtggtgg

SEQ ID NO: 220786 - DNA, 201 bp, Homo sapiens
gtggccatttggaggtaagaagacactctggctttttgaattgccagagttcttgcactggatgtttttatcttcgtgggctgatgtcccttcagtcttaraagttgtcatcctttggatgagttttttgttcttttatccgctttgatatccttggggccttgattatggtataaggtgggcatggttgactggctttga

SEQ ID NO: 220787 - DNA, 201 bp, Homo sapiens
ataaatagaaatcattatttttctccagtttgcttatcaataagttaacatatgaagttctgaaagcatggaccattctctttttttcattttttttttttgagacagggtcttctcctgtggcccaggctggagttcagtggcgtgatcacagcctacttttaacttcaaaatcctaggctcaagccatcctcccacctc

SEQ ID NO: 220788 - DNA, 201 bp, Homo sapiens
gggaggttgtatgtttccaggaatttatctgtttcttctaggttttctagcttgtgtgcatagaggtatttgtagtagtttctgagggctttttttttttmtatttccatggagtcagtcgtagcaccccctttgtcatttctgattgagtttatttggatattgtctcttattttagtagtctagctagtggtcaattta

SEQ ID NO: 220789 - DNA, 201 bp, Homo sapiens
cctgtagtttgcctttcttttctgtagctgctcgtcttgtcttgcacgccattcttctagctcatttatcgctttttctttccactctgcttcttgcttckgagaataagcagcaagggctgctaagcattccattttctcttctttgcatctgcatatattttcaggctggatgggaatcgatccacttgtgaaatagct

SEQ ID NO: 220790 - DNA, 201 bp, Homo sapiens
tgggaggttgtatgtttccaggaatttatctgtttcttctaggttttctagcttgtgtgcatagaggtatttgtagtagtttctgagggctttttttttttctatttccatggagtcagtcgtagcaccccctttgtcatttctgattgagtttatttggatattgtctcttattttagtagtctagctagtggtcaattt

SEQ ID NO: 220791 - DNA, 201 bp, Homo sapiens
gtttctctgttagtttttggtatcaggatgatgctagcctcatagaatgagtttgggaggagacccccccccccctttgttttttttttttttttttttttgcaatagtttcagtgggaatggtaccagctcttctttatacatctggtagaatttggctttgaatccagctggtcctgggctttttcttgttgttaggct

SEQ ID NO: 220792 - DNA, 201 bp, Homo sapiens
tgtttctctgttagtttttggtatcaggatgatgctagcctcatagaatgagtttgggaggagacccccccccccctttgttttttttttttttttttttttgcaatagtttcagtgggaatggtaccagctcttctttatacatctggtagaatttggctttgaatccagctggtcctgggctttttcttgttgttaggc

SEQ ID NO: 220793 - DNA, 201 bp, Homo sapiens
actcctgctctaaaacttgcctcagtctctaactctgctttataaccctcagatgaattctttcctttgaggagccaagaatcaagttgctgcagacctcyagggattcaccactgctaacactaatatatgtagctgtttagctctattcctgatggataaatatatgctaaatagttcttattactattacataacatt

SEQ ID NO: 220794 - DNA, 201 bp, Homo sapiens
  misc_feature (1)...(201): n = A,T,C or G
cattggacaatcaatatgtaataagaacagctatgcataaaatcagtagtgctacacagtcgctgagaatttctgtttcagacatttccatcagcaagcantgtaagtatagtgatttgaagtgacttcctaaagagaggcagtttttgagcaagcttctgaaagaagggaggacattctaagtgaagtatttcatgcacg

SEQ ID NO: 220795 - DNA, 201 bp, Homo sapiens
gcagagtggaccaaagagatttcaaggtgacaactaagatgaaaaggtgaagaggagtttctacaaatatttttcaagaaaaattattcaaattatatttytgagtaataaatgaagcatcagagggagttgtagatgcactgagaaagggaccctgtcatttgcggccatcttgtttttttttttttttttcacgtgaat

SEQ ID NO: 220796 - DNA, 201 bp, Homo sapiens
cctctttggttacatgtgtgcctaggtaatttgtgtgtgtatgtgtgtgtgtatgtttgtggcagttgtgaataagaatgtgttcttgatttggttcttgmcttgaacgttattggtgttttagaaatgctactaattttcatagattgattcctgaaactttactgaaatcgtttataaagccttttggtagagtattta

SEQ ID NO: 220797 - DNA, 201 bp, Homo sapiens
attgtgtgatgctgaggactgggcattactgaggccatcacacagataggaattttttcagcttttggcctccttccctcactccctctttttggagtccstagcatctgttgttctaatgtatatgttcgtatgcacccaaggtttagctcccacttgtgagaacataaaatatttggttttctgtttctgtgtgaattt

SEQ ID NO: 220798 - DNA, 201 bp, Homo sapiens
ggtgaattgcattttgaaagaaataagcaaagcagttatcaacttcataggtttacatttacataatacttttatttgagctaccactacccatattacarttttgtcaagtaacctaataccctttacattgtccaccttcagtacaagatttggtctagagttagatatttcatttaattgtcatgtcttgtaagcttc

SEQ ID NO: 220799 - DNA, 201 bp, Homo sapiens
ttaaaagtcttaggggtagaaatgtttttgatgtaatacacagtttagactgccctcttttcctatggtatcatctattgtattaaagaaactacaaaagraaggagcagattactttatcatgttgaattttatttatttatcttttgaataaacaccatgtccttaggattgacaaattatgcctatgaggacatacta

SEQ ID NO: 220800 - DNA, 201 bp, Homo sapiens
ctttgagtgtcttcatcatgaaatctttgccagatcccatctccagaatggtatttcctgtgttatcttctaggagttttatcgttttgtttttacatttmagtatttcatccatcttgagttgatttttatgtatagtgtaaggaagggatccagtttcagtcatctgcatatggctagcaagttatcccagcacccctt

SEQ ID NO: 220801 - DNA, 201 bp, Homo sapiens
tgtgtgtgtgtgtgtgtgtgtataaatatatatatatatatgcatgccacattttctatatctgttctaccattgatggacatttaggttaattccatttytttgctcctgtgaatagtgctatgatgcacatacacgtctgtgtgtctttatggtagaacaatttatattttttggggtgtatacacaataatgggatgg

SEQ ID NO: 220802 - DNA, 201 bp, Homo sapiens
tcatgtttctgcaaagcacatgatctcattcttttttatggctgcttaatagtccatgtgtgtgtgtgtgtgtgtgtgtgtgtgtgtgtgtgtgtgtatawatatatatatatatatgcatgccacattttctatatctgttctaccattgatggacatttaggttaattccatttctttgctcctgtgaatagtgctatg

SEQ ID NO: 220803 - DNA, 201 bp, Homo sapiens
attcatgtttctgcaaagcacatgatctcattcttttttatggctgcttaatagtccatgtgtgtgtgtgtgtgtgtgtgtgtgtgtgtgtgtgtgtgtawaaatatatatatatatatgcatgccacattttctatatctgttctaccattgatggacatttaggttaattccatttctttgctcctgtgaatagtgcta

SEQ ID NO: 220804 - DNA, 201 bp, Homo sapiens
ccattcatgtttctgcaaagcacatgatctcattcttttttatggctgcttaatagtccatgtgtgtgtgtgtgtgtgtgtgtgtgtgtgtgtgtgtgtgkataaatatatatatatatatgcatgccacattttctatatctgttctaccattgatggacatttaggttaattccatttctttgctcctgtgaatagtgc

SEQ ID NO: 220805 - DNA, 201 bp, Homo sapiens
gagtcagggagaataaaggaggctattgcaatcatctaggcaagagatgatgagtggctggatcagacaaatctttgggccttatattttagcctcctttsctagttcttcctggtagcggtgaaaagtggttgaatttggaatggattttgaaagtagagccaacagtattttctgaatgattggatgtgtggagaggga

SEQ ID NO: 220806 - DNA, 201 bp, Homo sapiens
ctggcattaggtgaactttaggggaaatgtcattcttgagaccatataagagaagtttcaagaatgtaaattaaagctatctgaagtactggacattttascatgatataatggcactaagagattttgcttatattgcgattgaggcagtggccacaaataaatacaaatccagataatgatcgaagggcaatataacaa

SEQ ID NO: 220807 - DNA, 201 bp, Homo sapiens
ttatttatatatatataaaattactgtcaattttatatatatataattttacataaaaatataattttatatgtatgtaaaattgacagtaattttttgcrgaaaattcacaatccagttttttgattccacactgcacatcccaccccctcaagaccagagaacacagggtctaggctaacacatcaaaagcagctctgg

SEQ ID NO: 220808 - DNA, 201 bp, Homo sapiens
tttgatgagcttagttgggctcctgggtctcttgaaattgtcagtgaaatagtagggttactatgaatttgatctaattaccatctgagccagcaattatraacaacagtttataattcacaaaaatgcaaaatgaagacattgagggctaaaaggcagaggcataacacccaagcaagtactttggcactggagcctaaa

SEQ ID NO: 220809 - DNA, 201 bp, Homo sapiens
ttacttactgaccccgctgatttctaacaaaacattttatcttgaggttgtatataacctatgtctagtaatccctttgctttaaaattcccactttaagrttgtgtgcacaaatgtttactaaattcttgcattttaaaaaattgtcaagtaagaataaagctaaattccagtgagacataatggtatacagtttttttg

SEQ ID NO: 220810 - DNA, 201 bp, Homo sapiens
ttttgttagtctagcacatgtatatgtgctaaagttaacttagtaataatatattttacttggagtcatctttttattccattgcattagtttccttcttmaataagctttcgttttcttctcagttattttatcaactctcttgtgaatgatgatgataactgcctgacaaacatcgaaaacaaatgtgactaaaagact

SEQ ID NO: 220811 - DNA, 201 bp, Homo sapiens
gttttgtaaatatattcgttactaattctgtagaatgctcagtgcctctgggtattgtatgtaatttacacaaatagcagcttttttatgtgggatcatgkcagtattttgactaagcagtaggaaaatgatcaacaggatcagcaaagaaactggagtgtgcacagtagtttaaatatatattgccatgatattaatcaa

SEQ ID NO: 220812 - DNA, 201 bp, Homo sapiens
ataattatttttccagatgagtttttgggattttttccagaacatcatagtgttctggtattttagtactgcaaaggatcatggagatcatatcactgaarttcattttatagatgagaccaagagagtatctttattttatgacagaagcagaaaatctgactctgcttacttgtctctcctgtgccatgttttgtgtag

SEQ ID NO: 220813 - DNA, 201 bp, Homo sapiens
gtatttttgtacagaagacaatatcctctagcagtataaaaacaaatgtgtgtggggatatgtaaacataaatacacacatacacgcaggtgcatgtgctwtgtgctgagatacaagagtcacaaaacctgacaagatgtctgatggtgtggcatttacagactaaaggaagaggaagacacacaacaaatgacagtgcaa

SEQ ID NO: 220814 - DNA, 201 bp, Homo sapiens
taatgattgccattctaactggtgtgagatggtatctcattgtggttttgatttgcatttctctgatggccagtgatgatgagcattttttcatgtgtttyttggctgcataaatgtcttcttttgagaagtgtctgttcatgtcctttgcccactttttgatggggttgtttgtttttttcttgtaaatttgtttgagtt

SEQ ID NO: 220815 - DNA, 201 bp, Homo sapiens
ctttagttattctatcgtatttttgtacagaagacaatatcctctagcagtataaaaacaaatgtgtgtggggatatgtaaacataaatacacacatacaygcaggtgcatgtgctatgtgctgagatacaagagtcacaaaacctgacaagatgtctgatggtgtggcatttacagactaaaggaagaggaagacacaca

SEQ ID NO: 220816 - DNA, 201 bp, Homo sapiens
tgcttcttgcttctgagaataagcagcaagggctgctaagcattccattttctcttctttgcatctgcatatattttcaggctggatgggaatcgatccayttgtgaaatagctgcataattgtctcttggaccattactttcctggtagtagtcaccatcatcactccgtcaacagcatctggactcccagctgttcacc

SEQ ID NO: 220817 - DNA, 201 bp, Homo sapiens; identical to SEQ ID NO: 40091

SEQ ID NO: 220818 - DNA, 201 bp, Homo sapiens
tgtgaatatgaaatttgacatagtttagatgaaaaccctaaggaggagctgccaagaaacagaatcagaagagagcctatcaaagaagcttgggacaccasgtgtgctaaacagtgtgacctgctgtgtagagaaatggcaggcaggcctctggctgctataacagctcttcacagtgctccatcatctcctgtgctattg

SEQ ID NO: 220819 - DNA, 201 bp, Homo sapiens
gtatgagcagtataggtatctgaaaaagagtatttattaagatatttaaaataaaaatccagacttcatgggtttttagctagggtgacatgtgtgtaaasaaatcatagtgctttctaaatacttaaaagtcttaggggtagaaatgtttttgatgtaatacacagtttagactgccctcttttcctatggtatcatcta

SEQ ID NO: 220820 - DNA, 201 bp, Homo sapiens
ttctagctacttgggaggcggaggcaggaggatcacttgagcccgggaggtcaaggctgcagtgagctgtgctcacacactacacttgaatctgggcgatwgagtgagaccccgtctccaaaaaagaagttatttttcaataatttctgattctagtttcatttgacagtctactgctactttttgaacaatccatatttt

SEQ ID NO: 220821 - DNA, 201 bp, Homo sapiens
aggaatcatattttatgtgtgtatgtttgtgataaatcctttaacaagttatattaagtttgcttttgatacttagttgccacctagagtttacaatagtrtcatcaaccaacattgtcatctatttgcatttaactaataatcatttaaaataattggaacttagtagaaagtaataaaaaattagtaaaaatcgaatta

SEQ ID NO: 220822 - DNA, 201 bp, Homo sapiens
tgctatattttgtacttttgcaatacctctacaggaatcatattttatgtgtgtatgtttgtgataaatcctttaacaagttatattaagtttgcttttgwtacttagttgccacctagagtttacaatagtatcatcaaccaacattgtcatctatttgcatttaactaataatcatttaaaataattggaacttagtag

SEQ ID NO: 220823 - DNA, 201 bp, Homo sapiens
ttacttgatttttagtaaagtatcttgaggaatatcctcttaatcctattttaaaaataattgaggttaagtagtttgttcataataacacagttagtagrtggcaaattcaggactgtctctaaagcctttcctctctcctgccttatgtatacaagaaataagctacaagtgttatagatcagtttcatgaaataagtc

SEQ ID NO: 220824 - DNA, 201 bp, Homo sapiens
ttaagttaccctttagtgaaaatgcacatttgaacataacaccttctactttttttccttttcttaagaaaagcacctttagtaatggcctttaggctccratgccaaagtacttgcttgggtgttatgcctccgccttttagccctcagtgtcttcgttttgcatttttgtgaattataaactgttgtaccactgatata

SEQ ID NO: 220825 - DNA, 201 bp, Homo sapiens
ggatggttcttctaaatgaagcagcaacttcgaaaggcgatgttggaaaaagacggagtaagtctctgtgttgccatttttgtaatttcgttttagtcttmagattcatttaagtcaaatgggaaatacataaaagccctttgtaaacaaacttctaaagaaatgttctggtttgaagaagattttaacttttttctattg

SEQ ID NO: 220826 - DNA, 201 bp, Homo sapiens
ctggcaggtagtgaataaaggactgaaacaggctgaaaggatttacactagtactttttcatgatgttttcaaggagggtgaaagaaaatagatgggaaargtttgcatgtcatttcatactgatttgcataaaactgcatgacaaaattggactgaaagaattcatatagttagtgagagataatcacccatgtttcctc

SEQ ID NO: 220827 - DNA, 201 bp, Homo sapiens
gcagtttttcctttgctttcacttcacttctcttgcctgccaccatgtaagatgtgccagcttccccttccaccatgattgtaagtttcctgaggctctcyagccatgcgtaactgtcagtcaattaaacctctttcctttataaattacccagtcttggatatttctttatagcagtgcaaaaactgactaatacatata

SEQ ID NO: 220828 - DNA, 201 bp, Homo sapiens
tttgctgacagtttttatcatgaatgaggtgctgcattaaaaaaattttttttgttgtcactttatgtagtttttcttgcctatggatataatcagttacrttgattgattttcaaatgttgaactggtcttgcatacaggaatggatactatttaattgtgtcatattattttattatgtgttgctggattcagtttgct

SEQ ID NO: 220829 - DNA, 201 bp, Homo sapiens
ttctttgtcctttggatagcaagagcttacttttcttgagccttctttttttttatgtcaacccccattggcattcttggattgctgacttctctagcaastggtctgggatatataaggccaagagaaaacccaacattataaaaatatatgtcctttctatctttctaggagcagaaatatggtcttttatcttttcta

SEQ ID NO: 220830 - DNA, 201 bp, Homo sapiens
ataataatttatatatgaaacagactccttgggttagaattgaaatttccaatttactttttatatatagtgaaagtatacaagtacagctattcaggctrttattaaaaagaccaaaaaaaaaaaaaaaaccaccccaaaattcggaaaaggacgcgtagtaaagggaactcttgtacactcatcgtgggaatgtgaatt

SEQ ID NO: 220831 - DNA, 201 bp, Homo sapiens
attttatatgtgtttgtgtgtgtgtacacatggacactttttagtgctagagtttatttgccttaagggcttgagagtaggatctgtcttatttgtgccawatttggggacaatgggattcatgtaacatgtcttacagtgctttttttttttaagtaaatttagcacagtgcttttcttgtaatactcagaaacattagg

SEQ ID NO: 220832 - DNA, 201 bp, Homo sapiens
tctgtcaagagggcataaaatgtatatacatactagtctattttcatcgtttactaccataagatatacacaaatctattataaaaaggtcaaaacttgtyaaaacttagacacacagttacaaatcacacatgacaccacttgcagttgagggaaatgtaaacaaacataaggttgccatattaaatcacaactgcataa

SEQ ID NO: 220833 - DNA, 201 bp, Homo sapiens
ttctgtgtattagctagagctctagctctgcatttagacaaatccaggtttgaattttggttcctcttaactaactttggggcttaaagttagttacttarcttccaagtctcatttttctgcagctctagttacctctctctctatatttaacttggttaagcctgtttcttaatctgtaaacttggtatgataaaacct

SEQ ID NO: 220834 - DNA, 201 bp, Homo sapiens
aatagattttattcacatctatgtctacggcttccttgacaactactgcagatgccgctatcaccatggggatggttcttctaaatgaagcagcaacttcraaaggcgatgttggaaaaagacggagtaagtctctgtgttgccatttttgtaatttcgttttagtcttaagattcatttaagtcaaatgggaaatacata

SEQ ID NO: 220835 - DNA, 201 bp, Homo sapiens
ttaggagaagacccgagctcaaggttggggtttaattctgtgtattagctagagctctagctctgcatttagacaaatccaggtttgaattttggttcctsttaactaactttggggcttaaagttagttacttaacttccaagtctcatttttctgcagctctagttacctctctctctatatttaacttggttaagcct

SEQ ID NO: 220836 - DNA, 201 bp, Homo sapiens
gagatggaaattattttttagagtggtttgtgaatatgaaatttgacatagtttagatgaaaaccctaaggaggagctgccaagaaacagaatcagaagasagcctatcaaagaagcttgggacaccaggtgtgctaaacagtgtgacctgctgtgtagagaaatggcaggcaggcctctggctgctataacagctcttca

SEQ ID NO: 220837 - DNA, 201 bp, Homo sapiens
cttcttttagtttgtactttttttttcaagtagtagttgtcatttagtataataactctctactgctctggggttatgttgttgttgtttttaacggaggytggacatagaaactacccagaaagctttggaaaatacatatccttggcctcaccatagatataaatagtaagcacatctgaaccagcatacatgccactt

SEQ ID NO: 220838 - DNA, 201 bp, Homo sapiens
ttgtacttcttttagtttgtactttttttttcaagtagtagttgtcatttagtataataactctctactgctctggggttatgttgttgttgtttttaacrgaggttggacatagaaactacccagaaagctttggaaaatacatatccttggcctcaccatagatataaatagtaagcacatctgaaccagcatacatgc

SEQ ID NO: 220839 - DNA, 201 bp, Homo sapiens
gcatgtaacatattccctctgctacaagaatcaggggtgcgctcaaagcgtgacttagatgaagcttctgcataggtattgtacagtgagatactcttatkacctttctattcgttccaaagcttcctttaacattttttaaaaggcatctattgatactatcttttccagggtctttgccttttccattgatataccaag

SEQ ID NO: 220840 - DNA, 201 bp, Homo sapiens
acaaattcaagctaagtaaatcctgaaggctcgtagggtatctggttttgatgtgattttgaagacacacacaaaaaaagaagtacaaaagtcaaatgttmgtataccttcctgaatattatattttaaaactatcagttcagcacactaagttcacttgtgaaaaggaaatgaatttctgaatgctgtttgtttagaaga

SEQ ID NO: 220841 - DNA, 201 bp, Homo sapiens
gattctggatattagccctttgtcagatgagtaggttgtgaaaattttctcccattttgtaggttgcctgtacactctgatggtaatttcttttgctgtgsagaagctctttagtttaattagatcccatttgtcaattttggcttttgttgccattgcttttggtgttttagacatgaagtccttgcccatgcctatgtc

SEQ ID NO: 220842 - DNA, 201 bp, Homo sapiens
aacatagtatcattcatatatattgttttttcatattatgctatgctatttgtcttctgcataaaattgggctttaagtaagtcatgagtcatggtaatgrattttgttataaccttatttttatgaacctttttttattgaatcactttttattttatgttggttcatatgctctatgaaatattcaatggggccaggtg

SEQ ID NO: 220843 - DNA, 201 bp, Homo sapiens
atatataattttttattttcaagtatgttacttgaaattaagaacatagtatcattcatatatattgttttttcatattatgctatgctatttgtcttctrcataaaattgggctttaagtaagtcatgagtcatggtaatgaattttgttataaccttatttttatgaacctttttttattgaatcactttttattttat

SEQ ID NO: 220844 - DNA, 201 bp, Homo sapiens
ttttttcatgtgttttttggctgcataaatgtcttcttttgagaagtgtctgttcatgtcctttgcccactttttgatggggttgtttgtttttttcttgwaaatttgtttgagttcattgtagattctggatattagccctttgtcagatgagtaggttgtgaaaattttctcccattttgtaggttgcctgtacactct

SEQ ID NO: 220845 - DNA, 201 bp, Homo sapiens
ttagtttgctttttgttaccctagctctcttttcaagtaaccttttggtccaccatagccattcttattttcggaacattacgtgtttaaaaggactcctyaaggagtatttaccactagcacaatttaaaaatgttgaaaaaccagaacgtactgactggtgtcatcttcccaagaattcagtaataacttaagtaaaat

SEQ ID NO: 220846 - DNA, 201 bp, Homo sapiens
ccagtgatggtgagcattttttcatgtgttttttggctgcataaatgtcttcttttgagaagtgtctgttcatgtcctttgcccactttttgatggggttrtttgtttttttcttgtaaatttgtttgagttcattgtagattctggatattagccctttgtcagatgagtaggttgtgaaaattttctcccattttgtag

SEQ ID NO: 220847 - DNA, 201 bp, Homo sapiens
ggttgaactagtttacagtcccaccaacagtgtaaaagtgttcctctttctccacatcctctccagcacctgttgtttcctgactttttaatgattgccaytctaactggtgtgagatggtatctcattgtggttttgatttgcatttctctgatggccagtgatggtgagcattttttcatgtgttttttggctgcataa

SEQ ID NO: 220848 - DNA, 201 bp, Homo sapiens
agagttgtgaaaaatggaagtatatttgataaaaccaatttatgggtaaaaaattgagtaagtgtgtataagtatgtgtaagtgctcccttgtaatacacygatacacgtgtgatacattaattactaatgacgaaatatactttgaaatctctggagaaatattttaattatatgctaataatatgtactaactacgaaa

SEQ ID NO: 220849 - DNA, 201 bp, Homo sapiens
atggtacacatctgtagtcccagttactcgggaggctgaggcaggagaatcacttgagcccagtaggtggaggttgcagcaagccaaggttgtgccactgyactccagcctgggcgacagagtgagactctttctccagaagaaaaaaacaaaaattctaattgaagttttgtgaatgttcttgttttcattaatacatat

SEQ ID NO: 220850 - DNA, 201 bp, Homo sapiens
tttgtctctcacttgggcacgaaaaagtgtggtgtgcagatgctaagcaaaaaacacaaagagaagaggcattcatttattccataaagatttaagcactrgctctgtgccagtccttgttctgggtgccatcaatgcagaaataaacaaaatgtataaaaattgttgccctcagggagcttctatagctagagggagtac

SEQ ID NO: 220851 - DNA, 201 bp, Homo sapiens
gccagatgtggaaccatatccgtggacctccatatgctcataagaacccacacaatggacaagtggtaagtgtaatttataagcatgaatattctgaagtktaatccagcttaatttaggaataagaaattatgtttagtatttagtaggaaaagattctgtttgtcagtcaaaatatatattctttctcatttactacct

SEQ ID NO: 220852 - DNA, 201 bp, Homo sapiens
gtgtcaatgacatgtgtcatgtctataagcagtgcatatctttatgtataatgtgaaatgtggtaactggttttgagagtccatatagtttatatgtgctrtgaaaatcctggaatttaagaacctttggaattagcctctcaatatatcacaaattgaagtttcaggttataaatttttaaagttaaggcatatttgctc

SEQ ID NO: 220853 - DNA, 201 bp, Homo sapiens
aacaactattcagtgaattgtaatgtatattttattactggtaattaattcattaataaaggcattctcattttagaaaaagtgtttttcattttctcctwgcactttcattcaccatagttctcaaaacttgcaaacttttagactgcactctctcaccactgtttcttgctctgtctgtactgtttcactgatggtagt

SEQ ID NO: 220854 - DNA, 201 bp, Homo sapiens
tttggctttgaatccagctggtcctgggctttttcttgttgttaggctttttattacttattcaatttcaaaacttattattggtcagttcagggattcastttcttcctggttcagtcatgggaggttgtatgtttccaggaatttatctgtttcttctaggttttctagcttgtgtgcatagaggtatttgtagtagtt

SEQ ID NO: 220855 - DNA, 201 bp, Homo sapiens
tagaatttggctttgaatccagctggtcctgggctttttcttgttgttaggctttttattacttattcaatttcaaaacttattattggtcagttcagggrttcactttcttcctggttcagtcatgggaggttgtatgtttccaggaatttatctgtttcttctaggttttctagcttgtgtgcatagaggtatttgtag

SEQ ID NO: 220856 - DNA, 201 bp, Homo sapiens
ccagccataaaaaagggtgagttcatatcctttgcagggacatggatgaagctggaaaccatcctcagcaaactaacacaggaacagaaaaccaaacaccrcgtgttctcactcataagtgagagttggacagtgagaacgcatggacacacggaggggaacatcacacaccgaggcctgtcaggggatcaggggctgggg

SEQ ID NO: 220857 - DNA, 201 bp, Homo sapiens
attactatctcagttacagttgaccatgcatatattctcttcagaatacgcgaataagccagtcacagcaatcagtgctatgcacatgcagactactactrtggataactacagtgcgattcgttcatgactgagcgtggagcagagtccacacagaagttgatcgtggtacccaaggctgcttctcactcattctggaag

SEQ ID NO: 220858 - DNA, 201 bp, Homo sapiens
aaattgatggagtacatgtgcaggttgttacaagagtatattgtgtgatgctgaggactgggcattactgaggccatcacacagataggaattttttcagyttttggcctccttccctcactccctctttttggagtccctagcatctgttgttctaatgtatatgttcgtatgcacccaaggtttagctcccacttgtga

SEQ ID NO: 220859 - DNA, 201 bp, Homo sapiens
aagcaacaaataaaagtctcatcaattaaatatagttttatttttaagccaatatcatatgtcttgtaaacaatccttcagaataaagtagaaaaatgtaygcatatttaagaacatctatctctataggaaattttgtctttatttcacattttaacaagtctttttaaaaattttaaattgatggagtacatgtgcagg

SEQ ID NO: 220860 - DNA, 201 bp, Homo sapiens
gatatgccctggaaaaaaagcaacaaataaaagtctcatcaattaaatatagttttatttttaagccaatatcatatgtcttgtaaacaatccttcagaakaaagtagaaaaatgtacgcatatttaagaacatctatctctataggaaattttgtctttatttcacattttaacaagtctttttaaaaattttaaattga

SEQ ID NO: 220861 - DNA, 201 bp, Homo sapiens
tgggagcctgtgtagggcatgtatgtcaactttcctactacagtggtaagggagctgaggtatatatacgccagatctcatcagccatttgctgagtgctrttctcttggcaaagttattacttctccagcactggtggactttgtctgtcaaagaaagccatctagtcaaagaaatgcaggtgctggtggtggaagtcag

SEQ ID NO: 220862 - DNA, 201 bp, Homo sapiens
taccacttttttcatcatatattcctcagaggaggtatatgtacttgtttatccgacttcacagaagacacatttttttgttgttgttgttgttgttgttktttttttgagacagggtcttgctctgttgctcagactggagtacactggcacaatcacagctcacgacagccacaaccaacctcctaggctcaagcaatc

SEQ ID NO: 220863 - DNA, 201 bp, Homo sapiens
aaaactaatccatctagcatataaccccaaagaaggattttctttttctgcaaaaaggagaaaatttgaaaaactgaaatagctagagcttaggatcatgstgacctacatttaatgtttaggatggttgtatatattgaaagtcatcagtaaatatgattggtttgtaaatgtttatttttttaattttttaaaatttta

SEQ ID NO: 220864 - DNA, 201 bp, Homo sapiens
ctcctggcgctattcatctgctttttgtaacaagctcttcttcagtatggtggactatgatgaggggacagacgtttttcagcaggtaaagagttatatcrtattcatatatttaacatagttgtttgtggtcgatacatttttgtttgtcacataaaaatacaattcattcatcgtctgaacctgggaggcggaggttgc

SEQ ID NO: 220865 - DNA, 201 bp, Homo sapiens
tcccagcacattgggaggccgaggttaggcagatcacctgaggtcaggagtttgagatcagcctggccaacatggtgaaaacccgtctctatttaaaatamaaaaattaattgagaatggtggcgggcatctataatgccaggtactccggaagctgaggcaggagaatcacttgaacccaggaggtggaggttgcagtca

SEQ ID NO: 220866 - DNA, 201 bp, Homo sapiens
aggccatgatatgtaggtaataatgaatatgcaatatgaaaaattgaagagctcatgttttctaagcgatcaattgtttgactaaataaaacatatttcarttgcctttgacataacttctatatgtcattaatgtttttaagtacattttatattgggatgtataatatccagttagttttcgtggcacagctgtgaaac

SEQ ID NO: 220867 - DNA, 201 bp, Homo sapiens
agatggtgtctctacaaaaaatttaaaaaattagcctggcatggtggcacacgcctgtagtcccagctactggggaagctgaggtggaaatatcactcgascccaggagtttgaggctgcaagtgagctatgattgtgccactgcactccagcctgtgccacagactgagaatctgtctctaaaaaaactcgttcttaaaa

SEQ ID NO: 220868 - DNA, 201 bp, Homo sapiens
tataataattaatttatcttatctgcaatgaatgtgagtagctaataggccatgatatgtaggtaataatgaatatgcaatatgaaaaattgaagagctcrtgttttctaagcgatcaattgtttgactaaataaaacatatttcaattgcctttgacataacttctatatgtcattaatgtttttaagtacattttatat

SEQ ID NO: 220869 - DNA, 201 bp, Homo sapiens
atcgtctgaacctgggaggcggaggttgcagtgagccgagattgtgccactgcattccaggtggaggacagagcaagacttttacacacacacacacacasacacacacacacacaaatacaattcattcaataggttagtaaatacaataagtagttataatacattttgtgatgtgattaacataattatggctaaact

SEQ ID NO: 220870 - DNA, 201 bp, Homo sapiens
tcgcctctgctaggatccctcgtacccctttttccctgtacagtctccaccttcctgttcttgcatggattactgaagttataaatgttaatttcctcacktccatttacatttatattctgtaggattctttttatcccagttactgtactggcattagtagttttgattatgctttttggagaactacatggtttttgg

SEQ ID NO: 220871 - DNA, 201 bp, Homo sapiens
cgtctgaacctgggaggcggaggttgcagtgagccgagattgtgccactgcattccaggtggaggacagagcaagacttttacacacacacacacacacasacacacacacacaaatacaattcattcaataggttagtaaatacaataagtagttataatacattttgtgatgtgattaacataattatggctaaactta

SEQ ID NO: 220872 - DNA, 201 bp, Homo sapiens
gctgactttaaaacctgatgcctatgataagatttggcacaatggaacctggaagtgtagcagttgaaagttaatttactattaatataataaatattattgacatatgtaccagagtagttgatttagcatgaacagtgtttttcttccttctagaggggaagccaaactgaagtcttaagttgagcctgcaatcaggaa

SEQ ID NO: 220873 - DNA, 201 bp, Homo sapiens
tactgccttttagtattcttctaagagtattctttaggtataaaacatattaaggcattgcttttcattattgtttatggtttgttaaagtatacgaaaarttattcaacattcttatgaaatgttttaacatattgtattctttttttttgggagggtttcagacttttttttttctttggttgttagaacttttatttt

SEQ ID NO: 220874 - DNA, 201 bp, Homo sapiens
agctgactttaaaacctgatgcctatgataagatttggcacaatggaacctggaagtgtagcagttgaaagttaatttactattaatataataaatattattgacatatgtaccagagtagttgatttagcatgaacagtgtttttcttccttctagaggggaagccaaactgaagtcttaagttgagcctgcaatcagga

SEQ ID NO: 220875 - DNA, 201 bp, Homo sapiens
gtcgtgttaatgacacttaacgttgtaaatttaggaaatcttataaatttttgttactgccttttagtattcttctaagagtattctttaggtataaaacwtattaaggcattgcttttcattattgtttatggtttgttaaagtatacgaaaagttattcaacattcttatgaaatgttttaacatattgtattcttttt

SEQ ID NO: 220876 - DNA, 201 bp, Homo sapiens
tagctgactttaaaacctgatgcctatgataagatttggcacaatggaacctggaagtgtagcagttgaaagttaatttactattaatataataaatattattgacatatgtaccagagtagttgatttagcatgaacagtgtttttcttccttctagaggggaagccaaactgaagtcttaagttgagcctgcaatcagg

SEQ ID NO: 220877 - DNA, 201 bp, Homo sapiens
ttcctctcttcctcctccctggtccctatactctgtctccctctcctgttttattttttctccacagtacttgtcaccttacagtatgctacataatttaycgaatgtgttattttgtccgtttgccttttgccatgaccctagtaatagataagcttctgaaagaatggattttatcaggttttgtcactgatacatttc

SEQ ID NO: 220878 - DNA, 201 bp, Homo sapiens
tatttaaagttagccctttcctctcttcctcctccctggtccctatactctgtctccctctcctgttttattttttctccacagtacttgtcaccttacartatgctacataatttatcgaatgtgttattttgtccgtttgccttttgccatgaccctagtaatagataagcttctgaaagaatggattttatcaggttt

SEQ ID NO: 220879 - DNA, 201 bp, Homo sapiens
tttcatctatagcacttatagtttcaaaggaaatgttgtatctctttttatgaaaagataaactatacagtaagtgatactgtgagattttttttttttttgaaacggagtcttgctctgttgcccaggctggagtgcagtggcttgatctcggctcactgcaagctccgcctcccaggttcactccattctcctgcctca

SEQ ID NO: 220880 - DNA, 201 bp, Homo sapiens
aattcagttatacaaagaaaaataattggaagcaattttagagcaataaattattcccttacctttaatttttcacacaaatgctggcttcccaacaagayccttcctgacgacactatttaaagttagccctttcctctcttcctcctccctggtccctatactctgtctccctctcctgttttattttttctccacagt

SEQ ID NO: 220881 - DNA, 201 bp, Homo sapiens
attattaagaacccgggtggtcattgtattagaatgttaggaactctttgccacagaattaaaagtgaaattgatatgttgttacattagtagcagagttyacgttagtaactgccaccgaattcacataactgagtttgttgccttctctttacgtttggtgaataggaaatactgtgataaatcaacatagaaacatac

SEQ ID NO: 220882 - DNA, 201 bp, Homo sapiens
gaagaggtgcccgattacagttgttcagcttatgaattaggcatatattcattcttgagctttttcctccttcaagttttcttaaataacttacattttttctttctctaaggagtccttcttttaggttagctcatttctaatgagtaaaagctcagtatttcctttttcagagattttgaagactctggttaggtagta

SEQ ID NO: 220883 - DNA, 201 bp, Homo sapiens
tttcttccttgtctgtttgtattcaaataccgtgtcacactcttgtgtatgatttgtaatccatttagtgcggaccaaaggtttaacatgttgctttggtrgctttagtgctgcttatttctctaatttttaaattcagcatttaaaattttgtcatactacttcagtcacttcatcgcttaagaggcaattcattttctt

SEQ ID NO: 220884 - DNA, 201 bp, Homo sapiens
ccgtggacctccatatgctcataagaacccacacaatggacaagtggtaagtgtaatttataagcatgaatattctgaagtttaatccagcttaatttagraataagaaattatgtttagtatttagtaggaaaagattctgtttgtcagtcaaaatatatattctttctcatttactacctgtgtcacctatatacacat

SEQ ID NO: 220885 - DNA, 201 bp, Homo sapiens
tatttagactcccagtcgtgcattgctcgttcttgtctttggtgtttttggtgtttttattgttatttttggtacaaatgcctatcagagccaggaagctraagtaaggagtgattgggcaagttataggatagcaggaagtacaggtactgttttaacctagagaacacatttagtctaaaggagtcccagttcattaac

SEQ ID NO: 220886 - DNA, 201 bp, Homo sapiens
ttcccatactttcatacctttcctcatccagtttctttggtcgaggctgctgtccctgcatcttacttgttctcagagttttgctttttcagttcttgtawcaccgtcatcatctcaaatatgtcactgtatcatacttaatcacacccaggtctttcctttagctaaaagaaatataagggccatgactttcagtcattt

SEQ ID NO: 220887 - DNA, 201 bp, Homo sapiens
gtttagatatcgttttttatttgccccatcttcttcccttttgtatccttgttttctcctttaaaaaattgtgcaaactagaatatttagactcccagtcrtgcattgctcgttcttgtctttggtgtttttggtgtttttattgttatttttggtacaaatgcctatcagagccaggaagctgaagtaaggagtgattgg

SEQ ID NO: 220888 - DNA, 201 bp, Homo sapiens
aagactaagtaactgctgtctgtgttagtttatcctacaaactaagaatggcttctacagttctaaatcattggggggtgggacgtcaacaaagaatattytgtgacatgaaaattatgaaattcagatatcagtgcctatgaataaagtttcattgaaacgcagccaggtttgttttatgtgttggctgcttttgcacta

SEQ ID NO: 220889 - DNA, 201 bp, Homo sapiens
gaccactttgaatatcaacacttaataagtttctaaaaatttatgtttatattttaaatggcagttaaaaattaaagctcaaagagactaaacattaaagrtcctataaataacattgtgaaagttgatcatacaaattgggtcaatcttggcacacccagctaaaacagagtcaagaggctagggggataaagcactggt

SEQ ID NO: 220890 - DNA, 201 bp, Homo sapiens
gtgagacttcttagattctctctaatttctgggtttagatatcgttttttatttgccccatcttcttcccttttgtatccttgttttctcctttaaaaaaytgtgcaaactagaatatttagactcccagtcgtgcattgctcgttcttgtctttggtgtttttggtgtttttattgttatttttggtacaaatgcctatc

SEQ ID NO: 220891 - DNA, 201 bp, Homo sapiens
aatacatattttgtaagctgcttatttttcttttatacatcatgagcatattcctatgcagttaactacattctacaatatatatgattttacacctatgyagtaatatcaatgtatgaattgccacaactattttaagttttatgccatccagctttttatggtgtatctttcagtacaccctgtggtttaatacaagac

SEQ ID NO: 220892 - DNA, 201 bp, Homo sapiens
tccagtctgtaacttttaattggggaatttaaaactatttacattttgattcagactctgcatcttaacaagatcctgaaatgatccatacgcatgttaargttggagaagcactgttgtagacaatagcataggttaagattagcatgtggagcaattttggtaaattgatcaattcgaaacataaagatggaagtttta

SEQ ID NO: 220893 - DNA, 201 bp, Homo sapiens
gccacaatgtacttctcgctagcattctcatagaacacatgtgaatgtagagtagagattaaaaagaatgactcagtgagttacactacccacaaggtcartgggccggaatgaaaattcaaccactggcctatctgtgcttagtgaacaacccagaccttttttcccgtttgcaccttttttggataccaaatgaaatct

SEQ ID NO: 220894 - DNA, 201 bp, Homo sapiens
ttggctgtgagctgtaatatattgagaggaatcttttttttctgagcagtaggtcttaatactgggcttcaaatattcagtaaactgtgctttaaacatasgtgctgtttttcatccaggctttcttgttccatttatagagcacaggcacaatagatttagcttaattgcgctggaccttaggcttttcggaatggtaaa

SEQ ID NO: 220895 - DNA, 201 bp, Homo sapiens
aacctatattaattaggttcttaaagtttttaaaacatctttacagtataaagaaaaaaatgcatgtctgattattttgttttttgtacatcatttataaycattatcatcttacaaataagcatacagccttagacaacttaagtaatatagtcagtgtcctaccaaaagtgagttaatggttgagccaagccatgaaca

SEQ ID NO: 220896 - DNA, 201 bp, Homo sapiens
ataaaattgccctccttagcagatgatttgattttgtacatagaaaaaaaaattagacctaattcgtaaattgggtaaggttaatgaatacatagtaaatratgatgattcatgtcataatgcatcataaaaaaaggaagttttaaaaaaatctattgtcatagcatcacaaaaagttttgaatcaatctaataaaagata

SEQ ID NO: 220897 - DNA, 201 bp, Homo sapiens
atgatttctaaataacattttctttagctcactttattgtaagaatattgcatataatacatgtacaaaatctgtgttaattgactatgttattggtaagkcttctggtcagcagtaagcttttagtagtcaatttttggggagtgaacacttaacacgtgatttttgactgtgtgggtgcccctaaccttcccattgttc

SEQ ID NO: 220898 - DNA, 201 bp, Homo sapiens
tggattgaatccattgctgaaacaattgaatccaacattgctaaaactttcattccatgatgactaactcttctaaacaattgagacggaataatactcaycttaggtaaacttttctgtgaataaaaaaagaggaagtgcctctattgtctgaagcaagactaactttgattctaaaatctgacggggacatttaaaaat

SEQ ID NO: 220899 - DNA, 201 bp, Homo sapiens
caaacaaaaggtctttaggatcttcccagaggtggaattggtttgggattttacagtatttctttctttaatttttatagtgttctgtatcaaatatttcraagaacttttttgttgttgctgttgttgtttttttgagacagagtcttgccctgtctcccagtctggagggcaatggcgtgatctcggctcactgcaaat

SEQ ID NO: 220900 - DNA, 201 bp, Homo sapiens
accttcaaattaactcgtggtcttatttaaattttgttttcaaagctgtatcaactgcatagtggaaatctatgaaataattatgaacccaaagtgttgamagcatgtaatggttatttttctttttttaaatacaatgtgaaatgttttccccaaaccaaatcgcttatgaaagttcgttgtatagaatagttaaaagca

SEQ ID NO: 220901 - DNA, 201 bp, Homo sapiens
tggtgggagcagctggcaacttcttaagaaattaagttggccacattgattccctctttatttcatgaaagattcctctgttgcatggaatgctgtttgayagaattttacccatagtctgactttttgcaaaattggagtctgtcctctcaaaccctgccactgctctatcaactaagtttatgcagcgttctttctcca

SEQ ID NO: 220902 - DNA, 201 bp, Homo sapiens
ttcttaactgattaacctcttggaatttttgctttctttatggcgtgtgtgctgtatgcattttatatttctgataaaaatggtgtatttgtttaatttaytgtatagctcattgtggtcttctgagtgcctttaaaggtagtggtggtctttactaaactatcagtttgtaatgtagatgaggtggtatagtgcttaatc

SEQ ID NO: 220903 - DNA, 201 bp, Homo sapiens
atagtagaaatgcagtgtataaattcactgatatgcatgtctgctgttactctgctgatttataccacctgtttattaagtaatgtcattaaattacttayaacttgaaaacatttttatattttaaaaacatggaatatacaaaggattgtataaaatgtgtatagaatattacatattttctgcatagttagcattaaa

SEQ ID NO: 220904 - DNA, 201 bp, Homo sapiens
tttatttcacaaaacactccacatctttttccagtgttaaagcaaccttgttttataatgtattttacacacacacacacacacacacacacacacacacactcttactgaaacacatctaattgaatgttgactaagttttctaatgttgcttgctggaaattggttgaaagattgtattctttggtttgaaataagttg

SEQ ID NO: 220905 - DNA, 201 bp, Homo sapiens
gcctataagagccttctatacagaagctacagtgctgtctcctcccaaacctccctaggaacagaatattactaatagcccagttccacctgtgctgtctrccagtcactgtgcctcccagactagccaccataatgacttttagcacagtacatcagtttttcctatttttgactttaagtagaatcatacaacactctt

SEQ ID NO: 220906 - DNA, 201 bp, Homo sapiens
tctgtaatataataaaaatgttattatattaaagatataactacatacaatgtattatatctgtaaaacataacagattgtttacagctaattgtcagttkgtttcttttgctttcttgcagtagcccttcatccttcccattttatttttaccaaaaaattaggggtcttgatgactaagttggaagtgataggacagac

SEQ ID NO: 220907 - DNA, 201 bp, Homo sapiens
ttgtgcttttttgctttgcatctttcactctttagttttgtgactttgagcaagttgtttaaacttctctgggcttcagtttccttgtttgtaaacagatrgtaatgtctacatcagagagttattggtactgggtaagatagtgaataaaacaaagttcttgcccttttggagctaaaattgtagtgctggaacaaagac

SEQ ID NO: 220908 - DNA, 201 bp, Homo sapiens
agagaaactgatacaccaccttttacctactggatgattctcaccataaacaaaacatcccacaagggatgcataaacacaagtcaaatatccctctgggkcagctcccccaggtatctgaaggctagcctcatttcagagagatctctactgtgatccgagggctatatacttccataaacacttgaaggtctcttacaa

SEQ ID NO: 220909 - DNA, 201 bp, Homo sapiens
gttgacttggggtttctgttccatttctgccctgttaatagggagtctgcatatttttttaactcatataatttgaaaaatgctatattgttactgcattwgctcccaacaaaaatagtaaattataaaaatgatttaaagcagcgtgaaacataagtgatataaaggtaaattcatagacatctttaaaatggcaatttt

SEQ ID NO: 220910 - DNA, 201 bp, Homo sapiens
gcttcccaaaatgctgggattacaggcgtgagccactgcgcctggcctcttgctttgttattaagaatttttgtcaatttcattttatatggctagttaayctgtcacaaaaatatctcatatgttatagttggacatttacattttaatttttcactatataaattattctaaaatagatttttgtatgtatattaagtt

SEQ ID NO: 220911 - DNA, 201 bp, Homo sapiens
gtattattcagtctctttttcagccaaaaatgtttcagttaatacaatgaaatttaagctaaacgattctcaactcaactcctaaaggccttgagttaaamaatgtatctttaaataatagggagggttagcgagcttaaagccattttagtataattcatatgtcttaattacacccatcaggtttttaaacggctcact

SEQ ID NO: 220912 - DNA, 201 bp, Homo sapiens
agaaaaaaattgttttccctgctaacatttgtttgtaattaaaaccacatgcacagagggattatggaactgcataatgagaatgtgttttaatatgtcamacttcatctaatacagttaattattctctgagtatcaagaagaaatattacatcagaggagaaaggataagaacaaaaagagaagaatcagtcctcccac

SEQ ID NO: 220913 - DNA, 201 bp, Homo sapiens
tttccacctggttttaatttttagtgtcaccatttaaactacatgcattcttgatcctaacgtctgactgaatcttgattgccagcccagactgctcttayacttcccttcaactgttgctgcctatctatgatcctgccaattaattacaacgaagaaccttgtgatttgtacccttacttcatgacaaagcacttcaca

SEQ ID NO: 220914 - DNA, 201 bp, Homo sapiens
tatgatactcacaaactcattttttgctttattttctcccaatattcatttgaagttcagctgcatgagtgttgtctgaaatgaaatgtcagaggctacasttggatgctattaaatgtttgtgttgtttcacaattcatattcaaaacttagaagatattcctgtagagttgcataaaaattgacacatttgcagaccat

SEQ ID NO: 220915 - DNA, 201 bp, Homo sapiens
gataagatcacttcttaccacctgctgtcaaactgctttacgtcatcagcatcttttgtctggattactgtagtaaactttccctggtctccttgcttctrtgcttgcttcgttatagtctgttcttgacatagttcatgtcactcttcttacagtcttgcttttatgactcaccatgtaattcagaataacatctaagtc

SEQ ID NO: 220916 - DNA, 201 bp, Homo sapiens
aaatacagtgaggcttattggcttgccacagctccagaagatgcagtccataccaaatgacaccccctggagttgtcaggttgttcttcatagttgaaggkgtgtggaaaaatagttagttattccccaaactcgagctctaaagctaactatcatggctgggcgtggtacctcaggcctcacgcctagcacattgggagg

SEQ ID NO: 220917 - DNA, 201 bp, Homo sapiens
tagatatataacttatgttgattttatttgaagttcatatatcctcagttgaacttaaatggtctatatttgtattactacaaatactcaaatatgtgttyactgtgaatttggacattaaaataactaaatctttactatacatcctatcagttttaatgttgttgccttttgtataaaaacacacagtaaacaagaaat

SEQ ID NO: 220918 - DNA, 201 bp, Homo sapiens
gccctcagtgtcttcgttttgcatttttgtgaattataaactgttgtaccactgatatacaggactgtatccataattatctttatgtacagaaccgtgaycataattgtctttaaactaattttttttacattttttcctcacaattttgaattttatttaaaatacagtccttaagttcttctatctgaagtgatcctg

SEQ ID NO: 220919 - DNA, 201 bp, Homo sapiens
agatcactgtgggtctgagaaaggaagactccagaagaaggcttgaattaggctaaaattcaacacagcatttagacaaaggagagaggaggggctgaggrtatttcatgagccgaaagtcataatttgtgtacaaaggaatgggaagagaaatatgttcatggtatattctgaggattatgagtatactgctatggtgtg

SEQ ID NO: 220920 - DNA, 201 bp, Homo sapiens
ataagtattgtctgtaatataataaaaatgttattatattaaagatataactacatacaatgtattatatctgtaaaacataacagattgtttacagctamttgtcagtttgtttcttttgctttcttgcagtagcccttcatccttcccattttatttttaccaaaaaattaggggtcttgatgactaagttggaagtga

SEQ ID NO: 220921 - DNA, 201 bp, Homo sapiens
tagacatgccgtggtgcttactgtgaaatcttctgtttggagaaaatacatacatccatgaaccggggaataacaatataaagtgtcacaagctaagtggmtggcagatctgttgtatggaaataatttacaggtgagaaagatcactgtgggtctgagaaaggaagactccagaagaaggcttgaattaggctaaaattc

SEQ ID NO: 220922 - DNA, 201 bp, Homo sapiens
ggatgcataaacacaagtcaaatatccctctggggcagctcccccaggtatctgaaggctagcctcatttcagagagatctctactgtgatccgagggctrtatacttccataaacacttgaaggtctcttacaacccattcctggtatagttcatcatacctaatgtggtattggagcaaagacaagatggtattaaact

SEQ ID NO: 220923 - DNA, 201 bp, Homo sapiens; identical to SEQ ID NO: 40092

SEQ ID NO: 220924 - DNA, 201 bp, Homo sapiens
gatggtattaaacttttgcatgagaagtccagccctggggagtgtatgtagtgcccctgtgaagttttgcttacaattattgaggtcttccaaatgggacsttcatcattaagaaacccaggttggcagtgccttcagtgtagcctcttggctggctggtagactttggttcctccaactcagtttgatgaatacattgtg

SEQ ID NO: 220925 - DNA, 201 bp, Homo sapiens
cagtaagtaacagagtattacaggaatgcacaggagagaaacctaacctagagtaaagggaatcatgacaagcttcccagattgtgacatgagctgaattytgtagaagaaaatgaaattctaaagtcgttaaggccaagtattcaacataagtgaagcctgggatattcagagaactacagttgtgtggggctacagcag

SEQ ID NO: 220926 - DNA, 201 bp, Homo sapiens
ttatccagtgacataaatctgactaaatgagttgtagactctctagaattcagaaattctaatgtggtaaacttagcttaagggtatttatgatatagtgrctggctatgaaactatattattcatcatcagtatcattatacctttattaaatgccacttctgtactagatcctagccattggacaatcaatatgtaata

SEQ ID NO: 220927 - DNA, 201 bp, Homo sapiens
tagttttttataatgttgcacttgacagccctatttttgttacgataggaagagtttaagtttgtacttcttttagtttgtactttttttttcaagtagtrgttgtcatttagtataataactctctactgctctggggttatgttgttgttgtttttaacggaggttggacatagaaactacccagaaagctttggaaaa

SEQ ID NO: 220928 - DNA, 201 bp, Homo sapiens
gtacaaaaactggccagtgcttgtcctagggttgtctgttttaataactgctttgtagatgcttcagtactgatgtgtttctactatggcccattattctyatcaggcaagctaatgaagaatatcaaatactggcgaactcctggcgctattcatctgctttttgtaacaagctcttcttcagtatggtggactatgatg

SEQ ID NO: 220929 - DNA, 201 bp, Homo sapiens
gtttcccattttttcatggtataattactgatttttggtcctcctttgtaattaataagctgtctatgtggatatagtaagtagtaaaagctatactatastacagtcttcgtgttttaaaggataccgtcaaaaaagtagcacacagaatgggggaaaatatttgcaaataatttttctataagatacttacagctagtt

SEQ ID NO: 220930 - DNA, 201 bp, Homo sapiens
tcccgagtagctgggactacgggtgcccgccaccatgcctggctaattttttgtatttttagtagacgcagagtttcactgtgttagccaggatggtctcratctcctgacctcatggtccacccacctcggcctcccaaagtgctgggattacaggcgtgagccaccacgcccagctgagattcttaagccctatttagt

SEQ ID NO: 220931 - DNA, 201 bp, Homo sapiens
tactgatttttggtcctcctttgtaattaataagctgtctatgtggatatagtaagtagtaaaagctatactatactacagtcttcgtgttttaaaggatrccgtcaaaaaagtagcacacagaatgggggaaaatatttgcaaataatttttctataagatacttacagctagtttgtctatatatatatatacatgagt

SEQ ID NO: 220932 - DNA, 201 bp, Homo sapiens
ggatctgaatgggcatttcttcatggaaaatataaaaatagctgataagcacatgaaaagatgctcagcattgttagtcatcagggaagtgcaaagtcgtyttacatagccattatgtcttaaggcatatatcttatggcagaatgaaagtagtgctagtgtcacgtatgaaaagttgggtggcatgtttctgagttcttt

SEQ ID NO: 220933 - DNA, 201 bp, Homo sapiens
tgcattcactattttttcaagtttatctgctgctatggcgataacatgtaaccccactagaggaaatcggaatagtttatagccaatgtccctcccatccrtggtaaatttaattttcttcagaagggattaagacattattaagaacccgggtggtcattgtattagaatgttaggaactctttgccacagaattaaaag

SEQ ID NO: 220934 - DNA, 201 bp, Homo sapiens
ttatttcacaaaacactccacatctttttccagtgttaaagcaaccttgttttataatgtattttacacacacacacacacacacacacacacacacacamtcttactgaaacacatctaattgaatgttgactaagttttctaatgttgcttgctggaaattggttgaaagattgtattctttggtttgaaataagttgc

SEQ ID NO: 220935 - DNA, 201 bp, Homo sapiens
gtttgttaaagtatacgaaaagttattcaacattcttatgaaatgttttaacatattgtattctttttttttgggagggtttcagacttttttttttcttkggttgttagaacttttattttaggttaggggatacctgtgcaggttagttacattggtacattgcataatactaaggattggggtatgaatgatcttgtc

SEQ ID NO: 220936 - DNA, 201 bp, Homo sapiens
gtaatttaacttaacaattccgcttctaggaatttaacctaaggatgcaatcaaggatgatttaaatttttatccatagaaattttgaaaataatattcaytttattgggaaaaattgaatataaatcaaatgtctaaaaataagaaaaagtaaatatactatggcatagccaaaaaatgatttacaagaatattttacct

SEQ ID NO: 220937 - DNA, 201 bp, Homo sapiens
gttaaagtatacgaaaagttattcaacattcttatgaaatgttttaacatattgtattctttttttttgggagggtttcagacttttttttttctttggtkgttagaacttttattttaggttaggggatacctgtgcaggttagttacattggtacattgcataatactaaggattggggtatgaatgatcttgtcaccg

SEQ ID NO: 220938 - DNA, 201 bp, Homo sapiens
gtcttgaactcctgaccttgtgatccgcctgcctcagcttcccaaaatgctgggattacaggcgtgagccactgcgcctggcctcttgctttgttattaaraatttttgtcaatttcattttatatggctagttaacctgtcacaaaaatatctcatatgttatagttggacatttacattttaatttttcactatataaa

SEQ ID NO: 220939 - DNA, 201 bp, Homo sapiens
ttttattatctacatttgaatagaatctattattatagagattaaataccctgtcctgtgtgtgttccttagattgaaaacaggacaagattacagtgaargcatcagcttagggtatgaaattctgaatccaaatacatttcaactccaaataatctctgggtccagaaagccagttgcactgactcagaaaaaagttta

SEQ ID NO: 220940 - DNA, 201 bp, Homo sapiens
aggcaaaaatagtttcgtgggctgggctcagggtcctcgtgctgtgtgcagcctagggacttggtgccttgcatccttgctgctccagctgagactagaasgggccaaggtacagctcgggatgtggattccgagggcacaagctccaagccttggcagcttccatgtggttcctgtgagtacacagcagtcaagaattga

SEQ ID NO: 220941 - DNA, 201 bp, Homo sapiens
agattaagtaatatccaagaaagatgaagttttttttttttttcttttgccctgctctaggattgagaatcatgtttttgtatgattggtacttagtttgrcctgtgttctataatggaaactgtaaattaagaaaaatagaaatcctctgtattttatctaggatgccaaaaacacttgaaaattaatccattttcatct

SEQ ID NO: 220942 - DNA, 201 bp, Homo sapiens
ctttttcagagattttgaagactctggttaggtagtagaaccagtgatatgttgatagaaaataaaagctcctcaaagcctacatttcttccacctgtgarcagtggacatttttagaacgtttccacacagatcatagcagcaatatatagctttatcagggaaaaaactaatcccataaaagggagatctgactttggg

SEQ ID NO: 220943 - DNA, 201 bp, Homo sapiens
ggccgcattattattaccaaactatagtttcagtaaagcacactacagaagaggtgcccgattacagttgttcagcttatgaattaggcatatattcattyttgagctttttcctccttcaagttttcttaaataacttacattttttctttctctaaggagtccttcttttaggttagctcatttctaatgagtaaaagc

SEQ ID NO: 220944 - DNA, 201 bp, Homo sapiens
gtgtctgttctcatctttatgttcatatgtacacaatgtttagctcccacttacaagtgagaacatgaggtatttggttttctgtttctgtgttaattcasttaggataatggcctccagctgaattcctattgatgtaaaggagatgattttgttctttttggctgcatagtattccatggtgcatacataccacatttt

SEQ ID NO: 220945 - DNA, 201 bp, Homo sapiens
tccgtttatggcaatctaggctttttctagtatgctcttccagattctttcagtctctacccattatctggttccaaaaccatttcacctttccaggtatytgttgtagcagcacccagtgcctctgagaccagtgtttgtcttagtccattttgggctgctgtaacggaatacctgagactggataagtataatgaacag

SEQ ID NO: 220946 - DNA, 201 bp, Homo sapiens
tgactgatgatgatgatgatgatgatgatgacggtagattacatttattggcttcctgctgtgtttcaggcattaggccattttacatgtattatcaattsacttctcacattttattattttgatcaaagagcttaacaatttgaagtttagagtaatttgctaaaggtcttactcatgaaacccaggacagagaattga

SEQ ID NO: 220947 - DNA, 201 bp, Homo sapiens
aaaatggtagaacaggcattgaatagacattcccttccaaaagggagaaataggcaagaaaagaaaaaggggtaactggctccaagtaagtccaaaaactsactgggaaaacagtattacatctgaaagctggagattattttttttcattccacgtcccatcatctgggcacactggggcaaaggttgaaccctcaaggc

SEQ ID NO: 220948 - DNA, 201 bp, Homo sapiens
gcacacttctgcaagatcgttcaggcaggcaggcttaggaggggccacggggttacatggatcagatgcaccccagtcctgtggcaatggtggccctgctstcttgcagcctagcagacagcagtagctacagccactcagtacagcatggcacacctcggggcgtgaacacctttggtcacattttgctggagctgcact

SEQ ID NO: 220949 - DNA, 201 bp, Homo sapiens
tactattacataacattagcagtaatactggtgtgtagccttccttcttccccaaaccaccttatttttgcataagttggttaaatctaaattctgtagamataattaaaagttgtggtaaaggaatgaagagaaaggaaagaaacgatgaaaagattacctaggaatccctttggaagggctaactgcttaaccattgtc

SEQ ID NO: 220950 - DNA, 201 bp, Homo sapiens
tttcctggacattagtatcctaaaaaagaaactgaaaagaaaataattcttagtattttagcacacaaaggagactcaggactagtatcatgactacattyccactagctgataggttttgaagtgctatcttattcacttagaattactgagaggtatgaactgaattctttccctctaaaagtcagatgttgaagcctt

SEQ ID NO: 220951 - DNA, 201 bp, Homo sapiens
agtgccaagaaggccgcagctgggtcttcttcactggcgccagccactccgttccccaggacaggatccccaggggtgccagcagggacaccgaagggatsttgctcagccatgtcgtgcaatttaacgacacagacaccaacccaccaacaccatgcctggcaatcgtggctgtggtagtgtctgggagatgttgttcct

SEQ ID NO: 220952 - DNA, 201 bp, Homo sapiens
aaatagaacttttaaaatggatttcttttgaccaagtgattatcctttcaacaagtgctatagaaggaagaattatataagcatcagcaaaagcctctatrtaatgtcttgctagcccattttttataaacgggacttgagtcagcagaaagggcattccaatattgcaacattagaatctttttataatctttttattat

SEQ ID NO: 220953 - DNA, 201 bp, Homo sapiens
atagagatgttgaattacccacaatgtcatcaatctgttaataaaacaaagccaaatgtattagaatttaactgcagtaagaaaaactttgcagtgtttcrgaaggaagaagtagaagaaggatatttatagggctttgggatctgtgctgaaatggtttaaggtgggctttttaagacaggcagcttatgtggattaggc

SEQ ID NO: 220954 - DNA, 201 bp, Homo sapiens
ttatggggagccagcatgtgtagcaatcaaatggcgagtgagaggagtgacgtaccagattctcttaaatcatggaaactaatagcgggagaactcattcrttactgggagggtggcaccaagtcccccatgatccaaactcctcctctcaagccccacctccaacaaatggggatcacatttcaacatgagatttggagg

SEQ ID NO: 220955 - DNA, 201 bp, Homo sapiens
cctatccctctttttcctttctgcagcagatatatgatgcttgggatgtaaaaagaatgagcattgtttgctcctatattgaccctgacgagttttggaakaggaaggatcgttacttcttacgtttgattttttagataaactggcaatcaaaagggttaagtgatttgcccaaaagcacataacaagttaatcacaaaa

SEQ ID NO: 220956 - DNA, 201 bp, Homo sapiens
tatccctctttttcctttctgcagcagatatatgatgcttgggatgtaaaaagaatgagcattgtttgctcctatattgaccctgacgagttttggaatargaaggatcgttacttcttacgtttgattttttagataaactggcaatcaaaagggttaagtgatttgcccaaaagcacataacaagttaatcacaaaaca

SEQ ID NO: 220957 - DNA, 201 bp, Homo sapiens
ctttgtattttcatgacccatttcttcaaagataatgtaaaatgccctgggtgcatgattttttttttctcggaccttcttaacggcaggaattagagccrtagttaccaaaacaattattctaaagaaagagtacagagacattgatttgatgatgaaaggaagcactgctggaatgttttcttggcttcttatgatgag

SEQ ID NO: 220958 - DNA, 201 bp, Homo sapiens
tatgtgtacagttttgattttagagtgttaggacattcaaatgggatatcaagtcaaaatgtagtcaaccagtagttacatcataagatgtgaaaatatasacctggctgggatgggatctttcatgtaaaagagctgttgaatttaacgatacacatcttctaaaggagagaaatataaaaagagaacagaacttcatgg

SEQ ID NO: 220959 - DNA, 201 bp, Homo sapiens
ggcttgactgtgtccccacacaaatgtcactttgaattgttcccataatccctatgtgttttgggagggacccatgttgttctgatgatagtgagtgagtyctcacatgacctgatggctttataaggggcttttccgcctttgcttggcactccttcttcctgccgccttgtgaagaaggtgccttgcttcccttttgcc

SEQ ID NO: 220960 - DNA, 201 bp, Homo sapiens
aggagtaaaacggtgtgctgcagtgttaccacggctgcccttcagtattaggcggtaagaatttttcagccccattataatcttatgggaccgtctttgtrtatggagtctgttgttaagtgattaacatcactgcgacacatgactgtatttctgtgggttttggcaaatgcagtcatggctctaccactagtcacaagt

SEQ ID NO: 220961 - DNA, 201 bp, Homo sapiens
gaattgtaattagatgctctgaattaaaatccctgaatattttactgtagggtttaaatgtattgtatatttagttgttttaaaatatattgaaggatgtrtttgaaaccagttctcttttatggtcctctgtaactaatatcattttccctacaatagacagaattctggacttacgacttgaaaacaacgctatgacat

SEQ ID NO: 220962 - DNA, 201 bp, Homo sapiens
gattaaacaagttacttaaccttttctgtaaaatggaagaatctgtacacctcaaggtttcttttttttcctgttctgataattaaattaaataatctttwtacagtccaccctaatccaagaccatcattcagtgcttgaaatctcagatagtaccaaactctatatatattgtgttttttcctaaacatgcataccagg

SEQ ID NO: 220963 - DNA, 201 bp, Homo sapiens
atggcttactgattaagttttattttagtgaaagtgcgccttgaaggatattacctcttcattgaagctacagacgtcttacacaattaagaacaacttayagtaacatctacctctttactcagcatgagatgtgttattggtggtacaaagcattttgaagacagtctgtataaattgcattatataacttaaaatgct

SEQ ID NO: 220964 - DNA, 201 bp, Homo sapiens
gtttaatttacatgcttgtaagcatttccaattaaaattacatttttaaaagtaaaatctaagcatagtgttactgtcattgttcaaaagaaagctgacartaaacataaggcattagtggcatcgattaaaagatcttaagaaaactagcagaatttttgtcagttgtaatagatatattagtttgctagggctgccata

SEQ ID NO: 220965 - DNA, 201 bp, Homo sapiens
gatgggttgggatagatactagggtgaaatgaggatggatgtctacatagggacaacttttgtaagtggttggaatgtaacaaatggtttttgcctctctrcaaaattttgtggttattgtgtgcacattttgaatacttagctaaggactatctcctgtggcatatgccgaactaaaaagcactaaaaaattactaagat

SEQ ID NO: 220966 - DNA, 201 bp, Homo sapiens
tgatgtgaaaatgtggatgatgaggaggaggatgatgatgatgatgataaattacctttaatgtgttaggagctgtatgtgttatctcctttagtccttawagtatccttatatgaaattgccactattatctcccaattaggtaaggaaagtatggcttagagaggttaagtagcttgatttaaatagggttccactgca

SEQ ID NO: 220967 - DNA, 201 bp, Homo sapiens
ccatttagtgcggaccaaaggtttaacatgttgctttggtggctttagtgctgcttatttctctaatttttaaattcagcatttaaaattttgtcatactrcttcagtcacttcatcgcttaagaggcaattcattttctttaaaaataaataggtttatttgtatccattataaataattttggatcctatatatattga

SEQ ID NO: 220968 - DNA, 201 bp, Homo sapiens
ctgtatgggtgaaacaaactgcattgaactcttgattgtgcaaatatgatcacgagcattttctaagcactcttccattgtacaatgacactttaataaartacttgtagagaagcatgtatttcagctatcaactttattcttttactattttgtccttttaaatttgggaagttaagttgtagggcgcaagaagttcat

SEQ ID NO: 220969 - DNA, 201 bp, Homo sapiens
tgtgaaaatatacacctggctgggatgggatctttcatgtaaaagagctgttgaatttaacgatacacatcttctaaaggagagaaatataaaaagagaayagaacttcatggacaaataatgtcatgtatttttcttataattaacatacaatttaccattttggtgacctctttaattttcataaacttagatatataa

SEQ ID NO: 220970 - DNA, 201 bp, Homo sapiens
aaagtgttatcttttcaagagcagcattctattttgcagtgctttcctcaggaaatgaaagaaagatttctcataatctaacaagaacatccaattccatkttaaaatattggttttaagtaagccaattaagaaagaacccttcaaacttttcacatgactttgctattatcattcagacagatgtcagagtcataatat

SEQ ID NO: 220971 - DNA, 201 bp, Homo sapiens
cttcatggacaaataatgtcatgtatttttcttataattaacatacaatttaccattttggtgacctctttaattttcataaacttagatatataacttaygttgattttatttgaagttcatatatcctcagttgaacttaaatggtctatatttgtattactacaaatactcaaatatgtgtttactgtgaatttggac

SEQ ID NO: 220972 - DNA, 201 bp, Homo sapiens
gaatttggacattaaaataactaaatctttactatacatcctatcagttttaatgttgttgccttttgtataaaaacacacagtaaacaagaaatcttgtygttcttccttcaaatatgtacatatatatgtatatattttttcctttaaaatatattcaggatcagatcacttcttaccacctgctccaggataagatca

SEQ ID NO: 220973 - DNA, 201 bp, Homo sapiens
gggtgttaactcctattgtctcagtacttctgatgtattataatattgcatactgtttccctaaattttcagtaaataataaattactattattgcatatrtatggtatattttggtatatatttgtgtgtttgctgtttattttcatttgagagtctaatagtgttaattctttgtatttatgttgtcaataagtcaatt

SEQ ID NO: 220974 - DNA, 201 bp, Homo sapiens
ttgcaactttcctgacagttccaaatatggggggtgataggagggggagagaatattatcttcttcccagtagatggtagagaatgaagaagctgactaarccagtccttttcttaggtaattttaggcacttccataccattttttggtgatgttttgttcctggaagttattccagacttttttgtttgaatcctttat

SEQ ID NO: 220975 - DNA, 201 bp, Homo sapiens
atatctcttctttcaggcaaatccagaaagacttggcctgagaattttatcatctatatcacatctgccatttggtgtagagcctagtaagaactaatgcygcctcaaagaaggccccaaggataggactacaaacatgtaactagtaggaaacagaggaatcttttattaaaatgttagagtgggatttaagcttatttt

SEQ ID NO: 220976 - DNA, 201 bp, Homo sapiens
atattatacatggttggatctctcaaattttagctgtgagtctgacaaaaacagttaccctttgtacctaattaaaccagattgtaatctagagacagggstgttaactcctattgtctcagtacttctgatgtattataatattgcatactgtttccctaaattttcagtaaataataaattactattattgcatatgta

SEQ ID NO: 220977 - DNA, 201 bp, Homo sapiens
ttagtggtcaacttacattcttattacatgttttgttgtcattctgctctcatttattccctaaaacagtgttcctcagactctctcttttgcttaggccytttcctgtaactggaagattgttttctatttttaatcgttaggttagggtgggtctggacaatagatattatttagtaaagcattcagctgcctcttcac

SEQ ID NO: 220978 - DNA, 201 bp, Homo sapiens
aggcaattaactgtaaataagctcatgagagaaggtccctaatctgattggattggtggccttataagtagaggaaagtatagagacgcctacctatctckgtctgctcacaaagaagaggtcatgtgagcacacagtgagaagctggctgtcttctgcccaaggggatccctcaccagacaccaatcccattggcacctt

SEQ ID NO: 220979 - DNA, 201 bp, Homo sapiens
ctagatgtcagaagtctgggcatggtgtagctggattctgtctctgttaagggtcttaggaggccaaaattaaggtgagaccgggttgcgttcttttctgratctctgggtcctcttctcaactcattcaagttgtaggcagaattcagcttttggtagttgtaggaaggagtttcttgttttcttcctgcttgtgttgct

SEQ ID NO: 220980 - DNA, 201 bp, Homo sapiens
gtttcttgttttcttcctgcttgtgttgctctcagttctttgctgccaaccccaggttccagccatggagcaccatctataggcagttcacagcatggctrtttgctttattccagatcactaggatcacttttgtgacacttcttttaaaatgttttcctgattaggtgaggctaatccaggataatctctcatttaaat

SEQ ID NO: 220981 - DNA, 201 bp, Homo sapiens
agatgttggaaaaagttcagaaaataggtcattcaacaacagaaatccattgcttcagaggtaactcaaatggctaatctcttgctccaatccttccactrttattactgagtaatgtctttatactgttctcttcagctgattagagccttctatgtccctttggctcccacctatatatactaccggttctcactctct

SEQ ID NO: 220982 - DNA, 201 bp, Homo sapiens
agtctttccatgtcagcctactgtaatttcaactttttatttctctagcactcatttggacatatagctaaattggccaccaaaattctattcttcatttygtaccatgtaacttaattgccaattttattaatttgtgatctgctgaatcctatagcacctctcaagaagaaaaatacttttatccctagttacaaagga

SEQ ID NO: 220983 - DNA, 201 bp, Homo sapiens
atattatcagataaaactgtgccgcctttcctgctagtgtaccttgaatctctgtgctgtgacgtaacagaggcatccattttacatacttgttttcttayattttagaagtttggattttagattccagttaagtactctttaaagatactcatattatacatggttggatctctcaaattttagctgtgagtctgacaa

SEQ ID NO: 220984 - DNA, 201 bp, Homo sapiens
cagaggtctttgggggtcttgggaaacctgtagctgggatcccagaggtatgtggtgggagtgtgctgccgaaattccttcactcaccgcttcctcaggtstggttcagtacaggaggccggtcctagtgcccagcgactctgagtggcttcctggcttcctccctctttaatcacagtgtccatctcttctctattgact

SEQ ID NO: 220985 - DNA, 201 bp, Homo sapiens
cctatgtgatagagtggaagaaagaaggtctttgtgcatctcttcatctcttcaatatttagtggtctttgtgcctctctcctgcatagtactgcttcagyccaatgatgatggcaggtgggtcatcttcagtctgtcagagtttgtaggtattacagaaatagcttctcttttggttctcatcccctccttcatgcttta

SEQ ID NO: 220986 - DNA, 201 bp, Homo sapiens
actaaattagttttgaaatatctgggattgctttcttcagttttttggtaaagagatacataaaactctggttattgtagagaagttctgatactccaggycatttttactgaaatgaactaaggtgttagtcagtaaagatgaatgtagtagtgactgtggaagttagaatataatgaaacatcctcattttctcaaata

SEQ ID NO: 220987 - DNA, 201 bp, Homo sapiens
ggaagagagtggtagatatgattagagtgacacggtgctgtgctgtggggcaggggcaagagcacaagttgacatgtgttctatataagccttgtaaactstgttagggaccttgaattttaatctaagtgatgtggaagccatttgaaggatatcaagccaaggagtgagataatctgacattttaaaaatcacttattt

SEQ ID NO: 220988 - DNA, 201 bp, Homo sapiens
ggtttcttgtatctgtttttctctaatggttcactaaattagttttgaaatatctgggattgctttcttcagttttttggtaaagagatacataaaactcyggttattgtagagaagttctgatactccaggccatttttactgaaatgaactaaggtgttagtcagtaaagatgaatgtagtagtgactgtggaagttag

SEQ ID NO: 220989 - DNA, 201 bp, Homo sapiens
taatccaggataatctctcatttaaataactcagagttaatagattagagaccttatgtttgcaaatatttgccatataaggtaacataattgtgggagcrctgttctgctatatcacaggtcttgtccatgcccaggggaggcagttacgttacagtggttcattggggattatttcatttatgcctactaaagtgggca

SEQ ID NO: 220990 - DNA, 201 bp, Homo sapiens
agcctattttcttggcctgatggggcttccttttgtagactctttttgtttactctggcatttactcttaaaagacttttcataggtacttcagatggaaragactctaatgttaccaaagccagaatcttctgtttgagtaagaaacccttttgtaaacattggtattaaataatagttgttgagccacttcttaaacaa

SEQ ID NO: 220991 - DNA, 201 bp, Homo sapiens
ttaactttaggtaaatttcttacggactctttcagctgtgggtcattttatgaaatataagccaatgttgatttataataatttatagttctctgataaaratatatcaataatgtatgctttctggatataaatgatcaaaaccattagaaaatagaggtaaaaatcaattttattttttatttttttattttttatttt

SEQ ID NO: 220992 - DNA, 201 bp, Homo sapiens
tcactggtgtatgtatttaagtatatttttatagtggccagtaacagtcttttctttccacatttagtactcccttcagaacctctattgaggtggttctrgtggtcatgaattccctttcagaaaaggatgtcttacttatttgcttatgaagctgaagttggctggatataaaactcttggtttgaagttctttttttt

SEQ ID NO: 220993 - DNA, 201 bp, Homo sapiens
atatcacacttattagatacattagagatatattttttatatatgttatatatacatgttgtatgttataatctgtatgatgtttacactgcattgcaggmgcttgtgtttacaaatcagtcttctaatgaacttattaaaaaaggtttatgaaaataatattgttaaagccctgcaaacgtggtgaaacccccatctcta

SEQ ID NO: 220994 - DNA, 201 bp, Homo sapiens
ttaaagaatgttttgtctgaaattggaataccaaactctgctttcttctgttttccatttgcttggtagattttcctccatctcttcacattgagcctatrgatgtcactgcgtgtgagatggatctgttgaagacagcttaccattggttcttgattctttatgcaacttgcttctttgtgccttttaattggggcattt

SEQ ID NO: 220995 - DNA, 201 bp, Homo sapiens
acatgtagctagatctctctcaagaaaagacctaaataaaaatttttatatgaaatttctctctttaaaatgttggcagttaattcatatttttttttaawatcttctgtgatattattatctttgtgttgagtactgaatgtaggctgctggtatataatcatataaataaatggttacatataatcattaaattctttt

SEQ ID NO: 220996 - DNA, 201 bp, Homo sapiens
tcttggcctcaagtgatccacccaccacggcttcccaaagtgctgggatttcaatcgtgagccaccacgcctggcacatgtggtttgttttattagttctsttatgttgtgcatcacatttattgatttgtgtatgttgaaccaacattgcataccagggataaagactacttgatcatggtggattaactttttgatgta

SEQ ID NO: 220997 - DNA, 201 bp, Homo sapiens
tcgggtatcttggtctatctcacatgtgatactctttggtataatgcttaccaggtcatggaaaagcatgcagttctgtaaagaatctagcctactaattstatatcaccattagtgaacatttttacttatttgcatccagattatttcttcttgccagtttctagttaaataaattctctctttttgccttcaacattc

SEQ ID NO: 220998 - DNA, 201 bp, Homo sapiens
taaatgaggccataaaggtggaaccctagtccaaagggactgatgtccatataagacgaggaatcgggagcaggagtgcatgtgcagagagaaaaggggcrtgttagaacacagcgagaagatggtcacaggccaggaagaggagcctcacccgaaaccaactctgccggcaccttcctcttggactttgagtcttcagaa

SEQ ID NO: 220999 - DNA, 201 bp, Homo sapiens
taaaatttattgcaagttttacttaactgttattttttccaatgtggcagatagtattttacatatagaggattaaatatttattgacaagtattttctckctgtttatggactgaattgtatttccccaaattcataagttgaagccatagcttctggcgtgactgtatttgaagatagggccttgaaggaagtaattaa

SEQ ID NO: 221000 - DNA, 201 bp, Homo sapiens
taacattaaagcaaatggatagaaacataaagcatttgttgcaggtaagtttttaactcatttatttaaatattatagcttctttttgtttttttttttttcctaacttgtttcaatccatgatgtagcatcttagcagtatactttatctggataaagtgatgactatcgaaacacatcaggaataccgagctgaaggat

SEQ ID NO: 221001 - DNA, 201 bp, Homo sapiens
aacatgttaacattaaagcaaatggatagaaacataaagcatttgttgcaggtaagtttttaactcatttatttaaatattatagcttctttttgtttttktttttttcctaacttgtttcaatccatgatgtagcatcttagcagtatactttatctggataaagtgatgactatcgaaacacatcaggaataccgagct

SEQ ID NO: 221002 - DNA, 201 bp, Homo sapiens
taagctctttgagaaatcgccagactgccttccacattggcagaactaatttacactcctactggcagtgtataaactttcttctcttccacaatctcgcyaaaatctattattttatgtctttttaataggcattctgattggtgtgaggtagcatcttgtggttttgatttgcatttctgtaatgattaacgctgttga

SEQ ID NO: 221003 - DNA, 201 bp, Homo sapiens
aggcgaccttgttgttcttgatacccatagtcttgctctcttgcagtgccaagaaggccgcagctgggtcttcttcactggcgccagccactccgttcccyaggacaggatccccaggggtgccagcagggacaccgaagggatcttgctcagccatgtcgtgcaatttaacgacacagacaccaacccaccaacaccatg

SEQ ID NO: 221004 - DNA, 201 bp, Homo sapiens
tttgacttttattcttcccattatcttcattatgtacgtagtggggaacatttttggactttagaatagaggctagaatctacaaattggttattgggacrttaaatctgaaaaagtagagtaatatggaatacagagtttgaaggcaaattgaattcatgctctttgactccccattactttatcactttttatttttta

SEQ ID NO: 221005 - DNA, 201 bp, Homo sapiens
gccttatattttagcctcctttgctagttcttcctggtagcggtgaaaagtggttgaatttggaatggattttgaaagtagagccaacagtattttctgartgattggatgtgtggagagggagggagggagggagggaggagagaaggagggaataaaggcaaggaaaagagtgaaagaaaagtaaggacagagacacaa

SEQ ID NO: 221006 - DNA, 201 bp, Homo sapiens
caggatgtcgaaggcgaccttgttgttcttgatacccatagtcttgctctcttgcagtgccaagaaggccgcagctgggtcttcttcactggcgccagccrctccgttccccaggacaggatccccaggggtgccagcagggacaccgaagggatcttgctcagccatgtcgtgcaatttaacgacacagacaccaaccca

SEQ ID NO: 221007 - DNA, 201 bp, Homo sapiens
cgtgaaacacagactatttgagtgtggtatttttataaagacatagattatgtaagttgtggccaagttatggaggtttttgacttttattcttcccattrtcttcattatgtacgtagtggggaacatttttggactttagaatagaggctagaatctacaaattggttattgggacattaaatctgaaaaagtagagta

SEQ ID NO: 221008 - DNA, 201 bp, Homo sapiens
cgtcaacagcatctggactcccagctgttcaccttgtggctggggcctgggggtgacaccatccaggatgtcgaaggcgaccttgttgttcttgatacccrtagtcttgctctcttgcagtgccaagaaggccgcagctgggtcttcttcactggcgccagccactccgttccccaggacaggatccccaggggtgccagc

SEQ ID NO: 221009 - DNA, 201 bp, Homo sapiens
actccgtcaacagcatctggactcccagctgttcaccttgtggctggggcctgggggtgacaccatccaggatgtcgaaggcgaccttgttgttcttgatmcccatagtcttgctctcttgcagtgccaagaaggccgcagctgggtcttcttcactggcgccagccactccgttccccaggacaggatccccaggggtgc

SEQ ID NO: 221010 - DNA, 201 bp, Homo sapiens
agacattatccagtgacataaatctgactaaatgagttgtagactctctagaattcagaaattctaatgtggtaaacttagcttaagggtatttatgatayagtgactggctatgaaactatattattcatcatcagtatcattatacctttattaaatgccacttctgtactagatcctagccattggacaatcaatatg

SEQ ID NO: 221011 - DNA, 201 bp, Homo sapiens
tgttctacatagacctataccataaaacatgcttcagcatgttggaaaatactcctcaaatggaaatactcctcaaaatgacctacaaattcaatttcctmttataatcccgtgggctttttgcaaaaataagaaagctgattcatatggaaatgcatgggatcctgaatagccaaaggattattgaaaaagaaccaagtt

SEQ ID NO: 221012 - DNA, 201 bp, Homo sapiens
aggtatacttctttattattgcagtacatatgaaaatgttgagtataaatttcactgatgattaagatctggattcaacatttgttatgaaattgtcattrctaataggatatcacatgatgatttagtcattgtaacctttgagtcatgaacactattcctttgacaaacagcatatgtttgtgatagtacacagatgta

SEQ ID NO: 221013 - DNA, 201 bp, Homo sapiens
tgacattcttcttggcataccacatttaagcattaatatgttactgttagttgtttttttttttttaaggagaaccaaaatttctttgactttcaaaaacygagtgctaactctgcgtattgtatacacttcaacatattttatgttcatatacagttttgctttaaaatatgtatttggatcacatatgttagaattgtt

SEQ ID NO: 221014 - DNA, 201 bp, Homo sapiens
cagttaaacctctttctttgtaaattacgctgtcttgggtatgtctttattagcagcatgagaatggactaatacagtaagaaaacttgttaaacgaacartgcgttaaatgatttccttactacattgtgtgacattcttcttggcataccacatttaagcattaatatgttactgttagttgtttttttttttttaagg

SEQ ID NO: 221015 - DNA, 201 bp, Homo sapiens
atttttgttgttgtgtctttgccaggttttgatatcggtgctgctggctacatagaacgtgttagggaggattccttcatccttgatttttttttttttttggaatagtttcagtaaaattgatgtcagctcttctttattatccatcttgaattcatctgaggattccgtcctccttttttttttggaatagtttcagta

SEQ ID NO: 221016 - DNA, 201 bp, Homo sapiens
tttgtcagtgcaccaggggtcgcctgcttgagggagttgaggactgagtgcatacaggagacctctttgccctgcttgctgacttggggttacagtcaaamaaccgggccacctgttaccacccagtgcagggggatgactcgtcaatgtcatttacaaaatcttctgccctgtagtttgcctttcttttctgtagctgct

SEQ ID NO: 221017 - DNA, 201 bp, Homo sapiens
atttataactctacaatttcagaataagatgtacatttcagtaactcagaaaaattgttttcaatgcatgtttatcaagcatcattaggttttgactccayataatgctagtctctgactttagtaagtttttcgtaaccttacataaaataaacattcaaaaactaacacttcagtattcttttttttttttttttttta

SEQ ID NO: 221018 - DNA, 201 bp, Homo sapiens
ttgttaaaaaacaaacaaatcatcttacactggtaagatattttatctgaatgtgtagcagttcatttgttattaaaaaaactgtttaaataaaaaaaaaacccttcttacttgtgagaagttttccctgaatatatagcctttctgaaagctttcacaatattacacattgctccttcccatacagcctcccacaaaatg

SEQ ID NO: 221019 - DNA, 201 bp, Homo sapiens
gtggtcttaaaaaaaccaaagatattattttcatcgtatcaataaagttgagtacaattatattaaagatactcataattatatacattcaggattgaaaraagcgtttctcatttataactctacaatttcagaataagatgtacatttcagtaactcagaaaaattgttttcaatgcatgtttatcaagcatcattagg

SEQ ID NO: 221020 - DNA, 201 bp, Homo sapiens
gctcatcatctagtggggatacataatatgatatcggttagcctcaagtctcagtcttcagagcctcgcttcttattgagttacatgatatttgaggctgsaattgttttagaattttgcctcagcaccatggtcattttatggctgtgacactgcgtctgatgtctttcaaactctgccttaatctttatattccttttt

SEQ ID NO: 221021 - DNA, 201 bp, Homo sapiens
cccatgttgttctgatgatagtgagtgagttctcacatgacctgatggctttataaggggcttttccgcctttgcttggcactccttcttcctgccgcctkgtgaagaaggtgccttgcttcccttttgccttccgccatgatcatgtttactgaggcctccccagctgtgctgaactgtgagtcagttaaacctctttct

SEQ ID NO: 221022 - DNA, 201 bp, Homo sapiens
caaaaaaaacaaaaaacaaaaaaatggtaagacaagagtaattgacatacattaaggatatacagaaatcttgatgttagtatttggaattgagattcttycctcttatttatttatgcctttatttttccatctgattaacatatttgttaggtactctgtttccagtagtagtacagatacatcatgcagctcatcatc

SEQ ID NO: 221023 - DNA, 201 bp, Homo sapiens
tgctttgcaagtttatttgtttgtcactattaagatactatgtaatggcacaagtcaagtactaatggtccacttaacagcatgaaaatcaacacaaaagsagtcattattgtgtagctaaagggaaactatacaaacatatggttacataggacataaaaacaatttttgttgttaaaaaagcaataatctttaacaata

SEQ ID NO: 221024 - DNA, 201 bp, Homo sapiens
aaccagggaggtggaggttgcagtgagccaagattgtgccactgcactccggcctggcgacagagagagagactccgtctcaaaaaaaaaaaaaaaaaagwaaagttgcattgagaagaaggaaggaatttcacagaaatcctatatcaagagtaagcctagtttatcaaaggaaattaaaatttgggtctggtgcagaga

SEQ ID NO: 221025 - DNA, 201 bp, Homo sapiens
taattttcatggtctcagaccttagtcctcaaataatttctcttagatgcataagagtcgtttttttttttttttggacccatgaggatgacttagtacartcagtcaatatgagtaaaaccacttcagatatagtcctttcttgtgataggttgttgtctttgtcaccataatacagtgaacaaaataatattcttttta

SEQ ID NO: 221026 - DNA, 201 bp, Homo sapiens
atctgcagcttggtatccctgggtggtgtggtcaagtcctggggagttgggaccagatccaggggtttgttctctagcccctggatgtaaagcagcagctstgctgcaggagagcagactgctcctagacctccagcaaaacactcagatggggcaatggaggctgtgctgtgggcacacttctgcaagatcgttcaggca

SEQ ID NO: 221027 - DNA, 201 bp, Homo sapiens
tcagttgaagaatttttattctttctgatttatttttgtagtagccttgtacagatgctgttgatcatttgctgcttcttaaaacttttttttttcccctktcctataccagaccagaaaccatagtttatatgtggggtggggatggctagacttttgagtggcctactgatttcttaattcaagtaccctttctgctca

SEQ ID NO: 221028 - DNA, 201 bp, Homo sapiens
atttcactgcattcaccgtagtgctctggggagggaaggcgggggccatatatgactgcctctctggtttctgagatttggtggtaacccattcaactacyggtgcctttccaatgtttaccttgccccaggggtgggtggggggcaggctctaatgggctgtgcttctgcctcccatagagcagtccaagagagtcacaa

SEQ ID NO: 221029 - DNA, 201 bp, Homo sapiens
accagctgacacttaagagataagggcctgaaaataggatcttagtcgtgctctccactttagtatttcactgcattcaccgtagtgctctggggagggarggcgggggccatatatgactgcctctctggtttctgagatttggtggtaacccattcaactactggtgcctttccaatgtttaccttgccccaggggtgg

SEQ ID NO: 221030 - DNA, 201 bp, Homo sapiens
atgaaataagtctctaaggacaaagtgtgatttattttaacctggctgcatttttaaattgaaaagaaatacataggtttcttgttattgtgactggaaayacaaaatgcattacatgatatgatgtttttctcacacatctgagaaagcattgaagggttctgagcaaagtaatgataggatagttttgacagtattcat

SEQ ID NO: 221031 - DNA, 201 bp, Homo sapiens
ttctcatataccttgattcacactgatagtttaccgattaaatataaagatgaattttgttcatctgtagccttcaaatagcaagcttaaagaaatataarattacctcaaaatttaagtctcattgggcagcctcaaccagtaacactcattattagttaaacccagtctgaaggcctgcaaagcaaagccatggtactg

SEQ ID NO: 221032 - DNA, 201 bp, Homo sapiens
tgccaaaaagtatttatagtagaagcagaagtgatatatcattgttaaatatagtgtatatatatatatacacacacacacacacacacacacacacacasagagaacatttctcatataccttgattcacactgatagtttaccgattaaatataaagatgaattttgttcatctgtagccttcaaatagcaagcttaaa

SEQ ID NO: 221033 - DNA, 201 bp, Homo sapiens
acagtgagtgtctcaaagtgttgcccaggctgagtgccaaaaagtatttatagtagaagcagaagtgatatatcattgttaaatatagtgtatatatatayatacacacacacacacacacacacacacacacacagagaacatttctcatataccttgattcacactgatagtttaccgattaaatataaagatgaattt

SEQ ID NO: 221034 - DNA, 201 bp, Homo sapiens
gattcaactagccaaaaggcaatcagggtattttaggtaatgggaggtttattggagagagatatggagaagcaaggaagacaattaaaaaaaaacctaaytgccacatagctaggtgtctcagatgttggaaaaagttcagaaaataggtcattcaacaacagaaatccattgcttcagaggtaactcaaatggctaatc

SEQ ID NO: 221035 - DNA, 201 bp, Homo sapiens
attctggatattagacctttgtcaggtacatagtttgtaaatgttttctcctattctgtagggtgtctttttagtctgttgatagtttcttttgctgtgcsaaagccttttagtttaattaggtcccacttgactattttttattttgtttagattgcttttgaggtcttatccataaatgctttgccaaggccagtgtcc

SEQ ID NO: 221036 - DNA, 201 bp, Homo sapiens
ggagttcagcttcctcttgtatctcattgagcttctttgccgtccaggttctgaatttatatctttaatttcagacatttcatcctggttaggatcgattrttagggagctagtgcaatcctttggatattacaaaacactgactttttcaattcttgtacttcctgcactgattccttctcagaaggaactggtgcttct

SEQ ID NO: 221037 - DNA, 201 bp, Homo sapiens
ttcttgtatttgcactttcatttctctagcgagattgggaaaatatttgtgggttatatcctcaaatatgttttccatgttttctgctttctcttaagaaygcacaatgaatcatagatttggttgttttacacaatctcttatttctcagaggctttgttcatttcttaaaattattttttctttatttttatctgactg

SEQ ID NO: 221038 - DNA, 201 bp, Homo sapiens
ttatgtgtgtttctgtggtggcagctgttgttcttttgtttccatgtctagaactttctttttttttttttgtagctgttgtaaggccagtcttgtggtawtgaattctcttagtgattgattctctgggaaaggcgttattttttcacttaccagcttagtttggcatgagatgcaattcttggttggaattttgtttct

SEQ ID NO: 221039 - DNA, 201 bp, Homo sapiens
agccaggtagcaatggtggtgatctggtaagtgtaggtttaattagcagcttgattccagatggtttgtcagattatgggtcctcactgtgggcgactackttaagtgacctcttggtgactagttcgcatgtgtgatttgttgttcaaaagatagatgtttcaaagagcggtgtctttatctcttagtctgtagtcttcc

SEQ ID NO: 221040 - DNA, 201 bp, Homo sapiens
gtcacaatgctggatgctagcagatgttagggcacatggaatgactgctgaatgccttacctattggcttatgttttggtggcttttgtggcaaaaggcasagtattattagactgtaatatagtccagagagccagaaataatgacatattttaatttaaaaattcacaatggaatggctacagttaactagcacaatgt

SEQ ID NO: 221041 - DNA, 201 bp, Homo sapiens
cactttggcctccgtaggccactgcaggagggcttagtgtgaagtacactcagccaagtggtcattatccttattaactaagaccatgtcagtaaaacaasagaactcagtgactgaacccagattaaatttgaatttcctaagccttttttttttccccccaaaggtaggctgccacccaggggatatattggttgagtt

SEQ ID NO: 221042 - DNA, 201 bp, Homo sapiens
gctatggccacaggagtggggctgagagaaacatgagagaaagggcaattgatattttgcatgaaagctggggtcttccattaacacttccataaattccrtcttaagattaagaagaatgacaaagtttgttcagaccccactggttgaagatggcagatccagcagttgatggtttcagagagctgcaccagtgtgttt

SEQ ID NO: 221043 - DNA, 201 bp, Homo sapiens
atttggttcttgccttgaacgttattggtgttttagaaatgctactaattttcatagattgattcctgaaactttactgaaatcgtttataaagccttttrgtagagtatttagggttttctagatacagaatcatatagtctgcaaagagagatactttgacttattcttttcctatttggatgtcttctgtttcttttt

SEQ ID NO: 221044 - DNA, 201 bp, Homo sapiens
ttttattgactatgccactagcaggccatcccttgttctctcctaagaaagactgagctatggccacaggagtggggctgagagaaacatgagagaaaggrcaattgatattttgcatgaaagctggggtcttccattaacacttccataaattccgtcttaagattaagaagaatgacaaagtttgttcagaccccactg

SEQ ID NO: 221045 - DNA, 201 bp, Homo sapiens
tggttttccatttatttgtgtcatctatgatttatttcagcagtgttttgtagttgtccttatagagatctttcacctctttggttacatgtgtgcctagstaatttgtgtgtgtatgtgtgtgtgtatgtttgtggcagttgtgaataagaatgtgttcttgatttggttcttgccttgaacgttattggtgttttagaa

SEQ ID NO: 221046 - DNA, 201 bp, Homo sapiens
acccagagaaactgatacaccaccttttacctactggatgattctcaccataaacaaaacatcccacaagggatgcataaacacaagtcaaatatccctcyggggcagctcccccaggtatctgaaggctagcctcatttcagagagatctctactgtgatccgagggctatatacttccataaacacttgaaggtctctt

SEQ ID NO: 221047 - DNA, 201 bp, Homo sapiens
gttttgtttaagccatccagtttgtgatactttgttatggccacccagagaaactgatacaccaccttttacctactggatgattctcaccataaacaaarcatcccacaagggatgcataaacacaagtcaaatatccctctggggcagctcccccaggtatctgaaggctagcctcatttcagagagatctctactgtg

SEQ ID NO: 221048 - DNA, 201 bp, Homo sapiens
aggtggggaaatggaataatttagctggaagccagggaatgtcaggtattgacagccatcatcagaagctaggaagaggcaaggaaagattctccccttcrgttttaagagggagcatggccctactcataccttgattttagacttctagcctccagaactatgaggttttttttgttttgtttaagccatccagtttgt

SEQ ID NO: 221049 - DNA, 201 bp, Homo sapiens
ggtagttctctcatccatagcaactcagtgagttgaagctgatgtgaatgcctcagtgagttgaggctgaagtggtattattgatcacttcggtgaaagtwagtgataaatttcttacctcctgttatatgtggaattgtttctttccaaaaaggtattctgcattcttaacccccaggtagcccagactgtggcctcatt

SEQ ID NO: 221050 - DNA, 201 bp, Homo sapiens
cctgaagtggtttttcaggttagctttgggatatgccctcggtggagaagaggggccctttcagatggctggggcagaggtcggagggtgcttacattttkgtttttcgtttacaaggggaaaaaaaaaatctaaaaagtgtacatgtttacagcatctgagtatctccaataataagatgactttaatatgtgaaaacat

SEQ ID NO: 221051 - DNA, 201 bp, Homo sapiens
caataagcatgcgtatctctgaaatacaggccattccgtatctggtactcactaagttcacaaactgtgatctcttccaatattggaagggaaacacgctmtattggaaagtgtggtcaccaatgtggtattttcctagtgatagcccagggttattttgacagtatgtggtctctttctgtctagctgactttaaaacct

SEQ ID NO: 221052 - DNA, 201 bp, Homo sapiens
atatgatactcaatttattaaatcaccgttttcaactcctctcttggtagatgtttgtttctctaactccagctcccagccacccccaaattaattattcmtgttgtgtatgtgcttgtgtgtgtatgaaagtgagctggaaaacatattttaaaactttcaaattattcctttttgatgtgatttttatttttgatgtgg

SEQ ID NO: 221053 - DNA, 201 bp, Homo sapiens
agttgtagaaaaacatatatgaggtttttgagaagtaaagagttttctagcaaaaagagaagaacacacagggaaaatgtgctctgaggagcaaaggacartcgattgtttcctgccacagacctttttatagttaatatcaagtccctatatgatttgatatgtccacagacctgttatttttttctttctttgcatttc

SEQ ID NO: 221054 - DNA, 201 bp, Homo sapiens
tgtaaaaagaatgagcattgtttgctcctatattgaccctgacgagttttggaataggaaggatcgttacttcttacgtttgattttttagataaactggsaatcaaaagggttaagtgatttgcccaaaagcacataacaagttaatcacaaaacagttagaacccatgctggcttctttgttaatcctgtattctttaa

SEQ ID NO: 221055 - DNA, 201 bp, Homo sapiens
aaattgtgtgtcacaggggtttgatgtacagattatttcattgcccaggtaatcagcatagtacccgatgggtagttttatgatcctcaccctcaagtacrccctagtatctgttgtttctgtctttggtcttttgtttttgtttgaaatagaaatttattctcagaataacgcacaaaagcacacgttgaggctgctgtt

SEQ ID NO: 221056 - DNA, 201 bp, Homo sapiens
aaatgggaaatacataaaagccctttgtaaacaaacttctaaagaaatgttctggtttgaagaagattttaacttttttctattgctgggatgtgttcatwtacttgaaaatatatttcttccaaaggggactgggtcgttttctgttgatttgcttataaagtggagctgtccttcacccttgtcagggtgctctaatcc

SEQ ID NO: 221057 - DNA, 201 bp, Homo sapiens
tctgatatattcagcaggtatataatctttgcgagttattcctggctatgtctttttgtgatttcttccatctctaaacatcttctgaatttactgtgtcstaaactttgctgaaagtatttaggtacttacggagatttaagtaccgtaatccaagaatgtagggttttggttatccaaactaatagaagaatgatgttt

SEQ ID NO: 221058 - DNA, 201 bp, Homo sapiens
taaattgtgtgtcacaggggtttgatgtacagattatttcattgcccaggtaatcagcatagtacccgatgggtagttttatgatcctcaccctcaagtaygccctagtatctgttgtttctgtctttggtcttttgtttttgtttgaaatagaaatttattctcagaataacgcacaaaagcacacgttgaggctgctgt

SEQ ID NO: 221059 - DNA, 201 bp, Homo sapiens
gtctgatatattcagcaggtatataatctttgcgagttattcctggctatgtctttttgtgatttcttccatctctaaacatcttctgaatttactgtgtygtaaactttgctgaaagtatttaggtacttacggagatttaagtaccgtaatccaagaatgtagggttttggttatccaaactaatagaagaatgatgtt

SEQ ID NO: 221060 - DNA, 201 bp, Homo sapiens
gcatgggttggttttccatttatttgtgtcatctatgatttatttcagcagtgttttgtagttgtccttatagagatctttcacctctttggttacatgtrtgcctaggtaatttgtgtgtgtatgtgtgtgtgtatgtttgtggcagttgtgaataagaatgtgttcttgatttggttcttgccttgaacgttattggtg

SEQ ID NO: 221061 - DNA, 201 bp, Homo sapiens
ttcttttgacacgtatcagttcatatcctttgcccactttttaatggggttattttttgcttaagttttttaagttccttatagattctggatattagtcstttatcagatacatagtttgtattttctcctgttgtgtaggttgtcaatttactcaattgatagttccttttgctgtgtagaagctcttcagtataatta

SEQ ID NO: 221062 - DNA, 201 bp, Homo sapiens
atatcagagtttaatatctttgaaaagttttggacttatccaaaatatatttaatttggtttaccccaaactgtgtgttgaaatacaaagttaatatacaycatacaaatttaaaaacaatttaaaatattgctgttctttactataacttatactcttttattttatcccttaaaatgaatcttaaaaaatactattgaa

SEQ ID NO: 221063 - DNA, 201 bp, Homo sapiens
gatatggttctgtggggatgtgtgtgtgtatatagatgtgtatacgtattttaaaattatgacttcagttagatacgtattattgtagcagagcattacaygttttcttctctctttccctcattccatacttttatctctttggcctgagacattaatacaggtatagcaggatctgtcttggtccacaaagaagtcgtc

SEQ ID NO: 221064 - DNA, 201 bp, Homo sapiens
ggatatggttctgtggggatgtgtgtgtgtatatagatgtgtatacgtattttaaaattatgacttcagttagatacgtattattgtagcagagcattacrtgttttcttctctctttccctcattccatacttttatctctttggcctgagacattaatacaggtatagcaggatctgtcttggtccacaaagaagtcgt

SEQ ID NO: 221065 - DNA, 201 bp, Homo sapiens
ccaacctcacttaccttttgttttgagtattccaactcaaagattcttttcattccctaatccattactaggattattcttcttcatgttcagattgtcckaaatttgacctgtgggaaccaactcctatatcatagtgtatctcctttagtctactttctggtacaagatattctaagcttacgttgtatgttctctgcc

SEQ ID NO: 221066 - DNA, 201 bp, Homo sapiens
ttgtacagggaaattttttttgcttttattaagtatttggggagataagtggcttgggaggaaggaaacagggagatcaattgaatatcctgtttctcagwaattttttacccagcacttgtagtattaatttataatgtttgtctgaacttgatattacattagtgattgtgaaatggagattttcaaattaagtgattt

SEQ ID NO: 221067 - DNA, 201 bp, Homo sapiens
tatataattagaacaccattataacttttaagtaaattaatattagttcagtgatataatcttactatataattcatatttaaattttgcatttgtctccraaatgtcttttatttcactcccgcacccccatgccatgtgagatccatttgaggttcatctgttacatttgttacacctctttcttttaatctataacgt

SEQ ID NO: 221068 - DNA, 201 bp, Homo sapiens
ttgaatatagtcattaaaaactgatttttgaatcctcactgatgttaagtgatgtgagtttctgggagactttggctttttagtagtgtatcatttgcctrtctagtgcatcttgtgtttcttttattttgacagtttctctctttctaacttcattaacacttatcagttaatcagcttcatttagaattgttttaattt

SEQ ID NO: 221069 - DNA, 201 bp, Homo sapiens
tcaggaatgccatagtgtcatggatgatggcagaagacatgggattcttgtgtcacagatgaaggatagtttattatagcaatagaatggtctttatgtayatatggttctatattttacatgttacatacgtattatgtgttacacacatgtatacataatacctaagatgtaggtgttatattttaaaacaaggaaatt

SEQ ID NO: 221070 - DNA, 201 bp, Homo sapiens
tttccttaaatttcttggctacctgaacaaggtatttcacctctttgcaagactggggaagtgtcatgccttttacatgttctttttctggtttggctaamgtgagacatttttcaggcttgagtgaatccatgaccagtttggtataaatgatgccctcaagttactgctgagctatgtagtttaattttcttatttttt

SEQ ID NO: 221071 - DNA, 201 bp, Homo sapiens
ctggagtgcagtgggctatctctgctcattgcaacccctgcctcccggattcaagtgattctcctgcctcagccacctgaggagctgggattacaggcgcrcgccaccacatctggctgatttttgtatttttagtagaggctgggtttcaccatgttgatcaggctggtctcaaactcctgacctcgtgatctgcccgcc

SEQ ID NO: 221072 - DNA, 201 bp, Homo sapiens
agttctctgaaattacatacattttcatttatggaataaatgtgtttttctggcatatctttaatttttattaggttctaaaaatgcctagaaactactakagtagacttttagatcctttctagatttttaagattatataaaatatggtaatagaatgatttatggtagtttctctatatatcaaagctaattttatgt

SEQ ID NO: 221073 - DNA, 201 bp, Homo sapiens
ttgagttagcgtcatagcatttgtatacatagttcataatctttgtttttggattttcacagggttccatcatgacacagtaaatagatgattccagggamctttatactgtgttttaccgatttcttagtaaaatagaaacttcttgagtatggagacttctttgatttgatgtctatgccattttaattatggcagaag

SEQ ID NO: 221074 - DNA, 201 bp, Homo sapiens
taatttcccagagtagagaatttgaactgtggtatcaaatgataaaattaaggtagggtatgtttttgattatagaatgttcttaaaattcaaaacctcakgtatgattttaatgagataatcttaaatctgcttttcttactaaatacacttataaatatggcacaataaaacagacatgtaattacaagtagtggtttt

SEQ ID NO: 221075 - DNA, 201 bp, Homo sapiens
cgatctttattccttaaccgttttattagatctcttttatgttcctatttccatcaccccttttaaaaaggatttacgtggtctccaaaggacactaagayttccttctctagaatctcagtcctctttcttttcaaccgtctatcttcttgccaatccccaatccttttaagctttactgcctactttgctgctgcttgt

SEQ ID NO: 221076 - DNA, 201 bp, Homo sapiens
gtaaacataaatacacacatacacgcaggtgcatgtgctatgtgctgagatacaagagtcacaaaacctgacaagatgtctgatggtgtggcatttacagwctaaaggaagaggaagacacacaacaaatgacagtgcaaataattcttcatttacaattatgttcttaaaaagttttcaaatgtccaaaattcagtagac

SEQ ID NO: 221077 - DNA, 201 bp, Homo sapiens
aaatgtggctgtgtcgcaataaaactgtagttatgaacatcagaatttgaattttatgtaattttcatgtcagagaatcctttttttaaaaaaaaatattytaaaaactatgcttttcttacagtctgtacaaaaactggccagtgcttgtcctagggttgtctgttttaataactgctttgtagatgcttcagtactgat

SEQ ID NO: 221078 - DNA, 201 bp, Homo sapiens
ggtagaaactgggttacttccataattatttatatttaaatttgttacctttttcttaagtttattacctatttataaaatctattctgtagcaatagggscattggtttattattaggttcaaggcaaatcttaggaggctgggaaggaagtaaagaaatgtacagtggtattatgtatagtaacaatggttctaatgta

SEQ ID NO: 221079 - DNA, 201 bp, Homo sapiens
ttctatggccacattggtagcatattatcaggcaaggctacacatattactcattcctcttgtcacgattggcacaaggttgggaaagtgactagagccaktctctgagatttgtccaaatggaactagcagaatgattaccttgctcattggcctgtgaaattggaaggatgtgcttttcgtttgtctctcacttgggca

SEQ ID NO: 221080 - DNA, 201 bp, Homo sapiens
atgtggaagtaatatatgcaaatatattactttgcaatatatttaaacagtgagattaaatttgcagtatattgcaatatattgcaaagtaatatatgtamatattaaaacatacatatacgttagaatttcctggttcttagttttaaaaaagagctaaagatattcataagtaaatcttcctggtctcatgctttctaa

SEQ ID NO: 221081 - DNA, 201 bp, Homo sapiens
tcctttgatttaaactctgtgttcttgggaaagtcacttaaccgtttggagcagcagttgtcctcaaatgtaaaatgagagggttgaacaagatcaggatwtctgaacatggtaaatgcagaaaaagtttcccattagttctctgaaattacatacattttcatttatggaataaatgtgtttttctggcatatctttaat

SEQ ID NO: 221082 - DNA, 201 bp, Homo sapiens
tgttgagcatttcttcttatgctgtgggccacatgtatgtctgcttttgaaaagtgtcggttcatgtcctttgcccacttttaaagggagtttttttttttgcttatttaagtttcttacaaattctgaatattagacctttgtcaaatgtataatttgcagccactttctcctgttctgtaggttgtctgtttatgctgt

SEQ ID NO: 221083 - DNA, 201 bp, Homo sapiens
cacatgatctcattcttttttatggctgcttaatagtccatgtgtgtgtgtgtgtgtgtgtgtgtgtgtgtgtgtgtgtgtataaatatatatatatatawgcatgccacattttctatatctgttctaccattgatggacatttaggttaattccatttctttgctcctgtgaatagtgctatgatgcacatacacgtct

SEQ ID NO: 221084 - DNA, 201 bp, Homo sapiens
aaatagaatgttgaaattgagactagatacatatacatatatctagataaatacattatatatctgtatatcttatagataagtattgtctgtaatataataaaaatgttattatattaaagatataactacatacaatgtattatatctgtaaaacataacagattgtttacagctaattgtcagtttgtttcttttgct

SEQ ID NO: 221085 - DNA, 201 bp, Homo sapiens
tacctttgataatatttcttcatagcccttaatttttaagtttccttaaatttcttggctacctgaacaaggtatttcacctctttgcaagactggggaastgtcatgccttttacatgttctttttctggtttggctaacgtgagacatttttcaggcttgagtgaatccatgaccagtttggtataaatgatgccctca

SEQ ID NO: 221086 - DNA, 201 bp, Homo sapiens
ccgccagcatatcctaaacttgtatgatcatgaaaagcttttattcaggaatgtgtctcataatggggactggtgaattgaatacagctggctaaaatcasgtggaaaagagcctatcacccttttgtttccttacagagaggtcacacctctcatgggtttagagtgtgaaattaacaaataaggtaaacttgggtccct

SEQ ID NO: 221087 - DNA, 201 bp, Homo sapiens
ttaagtgcacatattcattattgtctctattctgtaaactgtaattgtgtcttgcttttgtgttcctaaccaagattattagtgtcttagggcagtgatcyctccgccagcatatcctaaacttgtatgatcatgaaaagcttttattcaggaatgtgtctcataatggggactggtgaattgaatacagctggctaaaat

SEQ ID NO: 221088 - DNA, 201 bp, Homo sapiens
agaataaataacattacattgatacattacatattaactaacatttattctctcccaacaaaataaaatttttgtttattatgtgtaaactattggggacsctatgttaagtcctttatatatacagtatatatattatgtcatgtgattctcattattgtgaaagttagatatgaacaaaactcgttttataaatgagaa

SEQ ID NO: 221089 - DNA, 201 bp, Homo sapiens
ctgaatattattgaaagatacttaacatctttttaatacccccttttgtttgtgaatatgtgcagtgtctatttgaacacatttgtcaacagctttagagstacttatgtcattttccttctgtgtctttcattcttttattagattttattatatttcttttacatccgttgatggtgtgccagacctgtttaccgtatg

SEQ ID NO: 221090 - DNA, 201 bp, Homo sapiens
tgtataaccaaagttttggtgatgtgttggagattaatatataattggactccggttaaatgaagaattgataaattacaaaatactttgagaagaataartaacattacattgatacattacatattaactaacatttattctctcccaacaaaataaaatttttgtttattatgtgtaaactattggggacgctatgtt

SEQ ID NO: 221091 - DNA, 201 bp, Homo sapiens
taacctgtttcttggaattagaacatggacatctttggtgggttgggaaggtcccacttttcagactcccacagctacctgcttagctgttgcagaccaasatagttggtggaagctttcaagacattcatacactccaggtgtagaaattcaccaggctcttgagaatcttctgctttggagctataggcagagattgta

SEQ ID NO: 221092 - DNA, 201 bp, Homo sapiens
actcttttagatgtattctcctacaaagttactcatctcttccagggtttattacaaaatctaagtacgaaatatcctcatggaaggatgttactatggawcagtagatttaagaagaaaattcagttgaagggaaataaagaacttatgtagaatcaagcaggttgcctgtataaccaaagttttggtgatgtgttggag

SEQ ID NO: 221093 - DNA, 201 bp, Homo sapiens
catctgattctctgtattaaatactttcatgcttggaacacatgcagtggtttctgttttcctgactgaagtctgatacaaagctctttccctataactakgttgagaatgtaaagagggacctggaaagccatgtgttgcggatggcagagcagccatcagcctaggtgtggatgactgtgtggtacagtctccttaatc

SEQ ID NO: 221094 - DNA, 201 bp, Homo sapiens
atttgttcattatagcctattttaagaaacttagcattttaaaagagttttggatttataagagaaagagattgaagttcttggaaaatttaatgggtcartgtcggggtaggatagttagagaagaaagaacaggttaaagttaaaatctattgtgcaaagcagtatagagaaagggaaggtgaggagcaggttcatgac

SEQ ID NO: 221095 - DNA, 201 bp, Homo sapiens
ttatatggatgtaagccactaaaattttggggtctgtctggtactacaaaactttctatagcttaattcattcttactaataaagatgacttattaaaaaytaaataccaaaacaaatatcatcgcttatgatgtatttaaacacacctgattcagagtagtacattttccttgttttttctgtccatcgtttgttaacaa

SEQ ID NO: 221096 - DNA, 201 bp, Homo sapiens
atctagcctataacaacttttttcatttatttgctttttatttgttcattatagcctattttaagaaacttagcattttaaaagagttttggatttataaragaaagagattgaagttcttggaaaatttaatgggtcagtgtcggggtaggatagttagagaagaaagaacaggttaaagttaaaatctattgtgcaaag

SEQ ID NO: 221097 - DNA, 201 bp, Homo sapiens
tgctctagccagcatgcctggctgtgtgcagtggccagaccccatgctcactcacacacttcttgttgctctgttcctggtgtaccgttggcaggcatggsatcctggccggtagcgggagctgagtggagactgccagtctgagtggacaaaacgaatccagtgggccagagtgaacctcaggcaaaggtgccactggcc

SEQ ID NO: 221098 - DNA, 201 bp, Homo sapiens
agggtcttgctctgttgctcagactggagtacactggcacaatcacagctcacgacagccacaaccaacctcctaggctcaagcaatcctcccgcgttagyctcctaagtagctgggattataggcacgtgtcatcatgactggttaatttgtgtgtatgtgtttgtgtttgtagagacaggattttaccatgtttcccag

SEQ ID NO: 221099 - DNA, 201 bp, Homo sapiens
ccctcgcttgccatgttgtggatgaagagaagaagagaatagctgtggccctttggggagcccagacctgggagcttcctgagccagggctgtgactccckttttggggccctgtggtttctggtgtctccaagcttccggtgccactgcattccccagtgctggccggggaagctgcttgcagtccacctgcagcctcac

SEQ ID NO: 221100 - DNA, 201 bp, Homo sapiens
tcattccttttaatgaaggaactgaaaaacatttcggggcagtggggaagtggaagcattattttcagaagaacactgaagttagtattttttcaattaayaaaaagttcttcctaacttactgtttctttacttagccaccaaacattaatcactgtcttggttctagcacagtagtttaaaacgttttctcatcaaata

SEQ ID NO: 221101 - DNA, 201 bp, Homo sapiens
gttagtattttttcaattaacaaaaagttcttcctaacttactgtttctttacttagccaccaaacattaatcactgtcttggttctagcacagtagtttwaaacgttttctcatcaaatattagcataagatcctttgcattatatatcttcaaatcatccatggaaacttgcccagagtaggtacttacttatttaaca

SEQ ID NO: 221102 - DNA, 201 bp, Homo sapiens
tcctaacttactgtttctttacttagccaccaaacattaatcactgtcttggttctagcacagtagtttaaaacgttttctcatcaaatattagcataagrtcctttgcattatatatcttcaaatcatccatggaaacttgcccagagtaggtacttacttatttaacatttaaaatagtagcaaacattttcacatact

SEQ ID NO: 221103 - DNA, 201 bp, Homo sapiens
cataagatcctttgcattatatatcttcaaatcatccatggaaacttgcccagagtaggtacttacttatttaacatttaaaatagtagcaaacattttcrcatacttaagattcctcttaaatagttaagtatcataatcctgacaggtcttcaattgtcaatggctttgcatataaacctgagtagctctcttgtatcg

SEQ ID NO: 221104 - DNA, 201 bp, Homo sapiens
catagccattatgtcttaaggcatatatcttatggcagaatgaaagtagtgctagtgtcacgtatgaaaagttgggtggcatgtttctgagttctttgcgktgaaaattatgaggactagaatatgatcaaaagaaaaattttatttttctttcatttttgaaatttctattgcatttttgcagattcgggttttcagacc

SEQ ID NO: 221105 - DNA, 201 bp, Homo sapiens
acaattcatattcaaaacttagaagatattcctgtagagttgcataaaaattgacacatttgcagaccatattttgacaaagccgtaccttatgtactccrtgattgccagaattgcagttaaacttggtttggtttatatattggaaaaaattttaaaaatcatagttccttattatagaatcatatagatctgtttgat

SEQ ID NO: 221106 - DNA, 201 bp, Homo sapiens
aaaggataccgtcaaaaaagtagcacacagaatgggggaaaatatttgcaaataatttttctataagatacttacagctagtttgtctatatatatatatwcatgagtcttacaacttaaaaagagaaaacccaattcaaaatgggcaaaggatctgaatgggcatttcttcatggaaaatataaaaatagctgataagca

SEQ ID NO: 221107 - DNA, 201 bp, Homo sapiens
ttaattggctcagattaagtatttaaattttataagcatgtttagattgtactaactgcagtgaatcttgtttaaatatccaaaatactatatgcaaaagmaacatattttattatgcatctgctttagagtaaaatcttctcaatcatactaaaaaggaaatgagaaaataaagtactgctcgtattttcagctttcctg

SEQ ID NO: 221108 - DNA, 201 bp, Homo sapiens
tttctagagtagagcttggttaaatggcacatttcaagcctccctctcctgaccgcttatacttgcttggttttaaaatggcaggcagtttctttgtcttstaggaatacagtgttgtagagttgttaacttctcaggcttgttcaagtaagatgaatgttctaaagataagagcctttttttttccttcctttctttctt

SEQ ID NO: 221109 - DNA, 201 bp, Homo sapiens
tgcaaattaacctaatatatgtttttagatattgttaaataagcaccgtttatacgagggtagtgttctgtttagtatacttttcaaatggaaattacctrtagaaaatatttctgaaatataatcaatttaacacagttgagttaatagagcagttgagcagaaaaagtgttatttgaggatttcttcttcattctctgg

SEQ ID NO: 221110 - DNA, 201 bp, Homo sapiens
tgccactccagaccctgtccctggtcactgctgtcacctgccacttctacggggaatagggagaagccagacagtccctgaagctatgggggccactgcartggggccaggccaagtcacctgctggtgggagagcagggcagtcaggtatggaggggtgggcagagaggggaccccaaggcggaactgggtctggggcag

SEQ ID NO: 221111 - DNA, 201 bp, Homo sapiens
actgctatagttccagctgtggcgagggaggctgggtggtagtggtgggagtggttgcaggagcagcagtggcagtggggagacccgtgtgcaccgtgccscctgtgccctgtgtccccaaggtagctgactgtgccacccccaccctcctgagcctaggcaggacccactcccaggcctggagcctctgccactccagac

SEQ ID NO: 221112 - DNA, 201 bp, Homo sapiens
ttaggtgattttgaattctattactatcaaatttgaggaccagtacttgagagtgtataaacactattgtcagaattgggctagcacataaggatagagtrtatataccttaacgatggcagcagcgggccatccgaagaggccactgctatagttccagctgtggcgagggaggctgggtggtagtggtgggagtggttg

SEQ ID NO: 221113 - DNA, 201 bp, Homo sapiens
tccatgttgtatattcattgtagacttggtttaggcttctaaatcattttgagctgtagtggagactgaagttattagtaacttgggtcaatgtaaaaaawcagttttactcaggttaggtggtagaaagggaatgagagtgttctaaaatttctaagaagcatcttatcacaacctaataatgagtgtatgttggggcat

SEQ ID NO: 221114 - DNA, 201 bp, Homo sapiens
actccaaggtgttattttttttctccagtttttttatataaatagaaaataggacatttatttaaaacaactgcacagtcactgatattcgtaagagagaytatcagcagaaataatcatgggaatcaatttagaagccaaataatctagatggagatttgtgttggattttctataatcaactgttatcaactatatact

SEQ ID NO: 221115 - DNA, 201 bp, Homo sapiens
tgtataaaattagtgttaactcttctttaagtgtttggtagcattttccagtaaaatcatctgggtctggagatatcttccagaaacttataaattacatratccatttcctcgatggttaagcacagcacagtttgtttatatcttcttggctgaacacatgttcaagagcaaacacattttgtactataactgcatgtg

SEQ ID NO: 221116 - DNA, 201 bp, Homo sapiens
atatttatatcatataccaagggtccaactactatacaaagatttaacaaagcatctcaccttccggccataataggaaaatcatgtcacatttacccaartgtggatacatctatctatttccattaaaaattatgcatagatgtcaggaaaaatgacagcaaggaattccagggacatacctgtccttagaaaaacagg

SEQ ID NO: 221117 - DNA, 201 bp, Homo sapiens
actcataaaatgagttggggaatgttacctattttaatttttgggaaatattgtataaaattagtgttaactcttctttaagtgtttggtagcattttccrgtaaaatcatctgggtctggagatatcttccagaaacttataaattacataatccatttcctcgatggttaagcacagcacagtttgtttatatcttctt

SEQ ID NO: 221118 - DNA, 201 bp, Homo sapiens
gcttatccttaccagcatttgctgttgtgactattttattttagccattctgatagatactgtagtaatacctcattgtgatttaattttgcatttccctrtgactaattgtgttgaacatcttttcatgtgcttattcgtcatctatgtatcatctttaatgaagtatctgttcatagtcttctgcccctttctaattgg

SEQ ID NO: 221119 - DNA, 201 bp, Homo sapiens
tcggggtcgtttctaggttttggctattgcaaataaatgtggtatgagcatttttctgcaggtttttatgtgaacttaccgtttttctgggaagaatgccrcagagtgtggtggttaggttgtgtggtagtttctatttagttatataagaaacagccaaaatgttttctagaatggctgtatcatttcacattccagcca

SEQ ID NO: 221120 - DNA, 201 bp, Homo sapiens
atcggggtcgtttctaggttttggctattgcaaataaatgtggtatgagcatttttctgcaggtttttatgtgaacttaccgtttttctgggaagaatgcyacagagtgtggtggttaggttgtgtggtagtttctatttagttatataagaaacagccaaaatgttttctagaatggctgtatcatttcacattccagcc

SEQ ID NO: 221121 - DNA, 201 bp, Homo sapiens
agggacacttcttgccctttaaagtcacccgcactctccattgtacttcttacctgtcgaacttgacctctgacctctggcaatcactagtctgttctccrtttctataattttgtcatttcaagaatcttaggtaaatggaattgtatggtacgtgaccttttgggtttggcttttaaaaatcagccgtaattccctaaa

SEQ ID NO: 221122 - DNA, 201 bp, Homo sapiens
tgaactttcctccttgcacagcctttgctgtatttcagaggttttgataggttttggctgtctttgtgagggtgccaagtgctggggggtctagttcgctrtcttgctacaactttctcaaatgcaaatatcttgaccacagaatcagaattgtattcatctttataatcctctctataaggctgcacatacctgttgaat

SEQ ID NO: 221123 - DNA, 201 bp, Homo sapiens
gggttagaattgaaatttccaatttactttttatatatagtgaaagtatacaagtacagctattcaggctattattaaaaagaccaaaaaaaaaaaaaaaaccaccccaaaattcggaaaaggacgcgtagtaaagggaactcttgtacactcatcgtgggaatgtgaattagtacagccattatggaaaacagtatagag

SEQ ID NO: 221124 - DNA, 201 bp, Homo sapiens
atagtcccatattttacataggttctgttcattctttattgttttttcttcatttctgaatgagttatttcaaagagccagtctttgacctctgagattcygtcctcagcttgctcatttgtgctgttgatacttgcgattgtattctgaaattctctgagtttttcagctctatcagctcagtttagttctttgttgaaa

SEQ ID NO: 221125 - DNA, 201 bp, Homo sapiens
cttgagtgaatccatgaccagtttggtataaatgatgccctcaagttactgctgagctatgtagtttaattttcttattttttacattgaaggcatatgaygtaactttagtgtgttaactttcttcctaggtgtctcttcctcagataggataatcccaccatttttactgtttacagcaaacgttcattatatatgtga

SEQ ID NO: 221126 - DNA, 201 bp, Homo sapiens
tctcataagattttcaccaacaaatatattgaaaattcaaaggccgcattattattaccaaactatagtttcagtaaagcacactacagaagaggtgccckattacagttgttcagcttatgaattaggcatatattcattcttgagctttttcctccttcaagttttcttaaataacttacattttttctttctctaagg

SEQ ID NO: 221127 - DNA, 201 bp, Homo sapiens
tttatttgccttaagggcttgagagtaggatctgtcttatttgtgccaaatttggggacaatgggattcatgtaacatgtcttacagtgctttttttttttaagtaaatttagcacagtgcttttcttgtaatactcagaaacattaggtaactctgagattgaaggtattaatgagatttaaaaaattcccactgcagat

SEQ ID NO: 221128 - DNA, 201 bp, Homo sapiens
gttatatcgtattcatatatttaacatagttgtttgtggtcgatacatttttgtttgtcacataaaaatacaattcattcatcgtctgaacctgggaggcrgaggttgcagtgagccgagattgtgccactgcattccaggtggaggacagagcaagacttttacacacacacacacacacacacacacacacacaaatac

SEQ ID NO: 221129 - DNA, 201 bp, Homo sapiens
ctgcagggacacttcttgccctttaaagtcacccgcactctccattgtacttcttacctgtcgaacttgacctctgacctctggcaatcactagtctgttmtccatttctataattttgtcatttcaagaatcttaggtaaatggaattgtatggtacgtgaccttttgggtttggcttttaaaaatcagccgtaattccc

SEQ ID NO: 221130 - DNA, 201 bp, Homo sapiens
gtaggtacacatcttttacccagtttcctccagtggtaacctgttgtaaaactatagtacaaattcacaagtagggtactggcatcgatacagacaaatgyggaacagctctattactgcagggacacttcttgccctttaaagtcacccgcactctccattgtacttcttacctgtcgaacttgacctctgacctctggc

SEQ ID NO: 221131 - DNA, 201 bp, Homo sapiens
aaactttggacaagtataaatacttgtccaaaagtatacaacaaacacttttttaaattgaaatttttattttgaaataattgtaggtacacatcttttayccagtttcctccagtggtaacctgttgtaaaactatagtacaaattcacaagtagggtactggcatcgatacagacaaatgcggaacagctctattactg

SEQ ID NO: 221132 - DNA, 201 bp, Homo sapiens
tggctagactagagtagagcagttattatttttactgggcttcccctttctttgtcctttggatagcaagagcttacttttcttgagccttcttttttttwatgtcaacccccattggcattcttggattgctgacttctctagcaactggtctgggatatataaggccaagagaaaacccaacattataaaaatatatgt

SEQ ID NO: 221133 - DNA, 201 bp, Homo sapiens
accgcttatacttgcttggttttaaaatggcaggcagtttctttgtcttgtaggaatacagtgttgtagagttgttaacttctcaggcttgttcaagtaaratgaatgttctaaagataagagcctttttttttccttcctttctttctttttttttagagacagtgtcttactgtgttgcctaagcttatcttgaactcc

SEQ ID NO: 221134 - DNA, 201 bp, Homo sapiens
atatgcacccagtctctgtgagccacttttcctttttcacctgagaggagaggggaaagagattacttttctctctgatttctagagtagagcttggttamatggcacatttcaagcctccctctcctgaccgcttatacttgcttggttttaaaatggcaggcagtttctttgtcttgtaggaatacagtgttgtagagt

SEQ ID NO: 221135 - DNA, 201 bp, Homo sapiens
tgatttaactgctgttctagccagcaatgaaaggaatgtctatgtaaatttaaaccacaaattaaagctttcagcatcttctctcaccctgaccctgttcycaacctaagcctcatctggttaaaggcactagtttagaaaaattgccctgatgtaaaaattacaattagttgaatacaattatgacattttaatgttata

SEQ ID NO: 221136 - DNA, 201 bp, Homo sapiens
taatttaacaatttctcagaaacagctaacaagagtaatttttctagtttgtattgtactgtgactttatttacattttaattgatgttatataatatacrctgtatattatataatttaaatatatatttcatgttttatactaaaatgttacattttaaaatacatatttattcttgcacatagtatcaccagaatcct

SEQ ID NO: 221137 - DNA, 201 bp, Homo sapiens
gtgtggtttgctgaacatttgcagtgcagcctgttgcattgtttccttttcagaggacactggtttgtgggctagtctatataaatgatgaagacgaatgytccagtgggagattaacttatttcagtgcctaaagagttcattaaggtgttgggcctcctttttggggtcaagtctgaagagatagcagtttttctttca

SEQ ID NO: 221138 - DNA, 201 bp, Homo sapiens
ggaagacaactcatgttgccgtaggcattagtcagcagaattctcagtcatggagactgtagttggaagcagtcattaggtttgtgtgtccccaaagatayggggtgtggtttgctgaacatttgcagtgcagcctgttgcattgtttccttttcagaggacactggtttgtgggctagtctatataaatgatgaagacga

SEQ ID NO: 221139 - DNA, 201 bp, Homo sapiens
aatcatttgacagatgcaatgcttccacccccaacaaatatactttcttaacttctgtttgttatcacttagggaaaaaaggcagtcaacaaatatatttmattctatctaggaaaaatgtagccaaatcttttttcccattaacaaataatgtaagccttaatattcaagggtaataaaaaatacaagtcttccaaacag

SEQ ID NO: 221140 - DNA, 201 bp, Homo sapiens; identical to SEQ ID NO: 40096

SEQ ID NO: 221141 - DNA, 201 bp, Homo sapiens
caggtacctgctaaaggataaaaatctactttaaatatttatcctatagtcttaaatcttcccctaaagtttacccttaacagtttacgtatgaatctgtytcatgccattactaaattctctcagattgtcttttaaatttaataggcaaacttccctgattggaatacccagcctgctcgttactagctgtgtgacctt

SEQ ID NO: 221142 - DNA, 201 bp, Homo sapiens; identical to SEQ ID NO: 40097

SEQ ID NO: 221143 - DNA, 201 bp, Homo sapiens
tcaactctcttgtgaatgatgatgataactgcctgacaaacatcgaaaacaaatgtgactaaaagactgcagagatatatagcagagatttggacacaccstgagccaaattacaaaaacctgacagtacagggaaagcaaatatatatctattcaattagttaactaaagaaagagcaaatgtgatggcaaaagcaagtg

SEQ ID NO: 221144 - DNA, 201 bp, Homo sapiens
ggatcatggagatcatatcactgaaattcattttatagatgagaccaagagagtatctttattttatgacagaagcagaaaatctgactctgcttacttgyctctcctgtgccatgttttgtgtagaaaaacgtgattcgtatattcctataagtagaaaattatcccagaatcaaagttgaaaataacatgaggtcaaat

SEQ ID NO: 221145 - DNA, 201 bp, Homo sapiens
agtgctccatcatctcctgtgctattgtgtgggtttacgagattgacttaggcaagctaaatagagtttgggttgctctgttaggcaactttagattcaastagccaaaaggcaatcagggtattttaggtaatgggaggtttattggagagagatatggagaagcaaggaagacaattaaaaaaaaacctaattgccaca

SEQ ID NO: 221146 - DNA, 201 bp, Homo sapiens
agttgctgtagttacagtgggcgtgaacatcttgaccctttggaaaactataggatctgagcagtttgttttgaaaaacaaggaaaatagacggttaaagsaggatgccttgagccaatggtgttctcagctcaccacagggctatggcaacctctagatgtgagaaagataacatgtggttatgttcagttgtgtttatt

SEQ ID NO: 221147 - DNA, 201 bp, Homo sapiens
acaattgcctctcagttttaaatttgagttgttaaatgctttatagacatgccgtggtgcttactgtgaaatcttctgtttggagaaaatacatacatccrtgaaccggggaataacaatataaagtgtcacaagctaagtggctggcagatctgttgtatggaaataatttacaggtgagaaagatcactgtgggtctga

SEQ ID NO: 221148 - DNA, 201 bp, Homo sapiens
ggtttattggagagagatatggagaagcaaggaagacaattaaaaaaaaacctaattgccacatagctaggtgtctcagatgttggaaaaagttcagaaartaggtcattcaacaacagaaatccattgcttcagaggtaactcaaatggctaatctcttgctccaatccttccactattattactgagtaatgtctttat

SEQ ID NO: 221149 - DNA, 201 bp, Homo sapiens
ttctctcctgtaacagtcacctgtatgtgcaggagtccatgaagagccctttgtgttaccgtgtgagacttgggggatagagaactaatgaaaatgaaaaygaactaataaagtcccttttctctgacccaggagtctcatgtcttctgccagcatccatgaaacagtaacaggctaggtcgttagcttgcattatatatg

SEQ ID NO: 221150 - DNA, 201 bp, Homo sapiens
aggcaactttagattcaactagccaaaaggcaatcagggtattttaggtaatgggaggtttattggagagagatatggagaagcaaggaagacaattaaaraaaaacctaattgccacatagctaggtgtctcagatgttggaaaaagttcagaaaataggtcattcaacaacagaaatccattgcttcagaggtaactca

SEQ ID NO: 221151 - DNA, 201 bp, Homo sapiens
tgcagtgacaagccttaaagaataagacgttggctgggcgcagtggctcacgcctgtaatcccagcactttgagaggctgaggcgggcggatcacgaggtsaggagatcgagaccatcctggctaagacggtgaaaccctgtttctactaaaaatacaaaaaattatctgggcgaggtggcacacgcctgtagtcccagct

SEQ ID NO: 221152 - DNA, 201 bp, Homo sapiens
ccttattcgatgataattgtcattgatgagtacgtgggtttttgttttattattatttgtgcttttctgcattaaaatagttccccaaattctcaaaatartagttattaacaagaaaatattttcttataattattgtaaatattttaataaaaatacaagtggcaccaagatagattatcagttgcaaaggggattaac

SEQ ID NO: 221153 - DNA, 201 bp, Homo sapiens
ttattttttagagtggtttgtgaatatgaaatttgacatagtttagatgaaaaccctaaggaggagctgccaagaaacagaatcagaagagagcctatcaragaagcttgggacaccaggtgtgctaaacagtgtgacctgctgtgtagagaaatggcaggcaggcctctggctgctataacagctcttcacagtgctcca

SEQ ID NO: 221154 - DNA, 201 bp, Homo sapiens
agggttgtatgtgcagtgacaagccttaaagaataagacgttggctgggcgcagtggctcacgcctgtaatcccagcactttgagaggctgaggcgggcggatcacgaggtcaggagatcgagaccatcctggctaagacggtgaaaccctgtttctactaaaaatacaaaaaattatctgggcgaggtggcacacgcctg

SEQ ID NO: 221155 - DNA, 201 bp, Homo sapiens
gcatgttctcactgggtatgtcgagaatacaaaggcctgactagacgcgggcagactctgagggttgtatgtgcagtgacaagccttaaagaataagacgytggctgggcgcagtggctcacgcctgtaatcccagcactttgagaggctgaggcgggcggatcacgaggtcaggagatcgagaccatcctggctaagacg

SEQ ID NO: 221156 - DNA, 201 bp, Homo sapiens
gtgtgtaatgagaaaagcataaaatactgaggtaactcatacgtaagtaactttcttagaccagttctcttctgccctcattagtggattaccctgcttgrtttccactctttccatagagggtcacagtctctaaatacttaaaaaataaatatttatatagtttttatcttattattttaaaatgttttcaaggctcaa

SEQ ID NO: 221157 - DNA, 201 bp, Homo sapiens
caaagagtattaaaagattgtgtgtggtgtgtgtctgtgtgtgagtgtgtgttgtgcatgtgtgtaatgagaaaagcataaaatactgaggtaactcataygtaagtaactttcttagaccagttctcttctgccctcattagtggattaccctgcttgatttccactctttccatagagggtcacagtctctaaatactt

SEQ ID NO: 221158 - DNA, 201 bp, Homo sapiens
atgataacagtcttgctttgatttgattaaaactttcttataaagaagcctaaataacgttaattttcaacaatttaattgagttatatgattcgtggggrgtaacaaaaactaattgtggctgagctgtgtaagttcttttatttgactgtcaaatagcaattaaatttacactcattatttttgcctgtttcaaatacc

SEQ ID NO: 221159 - DNA, 201 bp, Homo sapiens
ggtaaatgcagaaaaagtttcccattagttctctgaaattacatacattttcatttatggaataaatgtgtttttctggcatatctttaatttttattagrttctaaaaatgcctagaaactactagagtagacttttagatcctttctagatttttaagattatataaaatatggtaatagaatgatttatggtagtttc

SEQ ID NO: 221160 - DNA, 201 bp, Homo sapiens
tggttaacatgtgagttaagttgaaggaaaagaaaacggggcctcccttaaggaagggagaatgctgattggtccatgttttttagaattttcaaggggartaaaagtttttctcgtactcataatagtggagtggttgtgctgttttttgccattgtttcctgtacatttttcctcttgaagcatttatgaggaaggatg

SEQ ID NO: 221161 - DNA, 201 bp, Homo sapiens
atgacgtatatatatttgcctaattctgaaggaatatagtaattgtatgataactagaagtgtactacaaaaaggaattcagttaaaccaagttaagagtrtgcattcttgtgttttgcttggtttttgaaggcacttgtaacttacctagtcctttgttacttaaataagaactattcctctgtgaggaattttcatttg

SEQ ID NO: 221162 - DNA, 201 bp, Homo sapiens
tgtctggcagccagtagctttgtttacaccagcatcaccacaagcacaggagtaaaacggtgtgctgcagtgttaccacggctgcccttcagtattaggcrgtaagaatttttcagccccattataatcttatgggaccgtctttgtgtatggagtctgttgttaagtgattaacatcactgcgacacatgactgtatttc

SEQ ID NO: 221163 - DNA, 201 bp, Homo sapiens
atgtctggcagccagtagctttgtttacaccagcatcaccacaagcacaggagtaaaacggtgtgctgcagtgttaccacggctgcccttcagtattaggyggtaagaatttttcagccccattataatcttatgggaccgtctttgtgtatggagtctgttgttaagtgattaacatcactgcgacacatgactgtattt

SEQ ID NO: 221164 - DNA, 201 bp, Homo sapiens
aaactgcctggtgtaacctgaaaccagttttatctaatagctgctggaacaacctgcctcaactcgaagattagtcttaatcagttacagtcactcaccasctccccagaactttactagagccagtgacctttctttaaatatgatatgtaacacttctcctttttagaagacctacaaccttctctttgttcttcagac

SEQ ID NO: 221165 - DNA, 201 bp, Homo sapiens
agttgttactatgtggtggaaagggcatacatacctatacaaacagtcctaggtttcagtccaaacttcatcagttactagttgtgcaatcttgaacaagktaggtaaatttttctaagtctcagtttcctcatttggaagatgacaggtaataactactttatgtgattgtcaatcaacagtggactggattaaaaaaat

SEQ ID NO: 221166 - DNA, 201 bp, Homo sapiens
acaggaatcatattttatgtgtgtatgtttgtgataaatcctttaacaagttatattaagtttgcttttgatacttagttgccacctagagtttacaatastatcatcaaccaacattgtcatctatttgcatttaactaataatcatttaaaataattggaacttagtagaaagtaataaaaaattagtaaaaatcgaat

SEQ ID NO: 221167 - DNA, 201 bp, Homo sapiens
agtcagagatggaaattattttttagagtggtttgtgaatatgaaatttgacatagtttagatgaaaaccctaaggaggagctgccaagaaacagaatcaraagagagcctatcaaagaagcttgggacaccaggtgtgctaaacagtgtgacctgctgtgtagagaaatggcaggcaggcctctggctgctataacagct

SEQ ID NO: 221168 - DNA, 201 bp, Homo sapiens
gggattacaggcgtgagccaccacgcccagctgagattcttaagccctatttagttgacaggaagtagggaagggtaaagggcaaattctaactttccttstatatcagagcatgtaatgatactaaaatatcattccctatctagattattatctgacagcaatataatgactaggaaaagtggagaaaaaaatatttta

SEQ ID NO: 221169 - DNA, 201 bp, Homo sapiens; identical to SEQ ID NO: 40093

SEQ ID NO: 221170 - DNA, 201 bp, Homo sapiens; identical to SEQ ID NO: 40094

SEQ ID NO: 221171 - DNA, 201 bp, Homo sapiens
gttcctgaggcttatccatgtcgtggcagttacaagttggcttctttttatttcctagcagtattccattgtgtggacctaccatattttgtctatccatkcaacagttgatgaaaatttaagttttcatgacatttaaatttaaagtcatgcttgtacaaatttgtaaattgccttggacatagtaatctgtgaaatgcc

SEQ ID NO: 221172 - DNA, 201 bp, Homo sapiens
aagcagagtcttcaggtttttcattttactcttgactttagagagccagccaattttggttttgatgatgtgaaataatcaaatccaagattaagtaatayccaagaaagatgaagttttttttttttttcttttgccctgctctaggattgagaatcatgtttttgtatgattggtacttagtttgacctgtgttctata

SEQ ID NO: 221173 - DNA, 201 bp, Homo sapiens
cttcttcccacacccattaaaaataaatataccaagggaatggaagaaatgtgggtatcagattttctgacaccctgcctgcagtgtaaatttttaaaaayatctgttctgagggcagcaagggttatgagagaggcaagcagagtcttcaggtttttcattttactcttgactttagagagccagccaattttggttttg

SEQ ID NO: 221174 - DNA, 201 bp, Homo sapiens
gatgtgatggttttatgaaggggaagttccctgtacatgctgtctcttgcctgctgccatgttaagatgtccctttgctgttcttcgtcttctgccatgaytgtgaggcctccccagccatgtggaactgtgagtccattgaacctctttcctttataaattacccagtctcgggtatgtctttattagcagtgtgaaaac

SEQ ID NO: 221175 - DNA, 201 bp, Homo sapiens
tagaaggagcgtgagtaaataatttatgattcaaaccaggacatgtgggagagaaataaagtgcaattaataattttgctgagatgacaggagtaaactgrgactttccctgggctaacggggacatctcgttacgtgagttagaggtagggtagacggtttgaaaatggatacatagtgtttgatgcatttttgttgatt

SEQ ID NO: 221176 - DNA, 201 bp, Homo sapiens
ccagtctaccctttggactccttggaggtgttcaaagagctcactgaatgtaaattaattgtctgtttcttaggcacatccaaaagaagccaaatacaatkacaagtacctataaaagttaacaccaccaaatatgtgaccagagtagtatttaattcagttcatgtatttgggaaaaaggtgtgcaggatagatctttga

SEQ ID NO: 221177 - DNA, 201 bp, Homo sapiens
aagaggcaattcattttctttaaaaataaataggtttatttgtatccattataaataattttggatcctatatatattgatggaaaattttgctcaaataraaccttcaggtttataaaagattcccacattattactactcttggttatagcttgtccatcgcattataaattcttgactactttctcattgtagggaag

SEQ ID NO: 221178 - DNA, 201 bp, Homo sapiens
tcttcttcttcagttttctactttcaatatttcgttccaagtaccacggctatccttataggtaatatctttatactaacatgaatgtttttatttttaastaatagaacagagtttcagtggttaatatataattaaggatgaatgtaaagttgctgtgtggtttttttaaattcagttaagcaagtttttgagcacctg

SEQ ID NO: 221179 - DNA, 201 bp, Homo sapiens
aaatggagtggtgtcataatttggagactggtatatagattatgccagcttgtttattatactgagttgctataaagttaagccttcataaaatgttaagrtaaaaatacaagaaggaaaaaatataagaaagaggaatgggcatctgaacgtattatgactgattctattaacttcattcatagatgtgaccttctaacc

SEQ ID NO: 221180 - DNA, 201 bp, Homo sapiens
gttatgaaaatgaaatgtgtcaatgacatgtgtcatgtctataagcagtgcatatctttatgtataatgtgaaatgtggtaactggttttgagagtccatrtagtttatatgtgctgtgaaaatcctggaatttaagaacctttggaattagcctctcaatatatcacaaattgaagtttcaggttataaatttttaaagt

SEQ ID NO: 221181 - DNA, 201 bp, Homo sapiens
gagaaaaaatggagtggtgtcataatttggagactggtatatagattatgccagcttgtttattatactgagttgctataaagttaagccttcataaaatrttaagataaaaatacaagaaggaaaaaatataagaaagaggaatgggcatctgaacgtattatgactgattctattaacttcattcatagatgtgacctt

SEQ ID NO: 221182 - DNA, 201 bp, Homo sapiens
ggggcttttctcttgtatatgttaggctcccaaacataggtttttctttattttccttttttctagaaagggttccaaagctaaaacaaatacaatagttygaaaaaccgtttgtatagagaggtcatggaagcataaatgccttactagagaagtcaggcatttatccttatccagaagttggataatatggtcatgaag

SEQ ID NO: 221183 - DNA, 201 bp, Homo sapiens
tgcattttatatttctgataaaaatggtgtatttgtttaatttattgtatagctcattgtggtcttctgagtgcctttaaaggtagtggtggtctttactraactatcagtttgtaatgtagatgaggtggtatagtgcttaatctctgattttttggttcctagaagcattaattgccctttatatatttttaaatctgt

SEQ ID NO: 221184 - DNA, 201 bp, Homo sapiens
atattcttttcaggctactgcctacatgattgaaaggcaggaatttcatagaaatttcagtgtttttcaagctgtgtagcatggatctctaaaagtttagwgctagtctatggtatgtgtatggtgggagggttgatgttgtgcaggggtggcaggggcttttctcttgtatatgttaggctcccaaacataggtttttct

SEQ ID NO: 221185 - DNA, 201 bp, Homo sapiens
tgtcccatgtctgtggattcggggtaatgtatacaagtagatggtccaaaacactttaagaataatggatttaatttaaagtctacagactaccatactgrtgatacaaaacagtcattctcttagaatattcttttcaggctactgcctacatgattgaaaggcaggaatttcatagaaatttcagtgtttttcaagctg

SEQ ID NO: 221186 - DNA, 201 bp, Homo sapiens
ctatgtttatatggtttaactatttttcttttggaaatttttaaggtatattaagaaaggtatgatgaataaattataatcagtttaatgtattttgtatygttgtttttatgaggggctttgcgttttaggcactggatttatttcatagcatactttgaaatccataaaattccatacattcattgatccgattttgtt

SEQ ID NO: 221187 - DNA, 201 bp, Homo sapiens
acaacaaacatgtgatacaggtacccttaatcctcattttaaagatgaggaaaacgaggcaggatgaattattttacttaagctagccagccagtagtgtkgtcatcaggactcaaactcaggcgttttggttcttgagcccatgcacttcaaaccacttagctatagtgcttatgaattttgagtgtgaggaaaggtcag

SEQ ID NO: 221188 - DNA, 201 bp, Homo sapiens
taaaatcattctactaagggaggtattgttgaattaagcattttgcccatgactgtacaacttgtatgtttacagttttactccagaattctccttctacmctatgttttaataactagctatacaacgctatttgtcaattacatattaaatatcagtaggagattgttgaggtacatgtagccctccctgatccttgaa

SEQ ID NO: 221189 - DNA, 201 bp, Homo sapiens
gaaaaatgggaagaactgggtacttgatgacatgtcttagccttgtaattgctctctcaactccttgctttgtgagttaataaccttccttattgtttagsacatttcaaattggatttctgatattttgtatctaaaatcattctactaagggaggtattgttgaattaagcattttgcccatgactgtacaacttgtat

SEQ ID NO: 221190 - DNA, 201 bp, Homo sapiens
agattatttcagtgatcttcagcgtttatttggcatgtcagactatctcagactatcagatatctctgatatttggcatatcagactataaattgctcatstccataagaattcctcctggagtatcatgctaatcctaccaggatagaaaatttacttttggttaagtgtaggaataatgtgttccccagctggaaaaca

SEQ ID NO: 221191 - DNA, 201 bp, Homo sapiens
cattaacagatcataatttttttttactgagtgttgaatttcagagtattacttttactctacattgatgatctctggctagattttttcaagtgtatatrgcttttccgtatagcatcctaatggcaagaaaaaagtgccttatgatataaatagcagcttaaaaaaggtattttcgtactgctccccttaaatatatgg

SEQ ID NO: 221192 - DNA, 201 bp, Homo sapiens
tagtctagaccaaattgtccagtactgtatataaccaaaggtgtaaatctttaactatctttgaattcatctaggccaaacctcattttatatgtaggaamactagagcccacaaagggcttatgttagggaagcccacttgagctagaattagaattcagttgtctttttcatggtctatcctgtgttcaagtacttcag

SEQ ID NO: 221193 - DNA, 201 bp, Homo sapiens
ataatgagtaagtctcatgagatctgatggtattataaaggggcattcccctgcacatgctgtctctttcctgcttccatctaagatgtgcctttcaccaygattgtgaggcttccacagccatatggaactgtgagtccgttaaacctttgtttctttataaattacccaagctcatgtgtatctttattagcagcgtga

SEQ ID NO: 221194 - DNA, 201 bp, Homo sapiens
tgtgcttttgaagtcttatcaacaaaatctttgctcagaacaaagtcctgaaacattttctcagtgttttcttctagtagttttatagttttgggtcttayacttaagtcattatattttgagttaatttttgtatatggtgagagacagggtccagttcactttctgcatatggatggatagtcagttttccccgcacta

SEQ ID NO: 221195 - DNA, 201 bp, Homo sapiens
aatgcaatacttcagtcaattcgtatctggaaaaaaaaatgttgtcctccaagttaagaaaaagcaactgtgcttttggaaaaacgggaggaaaaaaaaaraacaagcagtgtgccaaagattaaacccaaaaaagaggaatgaacatatcaaaagatgctcagaaccaagtggtgagctattcgtacaactcttttcctt

SEQ ID NO: 221196 - DNA, 201 bp, Homo sapiens
aaactcataaaggaaaagatgcataaatttggccacattaaaattaaagttttctacatgacagaataatttaaaatacaaatataaaggagaatctgaaygcaatacttcagtcaattcgtatctggaaaaaaaaatgttgtcctccaagttaagaaaaagcaactgtgcttttggaaaaacgggaggaaaaaaaaaaaa

SEQ ID NO: 221197 - DNA, 201 bp, Homo sapiens
aataaacatattttctttataaattatcaaattttagatattcctttatagcaatgcaaaatggaccaaaacagtactgttctgagttcttgtaaatgtastaactcaagccttacaacaaacatgtgatacaggtacccttaatcctcattttaaagatgaggaaaacgaggcaggatgaattattttacttaagctagc

SEQ ID NO: 221198 - DNA, 201 bp, Homo sapiens
ctgatatcatcttacttcattacttttgtgcttttttgctttgcatctttcactctttagttttgtgactttgagcaagttgtttaaacttctctgggctkcagtttccttgtttgtaaacagatggtaatgtctacatcagagagttattggtactgggtaagatagtgaataaaacaaagttcttgcccttttggagct

SEQ ID NO: 221199 - DNA, 201 bp, Homo sapiens
ctggtaatagtcatcttgtctggatctgtattcccaagagaggcaggccagatggctgtgtacagctggaagtagattttcttctaagcttttaacagctrctctcatttcttatatctggtacttgttttaaaatgagatatttatttataaatgaatgtccaacagaaggatatgaaagagttcaagaaaaatggtgac

SEQ ID NO: 221200 - DNA, 201 bp, Homo sapiens
aaggtaaattcatagacatctttaaaatggcaattttgtgagttattgcaaacttatttgtaaaatctggaatatgtttatggagtagtaaaatgtatttraatgctctgtgctttatgaagaagatttttattcttagcctaaagatatttcatgctgaaactgggctagcaattatgttctttgcccaatgcttgttat

SEQ ID NO: 221201 - DNA, 201 bp, Homo sapiens
actacccgcaagtttcagtagtaagcttttaccctgtgctgttctctctgatcataatcccaaatgttttaaaaagggcatttctcctgccacaaatggtkgggggagagcgtctgaaccaaggaaacgtgtggaccagaaaagagctgtgttaattctatttctgtattttcagtacatttttttcattacttaattagt

SEQ ID NO: 221202 - DNA, 201 bp, Homo sapiens
tgctttcaccatctaatgcaaatgtgaatgagatacttgctgtttacagaaaggtaggatgacagaaaaatacttataatacagtgagacaaatgtatgcraaggcaaaggaagtagcaagagaggaactaactccctgtctagagaattggcactgacttttcagctggatattgaagtataaaaagtttcagagacaga

SEQ ID NO: 221203 - DNA, 201 bp, Homo sapiens
gatagttcctgggcatgttatcataaacaaggtttacattgctttgttgttttgtttttattatttaagattataagtgttataatggattgaagtatcttgaggcagtggcctgtatgtcttacctcttccaaacattgaattaattcacccatttattcatttatttgctaattctttattattagttgcacaaatatt

SEQ ID NO: 221204 - DNA, 201 bp, Homo sapiens
gtcaatttttggggagtgaacacttaacacgtgatttttgactgtgtgggtgcccctaaccttcccattgttctatattatttcaaatatttagcatgtawgtaaaaaagttaatgagtgaataggcacacacaaattgtggatattcttgtaggtaagtctgtttcatcttgttaaataactataatactgtcttgtttc

SEQ ID NO: 221205 - DNA, 201 bp, Homo sapiens
cagaattatgttcaattcttttttggtttaagttcatagtcattttgtaataaaatgcggaactaataaaactcactttagatttgaaagctagagctagygcagagaagattgacggtgatggtaaaagtgaaaatcctgctacatgaggattactggaagtaatttgccaagtttagcttggaaaatgaaaaataatag

SEQ ID NO: 221206 - DNA, 201 bp, Homo sapiens
gcttacatttacttacttgcctgtatgctttatggtttcaaaattaagaaactactgtgaggagtacttgtttggctctagtttgtctcatagactggaaytggaaatacaaattttgttgtatttttcaacaaatgctcagtttctgcacacctgctttaatatggtaagagattaatgctttctgcacatcagaggtgc

SEQ ID NO: 221207 - DNA, 201 bp, Homo sapiens
tttttattatcacatgttattaattgtattccttttatacaaagaaaaaaggaactgaaagtgatccatggaaaagtaaaagtagattattaccttgtaasataaataaaaaataaaaacctaagtattaataacactttaatgttagtagatattttacgatatcaaggtagggaaggtcttttgaaataagactgagag

SEQ ID NO: 221208 - DNA, 201 bp, Homo sapiens
gaaacacccattcatttacgtattgcctgtgactacttttgcactacaacaagttgagtaatagcaacagactccatatgacttgcatagctggaaaataygtgtgactctttcctgaaaaagtatggcaatttctgctctataggctgtggtcaataaagaacacaaaaatccacacttttattaactcacccgtgaaca

SEQ ID NO: 221209 - DNA, 201 bp, Homo sapiens
tttgtcttttttttctagattataaggtatttgtgtctttgataaaaaccttttatatatctccaaagtgctaagcacatagtaggtgctcatcatatacytgttagttgaatctgtttacttgaaaattttattccttgtctacttccattaaatgcaactggaaccattaaaatacaaatacagtgaggcttattggct

SEQ ID NO: 221210 - DNA, 201 bp, Homo sapiens
agctttcctgagtttctgaagtaattatgggttttgagattttgtggcttgctttctaccagttttttatggatatatttgtatcgtgtgtacatattatrtaagaatatattcatataatattgtggttatttatgtattttttttttagtttccagaattaactgacacgcagaactagcatttatttgtacattataa

SEQ ID NO: 221211 - DNA, 201 bp, Homo sapiens
ttttaaaggagtcaggttttatatatacttttatacatattatacaaacatatacatcttttcacttggtatggtgacaaaattactattaatatatcttkcttttttttttttttttttttttttttttttttgagagggagtctcactctgttgcccaggctggagtgcagtggtgcaatctcggctcactgcaacctc

SEQ ID NO: 221212 - DNA, 201 bp, Homo sapiens
ttttaaaattgggttgttttgttcttattgatgagttttaagaggtctttgtatatttttgtaacagttctttatcagatgtctctttggcaaatattttytcccagtttgtgagtcgtcttcttatttcgttcaccatttcttttggagagcagaagttttaaattttagtgaattttaatgaagtctagcttattattt

SEQ ID NO: 221213 - DNA, 201 bp, Homo sapiens
catggtttgatagctcatttttttttatagcactgaataatctattgtctggatgtaccagtttatttacccattcacttaccagaggatgtcttggttgyttctgagttttggtaattatgaataaaggtgttatcaacacctctttacaggtttttgtgtggacctaagtgttcaattccttttgagtagatcccaagg

SEQ ID NO: 221214 - DNA, 201 bp, Homo sapiens
ttccacacatagggcacagagaaggggaaagagtggaaacataactcaagctaaagagtaatcaactcttaaccttttgctgcatttactttttcattatytccctctttagccctacatattcatcgattttagatgtgagtgtggtctgttatgcctgtgactgctgtagattatttcagtgatcttcagcgtttattt

SEQ ID NO: 221215 - DNA, 201 bp, Homo sapiens
gcagtacacttctttgacctcttctctaaagggagacattatctttattaaactcaaaagtaaacactcatttttctggagggggactctgtcttctttgrctatgtgctatatgcaaatatccttgaaaagatggtccagaacaagtcagtcagtccctgcattagcaagttgtgttagaaacccatgaggaattgtctg

SEQ ID NO: 221216 - DNA, 201 bp, Homo sapiens
tgtagtgaattacactgcaggagaggaaccttgcatttaagaaaccaaggtctttaaaaatgggcagtacacttctttgacctcttctctaaagggagacrttatctttattaaactcaaaagtaaacactcatttttctggagggggactctgtcttctttgactatgtgctatatgcaaatatccttgaaaagatggtc

SEQ ID NO: 221217 - DNA, 201 bp, Homo sapiens
tccattctcaacatttttatttctcccacccttgatgatgcatgcttggatacatacgtgaaattgggcacatctgcagcccatttcttgcttacatttayttacttgcctgtatgctttatggtttcaaaattaagaaactactgtgaggagtacttgtttggctctagtttgtctcatagactggaattggaaatacaa

SEQ ID NO: 221218 - DNA, 201 bp, Homo sapiens
gataaatatatgtaagataaacagttgtttaatagtcaaatataactgtgcatttaaaaataagctgaaaaatcagtgtattttagaaatataggctaatrttcttttattgggggcatgtaaaatattcattgaccagttgcacatataatcataaaaccgttttatcatcttgatatcctgcagattgccttgtaggtc

SEQ ID NO: 221219 - DNA, 201 bp, Homo sapiens
acatatctattactaagaaagagaaaaattcttttaaaatggtggactcattatcagtgaaactttaaaagaagtccaggcacagtggttcatgcctgcartcccagcactttcacaggctgatcattttagttgaggagtttgagaccagcctgggcaacagtagggggaatcctgtctctacaaaaaattacaaaatta

SEQ ID NO: 221220 - DNA, 201 bp, Homo sapiens
ccaccatagccattcttattttcggaacattacgtgtttaaaaggactccttaaggagtatttaccactagcacaatttaaaaatgttgaaaaaccagaaygtactgactggtgtcatcttcccaagaattcagtaataacttaagtaaaatcaggtttatttcacatactgatatatagtatatttagcttaatttccat

SEQ ID NO: 221221 - DNA, 201 bp, Homo sapiens
atgtgaaatgtggtaactggttttgagagtccatatagtttatatgtgctgtgaaaatcctggaatttaagaacctttggaattagcctctcaatatatcrcaaattgaagtttcaggttataaatttttaaagttaaggcatatttgctcacaaagaatggtaattttatgttatataaaggtaattgattgtatttacc

SEQ ID NO: 221222 - DNA, 201 bp, Homo sapiens
tggcaggtagtgaataaaggactgaaacaggctgaaaggatttacactagtactttttcatgatgttttcaaggagggtgaaagaaaatagatgggaaaartttgcatgtcatttcatactgatttgcataaaactgcatgacaaaattggactgaaagaattcatatagttagtgagagataatcacccatgtttcctct

SEQ ID NO: 221223 - DNA, 201 bp, Homo sapiens
gtgtttatttagaggtgatttctcttggtggaaggaggaagtaatgcagagctgtgaggtaagtaacatggggtttgcagtcagacaggcacaagtacctktctttgtgatactgtgcaaattgcctaatcttgttgaatggagttgtaataggtgctctctctttggggttgtgaagattaaaatatttatatgtgtgtg

SEQ ID NO: 221224 - DNA, 201 bp, Homo sapiens
aggtccctaatctgattggattggtggccttataagtagaggaaagtatagagacgcctacctatctctgtctgctcacaaagaagaggtcatgtgagcayacagtgagaagctggctgtcttctgcccaaggggatccctcaccagacaccaatcccattggcaccttcatcttggactttgaacctcttgaactgtgag

SEQ ID NO: 221225 - DNA, 201 bp, Homo sapiens
ggggtgtcctagaaccaataccctgtgcatactgaggaatgactataattttcagatactgtggggcacactgtaagttgtaaccttaatttttaacactrttattatgttaatgtcttcgtatattaattacagttatatttttctttaattgattttatttaattgatttataaagaggtgttgagagtgggagatgtg

SEQ ID NO: 221226 - DNA, 201 bp, Homo sapiens
gattgcagtcaagcatgagagtgagcaaaaaataatgtgacatgatgggttgggatagatactagggtgaaatgaggatggatgtctacatagggacaacytttgtaagtggttggaatgtaacaaatggtttttgcctctctacaaaattttgtggttattgtgtgcacattttgaatacttagctaaggactatctcct

SEQ ID NO: 221227 - DNA, 201 bp, Homo sapiens
ctgactttctacggaggggcagctatcgtgaattatttcagcatagtctgcttagggtttccttagtattgatgggttttgtttctttctttttttttttkttcctttacctacaacacctagactaccagtcttattgacagggtaataaaggtaaagctcatcaggagagctatttctccattttactatcaggacaga

SEQ ID NO: 221228 - DNA, 201 bp, Homo sapiens
cgttaacaaatttaagtattctttcctattttatagtcgcaagttctaattgggaacatatatccatctataataatgatatgacgtttttgaaatggttrtctttttaaaagtttactttatttgaataattgctcagagaaagaaaaatatgccatgtttttaggggtgttttagtaaaaaattatttggaacttcagt

SEQ ID NO: 221229 - DNA, 201 bp, Homo sapiens
tgtgtctttgataaaaaccttttatatatctccaaagtgctaagcacatagtaggtgctcatcatatacttgttagttgaatctgtttacttgaaaatttkattccttgtctacttccattaaatgcaactggaaccattaaaatacaaatacagtgaggcttattggcttgccacagctccagaagatgcagtccatacc

SEQ ID NO: 221230 - DNA, 201 bp, Homo sapiens
agggctgagaatggctctgtccatgcccatatcagcacaaaactggtagatagcagtgccataaggcaaagagggaaggtggtgtcagacagagccaggtyctatgacacatagctaccagggccaagccagcagtaggcttagtgcaggggcaggaaaggtggggagtagtaagataggcagatgctggaggcactaaga

SEQ ID NO: 221231 - DNA, 201 bp, Homo sapiens
aagtggtcattatccttattaactaagaccatgtcagtaaaacaagagaactcagtgactgaacccagattaaatttgaatttcctaagccttttttttttccccccaaaggtaggctgccacccaggggatatattggttgagtttcctcaaggtaactgtcaaggaaggaaaggaagcattatgcccgggaatggtcag

SEQ ID NO: 221232 - DNA, 201 bp, Homo sapiens
agatgaaaatggaatgatattcagtaaggaaatgtacagaataacagctaaaaatgaaaggcattcataccaattttgaaaaaagtatgatagtgaacaastacagcaaggcaaaaattccagcatgtagagggtatagcaattttgcattgatttgtacatcttaacaaccttaagctgtacaaatagaacaataatatc

SEQ ID NO: 221233 - DNA, 201 bp, Homo sapiens
taaagactctggctcacagagacatttttatgcctttgtcctgaagtgtgcaggcaaagagaaacagaaagaaaacagagcagggttcttttccaaactckgactcttaccaggtctgtcttttttggggaagttacttattctctctgttcttcttctgtaaaatgagttgaattctgcttttcttagtttgtagttttt

SEQ ID NO: 221234 - DNA, 201 bp, Homo sapiens
ttctccccaacttgtatactacttgtataccctttctcccagacttgtatattactgtaattacacatttaataggccacttaaagttgtcccatagttcrctgcaattttaaatttgtcttttttattttagattctttttttggaatggcttcagtttaatcttttcatctgctgttaattccttctgctgtatttttt

SEQ ID NO: 221235 - DNA, 201 bp, Homo sapiens
cctaagtacctcggacactgtgcctggcctttgtttttccccaagaaatagggtctcactgtgttgtccagggtggtcttgaactcctggactcaagcagytctcctgcattggcctccctgagttctcggattacaggcctgagccactgtgcccatctgtaaatgggttttcttttactatgcgttagtaaatatgatt

SEQ ID NO: 221236 - DNA, 201 bp, Homo sapiens
ctataaagttttccctgatcattaaaatcactctatgtccctgtcactctttctgcataactaactttggcatgtactaacgatactatattatgagataktttatgtatcctttctccccaacttgtatactacttgtataccctttctcccagacttgtatattactgtaattacacatttaataggccacttaaagtt

SEQ ID NO: 221237 - DNA, 201 bp, Homo sapiens
ctactggcagttagtggtagaggccaggaatgctgctaaacacctaaaatacaaaggacagcctcctatacccaattaagaaaatcatccagctccaaatmtcagagtattgaaagtgagaagcctagagaaacttagatgtaattttgacttcctgcatattttgcagctaagaaaactaatccatctagcatataaccc

SEQ ID NO: 221238 - DNA, 201 bp, Homo sapiens
cctcataagtctgttatctgtgccttcatttcttgtagtctttcctcatttctaccattatattgaaattattttgctaattttcagtttttccctttctrcatccaagatccttttctttgattctttatgctctgtgcactgttgtttaccatcgtccagtccctcctttcatattctcttccttgcattttaactgct

SEQ ID NO: 221239 - DNA, 201 bp, Homo sapiens
tttcttcatggtgtgaagtggattaggagaatgagtagaaagtgcgggtgagagaatatgggaaatatgtagctatggttgcaaagttggatgagggtcakaggaagctagggaaagttgacaaactggttgtgatacagttaagctagatttccacaagggtgaagaacaggttttgtgtagaagtaggatagggttgaa

SEQ ID NO: 221240 - DNA, 201 bp, Homo sapiens
acctgttctcagtgttttcaaattcagctgagattctgtctttcttggggtgattcccacccccgccgccccccgtatttcgcctctgctaggatccctcrtacccctttttccctgtacagtctccaccttcctgttcttgcatggattactgaagttataaatgttaatttcctcacttccatttacatttatattctg

SEQ ID NO: 221241 - DNA, 201 bp, Homo sapiens
ttctccttgcatagagaaaactgttcgattactgcaaatgataagttggactattagctgaattcagatgctttttaaaatagtggttcactgatattttmaaagccattaaaaatacaggagttaagcacaaggtaatttcagaggctaaaaaacgtttaaaacgtttcagtggtagtaatcaaggaaattctaattaaa

SEQ ID NO: 221242 - DNA, 201 bp, Homo sapiens
agcaactagcaaagtggattgctgacagaacggatgttcatgtatgtttttattcctcacagttttaataataggctggttagtttgtttttatggagcaktttaataaggccacagtaatactttttaatttctctatggttgtttctccttgcatagagaaaactgttcgattactgcaaatgataagttggactatta

SEQ ID NO: 221243 - DNA, 201 bp, Homo sapiens
tccattcatgtttctgcaaagcacatgatctcattcttttttatggctgcttaatagtccatgtgtgtgtgtgtgtgtgtgtgtgtgtgtgtgtgtgtgtrtataaatatatatatatatatgcatgccacattttctatatctgttctaccattgatggacatttaggttaattccatttctttgctcctgtgaatagtg

SEQ ID NO: 221244 - DNA, 201 bp, Homo sapiens
tcatgacctgcttctctgtttcactctatcaccaacccactaatgcatgtctgcttcttctaagttgtttcccactccccacaaagtggtgcattcttaasactgccatgtttgttcctgtgtacttccaagcccctttctttatgttccacagtagccactgttcttgcccaccatgttatagacctgttctcagtgttt

SEQ ID NO: 221245 - DNA, 201 bp, Homo sapiens
ttcctgtgttagtttgcttaggataatggcatccaactccattcatgtttctgcaaagcacatgatctcattcttttttatggctgcttaatagtccatgtgtgtgtgtgtgtgtgtgtgtgtgtgtgtgtgtgtgtgtataaatatatatatatatatgcatgccacattttctatatctgttctaccattgatggacat

SEQ ID NO: 221246 - DNA, 201 bp, Homo sapiens
acataatgctagtctctgactttagtaagtttttcgtaaccttacataaaataaacattcaaaaactaacacttcagtattctttttttttttttttttttaacttttaggttcaagggtacttgtgcagatctgttatatagttaaattgtgtgtcacaggggtttgatgtacagattatttcattgcccaggtaatcag

SEQ ID NO: 221247 - DNA, 201 bp, Homo sapiens
cacataatgctagtctctgactttagtaagtttttcgtaaccttacataaaataaacattcaaaaactaacacttcagtattctttttttttttttttttttaacttttaggttcaagggtacttgtgcagatctgttatatagttaaattgtgtgtcacaggggtttgatgtacagattatttcattgcccaggtaatca

SEQ ID NO: 221248 - DNA, 201 bp, Homo sapiens
taattttccaactgcattgagcaaattgggcctgacaagcttagtaaaagacaggagtattttgttgggtattcatttagttcttaggtttttttttttttgaaaaattagtggtatttgtaaggctagtgactctgctcacattttcatatattaattgtgaaatcaaacatgtctaggaaaacctgaagatattgacaa

SEQ ID NO: 221249 - DNA, 201 bp, Homo sapiens
ttaattttccaactgcattgagcaaattgggcctgacaagcttagtaaaagacaggagtattttgttgggtattcatttagttcttaggtttttttttttttgaaaaattagtggtatttgtaaggctagtgactctgctcacattttcatatattaattgtgaaatcaaacatgtctaggaaaacctgaagatattgaca

SEQ ID NO: 221250 - DNA, 201 bp, Homo sapiens
tgtcctaactaatctgcctttttttctatcaatcagtagtcagtccaggaggggcagaactatgtcatttaaaattttatttaaaatttcaaccagatcarattagtttccgtagacagtaatgttcccactgaattcaccaagatatggtctctctgtatgagtggatatagaacacgtgagttctaggataagctttag

SEQ ID NO: 221251 - DNA, 201 bp, Homo sapiens
atttttattcttataaagataacattgcattttctgtgagcaaaacattttttccatttattatgaaagaatatgattttattcgcatctgtttctagtcyattatagagagcaaacattccttttaatgtgttatatccaaggagaaacatactatagaaaaaaattaatgatagatgcagttgaaaattttagatttag

SEQ ID NO: 221252 - DNA, 201 bp, Homo sapiens
cttgtacttcctgcactgattccttctcagaaggaactggtgcttctttttctttttgaatttgctgttgttttgttggggctttttatttttatgttctkttttccttgaaggtttgactatggtatatggtgtgtatagtcagctggcttcgtttctgagtactttcatatggccaagactttgtatggtttctttggt

SEQ ID NO: 221253 - DNA, 201 bp, Homo sapiens
ttaggagaaaaggctagaaacctagaaggaggatttaatttctaaagcaggaaacaaccaccaaaactcataaaggaaaagatgcataaatttggccacaktaaaattaaagttttctacatgacagaataatttaaaatacaaatataaaggagaatctgaatgcaatacttcagtcaattcgtatctggaaaaaaaaat

SEQ ID NO: 221254 - DNA, 201 bp, Homo sapiens
atttgagtgttagatcgttttccattactttgagcctgtgagtattgttacatgtgaaatggatctattggagacggaacatattttaatgcagttttccmctgtgtgtctattaagtggagcatttagactgtttacattcaacgttaatattgatatgtgaagttttcttcctatcgtggtggtgttagctgggttaac

SEQ ID NO: 221255 - DNA, 201 bp, Homo sapiens
cattatgtaattaccttctttgtccttttttaactgttgtcgttttaaagtcacttttatctcgtgtaagtacaacctctgctctgtttggtttttcattkgagtgttagatcgttttccattactttgagcctgtgagtattgttacatgtgaaatggatctattggagacggaacatattttaatgcagttttcccctg

SEQ ID NO: 221256 - DNA, 201 bp, Homo sapiens
ggaaactgaggcccaaagcaatggacttgctcaaggttgcacaggtgctgaagatacatctgcaactcgagtattataatttataagcctccattcccaastattatgataaaattctaggcaaggtactttaaacataccagtggtaggtcttaagagcacagaaggttcttgggtagatactcctgtttgtgaatatct

SEQ ID NO: 221257 - DNA, 201 bp, Homo sapiens
tttttgtcttcttgatctaggtatttaacactataaacatttctcttaatattgcttttactgtatcccaaagattttggtatgttgtatctttgctgtcrtttgattcaaagaattttttgttttctgtcttaatttgctatttacccaaaaatcattcaggagcaagttgtttagttactatgtaattttgtgtttttg

SEQ ID NO: 221258 - DNA, 201 bp, Homo sapiens
cagatgattctgtgtattattccaggtttgaacctggttttgttttattaaaccatttcctggaatcttgattaattatgtattaagatgattttttaaastggtgacataccgtaaatagtattgttgctgctattgcctcttttcctccatgtagaatgtaagcttcctaatgacagttttctgtctcatgtttttgtt

SEQ ID NO: 221259 - DNA, 201 bp, Homo sapiens
agtccagaaacatactcacacttataaaatcacttgatttgtaacgaaagtggccttgcagtgcagtgagtaagtatggcatttttgataaatattgccgrgccaactggatatccatatgggaaaaagatgaatttcaacttttacctcccaccatacacaagaggaatcgtgaatctaaaagtaaaatgcgaacattag

SEQ ID NO: 221260 - DNA, 201 bp, Homo sapiens
atgtctctcgatttatttgcaatggtgtgaacctgttaagtagtctctgaaaggctactgtttgcatggtgatgttggagattgtggtctgagggcaggcmgttgggaagattgctgtaaggtaaggaagattcaagaacaagctggaatcccagcattttgggaggctgaggtgggcggatcacaaggtcaggagtttga

SEQ ID NO: 221261 - DNA, 201 bp, Homo sapiens
agaagctccataccgttcagcaacccactgaacgtagggaaggaatgggaagctcctgtgttccaaaagagttctgaactggctcttcatctgtcccttakcccctgcattctagttttattgttcttctccccccagattgactatccatgttctggtcattcctcattgttaaatgtggttaacactttacataggcct

SEQ ID NO: 221262 - DNA, 201 bp, Homo sapiens
tgggtaaggttaatgaatacatagtaaataatgatgattcatgtcataatgcatcataaaaaaaggaagttttaaaaaaatctattgtcatagcatcacaraaagttttgaatcaatctaataaaagatatgcacactgaaaactgaaaaatctattcaaataaattttttaaaaacttaaatggcaggtaaacctgataa

SEQ ID NO: 221263 - DNA, 201 bp, Homo sapiens
tgcttgagtttttaaaatttaagataatattctctgggctcatccatattgcttctaatgacaggatttcatctttaatagctaaataatattctattatrtatatatgctacattttctttatccgtttatctgttggtagacatttagattggtatcttggcaattgtgaatagcattgcagtaaacatggggctgcag

SEQ ID NO: 221264 - DNA, 201 bp, Homo sapiens
ctcaggtgatctgcccgtctcggcctccccaaagtgctgggattacaggcatgagccactgcacctggcctagaagaataatttttttcatggtagttggyatctgtttgcctgcctgcctgcctgcctcccagttggcctgtctctatttctttttaatgttggaaggcacaaggtcaacagtaagtttagagagtgatt

SEQ ID NO: 221265 - DNA, 201 bp, Homo sapiens
agaatgagaaagtcttcatactccagtatggattgaatccattgctgaaacaattgaatccaacattgctaaaactttcattccatgatgactaactcttytaaacaattgagacggaataatactcatcttaggtaaacttttctgtgaataaaaaaagaggaagtgcctctattgtctgaagcaagactaactttgatt

SEQ ID NO: 221266 - DNA, 201 bp, Homo sapiens
gccatttatgtatatcctaaaaccagaaaaaaaccacaaacccttattttattagagatctttcttaaaatgaggatgtagtttttggaaggaaaaatcasgaaaggaaataagaggagtagcaccttagtaagcagatgtgctgaattaaatctcatgatagatagtgtcagttgtttgtcctctgtattgcaggggcag

SEQ ID NO: 221267 - DNA, 201 bp, Homo sapiens
aactcgtggtcttatttaaattttgttttcaaagctgtatcaactgcatagtggaaatctatgaaataattatgaacccaaagtgttgaaagcatgtaatrgttatttttctttttttaaatacaatgtgaaatgttttccccaaaccaaatcgcttatgaaagttcgttgtatagaatagttaaaagcaaagttgctgta

SEQ ID NO: 221268 - DNA, 201 bp, Homo sapiens
catattttctgcatagttagcattaaaattttcactttcactagcagcttattttcatattcagctgattaagataccttcaaattaactcgtggtcttawttaaattttgttttcaaagctgtatcaactgcatagtggaaatctatgaaataattatgaacccaaagtgttgaaagcatgtaatggttatttttctttt

SEQ ID NO: 221269 - DNA, 201 bp, Homo sapiens
actgctatatttctactttgcactttcagtcacttttttttaccctaattatagaattcaagaaagaaaaagaacgaaatgacttacaaaatatacagaayataatgcataatttgaatgatgtatgttaaatgtgaagattcagataacttagtcagatttacatgttctttttcatccagtagtgaattaagacaaata

SEQ ID NO: 221270 - DNA, 201 bp, Homo sapiens
aggtttgaacctggttttgttttattaaaccatttcctggaatcttgattaattatgtattaagatgattttttaaactggtgacataccgtaaatagtaytgttgctgctattgcctcttttcctccatgtagaatgtaagcttcctaatgacagttttctgtctcatgtttttgttcatcgctttatcctcagcttcta

SEQ ID NO: 221271 - DNA, 201 bp, Homo sapiens
aatgcttccacccccaacaaatatactttcttaacttctgtttgttatcacttagggaaaaaaggcagtcaacaaatatatttaattctatctaggaaaartgtagccaaatcttttttcccattaacaaataatgtaagccttaatattcaagggtaataaaaaatacaagtcttccaaacagttaacttactgaaaact

SEQ ID NO: 221272 - DNA, 201 bp, Homo sapiens
acgttattggtgttttagaaatgctactaattttcatagattgattcctgaaactttactgaaatcgtttataaagccttttggtagagtatttagggttytctagatacagaatcatatagtctgcaaagagagatactttgacttattcttttcctatttggatgtcttctgtttctttttcttgccttgttgctctca

SEQ ID NO: 221273 - DNA, 201 bp, Homo sapiens
ctgttgctttgtagtatagtttgatgttgggtaatatccctccagctttgttatttttgcttaggattaccttggctatttgttctctgtttgggttccayatgaattttagaatagcttttttttttctagttctgtgaaaaatcatgataaattgagaggaatagtactgaacccgtagattgctttgggcagaatggc

SEQ ID NO: 221274 - DNA, 201 bp, Homo sapiens
gtggctgaactaatttacattcccagcagtggtgtataagcattcccttttctccacagccttggaagcatcttttttttttgacttttctgtaatagccrttctgacttgtgggaaatggtgtctcattgtagttttgattggcgtttctctgatgattagtgttgatgagcattttttcatgtttattgaccacttgca

SEQ ID NO: 221275 - DNA, 201 bp, Homo sapiens
aactttcagggcaactaccgactactggcagttagtggtagaggccaggaatgctgctaaacacctaaaatacaaaggacagcctcctatacccaattaaraaaatcatccagctccaaatatcagagtattgaaagtgagaagcctagagaaacttagatgtaattttgacttcctgcatattttgcagctaagaaaact

SEQ ID NO: 221276 - DNA, 201 bp, Homo sapiens
aggaggatttaatttctaaagcaggaaacaaccaccaaaactcataaaggaaaagatgcataaatttggccacattaaaattaaagttttctacatgacakaataatttaaaatacaaatataaaggagaatctgaatgcaatacttcagtcaattcgtatctggaaaaaaaaatgttgtcctccaagttaagaaaaagca

SEQ ID NO: 221277 - DNA, 201 bp, Homo sapiens
gttccaggggacattttccagcggacatttggtagtgtctggatacattttagattgtctcaactttcagggcaactaccgactactggcagttagtggtrgaggccaggaatgctgctaaacacctaaaatacaaaggacagcctcctatacccaattaagaaaatcatccagctccaaatatcagagtattgaaagtga

SEQ ID NO: 221278 - DNA, 201 bp, Homo sapiens
aacaaatgccatcagtaagataaagcaataaaatatggtatactcttacgaaaatgtacgtaattttctgttaccacattgtttgaatttaagcaattcaratgagaaacatgttactcatagttttcaacattgtaacaatacagagggagagtagtaaaaatgatatgaagatacatttatagggatatgttatacttg

SEQ ID NO: 221279 - DNA, 201 bp, Homo sapiens
tgccaaggccagtgtccagaatggtatttcctgggttgttccaggggacattttccagcggacatttggtagtgtctggatacattttagattgtctcaamtttcagggcaactaccgactactggcagttagtggtagaggccaggaatgctgctaaacacctaaaatacaaaggacagcctcctatacccaattaagaa

SEQ ID NO: 221280 - DNA, 201 bp, Homo sapiens
ccctgtaaaatatacttttccctgagttcatggctttgtgtgtgtataaaccgataacatatgtttgtgtacatgtgcatttatatgtgtataaaatttgmccctaagaacatactaatatattgctttactcccattaaaactgtcatacattttattttgtaggctttattttccccagtaatagaaatactgccattt

SEQ ID NO: 221281 - DNA, 201 bp, Homo sapiens
ggggtatgaatgatcttgtcaccgaagtactgagtatagtaccaaataggtagtttttcagccccttcctcctctaccctctaataggctgcagtgtctgytcccatctttgtgtccatgtttatccaatgtttagctcctacttataagaacgtgcagtacttgattttctttttctgttaatttgcttaggataatggc

SEQ ID NO: 221282 - DNA, 201 bp, Homo sapiens
taaggcattgcttttcattattgtttatggtttgttaaagtatacgaaaagttattcaacattcttatgaaatgttttaacatattgtattctttttttttgggagggtttcagacttttttttttctttggttgttagaacttttattttaggttaggggatacctgtgcaggttagttacattggtacattgcataata

SEQ ID NO: 221283 - DNA, 201 bp, Homo sapiens
ttaacctacttaaaacccctgcggtttagaaagattgataccaatattatcctcatgctatagacaggaaactgaggcccaaagcaatggacttgctcaakgtttaaatgctctacatggattaacctacttaaaacccttgcagtttagaaagattgctaccaatattatcctcatgctatagataggaaactgaggccc

SEQ ID NO: 221284 - DNA, 201 bp, Homo sapiens
gaatgttgaaattgagactagatacatatacatatatctagataaatacattatatatctgtatatcttatagataagtattgtctgtaatataataaaaatgttattatattaaagatataactacatacaatgtattatatctgtaaaacataacagattgtttacagctaattgtcagtttgtttcttttgctttctt

SEQ ID NO: 221285 - DNA, 201 bp, Homo sapiens
agaggcataacacccaagcaagtactttggcactggagcctaaaggccattactaaaggtgattttcttaaaaaaagaaaaaaaaaagtagaaggtgttaygttcagaaaggaagaaatatgatttcagtagtagcaatgaattcattttatatattacatgaactttagtgcttgccccattttctaagaagagcaaagt

SEQ ID NO: 221286 - DNA, 201 bp, Homo sapiens
taccatctgagccagcaattataaacaacagtttataattcacaaaaatgcaaaatgaagacattgagggctaaaaggcagaggcataacacccaagcaastactttggcactggagcctaaaggccattactaaaggtgattttcttaaaaaaagaaaaaaaaaagtagaaggtgttatgttcagaaaggaagaaatatg

SEQ ID NO: 221287 - DNA, 201 bp, Homo sapiens; identical to SEQ ID NO: 40095

SEQ ID NO: 221288 - DNA, 201 bp, Homo sapiens
tggggatggttcttctaaatgaagcagcaacttcgaaaggcgatgttggaaaaagacggagtaagtctctgtgttgccatttttgtaatttcgttttagtsttaagattcatttaagtcaaatgggaaatacataaaagccctttgtaaacaaacttctaaagaaatgttctggtttgaagaagattttaacttttttcta

SEQ ID NO: 221289 - DNA, 201 bp, Homo sapiens
aagctacaaatccctagttttaagtatcagttcattttatgattaaggtttcttttttcattaaccctcattcttcagttagcttcatcttcagagcaagstgatgatggcttgtgtgtgctagcaggatgaacgctatcttttcaaaacataatgccacagttcatgtacagctggcacatctatctgctttaccagcag

SEQ ID NO: 221290 - DNA, 201 bp, Homo sapiens
aaacaaagttgttactatgctgtatctgggtcctggtatgtgtcatacagggatattctataattttcaaaaatgttttttttattttatgatactcacaractcattttttgctttattttctcccaatattcatttgaagttcagctgcatgagtgttgtctgaaatgaaatgtcagaggctacacttggatgctatta

SEQ ID NO: 221291 - DNA, 201 bp, Homo sapiens
gagttttgctttttcagttcttgtaacaccgtcatcatctcaaatatgtcactgtatcatacttaatcacacccaggtctttcctttagctaaaagaaatrtaagggccatgactttcagtcatttcattttctgcaacatgcttctatgcacagaatctagtacacaatggttgttaaatgctgattgaaacagactttt

SEQ ID NO: 221292 - DNA, 201 bp, Homo sapiens
tttgaaaacactacactgataatataatgttaaattcaacaacgtttgtaatacttttctgcatctcttgcagtttttctcattaatacagagatacttaygtttgatggcctttggcaactccttaaatcatttaaaaaatgagattaaatatataatatataatttacattatatgttttatgtaaataatttgtatat

SEQ ID NO: 221293 - DNA, 201 bp, Homo sapiens
ctctagaaaactgagttttaagcagtagaaatctcctacatatgaacagttttagtgaaacaagtttttaatttttatcatgttgttattaacaatgtccyatgtctgtggattcggggtaatgtatacaagtagatggtccaaaacactttaagaataatggatttaatttaaagtctacagactaccatactgatgata

SEQ ID NO: 221294 - DNA, 201 bp, Homo sapiens
aatttcagtgtttttcaagctgtgtagcatggatctctaaaagtttagtgctagtctatggtatgtgtatggtgggagggttgatgttgtgcaggggtggmaggggcttttctcttgtatatgttaggctcccaaacataggtttttctttattttccttttttctagaaagggttccaaagctaaaacaaatacaatagt

SEQ ID NO: 221295 - DNA, 201 bp, Homo sapiens
agaatgttgaaattgagactagatacatatacatatatctagataaatacattatatatctgtatatcttatagataagtattgtctgtaatataataaaaatgttattatattaaagatataactacatacaatgtattatatctgtaaaacataacagattgtttacagctaattgtcagtttgtttcttttgctttct

SEQ ID NO: 221296 - DNA, 201 bp, Homo sapiens
aggaatttaacctaaggatgcaatcaaggatgatttaaatttttatccatagaaattttgaaaataatattcactttattgggaaaaattgaatataaatyaaatgtctaaaaataagaaaaagtaaatatactatggcatagccaaaaaatgatttacaagaatattttacctagaatgaagctcaagatgtaaaacatt

SEQ ID NO: 221297 - DNA, 201 bp, Homo sapiens
gtgaattataaactgttgtaccactgatatacaggactgtatccataattatctttatgtacagaaccgtgatcataattgtctttaaactaattttttttacattttttcctcacaattttgaattttatttaaaatacagtccttaagttcttctatctgaagtgatcctgttcggcttattcatttttattttaatct

SEQ ID NO: 221298 - DNA, 201 bp, Homo sapiens
aggcggaggttgcagtgagccgagattgtgccactgcattccaggtggaggacagagcaagacttttacacacacacacacacacacacacacacacacaaatacaattcattcaataggttagtaaatacaataagtagttataatacattttgtgatgtgattaacataattatggctaaacttatttttatcattgta

SEQ ID NO: 221299 - DNA, 201 bp, Homo sapiens
gcatttttgtgaattataaactgttgtaccactgatatacaggactgtatccataattatctttatgtacagaaccgtgatcataattgtctttaaactaattttttttacattttttcctcacaattttgaattttatttaaaatacagtccttaagttcttctatctgaagtgatcctgttcggcttattcatttttat

SEQ ID NO: 221300 - DNA, 201 bp, Homo sapiens
gaggcggaggttgcagtgagccgagattgtgccactgcattccaggtggaggacagagcaagacttttacacacacacacacacacacacacacacacacaaatacaattcattcaataggttagtaaatacaataagtagttataatacattttgtgatgtgattaacataattatggctaaacttatttttatcattgt

SEQ ID NO: 221301 - DNA, 201 bp, Homo sapiens
tgcatttttgtgaattataaactgttgtaccactgatatacaggactgtatccataattatctttatgtacagaaccgtgatcataattgtctttaaactaattttttttacattttttcctcacaattttgaattttatttaaaatacagtccttaagttcttctatctgaagtgatcctgttcggcttattcattttta

SEQ ID NO: 221302 - DNA, 201 bp, Homo sapiens
ggaggcggaggttgcagtgagccgagattgtgccactgcattccaggtggaggacagagcaagacttttacacacacacacacacacacacacacacacacaaatacaattcattcaataggttagtaaatacaataagtagttataatacattttgtgatgtgattaacataattatggctaaacttatttttatcattg

SEQ ID NO: 221303 - DNA, 201 bp, Homo sapiens
tttgcatttttgtgaattataaactgttgtaccactgatatacaggactgtatccataattatctttatgtacagaaccgtgatcataattgtctttaaactaattttttttacattttttcctcacaattttgaattttatttaaaatacagtccttaagttcttctatctgaagtgatcctgttcggcttattcatttt

SEQ ID NO: 221304 - DNA, 201 bp, Homo sapiens
tgggaggcggaggttgcagtgagccgagattgtgccactgcattccaggtggaggacagagcaagacttttacacacacacacacacacacacacacacacacaaatacaattcattcaataggttagtaaatacaataagtagttataatacattttgtgatgtgattaacataattatggctaaacttatttttatcat

SEQ ID NO: 221305 - DNA, 201 bp, Homo sapiens
ttttgcatttttgtgaattataaactgttgtaccactgatatacaggactgtatccataattatctttatgtacagaaccgtgatcataattgtctttaaactaattttttttacattttttcctcacaattttgaattttatttaaaatacagtccttaagttcttctatctgaagtgatcctgttcggcttattcattt

SEQ ID NO: 221306 - DNA, 201 bp, Homo sapiens
gctctaatttacattcccgacaacagtgcataagcattcccttttccccacgacctcaccggtatgtgctttttgactctaatcatagccattctgactgragtgagatggtatctcattgtggttttgatttgcatttctctgctgagtaatgataatgaacattttttcatatgtttactggccacttgtctgtctttt

SEQ ID NO: 221307 - DNA, 201 bp, Homo sapiens
aaaaaaaaaaaaaaaaaaaaaaaaaaaaagacatctcctgttgaacaaagcatcatcttgttatcacgtaccataaaaacaataattcctttaaacccggkgtttctctcctgtaacagtcacctgtatgtgcaggagtccatgaagagccctttgtgttaccgtgtgagacttgggggatagagaactaatgaaaatgaa

SEQ ID NO: 221308 - DNA, 201 bp, Homo sapiens
ctgctctaatttacattcccgacaacagtgcataagcattcccttttccccacgacctcaccggtatgtgctttttgactctaatcatagccattctgackggagtgagatggtatctcattgtggttttgatttgcatttctctgctgagtaatgataatgaacattttttcatatgtttactggccacttgtctgtctt

SEQ ID NO: 221309 - DNA, 201 bp, Homo sapiens
gtggctcacaactgtaatcccagcactttgggagaccgaggcaggcagaccacttgaggccagcatggcgaaaccccaactctactaaaatactaaagttrtccgggcatggcggtgcactcctgtgatcttccagccactcgagacactgaggcatgagaaccgcttgaacctgggaggcagaggttgcagtgaatcaag

SEQ ID NO: 221310 - DNA, 201 bp, Homo sapiens
cccggtttagccatgctgaacacagcactgaatatgttcccatactttcatacctttcctcatccagtttctttggtcgaggctgctgtccctgcatcttrcttgttctcagagttttgctttttcagttcttgtaacaccgtcatcatctcaaatatgtcactgtatcatacttaatcacacccaggtctttcctttagc

SEQ ID NO: 221311 - DNA, 201 bp, Homo sapiens
ttcctagtactgagcaatttagtagcaagaaccatgctcctttggaatggtcctgttttcttcatggtgtgaagtggattaggagaatgagtagaaagtgygggtgagagaatatgggaaatatgtagctatggttgcaaagttggatgagggtcagaggaagctagggaaagttgacaaactggttgtgatacagttaag

SEQ ID NO: 221312 - DNA, 201 bp, Homo sapiens
tcattacttttgtgcttttttgctttgcatctttcactctttagttttgtgactttgagcaagttgtttaaacttctctgggcttcagtttccttgtttgkaaacagatggtaatgtctacatcagagagttattggtactgggtaagatagtgaataaaacaaagttcttgcccttttggagctaaaattgtagtgctgg

SEQ ID NO: 221313 - DNA, 201 bp, Homo sapiens
tggctctttacagaaaatgtgctaactcccggtttagccatgctgaacacagcactgaatatgttcccatactttcatacctttcctcatccagtttcttyggtcgaggctgctgtccctgcatcttacttgttctcagagttttgctttttcagttcttgtaacaccgtcatcatctcaaatatgtcactgtatcatact

SEQ ID NO: 221314 - DNA, 201 bp, Homo sapiens
caaagaatattttgtgacatgaaaattatgaaattcagatatcagtgcctatgaataaagtttcattgaaacgcagccaggtttgttttatgtgttggctscttttgcactacgacagttcagctgagtggtttcagcaaagacccatggcccacaaagtttaaaatacttaaccttctggctctttacagaaaatgtgct

SEQ ID NO: 221315 - DNA, 201 bp, Homo sapiens
ttcaagataaataaaaaaaacaaaacaaacagcaagccattatttgctacctgttcagatatttcacaggaagggaaaaggaacaaacaagcttttgatayaccctcggtctccagtaaccaccagtgaccaaatccaaagttctcttcatgtgacctttctagcattttagttgacaagcccctcttggaaacttcatac

SEQ ID NO: 221316 - DNA, 201 bp, Homo sapiens
gttttccaaatatgagaaacagatggagtcattaattcaagataaataaaaaaaacaaaacaaacagcaagccattatttgctacctgttcagatatttcwcaggaagggaaaaggaacaaacaagcttttgatataccctcggtctccagtaaccaccagtgaccaaatccaaagttctcttcatgtgacctttctagca

SEQ ID NO: 221317 - DNA, 201 bp, Homo sapiens
tacccacccacataagtgatgtgagacaggtgacattatgtaaccgctgggtcttcctgacttcctctccagtttaagaacaggaagagcagtgcacaaawatgttctgtcgagctgaggatatcggaacttaaccggcttccacttggacagaatacatttgttccagaacactgtgtacattctgggttttccaaatat

SEQ ID NO: 221318 - DNA, 201 bp, Homo sapiens
tttttcccgtttgcaccttttttggataccaaatgaaatctgagcagctgccccttacccacccacataagtgatgtgagacaggtgacattatgtaaccrctgggtcttcctgacttcctctccagtttaagaacaggaagagcagtgcacaaaaatgttctgtcgagctgaggatatcggaacttaaccggcttccact

SEQ ID NO: 221319 - DNA, 201 bp, Homo sapiens
ctggctcttcatctgtcccttatcccctgcattctagttttattgttcttctccccccagattgactatccatgttctggtcattcctcattgttaaatgyggttaacactttacataggcctctctgtggaggctgtgtagaaaattggcctgagcactaggagactggactgctgttgccccatgaaatgacagatcta

SEQ ID NO: 221320 - DNA, 201 bp, Homo sapiens
tccaaaagagttctgaactggctcttcatctgtcccttatcccctgcattctagttttattgttcttctccccccagattgactatccatgttctggtcaytcctcattgttaaatgtggttaacactttacataggcctctctgtggaggctgtgtagaaaattggcctgagcactaggagactggactgctgttgcccc

SEQ ID NO: 221321 - DNA, 201 bp, Homo sapiens
cacactgcacatcccaccccctcaagaccagagaacacagggtctaggctaacacatcaaaagcagctctggagacttaattccattgtggtaatacagcyttcttactctggcagaagctccataccgttcagcaacccactgaacgtagggaaggaatgggaagctcctgtgttccaaaagagttctgaactggctctt

SEQ ID NO: 221322 - DNA, 201 bp, Homo sapiens
atgcacaattttttctttctgaaaaaaattagggtgaattgcattttgaaagaaataagcaaagcagttatcaacttcataggtttacatttacataatamttttatttgagctaccactacccatattacaattttgtcaagtaacctaataccctttacattgtccaccttcagtacaagatttggtctagagttagat

SEQ ID NO: 221323 - DNA, 201 bp, Homo sapiens
acaatttattatggaaggaaatgaacctaaatggtgatggtagttcatacttacttggagattttatgaccattttttctctattctcacaactacttttsacagtaaacaattggagccagttattttaaaagtacgttcgtgcaggcagtaatacagaagcattaatttttactataagatataaacacatttgttctg

SEQ ID NO: 221324 - DNA, 201 bp, Homo sapiens
attgttttattataatatgcttgtctgcttttgtaagattgttaattgtataaccccagattttcaagtgacatgataccggaccttcataaagatttcarctaaacaaaatctatgaaaaaatgcttttagaagaaaaagctgtgtacacacacgttatgaaaatgaaatgtgtcaatgacatgtgtcatgtctataagc

SEQ ID NO: 221325 - DNA, 201 bp, Homo sapiens
gtttttgagcaagcttctgaaagaagggaggacattctaagtgaagtatttcatgcacgtggttaagaatggacatagtatgttcgtgaaacacagactayttgagtgtggtatttttataaagacatagattatgtaagttgtggccaagttatggaggtttttgacttttattcttcccattatcttcattatgtacgt

SEQ ID NO: 221326 - DNA, 201 bp, Homo sapiens
aacaatgcgttaaatgatttccttactacattgtgtgacattcttcttggcataccacatttaagcattaatatgttactgttagttgtttttttttttttaaggagaaccaaaatttctttgactttcaaaaactgagtgctaactctgcgtattgtatacacttcaacatattttatgttcatatacagttttgcttta

SEQ ID NO: 221327 - DNA, 201 bp, Homo sapiens
ttttatatatacttttatacatattatacaaacatatacatcttttcacttggtatggtgacaaaattactattaatatatcttgcttttttttttttttytttttttttttttttttgagagggagtctcactctgttgcccaggctggagtgcagtggtgcaatctcggctcactgcaacctctgcctcccaggttcaa

SEQ ID NO: 221328 - DNA, 201 bp, Homo sapiens
ggggcgtctgttaagtaattgtggtagagaagtggtcttgaggtctattgttattgagccaggagagctctgtaatccatatgatagtgggcagagtggaycaaagagatttcaaggtgacaactaagatgaaaaggtgaagaggagtttctacaaatatttttcaagaaaaattattcaaattatatttctgagtaataa

SEQ ID NO: 221329 - DNA, 201 bp, Homo sapiens
ataatcttaaatctgcttttcttactaaatacacttataaatatggcacaataaaacagacatgtaattacaagtagtggttttctaaaataaaaaggcaycttcatttcacatttagagaaatgtttgcagatatgtatgattttactgtcctaactaatctgcctttttttctatcaatcagtagtcagtccaggaggg

SEQ ID NO: 221330 - DNA, 201 bp, Homo sapiens
aggttattttactttggaaatatatatctataaaatacacataaatatatgtaaaatatatatatatatataaagtatatttccaaagttatatatatatwtttaactcagactgcaaatatatatatggatttatatatataaattatacataaatattatatatagataaatctatatagataaatctatagctatata

SEQ ID NO: 221331 - DNA, 201 bp, Homo sapiens
attctcctgcctcagcctcccaagtagctgggactacaggtgcacgctgccacacccggctaatgggtttttttgttttttgtttttttgtttttttttttgtatttttagtagagacggggtttcactgtgttagccaggatggtctcgatctcctgacctcgtgatccgcccaccttggcctcccaaagtgctgggatt

SEQ ID NO: 221332 - DNA, 201 bp, Homo sapiens
atattgatgaggcagagagataagttatcattttcagtttaataaggttattttactttggaaatatatatctataaaatacacataaatatatgtaaaawatatatatatatataaagtatatttccaaagttatatatatatatttaactcagactgcaaatatatatatggatttatatatataaattatacataaat

SEQ ID NO: 221333 - DNA, 201 bp, Homo sapiens
ggactcattatcagtgaaactttaaaagaagtccaggcacagtggttcatgcctgcaatcccagcactttcacaggctgatcattttagttgaggagtttsagaccagcctgggcaacagtagggggaatcctgtctctacaaaaaattacaaaattagccagatgtgatggcatacacctgtggttctagctacttggga

SEQ ID NO: 221334 - DNA, 201 bp, Homo sapiens
ctactgttttgggtatattgatgaggcagagagataagttatcattttcagtttaataaggttattttactttggaaatatatatctataaaatacacataaatatatgtaaaatatatatatatatataaagtatatttccaaagttatatatatatatttaactcagactgcaaatatatatatggatttatatatata

SEQ ID NO: 221335 - DNA, 201 bp, Homo sapiens
ctaagatgtgcctttcaccatgattgtgaggcttccacagccatatggaactgtgagtccgttaaacctttgtttctttataaattacccaagctcatgtrtatctttattagcagcgtgagaacaaatacacctagcttttgacaaaggtgtagatgaccaggaaaaaaaaaatcatcttctaataaaatttatcaaaat

SEQ ID NO: 221336 - DNA, 201 bp, Homo sapiens
tctactgttttgggtatattgatgaggcagagagataagttatcattttcagtttaataaggttattttactttggaaatatatatctataaaatacacataaatatatgtaaaatatatatatatatataaagtatatttccaaagttatatatatatatttaactcagactgcaaatatatatatggatttatatatat

SEQ ID NO: 221337 - DNA, 201 bp, Homo sapiens
tcccttctttcttactctgaactttggtggccacagataataagcataaatacgtatatatgggttgattccttagtgatatggtttggctctgtgtcccyacctaaatctcaccttgaattgtaataatccccacttgtcatgggagggatccagtgggaggtaattgaattttgggggtgggtttttcccatgatgttc

SEQ ID NO: 221338 - DNA, 201 bp, Homo sapiens
ttggtataaatgggatttttaaatgagaaaaacagtaagattattgtagaaattcaaagagtattaaaagattgtgtgtggtgtgtgtctgtgtgtgagtgtgtgttgtgcatgtgtgtaatgagaaaagcataaaatactgaggtaactcatacgtaagtaactttcttagaccagttctcttctgccctcattagtgga

SEQ ID NO: 221339 - DNA, 201 bp, Homo sapiens
tcatggtaatgaattttgttataaccttatttttatgaacctttttttattgaatcactttttattttatgttggttcatatgctctatgaaatattcaayggggccaggtgcggtggctcacgcctgtaatcccagcactttgggaggccaaactggccggatcacttgaggtcaggagtttgagaccagcctggccaac

SEQ ID NO: 221340 - DNA, 201 bp, Homo sapiens
gattaattttaccatctgtgagtcatatgacctaagacattaaaatttggaatctcgtttgaatcttagatgactgatgatgatgatgatgatgatgatgdcggtagattacatttattggcttcctgctgtgtttcaggcattaggccattttacatgtattatcaattcacttctcacattttattattttgatcaaag

SEQ ID NO: 221341 - DNA, 201 bp, Homo sapiens
gagattaattttaccatctgtgagtcatatgacctaagacattaaaatttggaatctcgtttgaatcttagatgactgatgatgatgatgatgatgatgatgacggtagattacatttattggcttcctgctgtgtttcaggcattaggccattttacatgtattatcaattcacttctcacattttattattttgatcaa

SEQ ID NO: 221342 - DNA, 201 bp, Homo sapiens
taagattataagtgttataatggattgaagtatcttgaggcagtggcctgtatgtcttacctcttccaaacattgaattaattcacccatttattcatttrtttgctaattctttattattagttgcacaaatattaaatacatattataatcatatgtagtaggtaaatgatacggcttgactgtgtccccacacaaatg

SEQ ID NO: 221343 - DNA, 201 bp, Homo sapiens
ctcaaagtgttgcccaggctgagtgccaaaaagtatttatagtagaagcagaagtgatatatcattgttaaatatagtgtatatatatatatacacacacwcacacacacacacacacacacacagagaacatttctcatataccttgattcacactgatagtttaccgattaaatataaagatgaattttgttcatctgt

SEQ ID NO: 221344 - DNA, 201 bp, Homo sapiens
attcatttatttgctaattctttattattagttgcacaaatattaaatacatattataatcatatgtagtaggtaaatgatacggcttgactgtgtccccrcacaaatgtcactttgaattgttcccataatccctatgtgttttgggagggacccatgttgttctgatgatagtgagtgagttctcacatgacctgatgg

SEQ ID NO: 221345 - DNA, 201 bp, Homo sapiens
tgaatacacatgacatttatcgattaaatttgccatgttttacgggcaccatttgtggtgccccaaaacaatcacaaaagtgacatcaaagatcactggtyacagatttccataacaaataataataatgaagaagtttgaaatattgggagagttaccagaatgtgacatagacactgactgagcacatgctgtgggaaa

SEQ ID NO: 221346 - DNA, 201 bp, Homo sapiens
aagtttcaagaatgtaaattaaagctatctgaagtactggacattttagcatgatataatggcactaagagattttgcttatattgcgattgaggcagtgrccacaaataaatacaaatccagataatgatcgaagggcaatataacaaatatgttaaaaggttccttattaaagagtaattccctggccacccagggttc

SEQ ID NO: 221347 - DNA, 201 bp, Homo sapiens
attgttatgttcactgctcttcagcctcagcggcagtgttctgtgtgcaggtaatttatgtaattaaaaaatattaaaaactattattcttggtttacatrtatatttttatgttcattttaagataaatatatgtaagataaacagttgtttaatagtcaaatataactgtgcatttaaaaataagctgaaaaatcagtg

SEQ ID NO: 221348 - DNA, 201 bp, Homo sapiens
ttgcttcattgtaagaggataatatatattttatttcaaaaattcttctgagggctgggtatggtggctcacgcctgtaatcccagcacattgggaggccraggttaggcagatcacctgaggtcaggagtttgagatcagcctggccaacatggtgaaaacccgtctctatttaaaataaaaaaattaattgagaatggt

SEQ ID NO: 221349 - DNA, 201 bp, Homo sapiens
tttggtataaatgggatttttaaatgagaaaaacagtaagattattgtagaaattcaaagagtattaaaagattgtgtgtggtgtgtgtctgtgtgtgagtgtgtgttgtgcatgtgtgtaatgagaaaagcataaaatactgaggtaactcatacgtaagtaactttcttagaccagttctcttctgccctcattagtgg

SEQ ID NO: 221350 - DNA, 201 bp, Homo sapiens
atttggtataaatgggatttttaaatgagaaaaacagtaagattattgtagaaattcaaagagtattaaaagattgtgtgtggtgtgtgtctgtgtgtgagtgtgtgttgtgcatgtgtgtaatgagaaaagcataaaatactgaggtaactcatacgtaagtaactttcttagaccagttctcttctgccctcattagtg

SEQ ID NO: 221351 - DNA, 201 bp, Homo sapiens
gatggactgcattgccttacaaataccaaaaaaaatggagaaaaaagtctgtcaagagggcataaaatgtatatacatactagtctattttcatcgtttastaccataagatatacacaaatctattataaaaaggtcaaaacttgttaaaacttagacacacagttacaaatcacacatgacaccacttgcagttgaggg

SEQ ID NO: 221352 - DNA, 201 bp, Homo sapiens
tatttggtataaatgggatttttaaatgagaaaaacagtaagattattgtagaaattcaaagagtattaaaagattgtgtgtggtgtgtgtctgtgtgtgagtgtgtgttgtgcatgtgtgtaatgagaaaagcataaaatactgaggtaactcatacgtaagtaactttcttagaccagttctcttctgccctcattagt

SEQ ID NO: 221353 - DNA, 201 bp, Homo sapiens
ggtgtcaaactcctggactcaagcagtctgtgtgccttggcctcccagagtgcttgaattataggcttgaggcactgcaaccagcctataatttgttttgycagatctgatataaagaagtaggagaaatctttgccatgctgagttctttaaagtacttttaagaaagtgtgatgcttggcatataggaggtggtgaaca

SEQ ID NO: 221354 - DNA, 201 bp, Homo sapiens
taattttttttaactttttgactcttgtaataacagttagcttaaaatacaaacacattttacagctgtacaaaaatattttctttatatccttattctgkaagcttttttctgattttttaagaagtttttatactttattgttgaaaactaagacacacatacattagcctaggcctgcacatggtcaggattatcaat

SEQ ID NO: 221355 - DNA, 201 bp, Homo sapiens
tgagtgtctcaaagtgttgcccaggctgagtgccaaaaagtatttatagtagaagcagaagtgatatatcattgttaaatatagtgtatatatatatatayacacacacacacacacacacacacacacacagagaacatttctcatataccttgattcacactgatagtttaccgattaaatataaagatgaattttgtt

SEQ ID NO: 221356 - DNA, 201 bp, Homo sapiens
cgaaataagtataaattctcactatccctagtgaggatagagtaggaaagaacggatcaacttcagcttaacttaatgtagacttgatctttttggtaggygtagatttcactttataatgtttgtctgtaatttcataatgcttctctgaaaattccatttaaatttggagttaggccccactctattaatattctgtta

SEQ ID NO: 221357 - DNA, 201 bp, Homo sapiens
tatggtataaaaggtaaaaaaaatggtccacctgtctaggacactctccatgaatggagctttcaggcctggaggttgctctgggtgaataagtcagtagyggtgagtgagtgtgaaggcctgggacgttactgtacactactgtagactctataaacactgcacgcttaggctttatcgaaagatttttctttgataata

SEQ ID NO: 221358 - DNA, 201 bp, Homo sapiens
actagaagtgaggaattggaaagtaaagattagtgataatccaagcgtgatacattaaacattcagacagaatcagttgggtcaaagtaatagaaaagtgrcagtagagaataggaaatgcccgttggctttgtgatggattgtaaggtagaggtgccgaagttgaagcttaggtcattagaagaatggttgtaatattga

SEQ ID NO: 221359 - DNA, 201 bp, Homo sapiens
gatattgattgattgattgattcaaagatgtttgacatagattgccaagggttttgaattacctctaaacaattttaagttttcaaatgtttgtgagtaayagattgatgaaagtagtgattttggaagatttaactagaagtgaggaattggaaagtaaagattagtgataatccaagcgtgatacattaaacattcaga

SEQ ID NO: 221360 - DNA, 201 bp, Homo sapiens
attcccattataatgatactgtctcttgatagtagggtattgtacttaagcaattttttagtgaaaaattgtcaggaggacaacaaacatttaaaaaaaaacatgttttcactgtacattaaaaataaaacagagtaactcccaaaaccaaaaaaaggccattttcaactatttacatgactttatgacctatctttatca

SEQ ID NO: 221361 - DNA, 201 bp, Homo sapiens
tgttaaacaaaatacttaaaagagaatgaagattctattttgccttgcatgattagacatttttaagtatatatactatgtttccttttgagccaagacastatgttttgtattgtgttttgcattttatgaaacagaatatctaagtactagatattgattgattgattgattcaaagatgtttgacatagattgccaag

SEQ ID NO: 221362 - DNA, 201 bp, Homo sapiens
agtatcatgattcccattataatgatactgtctcttgatagtagggtattgtacttaagcaattttttagtgaaaaattgtcaggaggacaacaaacattwaaaaaaaaacatgttttcactgtacattaaaaataaaacagagtaactcccaaaaccaaaaaaaggccattttcaactatttacatgactttatgaccta

SEQ ID NO: 221363 - DNA, 201 bp, Homo sapiens
tcctaaggttttccaaataatatttccatgaaaacgtatctttttttagtattgaggtatgatttatatacaaaaaaatgcaaagatcttaaatatgcaaygtaaaatgagttttgactgtgcttacatattctaatggaagggttgggtgtggtggcactcgcttgtaatcccagcacttttggaggccacggcaggcgg

SEQ ID NO: 221364 - DNA, 201 bp, Homo sapiens
attgcctaatcttgttgaatggagttgtaataggtgctctctctttggggttgtgaagattaaaatatttatatgtgtgtgtgtgtgtgtgtgtgtgtgtktgtatatatgtgtatgtatacgtgtgtatacatatgtacacaaaatatgggttgtatggaacctaatatgtagtatgagtttaacttagattagcgattt

SEQ ID NO: 221365 - DNA, 201 bp, Homo sapiens
tggactgtagttgacagcaggtaaccgataccacagaaagtaaaaccaaagataaggggggactactatgcatttcctgatgtaaaacagaaaaaaaaaaattatttcacatttttctagcggtggtctctattttagaaaaaaaaatgcttccagatcataaatgcaaaactcgtgggcatacttttctgtggatatgat

SEQ ID NO: 221366 - DNA, 201 bp, Homo sapiens
tccatagctcaggagtcagctggtctctgcctgtactctccctctctgtgctgtaggcttgaatctctcaagggagtagggtggaacagacatagggctcwctttgttccctgtctcttaggcatcagcgtcttttatatcctgatgaccagcgtcctgaaaactgttacatatgttttgtttccttttgtttgtttgttt

SEQ ID NO: 221367 - DNA, 201 bp, Homo sapiens
ttgtgatagtttagcatcatctttagagaatttaccattgcactgtgtaggcatggtttgctaagcaaattaaggatataacctgttttgtctgatttgcycaagaaaataactttttgtgaacaatagtatcttgattgtttatatccataaagataatgctataattgcaaatatattttacctgtatatttaagcttt

SEQ ID NO: 221368 - DNA, 201 bp, Homo sapiens
acttctgatgtattataatattgcatactgtttccctaaattttcagtaaataataaattactattattgcatatgtatggtatattttggtatatatttrtgtgtttgctgtttattttcatttgagagtctaatagtgttaattctttgtatttatgttgtcaataagtcaattaaggaagcaaaggaaaagaaagtgt

SEQ ID NO: 221369 - DNA, 201 bp, Homo sapiens
agggttaagtgatttgcccaaaagcacataacaagttaatcacaaaacagttagaacccatgctggcttctttgttaatcctgtattctttaaaaaaaaaatagtccttattatttggaacacttgttatataacttactaggtttttctctgtggcatctcatattttatacctttattttattagggtattattattta

SEQ ID NO: 221370 - DNA, 201 bp, Homo sapiens
tgagccttcagtgagttataatccttttgctggtggagggttttgcttcttgttgatggctactgaccaataagggtactggctgctgatggtgggagcarctggcaacttcttaagaaattaagttggccacattgattccctctttatttcatgaaagattcctctgttgcatggaatgctgtttgacagaattttacc

SEQ ID NO: 221371 - DNA, 201 bp, Homo sapiens
aaatatacttttccctgagttcatggctttgtgtgtgtataaaccgataacatatgtttgtgtacatgtgcatttatatgtgtataaaatttgaccctaaraacatactaatatattgctttactcccattaaaactgtcatacattttattttgtaggctttattttccccagtaatagaaatactgccatttcccccat

SEQ ID NO: 221372 - DNA, 201 bp, Homo sapiens
aagtatgcattcattagctcctaaattccctgatgatataattcacgagcatctgccatttatgaattttcgatattcctctatgtctgaaatacatgcayatatttatatcatataccaagggtccaactactatacaaagatttaacaaagcatctcaccttccggccataataggaaaatcatgtcacatttacccaa

SEQ ID NO: 221373 - DNA, 201 bp, Homo sapiens
cttttgtattatcgttggtgaatgaccactgaaaatattaaagcagtggtaagataatacagttgactcttgaacaccatgggcgttagggacattgattrctcatgcagttgaagatctgtgtgtaacttttgactcctccaaaactttactcatagcctgcagttgtctgaaggccttaacaaataacatagtcagcac

SEQ ID NO: 221374 - DNA, 201 bp, Homo sapiens
tatctaatatgtacaaaagtaccgagaatagtaaataagaacgaccatgcagcttctatggccttacttaacggccaacttgctttatttttcacctcccrctccccactattctcaagcaaattccagacatcataccatttaacccctaaatatgtcgcacatatctctaatgcaaaagattgggaaccaagacatttg

SEQ ID NO: 221375 - DNA, 201 bp, Homo sapiens
gttgtttgggtttttttggtcctaaaggtacttctcttattctttaaatggtcctttgtaaatttttaaattctgctaactttactttggtaatcatactyatcaaatgtgtgtttagacattctttttgatggaaggatagggtggtatatatcatgttggaattaaaatggagagattaaacaataagtaatagtatag

SEQ ID NO: 221376 - DNA, 201 bp, Homo sapiens
ccaagacatttggtgtctatggctagcacactggatagcagccctctgtgtcttgaattcgtaacatgtagaataagatttatagtgggttgcaacccgamtttatttttaactaacagcaatataagaggaggtggctaatcctcacaaggctctccatgagggaagctcacccctataaatccaggcgggcgcttcgtt

SEQ ID NO: 221377 - DNA, 201 bp, Homo sapiens
agaggcaaaggctttatagagaaaagaagataggagtgtgaactgagccctgaggacagcctgcaaggagtggataaaaagccaataaacagaaaatgttrgtgttcagaaattaggagaagactgaatactttccctactcttaaaattaatccttcttttattataagtatacagtcttttctctcagaatttagttaa

SEQ ID NO: 221378 - DNA, 201 bp, Homo sapiens
tcttgccgaagctcccggctgaataaagcccttccttctcagtgtctgaggggttttgtctgtggcttgtcctgctacaatgggagtgacatggaacagcytaggtgagtgctgtgcatcactgctaagggaccttgagcttgggaaaccctgtctgtaagaaaactcactcaacttttgccccaggagaaggtattttat

SEQ ID NO: 221379 - DNA, 201 bp, Homo sapiens; identical to SEQ ID NO: 40108

SEQ ID NO: 221380 - DNA, 201 bp, Homo sapiens
atggctaaattaacattataattaatttaccaaataggtaatattttctagatgtataaaatgatgttctttcttttatacagaggatagaggcaattgtwaaaaactatccagaaggccataaagcagcagctgttcttccagtcctggatttagcccaaaggcagaatgggtggttgcccatctctgctatgaacaagg

SEQ ID NO: 221381 - DNA, 201 bp, Homo sapiens
tcttttgtaatgtattctgaacagctttccttatcagtagacatttctatactgtcattttaatgctacatagcattccattgtgaggatgttctattacytatataaccaggcccttctaacctttcacaagtagtgagatttcacattaaacctagcaagtatcaagaaaagtacaagaaaagtctacctaagttcctt

SEQ ID NO: 221382 - DNA, 201 bp, Homo sapiens
cctcctcaaacctgcttataaaatctgctgtggtccgcccatgccccttttttcagacgtcttacaaggagctgctctcctctcccctttcttctggctaytaaactttccgctccttaacccacccacatgtgtccctttccttaatcctcttggcaggagatgctgaaccctggatatttactccagacggtgatgcca

SEQ ID NO: 221383 - DNA, 201 bp, Homo sapiens
cttctaataataatagctaatgatagccaacactaatacagtacttaccatctgccaagcagaatattaagcactttacatgaagtacatctttttttttyccccccgagacagagtctcactctgttgcccaggctggagtgctgtggcacgagctgggctcactgcaacctctgcatcctgagttcaagcgattctcct

SEQ ID NO: 221384 - DNA, 201 bp, Homo sapiens
agattttcttttaagaagggatttgctttgtttctctcctgctcctggcagtactgctggccccagaaaagcccctctccttataccctaggcctctgttyctccggtgtgaaaggttccagactagcagttttctttgagggacagtttactcttataatgaggttaaagcttttggggaccttaactttgtgtagctta

SEQ ID NO: 221385 - DNA, 201 bp, Homo sapiens
atttcctttagaattcctaatatgagaaagttaacatacttgtctgaaatgcccgctcttcttttatattagaatatggatatatctataatttttaagawtgccagatagtaagtcttaatgataataggtcacctagaaagttgtagacagaattataaatcacgatagacaaggaccagccctggcaaacagctagaa

SEQ ID NO: 221386 - DNA, 201 bp, Homo sapiens
aaagagaaatgaaatgcagctgagagaataatcagattccttccaaagcaactgaacattgtcagtccgcatagcatcataaatagctttctgaaactacttttttttttttttttgagacggagccttgctctgctgctcaggctggagtgcggtggcgcgatctcggctcactgcaacctctgcctcccaggttcaggc

SEQ ID NO: 221387 - DNA, 201 bp, Homo sapiens; identical to SEQ ID NO: 40109

SEQ ID NO: 221388 - DNA, 201 bp, Homo sapiens
cttgaacccgggcggcagaggttgcagtgagccgagatcgtgccactgcactccagcctgggccacaagagcgaaactccgtcgcaaaaacataccaaaacaaacaaacaaacaaacaaaaaaacatatgctcaagtaggccgttaaaaatcttgggcactgatctgagtttctttaatcgttatacaaagcctttcctgg

SEQ ID NO: 221389 - DNA, 201 bp, Homo sapiens
ttcttttaagaagggatttgctttgtttctctcctgctcctggcagtactgctggccccagaaaagcccctctccttataccctaggcctctgttcctccsgtgtgaaaggttccagactagcagttttctttgagggacagtttactcttataatgaggttaaagcttttggggaccttaactttgtgtagcttacatgg

SEQ ID NO: 221390 - DNA, 201 bp, Homo sapiens
ggaatgcagtggctggatcatggctcactgcagcctccaattcctgggctcaagtgatcttctgcctcacccttccaagtagctgtagctatgggtgcatrctgccaagcccagctaattgatttttgtttgtttttgtagagaggggtcttgctatgttgcccaggctggtggttgtgaaatcctggcctcaagcaatcc

SEQ ID NO: 221391 - DNA, 201 bp, Homo sapiens
ttattaaatatataaatgtactacatgtatgcttgctttttagactttattttggctgtatttctacagcacaatatatatgtctgcctcatttttttttyctgtttttttgagttgaggtctcactttgtcaccaggctggaatgcagtggctggatcatggctcactgcagcctccaattcctgggctcaagtgatctt

SEQ ID NO: 221392 - DNA, 201 bp, Homo sapiens
tatctgcctgcctgtatatatggaggcctgattttcttccttaaactccttggtttcttagacctactatgttcttttaaagctttgatgtcatcaaacartcaggtggctaataataaggtcatggcctttgtaatcatctggccctaggatctaacataatttctgccaataattagtgatgtgacctaaccttgagaa

SEQ ID NO: 221393 - DNA, 201 bp, Homo sapiens
ctaaattgatcctttatgttgataaacagtgtcgatattaaggagctcattaattttggaagatccatatctatccaaactggtaagaggctttaagatamcaaatgctcagctttcaggagacgtctaaaatgaaacttttaaatcatattccattctgatatttgatcaagagaaaagttttaggcagaaaagaagagg

SEQ ID NO: 221394 - DNA, 201 bp, Homo sapiens
tcctgacctcgtgatctgcccgcttcagactcccaaagtgctgggattacaggcatgagccactgtgcccggcctaatcatggtattttgagatacatacygagcagcacagagcattgtgggactgcctcctttgttccagacattatgcttgtaataattgtgcctaattatatcaactcctacttcagagacattaca

SEQ ID NO: 221395 - DNA, 201 bp, Homo sapiens
ggctttttaaaaaaattttatagagatggtatcatacctctaagtactgcagctggatctcacaagttttgcagtcttttttgtttttgattgagcgtttstgttttttttttgtttttcattttgatttctttgacctgtaagtttctaaaaatgttcttaatatccatatatatggcgttttctagttatttctttaaa

SEQ ID NO: 221396 - DNA, 201 bp, Homo sapiens
atcacaggtgtgagccaccatgcttggcctgcctcatttttcttttacaaacagttactttgatgtacacacacatctttgcgtacttgtcctgttgtatrctgagatagtttacaagaagtagaattgtagggtcagactttaccgtatttttcccaaatgccttccctaaatgtatgagactacccattttcttcacat

SEQ ID NO: 221397 - DNA, 201 bp, Homo sapiens
gaggtcagttcaggataacttaagtttagtaaatgctagctggcccctgttgaccattactttcttttctaagaaacgtatactgttcttaacaacctgarcctatagaattgaatttgcttaaagagtgttggcattttcttcctaattcctcactttcttgggtatacccctttttttaggaggtaaatcatttccctg

SEQ ID NO: 221398 - DNA, 201 bp, Homo sapiens
ctttttaaaaaaattttatagagatggtatcatacctctaagtactgcagctggatctcacaagttttgcagtcttttttgtttttgattgagcgtttctgttttttttttgtttttcattttgatttctttgacctgtaagtttctaaaaatgttcttaatatccatatatatggcgttttctagttatttctttaaaaa

SEQ ID NO: 221399 - DNA, 201 bp, Homo sapiens
cttgtcctgttgtatgctgagatagtttacaagaagtagaattgtagggtcagactttaccgtatttttcccaaatgccttccctaaatgtatgagactayccattttcttcacatcccttgataatctttgacgttaggagttttctgagtctttgccaaatctgataatgtgactgtgattttagtagtttaattatta

SEQ ID NO: 221400 - DNA, 201 bp, Homo sapiens
tcatcttttacaccacactcagcatcagaagggttttttttttttttttttttgatagagaatctcgctctgtcgcccaggcaggaatgcagtggctcgayctcagctcactgcaacctccacctcctgggttcaagcaattctcctgtctcagcctcccaagtagctgggactacaggtgtgcgccaccacacgcggtga

SEQ ID NO: 221401 - DNA, 201 bp, Homo sapiens
aagcagtggaaggggtcagaggagataagggcccagataagtaatctgggctgaatcttaaatataataaaaactgttggaatgttttcagtagggaatgraatgagcaatcttaaaatactgccatagttgctatgtggagattagaatttagtagatatgtgggactaaggatttatgagtgattttcagctttttggc

SEQ ID NO: 221402 - DNA, 201 bp, Homo sapiens
ttattcgtatcctgttaatacaaataactacatttgtgtggtgatgtattacagcatatcatttataaagtgccatacacaaaccacatactatttgattmtgatgagaatcacataaccattaagctgtgttatataatggaaaatatttttgacttagaactaagacacctgatttttctctgaacttcctcattggca

SEQ ID NO: 221403 - DNA, 201 bp, Homo sapiens
tctaaatatagtagcctgtagatgggtttgtttgagataggtattctttcagttagcagtagttagatctttagggatagatactaggcatctacttaacaagttactacagctactttgtaccttactgtttcttcagtaatacagcatttatttagtatgtacgttgacactgttctactttatatattttctcattaa

SEQ ID NO: 221404 - DNA, 201 bp, Homo sapiens
tcataggtacataggtacttgataggtatttaatgcttcttgagagcattaagagatgtatttcatggaaagtgtttaatattctgcctggcagtaaagastaaattttcttcccactccagatcttgattcctctccttagagacagcagctgttactggtttcttttatgatgtctctgttgagatattttgatagaaa

SEQ ID NO: 221405 - DNA, 201 bp, Homo sapiens
atcgcttgaacccgggcggcagaggttgcagtgagccgagatcgtgccactgcactccagcctgggccacaagagcgaaactccgtcgcaaaaacataccaaaacaaacaaacaaacaaacaaaaaaacatatgctcaagtaggccgttaaaaatcttgggcactgatctgagtttctttaatcgttatacaaagcctttc

SEQ ID NO: 221406 - DNA, 201 bp, Homo sapiens
gccctccactgaatacaaaatttagtctggctcagtgcatttgcatttttacatgaacaatagggcagagaaagcaatcagatatgctcttgtctcacgcragcctcagagggatgacatcgagatctgtctgtactttgtccgtaaggaattttcttgtgggcaaattgtgagggaggtatgtagctttttatctttgta

SEQ ID NO: 221407 - DNA, 201 bp, Homo sapiens
tggaatgactgacgaaccatactttttaaattttagtgaagatgtaattattagatggcattttaagcatgagatatcaggaaaatcattttttgtttagttaagtgaaaaacactagtgtaaattgtggctgtcaggtgagtggatagggctagctcactgcctcttgagtgttctgaggcatgtttacagatgaaaggg

SEQ ID NO: 221408 - DNA, 201 bp, Homo sapiens
aagggaccttgagcttgggaaaccctgtctgtaagaaaactcactcaacttttgccccaggagaaggtattttatacaaaaataatagaaaagatggtctkaaacaaaagctgttcagtgctgctgctcaccaaatgcacaaacctaagacccatggaaatctttctaccagcctatttcttcctccttccccactttctt

SEQ ID NO: 221409 - DNA, 201 bp, Homo sapiens
tcgcttgaacccgggcggcagaggttgcagtgagccgagatcgtgccactgcactccagcctgggccacaagagcgaaactccgtcgcaaaaacataccaaaacaaacaaacaaacaaacaaaaaaacatatgctcaagtaggccgttaaaaatcttgggcactgatctgagtttctttaatcgttatacaaagcctttcc

SEQ ID NO: 221410 - DNA, 201 bp, Homo sapiens
tcacctgtaatcccagcactttgggaggttgaggcggacagattgtttgagcccacaaattcaagaccagccagggcaacatggtgaggtcttgtctctaygaaaaatacaaaaattagccaggcatggtgacgcacacctgtagtcccagctacgtgggaggctgaggtgacagaagcacctgagcctgggaggttaaga

SEQ ID NO: 221411 - DNA, 201 bp, Homo sapiens
ccacgcccagctaatttttgtgttcttagtagagatggggttttaccatgttggccaggatggtctcgatctcttgacctcgtgatctccttgccttagcstcccaaagtgctgggattacaggcatgaaccaccacacccggccagaaactactttttacggctggagtttcagaactaatttagtaaaggattgaaaag

SEQ ID NO: 221412 - DNA, 201 bp, Homo sapiens
ttaaaagaaaaaagatacttggtagtttgataactagtaatgttattttaagttgtatgtttttagttactagtaagcagtttgaattctgtgaaactttygttcatgatctttactcattttttaagtgcatttatgatctcttcaggctattagcctcttgtcatcaaatgtgtgtaagatttaagactcatcactgtc

SEQ ID NO: 221413 - DNA, 201 bp, Homo sapiens
gtgaaggcttagggagaacttcattagggctggaaaagggtggccaatgtttgatttactgcagttgtgctttgcatatcggaaatgctggctaaataaayggtatcaaactaactctgaaagaacggcgccgcaaataacagcacccaattaaagaaccacaggattttagagattaaatgatctttttgagatccaagt

SEQ ID NO: 221414 - DNA, 201 bp, Homo sapiens; identical to SEQ ID NO: 40107

SEQ ID NO: 221415 - DNA, 201 bp, Homo sapiens
ggttcacactaagtgaaagctggcatccaagttgattcagacaaaagtgaaagtcaagaagttaatagtacattaattctccaaatgcatgccagcagagygtggcaggaaggtacacaagtcagcagatctgggttgtcctggttctcctattgactcgtgtgtgtgatgttaggtgggtgaatcttggctttgaatctc

SEQ ID NO: 221416 - DNA, 201 bp, Homo sapiens
cgcttgaacccgggcggcagaggttgcagtgagccgagatcgtgccactgcactccagcctgggccacaagagcgaaactccgtcgcaaaaacataccaaaacaaacaaacaaacaaacaaaaaaacatatgctcaagtaggccgttaaaaatcttgggcactgatctgagtttctttaatcgttatacaaagcctttcct

SEQ ID NO: 221417 - DNA, 201 bp, Homo sapiens
gctctatgactttgtgctgttaatcttcctcagtttcttcagttgtaaaatgggaatattcctttttacagagttcagtctttcaataaacatttgaagtsttactgtacgtcatgcactgctgagctctagttaacagtgtggataataatgatagtcatttgataactgttttctgtatgccaagcaccgagttaaata

SEQ ID NO: 221418 - DNA, 201 bp, Homo sapiens
tgtaatgtattctgaacagctttccttatcagtagacatttctatactgtcattttaatgctacatagcattccattgtgaggatgttctattacttatayaaccaggcccttctaacctttcacaagtagtgagatttcacattaaacctagcaagtatcaagaaaagtacaagaaaagtctacctaagttcctttccta

SEQ ID NO: 221419 - DNA, 201 bp, Homo sapiens
aagtatttctttatgaaaaattttttaaggctatgatttactaaactttcttaaaattttaaattttagggaagacatgtaaggaatttgcataagacagytatgcaaaatggagctggaggagctttatttgtggtaagtaattacttagatttctttggaaagaaaagacttggaaattggggtaaatccattgtaaaa

SEQ ID NO: 221420 - DNA, 201 bp, Homo sapiens
cagcttcttagtctcttattaacttctcttagctggatgcatttataatgcaaatgtctgatagaactgaaaagtgagcttcgttggatggtagtattgtktgaacaacagaagaaattcagaaaaagagtagagcccatgaaaagacaattaaggaatcctattggggagaatataaaactttaatttttgtcattttga

SEQ ID NO: 221421 - DNA, 201 bp, Homo sapiens
acacatatgttcacatttaaaattttgtgttttaatttcataaaggcttccaataattggtaatgttttggtaattctatcagaagatcttactctctaakgaagctggataacactttttgttgtttgggtttttttggtcctaaaggtacttctcttattctttaaatggtcctttgtaaatttttaaattctgctaac

SEQ ID NO: 221422 - DNA, 201 bp, Homo sapiens
taataataataataaaaaaccacagcacacccactacaaaccagctgtcagtgtgaaaataaagtgaaacagcttaacatttctaaagactagctggggcyaggcgtgatgggtcacgcctggaatcccagcacttagggaggccaaggcaggaggatcacttgaagtcaggagttcaagaccagcctggccaacacggtg

SEQ ID NO: 221423 - DNA, 201 bp, Homo sapiens
aaccacttctgggatgaggacagggcccttgagagaaggtggtgtttggctgggccaccgaaaacccctcgcccctgccagcacactcggtctcctctctsgtcgaacagagctctgcctgtggtcctgggtcccagccctgaaacccacaggtccagcggtggccagggacacaggcccacccctgcaagccagcagaca

SEQ ID NO: 221424 - DNA, 201 bp, Homo sapiens
gacatgaaaactctggctccaaaaatagcattttctttgtgcaaataaaaacgtgtgtatcaagtatgatgttccccccaacgtggacacactcggttccycacaaagccaagcccgctgcagctgccacatctgtggacacactcggttcctcacaaagccaagcccgctgcagctgccacatcggtggacacactcggt

SEQ ID NO: 221425 - DNA, 201 bp, Homo sapiens
ggggatagaatgatacctacctcttagggttgttgtcagggttgagtacaaaagcctgtggatcagtgcctggctcatggtaaatgcatgtcagtgttagmtagtgtttttattcagtctcaaaatgtttaataaatgccttctatgagccagacaccatggatcagcagtacccgtgacagatgagggtctgcttgcatg

SEQ ID NO: 221426 - DNA, 201 bp, Homo sapiens
ggtcagcatgacctggaactgtccgctggtccctttcagtaacctgaagctttcaccgtagacgtgctgtattgcccagaatccatcgtgtcgctggtcgsggtcctgcggaggctggctgcctaccgggagcaccagcgggctcctcaagtctacgtggcccttatcgtccgcaacccagagacgtgccagctgttcacc

SEQ ID NO: 221427 - DNA, 201 bp, Homo sapiens; identical to SEQ ID NO: 40114

SEQ ID NO: 221428 - DNA, 201 bp, Homo sapiens
ggttctcctttttcacccaagcaattgcctttccatctaatggcccaaatggtcaaatggcatctactagtctcatatgactgctgcctctctggcctcgmcctgctgctgaggtcagcatgacctggaactgtccgctggtccctttcagtaacctgaagctttcaccgtagacgtgctgtattgcccagaatccatcgt

SEQ ID NO: 221429 - DNA, 201 bp, Homo sapiens
tgcagctttctctactaagggttctcctttttcacccaagcaattgcctttccatctaatggcccaaatggtcaaatggcatctactagtctcatatgacygctgcctctctggcctcgccctgctgctgaggtcagcatgacctggaactgtccgctggtccctttcagtaacctgaagctttcaccgtagacgtgctgt

SEQ ID NO: 221430 - DNA, 201 bp, Homo sapiens; identical to SEQ ID NO: 40116

SEQ ID NO: 221431 - DNA, 201 bp, Homo sapiens
cacttctgggatgaggacagggcccttgagagaaggtggtgtttggctgggccaccgaaaacccctcgcccctgccagcacactcggtctcctctctggtygaacagagctctgcctgtggtcctgggtcccagccctgaaacccacaggtccagcggtggccagggacacaggcccacccctgcaagccagcagacaaat

SEQ ID NO: 221432 - DNA, 201 bp, Homo sapiens
tgtgcaaataaaaacgtgtgtatcaagtatgatgttccccccaacgtggacacactcggttcctcacaaagccaagcccgctgcagctgccacatctgtgracacactcggttcctcacaaagccaagcccgctgcagctgccacatcggtggacacactcggttcctcacaaagccaagcccgctgcagctgccacatcc

SEQ ID NO: 221433 - DNA, 201 bp, Homo sapiens
catcaccacatggctctgtcccagagccatgcctctgtctttcagagaccacaggaggaaaacaaccacttctgggatgaggacagggcccttgagagaargtggtgtttggctgggccaccgaaaacccctcgcccctgccagcacactcggtctcctctctggtcgaacagagctctgcctgtggtcctgggtcccagc

SEQ ID NO: 221434 - DNA, 201 bp, Homo sapiens
gtgtatattgttgctgccctgtgaatcttaagatggggccagccatggagaagcagcctgctgacagccacagcctgcagcatgggccgccctcacagttstgcctgggctcacttaaaagcaccttttgttttcctcctctctgtcatggtcatgtggcagctctcacggaatccttgtctcctgccctagactacacct

SEQ ID NO: 221435 - DNA, 201 bp, Homo sapiens
ttccaaatcaggaaccacaaactgccctctgataagacatcggctatctaagcttgtgggtgctccctttctgccagcagttctggttcttaagaaaatcrccatcaatcagacatgaaaactctggctccaaaaatagcattttctttgtgcaaataaaaacgtgtgtatcaagtatgatgttccccccaacgtggacac

SEQ ID NO: 221436 - DNA, 201 bp, Homo sapiens
gccctcttgttggagacaggcatactcccattacagtcatcaccacatggctctgtcccagagccatgcctctgtctttcagagaccacaggaggaaaacmaccacttctgggatgaggacagggcccttgagagaaggtggtgtttggctgggccaccgaaaacccctcgcccctgccagcacactcggtctcctctctg

SEQ ID NO: 221437 - DNA, 201 bp, Homo sapiens
cagcagtcacccagtgtatattgttgctgccctgtgaatcttaagatggggccagccatggagaagcagcctgctgacagccacagcctgcagcatgggcygccctcacagttctgcctgggctcacttaaaagcaccttttgttttcctcctctctgtcatggtcatgtggcagctctcacggaatccttgtctcctgcc

SEQ ID NO: 221438 - DNA, 201 bp, Homo sapiens
agggtgacagtggcccagctggactgggacgtcgcgacggtccatcagctctctgccatccagccagatgttgtcattgcagcaggcaatgcccagccccrggcactctgtgcaggcggtgtccttgcagctctacccagctctgggctctgggaaaagggaacaatggacgctgtcgggcatggacatgatggggcttcc

SEQ ID NO: 221439 - DNA, 201 bp, Homo sapiens
tctgtggtcaccagcaggtctgccctgtgccaccaggagagggcagcagtcacccagtgtatattgttgctgccctgtgaatcttaagatggggccagccmtggagaagcagcctgctgacagccacagcctgcagcatgggccgccctcacagttctgcctgggctcacttaaaagcaccttttgttttcctcctctctg

SEQ ID NO: 221440 - DNA, 201 bp, Homo sapiens
tcaatggcctctcattagaggcagacatctctgccaacttagacagccccagggtgacagtggcccagctggactgggacgtcgcgacggtccatcagctytctgccatccagccagatgttgtcattgcagcaggcaatgcccagccccgggcactctgtgcaggcggtgtccttgcagctctacccagctctgggctct

SEQ ID NO: 221441 - DNA, 201 bp, Homo sapiens
cccaaaagggtgcatctgtggtcaccagcaggtctgccctgtgccaccaggagagggcagcagtcacccagtgtatattgttgctgccctgtgaatcttargatggggccagccatggagaagcagcctgctgacagccacagcctgcagcatgggccgccctcacagttctgcctgggctcacttaaaagcaccttttgt

SEQ ID NO: 221442 - DNA, 201 bp, Homo sapiens
ctgtattgcccagaatccatcgtgtcgctggtcgcggtcctgcggaggctggctgcctaccgggagcaccagcgggctcctcaagtctacgtggcccttaycgtccgcaacccagagacgtgccagctgttcaccaccgagctatgtgagcccacacgcccacccgggcctgcatggtccccgagctgtccctgcgggact

SEQ ID NO: 221443 - DNA, 201 bp, Homo sapiens
atgtcaacagttagctgcttctcattgctgagtggcgattggtcctgtcatggtttattcagccatgtggtggatggctacttgtcttctaagccacttgycttctgattgctggactgactctctcgccctctcttggtgcagccctcgggaggctcagtcacactctccgagagcacagccatcatctcccacggcatc

SEQ ID NO: 221444 - DNA, 201 bp, Homo sapiens
tctccaatacctgctttctccctaatcctccccaaaagggtgcatctgtggtcaccagcaggtctgccctgtgccaccaggagagggcagcagtcacccastgtatattgttgctgccctgtgaatcttaagatggggccagccatggagaagcagcctgctgacagccacagcctgcagcatgggccgccctcacagttc

SEQ ID NO: 221445 - DNA, 201 bp, Homo sapiens
gctgttggcatgtcaacagttagctgcttctcattgctgagtggcgattggtcctgtcatggtttattcagccatgtggtggatggctacttgtcttctawgccacttgccttctgattgctggactgactctctcgccctctcttggtgcagccctcgggaggctcagtcacactctccgagagcacagccatcatctcc

SEQ ID NO: 221446 - DNA, 201 bp, Homo sapiens
acctggcctaggatggattttaaagatgggcccgaaagtgcagggtttgacataaggatgtcgagaggccattcctcagtaggcagtagcagacctatctkagtgaaagggccacacttttagcaagtaaacaatcccctgcttctccaatacctgctttctccctaatcctccccaaaagggtgcatctgtggtcaccag

SEQ ID NO: 221447 - DNA, 201 bp, Homo sapiens
ccgcacctggcctaggatggattttaaagatgggcccgaaagtgcagggtttgacataaggatgtcgagaggccattcctcagtaggcagtagcagacctrtcttagtgaaagggccacacttttagcaagtaaacaatcccctgcttctccaatacctgctttctccctaatcctccccaaaagggtgcatctgtggtca

SEQ ID NO: 221448 - DNA, 201 bp, Homo sapiens
gcacagtctcggctccctgaaacctctgcctcctgggttcaagcaactctcgtgcctagcctcctaagaagctgggactacaggcacatgccaccatgccyggctaatttttgtatttttggtagagacagagtttcaccatgttggccaggctgatctcgaactcctgacctcaggtgatccacctgcctcggcctccca

SEQ ID NO: 221449 - DNA, 201 bp, Homo sapiens
agacagagtctcactgtgttgcccaggctggattaccgtggcacagtctcggctccctgaaacctctgcctcctgggttcaagcaactctcgtgcctagcytcctaagaagctgggactacaggcacatgccaccatgcctggctaatttttgtatttttggtagagacagagtttcaccatgttggccaggctgatctcg

SEQ ID NO: 221450 - DNA, 201 bp, Homo sapiens
gatcaccctgcatcctgggtcttcaccttcgaagggccatgagcccttctgaaaagacaaagcaatagactccctcccagagagaagtgcaccagaagaayacattttccatacaaactctggaggcagacatcctccacctccacccagccagcccatcctaggggccccggtgaagaattcttgtgctagaggtgaacc

SEQ ID NO: 221451 - DNA, 201 bp, Homo sapiens
cccgcccacccctgttccccctgcttaaggccccgcctcctccctgagcctcctgctggcctctcacctagaagcgggggtagtcctcggcctccagccarggggtgcagacctggatgtgctggaaatgcttctggtggatgaggcggctgtaatactccctcggaggccctttgccttcacagagaagagcagatactg

SEQ ID NO: 221452 - DNA, 201 bp, Homo sapiens; identical to SEQ ID NO: 40111

SEQ ID NO: 221453 - DNA, 201 bp, Homo sapiens; identical to SEQ ID NO: 40112

SEQ ID NO: 221454 - DNA, 201 bp, Homo sapiens; identical to SEQ ID NO: 40113

SEQ ID NO: 221455 - DNA, 201 bp, Homo sapiens; identical to SEQ ID NO: 40115

SEQ ID NO: 221456 - DNA, 201 bp, Homo sapiens; identical to SEQ ID NO: 40117

SEQ ID NO: 221457 - DNA, 201 bp, Homo sapiens
ctgtgtggcctgagatgagtgtctttcatgccacgtgacacccttgaggcccgttcaagctgttggcatgtcaacagttagctgcttctcattgctgagtrgcgattggtcctgtcatggtttattcagccatgtggtggatggctacttgtcttctaagccacttgccttctgattgctggactgactctctcgccctct

SEQ ID NO: 221458 - DNA, 201 bp, Homo sapiens
accccgccaggcctgtcctagcagccccacacaatacgctcatgtcctgtccccaaacactgccatcttcaaacacatgtcctctgtttccaggccgggcygggatcagatgggaagtggaacctcgtcatgaccagaaactgtttccctacgaagagcacttggagatggcaatgctgaacctcacactgtaggactcac

SEQ ID NO: 221459 - DNA, 201 bp, Homo sapiens
gaattccgttgtctcaggaatgttcgatgaatggaatcctgtgtggcctgagatgagtgtctttcatgccacgtgacacccttgaggcccgttcaagctgwtggcatgtcaacagttagctgcttctcattgctgagtggcgattggtcctgtcatggtttattcagccatgtggtggatggctacttgtcttctaagcca

SEQ ID NO: 221460 - DNA, 201 bp, Homo sapiens
actgggttccacgacaaagtcctgcacaacctcgcacaggaggctggccgggcgcggggctcaggcctgtcaacccagcactttaggaggctaaggcaggrggacttcttgacaccacgatttcaagaccaacctgggcaacatagtgggaccccatctccacaaaacattcagaaactagccgggcatggttgcgcacac

SEQ ID NO: 221461 - DNA, 201 bp, Homo sapiens
gccaccactgacctgtgctccatcaccagaattccgttgtctcaggaatgttcgatgaatggaatcctgtgtggcctgagatgagtgtctttcatgccacrtgacacccttgaggcccgttcaagctgttggcatgtcaacagttagctgcttctcattgctgagtggcgattggtcctgtcatggtttattcagccatgt

SEQ ID NO: 221462 - DNA, 201 bp, Homo sapiens
gagcacagcccctcctggcagccatgtgcacagatgcacgcgcagcagcctctgcctgcacacagagacgtgggtccaatgcctgtccacgtggggcagcrcgttaactacagagccaacaaacaagccagcacacgaaggcatactgggttccacgacaaagtcctgcacaacctcgcacaggaggctggccgggcgcgg

SEQ ID NO: 221463 - DNA, 201 bp, Homo sapiens
ccaccccttcatagccacacctggcccctggccaccactgacctgtgctccatcaccagaattccgttgtctcaggaatgttcgatgaatggaatcctgtrtggcctgagatgagtgtctttcatgccacgtgacacccttgaggcccgttcaagctgttggcatgtcaacagttagctgcttctcattgctgagtggcga

SEQ ID NO: 221464 - DNA, 201 bp, Homo sapiens
tctcttctagacctaaatgggtccttactttgcccagggtggggtttggactcaagagcatctgcatgcaggtgagaggcaggatcaccaccccgcccagscacagcctgactttggccttgagggccaagtgcagatcaccctgcatcctgggtcttcaccttcgaagggccatgagcccttctgaaaagacaaagcaat

SEQ ID NO: 221465 - DNA, 201 bp, Homo sapiens
caagcaacccctgagctcccacagactgcagctcggccacctggctctcgtgcctccacactacacccaagccccccattgccaccagcctttgccccagmtcaccctgagcacagcccctcctggcagccatgtgcacagatgcacgcgcagcagcctctgcctgcacacagagacgtgggtccaatgcctgtccacgtg

SEQ ID NO: 221466 - DNA, 201 bp, Homo sapiens
gaatcatcacaaggcagccaccccttcatagccacacctggcccctggccaccactgacctgtgctccatcaccagaattccgttgtctcaggaatgttcratgaatggaatcctgtgtggcctgagatgagtgtctttcatgccacgtgacacccttgaggcccgttcaagctgttggcatgtcaacagttagctgcttc

SEQ ID NO: 221467 - DNA, 201 bp, Homo sapiens
gcaaaacagcttctagcatttggtagatgctcagagactttcttttttgcattcatgagacctgtcctgcccactcctgtctcttctagacctaaatgggyccttactttgcccagggtggggtttggactcaagagcatctgcatgcaggtgagaggcaggatcaccaccccgcccaggcacagcctgactttggccttg

SEQ ID NO: 221468 - DNA, 201 bp, Homo sapiens
gctggtccctttcagtaacctgaagctttcaccgtagacgtgctgtattgcccagaatccatcgtgtcgctggtcgcggtcctgcggaggctggctgcctrccgggagcaccagcgggctcctcaagtctacgtggcccttatcgtccgcaacccagagacgtgccagctgttcaccaccgagctatgtgagcccacacgc

SEQ ID NO: 221469 - DNA, 201 bp, Homo sapiens
catagatacagaaaaccacaaaggaaaaacatagcatattgaatcatcacaaggcagccaccccttcatagccacacctggcccctggccaccactgaccwgtgctccatcaccagaattccgttgtctcaggaatgttcgatgaatggaatcctgtgtggcctgagatgagtgtctttcatgccacgtgacacccttgag

SEQ ID NO: 221470 - DNA, 201 bp, Homo sapiens
ctcaaaagaaaataagataaaacatagatacagaaaaccacaaaggaaaaacatagcatattgaatcatcacaaggcagccaccccttcatagccacaccyggcccctggccaccactgacctgtgctccatcaccagaattccgttgtctcaggaatgttcgatgaatggaatcctgtgtggcctgagatgagtgtcttt

SEQ ID NO: 221471 - DNA, 201 bp, Homo sapiens
aggtggcatttgaactggggcctgagtggtgaagcagccagccatgggaagggcttgggggaacaggatatgcacaggtcctgtggtggaaacaagccagytgtggttgaggaacaacagcaaggcagccagtgtggctggagtggagtgagcagggttggccaggggtgagggagaacaggccagagagagggattagga

SEQ ID NO: 221472 - DNA, 201 bp, Homo sapiens
tccatcccaaatctcccctccaaacttggtgaaaatcatctgaccatttttacagattagaacgaaagcaaacaagctctcactctgtctgaccccagcamgaggctgtccacacagagcttttggacaagctgtacgaggacctggcagagaccctgatggccaaggagtccacccagggccacccgagctatttgctgg

SEQ ID NO: 221473 - DNA, 201 bp, Homo sapiens
gggaaatggtgaatggagcaactggggagaagagtcaccaaagtcggggaatcagggaagccttccccaaagaggtggcatttgaactggggcctgagtgktgaagcagccagccatgggaagggcttgggggaacaggatatgcacaggtcctgtggtggaaacaagccagctgtggttgaggaacaacagcaaggcagc

SEQ ID NO: 221474 - DNA, 201 bp, Homo sapiens
actgctgcctctctggcctcgccctgctgctgaggtcagcatgacctggaactgtccgctggtccctttcagtaacctgaagctttcaccgtagacgtgcygtattgcccagaatccatcgtgtcgctggtcgcggtcctgcggaggctggctgcctaccgggagcaccagcgggctcctcaagtctacgtggcccttatc

SEQ ID NO: 221475 - DNA, 201 bp, Homo sapiens
aggctgtcctcgaactcctgggctcaagcagtcctcccatgtcagcctctagagtagctgggactattcggcacacaccaccatgcccaatgaagtgaatrttttacatgccagctggccggtattacaccattccatcccaaatctcccctccaaacttggtgaaaatcatctgaccatttttacagattagaacgaaag

SEQ ID NO: 221476 - DNA, 201 bp, Homo sapiens
aagcctgtggatcagtgcctggctcatggtaaatgcatgtcagtgttagatagtgtttttattcagtctcaaaatgtttaataaatgccttctatgagccwgacaccatggatcagcagtacccgtgacagatgagggtctgcttgcatgggagagccagagaataaacaaagaaatgaagaaacaagaaaagaccagatg

SEQ ID NO: 221477 - DNA, 201 bp, Homo sapiens
tgactgctgcctctctggcctcgccctgctgctgaggtcagcatgacctggaactgtccgctggtccctttcagtaacctgaagctttcaccgtagacgtrctgtattgcccagaatccatcgtgtcgctggtcgcggtcctgcggaggctggctgcctaccgggagcaccagcgggctcctcaagtctacgtggccctta

SEQ ID NO: 221478 - DNA, 201 bp, Homo sapiens
gccagccatggagaagcagcctgctgacagccacagcctgcagcatgggccgccctcacagttctgcctgggctcacttaaaagcaccttttgttttcctsctctctgtcatggtcatgtggcagctctcacggaatccttgtctcctgccctagactacacctaaccctaccctctcaacacctctcgttgaaggccctc

SEQ ID NO: 221479 - DNA, 201 bp, Homo sapiens
tgggtactattattaccactcacatttgaccagagggattgtttgattagggtgcagtagttgagagttcagacccaggagacagcctgcctgcttcgaawcctggcccaacccctggccctgtgtgaccttgggcaagtgactgcatctctctgtgctgttgttttcttattaataaaatgggggatagaatgataccta

SEQ ID NO: 221480 - DNA, 201 bp, Homo sapiens
gggctcaccctcaacacccacgaggtgggtactattattaccactcacatttgaccagagggattgtttgattagggtgcagtagttgagagttcagaccyaggagacagcctgcctgcttcgaatcctggcccaacccctggccctgtgtgaccttgggcaagtgactgcatctctctgtgctgttgttttcttattaat

SEQ ID NO: 221481 - DNA, 201 bp, Homo sapiens
cgcctcccagtccctgggtccctcccgacaccggcccctccctaagctccgcctcccagggcccgcctcctgagcgcagccagcagcccggactcggcccsgcctcccggaccctgggcccctccccacgtaggcccgtcctaagctccgcctcccagagtccgagcagcgcctggccacgtgctacgacatagtcaacgc

SEQ ID NO: 221482 - DNA, 201 bp, Homo sapiens
tgttcccacgttagtttgctaaggatagtggcctccagctccattcatgttcctgcaaaggacatgatcttgttcttttttatggctgcatagtagtccayggtgtatctgtaccacattctctttattcagcctaccattgataggcatttaggatgattccatgtctttgctattgtgaatagagctgcagtgaacata

SEQ ID NO: 221483 - DNA, 201 bp, Homo sapiens
atagagctgcagtgaacataggcatgcatgtgtctttatgatggaataatttatattcctttaggtatatacccagcaatggggttgctgggtcaaatggyatttcttttgttaggtctttgaggaattgctgcactgtcttccacagtggttgaactgatttacactcccaccaatggtgtataagctttctttttttct

SEQ ID NO: 221484 - DNA, 201 bp, Homo sapiens
taaggactaggatggtcctctttttggctaagtgaccttgagcaagctatttaatctctgagttctggtttccttatctctaaaatggatgtattgcatgcccccccccaccacacacacacacattcagatttttgagaccaaataaataatgaacgtgacattgttgaagtgtgggtagtacagtcggcataagatgat

SEQ ID NO: 221485 - DNA, 201 bp, Homo sapiens
accgtaatattttaccaaacaaatactgtcaattgaaaggagcatttaacagagcatgcatgtcagatttatttgaggaaatttgaaaacaaatacgtatrtacgtctctcagcttccattgatgggagtagaagaaggaagtaaatgatatcaaagacacttagaaattatccggtaaaccagcaattccaatgaaatct

SEQ ID NO: 221486 - DNA, 201 bp, Homo sapiens
gtgaccttgagcaagctatttaatctctgagttctggtttccttatctctaaaatggatgtattgcatgcccccccccaccacacacacacacattcagawttttgagaccaaataaataatgaacgtgacattgttgaagtgtgggtagtacagtcggcataagatgattgttatcatatgccccactctacaaaaacta

SEQ ID NO: 221487 - DNA, 201 bp, Homo sapiens
gatgtattgcatgcccccccccaccacacacacacacattcagatttttgagaccaaataaataatgaacgtgacattgttgaagtgtgggtagtacagtyggcataagatgattgttatcatatgccccactctacaaaaactacctccccaatacgcatgtggagtaggagagcccaggccctgccacatgatggacgt

SEQ ID NO: 221488 - DNA, 201 bp, Homo sapiens
tattgcatgcccccccccaccacacacacacacattcagatttttgagaccaaataaataatgaacgtgacattgttgaagtgtgggtagtacagtcggcrtaagatgattgttatcatatgccccactctacaaaaactacctccccaatacgcatgtggagtaggagagcccaggccctgccacatgatggacgtcatt

SEQ ID NO: 221489 - DNA, 201 bp, Homo sapiens
tttgggtgtcagagacagatttcactgaaataaaacaaacttacagaaaagttgtataaatcctaagtgtacaacttgatatgtttttcctaaggttacaracctatatgattagcactcatatcaatcaacacagtactagcagctttcccagaagctccttgtattttctcctagtcttttgatccaaaggtaaccact

SEQ ID NO: 221490 - DNA, 201 bp, Homo sapiens
tcatatcaatcaacacagtactagcagctttcccagaagctccttgtattttctcctagtcttttgatccaaaggtaaccactgtcctgatttctaacagygtaggttactttttaatttgacataaatgcaaataaaaacactcactcacctgtgcttggtttcattctctaagcaataggtttaagatttacccacatt

SEQ ID NO: 221491 - DNA, 201 bp, Homo sapiens
aggggtaagccaccgcgcccagccatacttggcattttctgtcgttttcactttagctgttgtggtgaatatgctgcattatcatgttgtgagttgaactyacattctctcaatgaccagtggatctgagcaccttttcctaggctgagtagccacatggacatcttcttttgtgcagagccctttaaaatcgttttgccc

SEQ ID NO: 221492 - DNA, 201 bp, Homo sapiens
ccactttcagaggcaaatgttgaggctcagacagagtgagcaacaggtccaaggggatgcagctgggcagcagcagggccaggactgtacccagagctgaygccacagcctgtgctccgaccacagcactccctgctttgcagatgattgtcattgaggcttgctcccttaacgaaattaccagcgatcatctctgactgt

SEQ ID NO: 221493 - DNA, 201 bp, Homo sapiens
tcccttccaaagctcagagtgacctaccttggctttccctcccttcccctcctgcctgctactgtccagcacacacgaagggcacagacctgctgcacccycgcagcagtgcaaggccagctctagaggccatctcaatactgtatatgctttggctccaacctgaactcaatgccctgacgcttgggtcagtcccttccc

SEQ ID NO: 221494 - DNA, 201 bp, Homo sapiens
tagtagagatggggtttcactgtgttggccaggctggtttcaaattcctgacctcaagtgatccacccatctgggcctcccaaagtgctaggattaaaggsgtaagccaccgcgcccagccatacttggcattttctgtcgttttcactttagctgttgtggtgaatatgctgcattatcatgttgtgagttgaactcaca

SEQ ID NO: 221495 - DNA, 201 bp, Homo sapiens
gaaggggcggccgggcagaggcaccccccacctccctcccggacggggcggctggccgggcgggggctgccccccccacctccctcccggagatttttttwaattttattatttttatttatttttgggatgaggtcttgctctgttgcccaggctagagtgcagtggtgtgatcttggctcactgcaaccttcacctcct

SEQ ID NO: 221496 - DNA, 201 bp, Homo sapiens
atttttttaaattttattatttttatttatttttgggatgaggtcttgctctgttgcccaggctagagtgcagtggtgtgatcttggctcactgcaacctycacctcctgggttcaagcgattcttctgcctcagccttaccttgaccaggctggtcttgaactcctgacctcgtgatccacccgccttggcctcccaaag

SEQ ID NO: 221497 - DNA, 201 bp, Homo sapiens
ctactatctattgcgaggcagaaagcagcaaagtaaaacttgtgcttgcttaaacatgttttcaaaatctttatgacattttatatatagaaaaagggagmaaaatgatataagcttatgaaccagagcagtggtcagaaacagtaaagtcaggagaaggaggcagtttcggggacaaagatgaggtgttctgttttagat

SEQ ID NO: 221498 - DNA, 201 bp, Homo sapiens
ccacctccacccccaaatctggctattactagttgtggtccctctgggtctgagagaacatagataaggtaggcattaatatactttatggaatcttagayttgattgcgttcatgctgcctttgcctcaccacctggtgcccaggttgaataggttaagcccactctcacatctcagaatcccccttcactagttcagcc

SEQ ID NO: 221499 - DNA, 201 bp, Homo sapiens
ctcatctctgaatggagataacagaatttccattgtgaggttgttaagggattaaacgacaggacaggcagtgtgactcaggataaataggagcgataggygagtctttcctattactatgtagcaatatgttattattgttagttgtttatccttgggtatgttgttattattttttattcttttttttaccttcagcca

SEQ ID NO: 221500 - DNA, 201 bp, Homo sapiens
  misc_feature (1)...(201): n = A,T,C or G
ctgaagcttaagcccctgagccctatcccttttatagccatgactttaaatatgaaaaccccacctctgaaccccctttatagcatgtcctcattctccanctgtgctcccatccctcaagacctgtcatctctcttgtcccaggcagtgagcacaggtggagggggccatgtgcagttgctccattgggcagcggctcag

SEQ ID NO: 221501 - DNA, 201 bp, Homo sapiens
cctggctgcctgtggcctgctgggactcccacgtgctgtccatacccatgatgctttaggccctgggagattattacccagtaggatgtcctgaaggcacrtcttgtgaggtctatccagatatactgaaagcattgggcagatgtcacagaaagaggaggagaggtcagaggccgggcctcctgctctccgaggctcagc

SEQ ID NO: 221502 - DNA, 201 bp, Homo sapiens
ttgaggcttgctcccttaacgaaattaccagcgatcatctctgactgttcatatctccttttgctgctttatttctattcttatccctaacatactatgcrtaactttaatttttaatgattctatatatgctctttcttctctattagaatctaaattctgagagggcggggatttttgttacttttgtatacccacgta

SEQ ID NO: 221503 - DNA, 201 bp, Homo sapiens
gttcctcttctagcttgactggtatgcctggatccctaatggcccgtgctcagtgaggatgccctcacccaccaccaaacaagatgcgacaaggcccacartgatgaggtcactccctgatgtctggcaatcctatgttcaaataagcatcatgtggcttctgagctggcggcaggtggacgtggtgagaggggacctctg

SEQ ID NO: 221504 - DNA, 201 bp, Homo sapiens
tccttcagcttctctcccttcatccttcagagcaacaccttgagtcccaccctttgcctgtgtgggaaaacgcaaacacccactggccaggccccggggaygcccatatcaataaattaacccctgccttaaaggggagtcttgccctggaggacctggggctacaccaccttacccatcccaccccaccctttgggccct

SEQ ID NO: 221505 - DNA, 201 bp, Homo sapiens
ctcccaaagtgctgggattacaggtgtgtgccaccacgcccagccactttctcgagttttctaggttctttcttttaggcaacccatgccccaaaagaccrttatttttctccttggctctcttctccccatgaaatagccacattagagattgtacaatacatatttacacataaactttaacctctcattccccatttc

SEQ ID NO: 221506 - DNA, 201 bp, Homo sapiens
taggtaaacttttgtcacaggggtttgttatatagatgattttgtcacccaggtattaagcctagtacccattagttatttttcctgatcctctccctcckcccatcctccactttcccataggccccagtgtctgttgttcccctctatgtgtccatgtgttcttgtcatttagctcccactttaagtatttgttttgtt

SEQ ID NO: 221507 - DNA, 201 bp, Homo sapiens
ttcatccccgctatgttcaattcaaatttatttaaccatggaacaattattttatttttatttttattttaccgtaatattttaccaaacaaatactgtcrattgaaaggagcatttaacagagcatgcatgtcagatttatttgaggaaatttgaaaacaaatacgtatatacgtctctcagcttccattgatgggagta

SEQ ID NO: 221508 - DNA, 201 bp, Homo sapiens
tcatccccgctatgttcaattcaaatttatttaaccatggaacaattattttatttttatttttattttaccgtaatattttaccaaacaaatactgtcawttgaaaggagcatttaacagagcatgcatgtcagatttatttgaggaaatttgaaaacaaatacgtatatacgtctctcagcttccattgatgggagtag

SEQ ID NO: 221509 - DNA, 201 bp, Homo sapiens
tggttttttcatccccgctatgttcaattcaaatttatttaaccatggaacaattattttatttttatttttattttaccgtaatattttaccaaacaaawactgtcaattgaaaggagcatttaacagagcatgcatgtcagatttatttgaggaaatttgaaaacaaatacgtatatacgtctctcagcttccattgat

SEQ ID NO: 221510 - DNA, 201 bp, Homo sapiens
gtcggcataagatgattgttatcatatgccccactctacaaaaactacctccccaatacgcatgtggagtaggagagcccaggccctgccacatgatggamgtcattaaattctctgatgcccatctcacatgtaaattgagtggaatggaatagttgatttccagtttccttactgtctttgacatgagtctaggacctc

SEQ ID NO: 221511 - DNA, 201 bp, Homo sapiens
tgtatactttttgaataaatgaataaacactcattaattctaaggcttgggtgtcccaggacatgaggatttatttttatatcccctctggggctgcagaytgtaaacttggctcattcttctcctaggtttccctgtctccttccagtctcgagctcagctctgccgtttcctcgccatgtgaatcttcacatgcacccc

SEQ ID NO: 221512 - DNA, 201 bp, Homo sapiens
gcgagcagcccagcgggtttctcatacctgactaaggagagaggtagataaagacattagcatggcagtgacaggaggatggaagagaaaaatcaaatacrtggtgatgggggaagagtagctgcagcatgcctgtgtccaagatggaatggagatgtaagcttcctcaacacctaggagcctacggggggcatgttgtac

SEQ ID NO: 221513 - DNA, 201 bp, Homo sapiens
gtttcagggtcctcatctctgaatggagataacagaatttccattgtgaggttgttaagggattaaacgacaggacaggcagtgtgactcaggataaataggagcgataggcgagtctttcctattactatgtagcaatatgttattattgttagttgtttatccttgggtatgttgttattattttttattctttttttt

SEQ ID NO: 221514 - DNA, 201 bp, Homo sapiens
gatgtcacagaaagaggaggagaggtcagaggccgggcctcctgctctccgaggctcagcgccttctcccctgggcaggtgtgtggagatcgtccacctcytccaccaaagggatgacacggtgagggtggaccctgagctgcaggcctgggatcaggagatcatggaggtggggctgtgccaggcccaggaccgaggtaa

SEQ ID NO: 221515 - DNA, 201 bp, Homo sapiens
gactcttaaggagcatgctgccttcaagcatctgtttaacaaagcacatcttgcaccgcccttaatccatttaaccctgagtggacacagcacatgtttcrgagagcaccgggttgggggtaaggtcatagatcaacaggatcccaaggcagaagaacttttcttagtacagaacaaaatggagtctcctatgtccacttc

SEQ ID NO: 221516 - DNA, 201 bp, Homo sapiens
gctctagcccacaagtcagtggactgtggctgcaccacggacagccccagtctgtgtgtcacccccatcttccctagctctgagggtgaatgtgtggacayggtgaaagcagctgttctcttctctgctcagtgtgcctcaaaaattgacatcaaatgcagttgtttttcaacatatttatgtgaagtgagttttttttgc

SEQ ID NO: 221517 - DNA, 201 bp, Homo sapiens
cacaaggtaaaagttaatgtattatggggtgagcacaggtacctccctccacccttgaggccttagggttgccagggaccgccagactccagagttccttkggaaaaccatgatgcagagcaggggattataggtagggtgagacaggcttacctgggagcgtgcccgggctgaacaccagcctccatctctgaaaaggcc

SEQ ID NO: 221518 - DNA, 201 bp, Homo sapiens
acttaagagatattttatgtttttgcaacttgccagcaacaaaaaaagctttttttaaacgctggagagggttgcaataaagatgctgccattaggagtcyggtcaggaagcccgggccgcccggggctccccctcaggcattatgctgatgcttcctgcctgccgggcagtgctgagggaatggcctgaaggtctgctgc

SEQ ID NO: 221519 - DNA, 201 bp, Homo sapiens
tgagttcgtttttaggtgccctgactttgtcatcatgatgagggagacaccaagttgttaagacagacagaaatgggcaagagctgggcgcggtggcttaygcctgttatcccagcacttttggaggcagcagtgggaggatcgcttgagcccaggagtttgagatctgcctggctagcatagcaagaccctgtctcttca

SEQ ID NO: 221520 - DNA, 201 bp, Homo sapiens
tgtcggaggtgagctgtgaagggctcgccctgggatttgggatttggagtttcccaagggccctggggtttgggatgtgttctgtgagcagcgggaagccrttggatcattttctgcagtacagtgatgtgatgtaattggtgtctgaaaattccccatccagctgctgcgtagaggctgcaagtgtggacgagtggaata

SEQ ID NO: 221521 - DNA, 201 bp, Homo sapiens
tttgactttatccacatagtgacagggcgccaccaagtgctctgctggggagacgcatggtcaccgtgaccatgttttaggaagtgcgtctggctgtgcckggagagtgggtctgagtgcaggaagcagatctggtctagctccaggaggtgggacttgtggatggaagcactggatcttttcaacagggcaaccagaaaa

SEQ ID NO: 221522 - DNA, 201 bp, Homo sapiens
gaggaagtgcaaggcagtatccttttgaggatgtgactcggaagttgcaggtcttgctttcagtcccatcctctggggcagaacttggtgctgaggccacrcgtatccgcgtggtgtgcagattgcaaggcagctctgtgcttgctccaacttggaggttctgttcctaaaaggaagaaggggagactggacgtttggggt

SEQ ID NO: 221523 - DNA, 201 bp, Homo sapiens
gtggggtggtctgctccacaaagtcatccagggatccagctttgtcctccctcattgctccgaggtgtttcttcctgcatgggcagcaccacacctacttygtagcctgtggtgagggggaatgggacacgaggaagtgcaaggcagtatccttttgaggatgtgactcggaagttgcaggtcttgctttcagtcccatcc

SEQ ID NO: 221524 - DNA, 201 bp, Homo sapiens
accagtgagcttcgataaggtgacacaaaaggacatattacaaaatcttctagcatttagttaactgtgagctcagtgtgcagcagccaaggactctttaygcattcactcagcaggtgttcctggagacccccatgaggcagcccccatgcagggtgcaccatggcctgttggaggtggacagagacagagagggtaggg

SEQ ID NO: 221525 - DNA, 201 bp, Homo sapiens
catgttggccaggctggtctcaaactcctgacctcaagtgatccacccgcctcggcctcccagagtgttgggcttacaggtgtgagccaccacacctggcygattctgccactttctaaggtgactagaactcgagcaagttccttaacctctctgaatctcagtcctcatattgaaaacggggatgctgatgataataaa

SEQ ID NO: 221526 - DNA, 201 bp, Homo sapiens
ggtgttttgcagaaagtgctttaaggtgtaaaatgagagtttccatggaagaaaagggacacttggacctggattctggctgagagatttcctgggtgagyggagaatttgaaagtggtgacacagaactgggtccattgagtgcagtaatgtgataggatttgtttcccccgactttgggagtggctttattttgtcatg

SEQ ID NO: 221527 - DNA, 201 bp, Homo sapiens
gtgactttagaaaaattctgatggataaaatgcatagcagatagctgctgctagtctgaggcttctctcatttgtctggtattcttctgttccctacagtrcctgtctcacaatgctataaaatatcaccaaattcctccatatgggagaaaggccaaaaagaatcagtgaaaacctaaactggcccattcaggacaggcg

SEQ ID NO: 221528 - DNA, 201 bp, Homo sapiens
gcatgctactaagcatgctcgggtgaactttgctctatatttcactggattataacactgaactctattaacatgctcttggcatcctggctgcccgcccrtgtagctcagtcaggctgcaactctgcgtcctcccagcctgcaggctgctagctcaagcaccaactccactagggcaagggctttgtccagggccccttt

SEQ ID NO: 221529 - DNA, 201 bp, Homo sapiens
aaatggagccagttctgtatgttagtgtttttgttcacgtggccaggagctttaaataacctcattctgctttgcgctcacatccctcatctttcaggctraaagtactccagtcgcagtcacgatttggttgtagtgggattgggtgagcagcccgaggccaggtgcttgttcccctcagagcacccggcacacctcggt

SEQ ID NO: 221530 - DNA, 201 bp, Homo sapiens
gggacatcgtgtccctgatgaactggaaatggagccagttctgtatgttagtgtttttgttcacgtggccaggagctttaaataacctcattctgctttgygctcacatccctcatctttcaggctgaaagtactccagtcgcagtcacgatttggttgtagtgggattgggtgagcagcccgaggccaggtgcttgttcc

SEQ ID NO: 221531 - DNA, 201 bp, Homo sapiens
aaccatctttgttttctgtcctgcctctgccgcccacagcttgaattcggagtgatttaccactgcacagaggagcggctgtacacgggccggcggggtcrgggcgccttctgcaatggccagcggctccgggtctccggggagacaggtgggcttcacaacgctcgtctcagtttacttctgaaagaaaagtgtgaaagg

SEQ ID NO: 221532 - DNA, 201 bp, Homo sapiens
gtagaggcaagtagagaaaaccaggagttcccttctgtgcaggtgaatcttgagagaacattgtctcggtcaggttcctagcaggacagacgcacactcargtgaggattgtagggggccttgtttgcagagggactcattacaaaggaggggccagcccagggcctgctgcagagtgcaggagcaggccgcccatgtccc

SEQ ID NO: 221533 - DNA, 201 bp, Homo sapiens
gatgaggtcagcagctcaagggtctagtgtttttagctgtcttcccagccctgctccagagcccccatgtaacctgctgccctgcagtgcccagcacagakcagtgtctgttgaatgcgtgagtcaagcaaaacatcaaacagaatccttgacatgggaaaaacatgctcccagccaccaccagctgaacattgacatcca

SEQ ID NO: 221534 - DNA, 201 bp, Homo sapiens
gcagatgaagcttgtagcttcagtgcaagcgttcttcctggaaagcagagctgctgtgtgcatggaacacgggttctccttccatccttccctgcctcccwgctttccttccagagcaagcatcagccagatatttaggaacttttaggttctactgtaaaacttttcttccttgaggcagtgaaaagccagcttaggatt

SEQ ID NO: 221535 - DNA, 201 bp, Homo sapiens
gagtcgtcataaagtggatagtgctttaccttggtgcaaatcctctaatcctgtttaaaaattaatctgcaatactaagtagactcattttttgttgaagrgccttccttccctttgtagtttgaagaacccaagcctcagaccgtaaagaatgaatgaatttaagagtgttgcgaaactccaccctttgacctttccctc

SEQ ID NO: 221536 - DNA, 201 bp, Homo sapiens
ggctgggtgtgaagggccttgcacacctgatgcaagacagcagcccgattgtgaggccaggtctagtggaagaggctggccacagggtcacctgccctgcyggtaggaggtacaggcatgttcgagccccatggccttccttatgacacactcacaaagaaagtcatcagagaaactgcaataataaatattaataaaagc

SEQ ID NO: 221537 - DNA, 201 bp, Homo sapiens
ccaaagacatggaggtacaggagggaggacactcgagggggcttgagcctggcatggggcatgctgccctggctgggtgtgaagggccttgcacacctgaygcaagacagcagcccgattgtgaggccaggtctagtggaagaggctggccacagggtcacctgccctgctggtaggaggtacaggcatgttcgagcccca

SEQ ID NO: 221538 - DNA, 201 bp, Homo sapiens
ggcactgtcctgcccgggcagtgaggcctgacgggacatgaccgaagtttggctgtgtttgggtgtgtggcacaacaaggacaaactgctctgatccccakcagtgagtcagggacaggagcagaatcccggtcacgtcctgccctgagccaggcttgccagccctggcagcctcgcctgctgttacataaacggcaggcc

SEQ ID NO: 221539 - DNA, 201 bp, Homo sapiens
aagaggggcctcagccagggcagtgggcggacggccacacgggcgacctcctggagcagctgtgctggagtagatggaggctgagagcacagacaggcagraggtggccagggatgtcattgcaggcacaagggatcgtgtccaaagacatggaggtacaggagggaggacactcgagggggcttgagcctggcatggggc

SEQ ID NO: 221540 - DNA, 201 bp, Homo sapiens
gacccaggaagaggggcctcagccagggcagtgggcggacggccacacgggcgacctcctggagcagctgtgctggagtagatggaggctgagagcacagrcaggcagaaggtggccagggatgtcattgcaggcacaagggatcgtgtccaaagacatggaggtacaggagggaggacactcgagggggcttgagcctgg

SEQ ID NO: 221541 - DNA, 201 bp, Homo sapiens
actgatactggtgaggttctgtgtgtaaataagtttgtggaccaagaccttttcatacaatacctcatgtgattcctaaaacaacccaatgtgttagatayactgttattacagaagaggaaatgaaggccatgagaacccatatagaatttgaatttagagctgtctgattctggagtgtactttatccctctctactcc

SEQ ID NO: 221542 - DNA, 201 bp, Homo sapiens
aaaagtcattagattttctcagatacatgttctcacaactgatactggtgaggttctgtgtgtaaataagtttgtggaccaagaccttttcatacaatacstcatgtgattcctaaaacaacccaatgtgttagatacactgttattacagaagaggaaatgaaggccatgagaacccatatagaatttgaatttagagct

SEQ ID NO: 221543 - DNA, 201 bp, Homo sapiens
cggtaggttcttattttttgtaacaatacaaaaattagctgaaaaagtcattagattttctcagatacatgttctcacaactgatactggtgaggttctgkgtgtaaataagtttgtggaccaagaccttttcatacaatacctcatgtgattcctaaaacaacccaatgtgttagatacactgttattacagaagaggaa

SEQ ID NO: 221544 - DNA, 201 bp, Homo sapiens
taaacttttcttaacctagtattttagcatcctatttgcaacgtgtacattgtatgtacggtaggttcttattttttgtaacaatacaaaaattagctgaraaagtcattagattttctcagatacatgttctcacaactgatactggtgaggttctgtgtgtaaataagtttgtggaccaagaccttttcatacaatacc

SEQ ID NO: 221545 - DNA, 201 bp, Homo sapiens
gcttactgattttagaaatacagcacttttcctcactttttctcttagcataggacaattcgtgaattaaacttttcttaacctagtattttagcatcctrtttgcaacgtgtacattgtatgtacggtaggttcttattttttgtaacaatacaaaaattagctgaaaaagtcattagattttctcagatacatgttctc

SEQ ID NO: 221546 - DNA, 201 bp, Homo sapiens
accccatgtgctccctcgccctgtggacgtgatcctggctaaagggcagggctgtttgagtctcgcttactgattttagaaatacagcacttttcctcacyttttctcttagcataggacaattcgtgaattaaacttttcttaacctagtattttagcatcctatttgcaacgtgtacattgtatgtacggtaggttctt

SEQ ID NO: 221547 - DNA, 201 bp, Homo sapiens
gtcaggtgtggtgatgcatgcctgtggtcccagctactcaggaggctgaggcaggaggattgcttgagcccagtggtttgtggcttcagtgagccatgatygtgccactgcactccagcctggctgacaaagcgagaccatgtctccaagaaaaaaaaaaaaaatttctaaaagtacttgctgggttacactaaatgaaac

SEQ ID NO: 221548 - DNA, 201 bp, Homo sapiens
acgagccggctgtttccaggtcctttattaaccatattggcctagaggtttctgcggtgatgatccgtgtggccgtggcatgggagggctggctcatctgygtggggtctggtaaaggcttggaggagatgcaggatcaggcacagtgaagttattggggctgtgatgtgtttcagtcaggtcacttggacaaactgcact

SEQ ID NO: 221549 - DNA, 201 bp, Homo sapiens
gcggaggttgcagtgagccgaggtcacaccactgcactccagcctgtgtgacagagcaagactctgtctcgaaaaataaataaataaacctaattttaatmaaagggcaatagcaaaagaatttatcatatggattctttgagaggaagcatgctgcagtaacgagccggctgtttccaggtcctttattaaccatattgg

SEQ ID NO: 221550 - DNA, 201 bp, Homo sapiens
atttgttgagagtcctgtgtgcaaattggtgatttgagaaaattgacctggtggcaatgagcaggaactaggaaaccctggccagaggcagggcctgggcrgtgggagctggaggctgtcataggaatatgaagtcctggagttatggctacccagtggacatggctatgtggacgctgtatgctttttttggtatgacct

SEQ ID NO: 221551 - DNA, 201 bp, Homo sapiens
acagtgagccaagattgcgctactgcactccatctggggcaacagagagagaccctgtctcaagagaaaaataacaacagagcataacacaacacagcatyctgcctctgaatccactcttcccactctgtaacccatgactcggccctgttttcctggcggacacacccagattgcagcattctccaagctgccccaagg

SEQ ID NO: 221552 - DNA, 201 bp, Homo sapiens
cttcttcaaattctaccatgcaaatttcagacatacacaaagtacacagaaaaagcaaaatgatgccccatgacccctcacatggcagcacgcctgcttcrtgtgtgtccaccagctcccgccacccccagctgcctggagccaatcccaggcatcaggtcacttcctagtcagtacttcagcgtgtctccaaaaacagac

SEQ ID NO: 221553 - DNA, 201 bp, Homo sapiens
catggcagcacgcctgcttcgtgtgtgtccaccagctcccgccacccccagctgcctggagccaatcccaggcatcaggtcacttcctagtcagtacttcrgcgtgtctccaaaaacagactgctctcttacaaatacaatcacatcatcaatatcactctctacccaaaatgcatccctaaaatcagcaaataatcccat

SEQ ID NO: 221554 - DNA, 201 bp, Homo sapiens
ttccttttggaaaggtaatttctgtcacagtgtaatgtgttatcctaacgcctagcgcagccttcatctttgaataacaatgttttttcccacatcaaacragtgaaccatctttgttttctgtcctgcctctgccgcccacagcttgaattcggagtgatttaccactgcacagaggagcggctgtacacgggccggcgg

SEQ ID NO: 221555 - DNA, 201 bp, Homo sapiens
ctcctaaaaaaattactgaaggcctttaaaacatttattaattcattttaagattaaaaattcattacattttaacgtgaataatatatttttatgggaamtaatcatattttccaaaataagaaagctttagtgaggagagtgggatagttttacattttttccaaatttctttatgtctggcttaatgtaagacaacta

SEQ ID NO: 221556 - DNA, 201 bp, Homo sapiens
agagcttgtttgcgaccaaacttgccgcgcggggcggccgcttgcaggaacactgcggccttgtgcgctcggcggtctgagctcctgcgaggccgagaackacgcctagcgcccagcggcctccgcgaacaaaaagcgaccggtcggaaggtgctggcccagccgcccctggcgctcgagcccgaatccggccacagacca

SEQ ID NO: 221557 - DNA, 201 bp, Homo sapiens
accatctggaccacgttccccaaaaaccatctcagtaagggtcagaatggcctgcaactgctgccaactggaagtttccatgctgtgaagtcattaattayccacctgtaagtctggaatgccatcaggtggttccaaggtctccacctttgacaggttggtggctcccagccactcccatgcatcaggcctgcctgtgca

SEQ ID NO: 221558 - DNA, 201 bp, Homo sapiens; identical to SEQ ID NO: 40132

SEQ ID NO: 221559 - DNA, 201 bp, Homo sapiens; identical to SEQ ID NO: 40134

SEQ ID NO: 221560 - DNA, 201 bp, Homo sapiens
tggaaggagagacccgagccaggggggtctgtgaagtgcatgcttagttagcgagtagctgaaaaacattaattaaaaaccaggatacctaactcattgcyggtggagtgagagtgtttaaaatctctaagactgagggaaaatagccgtggtaaaggggttcagcgggaccttacctggcaaccccatgtgctccctcgc

SEQ ID NO: 221561 - DNA, 201 bp, Homo sapiens
cacagggcctgggttccagagcacatgccagctgccctgcagtgactggcataaaggtcggatggggacaggagcacaagaacaagatggggtgagacagsaaagatagttggacgtctccatgaatatgttagcctaggatgtctctgaagctggttgatggtgacctttccttttagatttgaaattcaggcttcagtg

SEQ ID NO: 221562 - DNA, 201 bp, Homo sapiens
tgcgctccacgtagctcagtcaagttgacacataaaattaaccatcacaacacattcacttgtgttgcagtaaatctggaagcataaacatggggcgtgtygtcaggtgcacacctccagtggccacatcttcctgacctgacagagggaaagacacatctcctattgaaactgcactctggcaaggctccggcgtgctgc

SEQ ID NO: 221563 - DNA, 201 bp, Homo sapiens
tgtggacagagtcccaaggccatttgcggagaaccccctcttacttgggggagggtcagccttttcattctgtttgggccctcagctgttggacaaggccygcccacaggaaggagagggatctactttcctgattaagatgctgatgccctcgcagaaacacccagaacaatttttttttttttttgagatggagccttg

SEQ ID NO: 221564 - DNA, 201 bp, Homo sapiens
ggctggcagctggagacgcggagagacagctgatgttccagtttgaaggccatagggcaggaagagttgttcatgtggacagagtcccaaggccatttgcsgagaaccccctcttacttgggggagggtcagccttttcattctgtttgggccctcagctgttggacaaggcctgcccacaggaaggagagggatctactt

SEQ ID NO: 221565 - DNA, 201 bp, Homo sapiens
ggatcgcctccattgcagggcttaacatgtcctcttctgtgaggttttgtcttttcaaaagcagcattttttaaggcaggaatatataaacaaacctatartacactcatagtctcatcagaaagatgatcagatcttgatatttttaaaataaggttttccgtttgtgagaggctcttggagtatgttaggaaatctgca

SEQ ID NO: 221566 - DNA, 201 bp, Homo sapiens
gccacaggccacgggccctggaacacagggaatgcagctgggatgtgggtgacgggtggctgctggcattggtatggaaggtgccagtgccttgtcagggyggagggcgactagagatcaaggtgaggggaaaaatagccacgagactaaaggaggcgttgaggattcgagagcctgaggtgggctggcctgggagccacg

SEQ ID NO: 221567 - DNA, 201 bp, Homo sapiens
ggaagcaatttcaggcacgttattctgtgtccttggtgcattttctcaggctgggttcttccactgcaggttcattgcagaagaggccgcggcttctgggrccaagtgtgtgctcacccacagcccgacgtggatcatcgaccccatcgacggcacctgcaattttgtgcacaggtgagctgagcagggatcgcctccatt

SEQ ID NO: 221568 - DNA, 201 bp, Homo sapiens
gaaatcactcagccagaggatggagaggctgctagtgagatacaggccccctcctcgagctttaggggtggaggaaggcaggagctcaaaggcatggggarctgagacattgagaaggagaggggagttccggagtctaggcccctccctctctcctggcctcctcctgggcccagtggagacaggagcctggagcctggt

SEQ ID NO: 221569 - DNA, 201 bp, Homo sapiens
gccgcgtggggcccccggcccaccactagtgcttagtgatgcacgccccctcgcccaggccagagggcgcagtgggaatggctgccacagccgggccccasagctgtccctgcaagaggcctgtatgagcacctcttaacctttttggggtcaccctttgagtatttgatgctagctattaatcttttgttcagaaaaatt

SEQ ID NO: 221570 - DNA, 201 bp, Homo sapiens
tgaaccccacgctatagctgtggtgattgttgtggtctgaagacatccgaaagccaccagcatctgccactcagatggcgcctgttcacccctgtgcccaycagtgctgggccacagcagtgggagaaagctctcctgggcactggaacaagcgtgaggcctggcacatggtgcatttgctctggaagccagcggctcatc

SEQ ID NO: 221571 - DNA, 201 bp, Homo sapiens
taatgggactggaagcaatttcaggcacgttattctgtgtccttggtgcattttctcaggctgggttcttccactgcaggttcattgcagaagaggccgcrgcttctggggccaagtgtgtgctcacccacagcccgacgtggatcatcgaccccatcgacggcacctgcaattttgtgcacaggtgagctgagcagggat

SEQ ID NO: 221572 - DNA, 201 bp, Homo sapiens; identical to SEQ ID NO: 40139

SEQ ID NO: 221573 - DNA, 201 bp, Homo sapiens
ctggtttcatactgtttgcatcttttgaatgataatgattttgtaatactttatatggggagaatagaaagataaattcagcatttcctgttgcttggctkattgaaatttattactgataatttagaaaatttaggcttcaaacttgttactggtaacaattggcttataaatttttaggatgtcatcaaattgagaacc

SEQ ID NO: 221574 - DNA, 201 bp, Homo sapiens
gtggaggccatctccaggaagctcagctgctgaaggcaggtccgagggcttgcaaacacccactttcaaggaatagtgggagggagatgagccgcagaatrgtggggagataggaggaaagccacgaggggaggcaggggccacaggccacgggccctggaacacagggaatgcagctgggatgtgggtgacgggtggctg

SEQ ID NO: 221575 - DNA, 201 bp, Homo sapiens
ttggactgtggtgctgggaaccccttccctataccttacagctgcagggccttgggcaactttctccatttctttttgcctccgtttcctcatctttaacrtggagaataatttttgctgtcctcagagttactgtgtggaataaatgtacatgtgaactgctcagaacagcacggggcagaagaagcgctctgtaagctt

SEQ ID NO: 221576 - DNA, 201 bp, Homo sapiens
tcggctctgtttagcgatggtggacttggactgtggtgctgggaaccccttccctataccttacagctgcagggccttgggcaactttctccatttctttktgcctccgtttcctcatctttaacgtggagaataatttttgctgtcctcagagttactgtgtggaataaatgtacatgtgaactgctcagaacagcacgg

SEQ ID NO: 221577 - DNA, 201 bp, Homo sapiens
agagggattaggaagtaatcaattgtgacggctccagccgtggggtcggctctgtttagcgatggtggacttggactgtggtgctgggaaccccttccctrtaccttacagctgcagggccttgggcaactttctccatttctttttgcctccgtttcctcatctttaacgtggagaataatttttgctgtcctcagagtt

SEQ ID NO: 221578 - DNA, 201 bp, Homo sapiens
aagatgaaagcagaaggggcaaaagagaacatagcaccaaggacctccaagaaatgcactttggctaaagtttgaggtgggagaggtcaggacttgggggscccgtgtggagggcagaattgcaggtgggtgtcctgctcgaactgatggggtgtggcccttgggggctgtgagttggggtggacttgatgagtcgtacat

SEQ ID NO: 221579 - DNA, 201 bp, Homo sapiens
ggagagagaagaggaggggtcggggccaatagagaagatgaaagcagaaggggcaaaagagaacatagcaccaaggacctccaagaaatgcactttggctraagtttgaggtgggagaggtcaggacttgggggccccgtgtggagggcagaattgcaggtgggtgtcctgctcgaactgatggggtgtggcccttggggg

SEQ ID NO: 221580 - DNA, 201 bp, Homo sapiens
tcagctaggaaggttaggtgatgggcttggggaggggagagagaagaggaggggtcggggccaatagagaagatgaaagcagaaggggcaaaagagaacayagcaccaaggacctccaagaaatgcactttggctaaagtttgaggtgggagaggtcaggacttgggggccccgtgtggagggcagaattgcaggtgggtg

SEQ ID NO: 221581 - DNA, 201 bp, Homo sapiens; identical to SEQ ID NO: 40133

SEQ ID NO: 221582 - DNA, 201 bp, Homo sapiens
acaggagcacaagaacaagatggggtgagacaggaaagatagttggacgtctccatgaatatgttagcctaggatgtctctgaagctggttgatggtgacstttccttttagatttgaaattcaggcttcagtgacttcaggcccatattttatatgttatacattaacagaatgctactggaaggagagacccgagccag

SEQ ID NO: 221583 - DNA, 201 bp, Homo sapiens
cggactgggaggccatcccagcacctgggatgtggacagcttcctggaagaagtcacagctgagtgtgtctttagaaaaaaagcaggagtcagctaggaargttaggtgatgggcttggggaggggagagagaagaggaggggtcggggccaatagagaagatgaaagcagaaggggcaaaagagaacatagcaccaagga

SEQ ID NO: 221584 - DNA, 201 bp, Homo sapiens; identical to SEQ ID NO: 40135

SEQ ID NO: 221585 - DNA, 201 bp, Homo sapiens
aggtgcagacctggccagtcactgcagtgtgcaggcggactgggaggccatcccagcacctgggatgtggacagcttcctggaagaagtcacagctgagtrtgtctttagaaaaaaagcaggagtcagctaggaaggttaggtgatgggcttggggaggggagagagaagaggaggggtcggggccaatagagaagatgaa

SEQ ID NO: 221586 - DNA, 201 bp, Homo sapiens
gtctcaggatcctgtgtccgttgtcccagctctgccctagcctgccatgagcgctgcaggaggccttctgcaggctggcgccctgcccctgggctcacctytcatgtgagagatggaggaggtgcagacctggccagtcactgcagtgtgcaggcggactgggaggccatcccagcacctgggatgtggacagcttcctgg

SEQ ID NO: 221587 - DNA, 201 bp, Homo sapiens
tatttagattcttagattagccaacaaaattctgcctcaaacatttctcccataaattaaaatactagtaatttaatgaaccaaatcaaaacaaagactcyaatcctaccttcttgagcgctggcatttgagggaaagcactcattcattcagtaactgtttatcgagtgcccactcagcctgggtctgctgatgtctctt

SEQ ID NO: 221588 - DNA, 201 bp, Homo sapiens
aaagctccttgcacccctgtactcaaccatttgttatttctggaaggacccactagaagtgtgacccaccctaagaagcctggagtggtgatgtcccctgktggcctatgcctgttcagctgcctgggcaactttcccaggaggatgggatgccaagtggcactggcagccgcgtggggcccccggcccaccactagtgct

SEQ ID NO: 221589 - DNA, 201 bp, Homo sapiens
ttttctggtgacaggaaattctttttattgcagatctctcaaaggccttggttctgacagaaattggccccaaacgtgaccctgcgaccctgaagctgttyctgagtaacatggagcggctgctgcatgccaaggcgcatgggtaggaggttcagttcggggaacaccctgcagcccgaggaggaagaacggaacacggac

SEQ ID NO: 221590 - DNA, 201 bp, Homo sapiens; identical to SEQ ID NO: 40140

SEQ ID NO: 221591 - DNA, 201 bp, Homo sapiens
tccacaaagtcatccagggatccagctttgtcctccctcattgctccgaggtgtttcttcctgcatgggcagcaccacacctactttgtagcctgtggtgrgggggaatgggacacgaggaagtgcaaggcagtatccttttgaggatgtgactcggaagttgcaggtcttgctttcagtcccatcctctggggcagaact

SEQ ID NO: 221592 - DNA, 201 bp, Homo sapiens
cccaggctggagtgcaatggcatgatctcggctcactgcaacctccgccttccaggttcaagcaattctcctgccttggcctcccgaatagctgggactamaggcactcaccaccatgcccagctaattttgtatttttagtagagatggggttttgccatgttggtcaggctggtctcgaactcctgacctcaggtgatc

SEQ ID NO: 221593 - DNA, 201 bp, Homo sapiens
gggcacaggtgtgtaacatgatcttgttttgggccgttcttacagaggaagtttcatgctcttttcaaaacccctgtgtttttcttttactcgaagagaarttgtttcacaggtgcaacaaaataattttgaaataatttcaagtaatggagaaataatttttcttgtaaaagaataatggtggagtcattaaggctcact

SEQ ID NO: 221594 - DNA, 201 bp, Homo sapiens
taccactagagcacctgaaggctcacgtatgtgcaagcaggtctccagcccatgcatccagagctgtttcatatccctcaggaagatgcaaggctttatcrtcttgcccgagcttcttcgagtgtgggtcccgcagcagcggtgcacccccaggagcttgtgggcaggtagcctcagccccacccagacctgttgaggcag

SEQ ID NO: 221595 - DNA, 201 bp, Homo sapiens
tccaagctgccccaagggcccccagcacccgcctcctccacacacacagctgtgtatgttttgaatgtggaaaactgagtgtataaataccagtgagcttmgataaggtgacacaaaaggacatattacaaaatcttctagcatttagttaactgtgagctcagtgtgcagcagccaaggactctttatgcattcactcag

SEQ ID NO: 221596 - DNA, 201 bp, Homo sapiens
gaaggctttggtctctaggctgagccagtctcaggatcctgtgtccgttgtcccagctctgccctagcctgccatgagcgctgcaggaggccttctgcagrctggcgccctgcccctgggctcacctttcatgtgagagatggaggaggtgcagacctggccagtcactgcagtgtgcaggcggactgggaggccatccca

SEQ ID NO: 221597 - DNA, 201 bp, Homo sapiens
tggtggtgtgccctccacacagtgggtccttggaatatgaatactcttttgtctacctctggctcttcagggcagaaggcacattggtgggctctggaccygtgtccccacttgtccatctggctttaccaacacagtattgttttgatttgtgattttcctttttgctggttattcacaccgggaatttaatgagtgacg

SEQ ID NO: 221598 - DNA, 201 bp, Homo sapiens
gagacagaattcctgtgagacagcagctggcaggcacagagtagcagctgtccctttggtggggtgggggtcggtacatggtctccaagggtccgaggccyactgctcctgaccctatctgagaggtccctatcatttcctacccattttgctaacaaaagctgtctcagaagaagggggagggcagaaggcactgccctt

SEQ ID NO: 221599 - DNA, 201 bp, Homo sapiens
cagtcttgctctgttgcccagtccggagtgtagtggcacaatctcggtttactgcaaactccaccttccaggtttaagcaattctcctgcctcagtctccygagtagctaggattacaggcatgcaccaccatgcccagctagtttttgtacttttagtaaagacaggatttcaccatgttggccaggcttgtctcaaact

SEQ ID NO: 221600 - DNA, 201 bp, Homo sapiens
atgtcatattaatatcaccactcctcaggagagctcttgaagtgttggaaagttgtcaggcttacagtgttagatacgatttttcaaaaaaataaaaaaawatatatatttttgagacagtcttgctctgttgcccagtccggagtgtagtggcacaatctcggtttactgcaaactccaccttccaggtttaagcaattc

SEQ ID NO: 221601 - DNA, 201 bp, Homo sapiens
tggtgatggcctccagctcctgcctcgcctggtccacacctgcagtgtttgcttagctctgcagggtggggtcagcctacgtgagaaattcgaaaactcamcaacatttcaaacatcagcagagacagaattcctgtgagacagcagctggcaggcacagagtagcagctgtccctttggtggggtgggggtcggtacatg

SEQ ID NO: 221602 - DNA, 201 bp, Homo sapiens
gtggtgatggcctccagctcctgcctcgcctggtccacacctgcagtgtttgcttagctctgcagggtggggtcagcctacgtgagaaattcgaaaactcracaacatttcaaacatcagcagagacagaattcctgtgagacagcagctggcaggcacagagtagcagctgtccctttggtggggtgggggtcggtacat

SEQ ID NO: 221603 - DNA, 201 bp, Homo sapiens
aaaaattcctttcctggcaacctttcttcattgtctctatttattcctacttctttcctccctggctgatgcctgtgtgcccagatggccttcgaggcagygagaggagctatggccatggcccatctctgctgctgtgagcccgtgcggccaggaaagtggcgggccaggatggatgaggtgtcaggagagggcccgcca

SEQ ID NO: 221604 - DNA, 201 bp, Homo sapiens
aggagggggagaggaggcggtggtgatggcctccagctcctgcctcgcctggtccacacctgcagtgtttgcttagctctgcagggtggggtcagcctacrtgagaaattcgaaaactcaacaacatttcaaacatcagcagagacagaattcctgtgagacagcagctggcaggcacagagtagcagctgtccctttggt

SEQ ID NO: 221605 - DNA, 201 bp, Homo sapiens
tgggctgagcgcacctgtcgctggaggaagaggaggcaggagggggagaggaggcggtggtgatggcctccagctcctgcctcgcctggtccacacctgcmgtgtttgcttagctctgcagggtggggtcagcctacgtgagaaattcgaaaactcaacaacatttcaaacatcagcagagacagaattcctgtgagacag

SEQ ID NO: 221606 - DNA, 201 bp, Homo sapiens
gctgttgcctctcagcatctcggtgggaggacagcactgccagcggctctgtctgttgctgcaggggtggcccacatctgctgtgtccacagtggtagcckctcacccacgtgactgccaagcacttgaaaggtggctcatgagactgaagaactgaagtctttatttaattcaaatgtaagcagccatatgcggtgactg

SEQ ID NO: 221607 - DNA, 201 bp, Homo sapiens
agtgctgacagcacttatgatcacgccctaagtggaatcatcacctgtgtgtctcctgcaggctgctgttgtcaggaggcagcctctccaccccctgcccyggctgccattgtggcttctacccaccatttttcctcctagatctgtttggggagcaccagttcctgagcaggggctctggctggtgggcctgtgcatcac

SEQ ID NO: 221608 - DNA, 201 bp, Homo sapiens
acagaagaggaaagtcacatagctacagaagacatggaaaaacagatttagtgcctgaagtttctaggaaaactggcagtgctgacagcacttatgatcaygccctaagtggaatcatcacctgtgtgtctcctgcaggctgctgttgtcaggaggcagcctctccaccccctgccccggctgccattgtggcttctaccc

SEQ ID NO: 221609 - DNA, 201 bp, Homo sapiens
tagtccctctggacctgagtcatatctgttcgctgctttgtcaaccttgtgcccagtttaagctttcgtagttgctccttgtatgtgtgttttcagggtgkggagcgttttctttaaaaacgtcattgcaagccattacagaagaggaaagtcacatagctacagaagacatggaaaaacagatttagtgcctgaagtttc

SEQ ID NO: 221610 - DNA, 201 bp, Homo sapiens
ttccaggtgtcggcacccccctgcatccagagggctcactcctgcagcttccctttccaaagcagcattatttaaaagttgctttctccaagaaaatggtmtttctatcgttgcgattgcagcagttagacgattaatgaagcattttttccctccaaacattgagtgttcccagtttggagtcattttgcttttcttttt

SEQ ID NO: 221611 - DNA, 201 bp, Homo sapiens
ttattcaagaaaactagaaatatttagattataccacagcttagacaggctttgcctgatttattaagccatttacaatcagttctatcatccatacccargacttccgggctggaaaaatacatcctatagctttcccagtaggaaccacattcatcattgcttttttctgtggaggcaatgtataaatagagcagcttt

SEQ ID NO: 221612 - DNA, 201 bp, Homo sapiens
ctgctgccaactggaagtttccatgctgtgaagtcattaattacccacctgtaagtctggaatgccatcaggtggttccaaggtctccacctttgacaggktggtggctcccagccactcccatgcatcaggcctgcctgtgcacggagggccaagtctgttgggccccttggcttggagaagggtttcactgagatatta

SEQ ID NO: 221613 - DNA, 201 bp, Homo sapiens
aatgagaaccattatcaaagaagaaacttgaatctttgcacaaaaccaatcaagtcatgccccgttgttaaaattaggacttgtttctggaggacacagtsattaaaacaagcaccactaatctctctctctttctccctctctctttctgcttcccttggcttcccctttcttatttctattatgccttgctggaatatc

SEQ ID NO: 221614 - DNA, 201 bp, Homo sapiens
ttctttcttttcttttctttctttctttctctttctttctttctttttctttcttctttctttctttctttctttctttctttctttctttctttctttcctttctttcctttctttcctttcttccctccttcccttctttatttctctctctctccttccttccttcccttccttctttcttttctttttcttttcttt

SEQ ID NO: 221615 - DNA, 201 bp, Homo sapiens
ttttctttcttttcttttctttctttctttctctttctttctttctttttctttcttctttctttctttctttctttctttctttctttctttctttctttcctttctttcctttctttcctttcttccctccttcccttctttatttctctctctctccttccttccttcccttccttctttcttttctttttcttttct

SEQ ID NO: 221616 - DNA, 201 bp, Homo sapiens
cttttctttcttttcttttctttctttctttctctttctttctttctttttctttcttctttctttctttctttctttctttctttctttctttctttctttcctttctttcctttctttcctttcttccctccttcccttctttatttctctctctctccttccttccttcccttccttctttcttttctttttcttttc

SEQ ID NO: 221617 - DNA, 201 bp, Homo sapiens
tcttttctttcttttcttttctttctttctttctctttctttctttctttttctttcttctttctttctttctttctttctttctttctttctttctttctttcctttctttcctttctttcctttcttccctccttcccttctttatttctctctctctccttccttccttcccttccttctttcttttctttttctttt

SEQ ID NO: 221618 - DNA, 201 bp, Homo sapiens
aaacaccagaacatgggacgcttctttctttctttccttcttttctttcttttcttttctttctttctttctctttctttctttctttttctttcttctttctttctttctttctttctttctttctttctttctttctttcctttctttcctttctttcctttcttccctccttcccttctttatttctctctctctcct

SEQ ID NO: 221619 - DNA, 201 bp, Homo sapiens
caaacaccagaacatgggacgcttctttctttctttccttcttttctttcttttcttttctttctttctttctctttctttctttctttttctttcttctttctttctttctttctttctttctttctttctttctttctttcctttctttcctttctttcctttcttccctccttcccttctttatttctctctctctcc

SEQ ID NO: 221620 - DNA, 201 bp, Homo sapiens
ccaaacaccagaacatgggacgcttctttctttctttccttcttttctttcttttcttttctttctttctttctctttctttctttctttttctttcttctttctttctttctttctttctttctttctttctttctttctttcctttctttcctttctttcctttcttccctccttcccttctttatttctctctctctc

SEQ ID NO: 221621 - DNA, 201 bp, Homo sapiens
accaaacaccagaacatgggacgcttctttctttctttccttcttttctttcttttcttttctttctttctttctctttctttctttctttttctttcttctttctttctttctttctttctttctttctttctttctttctttcctttctttcctttctttcctttcttccctccttcccttctttatttctctctctct

SEQ ID NO: 221622 - DNA, 201 bp, Homo sapiens
ctctgctcactgcaacctccgcctcccgggttcaagcgattctcctgccttccaagtatctgggattacaggcatgcaccactatgtctgggtaattttcrtatttttagtagagacggggtttcaccatgttggccagtctggtcttgaactcctgacctcaagtgatccacccacctcagcctcccaaagtgctgggat

SEQ ID NO: 221623 - DNA, 201 bp, Homo sapiens
tcctgccatgccctggctttgtggggcgcctaaacctgttttcagatgatgattttgagtgagatacaagtgtagctacttggaaaagattcagtagcatycctgagctatagtgatagaaaccccgtccttgtcccttctgtggagcagcctgttggagcttctctgggttggcctaggcccagagatgaggtcagcagc

SEQ ID NO: 221624 - DNA, 201 bp, Homo sapiens
ggacagcagggatgatcctgaccttcttgtcacagactaaacagactaagtagccagaagaaaaaaaaagaaagaaagaaaaaaggggcttaaaggcactyagctgtcaaaattataaggagggtttgttaaaactattttttaaaaaagaaaagtggttaagttatgcagtaggatataatattctataataacttatta

SEQ ID NO: 221625 - DNA, 201 bp, Homo sapiens
atggtgaatccccatctctacaaaaaaattaaaaaatcagctgggcatgctggtgcacgcttatgctcccagctacttggaaggctgaggtgagaggctckcttgagtcctggaggtcgagttgtgatgctgccactgcagtctagcctgggtgacagagcaagaccttgtctcaaaaaaaaaaaaaaaaaaatgtagatt

SEQ ID NO: 221626 - DNA, 201 bp, Homo sapiens
aaaaagaaaaggaaaaaaaaaaaaaaggcagcatggtaaggccgggtttttatagattgggtctttggagtgtgctgttggccttggccacatagctgtcycctgccatgccctggctttgtggggcgcctaaacctgttttcagatgatgattttgagtgagatacaagtgtagctacttggaaaagattcagtagcatc

SEQ ID NO: 221627 - DNA, 201 bp, Homo sapiens
gaccaggagtcaggacgcggattgatgttcaggtagctgtgtggccttgagagggccatgtcagctctcttttggtgccaggtgaagtctgtactgggggyctggctgcctccctcacagggttgggagcatgtcccaggacgacacctaggagagtaccatgaaaccagagaatgacggaggcagtctcagtcagcgttg

SEQ ID NO: 221628 - DNA, 201 bp, Homo sapiens
aggccctgagggagcttgagctgactcctgcttctgcttctgcttctgctctgtccggagtctcaggctgcctttagcaagtattccgcatgagcgtcatycctgcggcttcaggagaagcagagtgaaccttggagaaaagagaggcacccaaggtggggacctgcgggcttgcctcattcatccctggacaagcctccc

SEQ ID NO: 221629 - DNA, 201 bp, Homo sapiens
aattaacttatattaatagttgctgctgggaaaacaagctgcttggtgacttccctaaagggtgtcccacgcatctggcgaatgaacagacagagctcctsctcccgagtgtcctgggaggcacgtgggcatgccgcgtgggtggtctgggtgctgcagcgtgagttgtcctgggtgtggagtgtcagtgcctgcagaccc

SEQ ID NO: 221630 - DNA, 201 bp, Homo sapiens
ttctagtccctctggacctgagtcatatctgttcgctgctttgtcaaccttgtgcccagtttaagctttcgtagttgctccttgtatgtgtgttttcaggrtgtggagcgttttctttaaaaacgtcattgcaagccattacagaagaggaaagtcacatagctacagaagacatggaaaaacagatttagtgcctgaagt

SEQ ID NO: 221631 - DNA, 201 bp, Homo sapiens
aacctgggaagtggaggttgcagtgagctgagattgcaccattgcactccagcctgggcatctcagtgagactccatcttaaaaaaaaaaaaaagaaaaggaaaaaaaaaaaaaaggcagcatggtaaggccgggtttttatagattgggtctttggagtgtgctgttggccttggccacatagctgtctcctgccatgcc

SEQ ID NO: 221632 - DNA, 201 bp, Homo sapiens
ctgttgtcaggaggcagcctctccaccccctgccccggctgccattgtggcttctacccaccatttttcctcctagatctgtttggggagcaccagttcckgagcaggggctctggctggtgggcctgtgcatcacctgacctagaagcatgtggacaactgagagtggagaggcagttcctgcaaggagcaaggcgtgca

SEQ ID NO: 221633 - DNA, 201 bp, Homo sapiens
cgcttgaacctgggaagtggaggttgcagtgagctgagattgcaccattgcactccagcctgggcatctcagtgagactccatcttaaaaaaaaaaaaaaraaaaggaaaaaaaaaaaaaaggcagcatggtaaggccgggtttttatagattgggtctttggagtgtgctgttggccttggccacatagctgtctcctgc

SEQ ID NO: 221634 - DNA, 201 bp, Homo sapiens
gttcctgagcaggggctctggctggtgggcctgtgcatcacctgacctagaagcatgtggacaactgagagtggagaggcagttcctgcaaggagcaaggygtgcagtgtagatgaagaaccagaagcctgggttcactgcatctcatctgccttgcctggctaggctgaaagctccaggggcagactgagcctgcccagg

SEQ ID NO: 221635 - DNA, 201 bp, Homo sapiens
cctggaagacaggtgtagactgaatcaaagaatgataaggtttaaacttccttctggtggggtgcagtggctcatgtctgtaatactagcacttcaggagsccaaggtcagaggattgcttgagcccaggagtttgagaccagcctgggcaacatggtgaatccccatctctacaaaaaaattaaaaaatcagctgggcat

SEQ ID NO: 221636 - DNA, 201 bp, Homo sapiens
cttgacttgacctggtcttcttggctcagaagcccctgcttattcgtgggtttctccagggggccggggaggaggtcgcacagcctgagatgatgtatgcrtgcacttgtcgtatcccagggttgtatttctagataatttatcagcaaaatggaggggctggatgactctgcatcccaggcatgaacttcataacccagc

SEQ ID NO: 221637 - DNA, 201 bp, Homo sapiens
cgggcggatcacgagtgaggagttcaagaccagcctgaacaacatggtgaaacctcgtccctactaagaatgcaaacattagccgggtgtggtggcgtggkcctgtaattccagctactcgggaggctgaggcaggagaattgcttgaacctgggaggcggaggttgcagtgagccgaggtcacaccactgcactccagcc

SEQ ID NO: 221638 - DNA, 201 bp, Homo sapiens
gagccactccacctggctcttttttttttttttttttttctgtgaatgattatataaatgaaagaacaagcgagtgttaaacacttaccttctttttttttcccgtcgtttccttctaacttgttaggttatctcaaggttaccagctctccctctgaatttctgtttgccagtcgctcatgtttgttttgttgacaacct

SEQ ID NO: 221639 - DNA, 201 bp, Homo sapiens
gatcatagctcactgcagccttgaactcctgggttccagtgatcctcctgcttcagcctcctgagtagctgggattacaggagccactccacctggctcttttttttttttttttttttctgtgaatgattatataaatgaaagaacaagcgagtgttaaacacttaccttctttttttttcccgtcgtttccttctaact

SEQ ID NO: 221640 - DNA, 201 bp, Homo sapiens
gacagggcgagactctgtctccaaaaaaaagtgacatcgaataccatgagatgcctgctgttgcctctcagcatctcggtgggaggacagcactgccagcrgctctgtctgttgctgcaggggtggcccacatctgctgtgtccacagtggtagccgctcacccacgtgactgccaagcacttgaaaggtggctcatgaga

SEQ ID NO: 221641 - DNA, 201 bp, Homo sapiens
tgatcatagctcactgcagccttgaactcctgggttccagtgatcctcctgcttcagcctcctgagtagctgggattacaggagccactccacctggctcttttttttttttttttttttctgtgaatgattatataaatgaaagaacaagcgagtgttaaacacttaccttctttttttttcccgtcgtttccttctaac

SEQ ID NO: 221642 - DNA, 201 bp, Homo sapiens
accccatctctactaaagataaaaaaaattagccaggcgtgtggcgcacgcctgtaatcccagctactcatgaggctgaggcaggagaattgcttgaaccygggaggcagaggttgcagtgagctgagatcgcgccattgcactccagcctgggcgacagggcgagactctgtctccaaaaaaaagtgacatcgaatacca

SEQ ID NO: 221643 - DNA, 201 bp, Homo sapiens
cattacagaagaggaaagtcacatagctacagaagacatggaaaaacagatttagtgcctgaagtttctaggaaaactggcagtgctgacagcacttatgrtcacgccctaagtggaatcatcacctgtgtgtctcctgcaggctgctgttgtcaggaggcagcctctccaccccctgccccggctgccattgtggcttct

SEQ ID NO: 221644 - DNA, 201 bp, Homo sapiens
tatattttttaagagatagggtcttgctcagttgcccaggttggagtgcagtggcatgatcatagctcactgcagccttgaactcctgggttccagtgatmctcctgcttcagcctcctgagtagctgggattacaggagccactccacctggctcttttttttttttttttttttctgtgaatgattatataaatgaaag

SEQ ID NO: 221645 - DNA, 201 bp, Homo sapiens
aggcctggagtttgagaccagccttggcaatattgtgagacctcagctctacaaaataaaaataaaaatgatccgggtgtggtggtgcgtgcttgtagttrcagctactggggaggctgaggcgggaggattgcttgagttcaggaggtcaagactacagtgagccaagattgcgctactgcactccatctggggcaacag

SEQ ID NO: 221646 - DNA, 201 bp, Homo sapiens
tgtatttttagtagagatcaggtttcaccgtgttggccaggctggtctcaaactcctgacctgaagtgatccacccacctcagcctcccaaagttctgtawttacaggtgtgagccaccgcgcctggccaagtagagatttcttaaaggttagttgcagtgtgaaatctagtggatttgttggtactcagttacattgaaa

SEQ ID NO: 221647 - DNA, 201 bp, Homo sapiens
tgccatgccctggctttgtggggcgcctaaacctgttttcagatgatgattttgagtgagatacaagtgtagctacttggaaaagattcagtagcatcccygagctatagtgatagaaaccccgtccttgtcccttctgtggagcagcctgttggagcttctctgggttggcctaggcccagagatgaggtcagcagctca

SEQ ID NO: 221648 - DNA, 201 bp, Homo sapiens
gtagcatccctgagctatagtgatagaaaccccgtccttgtcccttctgtggagcagcctgttggagcttctctgggttggcctaggcccagagatgaggycagcagctcaagggtctagtgtttttagctgtcttcccagccctgctccagagcccccatgtaacctgctgccctgcagtgcccagcacagagcagtgtc

SEQ ID NO: 221649 - DNA, 201 bp, Homo sapiens
  misc_feature (1)...(201): n = A,T,C or G
gggccggcggggtcggggcgccttctgcaatggccagcggctccgggtctccggggagacaggtgggcttcacaacgctcgtctcagtttacttctgaaanaaaagtgtgaaaggagaatgccaaagccaccatgatgtgggacggtggtggaggtcccttgctgatggtgtcatctctttttagggacatcgtgtccctg

SEQ ID NO: 221650 - DNA, 201 bp, Homo sapiens
aaccagccgaattctaggactgacctggtcatgaggattcctttaaagccagggtaccggaaggggaaggatgatgaaatgctgccagacacctgcaggcyctgaaaaagcgttgactgaatgacgcctccaaccgccagaaataaaccctttctctgtagcttggggtgtccactctagggtgtttgtgctcaccccagg

SEQ ID NO: 221651 - DNA, 201 bp, Homo sapiens
acactgatgaaagtgtagtcacagaagttatatatccaacaaaaccagcttgtgccacaggcatgttttataggctttaaagcacaactgcctcttactcygtgagtacgtatttcttttttctttttcttttttttgagactccgtcacccagcctggagtgcagtggctgatctcggctcacggcaccctctgctcctg

SEQ ID NO: 221652 - DNA, 201 bp, Homo sapiens
gaagtatttaaagttaagtactaaagtatctcaaagtacttaagctgaagataagtaagaattgtaatactgtaatttgtctaaggatgcaatgattgacktctttctctgttaaataatattgtggtgcccagagtgggtgggaggctgagcagtacttcaggggttgattgatgttctgtgactgtgtgaaggggctgc

SEQ ID NO: 221653 - DNA, 201 bp, Homo sapiens
tgagaacatagctctttcatggttcccatagaccttctgaactacacagtgttgtgcgacctgcatggaaggcgtggggctgaggtttaaagcttattaartaattcaagcagcagcactgagaagagccttaatttctttctaattgaaacagttttatttaaatagggccgagggctgcatgtttctcaaaagcagccc

SEQ ID NO: 221654 - DNA, 201 bp, Homo sapiens
aaagtgtagtcacagaagttatatatccaacaaaaccagcttgtgccacaggcatgttttataggctttaaagcacaactgcctcttactctgtgagtacrtatttcttttttctttttcttttttttgagactccgtcacccagcctggagtgcagtggctgatctcggctcacggcaccctctgctcctgggctcaagt

SEQ ID NO: 221655 - DNA, 201 bp, Homo sapiens
gcctctcagcatctcggtgggaggacagcactgccagcggctctgtctgttgctgcaggggtggcccacatctgctgtgtccacagtggtagccgctcacscacgtgactgccaagcacttgaaaggtggctcatgagactgaagaactgaagtctttatttaattcaaatgtaagcagccatatgcggtgactggctact

SEQ ID NO: 221656 - DNA, 201 bp, Homo sapiens
acaggcatgttttataggctttaaagcacaactgcctcttactctgtgagtacgtatttcttttttctttttcttttttttgagactccgtcacccagcctggagtgcagtggctgatctcggctcacggcaccctctgctcctgggctcaagtgattctccaaagccagccttccgagtagctggaactacaggcacaca

SEQ ID NO: 221657 - DNA, 201 bp, Homo sapiens
ggaaagtggcttccaggaggctgatgaccacagtggataatacaccaaacaccagaacatgggacgcttctttctttctttccttcttttctttcttttcktttctttctttctttctctttctttctttctttttctttcttctttctttctttctttctttctttctttctttctttctttctttcctttctttccttt

SEQ ID NO: 221658 - DNA, 201 bp, Homo sapiens
caaatccgagaaaataaacaagtccagactggctttggggtgtgcggggtggggctccgtggctggcccttgtcccccgtggagggctggcctcgtgtcamccgtggtctatttgtgacactgctgtggaagcggaagtcttaagtgaacggtccaagtgcatctccagctgacccctagagcgtgtgatctcacaaacta

SEQ ID NO: 221659 - DNA, 201 bp, Homo sapiens
gggtttcaaatccgagaaaataaacaagtccagactggctttggggtgtgcggggtggggctccgtggctggcccttgtcccccgtggagggctggcctcrtgtcacccgtggtctatttgtgacactgctgtggaagcggaagtcttaagtgaacggtccaagtgcatctccagctgacccctagagcgtgtgatctcac

SEQ ID NO: 221660 - DNA, 201 bp, Homo sapiens
tggtgaaggccacacgtccattcgagggtcttcagtggctccagagacatagtttccagtgctttcctgtctgcacccctggggggatcctggtactgggraggtgactgggaaaagagcagcaatttcagaacagtctccagagctgatcctgacagttcctgaaccccacgctatagctgtggtgattgttgtggtctg

SEQ ID NO: 221661 - DNA, 201 bp, Homo sapiens
  misc_feature (1)...(201): n = A,T,C or G
catctgtttgctgtgccacctttttctttaatgggactggaagcaatttcaggcacgttattctgtgtccttggtgcattttctcaggctgggttcttccnctgcaggttcattgcagaagaggccgcggcttctggggccaagtgtgtgctcacccacagcccgacgtggatcatcgaccccatcgacggcacctgcaat

SEQ ID NO: 221662 - DNA, 201 bp, Homo sapiens
tttgagactccgtcacccagcctggagtgcagtggctgatctcggctcacggcaccctctgctcctgggctcaagtgattctccaaagccagccttccgastagctggaactacaggcacacaccaccatgcctggctaacttttgtatgtttggtagagatggggcttcgccatgctgcccaggctggtcttgaagtcct

SEQ ID NO: 221663 - DNA, 201 bp, Homo sapiens
aaacagttaatattttaaaagattatgaaggctaggtgtagtggctcacgtcttaatcccagcactttgggaggccgaggcgggaggatcacttgaggccyggagtttgagaccagccttggcaatattgtgagacctcagctctacaaaataaaaataaaaatgatccgggtgtggtggtgcgtgcttgtagttgcagct

SEQ ID NO: 221664 - DNA, 201 bp, Homo sapiens
gtgccaccacgcctggctaatttttgtatttttagtagagatggggtttcaccatgttggccaggccagtctcaaactcctgacctcatgtgatccacccrccttggcctcccaaagtgctgggattacaggcgtgagccactgtgcccagctgtttattggcttctttgatattatttgcttttaaaatgatggtaataa

SEQ ID NO: 221665 - DNA, 201 bp, Homo sapiens
agtcttgctctgtcgcccaggctggagtgcagtggtgcgatctcagctcactgcaacctccgcttcccgggctcaagcaattctcctgcctcagcctcccragtagctgggattacaggcatgtgccaccacgcctggctaatttttgtatttttagtagagatggggtttcaccatgttggccaggccagtctcaaactc

SEQ ID NO: 221666 - DNA, 201 bp, Homo sapiens
ttttttttttttttttttttttgagacacagtcttgctctgtcgcccaggctggagtgcagtggtgcgatctcagctcactgcaacctccgcttcccgggytcaagcaattctcctgcctcagcctcccgagtagctgggattacaggcatgtgccaccacgcctggctaatttttgtatttttagtagagatggggtttc

SEQ ID NO: 221667 - DNA, 201 bp, Homo sapiens
ccgagttcaagtgattctcctgcctcagcctcctgaacagctgggtctacaggcatgcgccaccatgcctggctaatttttgtatttttagtagagacggsgtttcaccatattggccaggctgatctagaactcctgacctcaagtggtccacccgccttggcctcccaaagtgctgggattacaggcacgagccactgc

SEQ ID NO: 221668 - DNA, 201 bp, Homo sapiens
gttccgtctccaaattcgagttttgggtgtgaagagtttataaagtccagccgctgtcctcgcagtgtttggggttagcggagggagagcttgtttgcgaycaaacttgccgcgcggggcggccgcttgcaggaacactgcggccttgtgcgctcggcggtctgagctcctgcgaggccgagaacgacgcctagcgcccag

SEQ ID NO: 221669 - DNA, 201 bp, Homo sapiens
ttaaaatatagagtcgataatgagttatactgggtttttttttttctgtttttttttttctgagatggagtttcactcttgttgcccaggctggagtgcartggggcgatctcggctcactgcaacctccgcctccctggttcaagtgattttcctcctaagcctcccaagtagctgggattacaggcgcatgccaccatg

SEQ ID NO: 221670 - DNA, 201 bp, Homo sapiens
aattctcctgcctcatcctcctgagtagctgggactacaggcatgcgccaccacatctggctaatttttttgtattttttagtagagacggggtttcaccrtgttggccaggctggtctcaaactgctgacctcaagtgagccttttgcctcggcctccgaaagtgctggggttacagttgtgagccactgcacctgacca

SEQ ID NO: 221671 - DNA, 201 bp, Homo sapiens
caggggttgattgatgttctgtgactgtgtgaaggggctgctggaacagctggctaggtccttggcccttctgtgggttggctagggtctgtcctatgttmctacactgaatacgggagctcctggcttttcgtggtgggctcctccccatgggagtgggggacattcctctgcactctgggagctcttcacaggcctcag

SEQ ID NO: 221672 - DNA, 201 bp, Homo sapiens
ccagcacactaggctgcacgcgctaagcaggaagggtgagcagagcccgggtgtgggctcctttatgatctgcctctgatggcatgtttatatgtaaaacrtgaagttattccatgctaagcacagcctttttctaggtgagttgcctcgagaattcagttgtgcctacataaggtgaccctttcgaggcagtggagtcgt

SEQ ID NO: 221673 - DNA, 201 bp, Homo sapiens
tgttctctggcagtggcaggtgatggtgctgcgctgcctgtctacacgcacaggtggctgggggcctggggcacagagcatgatgtggcttaaacggagcrtggttctccagctctggagaaccctggagagattcccattccatgggcgggtggcttgcagctcctgcgctcacagtgcacgccagcacactaggctgca

SEQ ID NO: 221674 - DNA, 201 bp, Homo sapiens
tttccaccgcttcagtttcctacttgaagtcaggtttaaaaaggagaagaattgcacattcctcctcagtttcttagaaacttacctttgtgcctgagtcrtttctagtccctctggacctgagtcatatctgttcgctgctttgtcaaccttgtgcccagtttaagctttcgtagttgctccttgtatgtgtgttttcag

SEQ ID NO: 221675 - DNA, 201 bp, Homo sapiens
cagccttgcaaagtgctgggattacaggcatgaaccaccacgcccagctcatgagtacgtatttcagtgtactcaaatgacttctctcattatttgagttrtaaagtttcccctaagacagcatactcttagcattgctcaaccagagcaagggtttccaaactgtcggaagtcactggctattcattttcatcctaaaat

SEQ ID NO: 221676 - DNA, 201 bp, Homo sapiens
tggggcaacagagagagaccctgtctcaagagaaaaataacaacagagcataacacaacacagcatcctgcctctgaatccactcttcccactctgtaacscatgactcggccctgttttcctggcggacacacccagattgcagcattctccaagctgccccaagggcccccagcacccgcctcctccacacacacagct

SEQ ID NO: 221677 - DNA, 201 bp, Homo sapiens
gcatggtgaaaccccatctctactaaagataaaaaaaattagccaggcgtgtggcgcacgcctgtaatcccagctactcatgaggctgaggcaggagaatygcttgaacccgggaggcagaggttgcagtgagctgagatcgcgccattgcactccagcctgggcgacagggcgagactctgtctccaaaaaaaagtgaca

SEQ ID NO: 221678 - DNA, 201 bp, Homo sapiens
atgaaaaataggcaagcatactgatatgtgtctgtagtccctgctacttgggaggctgaggtgggaggatcactgaagcctgggaggggggcttgcggtargccgagattgtgccactacactccagcctgggcgacacagaccgtgtctttaaaaaaaaaaaaaaattaatgagatattttatattcttacttggaagtc

SEQ ID NO: 221679 - DNA, 201 bp, Homo sapiens
tactgatatgtgtctgtagtccctgctacttgggaggctgaggtgggaggatcactgaagcctgggaggggggcttgcggtaagccgagattgtgccactrcactccagcctgggcgacacagaccgtgtctttaaaaaaaaaaaaaaattaatgagatattttatattcttacttggaagtctttgaagtctggcatgca

SEQ ID NO: 221680 - DNA, 201 bp, Homo sapiens
atcctgcctcaacatctatctgtaaacacagagaaatacaagaacatgttaccatttctaaagtatgcacataaatggggaaaagaaagcagaattgtttratttactttctttttttttcttttttttttttttgagataaggtcttgctctgtcacccaggctggagtgcagtggcacgatcatagctcaccgcagcct

SEQ ID NO: 221681 - DNA, 201 bp, Homo sapiens
ataaaaaccctagaagaaaacctaggcattaccattcaggacataggcgtgggcgaggacttcatgtccaaaacaccaaaagcaatggcaacaaaagccaraattgacaaatgggatctaattaaactaaagagcttctgcacagcaaaagaaactaccatcagagtgaacaggcaacccacaacatgggagaaaattttc

SEQ ID NO: 221682 - DNA, 201 bp, Homo sapiens
attggtataaagatgaataagataggttttctaccctgagaagtggggagacaaagacataaaacaggtaattttaatataattggtatgtataaagatawgctgtactagtcgcttagaagaaattcacctaaccttaccttcaggtgaggcttcctaaagtgagtcacaacagataagtaagagtgagctagatcattg

SEQ ID NO: 221683 - DNA, 201 bp, Homo sapiens
ctttttatgttacctctccatttctaaaaagacctttgtatgctacgggtatttacttttcagtttttactatcccagttttaagatgtgttacgtattgrctttccataagggaagatgatttagctttcttaccacacccttctcaacaacaagcacgtataattctccttcttctgtcttcctagtatatttatatca

SEQ ID NO: 221684 - DNA, 201 bp, Homo sapiens
tctaggagctatcccagggtcgtgaatcctcgagtgcaggtggggaagtagggtgatacccacctgtgaccatgacaagttttggagaccagaaactcggwtagagtttctagaaccccgcatccctctcatactgcctgaagccctgctctggggagagtgtcatcacagtaccatgtggcatgcgagtgtcgtggtaat

SEQ ID NO: 221685 - DNA, 201 bp, Homo sapiens
tatgctgtactagtcgcttagaagaaattcacctaaccttaccttcaggtgaggcttcctaaagtgagtcacaacagataagtaagagtgagctagatcawtgttttccaactgggtagttacctcttagtgggccatgaagtcaatttagtggtcatgaccagtaattaaaaaaaagagagaatagaatagattgcatgg

SEQ ID NO: 221686 - DNA, 201 bp, Homo sapiens
ttctggaaatgttcttcaacttgagaagttgcattaatttcttctaagagatggtttagcagattgcttcaaagaatagtccctcagccgggcacggtggstcacgcctgtaatcccagcactttgggaggccaaggcaggcggatcatggggtcaggagatcgagaccatcctggctaacacggtgaaaccccatctcta

SEQ ID NO: 221687 - DNA, 201 bp, Homo sapiens
tatttgaacaaagaacatgtttagtttcacacttaaggtttacttacttacagattttcttcaatttacattgaacaaaataatacagtatcaagtttagyctgggtgaggggacatgttttggcatcttttccctatagtagtagttttggttcaaattaatttttgaaaaatagcttttgtatggaacagtataaatgg

SEQ ID NO: 221688 - DNA, 201 bp, Homo sapiens
cttttatgtctttttgaatctggagccttcgaaatttgccatgtatgtcaagatggttcccttttaaaagttactatgcatataaaactattaacagcttsgaaagagttaagcattaagtgtgaacttaccaatgtactgttgcttttgggataatcagagaacattcaagttcaaacacagccaagaggtatttttgat

SEQ ID NO: 221689 - DNA, 201 bp, Homo sapiens
cccaaaattattaaagtagtaaaagtagaccttagaaaaaataaggcaggggcatatcctgaatggaagtattcttgaattttcatttactctatttacayaaatatgcagtgtgacactcaactgatttcactccaccttcaaggcatgtattttggcctcatactattactacatttgagtaaacatttaacctgatta

SEQ ID NO: 221690 - DNA, 201 bp, Homo sapiens
acaattttaagtcatctttttaaatgtccatttttctttttgattgatatttcctccattgatttattaattacacagatgtttgaatgcttaccacaggkcaatccctgtgttaggtgcattaaacgtggtaatgaacgagtgaaagtgttcgccttcatacagcttacggttttaggtagtcatggaaatcggtgatgg

SEQ ID NO: 221691 - DNA, 201 bp, Homo sapiens
ggcttatttatagttaaaaataggaaagatttaattaaagcaacagatagttcagacccattgaaaccctatcaagacttcattatagatgtaagtatatrctaggcttggtcagaaatatgaagtatcgtcacgaatttagaattaatttattaaaactaagatctacaaatctgtgaattttacttattttaaatgaaa

SEQ ID NO: 221692 - DNA, 201 bp, Homo sapiens
ttcctccattgatttattaattacacagatgtttgaatgcttaccacaggtcaatccctgtgttaggtgcattaaacgtggtaatgaacgagtgaaagtgytcgccttcatacagcttacggttttaggtagtcatggaaatcggtgatggttcacaacaaaatgattttggtgaaaagaaatacctgttatatgatttaa

SEQ ID NO: 221693 - DNA, 201 bp, Homo sapiens
taggtagtcatggaaatcggtgatggttcacaacaaaatgattttggtgaaaagaaatacctgttatatgatttaaagaatcaaagcataaagacataatygaaacttggatgggccgggtgtggtggctcacacctgtaatccccgcactttgggaggccgaggcgggtggatcacgaggtcaggagatcgagaccatgc

SEQ ID NO: 221694 - DNA, 201 bp, Homo sapiens
gtgtagccagtcataacatctttgtactctatgagcaaatagtaattttggaccttgataaaacaattttgtagagtgtaatatttctaagaggaaatgtyacaggggctatgatgcaagaaagcctcagaaatgactgcatacaggtcagtaattagatgcattataaaataatactttgaaatacttacttaaaatatt

SEQ ID NO: 221695 - DNA, 201 bp, Homo sapiens; identical to SEQ ID NO: 40152

SEQ ID NO: 221696 - DNA, 201 bp, Homo sapiens
ggagagaataacaatatattagtggttcgcctttaagttggaacatcagactgaacctatataatgtatcctagtgacaaagcatttctggatactaaaayggtggcaaggtttaggatatgagtggttttttatccccactaaaaacaggtgaaaaatgcttttgtccctacaggtttacctgctaatgcaagtttagaa

SEQ ID NO: 221697 - DNA, 201 bp, Homo sapiens
aaggaaaaaaaaaaaaaacacaaaaaaaaaacactggattttctccaccctgagaaatgaggtcctaaggaagttagagcctaaatggtgtggtaaggtaraggtggtgattgcttccagagtcctgtccttgaaggactggcaaatgagaacatggatatattctaaagttgactttttctaggctactggagaagtggc

SEQ ID NO: 221698 - DNA, 201 bp, Homo sapiens
tgaatggggggtggatcttgtatcagtgtaaagtcaggaatttgtgattagaaagagtatgccttgtgagtctgacaccactgtcaccactacccctggamctcttgatgtagctttaatggaaacaagaacattttagaggttttgaaggtgacaggggagagaataacaatatattagtggttcgcctttaagttggaa

SEQ ID NO: 221699 - DNA, 201 bp, Homo sapiens
ctccattgatttattaattacacagatgtttgaatgcttaccacaggtcaatccctgtgttaggtgcattaaacgtggtaatgaacgagtgaaagtgttcsccttcatacagcttacggttttaggtagtcatggaaatcggtgatggttcacaacaaaatgattttggtgaaaagaaatacctgttatatgatttaaaga

SEQ ID NO: 221700 - DNA, 201 bp, Homo sapiens
acccccagcctttattttaatttcactggggattatcagtaagggagttgcaagatctgttaactgtacttattctttatcagtcttttgctcaatggcawatgttccataaattgacattcacctctttgcaaactggagctattaaaaatatttctgataatagcttgatttgaaattgaagaacagttttgagtttga

SEQ ID NO: 221701 - DNA, 201 bp, Homo sapiens
atgggccgggtgtggtggctcacacctgtaatccccgcactttgggaggccgaggcgggtggatcacgaggtcaggagatcgagaccatgctggctaacayggtgaaaccccatttctactaaaaatacaaaaaattagccaggcatggcggtgtgcgcctgtagtccgagctactcgggaggctgaggcaggaggatggc

SEQ ID NO: 221702 - DNA, 201 bp, Homo sapiens
gcatgagccaccacccccagcctttattttaatttcactggggattatcagtaagggagttgcaagatctgttaactgtacttattctttatcagtctttygctcaatggcatatgttccataaattgacattcacctctttgcaaactggagctattaaaaatatttctgataatagcttgatttgaaattgaagaacag

SEQ ID NO: 221703 - DNA, 201 bp, Homo sapiens
catggcggtgtgcgcctgtagtccgagctactcgggaggctgaggcaggaggatggcgggaacccgggaggcggagcttgcagtgagccgagatcgtgccmccgcactccagcctgggcgacagagcgagactccatctcaaaaaaaaaaaaaaaaaaagaagatcttggataaacttggtaaatatgaaacgcatgacta

SEQ ID NO: 221704 - DNA, 201 bp, Homo sapiens
gtgcctttggtcatctcttctcttcatttgaagtttttctaccacacctgcatgtacaaaccctgctgctttttcaaggcttggcacagacgccaccctawcatgaagttactcagcttccccagctggaggtagtctgtcttcccaagatagaggtaactctttattttaatttctttctttctcttttgagacagggtc

SEQ ID NO: 221705 - DNA, 201 bp, Homo sapiens
gagagaataacaatatattagtggttcgcctttaagttggaacatcagactgaacctatataatgtatcctagtgacaaagcatttctggatactaaaatrgtggcaaggtttaggatatgagtggttttttatccccactaaaaacaggtgaaaaatgcttttgtccctacaggtttacctgctaatgcaagtttagaag

SEQ ID NO: 221706 - DNA, 201 bp, Homo sapiens; identical to SEQ ID NO: 40154

SEQ ID NO: 221707 - DNA, 201 bp, Homo sapiens
aaatgctaatatgctacctgtcagatatactttctcttttacatatattcctcttcctccaccgtgcctttggtcatctcttctcttcatttgaagttttyctaccacacctgcatgtacaaaccctgctgctttttcaaggcttggcacagacgccaccctaacatgaagttactcagcttccccagctggaggtagtct

SEQ ID NO: 221708 - DNA, 201 bp, Homo sapiens; identical to SEQ ID NO: 40155

SEQ ID NO: 221709 - DNA, 201 bp, Homo sapiens; identical to SEQ ID NO: 40157

SEQ ID NO: 221710 - DNA, 201 bp, Homo sapiens
gattatttttggttgaacctttctagagaatcagtccctggttttctgcctcattaagggagtcattctaggtgggtctgattatttcttaaaatgagttkcaaacagttttcctatttcaaaccttaccttattctttgccttcagagatacttgtgcctcaaattcttgagttctggaattctatagtgagagatagat

SEQ ID NO: 221711 - DNA, 201 bp, Homo sapiens
ttacggttatagaattctaggcagggaataatttttactcagaaatttaaaggtattgttttctagcttccagtactgccagtaagtctagttccatttakatttctcttttgtttaaaaacctgattgccattatttccttttggaagtctttctgatcttttcatgtctaatgtttttaatttcaagatgatataactt

SEQ ID NO: 221712 - DNA, 201 bp, Homo sapiens
gtttacttacttacagattttcttcaatttacattgaacaaaataatacagtatcaagtttagcctgggtgaggggacatgttttggcatcttttccctakagtagtagttttggttcaaattaatttttgaaaaatagcttttgtatggaacagtataaatgggcttatagttcagatactgagcaaatacacaatacta

SEQ ID NO: 221713 - DNA, 201 bp, Homo sapiens
agttaatgcgtagcgtaattaacctagtgttttaaatccctacgtctagatggtggaggctggatttaagggaggtgatgtggtcccagaagtgggctttsatgggaaatgtggcattaggggaatatgaacacttccccttggggagagcttgtggaaaagatatccttaattaagtcaagagggtagggagcatttgtt

SEQ ID NO: 221714 - DNA, 201 bp, Homo sapiens
ttacattgcttttttggtaatttttaaaaacttaattttctctagttaaaagcaaataacgaaaagtctaataaaaaagtcagtctcttctatgcccgtcwtaaaccctgcagtcctctgttcttgcagccatgtttactttttatgttacctctccatttctaaaaagacctttgtatgctacgggtatttacttttcag

SEQ ID NO: 221715 - DNA, 201 bp, Homo sapiens
tcttcaatttacattgaacaaaataatacagtatcaagtttagcctgggtgaggggacatgttttggcatcttttccctatagtagtagttttggttcaarttaatttttgaaaaatagcttttgtatggaacagtataaatgggcttatagttcagatactgagcaaatacacaatactactttttactaacaggcacat

SEQ ID NO: 221716 - DNA, 201 bp, Homo sapiens
taattttcaaaatttacaaatcagtatctcagagaagttaaagaaaatggaaaggaacaaagcccttttagaataattaatatacattgccttgcttcttyccaaaaggaacatgtacttgtcaccctagcttttgttatttagagcactggtacagatacgctgtcccatacatcaggatcaaattattagtttcagttt

SEQ ID NO: 221717 - DNA, 201 bp, Homo sapiens
caaaaataataataataaatttagccagttacagtgatgcacacctgtagtcccagctactcaggaggctgaggcagggggttccttgaacttggggtcarggctgcagagtgagctgtggtggtgccactgcactccagcctggatgacagtgagaccctctctcaaaaaaaaaaaaatgagagactatttttctgtcct

SEQ ID NO: 221718 - DNA, 201 bp, Homo sapiens
tccatcgtggtcacagaatgggcttgtctgatattgatgttttgtgaaaatgtttctgtaccacagaccccagggcctaatattgtggcaggctagctcckggatgccattctcactaggttccatgtggacatatggatatagttatagtggattttgccttatcctctacatatagaggagtcagctatgtagttgctt

SEQ ID NO: 221719 - DNA, 201 bp, Homo sapiens
aactataggaacaaaccagaccagtgaagtcacacaaacccaaaattattaaagtagtaaaagtagaccttagaaaaaataaggcaggggcatatcctgawtggaagtattcttgaattttcatttactctatttacataaatatgcagtgtgacactcaactgatttcactccaccttcaaggcatgtattttggcctca

SEQ ID NO: 221720 - DNA, 201 bp, Homo sapiens
tatcataagggttttataatttgtcaggttattttatgtatctttttgcttcagtacaatcatatgctagtggcatagaagattatttcccagctagctgyggtagctcatgcctataatctcccagcactttgggaggccgagatgggagaattgcttgagcccaggagttagagaccagcctgagcaacatagtgaaat

SEQ ID NO: 221721 - DNA, 201 bp, Homo sapiens
ttcagtagtagtatagtatatgtgtgtttttacagatcagaaaattttatttgctagtaaacggtatgggacatactgaaattttaacttttcagagggamaaggtaactcattgcaactggtttagagttcagcctacagagaggtactatgctactgacaggaacttcctggagtaagtaagttttagtgcagtgtaag

SEQ ID NO: 221722 - DNA, 201 bp, Homo sapiens
gcctttggatatagcactgaggaatttgggtactgtgttgtgagtagttaggaggagcagttaatgcgtagcgtaattaacctagtgttttaaatccctaygtctagatggtggaggctggatttaagggaggtgatgtggtcccagaagtgggctttgatgggaaatgtggcattaggggaatatgaacacttccccttg

SEQ ID NO: 221723 - DNA, 201 bp, Homo sapiens; identical to SEQ ID NO: 40159

SEQ ID NO: 221724 - DNA, 201 bp, Homo sapiens
agtgaagtctcctgatctgtaatgaacaggactgcccatttaaccacacccttgctaacactgttatcaagtgtttgcatcgttgccgatctgaaagacgytatcttggaaatgggtatttactggccgggcatggtggcttatgcctgtaaccctagcactttgggaggctgaggcatgcagatcacttgatgtcaggag

SEQ ID NO: 221725 - DNA, 201 bp, Homo sapiens
catttttgtgaatggctaatagattaacatggttcaaaattcacaaagttttaaaggctctacagtgaagtctcctgatctgtaatgaacaggactgcccrtttaaccacacccttgctaacactgttatcaagtgtttgcatcgttgccgatctgaaagacgctatcttggaaatgggtatttactggccgggcatggtg

SEQ ID NO: 221726 - DNA, 201 bp, Homo sapiens
gatcttgtatcagtgtaaagtcaggaatttgtgattagaaagagtatgccttgtgagtctgacaccactgtcaccactacccctggaactcttgatgtagstttaatggaaacaagaacattttagaggttttgaaggtgacaggggagagaataacaatatattagtggttcgcctttaagttggaacatcagactgaac

SEQ ID NO: 221727 - DNA, 201 bp, Homo sapiens
ctgacaggtgagagattaggataccttttcttgattggaaacctgtataaatggagaagtagagggttaactttttaagccagcattcggatattttcatygttgttttaattatttttattaaaaaacgtaagtagagggtctctttgtgttgcccgggctggtctcaaaactcctgggctcactccttggcctcccaaa

SEQ ID NO: 221728 - DNA, 201 bp, Homo sapiens
cagattctcactctgtcacccaggctggactgcagtggcacaatcttggctcactgcaacactcttgccttccaggttcaagagattcttgtgcctcagcmtcccgagcagctgggagtacagacccctgcccccatacccggctaatttttgtagcaaattactcatttgtctgtctactttttattataaagattgtgg

SEQ ID NO: 221729 - DNA, 201 bp, Homo sapiens
tttatgtctttttgaatctggagccttcgaaatttgccatgtatgtcaagatggttcccttttaaaagttactatgcatataaaactattaacagcttggraagagttaagcattaagtgtgaacttaccaatgtactgttgcttttgggataatcagagaacattcaagttcaaacacagccaagaggtatttttgataa

SEQ ID NO: 221730 - DNA, 201 bp, Homo sapiens
aaaaacctgattgccattatttccttttggaagtctttctgatcttttcatgtctaatgtttttaatttcaagatgatataacttgttttggatttttcayttactgtgcagggcacttagtgggccctcatgtttctttcataatttcatcccttttgttaaatgctttttcctttggaaactcttattatttggatcct

SEQ ID NO: 221731 - DNA, 201 bp, Homo sapiens
aaagttgcacagcttgtaaagtgtaggatcagaattccaactcaggcagcctgactccagaggtcacattcttaaccactacattattccctgcaactcarccatatttcatatttttatttactgtattttaaaaggatgatattcagagcaaaacaaaatacacaccagtatgatgcttactaagctttgtgtagtttt

SEQ ID NO: 221732 - DNA, 201 bp, Homo sapiens
ccattcattacaggactggtgctactaacttaatgagtacgcacattttgacctgttatgtgaaaaaggaaacagattgttaggcatgtgaagtgctttgmctgtgtttctgtaactactaactagagagctaggtttcgaacttacgcagattgatttcagagcccagcttgcaaccgctaagctctgtttccttcctag

SEQ ID NO: 221733 - DNA, 201 bp, Homo sapiens
agtaaaaagcatggcttttctgtatgctgtgctaagtacttgccattcattacaggactggtgctactaacttaatgagtacgcacattttgacctgttaygtgaaaaaggaaacagattgttaggcatgtgaagtgctttgactgtgtttctgtaactactaactagagagctaggtttcgaacttacgcagattgattt

SEQ ID NO: 221734 - DNA, 201 bp, Homo sapiens
gctggtctcaaaactcctgggctcactccttggcctcccaaaatgctgggattacaggtgtgagccacggtgcccaatgtgcacgttttcattgttggaaraaaggcttggctgggtgtacccagcctgtaatctcttggggaggccaaggtaggaggattgtttgagcccaggagtttgaggctgcagtgagctatgatc

SEQ ID NO: 221735 - DNA, 201 bp, Homo sapiens
agtagagggttaactttttaagccagcattcggatattttcattgttgttttaattatttttattaaaaaacgtaagtagagggtctctttgtgttgcccrggctggtctcaaaactcctgggctcactccttggcctcccaaaatgctgggattacaggtgtgagccacggtgcccaatgtgcacgttttcattgttgga

SEQ ID NO: 221736 - DNA, 201 bp, Homo sapiens
caatgaagttgcagtctcccgaattccagtcacttttcacagaaggactgaagagtctgacaggtgagagattaggataccttttcttgattggaaacctrtataaatggagaagtagagggttaactttttaagccagcattcggatattttcattgttgttttaattatttttattaaaaaacgtaagtagagggtctc

SEQ ID NO: 221737 - DNA, 201 bp, Homo sapiens
ttgtagatgtgtagttggtgactgcctctccagatgctgaggtgcctgtatcattggcacaggccagtgctgaaccgtaggtggagtaggctgtgccttcygaagcagtatctattcacaatgaagttgcagtctcccgaattccagtcacttttcacagaaggactgaagagtctgacaggtgagagattaggatacctt

SEQ ID NO: 221738 - DNA, 201 bp, Homo sapiens
ttggtgagctgaatggtgtctgtgtttcggctctaaattcctttttctatttttttaagtctccatggtaaccaactgtcttagtttgcctgagcttgaartacttccttggatgtatgattttcaactttaaaactaggaatgtctcaggcaaaccagtatgaagtggtcactctactaattaatacttgaggttttatg

SEQ ID NO: 221739 - DNA, 201 bp, Homo sapiens
tcctccacccgcttccgtggaatggaatggtttttctctgcaggtttacaccggggtcactcgagagctgctgcggcctccttatgggcaggacccccgtwtggggagaacgaggatgtgatatgtagaagggaaggccgcggtgtgccagaaatcagaggagattgcaagatggcaggaaaagaatcaggaaaatggggg

SEQ ID NO: 221740 - DNA, 201 bp, Homo sapiens
ccttttaaaagttactatgcatataaaactattaacagcttggaaagagttaagcattaagtgtgaacttaccaatgtactgttgcttttgggataatcaragaacattcaagttcaaacacagccaagaggtatttttgataagtagttgtcagtgcctcttttctgtaatgctacagagtgaagtatctcatagatcac

SEQ ID NO: 221741 - DNA, 201 bp, Homo sapiens
tgaaataaattttaataattatttttggttcatctaatttaatccaatatatctaagatactatcagtatgaattttgtataaaaattgttaatgaggccrggcacagtgtctcccacctgtaatcctagcactttgggaggctggacatggtggctcatacctgtaatcccagcacttttgagtggctgaggtgggtgga

SEQ ID NO: 221742 - DNA, 201 bp, Homo sapiens
attttagtaaagccagcatgagaatcttaaaacagtagttatctgtataaattaagccttgaccttcttcatcccactgtttatagtaagttcaagtgaaygtaaaacttgtcctttatttgcttgaatttcagaacagctacttgataccgttttaagaaaacttaaaaaaacccaatacttaccagtgaagtcattctt

SEQ ID NO: 221743 - DNA, 201 bp, Homo sapiens
tcagatatactttctcttttacatatattcctcttcctccaccgtgcctttggtcatctcttctcttcatttgaagtttttctaccacacctgcatgtacraaccctgctgctttttcaaggcttggcacagacgccaccctaacatgaagttactcagcttccccagctggaggtagtctgtcttcccaagatagaggta

SEQ ID NO: 221744 - DNA, 201 bp, Homo sapiens
catgggaagtgtcagccaactgggactcccagtctaagtctcagtaggagttttcattaggagaaatcagagaagaatactccagtattatgccagggaaygaacctgattgttagcatcttgaaaccaagtagggaaagggatgagggtcatgttaattttcacttgaatcttgttttcattatgatgcttcattcccat

SEQ ID NO: 221745 - DNA, 201 bp, Homo sapiens
tggttggttactttgcttcccaaacgcttatttttgctttgatcatattcctatgattttttcctccaaattttgatcttgcctttaggttccccagggayggttacaagtctcttcattaggagaaataacaccaagatggatataccatattatttgctactttgtgatcatatttttgcctatttacatattttcttt

SEQ ID NO: 221746 - DNA, 201 bp, Homo sapiens
ccctgctgctttttcaaggcttggcacagacgccaccctaacatgaagttactcagcttccccagctggaggtagtctgtcttcccaagatagaggtaacyctttattttaatttctttctttctcttttgagacagggtctcactctgttgcctaggctggagtgcacagtgtgatctcgactcactgcagcctctgcct

SEQ ID NO: 221747 - DNA, 201 bp, Homo sapiens
tggtacgaagggtaggttttcttttatgatacttttgtttgccatgtagacatacaaattttggtgactgctatgtgaatgtcttagtgtgggttatgggmtaagaagtgtgacagccagccactgagctggagtaagttggggaggtgtttcagtgaagtgactcacacaagcaaaattatggaggaaaactgtggggag

SEQ ID NO: 221748 - DNA, 201 bp, Homo sapiens
ggctggacatggtggctcatacctgtaatcccagcacttttgagtggctgaggtgggtggatcacttgagcccaggagtttgagaccagcctgggcaacayggtgaaaccccatctctactaaaaatatgaaaaataggcaagcatactgatatgtgtctgtagtccctgctacttgggaggctgaggtgggaggatcact

SEQ ID NO: 221749 - DNA, 201 bp, Homo sapiens
gtagggtgatacccacctgtgaccatgacaagttttggagaccagaaactcggatagagtttctagaaccccgcatccctctcatactgcctgaagccctsctctggggagagtgtcatcacagtaccatgtggcatgcgagtgtcgtggtaatgctccccgaccaaaccaccaaaccgagggttgggctgcttattctcg

SEQ ID NO: 221750 - DNA, 201 bp, Homo sapiens
aaattagccggatgtggtggtgtgcgcctgtaatccctgctacttgggatgctgaggcaggagaatctcttgaacccaggaggcaggggttgcagtgagcygagatcgcgccactgcactcccgcctgagcgacagagcgagactccatctcaaaaaaaaaaaaaaaaaaaaaaagaattcctttgttattttatcatgct

SEQ ID NO: 221751 - DNA, 201 bp, Homo sapiens
catttgattcaccttatctatgatcttgatgtggctccttatataggtgagagcaagttataaagtgtttgaatttttggcagtgaaatatctggtttcaratttcataaggaaaaaatgtttgactcatttggttgaagaattcttggagaaatggagtattttaaaataagacaaagtttgggttatggggtaagtttt

SEQ ID NO: 221752 - DNA, 201 bp, Homo sapiens
ttcctttgttattttatcatgcttcaaggtccaggaaaggcctaggcaaaactcttggggggcttttgttacattctagccttgtttaagggcactggctsgctctttcagcttttaatatgtaactcaaccagtcagtcagtactgaaacagttgttatggaggcctgcgctagtgagaccccgcctgccacagtaagtg

SEQ ID NO: 221753 - DNA, 201 bp, Homo sapiens
ctggacatggtggctcatacctgtaatcccagcacttttgagtggctgaggtgggtggatcacttgagcccaggagtttgagaccagcctgggcaacacgstgaaaccccatctctactaaaaatatgaaaaataggcaagcatactgatatgtgtctgtagtccctgctacttgggaggctgaggtgggaggatcactga

SEQ ID NO: 221754 - DNA, 201 bp, Homo sapiens
cacttgagcccaggagtttgagaccagcctgggcaacacggtgaaaccccatctctactaaaaatatgaaaaataggcaagcatactgatatgtgtctgtrgtccctgctacttgggaggctgaggtgggaggatcactgaagcctgggaggggggcttgcggtaagccgagattgtgccactacactccagcctgggcga

SEQ ID NO: 221755 - DNA, 201 bp, Homo sapiens
tatgaaaaataggcaagcatactgatatgtgtctgtagtccctgctacttgggaggctgaggtgggaggatcactgaagcctgggaggggggcttgcggtragccgagattgtgccactacactccagcctgggcgacacagaccgtgtctttaaaaaaaaaaaaaaattaatgagatattttatattcttacttggaagt

SEQ ID NO: 221756 - DNA, 201 bp, Homo sapiens
gtaatccctcaaactgacaccgttttcagttttttcatctgaacaagagatgaatttctgagttgataaacttgaaatgtgtccccctttgttttccttcmcttaccttcacttttaatttcattggtatgcctgtgtatttgccttgtagatgtgtagttggtgactgcctctccagatgctgaggtgcctgtatcattg

SEQ ID NO: 221757 - DNA, 201 bp, Homo sapiens
tcagttaaatgaatctctgctgttccaactagatggaaaagccttgtacttttgtggttaaaataaacacattgaaataaagaacttgggaataaaaatcktattttctctcatctcagaattatttgtcaaagagaatcacgaattaagaatagcaggaggagcagtgagggatttattaaatggagtaaagcctcagga

SEQ ID NO: 221758 - DNA, 201 bp, Homo sapiens
tgggttttcttatctgggaaaagaaagaggaggtggagaaatgaccagttgctttctaaggtcccttctagacctaactaattatatgttgttttcattargcagatgtatgggatagtaccaataaaaatgaaaaacagattttgcttgtgatatgccaatatagaggtaataccctgtgaagattttgtcttgtaggtt

SEQ ID NO: 221759 - DNA, 201 bp, Homo sapiens
aagtagagggttaactttttaagccagcattcggatattttcattgttgttttaattatttttattaaaaaacgtaagtagagggtctctttgtgttgccygggctggtctcaaaactcctgggctcactccttggcctcccaaaatgctgggattacaggtgtgagccacggtgcccaatgtgcacgttttcattgttgg

SEQ ID NO: 221760 - DNA, 201 bp, Homo sapiens
ggaagtagggtgatacccacctgtgaccatgacaagttttggagaccagaaactcggatagagtttctagaaccccgcatccctctcatactgcctgaagmcctgctctggggagagtgtcatcacagtaccatgtggcatgcgagtgtcgtggtaatgctccccgaccaaaccaccaaaccgagggttgggctgcttatt

SEQ ID NO: 221761 - DNA, 201 bp, Homo sapiens
ttagctgtgtgtagtggcaggtctacttgggaggctgaagcaggagaatcacctgaacctgggaggctgcagtgagctgagattgcaccactgcactccamccagggtgacaaagtgagaatccgcctcaaagaacaaaaaaaggatttatgactaaggttgaaaatcttcattattaaagagatttctatatttccttta

SEQ ID NO: 221762 - DNA, 201 bp, Homo sapiens
ggaatgtctcaggcaaaccagtatgaagtggtcactctactaattaatacttgaggttttatgtacatatatataaaattagttttatgtcacttttttcrttcaacatatgagaacatttgtttattaccatttttgtgaatggctaatagattaacatggttcaaaattcacaaagttttaaaggctctacagtgaagt

SEQ ID NO: 221763 - DNA, 201 bp, Homo sapiens
aatagtgcaatatagagtcttgtctaactggcttctcataagcatactgaaagagagaaactaatactctttttcagtgtcctagtttataaaataaaagytgttcctattggtactatcattttctgacatttactgaacccttataacatgtcaggcactgttctgagcacattatgtaaatttaatctcctgacaacc

SEQ ID NO: 221764 - DNA, 201 bp, Homo sapiens
agaatagactctggagccaaaatccctgggttcaaattctgactccgtcactcactagccacaaaacaaaaacgttaattaatattggcttcctttgtacmgctgttgtgaggtttaagagagttaattgtaaatgcttagaacagtgcctgacacatgtacacactcagtcagtgctaacttcttaactgcatataaaca

SEQ ID NO: 221765 - DNA, 201 bp, Homo sapiens
attgaagaacagttttgagtttgatgtggagtttctccacatcacttggcagaggtgacatgtttgtgtgttaaactcatcttttttaatcatgatggatwtttttttaaaaaaatcagtcttttgatctgtttttgaataatgtggatatctttctgtttcaatgtttaggtatggtagttgacgttaaaaagactataa

SEQ ID NO: 221766 - DNA, 201 bp, Homo sapiens
gttatcctgagatgatactgtcttcatttaaggtcaggaggtgatgacagtgctttgagatggtgatgaaggtaacagaacagtgggaggagaggggatgygggattgagtcagatttaaggagatacagagcagtttgaacataaggaccttgttgctgaggattgactggggaggtctaggcttctggtggtgactcag

SEQ ID NO: 221767 - DNA, 201 bp, Homo sapiens
gttcagagagaaaaagccatcatggtagtgggggttatcctgagatgatactgtcttcatttaaggtcaggaggtgatgacagtgctttgagatggtgatraaggtaacagaacagtgggaggagaggggatgcgggattgagtcagatttaaggagatacagagcagtttgaacataaggaccttgttgctgaggattga

SEQ ID NO: 221768 - DNA, 201 bp, Homo sapiens
acttcagcacagagatacctacttcagtctttattaactaccacatatttctgtagaatgaatatataatagaaacatcttagatgcttgtattttatttkatcagtttattttaaagcttaatgatcaaatgattataagcataaaatgtaggttatgtgctggcatttgggtatttaagaattggctaacttttatggc

SEQ ID NO: 221769 - DNA, 201 bp, Homo sapiens
tctaaaattcaaaatcagaagcttttaggttcataaatcatatattttgaaaaatgaacatgtttggaaagaattatatatacatggtttaaaattctggmggctcttaagaatatgctatgaagactcctttctgttccctagttatttactttctccacctccaaagaaactaatgttattgctttcttgtgtgttctt

SEQ ID NO: 221770 - DNA, 201 bp, Homo sapiens
cccctgcctaattttgttaatatttattggaatgcagcatgcctctgtttatgtattgtctgtggctgcttacatactacaaggttggagttgagtggttkcagcagagattgtatgcctgtaaagccagattagtattctcctcctttttgtagaaaaagtttactgattgctagtttaggctgtccatgtggaagttaa

SEQ ID NO: 221771 - DNA, 201 bp, Homo sapiens
agtgctgggattacaggcgtgagccaccacacccagcctttttttttttttttttttttaatgagcttgcataacttttgaaaggaaaagaaataagtagycttccaaaaaagcattaaaccacgcttagaaaaatgattgttaattttagagaaggattttttgcttggggagggaaaaaaaggattcattacttttaga

SEQ ID NO: 221772 - DNA, 201 bp, Homo sapiens
aagtttttagataggctcatagccttgtatttcgttttagattgtaagctcaatggcagggatactatattggtaattatgttttcatatagcaaccaccmcagtatattcttggtgcttaataaatgtttataattgttaacaataacctgttgtatattgtttattttgaatggtatatatgtgaaatacatatgaaaa

SEQ ID NO: 221773 - DNA, 201 bp, Homo sapiens
aaaagttacagccgtagtgtgtgataagtgcttagttgagatggacaagacattaaatttgtgggtggaggacacaaacaggaaacatgtttcgattgacrgcaacctggtttgatactattcatcgttttggacattcactggggtcttggaatttcaaaaataagatgtttgagtagctgtatactctttatcacatgg

SEQ ID NO: 221774 - DNA, 201 bp, Homo sapiens
tgacaccccaaactgcaaaagttacagccgtagtgtgtgataagtgcttagttgagatggacaagacattaaatttgtgggtggaggacacaaacaggaarcatgtttcgattgacggcaacctggtttgatactattcatcgttttggacattcactggggtcttggaatttcaaaaataagatgtttgagtagctgtat

SEQ ID NO: 221775 - DNA, 201 bp, Homo sapiens
ttttgcctcactcatttgccaaagtagccatttctaagttaaggaagtttttagataggctcatagccttgtatttcgttttagattgtaagctcaatggyagggatactatattggtaattatgttttcatatagcaaccaccacagtatattcttggtgcttaataaatgtttataattgttaacaataacctgttgta

SEQ ID NO: 221776 - DNA, 201 bp, Homo sapiens
tgccttacgtggttttacttagctgtgtcacccgtggtccaaaaatattgaatggaagattatataaataaacatttcatgagttttaaattgcaaacagktctgaataacatggtaaaaatctcacggcctcctgctccgtcctacctaggacacaagtcatccctttgtccgacatattcatgctgtatgtgctcgcca

SEQ ID NO: 221777 - DNA, 201 bp, Homo sapiens
gtacaagtaaaacattctttggatgatattcaaagccttattagcactgcacctgaataataggtcattttgcctcactcatttgccaaagtagccatttytaagttaaggaagtttttagataggctcatagccttgtatttcgttttagattgtaagctcaatggcagggatactatattggtaattatgttttcatat

SEQ ID NO: 221778 - DNA, 201 bp, Homo sapiens
ttcattgttcatgccaaaattctaagtactgtttttcttagcaagtgtaacataatcaggaacaatgggtacaagtaaaacattctttggatgatattcaragccttattagcactgcacctgaataataggtcattttgcctcactcatttgccaaagtagccatttctaagttaaggaagtttttagataggctcatag

SEQ ID NO: 221779 - DNA, 201 bp, Homo sapiens
attgccttacgtggttttacttagctgtgtcacccgtggtccaaaaatattgaatggaagattatataaataaacatttcatgagttttaaattgcaaacrgttctgaataacatggtaaaaatctcacggcctcctgctccgtcctacctaggacacaagtcatccctttgtccgacatattcatgctgtatgtgctcgc

SEQ ID NO: 221780 - DNA, 201 bp, Homo sapiens
tggccacaaaccctacttcctctccttgtatgtaagttcagagagaaaaagccatcatggtagtgggggttatcctgagatgatactgtcttcatttaagrtcaggaggtgatgacagtgctttgagatggtgatgaaggtaacagaacagtgggaggagaggggatgcgggattgagtcagatttaaggagatacagagc

SEQ ID NO: 221781 - DNA, 201 bp, Homo sapiens
cgagtggaggataacatcactggagatgaggtgattaaggaactgagtagtcagcctgggcaacacagcaagaccccatctctacagaacgttaaaaaaarattagccgggcacggtggtgcatgcctgtggtcctagcttcttgagaggctgatggaagagcatcgcaaatgagaagtgagtggccacaaaccctacttc

SEQ ID NO: 221782 - DNA, 201 bp, Homo sapiens
tgggattacaggcatgagccgctgcacccagctctattttttgttttgtgataggaaattataaaacatggaattatgcatttgtcagcctttaaaaaaayttttaagtgaatgaaagtggcgtatttgaacatcaacttaggacagatttttactacttttgaaaaaatgttggaaaatatttctgtatgaaaagtaaaa

SEQ ID NO: 221783 - DNA, 201 bp, Homo sapiens
tgggattgcaggtgttagcctggcattgagcaacgttttgtaatttaagcatacaagtctctcacctccttgtttacatttattcccaggcatttttttcwtttagatgcgattgtaaatggaattgctttcttaatttccttttctgattgttcgttgctggtacagtagtcccttcttatccacagtattgccttacgt

SEQ ID NO: 221784 - DNA, 201 bp, Homo sapiens
taaagtcctacaagacaatttgaaataattcattgttcatgccaaaattctaagtactgtttttcttagcaagtgtaacataatcaggaacaatgggtacragtaaaacattctttggatgatattcaaagccttattagcactgcacctgaataataggtcattttgcctcactcatttgccaaagtagccatttctaag

SEQ ID NO: 221785 - DNA, 201 bp, Homo sapiens
tggaagaataagaagggtggtatggtggtttcggtggtatgaccaaaatacagattttgaagacctgtgtcagtggcaagtggatggttgaggttcgagtrgaggataacatcactggagatgaggtgattaaggaactgagtagtcagcctgggcaacacagcaagaccccatctctacagaacgttaaaaaaaaattag

SEQ ID NO: 221786 - DNA, 201 bp, Homo sapiens
ttatttttgttaagattgctgtagttctttttttttttgagacggaggcttgctctgtcgccagtgctgggattgcaggtgttagcctggcattgagcaasgttttgtaatttaagcatacaagtctctcacctccttgtttacatttattcccaggcatttttttcttttagatgcgattgtaaatggaattgctttctt

SEQ ID NO: 221787 - DNA, 201 bp, Homo sapiens
tgtcttgaagggaacttgtcatgtggtggagaagtatatttctgaaagtaagggtatgtaggccctcagtgaggtggaagaataagaagggtggtatggtsgtttcggtggtatgaccaaaatacagattttgaagacctgtgtcagtggcaagtggatggttgaggttcgagtggaggataacatcactggagatgaggt

SEQ ID NO: 221788 - DNA, 201 bp, Homo sapiens
aactgcatagtgaaaaagtaggccacaaatattaagttttggacaattacaattacatctctatcttactgtgcaagatagagatgatgtggcatctcttrgggtcttactgttcctgttttcagccctgcatcagttcttgatatttggcagcttaagtgaattcaggtatttgcttatagtgacatctgctgtcatgta

SEQ ID NO: 221789 - DNA, 201 bp, Homo sapiens
atatttatatgtgtttacaggtgtttaaaacttgatgatgttattgtcttgaagggaacttgtcatgtggtggagaagtatatttctgaaagtaagggtaygtaggccctcagtgaggtggaagaataagaagggtggtatggtggtttcggtggtatgaccaaaatacagattttgaagacctgtgtcagtggcaagtgg

SEQ ID NO: 221790 - DNA, 201 bp, Homo sapiens
gggagattcatttgactgtgcaagatgggcgacagagtgagactccatctgaattaaaaaaaaaatttagaactgcatagtgaaaaagtaggccacaaatrttaagttttggacaattacaattacatctctatcttactgtgcaagatagagatgatgtggcatctcttagggtcttactgttcctgttttcagccctgc

SEQ ID NO: 221791 - DNA, 201 bp, Homo sapiens
tatagcattttttgcctgacagaagaaagtgtgtatatttatatgtgtttacaggtgtttaaaacttgatgatgttattgtcttgaagggaacttgtcatrtggtggagaagtatatttctgaaagtaagggtatgtaggccctcagtgaggtggaagaataagaagggtggtatggtggtttcggtggtatgaccaaaat

SEQ ID NO: 221792 - DNA, 201 bp, Homo sapiens
gggattacaggcatgagccgctgcacccagctctattttttgttttgtgataggaaattataaaacatggaattatgcatttgtcagcctttaaaaaaacytttaagtgaatgaaagtggcgtatttgaacatcaacttaggacagatttttactacttttgaaaaaatgttggaaaatatttctgtatgaaaagtaaaac

SEQ ID NO: 221793 - DNA, 201 bp, Homo sapiens
ttttggaggattttagggggagggagattcatttgactgtgcaagatgggcgacagagtgagactccatctgaattaaaaaaaaaatttagaactgcatartgaaaaagtaggccacaaatattaagttttggacaattacaattacatctctatcttactgtgcaagatagagatgatgtggcatctcttagggtcttac

SEQ ID NO: 221794 - DNA, 201 bp, Homo sapiens
ctgccttttgagagatttccttacccttatgttccaggggaagaagattggggaactcatggttcagtatctagacttttcctcattgtcctgtataatcrcggccttcacccttgttgggactccacagatttggagctgatcagatgggtttgttgagaacagctgatcagatgggtttttggaggattttagggggag

SEQ ID NO: 221795 - DNA, 201 bp, Homo sapiens
gccgctgcacccagctctattttttgttttgtgataggaaattataaaacatggaattatgcatttgtcagcctttaaaaaaacttttaagtgaatgaaartggcgtatttgaacatcaacttaggacagatttttactacttttgaaaaaatgttggaaaatatttctgtatgaaaagtaaaacaacttttaattttttt

SEQ ID NO: 221796 - DNA, 201 bp, Homo sapiens
tctcaagtatgagatagaactttttaaaaagcactcatagtggtttttaaaaatatttttaacatagagtcaaagactagggcttttgcaatagggagagrccagggtttcatccatctcatccagaagaggagaaattgataaaggagagaggggaatgaaatacagagtagtaatgggcggcttggtcttgagagttgg

SEQ ID NO: 221797 - DNA, 201 bp, Homo sapiens
tgcatttgtcagcctttaaaaaaacttttaagtgaatgaaagtggcgtatttgaacatcaacttaggacagatttttactacttttgaaaaaatgttggaraatatttctgtatgaaaagtaaaacaacttttaattttttttagaagtcaatgaaaggattctattttgcaaagctgtattatgaagctaaagaatatga

SEQ ID NO: 221798 - DNA, 201 bp, Homo sapiens
tttctgacatttgtttaatgaatgagagtattactgttgagaaggctttttctctcaagtatgagatagaactttttaaaaagcactcatagtggtttttwaaaatatttttaacatagagtcaaagactagggcttttgcaatagggagaggccagggtttcatccatctcatccagaagaggagaaattgataaaggag

SEQ ID NO: 221799 - DNA, 201 bp, Homo sapiens
cgtggcaatccagttaatctggtgtcagtagtgttaaagaacatatgtaatgataggagattcttttcttgcagtgtaacaagttagatactttgaagcaytctttaaagattttctttaataacttgaaggcactgttacacctttcctgtatcagattttttttttttggaattgaaatccatgagatttataactgtc

SEQ ID NO: 221800 - DNA, 201 bp, Homo sapiens
cttaggtgttatgcctcaaacataactcccatattgggcgtggcaatccagttaatctggtgtcagtagtgttaaagaacatatgtaatgataggagattsttttcttgcagtgtaacaagttagatactttgaagcattctttaaagattttctttaataacttgaaggcactgttacacctttcctgtatcagattttt

SEQ ID NO: 221801 - DNA, 201 bp, Homo sapiens
agctgtattatgaagctaaagaatatgatcttgctaaaaagtaagtacaaactgtaacatgtattttttttttaaaatcaatgccttttctcattttcttmtttgaaataggtaaaaatatgttcttagtagttcttcctaagtgtattctggaataagggatttatcactcagactgatgctaaggaccagcctagattc

SEQ ID NO: 221802 - DNA, 201 bp, Homo sapiens
tagctggatatagtactgttagaaattactttcttgcttaaagggtaaatgtatttccctttggtgtttgggaaattgttgctgtttagtattttgcattmtgataactttaaaaatgtttactataatcacttctaatttattcgcaaaactgttagtgctttattaaaatgtgatcaggaagaaaaagcaatttatatg

SEQ ID NO: 221803 - DNA, 201 bp, Homo sapiens; identical to SEQ ID NO: 40183

SEQ ID NO: 221804 - DNA, 201 bp, Homo sapiens
agaaaacttgtgagtaaaaggataggcaatatgaatatttctaaaattcaaaatcagaagcttttaggttcataaatcatatattttgaaaaatgaacatrtttggaaagaattatatatacatggtttaaaattctggcggctcttaagaatatgctatgaagactcctttctgttccctagttatttactttctccacc

SEQ ID NO: 221805 - DNA, 201 bp, Homo sapiens
gctacacagctgtgctcttgggacttccctttatcatcagtttgagaattcctttcatcttttttctgagttagaccctttgtttcttgtatctcatgtcstcttcatttactttctttgttttggtgtagcatagtctcacttgctttgaggaaaagtagatgagaggtttttttgtttgtttgtttttgttttgggaca

SEQ ID NO: 221806 - DNA, 201 bp, Homo sapiens
atttctttgaccatttcttaccctttttttaatgacgtttacctgaaagctggagtttctctaatttttctcttattctcctcttttgtttgttctgcctyttgagagatttccttacccttatgttccaggggaagaagattggggaactcatggttcagtatctagacttttcctcattgtcctgtataatcacggcct

SEQ ID NO: 221807 - DNA, 201 bp, Homo sapiens
ttttctggaagtgtcctttcaattgggaaactcatttctttcagttctgtagcatttcttgtattatttctttgaccatttcttaccctttttttaatgaygtttacctgaaagctggagtttctctaatttttctcttattctcctcttttgtttgttctgccttttgagagatttccttacccttatgttccaggggaa

SEQ ID NO: 221808 - DNA, 201 bp, Homo sapiens
agattcttgttcttggtaacttaaaggttttctggaagtgtcctttcaattgggaaactcatttctttcagttctgtagcatttcttgtattatttctttraccatttcttaccctttttttaatgacgtttacctgaaagctggagtttctctaatttttctcttattctcctcttttgtttgttctgccttttgagaga

SEQ ID NO: 221809 - DNA, 201 bp, Homo sapiens
cttaaactcagcaatttacaccctcaaatgtggtcaaactggtcacataatcccatcaattgcagcttaaaacattgattgattgattgattgattgattgtctgtctacctggaatacccttactaactgacttctccaaccaggattggtttttcttcctctttgctacacagctgtgctcttgggacttccctttatc

SEQ ID NO: 221810 - DNA, 201 bp, Homo sapiens
acttaaactcagcaatttacaccctcaaatgtggtcaaactggtcacataatcccatcaattgcagcttaaaacattgattgattgattgattgattgattgtctgtctacctggaatacccttactaactgacttctccaaccaggattggtttttcttcctctttgctacacagctgtgctcttgggacttccctttat

SEQ ID NO: 221811 - DNA, 201 bp, Homo sapiens
aatatgttcttagtagttcttcctaagtgtattctggaataagggatttatcactcagactgatgctaaggaccagcctagattccattgagattgaaacygtaattagtgttttctgcatgctgctgctttataccaagggcaagaaattgtttggcttcaaatactttttctaaaaattgtcttctgttggagtaaaag

SEQ ID NO: 221812 - DNA, 201 bp, Homo sapiens
tacttaaactcagcaatttacaccctcaaatgtggtcaaactggtcacataatcccatcaattgcagcttaaaacattgattgattgattgattgattgattgtctgtctacctggaatacccttactaactgacttctccaaccaggattggtttttcttcctctttgctacacagctgtgctcttgggacttcccttta

SEQ ID NO: 221813 - DNA, 201 bp, Homo sapiens
ggaataagggatttatcactcagactgatgctaaggaccagcctagattccattgagattgaaaccgtaattagtgttttctgcatgctgctgctttatascaagggcaagaaattgtttggcttcaaatactttttctaaaaattgtcttctgttggagtaaaagaggaccatgcctatatcttaatttgtttttggtta

SEQ ID NO: 221814 - DNA, 201 bp, Homo sapiens
ttacttaaactcagcaatttacaccctcaaatgtggtcaaactggtcacataatcccatcaattgcagcttaaaacattgattgattgattgattgattgattgtctgtctacctggaatacccttactaactgacttctccaaccaggattggtttttcttcctctttgctacacagctgtgctcttgggacttcccttt

SEQ ID NO: 221815 - DNA, 201 bp, Homo sapiens
atctcctgacctcatgatccgcccgcctcagcctcccaaagtgccggggttacaggcgtgagccaccgcgccgggccccattttagacattctgtactggytattatgctcctccaaaactgtcctcagacactttggtttgcccctcattctttcagtactgttattgcagtttttgtttaaatgaatatttaacattta

SEQ ID NO: 221816 - DNA, 201 bp, Homo sapiens
ctcactgcaaactctgcctcccgggttcacaccattctcctgccccagcctgtagctgggactacaggcacccgccaccacacccggctaattttttagtrtttttagtagagacggggtttcaccgtgttagccaggatagtctcgatctcctgacctcatgatccgcccgcctcagcctcccaaagtgccggggttaca

SEQ ID NO: 221817 - DNA, 201 bp, Homo sapiens
tcatacttctgagtaacacacatatatacttttgttatttttaatttcctttctcccattttagacattttcttttcttttttttttttttgagacggagwctcgctctatcgtccaggctggagtgcagtggcgcgatctcggctcactgcaaactctgcctcccgggttcacaccattctcctgccccagcctgtagct

SEQ ID NO: 221818 - DNA, 201 bp, Homo sapiens
gttagatatctgataccttaatcagatggaaaatagcaatgaataaaaaattaaaccgtaattgtaaggcaggagaatagcttgtataaaagatgtttaaytgacacaatatgtgatgctctaaggctctatcctagggataagaagcttggtgattctgatttcctgacttggagtggattaaagcaggaaattaagagg

SEQ ID NO: 221819 - DNA, 201 bp, Homo sapiens
aataaaaaattaaaccgtaattgtaaggcaggagaatagcttgtataaaagatgtttaattgacacaatatgtgatgctctaaggctctatcctagggatragaagcttggtgattctgatttcctgacttggagtggattaaagcaggaaattaagagggagtcaggctttttttttttttttttaggcagtatctgtct

SEQ ID NO: 221820 - DNA, 201 bp, Homo sapiens
gcaggagaatagcttgtataaaagatgtttaattgacacaatatgtgatgctctaaggctctatcctagggataagaagcttggtgattctgatttcctgrcttggagtggattaaagcaggaaattaagagggagtcaggctttttttttttttttttaggcagtatctgtctctcttgctcaggctggagtgcagcagc

SEQ ID NO: 221821 - DNA, 201 bp, Homo sapiens
cctagaatggtgaatcttttccagatttactttgatcagatccatcagaggaatccctatctatggcagctgtaacattactaaatgcatttaaaaaaaaattttaaggtggacaggaaggaggatttattggtgagtattaagagggggcaccacagtggaagccctcatgagtgcagggcctgccacttgcccagagga

SEQ ID NO: 221822 - DNA, 201 bp, Homo sapiens
ttacttgaattgttcattgctagtgtataagtaggcaactcattttttttaattgaccttgtatggtacaatctctttgaactcatttattatcactgatrgtttaggtctttttttttttgaggtttcattagggttttctgtatataagatcatgtcatctagaatagagatagttttatttattctattcctatttca

SEQ ID NO: 221823 - DNA, 201 bp, Homo sapiens
tatgtagttaaatctttctttaatttctattgcctttgtatttatagctcttgcctagatagtcttaactgtagtatagactttaacagtgttttctttaytttctttttgtttttttagttgcaactactggcccttcagtatattatagtcagtcaccagcatataattccccagtatcttctcagaccagcagctaat

SEQ ID NO: 221824 - DNA, 201 bp, Homo sapiens
gctgtcacgtcttccctttgccattctattcatcatgcttttttttttcataggttattgcatgaggatctctttaatttcctggttgtcccatttattcyagtgctatcccatattatccatactctgaaaatgtgttatctacaatgtggcatttccaagtgtcatttcacctgtactttttaaagtagggtgtcatat

SEQ ID NO: 221825 - DNA, 201 bp, Homo sapiens
atacttcatacttctgagtaacacacatatatacttttgttatttttaatttcctttctcccattttagacattttcttttcttttttttttttttgagayggagtctcgctctatcgtccaggctggagtgcagtggcgcgatctcggctcactgcaaactctgcctcccgggttcacaccattctcctgccccagcctg

SEQ ID NO: 221826 - DNA, 201 bp, Homo sapiens
gtctccaaaaaagaaaaaaagaaaaaaaaatataattctttctctagtttttctttttccagatggcttctgtttagtttttctatgttctgtcaagttgrtttcttattctgcagctgattcctacttctcaaagtctacttgacagctcttatttttatttatttgttttttagaatagggtcttgctgtgttgcccag

SEQ ID NO: 221827 - DNA, 201 bp, Homo sapiens
ctgtctccaaaaaagaaaaaaagaaaaaaaaatataattctttctctagtttttctttttccagatggcttctgtttagtttttctatgttctgtcaagtygatttcttattctgcagctgattcctacttctcaaagtctacttgacagctcttatttttatttatttgttttttagaatagggtcttgctgtgttgccc

SEQ ID NO: 221828 - DNA, 201 bp, Homo sapiens
tggcagcgcctgtagtcccacctactcggtaggctgagacaggagaattgcttgaaccctggaggcagaggttgtggtgagcagagattgcaccactgcaytccagcctgtgtgacagagcgagactctgtctccaaaaaagaaaaaaagaaaaaaaaatataattctttctctagtttttctttttccagatggcttctg

SEQ ID NO: 221829 - DNA, 201 bp, Homo sapiens
cgggcgtggtggcagcgcctgtagtcccacctactcggtaggctgagacaggagaattgcttgaaccctggaggcagaggttgtggtgagcagagattgcrccactgcactccagcctgtgtgacagagcgagactctgtctccaaaaaagaaaaaaagaaaaaaaaatataattctttctctagtttttctttttccaga

SEQ ID NO: 221830 - DNA, 201 bp, Homo sapiens
aactgcccatgctttctagaatgtcggagttttggagtgtgatgatgcgtctgtatatcatatctttctagtctttcattgtgctttcatttgttagtctyctcttgttttgccatttttctactccctcacatgtgcttttgcccttaaaaatattcttcgtctgtaatctgagcactttgggaggccgagagaccagcc

SEQ ID NO: 221831 - DNA, 201 bp, Homo sapiens
cagaggctggccatctgtgaactgcccatgctttctagaatgtcggagttttggagtgtgatgatgcgtctgtatatcatatctttctagtctttcattgygctttcatttgttagtcttctcttgttttgccatttttctactccctcacatgtgcttttgcccttaaaaatattcttcgtctgtaatctgagcactttg

SEQ ID NO: 221832 - DNA, 201 bp, Homo sapiens
ttttcccccaaatttaaagtcatttacattagaacctggggatttcagcggaatatggattaactagtgagtaactttggaacatgtgaagctattctgtraagttaggtttgagtgaaatgacaaaacagggtgctttggatagaaggtaaagaatggagggagaagaggcagtggctgtgaagaatatgaagaggttag

SEQ ID NO: 221833 - DNA, 201 bp, Homo sapiens
ctttcaactacataacttctccattaaataaagtggagtggtggcagaattttgaggattggttattatgacacctctcttacacttagagtcttttttttcccccaaatttaaagtcatttacattagaacctggggatttcagcggaatatggattaactagtgagtaactttggaacatgtgaagctattctgtaaag

SEQ ID NO: 221834 - DNA, 201 bp, Homo sapiens
tatgtgatgctctaaggctctatcctagggataagaagcttggtgattctgatttcctgacttggagtggattaaagcaggaaattaagagggagtcaggstttttttttttttttttaggcagtatctgtctctcttgctcaggctggagtgcagcagctggctccatctttgctcactgtaacctctgccttctgggct

SEQ ID NO: 221835 - DNA, 201 bp, Homo sapiens
tttttttcttccaatagaaagaaatgcaggagttgaaactaaatagcagtaactcagcatcccctcatcgttggcccacagagaattatggaccagactcrgtgcctgatggatatcaggggtcacagacatttcatggggctccactaacaggtgagctggcaagtggataatcgcatattttagtaaaactactttact

SEQ ID NO: 221836 - DNA, 201 bp, Homo sapiens
tatcctagggataagaagcttggtgattctgatttcctgacttggagtggattaaagcaggaaattaagagggagtcaggctttttttttttttttttagkcagtatctgtctctcttgctcaggctggagtgcagcagctggctccatctttgctcactgtaacctctgccttctgggctcaagagatcttcccacctca

SEQ ID NO: 221837 - DNA, 201 bp, Homo sapiens
tccaaaagattaaaaaccactggtctagacagaagttagaatgttctttcaactacataacttctccattaaataaagtggagtggtggcagaattttgasgattggttattatgacacctctcttacacttagagtcttttttttcccccaaatttaaagtcatttacattagaacctggggatttcagcggaatatgga

SEQ ID NO: 221838 - DNA, 201 bp, Homo sapiens
tgtgccactgcactccagccttgtgacagagtgagattctgtctccaaaaacaaaaacaaaaaaactcagctctacatacatgagaaaatgagtatgtaawatataaatttttttttggtattatcgtaaaagtaattttaacttcatggatcccctgaaggggtttttgagcaccctcagagatctttagacctcacttg

SEQ ID NO: 221839 - DNA, 201 bp, Homo sapiens
agctaatattgtttacctaacagtgtagatagtataaaaattaagagtttaagtgcattggacgtattattatatacataataaattctctgcagctactrcttttttccctttcctggtggagcatttgaacatcaccttgagaattagttgtattttgtttcagcatggggttaagtgaaaagctaatttggggaggta

SEQ ID NO: 221840 - DNA, 201 bp, Homo sapiens
acagagtgagattctgtctccaaaaacaaaaacaaaaaaactcagctctacatacatgagaaaatgagtatgtaaaatataaatttttttttggtattatygtaaaagtaattttaacttcatggatcccctgaaggggtttttgagcaccctcagagatctttagacctcacttgctctggttgctttattgtaagccac

SEQ ID NO: 221841 - DNA, 201 bp, Homo sapiens; identical to SEQ ID NO: 40229

SEQ ID NO: 221842 - DNA, 201 bp, Homo sapiens
gccttggcaactgctaatctgtctctgtaggtttgcctcttctgaacatttcacataaatggaatcatatagtatgtggtcttttgtgactggcttctttsatttagcaaggttttcaaggttcatctgtgttatagcatgtatcagtactttatccgagactatgattttttgattgcttactgtaaacctatggaataa

SEQ ID NO: 221843 - DNA, 201 bp, Homo sapiens
aggtgatccacccgcctcggcctcccaaagtgctggaattacttgtgtgagccaccgcacagggccaataatagcattttttatgaaaaataattattttycaacagcaaaaaagtagtcagaaagtgtcattgcttttgcatttttgtgaatctttttaatgtcttgcttaatagaacatagctagattctcatttactt

SEQ ID NO: 221844 - DNA, 201 bp, Homo sapiens
aataatagcattttttatgaaaaataattattttccaacagcaaaaaagtagtcagaaagtgtcattgcttttgcatttttgtgaatctttttaatgtctygcttaatagaacatagctagattctcatttacttcctctttcagtctgtaaaactattacatgtcatgaagcctctagaaaactcagctcagcggggcgc

SEQ ID NO: 221845 - DNA, 201 bp, Homo sapiens
aagcttaaaaaaaaaaaaaagcaagcttagagcctttctgagattcttagtggggaccttggcttccaaaagattaaaaaccactggtctagacagaagtyagaatgttctttcaactacataacttctccattaaataaagtggagtggtggcagaattttgaggattggttattatgacacctctcttacacttagagt

SEQ ID NO: 221846 - DNA, 201 bp, Homo sapiens
gggcgtggtggcgcatgcctgtagtcccagctacccgggagcctgaggcaggagagtcgcttgaacccgggaggcggaggttccagtgagccgagatcgcrctactgcactccagcctgggcgacagagggagactccaaaaaaacaaaaacaaaaacaaaaaaaacccggaaactcacggatgaccatgattataatagt

SEQ ID NO: 221847 - DNA, 201 bp, Homo sapiens
accagcctggctaacatgttgatacctcgtctctactaaaaatacaaaaaaagttagccgggcgtggtggcgcatgcctgtagtcccagctacccgggagsctgaggcaggagagtcgcttgaacccgggaggcggaggttccagtgagccgagatcgcgctactgcactccagcctgggcgacagagggagactccaaaa

SEQ ID NO: 221848 - DNA, 201 bp, Homo sapiens
catttgcaatggcccgacggcgcaaatgacacggaaagtccccttgttttgagtatgaggtgtttgtcgctgtccctttgtaagggtccagctccactccrctcctcatactcacctccctcgcccccctccccgcccggaacactttggtagctgcctttgcttaaaaaaaaaaaattctaaagttcttacaaatcgtta

SEQ ID NO: 221849 - DNA, 201 bp, Homo sapiens
tggagaaacaataggatttagaagaactaatttagaatatagattacaaataataggccaggcgtagtggctcatgcctgtaatcccagcacattggtaarctgaggtgggtggattgtgaggtcaggagttgaagaccagcctggccaacgtagtgaaaccctgtctctactagaaatataagaaaagtttagcggggca

SEQ ID NO: 221850 - DNA, 201 bp, Homo sapiens
gaacccagtggggactgacgcagctccgggtgagctttggcggctgcgtcgagtgacaaggtaggcatctcagcgcggacatttgcaatggcccgacggcrcaaatgacacggaaagtccccttgttttgagtatgaggtgtttgtcgctgtccctttgtaagggtccagctccactccactcctcatactcacctccctc

SEQ ID NO: 221851 - DNA, 201 bp, Homo sapiens
cctggaggaacccagtggggactgacgcagctccgggtgagctttggcggctgcgtcgagtgacaaggtaggcatctcagcgcggacatttgcaatggccsgacggcgcaaatgacacggaaagtccccttgttttgagtatgaggtgtttgtcgctgtccctttgtaagggtccagctccactccactcctcatactcac

SEQ ID NO: 221852 - DNA, 201 bp, Homo sapiens
tggtactgtaatgagtaatttttcttctgttcgattttagctggatatagtactgttagaaattactttcttgcttaaagggtaaatgtatttccctttgktgtttgggaaattgttgctgtttagtattttgcattatgataactttaaaaatgtttactataatcacttctaatttattcgcaaaactgttagtgcttt

SEQ ID NO: 221853 - DNA, 201 bp, Homo sapiens
caccccgtagtacccgcgcggcctagttctcgggggcttgggcacccgggtgctgtatcggcgggtttcttcccatctcctggacatatactttatatgcygcggcggaggtcgtacctccttggcctggaggaacccagtggggactgacgcagctccgggtgagctttggcggctgcgtcgagtgacaaggtaggcatc

SEQ ID NO: 221854 - DNA, 201 bp, Homo sapiens
ctggccgatcgcgcaccccgtagtacccgcgcggcctagttctcgggggcttgggcacccgggtgctgtatcggcgggtttcttcccatctcctggacatwtactttatatgctgcggcggaggtcgtacctccttggcctggaggaacccagtggggactgacgcagctccgggtgagctttggcggctgcgtcgagtga

SEQ ID NO: 221855 - DNA, 201 bp, Homo sapiens
gcttcctctttctcccggcttgttcccgacgcttgttcccgacggtgctcgctcctggggccgccctggcccgggctttctggccgatcgcgcaccccgtrgtacccgcgcggcctagttctcgggggcttgggcacccgggtgctgtatcggcgggtttcttcccatctcctggacatatactttatatgctgcggcgga

SEQ ID NO: 221856 - DNA, 201 bp, Homo sapiens
tctgaggaaaagagggaattagttgaagggatctgtaagcaaacagtaattatggatataagggattatagcattttttgcctgacagaagaaagtgtgtrtatttatatgtgtttacaggtgtttaaaacttgatgatgttattgtcttgaagggaacttgtcatgtggtggagaagtatatttctgaaagtaagggtat

SEQ ID NO: 221857 - DNA, 201 bp, Homo sapiens
gggggacagcggtgggcgggagacctttggcgccggcgcttcctctttctcccggcttgttcccgacgcttgttcccgacggtgctcgctcctggggccgycctggcccgggctttctggccgatcgcgcaccccgtagtacccgcgcggcctagttctcgggggcttgggcacccgggtgctgtatcggcgggtttcttc

SEQ ID NO: 221858 - DNA, 201 bp, Homo sapiens
ataagggattatagcattttttgcctgacagaagaaagtgtgtatatttatatgtgtttacaggtgtttaaaacttgatgatgttattgtcttgaagggarcttgtcatgtggtggagaagtatatttctgaaagtaagggtatgtaggccctcagtgaggtggaagaataagaagggtggtatggtggtttcggtggtat

SEQ ID NO: 221859 - DNA, 201 bp, Homo sapiens
agaagggatgaataaggtatataggatggtgtttttggtggcatcatcataaaactagacatagtggaatggtgctctttgggagcatgacttgtttaaarttgcacaagtgttactctaataatttttctttttcccctctaaataggaacagcttctagattgtgaaggtgaagatggatggaataaactttttgactt

SEQ ID NO: 221860 - DNA, 201 bp, Homo sapiens
tccggctagtggaggtgtatcgctcaactaaaagattgaaggatgctgtggcccactgccatgaggcagagaggaacatagctttgcgttcaagtttagartggaattcgtgtgttgtacagacccttaaggtagataaaagctattgggtctttacatttctatgtaggcaattagcatacatctttttgtactaaagca

SEQ ID NO: 221861 - DNA, 201 bp, Homo sapiens
tggcccactgccatgaggcagagaggaacatagctttgcgttcaagtttagaatggaattcgtgtgttgtacagacccttaaggtagataaaagctattgrgtctttacatttctatgtaggcaattagcatacatctttttgtactaaagcagcagtgccccgcaggacttaaaatttcttttatttatgtagaacagtt

SEQ ID NO: 221862 - DNA, 201 bp, Homo sapiens
aaatgtatatatttttggtgttttataaggtcgatataaaaatcaatatagtttcacaaatgtggttggagtgagaaaaggaatttgtaggcttaaaatgrttaatttcttaacatttgattaagttttgtaacttactgttcattccacaaaataggaatatctggagtctttacagtgtttggagtctgataaaagtga

SEQ ID NO: 221863 - DNA, 201 bp, Homo sapiens
atatataaatggtacctcaagtgaaagaaatcaactacctaaaataggattttccactccaaactagattttctttacatgtcatttctgttaatgtgggycacacacactggtaagctcagaatcatctttttcttttcttttattcacatccaatatggttgaaataaaacaaaatgctgtttttccttttttagaaag

SEQ ID NO: 221864 - DNA, 201 bp, Homo sapiens
ataaaaattaagagtttaagtgcattggacgtattattatatacataataaattctctgcagctactacttttttccctttcctggtggagcatttgaacrtcaccttgagaattagttgtattttgtttcagcatggggttaagtgaaaagctaatttggggaggtaacgcggaatgtcaggtagtccagattgcagtgc

SEQ ID NO: 221865 - DNA, 201 bp, Homo sapiens
tatctagacttttcctcattgtcctgtataatcacggccttcacccttgttgggactccacagatttggagctgatcagatgggtttgttgagaacagctsatcagatgggtttttggaggattttagggggagggagattcatttgactgtgcaagatgggcgacagagtgagactccatctgaattaaaaaaaaaattt

SEQ ID NO: 221866 - DNA, 201 bp, Homo sapiens
tctagacttttcctcattgtcctgtataatcacggccttcacccttgttgggactccacagatttggagctgatcagatgggtttgttgagaacagctgakcagatgggtttttggaggattttagggggagggagattcatttgactgtgcaagatgggcgacagagtgagactccatctgaattaaaaaaaaaatttag

SEQ ID NO: 221867 - DNA, 201 bp, Homo sapiens
aattaaaaaaaaaatttagaactgcatagtgaaaaagtaggccacaaatattaagttttggacaattacaattacatctctatcttactgtgcaagataghgatgatgtggcatctcttagggtcttactgttcctgttttcagccctgcatcagttcttgatatttggcagcttaagtgaattcaggtatttgcttatag

SEQ ID NO: 221868 - DNA, 201 bp, Homo sapiens
gatttggagctgatcagatgggtttgttgagaacagctgatcagatgggtttttggaggattttagggggagggagattcatttgactgtgcaagatgggygacagagtgagactccatctgaattaaaaaaaaaatttagaactgcatagtgaaaaagtaggccacaaatattaagttttggacaattacaattacatct

SEQ ID NO: 221869 - DNA, 201 bp, Homo sapiens
catttagttttcttcagcagagatgaggtagccacatagctacactagacggcattgtatctatctgccatcttgtcaaggcagcagagttgtgttaagaraacatttttggagtcagatctggttcaaattccagctgttattccctgcatccgtttctctcattttaagataggagctaatattgtttacctaacagtg

SEQ ID NO: 221870 - DNA, 201 bp, Homo sapiens
agatgaggtagccacatagctacactagacggcattgtatctatctgccatcttgtcaaggcagcagagttgtgttaagaaaacatttttggagtcagatstggttcaaattccagctgttattccctgcatccgtttctctcattttaagataggagctaatattgtttacctaacagtgtagatagtataaaaattaag

SEQ ID NO: 221871 - DNA, 201 bp, Homo sapiens
atatatcttattttaacaatagggttcaaaggagcttgacttttttggaattggaaataaaagtaggttctttcatgtttatcaggcaagaactaaattaytcatactgctaaggttacatcaaggatatgctgatgtgtggcgattattacagtgtgatcagcagtatttgcaacttaagagaatactgtgtggtgggga

SEQ ID NO: 221872 - DNA, 201 bp, Homo sapiens
ttggacgtattattatatacataataaattctctgcagctactacttttttccctttcctggtggagcatttgaacatcaccttgagaattagttgtattytgtttcagcatggggttaagtgaaaagctaatttggggaggtaacgcggaatgtcaggtagtccagattgcagtgcagaaagaacacactgaaaggatgg

SEQ ID NO: 221873 - DNA, 201 bp, Homo sapiens
atcaccttgagaattagttgtattttgtttcagcatggggttaagtgaaaagctaatttggggaggtaacgcggaatgtcaggtagtccagattgcagtgyagaaagaacacactgaaaggatggtcagtgtaatgttagaggactgtgaaagttgaggaaagaagtttagtttgtagatacttgtttttttgagcaggga

SEQ ID NO: 221874 - DNA, 201 bp, Homo sapiens
ttaacatatatgtatgtaagccctgaactgtgtatttagaaagcaattttagtaaattgaactattttttagacctggaaacgtagcaaaattgagacttytagttcagcatgaaataaacactctaagagcccaggaaaaacatggccttcaacctgctctgcttgtacattgggcagaatgccttcagaaaacggtgag

SEQ ID NO: 221875 - DNA, 201 bp, Homo sapiens
caccttggcctcccagagtgttgggattacaggtgtgagccaccacgcctgtacctggcctatctttcataggttatataaattccttggttcccagtttytgcagtcttttccaattcagtttaattaatggttaactgtttattcattatcaaaaaaagtacagtgtaatagataagaccatgttactattagaagtat

SEQ ID NO: 221876 - DNA, 201 bp, Homo sapiens
aaatcaatatagtttcacaaatgtggttggagtgagaaaaggaatttgtaggcttaaaatgattaatttcttaacatttgattaagttttgtaacttactrttcattccacaaaataggaatatctggagtctttacagtgtttggagtctgataaaagtgactggcgagcaaccaatacagacttactgctggcctatgc

SEQ ID NO: 221877 - DNA, 201 bp, Homo sapiens
atataaattccttggttcccagtttttgcagtcttttccaattcagtttaattaatggttaactgtttattcattatcaaaaaaagtacagtgtaatagayaagaccatgttactattagaagtatgggtatcatcaaattaagatttttgattctaaaattattaggttccaagaccaaagattaaattaataaaaggtg

SEQ ID NO: 221878 - DNA, 201 bp, Homo sapiens
aatcttatgcttcttacgctttccactagagatgtgcaggaaagtagagaattactgcaaaggtacgttgactttgagaagaatgctttagtataaattgyagtttttctttttgcagtaagttcattgctctaaacttcttcactgaatcattatttgtataatgtacctaggagttatagttaatacagtgaacaacta

SEQ ID NO: 221879 - DNA, 201 bp, Homo sapiens
gctgatcagatgggtttgttgagaacagctgatcagatgggtttttggaggattttagggggagggagattcatttgactgtgcaagatgggcgacagagygagactccatctgaattaaaaaaaaaatttagaactgcatagtgaaaaagtaggccacaaatattaagttttggacaattacaattacatctctatctta

SEQ ID NO: 221880 - DNA, 201 bp, Homo sapiens
atgggtttgttgagaacagctgatcagatgggtttttggaggattttagggggagggagattcatttgactgtgcaagatgggcgacagagtgagactccrtctgaattaaaaaaaaaatttagaactgcatagtgaaaaagtaggccacaaatattaagttttggacaattacaattacatctctatcttactgtgcaag

SEQ ID NO: 221881 - DNA, 201 bp, Homo sapiens
tttttgtgggagttaggctttcagtccttaaagtgactttctacttttttccttttctcttttccttctacccttgcagggctctcataagtgcctttgcrtggtgtcacagttagataaaaattgcctgtattttttttaatgtctttgatctgggcatcccgagggtgcctctgtaagtgtgctgagacacaactgtgt

SEQ ID NO: 221882 - DNA, 201 bp, Homo sapiens
acctaattgcccagcagaattaactcgaaggagggtttttaaaaaaagttcaattgaaatataattcatataccatacgcttcacccatttaaagtgtacrgttcagtggcttttagtatgttcatagagtattaccactgtcaccacagtcagttttagaagattttcatcactccatgaggaattccttacctattagc

SEQ ID NO: 221883 - DNA, 201 bp, Homo sapiens
gaattaactcgaaggagggtttttaaaaaaagttcaattgaaatataattcatataccatacgcttcacccatttaaagtgtacagttcagtggcttttastatgttcatagagtattaccactgtcaccacagtcagttttagaagattttcatcactccatgaggaattccttacctattagcagttacttcccatttt

SEQ ID NO: 221884 - DNA, 201 bp, Homo sapiens
caccacagtcagttttagaagattttcatcactccatgaggaattccttacctattagcagttacttcccattttacccaaacctctcagccttggcaacygctaatctgtctctgtaggtttgcctcttctgaacatttcacataaatggaatcatatagtatgtggtcttttgtgactggcttctttcatttagcaagg

SEQ ID NO: 221885 - DNA, 201 bp, Homo sapiens
gtttccaagatttccaaggctgatgaaaattcttctgttgtctgcttgtcttactttcttgaatttattttttgtatgttatgtatttattatttagagasaggatctccctgtgtcacccacgctggagtgcagtgtcacagtcataactcacggcagtgtcaacctcctgggctcaagtgattctccttccttggcctc

SEQ ID NO: 221886 - DNA, 201 bp, Homo sapiens
agcattctttaaagattttctttaataacttgaaggcactgttacacctttcctgtatcagattttttttttttggaattgaaatccatgagatttataaytgtcatgcaaagtaattccatttctcctaaaatttaaggcttgctaaggtaaacagtttctgacatttgtttaatgaatgagagtattactgttgagaag

SEQ ID NO: 221887 - DNA, 201 bp, Homo sapiens
atgagatagaactttttaaaaagcactcatagtggtttttaaaaatatttttaacatagagtcaaagactagggcttttgcaatagggagaggccagggtwtcatccatctcatccagaagaggagaaattgataaaggagagaggggaatgaaatacagagtagtaatgggcggcttggtcttgagagttggggaaagac

SEQ ID NO: 221888 - DNA, 201 bp, Homo sapiens
aagggtggtatggtggtttcggtggtatgaccaaaatacagattttgaagacctgtgtcagtggcaagtggatggttgaggttcgagtggaggataacatsactggagatgaggtgattaaggaactgagtagtcagcctgggcaacacagcaagaccccatctctacagaacgttaaaaaaaaattagccgggcacggtg

SEQ ID NO: 221889 - DNA, 201 bp, Homo sapiens
ggaagagacttggttgttgacttggtgccattttccctttaaatgttgagcagtttttaccaatgaaaccacgtctggagttttcttaagttttaaaaaayactattgatttctcttctttattatttccttcttgccttggattttgcactttttttctagtttcttttttttttttttggcttttgagacagtctcgct

SEQ ID NO: 221890 - DNA, 201 bp, Homo sapiens
aagatgaactaaaatgagagcagctcaaacaagatgagaggctgagctaaagctctagcagaaagagaggtattaaagatataaaattggctgcaattcaratgtggagagtgagaaatggtgaagttggaggtagtccctaagcaaggaaaaccccccaaaattaactagaaattcttttaatcaattgtattttaagat

SEQ ID NO: 221891 - DNA, 201 bp, Homo sapiens
ttttgaatctgataatgtcattgtcccaagggaccttagaaatgaagactttagacatgagtaaactgaggccaagagaggctatctgatttacccaaggkgtctttactgagtaatagcagaagtggaacaagaatctgtatcttacggtgtactgttatttctcctagctagaaaatgatactaagtttttgtttataa

SEQ ID NO: 221892 - DNA, 201 bp, Homo sapiens
ttttaacttctaattaatataaaaattaatgatattttacattattgtttttcaccaagtcttcaaaatccagtgtgtgtgtttacacttactgttagcaygtcttgatttggactagccaccttgtgaggttttaatagaatgtggctaggctaccatattggacaccatagctctcagaatgtttccctatcactagtt

SEQ ID NO: 221893 - DNA, 201 bp, Homo sapiens
tgcttgaaaccaggaggcggaggttgcagtgagctgaaatcgtgccactgcagcactgcagcctggcgacagagcgagactccatctcaaaaaaaaaaaaaggaaatagtgaattgagatgatttgattgagtggattcacaactaattaactggtcacagattcaactgttgaataattttgtaaaagaggccgggttta

SEQ ID NO: 221894 - DNA, 201 bp, Homo sapiens
ttgaacccaggaggtggaggttgcagtgagctgagattgaaccactgcactccagcctgggcgacacagcgagactccatctcaaaaaaaaaaaaaaaaaattgtagaactatacactccctggctgggtgtggtggctcacacctgtaatcccaggactttgggaagccaaggcaggtggatcacaaggtcaagagatcg

SEQ ID NO: 221895 - DNA, 201 bp, Homo sapiens
agccaccgtgcccagccggaaataattcttaaaagctgtttaaaggaggattctgatcagccaggttcagaaatcagtgtatcagatcagagaataagagyttgtccctgttctcctatggccacttaaatccagaccttttcatctgaaatgcaaatatgtttggcatttttcatacacattcctgtcttttttccccct

SEQ ID NO: 221896 - DNA, 201 bp, Homo sapiens
ggattctgatcagccaggttcagaaatcagtgtatcagatcagagaataagagtttgtccctgttctcctatggccacttaaatccagaccttttcatctraaatgcaaatatgtttggcatttttcatacacattcctgtcttttttcccccttctgctgtcttatgtagatactgagaatattaaacctgtactcttct

SEQ ID NO: 221897 - DNA, 201 bp, Homo sapiens
ggcggaggttgcagtgagccaagatcacactgctgcacgacagcctgggcgacagagcgagacttcgtctcaaaaacaaaaagtgttggaattataggcawgagccactgcatctggccatatttttcatctaaatggttgtttatgtatgatttatcttgcttccttcatgaattctctcccacagtctctgtattaaaa

SEQ ID NO: 221898 - DNA, 201 bp, Homo sapiens
attcagtcagaactttatgtaagacctgatgacgtccatgtgaacatccggctagtggaggtgtatcgctcaactaaaagattgaaggatgctgtggcccrctgccatgaggcagagaggaacatagctttgcgttcaagtttagaatggaattcgtgtgttgtacagacccttaaggtagataaaagctattgggtcttt

SEQ ID NO: 221899 - DNA, 201 bp, Homo sapiens
ccaagttttctcaacttttccactgttaataatcatactctgataaaaacttcaacaaaaagtgtcttcattgcaagttatttccatagagatacctaaawacagaattagagacaaaggccatgaacatctttaagtcttgcaaattgccaaaatgacagaaagattatacctctttatgcttccagaagcacataacct

SEQ ID NO: 221900 - DNA, 201 bp, Homo sapiens
ttaaatactcagttttgtcatagtcaagcctaaaatgaatgttctaactgctatttcatattttattttttaaaatagtataatcttgagtgaaaattaargttcatctgtcatcagatggctaggttcacatgtattagtataagcacttagcatcactggtatttcagaaaatactgttttagctgagaaacaaaataa

SEQ ID NO: 221901 - DNA, 201 bp, Homo sapiens
cggctagcctttcctggggcttttttagtgatgtgtgcagtcagttatttggtgccttgtgggtcatgatttccatttcttctgtgtacaggcataaaagrtcttctgttcttatacaagcatgtaaatccaacattctcattgtctcattttattcttgcaatgaccctgtgaaatgtgtagaagcagcacatcgtcatt

SEQ ID NO: 221902 - DNA, 201 bp, Homo sapiens
tctgttgaaggccttcaagaacaggttagggaagtgaaatctcacccttagtgaccagtaacacatcttagccatgccaaacaagtacaatgataaagtarcaatctctgattttttttttaagtataccagttttattactagctaaggtagctcttaatcttttatttttaaagatacggtctttgagaaatgtgaaaa

SEQ ID NO: 221903 - DNA, 201 bp, Homo sapiens
tctctacagaacgttaaaaaaaaattagccgggcacggtggtgcatgcctgtggtcctagcttcttgagaggctgatggaagagcatcgcaaatgagaagygagtggccacaaaccctacttcctctccttgtatgtaagttcagagagaaaaagccatcatggtagtgggggttatcctgagatgatactgtcttcattt

SEQ ID NO: 221904 - DNA, 201 bp, Homo sapiens
ggatgtatacttgcgtacagtttctgtgagctctaggttaggaatccctgacctaagaatgaatgtgcctatatactactgtagaacatagagccttattytgttttgaatctgataatgtcattgtcccaagggaccttagaaatgaagactttagacatgagtaaactgaggccaagagaggctatctgatttacccaa

SEQ ID NO: 221905 - DNA, 201 bp, Homo sapiens
gggcacggtggtgcatgcctgtggtcctagcttcttgagaggctgatggaagagcatcgcaaatgagaagtgagtggccacaaaccctacttcctctcctygtatgtaagttcagagagaaaaagccatcatggtagtgggggttatcctgagatgatactgtcttcatttaaggtcaggaggtgatgacagtgctttgag

SEQ ID NO: 221906 - DNA, 201 bp, Homo sapiens
ggatttgtataaagatgttagtttagagcaggggttgattagaacttgtgggccaaatatggcccctgcctaattttgttaatatttattggaatgcagcwtgcctctgtttatgtattgtctgtggctgcttacatactacaaggttggagttgagtggttgcagcagagattgtatgcctgtaaagccagattagtatt

SEQ ID NO: 221907 - DNA, 201 bp, Homo sapiens
gacatttgtttaatgaatgagagtattactgttgagaaggctttttctctcaagtatgagatagaactttttaaaaagcactcatagtggtttttaaaaawatttttaacatagagtcaaagactagggcttttgcaatagggagaggccagggtttcatccatctcatccagaagaggagaaattgataaaggagagagg

SEQ ID NO: 221908 - DNA, 201 bp, Homo sapiens
atttgtttaatgaatgagagtattactgttgagaaggctttttctctcaagtatgagatagaactttttaaaaagcactcatagtggtttttaaaaatatktttaacatagagtcaaagactagggcttttgcaatagggagaggccagggtttcatccatctcatccagaagaggagaaattgataaaggagagagggga

SEQ ID NO: 221909 - DNA, 201 bp, Homo sapiens
aaaactttgggaagctgaggtgggtgaatcacttgaggccaggaatttgagatcagcctggccaacatggtgaaaccctgtctttactaaaaatagaaaartcagctgggcgtggtggtacacgcctgtaatcccgactacttgggaggctgaggtacaagaatcacttgaggctgggaggcggaggttgctgtgagctga

SEQ ID NO: 221910 - DNA, 201 bp, Homo sapiens
tatccagctgtaagatttctaccttccacttaagtggtaatatgttcattctgtgaaaaattaagtgcattgtaatccctagagtcaccatttaaaaaackattcaaagagatatattcaaaaccaatatatgaattaaaacagaacgctaaaaatcatttaaataaccaaaaaggaggcgaaaagtggtaagcagaagga

SEQ ID NO: 221911 - DNA, 201 bp, Homo sapiens
gaggccaaggcgggcagatcacttgaggtcgggagtttgagaccagcctgaccaacatggagaaaccccgtctctactaaaaatacaaaaattaaccaggmgtagtggcgcatgcctgtaatcccagctacttgggaggctgaggcaggagaagcacttcaacctgggacaggaggttgcagtgacccgagattgcgccat

SEQ ID NO: 221912 - DNA, 201 bp, Homo sapiens
tttggggaggtaacgcggaatgtcaggtagtccagattgcagtgcagaaagaacacactgaaaggatggtcagtgtaatgttagaggactgtgaaagttgrggaaagaagtttagtttgtagatacttgtttttttgagcagggaattgtcttggctggaggtgaacgtcagaaaggttaatgtaggcaagtgtagaatgg

SEQ ID NO: 221913 - DNA, 201 bp, Homo sapiens
tattgctgcaaaatagttaatgtagttaaatataagcacttagaggagcaatgcctggcacacagtgaatgttacatattagctgagctgttactgttatkccttaataattaagttctgataattattcagcctgaaaattaaaaaaaaaaattagcacaaggctttgtaggtaagaccattatagatctttctaaatac

SEQ ID NO: 221914 - DNA, 201 bp, Homo sapiens
ttgactggtggcatgacacccttgttggtttgttttttaaaatgtactgggatgctgatttgtaatgtacttcattgctctgctatttcaggtctgctcartgaagacctatgttttatctaatgtttatgtttagccactaacgtctgccagtattcaaatgtagtggcaacggcatgtatacaatatggaagagtgtcc

SEQ ID NO: 221915 - DNA, 201 bp, Homo sapiens
ggaaatagttatgtatatatatcttattttaacaatagggttcaaaggagcttgacttttttggaattggaaataaaagtaggttctttcatgtttatcargcaagaactaaattactcatactgctaaggttacatcaaggatatgctgatgtgtggcgattattacagtgtgatcagcagtatttgcaacttaagagaa

SEQ ID NO: 221916 - DNA, 201 bp, Homo sapiens
tcacccttagtgaccagtaacacatcttagccatgccaaacaagtacaatgataaagtagcaatctctgattttttttttaagtataccagttttattacyagctaaggtagctcttaatcttttatttttaaagatacggtctttgagaaatgtgaaaagtgttaacttaaaagtggatgtatacttgcgtacagtttct

SEQ ID NO: 221917 - DNA, 201 bp, Homo sapiens
gcagaaaaaacgagccgtatgtgatcacgtgtatataaaggcttaaagaacacttaatccacacctcagatgagctgagatgagattattccttaaattgmaaaatgttattgaatagagttatgcactaagaaatgcttaattaagaacctacacctctggggaattattttgatgataatgatgagaggcaggacgtta

SEQ ID NO: 221918 - DNA, 201 bp, Homo sapiens
gtgggtgtgtatcagacatttattagagtatacagtaaacagttaatgaactaaggttactaatagtgtttactgtgggttggctatgtgcaaaagtgctktgtgaatgtaattttatttaattacagtaacttagaatggccggtaccattattaatcccttttttataaataaggaaattaaagaaaggttaggtaact

SEQ ID NO: 221919 - DNA, 201 bp, Homo sapiens
tacttaccactacaacatgcatgttaaagaatgccagtttaagcaaagtaccttttgactggtggcatgacacccttgttggtttgttttttaaaatgtastgggatgctgatttgtaatgtacttcattgctctgctatttcaggtctgctcaatgaagacctatgttttatctaatgtttatgtttagccactaacgtc

SEQ ID NO: 221920 - DNA, 201 bp, Homo sapiens
atagagctgagattcacactccggtggtgtaactccaaagcacttgccagtataatacattgctcccaggcagcgagaaataacaaaattgttccttttaygtacgacagacttctgaaatggtagtagtagtagtgccctttttttttctctttttagcccaggaaagatttagaataaaatctagtttagatgagcaca

SEQ ID NO: 221921 - DNA, 201 bp, Homo sapiens
acttgtgggccaaatatggcccctgcctaattttgttaatatttattggaatgcagcatgcctctgtttatgtattgtctgtggctgcttacatactacarggttggagttgagtggttgcagcagagattgtatgcctgtaaagccagattagtattctcctcctttttgtagaaaaagtttactgattgctagtttagg

SEQ ID NO: 221922 - DNA, 201 bp, Homo sapiens
tagttatgtatatatatcttattttaacaatagggttcaaaggagcttgacttttttggaattggaaataaaagtaggttctttcatgtttatcaggcaakaactaaattactcatactgctaaggttacatcaaggatatgctgatgtgtggcgattattacagtgtgatcagcagtatttgcaacttaagagaatactg

SEQ ID NO: 221923 - DNA, 201 bp, Homo sapiens
tctgtgtagtcgtggcctatgacaattacatacaattttgacttaacatacaggtttcaggctcccaacattgtattctgtggaagtatcgtggagcactratccatgagcttgaaaagcttggtactagtactgactctgccattaattaatgatcttgggccagtcacttccattgtgactgtttggcttcttatcttt

SEQ ID NO: 221924 - DNA, 201 bp, Homo sapiens
agcttggtactagtactgactctgccattaattaatgatcttgggccagtcacttccattgtgactgtttggcttcttatctttaaaatgagagaattacygaagccagttctcatcacactgaatgttaaaaattacagttacagcagtgattgcaaattcaaagctctggtgcggataccaacagtgaccataaagttt

SEQ ID NO: 221925 - DNA, 201 bp, Homo sapiens
gttttttaaaaataagatgattaaaattaaagattaatgagctcataggagatactcagaagtactgaacagggtgaagaaaactaaaagctaaccacctyattaacatttcctatatttgagagcatttccttctagttctttctctatacatatagtattttttatgagattgttaccatgttactatgttgtgtgtag

SEQ ID NO: 221926 - DNA, 201 bp, Homo sapiens
tttattagagtatacagtaaacagttaatgaactaaggttactaatagtgtttactgtgggttggctatgtgcaaaagtgctttgtgaatgtaattttatytaattacagtaacttagaatggccggtaccattattaatcccttttttataaataaggaaattaaagaaaggttaggtaacttactcattattatacagc

SEQ ID NO: 221927 - DNA, 201 bp, Homo sapiens
atcagatggaaaatagcaatgaataaaaaattaaaccgtaattgtaaggcaggagaatagcttgtataaaagatgtttaattgacacaatatgtgatgctstaaggctctatcctagggataagaagcttggtgattctgatttcctgacttggagtggattaaagcaggaaattaagagggagtcaggcttttttttttt

SEQ ID NO: 221928 - DNA, 201 bp, Homo sapiens
gtgcaagagagggatcccaaagctcacagatttctgggtcttctttatgaattggaagaaaacacagacaaagccgttgaatgttacagggtaagttacargattcaaatatagcctttgcatagccaaacacatgatgcccagagaaatttatataagtaagtcaaatatattttatgaatatcataaaacaggcattgg

SEQ ID NO: 221929 - DNA, 201 bp, Homo sapiens
cgtcatcagccattatgaacgcccttgttttcttgctgtcagctgtttgagattgtcatgatgatgttaaattatgttcagtcttctgagtgttttgttgrttaatttgtgttactactcttttattaggatttatgttgtctggtgtattgtagcatctgtatttctgtcaccattgaaaatcagttagaaaacatcagt

SEQ ID NO: 221930 - DNA, 201 bp, Homo sapiens
tgttctgtgcctgcttcctccccatagtaatttcaaaatagctatcctcacctctgtaaggtttccaaaatcaaacttgggcttctggctagccttttctrggtcttgatttttcagtgctttccagaggcaattgtttggaacctcttggcacagtttctgtttctttttccatgtacaggcataaaaggtcttttggtt

SEQ ID NO: 221931 - DNA, 201 bp, Homo sapiens
ttcctctacaattatcatggttaacagaagtaatagaaagagcatggactttagaatcagaagatgttagattgtacaacacttttctgtgttcatgaagraaaaaatataataaaggcaaaaaataataataatacaaaacaacagaaaaagaaaaaagataattaaaaaacactttcacgtgtattatttaaagtgtaa

SEQ ID NO: 221932 - DNA, 201 bp, Homo sapiens
atataataaaggcaaaaaataataataatacaaaacaacagaaaaagaaaaaagataattaaaaaacactttcacgtgtattatttaaagtgtaaagtgcytattaaagtggcaaaaatgtaaataagataaaatatatcattttagagtttttacttttggaattttttgcaaatgaaagcccttaattaatgtctttta

SEQ ID NO: 221933 - DNA, 201 bp, Homo sapiens
gcaaaaaataataataatacaaaacaacagaaaaagaaaaaagataattaaaaaacactttcacgtgtattatttaaagtgtaaagtgcctattaaagtgrcaaaaatgtaaataagataaaatatatcattttagagtttttacttttggaattttttgcaaatgaaagcccttaattaatgtcttttatttttagttgc

SEQ ID NO: 221934 - DNA, 201 bp, Homo sapiens
agtcagtgtcattttttaagatggacttaaacattcttcatcactactatttttattaaaatttctagaaataatcaagtgagaatgcatttaataagaasatgagattttgcctaacatagaattcccttcagctttgatatagaaaagcagttatataattaagatatatataatgtgaattgtttatgttggcaaaac

SEQ ID NO: 221935 - DNA, 201 bp, Homo sapiens
ttgaaattttagccagttctttcaacttgtaaatgaactttagatctaatcatgcgtgttccttaaagttgtgtgcttttaactttcttttttagggcagyggtcttaattctttttatgatcaacgagaatacatagggagaagtgttcattattggaagaaagttttgccattgttgaagataataaaaaagaagaaca

SEQ ID NO: 221936 - DNA, 201 bp, Homo sapiens
tgtaggttatgtgctggcatttgggtatttaagaattggctaacttttatggcaagattttcagactcttaatcagaggaatactgtggttctagtaagtrcatctgcattgcagctaggtagttaacaaagtatcttgaaaccttttagttaagatgaggaaatagccaggcacggtggctcacgcctatgatcttagca

SEQ ID NO: 221937 - DNA, 201 bp, Homo sapiens
aactaatgttattgctttcttgtgtgttcttcaggaaatgttttatgcatctccaagtaaacacatatatatctcctgtctttaaaagaaggaggaaaacrtttgaacattgcatttactttatttccattaactgtatcttggagatgtttccatgtcagtatatataaagggcattctcattagtttggatgcttgcat

SEQ ID NO: 221938 - DNA, 201 bp, Homo sapiens
ttaaacattttcatagtgtagacattcaggtaacagagttcctttatgaatttattggagatgggaatttccagtttataaacaaagacatagagctatamactgcttaaattaattgccttgttatttaatgttaatcttgttttctaaattcactagctctcacacataagatatgacagagaagaataatgagatgtt

SEQ ID NO: 221939 - DNA, 201 bp, Homo sapiens
tgactctgccattaattaatgatcttgggccagtcacttccattgtgactgtttggcttcttatctttaaaatgagagaattactgaagccagttctcatyacactgaatgttaaaaattacagttacagcagtgattgcaaattcaaagctctggtgcggataccaacagtgaccataaagttttctaggtgattccact

SEQ ID NO: 221940 - DNA, 201 bp, Homo sapiens
ttcacttggaaaagctttccaagttaacattcctctacaattatcatggttaacagaagtaatagaaagagcatggactttagaatcagaagatgttagaytgtacaacacttttctgtgttcatgaagaaaaaaatataataaaggcaaaaaataataataatacaaaacaacagaaaaagaaaaaagataattaaaaaa

SEQ ID NO: 221941 - DNA, 201 bp, Homo sapiens
ttaacattcctctacaattatcatggttaacagaagtaatagaaagagcatggactttagaatcagaagatgttagattgtacaacacttttctgtgttcmtgaagaaaaaaatataataaaggcaaaaaataataataatacaaaacaacagaaaaagaaaaaagataattaaaaaacactttcacgtgtattatttaaa

SEQ ID NO: 221942 - DNA, 201 bp, Homo sapiens
tatatcttattttaacaatagggttcaaaggagcttgacttttttggaattggaaataaaagtaggttctttcatgtttatcaggcaagaactaaattacwcatactgctaaggttacatcaaggatatgctgatgtgtggcgattattacagtgtgatcagcagtatttgcaacttaagagaatactgtgtggtggggaa

SEQ ID NO: 221943 - DNA, 201 bp, Homo sapiens
gaatgttacagggtaagttacaggattcaaatatagcctttgcatagccaaacacatgatgcccagagaaatttatataagtaagtcaaatatattttatraatatcataaaacaggcattggtatcatagtacagttacgtgacacagcttggaacagatttagaattgtttaacacctataaattgtaagtctaacacg

SEQ ID NO: 221944 - DNA, 201 bp, Homo sapiens
atttgtcatgtgacccattaacatatatgtatgtaagccctgaactgtgtatttagaaagcaattttagtaaattgaactattttttagacctggaaacgyagcaaaattgagacttctagttcagcatgaaataaacactctaagagcccaggaaaaacatggccttcaacctgctctgcttgtacattgggcagaatgc

SEQ ID NO: 221945 - DNA, 201 bp, Homo sapiens
cctcatggttaggtctttctgggaaatttttaattgaaacacttgtagaaaaagaaagcagacatgctagatctgtccctgacctcacttgttagaactgrtcggattcctgggctgatacagagaagtttgaaacttttcaaaatttacctgttttctgataccactacaatttctttggaaaaagaatttcctgttaag

SEQ ID NO: 221946 - DNA, 201 bp, Homo sapiens
atcagttatttaaatttaaaagagtaagtttccccagcactgtttctgtcatgatataattaaatgtttaaaattatttgatttttttttcttccaatagraagaaatgcaggagttgaaactaaatagcagtaactcagcatcccctcatcgttggcccacagagaattatggaccagactcggtgcctgatggatatca

SEQ ID NO: 221947 - DNA, 201 bp, Homo sapiens; identical to SEQ ID NO: 40208

SEQ ID NO: 221948 - DNA, 201 bp, Homo sapiens; identical to SEQ ID NO: 40209

SEQ ID NO: 221949 - DNA, 201 bp, Homo sapiens
ctgttttatttaaaatataagagttcgtggcacagagaaggttcctgagtgattgaactgctaccatgtactaatcatactctggtctatgagttcattcycagattagctgtggattacatgtgtttcaaatgtatagctaggaattgaaaagtggtctgagcttcaaaaagtcttactatattttaatacttccatatg

SEQ ID NO: 221950 - DNA, 201 bp, Homo sapiens
atattaaatcaaagttattataagctttggtgtatagttaggctgttggccagagctcacattgctcttttattccatagctcacttttttttgtgggagytaggctttcagtccttaaagtgactttctacttttttccttttctcttttccttctacccttgcagggctctcataagtgcctttgcgtggtgtcacagt

SEQ ID NO: 221951 - DNA, 201 bp, Homo sapiens
aaaacatgttccttgaggcctattaacatttctttcctaaattgtctattcatatggtgcttttaaaagttagattacttttagtagatttattagagcckcacagtttagagtcagtagtcaattaaagtccctacttaaacttcagactaagattttttttttatttaatattttattttttctttttgctttcatgca

SEQ ID NO: 221952 - DNA, 201 bp, Homo sapiens
ctacttttttccttttctcttttccttctacccttgcagggctctcataagtgcctttgcgtggtgtcacagttagataaaaattgcctgtattttttttwatgtctttgatctgggcatcccgagggtgcctctgtaagtgtgctgagacacaactgtgtagtggtaaccaaacctaattgcccagcagaattaactcga

SEQ ID NO: 221953 - DNA, 201 bp, Homo sapiens
tttctaggttttggctattgttcagctgctatgaacaatcaagtacagatttttgaagctgaaaaagcattgaagatgcttccaaagataaatattactgmtaagtttttctccccagtaataagcagctggattttaaatattaatctaaaacgtgaggtctaattgtgcagatttctttactctcttaggtgttatgcc

SEQ ID NO: 221954 - DNA, 201 bp, Homo sapiens
ttggcctcccaaagtgctgggattacaggcatgagccaccgtgcccagccggaaataattcttaaaagctgtttaaaggaggattctgatcagccaggttyagaaatcagtgtatcagatcagagaataagagtttgtccctgttctcctatggccacttaaatccagaccttttcatctgaaatgcaaatatgtttggca

SEQ ID NO: 221955 - DNA, 201 bp, Homo sapiens
atggactttagaatcagaagatgttagattgtacaacacttttctgtgttcatgaagaaaaaaatataataaaggcaaaaaataataataatacaaaacarcagaaaaagaaaaaagataattaaaaaacactttcacgtgtattatttaaagtgtaaagtgcctattaaagtggcaaaaatgtaaataagataaaatata

SEQ ID NO: 221956 - DNA, 201 bp, Homo sapiens
tctcttcatcttccacaaaatttgagaccttcaaaggtagaaactgttttatttaaaatataagagttcgtggcacagagaaggttcctgagtgattgaastgctaccatgtactaatcatactctggtctatgagttcattcccagattagctgtggattacatgtgtttcaaatgtatagctaggaattgaaaagtggt

SEQ ID NO: 221957 - DNA, 201 bp, Homo sapiens
agtgattgaactgctaccatgtactaatcatactctggtctatgagttcattcccagattagctgtggattacatgtgtttcaaatgtatagctaggaatygaaaagtggtctgagcttcaaaaagtcttactatattttaatacttccatatgaatttgacttcattatgtaaggaaatagttatgtatatatatcttat

SEQ ID NO: 221958 - DNA, 201 bp, Homo sapiens; identical to SEQ ID NO: 40218

SEQ ID NO: 221959 - DNA, 201 bp, Homo sapiens; identical to SEQ ID NO: 40221

SEQ ID NO: 221960 - DNA, 201 bp, Homo sapiens
atcttctttagtggagtttctatttttaatccattttggtaacatttctagaaaagaatccatttccctgattgtatccggtttactagtgtaaggccatycattatattttttcattcttgtaatatctttcacattgctctttatagcaccccttaaatagttctagtacaaggtgtttgatttatggaatacatttta

SEQ ID NO: 221961 - DNA, 201 bp, Homo sapiens
attctgaaatgcagaaccatttttgagctttggaatgactctgactttgatccttactcttttaactatactttcatatgtgatttgttaatatttcaggwtttgtgagtttatactttttaaggatatgattttgtagttttcttttttgtactatctttggatttcagtattagggttgtgctaatttattgtgctaag

SEQ ID NO: 221962 - DNA, 201 bp, Homo sapiens
catctttgctcactgtaacctctgccttctgggctcaagagatcttcccacctcagcgccccaagtagctggggatacagatgcgcaccaccacacctggmtaaggtttgcattttttggtagagacaggtgtcactatgttgcccaggctagtcttgaacttctgagcacagcagtctgcctgcctcggcctcccgtagt

SEQ ID NO: 221963 - DNA, 201 bp, Homo sapiens
ggccactctctcactttttttctgaagctggtcagaatgtccccttgccatccaaatagtatggcaaggggacattttggtctttttttttttttttaagrcagggtcttgttctgttgtgcaggctggagtacagtggtatgatcacagcttactgtggcttcgacctcctagctcaagagaggctcttggctcagcctg

SEQ ID NO: 221964 - DNA, 201 bp, Homo sapiens
cagtgtgatcagcagtatttgcaacttaagagaatactgtgtggtggggaagacatttttgaatttgcacaaaaattttgaatgttaattctgtgtagtcrtggcctatgacaattacatacaattttgacttaacatacaggtttcaggctcccaacattgtattctgtggaagtatcgtggagcactaatccatgagct

SEQ ID NO: 221965 - DNA, 201 bp, Homo sapiens
taaaaattacagttacagcagtgattgcaaattcaaagctctggtgcggataccaacagtgaccataaagttttctaggtgattccactagtttcttattrgatgtgtatgtgtagcatctggactaggcactgtagatggatgagtgggggaaattttatttagcttgaaaattgagatagttttggacctcatggttag

SEQ ID NO: 221966 - DNA, 201 bp, Homo sapiens
gctaaggtttgcattttttggtagagacaggtgtcactatgttgcccaggctagtcttgaacttctgagcacagcagtctgcctgcctcggcctcccgtastgttgggactacaggtgtgtgttactgctcccagctgggaggcaggcttttaaaggcatccaaaggaagatggaaatgctggtaagaaaggaaaatggtg

SEQ ID NO: 221967 - DNA, 201 bp, Homo sapiens
cgttggcccacagagaattatggaccagactcggtgcctgatggatatcaggggtcacagacatttcatggggctccactaacaggtgagctggcaagtgsataatcgcatattttagtaaaactactttacttccctcttttaagtagataacgtgtgaaatcaccttgtttatatatgtttgttaatatacatgtcaac

SEQ ID NO: 221968 - DNA, 201 bp, Homo sapiens
tgataatgatgagaggcaggacgttatataggaaatcttacttaatttgaaatattatggttatataaagaaagaaaaggagtttggacctgaatcatacwgggtttttaagttctgctctatcacttactataatagctgtgtaagttaacctgtctgaaatgtggagataatacttgccttacataattactatgagca

SEQ ID NO: 221969 - DNA, 201 bp, Homo sapiens
tcatatagttaaggcaaccccactagccttttgtgatagtatcttctcaacacaagcaaaataacagaaaatctttgtgaaatcaagcttattaaatgtcrtaagtcatagataagtatatgaaatgtctaacgttcaaaccttgttttcttaaaaccttacacatcatataggtccttgtaagaggataaacaaaccggc

SEQ ID NO: 221970 - DNA, 201 bp, Homo sapiens; identical to SEQ ID NO: 40234

SEQ ID NO: 221971 - DNA, 201 bp, Homo sapiens
ttctaagtactgtttttcttagcaagtgtaacataatcaggaacaatgggtacaagtaaaacattctttggatgatattcaaagccttattagcactgcayctgaataataggtcattttgcctcactcatttgccaaagtagccatttctaagttaaggaagtttttagataggctcatagccttgtatttcgttttaga

SEQ ID NO: 221972 - DNA, 201 bp, Homo sapiens
aaagcagcagtgccccgcaggacttaaaatttcttttatttatgtagaacagttataaaatgaaatttttaccaggatcagttaaatttataatgggaagrttggggagataactatgataaatgtatatatttttggtgttttataaggtcgatataaaaatcaatatagtttcacaaatgtggttggagtgagaaaagg

SEQ ID NO: 221973 - DNA, 201 bp, Homo sapiens
aagtcgtggcaagcaagattttttaaaagagattgttgaaacttttgccaacaaaagcgggcagtctgcattatatgatgctctgttttctagtcagtcayctaaggatacatcttttcttggtagcgatgatattggaaacattgatgtacgagaaccagagcttgaagatttgactagatacgatgttggtaagttata

SEQ ID NO: 221974 - DNA, 201 bp, Homo sapiens
tttcaccgtgttagccaggatagtctcgatctcctgacctcatgatccgcccgcctcagcctcccaaagtgccggggttacaggcgtgagccaccgcgccsggccccattttagacattctgtactggttattatgctcctccaaaactgtcctcagacactttggtttgcccctcattctttcagtactgttattgcagt

SEQ ID NO: 221975 - DNA, 201 bp, Homo sapiens
actgagtgactgagactttgtctccaaaaaaaaaaaaacaacgtgatattgagatgttctcattttatatgttgtatgtcagtcttgctcatgtattaaakgagcaaagaatgaaactacagggataaatgaatatgtaagacagtcagattggtggtataaattgagggattctggctttttatgttttaaaagcatatt

SEQ ID NO: 221976 - DNA, 201 bp, Homo sapiens
tatatatgttgcaccgatcaattttagaagtgtggctactagagtggaacaagaagtgggatctgttgaaggccttcaagaacaggttagggaagtgaaayctcacccttagtgaccagtaacacatcttagccatgccaaacaagtacaatgataaagtagcaatctctgattttttttttaagtataccagttttatta

SEQ ID NO: 221977 - DNA, 201 bp, Homo sapiens
gcagaaccttttcaatattgactttcttgtagaaaaacagatttctttactgtaccgatggattaatatagtggtgttccattgctttaatgacttaaagsaaaacccatcgttttggggtttcttattaggttaggtgttctttatttggcttttgtcagttgattttggtttattgagttctagtcagtgtcatttttt

SEQ ID NO: 221978 - DNA, 201 bp, Homo sapiens
attgcttcagaaaactgaatgtgtatgtcggtcatattgcctttataaccatgctaatatctatgctttatacatactcaaacttgccttgccttaaaaamatacatactacatacttaaatcaggaattctagccatctcacagaataccaactaaaactaagtgcattgagatctgagattggtaaacccagattcatt

SEQ ID NO: 221979 - DNA, 201 bp, Homo sapiens
cctaacatagaattcccttcagctttgatatagaaaagcagttatataattaagatatatataatgtgaattgtttatgttggcaaaactaatggcacaargaaaaatttcaaacccttaagccaattttttaattttatttcaggtgctattcgagcacataatggtagtcttcagcaccttacttggcttggcttacag

SEQ ID NO: 221980 - DNA, 201 bp, Homo sapiens
tgtagagacagagtctcactgtgttgtccaggctgatcttgaactcctgggctcaagagatactcccacttcggcctcccaaagtgctgagatcacaggcrtgagccaccatgcctgttctatcctaataatttttaacattgattacatgttgaaatgataaacttttagatatattatattaactaatatttttaaaat

SEQ ID NO: 221981 - DNA, 201 bp, Homo sapiens
tttttccatgtacaggcataaaaggtcttttggttgttttctggtaaaactatcataaaacagttcaagcaaatgactattggtagttttgccattaacakgggtgccttctagtcattttgtttcctggtaaaacacacaaaacagagggagcagacagtttgtacatcagcatgagtgttgatgtgctttttattttaa

SEQ ID NO: 221982 - DNA, 201 bp, Homo sapiens
gttctttcatgtttatcaggcaagaactaaattactcatactgctaaggttacatcaaggatatgctgatgtgtggcgattattacagtgtgatcagcagyatttgcaacttaagagaatactgtgtggtggggaagacatttttgaatttgcacaaaaattttgaatgttaattctgtgtagtcgtggcctatgacaatt

SEQ ID NO: 221983 - DNA, 201 bp, Homo sapiens
taaggggacattttgtaggttctagggttgggtatggtgctgtcatttagttttcttcagcagagatgaggtagccacatagctacactagacggcattgkatctatctgccatcttgtcaaggcagcagagttgtgttaagaaaacatttttggagtcagatctggttcaaattccagctgttattccctgcatccgttt

SEQ ID NO: 221984 - DNA, 201 bp, Homo sapiens
ttgtatctatctgccatcttgtcaaggcagcagagttgtgttaagaaaacatttttggagtcagatctggttcaaattccagctgttattccctgcatccstttctctcattttaagataggagctaatattgtttacctaacagtgtagatagtataaaaattaagagtttaagtgcattggacgtattattatatacat

SEQ ID NO: 221985 - DNA, 201 bp, Homo sapiens
aagtagagctaagatttacattaagttccgtctggtatacaatttttgcttcattaagtgaaaattacctacaggatgacaatttagggatattttaaagragtgttttctaataactattgtctgaaagtagaagggattgcattttgagatagtaaggttttcaagcaaaagacaaaaggtggtttctctagtatataa

SEQ ID NO: 221986 - DNA, 201 bp, Homo sapiens
agaaaatacagcaggtatgttaagtgtaaaggacatttataatgcttttaacaagtcttctatttagaaggaataacctagtctgataatttctataattwtcgattttacgatgcccatggtgatttaaaaaacttaaaactaacaggtgaaaatattcttttctgggtggtccttgtttttcattagtatgtacaggtc

SEQ ID NO: 221987 - DNA, 201 bp, Homo sapiens
caacagttgaagagaaggcaaaagcagatacgttaaaacttccacctacatttttttgtggagtctgtagtgatactgatgaagacaatggaaatggggargactttcaatcagagcttcaaaaagttcaggaagctcaagtaagaacatctctaataaattttccttctagttccattgcctttgttgatgcagtaaact

SEQ ID NO: 221988 - DNA, 201 bp, Homo sapiens
ctttccttacagaaactaatcacagttggctttggattagtttcatatgtatagtaatacttgcctatgttttaagatttttttcaattgctgcaaatgcrtggatattttggtaaactattgtatgctaagtatagttaggcaacactttaaaatttttaacctttataaattctagaaatttatagtaattcttttcaa

SEQ ID NO: 221989 - DNA, 201 bp, Homo sapiens
gtcaggctggtcttgaaactaatggtatgtctttaaaatgtctttacttaatttagttgatcatttggttatcgaattctgagtttgaaataatttttttytcgcaattttgaaagcattgctccattttctagaagttctgttgttaggagtccgatgagattcttgttcttggtaacttaaaggttttctggaagtgtc

SEQ ID NO: 221990 - DNA, 201 bp, Homo sapiens
aaacactattgatttctcttctttattatttccttcttgccttggattttgcactttttttctagtttcttttttttttttttggcttttgagacagtctygctctgtctcccaggctggagtgcagtggcatgatctcagctcactgcaacctctgcctcctgggttcaagcaattctcatgtctcagccacccgagtat

SEQ ID NO: 221991 - DNA, 201 bp, Homo sapiens
aatttgtcatgtgacccattaacatatatgtatgtaagccctgaactgtgtatttagaaagcaattttagtaaattgaactattttttagacctggaaacktagcaaaattgagacttctagttcagcatgaaataaacactctaagagcccaggaaaaacatggccttcaacctgctctgcttgtacattgggcagaatg

SEQ ID NO: 221992 - DNA, 201 bp, Homo sapiens
tactgttaaattttggtatgttctgttattctgctagtgaaatatatatagatttgggggggctattccttttcctttttttttttttttttgagacaagkgtctcactctggtgcccaggatggaatgcagtggcgctatcacagttcattgtaacctggaactcctggactcgagggatcctcccgcctcgacctccca

SEQ ID NO: 221993 - DNA, 201 bp, Homo sapiens
ctattaaaaatgttttgttaaattttgttttaaaagtaagattttaatatccaaattcccaaaatagacatttttgaagatttggaaaatacagacggctsaaaatctttacattattactgttaaattttggtatgttctgttattctgctagtgaaatatatatagatttgggggggctattccttttccttttttttt

SEQ ID NO: 221994 - DNA, 201 bp, Homo sapiens
atcctctgtttaaacattttcatagtgtagacattcaggtaacagagttcctttatgaatttattggagatgggaatttccagtttataaacaaagacatrgagctatacactgcttaaattaattgccttgttatttaatgttaatcttgttttctaaattcactagctctcacacataagatatgacagagaagaataa

SEQ ID NO: 221995 - DNA, 201 bp, Homo sapiens
atgagctcataggagatactcagaagtactgaacagggtgaagaaaactaaaagctaaccaccttattaacatttcctatatttgagagcatttccttctrgttctttctctatacatatagtattttttatgagattgttaccatgttactatgttgtgtgtagatgagctagcctgttttttaaatgttactttagttc

SEQ ID NO: 221996 - DNA, 201 bp, Homo sapiens
taataaagattatagatgacagtgattcaaatctttcagtggtcaagaaagtaagtagcaggttgttgtatgtacgttcttactgataacccactggtcartgtttttgcgttggtcttatattttggtaatttcaaaaatactcagtaatatgttgttattaatgcacagaagggatgtgtgtgtctaaatgcttagatt

SEQ ID NO: 221997 - DNA, 201 bp, Homo sapiens
cttactgataacccactggtcagtgtttttgcgttggtcttatattttggtaatttcaaaaatactcagtaatatgttgttattaatgcacagaagggatrtgtgtgtctaaatgcttagatttgcttgctttgtcttaggtttggtgtgtctttttaaacttgggaatctaggtatatgctcttaaaaagtacttcttgg

SEQ ID NO: 221998 - DNA, 201 bp, Homo sapiens
actttagacatgagtaaactgaggccaagagaggctatctgatttacccaaggggtctttactgagtaatagcagaagtggaacaagaatctgtatcttayggtgtactgttatttctcctagctagaaaatgatactaagtttttgtttataatgaaggagagggacaaatttaacattgtaaaaggaagggcactggtt

SEQ ID NO: 221999 - DNA, 201 bp, Homo sapiens
ttttggagtcagatctggttcaaattccagctgttattccctgcatccgtttctctcattttaagataggagctaatattgtttacctaacagtgtagatrgtataaaaattaagagtttaagtgcattggacgtattattatatacataataaattctctgcagctactacttttttccctttcctggtggagcatttga

SEQ ID NO: 222000 - DNA, 201 bp, Homo sapiens
aataaattaggttttgtattaataaatgaaaatgggagcagataaatttttaacaaattaagaatcatattttaaaatcagcaccaggtacctagaactcwctggcaaatagaaactttcaaaagatataatcaggtccgggcgtggtgggtcacacctataatcccagcactttgggaggctgaggtggtgggtcacttg

SEQ ID NO: 222001 - DNA, 201 bp, Homo sapiens
ttgagcacaggagatggaggtagcagtgagctgaaatcatgccactgcactccagcctgactgagtgactgagactttgtctccaaaaaaaaaaaaacaaygtgatattgagatgttctcattttatatgttgtatgtcagtcttgctcatgtattaaatgagcaaagaatgaaactacagggataaatgaatatgtaaga

SEQ ID NO: 222002 - DNA, 201 bp, Homo sapiens
ctcccaagttcaagcgattctcctgccttagcttcctgagtagctgggattacaggcacccgccaccacgcccggctaattttttttttttttttttttttaaagacagagtcttgctctgtcgtccaggctggagtgcagtggggcggtatctgatcactgcaacctctgcctctcaagttaaagtgattctcctgcccc

SEQ ID NO: 222003 - DNA, 201 bp, Homo sapiens
ttgtagtttttctttttgcagtaagttcattgctctaaacttcttcactgaatcattatttgtataatgtacctaggagttatagttaatacagtgaacarctaggaggcaatcttatttttcttcttttacggggaagttctaattggttttatatgactttcctttttagagaactcttatagttcaagcttgattaaa

SEQ ID NO: 222004 - DNA, 201 bp, Homo sapiens
tttgtcatgtgacccattaacatatatgtatgtaagccctgaactgtgtatttagaaagcaattttagtaaattgaactattttttagacctggaaacgtrgcaaaattgagacttctagttcagcatgaaataaacactctaagagcccaggaaaaacatggccttcaacctgctctgcttgtacattgggcagaatgcc

SEQ ID NO: 222005 - DNA, 201 bp, Homo sapiens
gattggaaaactcaaaataactagaatatcaattttccgaaattgatctatagatttaacacaacaccagtcaaaacccctccaggaattttttttttttttggggggggatggagtttcgctctgtcgccaggctggagtgcagtggggcgatctctgctcgctgcaacctctgcctcccaggttcaagtgattctcctg

SEQ ID NO: 222006 - DNA, 201 bp, Homo sapiens
taagcaaggaaaaccccccaaaattaactagaaattcttttaatcaattgtattttaagatgaagatttcgaaacagctgtcaagaaacttaatggaaaaytatatttggatggctcagaaaaatgtagacccttggaagaaaatacagcaggtatgttaagtgtaaaggacatttataatgcttttaacaagtcttctat

SEQ ID NO: 222007 - DNA, 201 bp, Homo sapiens; identical to SEQ ID NO: 40633

SEQ ID NO: 222008 - DNA, 201 bp, Homo sapiens
aaacgtagcaaaattgagacttctagttcagcatgaaataaacactctaagagcccaggaaaaacatggccttcaacctgctctgcttgtacattgggcaraatgccttcagaaaacggtgagttttaaagtataagcatttttaaagaacattaccttaattttttaaaatcatgaactttttattgaaagtttttttgt

SEQ ID NO: 222009 - DNA, 201 bp, Homo sapiens
ccagcccttggcaatcactagtctactttctgtgtctttgagtttgcctactctggatatttcatataaatgaaatgatatatgaggttttgtgattggcwcctttcatttagaataatgttttcaaggctgattcatgttgtagtatgcattggtacttcattattttttatgcaaaagtaatattctattgtatggcta

SEQ ID NO: 222010 - DNA, 201 bp, Homo sapiens
gtagcaaaattgagacttctagttcagcatgaaataaacactctaagagcccaggaaaaacatggccttcaacctgctctgcttgtacattgggcagaatrccttcagaaaacggtgagttttaaagtataagcatttttaaagaacattaccttaattttttaaaatcatgaactttttattgaaagtttttttgttctg

SEQ ID NO: 222011 - DNA, 201 bp, Homo sapiens
ctaagagcccaggaaaaacatggccttcaacctgctctgcttgtacattgggcagaatgccttcagaaaacggtgagttttaaagtataagcatttttaawgaacattaccttaattttttaaaatcatgaactttttattgaaagtttttttgttctgaaaacagcagcttggtcacattatgacagatgtgttttttat

SEQ ID NO: 222012 - DNA, 201 bp, Homo sapiens
aagactagggcttttgcaatagggagaggccagggtttcatccatctcatccagaagaggagaaattgataaaggagagaggggaatgaaatacagagtastaatgggcggcttggtcttgagagttggggaaagacgagtttaagtaggtaaggtaaaatggaatttatatgtgatagcatcaggtttctcagtgaagga

SEQ ID NO: 222013 - DNA, 201 bp, Homo sapiens
agtacagatttttgaagctgaaaaagcattgaagatgcttccaaagataaatattactgataagtttttctccccagtaataagcagctggattttaaatrttaatctaaaacgtgaggtctaattgtgcagatttctttactctcttaggtgttatgcctcaaacataactcccatattgggcgtggcaatccagttaat

SEQ ID NO: 222014 - DNA, 201 bp, Homo sapiens
gacctatgttttatctaatgtttatgtttagccactaacgtctgccagtattcaaatgtagtggcaacggcatgtatacaatatggaagagtgtccctgtmgggctgttcttttgtgcatggtttagaaaaatgttgtatttgaaaatggaccccgtttttaacagccagcattctacagcttgcatattatatatgttgc

SEQ ID NO: 222015 - DNA, 201 bp, Homo sapiens
agcccaaatttccagttaaaaatgtcaacgcatttgatatttgtccacataattcagactgtaatgtttacacaaatgtgagcttttaaaatctaaaaggytctcactattaaaaatgttttgttaaattttgttttaaaagtaagattttaatatccaaattcccaaaatagacatttttgaagatttggaaaatacaga

SEQ ID NO: 222016 - DNA, 201 bp, Homo sapiens
gcaatacttgttcattatatcaaaatttagaaaatatggaaaaacaaaaaggataaaaaattatccacaaccaaaatagcccaaatttccagttaaaaatrtcaacgcatttgatatttgtccacataattcagactgtaatgtttacacaaatgtgagcttttaaaatctaaaaggttctcactattaaaaatgttttgt

SEQ ID NO: 222017 - DNA, 201 bp, Homo sapiens
tttcaggtctgctcaatgaagacctatgttttatctaatgtttatgtttagccactaacgtctgccagtattcaaatgtagtggcaacggcatgtatacartatggaagagtgtccctgtagggctgttcttttgtgcatggtttagaaaaatgttgtatttgaaaatggaccccgtttttaacagccagcattctacagc

SEQ ID NO: 222018 - DNA, 201 bp, Homo sapiens
tcagtgtttttgcgttggtcttatattttggtaatttcaaaaatactcagtaatatgttgttattaatgcacagaagggatgtgtgtgtctaaatgcttakatttgcttgctttgtcttaggtttggtgtgtctttttaaacttgggaatctaggtatatgctcttaaaaagtacttcttggggaattagaaaagatttct

SEQ ID NO: 222019 - DNA, 201 bp, Homo sapiens
gagtttttacttttggaattttttgcaaatgaaagcccttaattaatgtcttttatttttagttgcctgtgcccctggagtctgtaaaagagatgcttaaktcagtcatgcaggaactcgaagactatagtgaaggaggtcctctctataaaaatggttctttgcgaaatgcagattcagaaataaaacattctacaccgt

SEQ ID NO: 222020 - DNA, 201 bp, Homo sapiens
gtgtaatcaaaacaaatattataacctcaggactaattcttaatgaactttgctgaaattgaaagttgttgctgacaacttaagagcatttcttctcatcstcatcagccattatgaacgcccttgttttcttgctgtcagctgtttgagattgtcatgatgatgttaaattatgttcagtcttctgagtgttttgttgat

SEQ ID NO: 222021 - DNA, 201 bp, Homo sapiens
tccctcttttaagtagataacgtgtgaaatcaccttgtttatatatgtttgttaatatacatgtcaacgtctgtttatatgtgacttcaaaagctgtattwggtgttacggagatttttataatcccaagcagaaaaaacgagccgtatgtgatcacgtgtatataaaggcttaaagaacacttaatccacacctcagatg

SEQ ID NO: 222022 - DNA, 201 bp, Homo sapiens
ttgtaatgtacttcattgctctgctatttcaggtctgctcaatgaagacctatgttttatctaatgtttatgtttagccactaacgtctgccagtattcamatgtagtggcaacggcatgtatacaatatggaagagtgtccctgtagggctgttcttttgtgcatggtttagaaaaatgttgtatttgaaaatggacccc

SEQ ID NO: 222023 - DNA, 201 bp, Homo sapiens
cccttcctcacagcctgagagcaaaggtatagaactagcattctcagtatgagataacagcagtttttagcagctgggtagcccttagcaaagtattaatwactgtggctgtatgaaatgaagtacttaccactacaacatgcatgttaaagaatgccagtttaagcaaagtaccttttgactggtggcatgacacccttg

SEQ ID NO: 222024 - DNA, 201 bp, Homo sapiens
ttcactatcaccaagtaaaagttacaaggtaaacaggaaagaatggaatcatttcattgtgaaattgtttctgttctaagtgttttaaatgctgttttgtkatttttatttttttttagtattctcccaaaacaccacctcgatgggcagaagatcagaattctttactgaaaatgatttgccaacaagtagaggccatta

SEQ ID NO: 222025 - DNA, 201 bp, Homo sapiens
aattgaaaagtggtctgagcttcaaaaagtcttactatattttaatacttccatatgaatttgacttcattatgtaaggaaatagttatgtatatatatcktattttaacaatagggttcaaaggagcttgacttttttggaattggaaataaaagtaggttctttcatgtttatcaggcaagaactaaattactcatact

SEQ ID NO: 222026 - DNA, 201 bp, Homo sapiens; identical to SEQ ID NO: 40290

SEQ ID NO: 222027 - DNA, 201 bp, Homo sapiens
tctttggttttaaatagattctgtgttcacttagggtttttggtagaacactaaatcaggatgctaattctagttcatgattatcatacatctctgcatcraagtatatgtgttttttatcagtatgctgttttaacctatagataggttccatggtttttattttcagttagagtattaacgtcaatacttaatacctta

SEQ ID NO: 222028 - DNA, 201 bp, Homo sapiens
tatagtaattcttttcaatgactattaagtaaacacaaatttttttttgttttctttggttttaaatagattctgtgttcacttagggtttttggtagaamactaaatcaggatgctaattctagttcatgattatcatacatctctgcatcaaagtatatgtgttttttatcagtatgctgttttaacctatagataggt

SEQ ID NO: 222029 - DNA, 201 bp, Homo sapiens
tcctcctttttgtagaaaaagtttactgattgctagtttaggctgtccatgtggaagttaatttatttccccatctggtataaggaaagaagttcatttcmctgagtgcagggagtaggtaattttcttgaaaaagtacataaaagtacctaaattggtagggtaagagcagtatctaaaagaactaacataactttaaga

SEQ ID NO: 222030 - DNA, 201 bp, Homo sapiens
agtaactttattgatagatttgatttaacttatgtccaaaatatcattttaacttctaattaatataaaaattaatgatattttacattattgtttttcascaagtcttcaaaatccagtgtgtgtgtttacacttactgttagcacgtcttgatttggactagccaccttgtgaggttttaatagaatgtggctaggcta

SEQ ID NO: 222031 - DNA, 201 bp, Homo sapiens
acagttaaaaagggaaacagatgaaagtaactttattgatagatttgatttaacttatgtccaaaatatcattttaacttctaattaatataaaaattaaygatattttacattattgtttttcaccaagtcttcaaaatccagtgtgtgtgtttacacttactgttagcacgtcttgatttggactagccaccttgtgag

SEQ ID NO: 222032 - DNA, 201 bp, Homo sapiens
agagcagttcactattaaaacttttatgtcccttaaaatgtagatattttaaatttatctccaaatacagaaattatccttcttagtcaccttatttttgwgttaataagtgtgaatatttagaatattttaaaaatgggagtggtggtggtggatccttcatcgttctgttttaacagaaatagaactgtaatgcccttg

SEQ ID NO: 222033 - DNA, 201 bp, Homo sapiens
ataaaaagaaacagttaaaaagggaaacagatgaaagtaactttattgatagatttgatttaacttatgtccaaaatatcattttaacttctaattaatayaaaaattaatgatattttacattattgtttttcaccaagtcttcaaaatccagtgtgtgtgtttacacttactgttagcacgtcttgatttggactagcc

SEQ ID NO: 222034 - DNA, 201 bp, Homo sapiens
aattttctagtagccatattaaaaagaataaaaagaaacagttaaaaagggaaacagatgaaagtaactttattgatagatttgatttaacttatgtccaraatatcattttaacttctaattaatataaaaattaatgatattttacattattgtttttcaccaagtcttcaaaatccagtgtgtgtgtttacacttact

SEQ ID NO: 222035 - DNA, 201 bp, Homo sapiens
catctcaaataaataaataaataaataaattttctagtagccatattaaaaagaataaaaagaaacagttaaaaagggaaacagatgaaagtaactttatygatagatttgatttaacttatgtccaaaatatcattttaacttctaattaatataaaaattaatgatattttacattattgtttttcaccaagtcttcaa

SEQ ID NO: 222036 - DNA, 201 bp, Homo sapiens
acttgagcccacaagttccaggctttagtgaactgtgatcacatcactgcactccagctctgggtgacaaagcaagactgcatctcaaataaataaataamtaaataaattttctagtagccatattaaaaagaataaaaagaaacagttaaaaagggaaacagatgaaagtaactttattgatagatttgatttaactta

SEQ ID NO: 222037 - DNA, 201 bp, Homo sapiens
cacttgagcccacaagttccaggctttagtgaactgtgatcacatcactgcactccagctctgggtgacaaagcaagactgcatctcaaataaataaatawataaataaattttctagtagccatattaaaaagaataaaaagaaacagttaaaaagggaaacagatgaaagtaactttattgatagatttgatttaactt

SEQ ID NO: 222038 - DNA, 201 bp, Homo sapiens
ttacttgggaggctgaggcagagggatcacttgagcccacaagttccaggctttagtgaactgtgatcacatcactgcactccagctctgggtgacaaagsaagactgcatctcaaataaataaataaataaataaattttctagtagccatattaaaaagaataaaaagaaacagttaaaaagggaaacagatgaaagta

SEQ ID NO: 222039 - DNA, 201 bp, Homo sapiens
ttttaaagtataagcatttttaaagaacattaccttaattttttaaaatcatgaactttttattgaaagtttttttgttctgaaaacagcagcttggtcayattatgacagatgtgttttttattgctgcaaaatagttaatgtagttaaatataagcacttagaggagcaatgcctggcacacagtgaatgttacatatt

SEQ ID NO: 222040 - DNA, 201 bp, Homo sapiens
ttctgtgtagtcgtggcctatgacaattacatacaattttgacttaacatacaggtttcaggctcccaacattgtattctgtggaagtatcgtggagcacyaatccatgagcttgaaaagcttggtactagtactgactctgccattaattaatgatcttgggccagtcacttccattgtgactgtttggcttcttatctt

SEQ ID NO: 222041 - DNA, 201 bp, Homo sapiens
aattataaatgtatatttgcctttagcctccttctatccccattatatatgtttctgataggaatttaaaaaattttaattttgaaataattatagatttytttgcacaggaagttgcaaagattgtacagaaagattctatatgctacttcatttttccccaatgcttatacaggttgagcatttaaaatccgaaatcct

SEQ ID NO: 222042 - DNA, 201 bp, Homo sapiens
ggactaggcactgtagatggatgagtgggggaaattttatttagcttgaaaattgagatagttttggacctcatggttaggtctttctgggaaatttttawttgaaacacttgtagaaaaagaaagcagacatgctagatctgtccctgacctcacttgttagaactggtcggattcctgggctgatacagagaagtttga

SEQ ID NO: 222043 - DNA, 201 bp, Homo sapiens
cactggtgttaaggtggtttagttattacagtatttggaagttgaacaaatgactattgagataccatttggttttgacttgaaattttagccagttcttwcaacttgtaaatgaactttagatctaatcatgcgtgttccttaaagttgtgtgcttttaactttcttttttagggcagcggtcttaattctttttatgat

SEQ ID NO: 222044 - DNA, 201 bp, Homo sapiens
tgttttatatattaatgtatactttatcgtgtgtgtacaatattaaattataaatgtatatttgcctttagcctccttctatccccattatatatgtttcygataggaatttaaaaaattttaattttgaaataattatagatttttttgcacaggaagttgcaaagattgtacagaaagattctatatgctacttcattt

SEQ ID NO: 222045 - DNA, 201 bp, Homo sapiens
ggaaaaagaatttcctgttaagtgtctgttttgtaaggggacattttgtaggttctagggttgggtatggtgctgtcatttagttttcttcagcagagatsaggtagccacatagctacactagacggcattgtatctatctgccatcttgtcaaggcagcagagttgtgttaagaaaacatttttggagtcagatctggt

SEQ ID NO: 222046 - DNA, 201 bp, Homo sapiens; identical to SEQ ID NO: 40651

SEQ ID NO: 222047 - DNA, 201 bp, Homo sapiens
ttgaagctgaaaaagcattgaagatgcttccaaagataaatattactgataagtttttctccccagtaataagcagctggattttaaatattaatctaaarcgtgaggtctaattgtgcagatttctttactctcttaggtgttatgcctcaaacataactcccatattgggcgtggcaatccagttaatctggtgtcagt

SEQ ID NO: 222048 - DNA, 201 bp, Homo sapiens
ataagttgaaagtgagggtcaaaggaaggtatggggaagttgaggaaataggaggtgtgaagtgtcagagtggagaaagtgagtattagtactaaaatggyattttgttttaggcagcaccagtttgatggttgagataatgcaaatgaaatcagttagcttggggttatgatttcccaaatctaagcacacagaaaccag

SEQ ID NO: 222049 - DNA, 201 bp, Homo sapiens
tgaagggatctgtaagcaaacagtaattatggatataagggattatagcattttttgcctgacagaagaaagtgtgtatatttatatgtgtttacaggtgyttaaaacttgatgatgttattgtcttgaagggaacttgtcatgtggtggagaagtatatttctgaaagtaagggtatgtaggccctcagtgaggtggaag

SEQ ID NO: 222050 - DNA, 201 bp, Homo sapiens
atgtatattgtaatgttttatatattaatgtatactttatcgtgtgtgtacaatattaaattataaatgtatatttgcctttagcctccttctatccccawtatatatgtttctgataggaatttaaaaaattttaattttgaaataattatagatttttttgcacaggaagttgcaaagattgtacagaaagattctata

SEQ ID NO: 222051 - DNA, 201 bp, Homo sapiens
ctctaaacttcttcactgaatcattatttgtataatgtacctaggagttatagttaatacagtgaacaactaggaggcaatcttatttttcttcttttacrgggaagttctaattggttttatatgactttcctttttagagaactcttatagttcaagcttgattaaaattagccttatggttaaatactcagttttgtc

SEQ ID NO: 222052 - DNA, 201 bp, Homo sapiens
cactccagcctggacgacagatcgagacaccatctcaaaaaaaaaaaaaaaaatcagttatttaaatttaaaagagtaagtttccccagcactgtttctgkcatgatataattaaatgtttaaaattatttgatttttttttcttccaatagaaagaaatgcaggagttgaaactaaatagcagtaactcagcatcccctc

SEQ ID NO: 222053 - DNA, 201 bp, Homo sapiens
agccttttctaggtcttgatttttcagtgctttccagaggcaattgtttggaacctcttggcacagtttctgtttctttttccatgtacaggcataaaagrtcttttggttgttttctggtaaaactatcataaaacagttcaagcaaatgactattggtagttttgccattaacatgggtgccttctagtcattttgttt

SEQ ID NO: 222054 - DNA, 201 bp, Homo sapiens
ctaacataactttaagattattttagaaaacatgtaggatgttttattttgtattctttgtatactcaaatttttggtcacaagttccttttacatttttsttaaggacatcgaagatctttgtatgtgggttcctttttttctttctttctttctttttttttttttttttttttgagatggagtcttgctgtgtcacca

SEQ ID NO: 222055 - DNA, 201 bp, Homo sapiens
acccaaggggtctttactgagtaatagcagaagtggaacaagaatctgtatcttacggtgtactgttatttctcctagctagaaaatgatactaagttttygtttataatgaaggagagggacaaatttaacattgtaaaaggaagggcactggttctgcagagcagtgtcatccagtagaaataaaatataacctgtgta

SEQ ID NO: 222056 - DNA, 201 bp, Homo sapiens
tgtaaaaggaagggcactggttctgcagagcagtgtcatccagtagaaataaaatataacctgtgtatgtaatttaaaattgtcatttggtgcaatggctkgtgcctataatcccagttacttgggaggctgaggcagagggatcacttgagcccacaagttccaggctttagtgaactgtgatcacatcactgcactcca

SEQ ID NO: 222057 - DNA, 201 bp, Homo sapiens
gcataaaaggtcttttggttgttttctggtaaaactatcataaaacagttcaagcaaatgactattggtagttttgccattaacatgggtgccttctagtyattttgtttcctggtaaaacacacaaaacagagggagcagacagtttgtacatcagcatgagtgttgatgtgctttttattttaagccagggaacacatt

SEQ ID NO: 222058 - DNA, 201 bp, Homo sapiens
tagcagaagtggaacaagaatctgtatcttacggtgtactgttatttctcctagctagaaaatgatactaagtttttgtttataatgaaggagagggacaratttaacattgtaaaaggaagggcactggttctgcagagcagtgtcatccagtagaaataaaatataacctgtgtatgtaatttaaaattgtcatttggt

SEQ ID NO: 222059 - DNA, 201 bp, Homo sapiens
aattgtttggaacctcttggcacagtttctgtttctttttccatgtacaggcataaaaggtcttttggttgttttctggtaaaactatcataaaacagttsaagcaaatgactattggtagttttgccattaacatgggtgccttctagtcattttgtttcctggtaaaacacacaaaacagagggagcagacagtttgta

SEQ ID NO: 222060 - DNA, 201 bp, Homo sapiens
tgatttacccaaggggtctttactgagtaatagcagaagtggaacaagaatctgtatcttacggtgtactgttatttctcctagctagaaaatgatactargtttttgtttataatgaaggagagggacaaatttaacattgtaaaaggaagggcactggttctgcagagcagtgtcatccagtagaaataaaatataacc

SEQ ID NO: 222061 - DNA, 201 bp, Homo sapiens
gttttgaatctgataatgtcattgtcccaagggaccttagaaatgaagactttagacatgagtaaactgaggccaagagaggctatctgatttacccaagrggtctttactgagtaatagcagaagtggaacaagaatctgtatcttacggtgtactgttatttctcctagctagaaaatgatactaagtttttgtttata

SEQ ID NO: 222062 - DNA, 201 bp, Homo sapiens
tatactactgtagaacatagagccttattctgttttgaatctgataatgtcattgtcccaagggaccttagaaatgaagactttagacatgagtaaactgwggccaagagaggctatctgatttacccaaggggtctttactgagtaatagcagaagtggaacaagaatctgtatcttacggtgtactgttatttctccta

SEQ ID NO: 222063 - DNA, 201 bp, Homo sapiens
atacggtctttgagaaatgtgaaaagtgttaacttaaaagtggatgtatacttgcgtacagtttctgtgagctctaggttaggaatccctgacctaagaaygaatgtgcctatatactactgtagaacatagagccttattctgttttgaatctgataatgtcattgtcccaagggaccttagaaatgaagactttagaca

SEQ ID NO: 222064 - DNA, 201 bp, Homo sapiens
gatacggtctttgagaaatgtgaaaagtgttaacttaaaagtggatgtatacttgcgtacagtttctgtgagctctaggttaggaatccctgacctaagartgaatgtgcctatatactactgtagaacatagagccttattctgttttgaatctgataatgtcattgtcccaagggaccttagaaatgaagactttagac

SEQ ID NO: 222065 - DNA, 201 bp, Homo sapiens
gtggctgtgaagaatatgaagaggttagtattctcccccagtttggcagaggctggccatctgtgaactgcccatgctttctagaatgtcggagttttggwgtgtgatgatgcgtctgtatatcatatctttctagtctttcattgtgctttcatttgttagtcttctcttgttttgccatttttctactccctcacatgt

SEQ ID NO: 222066 - DNA, 201 bp, Homo sapiens
ttttaaagatacggtctttgagaaatgtgaaaagtgttaacttaaaagtggatgtatacttgcgtacagtttctgtgagctctaggttaggaatccctgasctaagaatgaatgtgcctatatactactgtagaacatagagccttattctgttttgaatctgataatgtcattgtcccaagggaccttagaaatgaagac

SEQ ID NO: 222067 - DNA, 201 bp, Homo sapiens
tagtcaattaaagtccctacttaaacttcagactaagattttttttttatttaatattttattttttctttttgctttcatgcagacagacatcttgcaakactttaagattcttgggccatttctgtcaggttgttctgtgttctgtgcctgcttcctccccatagtaatttcaaaatagctatcctcacctctgtaagg

SEQ ID NO: 222068 - DNA, 201 bp, Homo sapiens
taatcttttatttttaaagatacggtctttgagaaatgtgaaaagtgttaacttaaaagtggatgtatacttgcgtacagtttctgtgagctctaggttargaatccctgacctaagaatgaatgtgcctatatactactgtagaacatagagccttattctgttttgaatctgataatgtcattgtcccaagggacctta

SEQ ID NO: 222069 - DNA, 201 bp, Homo sapiens
tttaagtataccagttttattactagctaaggtagctcttaatcttttatttttaaagatacggtctttgagaaatgtgaaaagtgttaacttaaaagtgratgtatacttgcgtacagtttctgtgagctctaggttaggaatccctgacctaagaatgaatgtgcctatatactactgtagaacatagagccttattct

SEQ ID NO: 222070 - DNA, 201 bp, Homo sapiens
tgaggtagccacatagctacactagacggcattgtatctatctgccatcttgtcaaggcagcagagttgtgttaagaaaacatttttggagtcagatctgkttcaaattccagctgttattccctgcatccgtttctctcattttaagataggagctaatattgtttacctaacagtgtagatagtataaaaattaagagt

SEQ ID NO: 222071 - DNA, 201 bp, Homo sapiens
ttcagcatggggttaagtgaaaagctaatttggggaggtaacgcggaatgtcaggtagtccagattgcagtgcagaaagaacacactgaaaggatggtcastgtaatgttagaggactgtgaaagttgaggaaagaagtttagtttgtagatacttgtttttttgagcagggaattgtcttggctggaggtgaacgtcaga

SEQ ID NO: 222072 - DNA, 201 bp, Homo sapiens
atgatgttattgtcttgaagggaacttgtcatgtggtggagaagtatatttctgaaagtaagggtatgtaggccctcagtgaggtggaagaataagaaggrtggtatggtggtttcggtggtatgaccaaaatacagattttgaagacctgtgtcagtggcaagtggatggttgaggttcgagtggaggataacatcactg

SEQ ID NO: 222073 - DNA, 201 bp, Homo sapiens
ttggatttgtataaagatgttagtttagagcaggggttgattagaacttgtgggccaaatatggcccctgcctaattttgttaatatttattggaatgcarcatgcctctgtttatgtattgtctgtggctgcttacatactacaaggttggagttgagtggttgcagcagagattgtatgcctgtaaagccagattagta

SEQ ID NO: 222074 - DNA, 201 bp, Homo sapiens
ttggactagcaccccttcctcacagcctgagagcaaaggtatagaactagcattctcagtatgagataacagcagtttttagcagctgggtagcccttagsaaagtattaataactgtggctgtatgaaatgaagtacttaccactacaacatgcatgttaaagaatgccagtttaagcaaagtaccttttgactggtggc

SEQ ID NO: 222075 - DNA, 201 bp, Homo sapiens
atgaatatgtaagacagtcagattggtggtataaattgagggattctggctttttatgttttaaaagcatattcattttgtttcctaaaatgttaaaaaaygaaatattctttattttctaggatttaattttagcctttttaaatctaatcccatggccttttggactagcaccccttcctcacagcctgagagcaaagg

SEQ ID NO: 222076 - DNA, 201 bp, Homo sapiens
taagattattttagaaaacatgtaggatgttttattttgtattctttgtatactcaaatttttggtcacaagttccttttacatttttgttaaggacatcraagatctttgtatgtgggttcctttttttctttctttctttctttttttttttttttttttttgagatggagtcttgctgtgtcaccaggctggagtgca

SEQ ID NO: 222077 - DNA, 201 bp, Homo sapiens
gatattgagatgttctcattttatatgttgtatgtcagtcttgctcatgtattaaatgagcaaagaatgaaactacagggataaatgaatatgtaagacartcagattggtggtataaattgagggattctggctttttatgttttaaaagcatattcattttgtttcctaaaatgttaaaaaacgaaatattctttattt

SEQ ID NO: 222078 - DNA, 201 bp, Homo sapiens
gagctgaaatcatgccactgcactccagcctgactgagtgactgagactttgtctccaaaaaaaaaaaaacaacgtgatattgagatgttctcattttatrtgttgtatgtcagtcttgctcatgtattaaatgagcaaagaatgaaactacagggataaatgaatatgtaagacagtcagattggtggtataaattgagg

SEQ ID NO: 222079 - DNA, 201 bp, Homo sapiens
ggaggatcacttgagcacaggagatggaggtagcagtgagctgaaatcatgccactgcactccagcctgactgagtgactgagactttgtctccaaaaaamaaaaaacaacgtgatattgagatgttctcattttatatgttgtatgtcagtcttgctcatgtattaaatgagcaaagaatgaaactacagggataaatga

SEQ ID NO: 222080 - DNA, 201 bp, Homo sapiens
ttgaggctgggcacggtggctcactcctagaatgccagcactttgggaggttgaggtgggcagatcacttgagctcaagagttcgagaccagcctggccarcatggtgaaaccctgtttctactgaaaatacaaaaatgagccgggcgtcgtggtgcgtgcctataattagcagctacttaggaggctgaggcaggaggat

SEQ ID NO: 222081 - DNA, 201 bp, Homo sapiens; identical to SEQ ID NO: 40524

SEQ ID NO: 222082 - DNA, 201 bp, Homo sapiens
gtgacatttaatggtaaaatgagtatgtggtcaactctatgtacgtgtttttaagtattatctatttctatgagtacttctgagttatctgtatgaatagyggtagttttgagtaacaatataaacgagtttagtggttgctttggtttaagatgtattcttcggttagcatttaaaagtacagttctaagtttaatttac

SEQ ID NO: 222083 - DNA, 201 bp, Homo sapiens; identical to SEQ ID NO: 40525

SEQ ID NO: 222084 - DNA, 201 bp, Homo sapiens; identical to SEQ ID NO: 40526

SEQ ID NO: 222085 - DNA, 201 bp, Homo sapiens; identical to SEQ ID NO: 40527

SEQ ID NO: 222086 - DNA, 201 bp, Homo sapiens
ctttgctaatgctgacttactggtttataaaatcctttgccaatttgtaggaacaaaagtgatatcaatttttaagtttttttaatactagtcatggtcamcaattcatgcaaatggcagttggtagttttgccatcttcaacgtgggtacctcccagttgtttggtttcttggtaaaactcacacaaaacagatggagaa

SEQ ID NO: 222087 - DNA, 201 bp, Homo sapiens
ctatgttgtgtgtagatgagctagcctgttttttaaatgttactttagttctgagcatttttaaacttaaatgttttttgaacattaatgagttcatggtrtcccatcacatggaagtactgtaaattctgttcctttatttatgttgtttctggtttatgccattacaaattctaggacactgtcctagttttatagggt

SEQ ID NO: 222088 - DNA, 201 bp, Homo sapiens
tttgtaaaaaacatagtatctgtgaagtacaataaaatgtagtgcgataaaatgaggtatgcttggacagcaaaacatcatgttgtacctagtaaatgtayacaatttttatttgtgaattatacctcaataaagctggacaaatgaactgtatttgcaacatggtagggaatatatgacattggacactaatgcaaatgg

SEQ ID NO: 222089 - DNA, 201 bp, Homo sapiens
attgtgctttcatttgttagtcttctcttgttttgccatttttctactccctcacatgtgcttttgcccttaaaaatattcttcgtctgtaatctgagcaytttgggaggccgagagaccagcctgaccaatatggtgaaaatccgtctctattaaaaatacaaaaatgagccgggcgtggtggcagcgcctgtagtccca

SEQ ID NO: 222090 - DNA, 201 bp, Homo sapiens
aaggcaaaaaataataataatacaaaacaacagaaaaagaaaaaagataattaaaaaacactttcacgtgtattatttaaagtgtaaagtgcctattaaartggcaaaaatgtaaataagataaaatatatcattttagagtttttacttttggaattttttgcaaatgaaagcccttaattaatgtcttttatttttagt

SEQ ID NO: 222091 - DNA, 201 bp, Homo sapiens; identical to SEQ ID NO: 40535

SEQ ID NO: 222092 - DNA, 201 bp, Homo sapiens; identical to SEQ ID NO: 40191

SEQ ID NO: 222093 - DNA, 201 bp, Homo sapiens; identical to SEQ ID NO: 40192

SEQ ID NO: 222094 - DNA, 201 bp, Homo sapiens; identical to SEQ ID NO: 40193

SEQ ID NO: 222095 - DNA, 201 bp, Homo sapiens; identical to SEQ ID NO: 40194

SEQ ID NO: 222096 - DNA, 201 bp, Homo sapiens; identical to SEQ ID NO: 40196

SEQ ID NO: 222097 - DNA, 201 bp, Homo sapiens; identical to SEQ ID NO: 40199

SEQ ID NO: 222098 - DNA, 201 bp, Homo sapiens; identical to SEQ ID NO: 40200

SEQ ID NO: 222099 - DNA, 201 bp, Homo sapiens; identical to SEQ ID NO: 40201

SEQ ID NO: 222100 - DNA, 201 bp, Homo sapiens; identical to SEQ ID NO: 40202

SEQ ID NO: 222101 - DNA, 201 bp, Homo sapiens
atggtcttgatctcctgacctcatgatcggcccaccttgacctcccaaagtgctgggattacaggcgtgagccaccgcacccggcccaacttaaccacttkcaagtgtgcaatgcagtagccttatgttgctgtgcaatgtatctccagaaagttttcatcttttatttctatttatttatttattattttgagacatgat

SEQ ID NO: 222102 - DNA, 201 bp, Homo sapiens
accttacacatcatataggtccttgtaagaggataaacaaaccggctagcctttcctggggcttttttagtgatgtgtgcagtcagttatttggtgccttktgggtcatgatttccatttcttctgtgtacaggcataaaaggtcttctgttcttatacaagcatgtaaatccaacattctcattgtctcattttattctt

SEQ ID NO: 222103 - DNA, 201 bp, Homo sapiens
  misc_feature (1)...(201): n = A,T,C or G
tcttctgtgtacaggcataaaaggtcttctgttcttatacaagcatgtaaatccaacattctcattgtctcattttattcttgcaatgaccctgtgaaatntgtagaagcagcacatcgtcattttacaattgagaaacatggagactccaaatggattatttacaggttcacaaaacagctttgtggcactgaaagggcg

SEQ ID NO: 222104 - DNA, 201 bp, Homo sapiens
gcataaaaggtcttctgttcttatacaagcatgtaaatccaacattctcattgtctcattttattcttgcaatgaccctgtgaaatgtgtagaagcagcayatcgtcattttacaattgagaaacatggagactccaaatggattatttacaggttcacaaaacagctttgtggcactgaaagggcgagagccaagatctc

SEQ ID NO: 222105 - DNA, 201 bp, Homo sapiens
aattctttactgaaaatgatttgccaacaagtagaggccattaaggtaagtcacttaatttctctagctgtactttttattccaagattccttccctggcyactctctcactttttttctgaagctggtcagaatgtccccttgccatccaaatagtatggcaaggggacattttggtctttttttttttttttaagacag

SEQ ID NO: 222106 - DNA, 201 bp, Homo sapiens
tatgctgatgtgtggcgattattacagtgtgatcagcagtatttgcaacttaagagaatactgtgtggtggggaagacatttttgaatttgcacaaaaatyttgaatgttaattctgtgtagtcgtggcctatgacaattacatacaattttgacttaacatacaggtttcaggctcccaacattgtattctgtggaagta

SEQ ID NO: 222107 - DNA, 201 bp, Homo sapiens
aatatgatcttgctaaaaagtaagtacaaactgtaacatgtattttttttttaaaatcaatgccttttctcattttcttctttgaaataggtaaaaatatrttcttagtagttcttcctaagtgtattctggaataagggatttatcactcagactgatgctaaggaccagcctagattccattgagattgaaaccgtaat

SEQ ID NO: 222108 - DNA, 201 bp, Homo sapiens; identical to SEQ ID NO: 40563

SEQ ID NO: 222109 - DNA, 201 bp, Homo sapiens; identical to SEQ ID NO: 40216

SEQ ID NO: 222110 - DNA, 201 bp, Homo sapiens; identical to SEQ ID NO: 40219

SEQ ID NO: 222111 - DNA, 201 bp, Homo sapiens; identical to SEQ ID NO: 40220

SEQ ID NO: 222112 - DNA, 201 bp, Homo sapiens; identical to SEQ ID NO: 40435

SEQ ID NO: 222113 - DNA, 201 bp, Homo sapiens; identical to SEQ ID NO: 40436

SEQ ID NO: 222114 - DNA, 201 bp, Homo sapiens; identical to SEQ ID NO: 40437

SEQ ID NO: 222115 - DNA, 201 bp, Homo sapiens
ttattccttaataattaagttctgataattattcagcctgaaaattaaaaaaaaaaattagcacaaggctttgtaggtaagaccattatagatctttctawatacttaaggtgtgttttgtgtcaccatgaggtgtagatggtcagccttttgaacaaactgacactacagaagaggcaggtttcagctatctaaaaatgg

SEQ ID NO: 222116 - DNA, 201 bp, Homo sapiens; identical to SEQ ID NO: 40438

SEQ ID NO: 222117 - DNA, 201 bp, Homo sapiens
aaaagctattgggtctttacatttctatgtaggcaattagcatacatctttttgtactaaagcagcagtgccccgcaggacttaaaatttcttttatttakgtagaacagttataaaatgaaatttttaccaggatcagttaaatttataatgggaagattggggagataactatgataaatgtatatatttttggtgttt

SEQ ID NO: 222118 - DNA, 201 bp, Homo sapiens; identical to SEQ ID NO: 40439

SEQ ID NO: 222119 - DNA, 201 bp, Homo sapiens
acatttctatgtaggcaattagcatacatctttttgtactaaagcagcagtgccccgcaggacttaaaatttcttttatttatgtagaacagttataaaaygaaatttttaccaggatcagttaaatttataatgggaagattggggagataactatgataaatgtatatatttttggtgttttataaggtcgatataaaa

SEQ ID NO: 222120 - DNA, 201 bp, Homo sapiens; identical to SEQ ID NO: 40440

SEQ ID NO: 222121 - DNA, 201 bp, Homo sapiens; identical to SEQ ID NO: 40224

SEQ ID NO: 222122 - DNA, 201 bp, Homo sapiens
caaagatgagaatgatggtatcagggacacctcggcagaactgaggctttgggtacggcttgttcttacaataccggtaacaacggacggggcggcggccmatggcgataccaggatcttcagtggcgcgcttaagagaaagagcaatgcatttcttaaaacttaaaccggaggtcaggagtttgagaccagcctgcccaa

SEQ ID NO: 222123 - DNA, 201 bp, Homo sapiens; identical to SEQ ID NO: 40225

SEQ ID NO: 222124 - DNA, 201 bp, Homo sapiens
attataggcaagagccactgcatctggccatatttttcatctaaatggttgtttatgtatgatttatcttgcttccttcatgaattctctcccacagtctstgtattaaaactataaatatcacttttattggcaatataatcttttttatgaagtagtcataatttgcttgctactttctgttattgggcatccaagttt

SEQ ID NO: 222125 - DNA, 201 bp, Homo sapiens
gttgggactccacagatttggagctgatcagatgggtttgttgagaacagctgatcagatgggtttttggaggattttagggggagggagattcatttgaytgtgcaagatgggcgacagagtgagactccatctgaattaaaaaaaaaatttagaactgcatagtgaaaaagtaggccacaaatattaagttttggacaa

SEQ ID NO: 222126 - DNA, 201 bp, Homo sapiens
aaaaggtcttctgttcttatacaagcatgtaaatccaacattctcattgtctcattttattcttgcaatgaccctgtgaaatgtgtagaagcagcacatcstcattttacaattgagaaacatggagactccaaatggattatttacaggttcacaaaacagctttgtggcactgaaagggcgagagccaagatctcctga

SEQ ID NO: 222127 - DNA, 201 bp, Homo sapiens
aagcagcacatcgtcattttacaattgagaaacatggagactccaaatggattatttacaggttcacaaaacagctttgtggcactgaaagggcgagagcyaagatctcctgatttctgttcctgtgttcatagattctttttccttaataaaagtaaacatatatcaagatggtccttgttttttaaaaataagatgatt

SEQ ID NO: 222128 - DNA, 201 bp, Homo sapiens
attgaaaccgtaattagtgttttctgcatgctgctgctttataccaagggcaagaaattgtttggcttcaaatactttttctaaaaattgtcttctgttgragtaaaagaggaccatgcctatatcttaatttgtttttggttagatatctgataccttaatcagatggaaaatagcaatgaataaaaaattaaaccgtaa

SEQ ID NO: 222129 - DNA, 201 bp, Homo sapiens
gaaagggcgagagccaagatctcctgatttctgttcctgtgttcatagattctttttccttaataaaagtaaacatatatcaagatggtccttgttttttwaaaataagatgattaaaattaaagattaatgagctcataggagatactcagaagtactgaacagggtgaagaaaactaaaagctaaccaccttattaaca

SEQ ID NO: 222130 - DNA, 201 bp, Homo sapiens
tgctgctgctttataccaagggcaagaaattgtttggcttcaaatactttttctaaaaattgtcttctgttggagtaaaagaggaccatgcctatatcttmatttgtttttggttagatatctgataccttaatcagatggaaaatagcaatgaataaaaaattaaaccgtaattgtaaggcaggagaatagcttgtataa

SEQ ID NO: 222131 - DNA, 201 bp, Homo sapiens
tcttctgttggagtaaaagaggaccatgcctatatcttaatttgtttttggttagatatctgataccttaatcagatggaaaatagcaatgaataaaaaaytaaaccgtaattgtaaggcaggagaatagcttgtataaaagatgtttaattgacacaatatgtgatgctctaaggctctatcctagggataagaagcttg

SEQ ID NO: 222132 - DNA, 201 bp, Homo sapiens
tttttggttagatatctgataccttaatcagatggaaaatagcaatgaataaaaaattaaaccgtaattgtaaggcaggagaatagcttgtataaaagatstttaattgacacaatatgtgatgctctaaggctctatcctagggataagaagcttggtgattctgatttcctgacttggagtggattaaagcaggaaatt

SEQ ID NO: 222133 - DNA, 201 bp, Homo sapiens
aattttttgtaaagacaaggtcttgctatgtttcccaggctggttagtcttgaactcctggcttcaagtgatccttctgccttgccctcccaaagtgctgrgattacaggtatgagccaccacacctgactgtgaacttttaataataaaaagttagtttccctcttaatccattcactcaggtctcctttcctagatgac

SEQ ID NO: 222134 - DNA, 201 bp, Homo sapiens
gagaattactgaagccagttctcatcacactgaatgttaaaaattacagttacagcagtgattgcaaattcaaagctctggtgcggataccaacagtgacyataaagttttctaggtgattccactagtttcttattggatgtgtatgtgtagcatctggactaggcactgtagatggatgagtgggggaaattttattta

SEQ ID NO: 222135 - DNA, 201 bp, Homo sapiens
gatgagtgggggaaattttatttagcttgaaaattgagatagttttggacctcatggttaggtctttctgggaaatttttaattgaaacacttgtagaaamagaaagcagacatgctagatctgtccctgacctcacttgttagaactggtcggattcctgggctgatacagagaagtttgaaacttttcaaaatttacct

SEQ ID NO: 222136 - DNA, 201 bp, Homo sapiens
catcaccttgagaattagttgtattttgtttcagcatggggttaagtgaaaagctaatttggggaggtaacgcggaatgtcaggtagtccagattgcagtrcagaaagaacacactgaaaggatggtcagtgtaatgttagaggactgtgaaagttgaggaaagaagtttagtttgtagatacttgtttttttgagcaggg

SEQ ID NO: 222137 - DNA, 201 bp, Homo sapiens
tgttttaaaagcatattcattttgtttcctaaaatgttaaaaaacgaaatattctttattttctaggatttaattttagcctttttaaatctaatcccatrgccttttggactagcaccccttcctcacagcctgagagcaaaggtatagaactagcattctcagtatgagataacagcagtttttagcagctgggtagcc

SEQ ID NO: 222138 - DNA, 201 bp, Homo sapiens
aatcatttcattgtgaaattgtttctgttctaagtgttttaaatgctgttttgttatttttatttttttttagtattctcccaaaacaccacctcgatggrcagaagatcagaattctttactgaaaatgatttgccaacaagtagaggccattaaggtaagtcacttaatttctctagctgtactttttattccaagatt

SEQ ID NO: 222139 - DNA, 201 bp, Homo sapiens
gtaaacaggaaagaatggaatcatttcattgtgaaattgtttctgttctaagtgttttaaatgctgttttgttatttttatttttttttagtattctcccraaacaccacctcgatgggcagaagatcagaattctttactgaaaatgatttgccaacaagtagaggccattaaggtaagtcacttaatttctctagctgt

SEQ ID NO: 222140 - DNA, 201 bp, Homo sapiens; identical to SEQ ID NO: 40451

SEQ ID NO: 222141 - DNA, 201 bp, Homo sapiens
ccctggagtctgtaaaagagatgcttaattcagtcatgcaggaactcgaagactatagtgaaggaggtcctctctataaaaatggttctttgcgaaatgcrgattcagaaataaaacattctacaccgtctcctaccagatattcactatcaccaagtaaaagttacaaggtaaacaggaaagaatggaatcatttcattg

SEQ ID NO: 222142 - DNA, 201 bp, Homo sapiens
ttgcaaatgaaagcccttaattaatgtcttttatttttagttgcctgtgcccctggagtctgtaaaagagatgcttaattcagtcatgcaggaactcgaaractatagtgaaggaggtcctctctataaaaatggttctttgcgaaatgcagattcagaaataaaacattctacaccgtctcctaccagatattcactatc

SEQ ID NO: 222143 - DNA, 201 bp, Homo sapiens; identical to SEQ ID NO: 40240

SEQ ID NO: 222144 - DNA, 201 bp, Homo sapiens; identical to SEQ ID NO: 40242

SEQ ID NO: 222145 - DNA, 201 bp, Homo sapiens
tggttaacagaagtaatagaaagagcatggactttagaatcagaagatgttagattgtacaacacttttctgtgttcatgaagaaaaaaatataataaagrcaaaaaataataataatacaaaacaacagaaaaagaaaaaagataattaaaaaacactttcacgtgtattatttaaagtgtaaagtgcctattaaagtgg

SEQ ID NO: 222146 - DNA, 201 bp, Homo sapiens; identical to SEQ ID NO: 40243

SEQ ID NO: 222147 - DNA, 201 bp, Homo sapiens
aattatcatggttaacagaagtaatagaaagagcatggactttagaatcagaagatgttagattgtacaacacttttctgtgttcatgaagaaaaaaatakaataaaggcaaaaaataataataatacaaaacaacagaaaaagaaaaaagataattaaaaaacactttcacgtgtattatttaaagtgtaaagtgcctat

SEQ ID NO: 222148 - DNA, 201 bp, Homo sapiens; identical to SEQ ID NO: 40245

SEQ ID NO: 222149 - DNA, 201 bp, Homo sapiens; identical to SEQ ID NO: 40246

SEQ ID NO: 222150 - DNA, 201 bp, Homo sapiens
ttactgataacccactggtcagtgtttttgcgttggtcttatattttggtaatttcaaaaatactcagtaatatgttgttattaatgcacagaagggatgygtgtgtctaaatgcttagatttgcttgctttgtcttaggtttggtgtgtctttttaaacttgggaatctaggtatatgctcttaaaaagtacttcttggg

SEQ ID NO: 222151 - DNA, 201 bp, Homo sapiens
caggaaggcagaagacattgaaaatgatgccctttctcctgaagaacaagaagaatgcaaaaattatctgagaaagaccagggactacctaataaagattwtagatgacagtgattcaaatctttcagtggtcaagaaagtaagtagcaggttgttgtatgtacgttcttactgataacccactggtcagtgtttttgcgt

SEQ ID NO: 222152 - DNA, 201 bp, Homo sapiens; identical to SEQ ID NO: 40247

SEQ ID NO: 222153 - DNA, 201 bp, Homo sapiens
ataaaagcactatttgtatagatttttcacaggaaggcagaagacattgaaaatgatgccctttctcctgaagaacaagaagaatgcaaaaattatctgasaaagaccagggactacctaataaagattatagatgacagtgattcaaatctttcagtggtcaagaaagtaagtagcaggttgttgtatgtacgttcttac

SEQ ID NO: 222154 - DNA, 201 bp, Homo sapiens; identical to SEQ ID NO: 40249

SEQ ID NO: 222155 - DNA, 201 bp, Homo sapiens; identical to SEQ ID NO: 40251

SEQ ID NO: 222156 - DNA, 201 bp, Homo sapiens; identical to SEQ ID NO: 40252

SEQ ID NO: 222157 - DNA, 201 bp, Homo sapiens; identical to SEQ ID NO: 40253

SEQ ID NO: 222158 - DNA, 201 bp, Homo sapiens
gaaaagcagttatataattaagatatatataatgtgaattgtttatgttggcaaaactaatggcacaaggaaaaatttcaaacccttaagccaattttttwattttatttcaggtgctattcgagcacataatggtagtcttcagcaccttacttggcttggcttacagtggaattcattgcctgctttacctggaatccg

SEQ ID NO: 222159 - DNA, 201 bp, Homo sapiens
attttaagataggagctaatattgtttacctaacagtgtagatagtataaaaattaagagtttaagtgcattggacgtattattatatacataataaattmtctgcagctactacttttttccctttcctggtggagcatttgaacatcaccttgagaattagttgtattttgtttcagcatggggttaagtgaaaagcta

SEQ ID NO: 222160 - DNA, 201 bp, Homo sapiens
agatggtccttgttttttaaaaataagatgattaaaattaaagattaatgagctcataggagatactcagaagtactgaacagggtgaagaaaactaaaarctaaccaccttattaacatttcctatatttgagagcatttccttctagttctttctctatacatatagtattttttatgagattgttaccatgttactat

SEQ ID NO: 222161 - DNA, 201 bp, Homo sapiens
tggtcagtgtaatgttagaggactgtgaaagttgaggaaagaagtttagtttgtagatacttgtttttttgagcagggaattgtcttggctggaggtgaaygtcagaaaggttaatgtaggcaagtgtagaatggaaatgaaggtgtgatcatttaggaggttatttgtttaggtgagagttaataaattaggttttgtat

SEQ ID NO: 222162 - DNA, 201 bp, Homo sapiens
agtagctggggatacagatgcgcaccaccacacctggctaaggtttgcattttttggtagagacaggtgtcactatgttgcccaggctagtcttgaacttytgagcacagcagtctgcctgcctcggcctcccgtagtgttgggactacaggtgtgtgttactgctcccagctgggaggcaggcttttaaaggcatccaaa

SEQ ID NO: 222163 - DNA, 201 bp, Homo sapiens
gtttagaaaacttgtgagtaaaaggataggcaatatgaatatttctaaaattcaaaatcagaagcttttaggttcataaatcatatattttgaaaaatgarcatgtttggaaagaattatatatacatggtttaaaattctggcggctcttaagaatatgctatgaagactcctttctgttccctagttatttactttctc

SEQ ID NO: 222164 - DNA, 201 bp, Homo sapiens
catccaaaggaagatggaaatgctggtaagaaaggaaaatggtggtacataaattatgtaactagcagcactgtgactgttaactcttgtacctttttacygtgagactttaatcccttagtttaggtctggcctcatttctctgatggtaatactgtcaaggaacctagaggatatttacttattttagttgttacttga

SEQ ID NO: 222165 - DNA, 201 bp, Homo sapiens
tgtttggaaagaattatatatacatggtttaaaattctggcggctcttaagaatatgctatgaagactcctttctgttccctagttatttactttctccasctccaaagaaactaatgttattgctttcttgtgtgttcttcaggaaatgttttatgcatctccaagtaaacacatatatatctcctgtctttaaaagaag

SEQ ID NO: 222166 - DNA, 201 bp, Homo sapiens
aaaatggtggtacataaattatgtaactagcagcactgtgactgttaactcttgtacctttttactgtgagactttaatcccttagtttaggtctggcctmatttctctgatggtaatactgtcaaggaacctagaggatatttacttattttagttgttacttgatttgagaaatggaaatttcctgtatttggtactgt

SEQ ID NO: 222167 - DNA, 201 bp, Homo sapiens
cctaatgatttcataaaagcactatttgtatagatttttcacaggaaggcagaagacattgaaaatgatgccctttctcctgaagaacaagaagaatgcaraaattatctgagaaagaccagggactacctaataaagattatagatgacagtgattcaaatctttcagtggtcaagaaagtaagtagcaggttgttgtat

SEQ ID NO: 222168 - DNA, 201 bp, Homo sapiens
tattctgtgtgtttaggcatcagaaattgttgaatatgaagaagacgcacacataacttttgctatattggatgcagtaaatggaaatatagaagatgctrtgactgcttttgaatctataaaaagtgttgtttcttattggaatcttgcactggtaagtagatgcagtacttgagctaaaagttttatttatttatttat

SEQ ID NO: 222169 - DNA, 201 bp, Homo sapiens
ttatattctgagtataaacaatttgactaaaaactattctgtgtgtttaggcatcagaaattgttgaatatgaagaagacgcacacataacttttgctatrttggatgcagtaaatggaaatatagaagatgctgtgactgcttttgaatctataaaaagtgttgtttcttattggaatcttgcactggtaagtagatgca

SEQ ID NO: 222170 - DNA, 201 bp, Homo sapiens
aaatcatttgggttttatattctgagtataaacaatttgactaaaaactattctgtgtgtttaggcatcagaaattgttgaatatgaagaagacgcacacrtaacttttgctatattggatgcagtaaatggaaatatagaagatgctgtgactgcttttgaatctataaaaagtgttgtttcttattggaatcttgcact

SEQ ID NO: 222171 - DNA, 201 bp, Homo sapiens; identical to SEQ ID NO: 40261

SEQ ID NO: 222172 - DNA, 201 bp, Homo sapiens; identical to SEQ ID NO: 40263

SEQ ID NO: 222173 - DNA, 201 bp, Homo sapiens
agaataatgagatgtttgtctcttaagatcatataaaatctttggaaaatcatttgggttttatattctgagtataaacaatttgactaaaaactattctrtgtgtttaggcatcagaaattgttgaatatgaagaagacgcacacataacttttgctatattggatgcagtaaatggaaatatagaagatgctgtgactg

SEQ ID NO: 222174 - DNA, 201 bp, Homo sapiens; identical to SEQ ID NO: 40265

SEQ ID NO: 222175 - DNA, 201 bp, Homo sapiens
tttccagtttataaacaaagacatagagctatacactgcttaaattaattgccttgttatttaatgttaatcttgttttctaaattcactagctctcacasataagatatgacagagaagaataatgagatgtttgtctcttaagatcatataaaatctttggaaaatcatttgggttttatattctgagtataaacaatt

SEQ ID NO: 222176 - DNA, 201 bp, Homo sapiens; identical to SEQ ID NO: 40266

SEQ ID NO: 222177 - DNA, 201 bp, Homo sapiens
aacagagttcctttatgaatttattggagatgggaatttccagtttataaacaaagacatagagctatacactgcttaaattaattgccttgttatttaaygttaatcttgttttctaaattcactagctctcacacataagatatgacagagaagaataatgagatgtttgtctcttaagatcatataaaatctttggaa

SEQ ID NO: 222178 - DNA, 201 bp, Homo sapiens
tatgatcttgctaaaaagtaagtacaaactgtaacatgtattttttttttaaaatcaatgccttttctcattttcttctttgaaataggtaaaaatatgtycttagtagttcttcctaagtgtattctggaataagggatttatcactcagactgatgctaaggaccagcctagattccattgagattgaaaccgtaatta

SEQ ID NO: 222179 - DNA, 201 bp, Homo sapiens; identical to SEQ ID NO: 40267

SEQ ID NO: 222180 - DNA, 201 bp, Homo sapiens
tgatcctctgtttaaacattttcatagtgtagacattcaggtaacagagttcctttatgaatttattggagatgggaatttccagtttataaacaaagacrtagagctatacactgcttaaattaattgccttgttatttaatgttaatcttgttttctaaattcactagctctcacacataagatatgacagagaagaat

SEQ ID NO: 222181 - DNA, 201 bp, Homo sapiens
atcttagatgcttgtattttattttatcagtttattttaaagcttaatgatcaaatgattataagcataaaatgtaggttatgtgctggcatttgggtatktaagaattggctaacttttatggcaagattttcagactcttaatcagaggaatactgtggttctagtaagtgcatctgcattgcagctaggtagttaaca

SEQ ID NO: 222182 - DNA, 201 bp, Homo sapiens
ttgtaaatgaactttagatctaatcatgcgtgttccttaaagttgtgtgcttttaactttcttttttagggcagcggtcttaattctttttatgatcaackagaatacatagggagaagtgttcattattggaagaaagttttgccattgttgaagataataaaaaagaagaacagtattcctgaacctattgatcctctg

SEQ ID NO: 222183 - DNA, 201 bp, Homo sapiens; identical to SEQ ID NO: 40268

SEQ ID NO: 222184 - DNA, 201 bp, Homo sapiens
ttcaacttgtaaatgaactttagatctaatcatgcgtgttccttaaagttgtgtgcttttaactttcttttttagggcagcggtcttaattctttttatgrtcaacgagaatacatagggagaagtgttcattattggaagaaagttttgccattgttgaagataataaaaaagaagaacagtattcctgaacctattgat

SEQ ID NO: 222185 - DNA, 201 bp, Homo sapiens; identical to SEQ ID NO: 40270

SEQ ID NO: 222186 - DNA, 201 bp, Homo sapiens; identical to SEQ ID NO: 40272

SEQ ID NO: 222187 - DNA, 201 bp, Homo sapiens; identical to SEQ ID NO: 40273

SEQ ID NO: 222188 - DNA, 201 bp, Homo sapiens
tggctagccttttctaggtcttgatttttcagtgctttccagaggcaattgtttggaacctcttggcacagtttctgtttctttttccatgtacaggcatraaaggtcttttggttgttttctggtaaaactatcataaaacagttcaagcaaatgactattggtagttttgccattaacatgggtgccttctagtcattt

SEQ ID NO: 222189 - DNA, 201 bp, Homo sapiens
ggagaaaaacaagcatttacatatattcttcgtcactttgaagatgcatgacctgaactcgactgcttgtgtttgtttacatatcaggcatacccaggcayctcctgcagccagaggttccattgctgtctttgctcagtcctcttttaaaatatgaattagtggacaggcacggtgcctcacacctgtaatcccagcact

SEQ ID NO: 222190 - DNA, 201 bp, Homo sapiens; identical to SEQ ID NO: 40275

SEQ ID NO: 222191 - DNA, 201 bp, Homo sapiens
gttgcagtgagctgagatcgagccactgcactgcagcctggcgacagagcaagactccatctcaaaaaaaaaaaggaaggggggaacaagccttgttcctwtacgtgctgtcctgactgctgtgtattatttttgttaagattgctgtagttctttttttttttgagacggaggcttgctctgtcgccagtgctgggattg

SEQ ID NO: 222192 - DNA, 201 bp, Homo sapiens
gtcattttttaagatggacttaaacattcttcatcactactatttttattaaaatttctagaaataatcaagtgagaatgcatttaataagaacatgagaytttgcctaacatagaattcccttcagctttgatatagaaaagcagttatataattaagatatatataatgtgaattgtttatgttggcaaaactaatggc

SEQ ID NO: 222193 - DNA, 201 bp, Homo sapiens
cagtcaccagcatataattccccagtatcttctcagaccagcagctaatgttactcccacaaaggtaacaaaggaataatttatacatttataattatttyctttttaaattgtttagggttccttcaaataaattcaagagagcagttcactattaaaacttttatgtcccttaaaatgtagatattttaaatttatctc

SEQ ID NO: 222194 - DNA, 201 bp, Homo sapiens
ttcaatattgactttcttgtagaaaaacagatttctttactgtaccgatggattaatatagtggtgttccattgctttaatgacttaaaggaaaacccatygttttggggtttcttattaggttaggtgttctttatttggcttttgtcagttgattttggtttattgagttctagtcagtgtcattttttaagatggact

SEQ ID NO: 222195 - DNA, 201 bp, Homo sapiens
agttcactattaaaacttttatgtcccttaaaatgtagatattttaaatttatctccaaatacagaaattatccttcttagtcaccttatttttgtgttartaagtgtgaatatttagaatattttaaaaatgggagtggtggtggtggatccttcatcgttctgttttaacagaaatagaactgtaatgcccttgctgac

SEQ ID NO: 222196 - DNA, 201 bp, Homo sapiens
actatgtggtaagtactttcaggcctgatacagctatatatataacaattgattgaagactcaatattacagtggtagttgaatgtgacagctttgaggayagagtgttggggtgcatttagacccttgctcttctgcttattttgaccacaggcaagtttcttaacctctcaatgcatcagttgcctcatatgtaaaatg

SEQ ID NO: 222197 - DNA, 201 bp, Homo sapiens
ctgttaagtgtctgttttgtaaggggacattttgtaggttctagggttgggtatggtgctgtcatttagttttcttcagcagagatgaggtagccacatarctacactagacggcattgtatctatctgccatcttgtcaaggcagcagagttgtgttaagaaaacatttttggagtcagatctggttcaaattccagctg

SEQ ID NO: 222198 - DNA, 201 bp, Homo sapiens
cataaattatgtaactagcagcactgtgactgttaactcttgtacctttttactgtgagactttaatcccttagtttaggtctggcctcatttctctgatsgtaatactgtcaaggaacctagaggatatttacttattttagttgttacttgatttgagaaatggaaatttcctgtatttggtactgtaatgagtaattt

SEQ ID NO: 222199 - DNA, 201 bp, Homo sapiens
tctctgatggtaatactgtcaaggaacctagaggatatttacttattttagttgttacttgatttgagaaatggaaatttcctgtatttggtactgtaatkagtaatttttcttctgttcgattttagctggatatagtactgttagaaattactttcttgcttaaagggtaaatgtatttccctttggtgtttgggaaat

SEQ ID NO: 222200 - DNA, 201 bp, Homo sapiens
ttgtaaagagcaagatgtaatattaaatcaaagttattataagctttggtgtatagttaggctgttggccagagctcacattgctcttttattccatagcycacttttttttgtgggagttaggctttcagtccttaaagtgactttctacttttttccttttctcttttccttctacccttgcagggctctcataagtgc

SEQ ID NO: 222201 - DNA, 201 bp, Homo sapiens
tgtgctgagacacaactgtgtagtggtaaccaaacctaattgcccagcagaattaactcgaaggagggtttttaaaaaaagttcaattgaaatataattcrtataccatacgcttcacccatttaaagtgtacagttcagtggcttttagtatgttcatagagtattaccactgtcaccacagtcagttttagaagatttt

SEQ ID NO: 222202 - DNA, 201 bp, Homo sapiens
agatcattcctggctaacacggtgaaaccccgtctctactaaaaatacaaaaaaaaaaaaaaaaaaaaaaaaaattagccgggcgtggtggcaggcatctrtagtcccagctacttgggaggctgaggcaagagaatggtgtgaacccaggaggcggagcttgcagtgagccgagatcacgccactgcactccagcctggg

SEQ ID NO: 222203 - DNA, 201 bp, Homo sapiens
ccgaggcgggcagatcacaaggtcaggagatcgagatcattcctggctaacacggtgaaaccccgtctctactaaaaatacaaaaaaaaaaaaaaaaaaaraaaaaattagccgggcgtggtggcaggcatctatagtcccagctacttgggaggctgaggcaagagaatggtgtgaacccaggaggcggagcttgcagtg

SEQ ID NO: 222204 - DNA, 201 bp, Homo sapiens
aaatattgctttcacttagtgcgtaggttttaccggggatttaatcctcatgtgaagatttaatttgtcatgtgacccattaacatatatgtatgtaagcsctgaactgtgtatttagaaagcaattttagtaaattgaactattttttagacctggaaacgtagcaaaattgagacttctagttcagcatgaaataaaca

SEQ ID NO: 222205 - DNA, 201 bp, Homo sapiens; identical to SEQ ID NO: 40276

SEQ ID NO: 222206 - DNA, 201 bp, Homo sapiens
gatgcggtttgtactctgattcacagaaaagcagtgtaagtagtaaaacaaaaatattgctttcacttagtgcgtaggttttaccggggatttaatcctcrtgtgaagatttaatttgtcatgtgacccattaacatatatgtatgtaagccctgaactgtgtatttagaaagcaattttagtaaattgaactatttttta

SEQ ID NO: 222207 - DNA, 201 bp, Homo sapiens; identical to SEQ ID NO: 40277

SEQ ID NO: 222208 - DNA, 201 bp, Homo sapiens
cagagttcctttatgaatttattggagatgggaatttccagtttataaacaaagacatagagctatacactgcttaaattaattgccttgttatttaatgktaatcttgttttctaaattcactagctctcacacataagatatgacagagaagaataatgagatgtttgtctcttaagatcatataaaatctttggaaaa

SEQ ID NO: 222209 - DNA, 201 bp, Homo sapiens
caaaaatcttggtgggatgcggtttgtactctgattcacagaaaagcagtgtaagtagtaaaacaaaaatattgctttcacttagtgcgtaggttttaccrgggatttaatcctcatgtgaagatttaatttgtcatgtgacccattaacatatatgtatgtaagccctgaactgtgtatttagaaagcaattttagtaaa

SEQ ID NO: 222210 - DNA, 201 bp, Homo sapiens
ataccagccacttacaattaaaggagaaatgtaattctcaccacagctcctatcagccgttatgcctgccccttcctgtgtgtaaacagctttgtacagaragacaaaaatcttggtgggatgcggtttgtactctgattcacagaaaagcagtgtaagtagtaaaacaaaaatattgctttcacttagtgcgtaggtttt

SEQ ID NO: 222211 - DNA, 201 bp, Homo sapiens; identical to SEQ ID NO: 40491

SEQ ID NO: 222212 - DNA, 201 bp, Homo sapiens
cacttaatttctctagctgtactttttattccaagattccttccctggccactctctcactttttttctgaagctggtcagaatgtccccttgccatccamatagtatggcaaggggacattttggtctttttttttttttttaagacagggtcttgttctgttgtgcaggctggagtacagtggtatgatcacagcttac

SEQ ID NO: 222213 - DNA, 201 bp, Homo sapiens
cttggagtagtatataccagccacttacaattaaaggagaaatgtaattctcaccacagctcctatcagccgttatgcctgccccttcctgtgtgtaaacrgctttgtacagaaagacaaaaatcttggtgggatgcggtttgtactctgattcacagaaaagcagtgtaagtagtaaaacaaaaatattgctttcactta

SEQ ID NO: 222214 - DNA, 201 bp, Homo sapiens
acagctatatatataacaattgattgaagactcaatattacagtggtagttgaatgtgacagctttgaggacagagtgttggggtgcatttagacccttgytcttctgcttattttgaccacaggcaagtttcttaacctctcaatgcatcagttgcctcatatgtaaaatgaggataataataataccttaattcatagg

SEQ ID NO: 222215 - DNA, 201 bp, Homo sapiens
tactctggtctatgagttcattcccagattagctgtggattacatgtgtttcaaatgtatagctaggaattgaaaagtggtctgagcttcaaaaagtcttrctatattttaatacttccatatgaatttgacttcattatgtaaggaaatagttatgtatatatatcttattttaacaatagggttcaaaggagcttgact

SEQ ID NO: 222216 - DNA, 201 bp, Homo sapiens
tatttctccttggagtagtatataccagccacttacaattaaaggagaaatgtaattctcaccacagctcctatcagccgttatgcctgccccttcctgtrtgtaaacagctttgtacagaaagacaaaaatcttggtgggatgcggtttgtactctgattcacagaaaagcagtgtaagtagtaaaacaaaaatattgct

SEQ ID NO: 222217 - DNA, 201 bp, Homo sapiens
ctttaatttctattgcctttgtatttatagctcttgcctagatagtcttaactgtagtatagactttaacagtgttttctttattttctttttgttttttyagttgcaactactggcccttcagtatattatagtcagtcaccagcatataattccccagtatcttctcagaccagcagctaatgttactcccacaaaggt

SEQ ID NO: 222218 - DNA, 201 bp, Homo sapiens
gaaacaggtatttctccttggagtagtatataccagccacttacaattaaaggagaaatgtaattctcaccacagctcctatcagccgttatgcctgcccyttcctgtgtgtaaacagctttgtacagaaagacaaaaatcttggtgggatgcggtttgtactctgattcacagaaaagcagtgtaagtagtaaaacaaaa

SEQ ID NO: 222219 - DNA, 201 bp, Homo sapiens
ttatgtagttaaatctttctttaatttctattgcctttgtatttatagctcttgcctagatagtcttaactgtagtatagactttaacagtgttttctttmttttctttttgtttttttagttgcaactactggcccttcagtatattatagtcagtcaccagcatataattccccagtatcttctcagaccagcagctaa

SEQ ID NO: 222220 - DNA, 201 bp, Homo sapiens
ggtaaaactcacacaaaacagatggagaagagtttgtatatcaacatgaatgttaatgtgatttttttaaagcccgcgaacacatttgtgttccttgtgakctcctttgcatgaatttgtcaggtaatttttttgacctgaacattctcataatagcttcagtttgcccaatgcaacctcatcattttgcggatttttcaa

SEQ ID NO: 222221 - DNA, 201 bp, Homo sapiens
cttatctttaaaatgagagaattactgaagccagttctcatcacactgaatgttaaaaattacagttacagcagtgattgcaaattcaaagctctggtgcrgataccaacagtgaccataaagttttctaggtgattccactagtttcttattggatgtgtatgtgtagcatctggactaggcactgtagatggatgagtg

SEQ ID NO: 222222 - DNA, 201 bp, Homo sapiens
ttttttctaacttaacttttccttaaatgaaacaggtatttctccttggagtagtatataccagccacttacaattaaaggagaaatgtaattctcaccayagctcctatcagccgttatgcctgccccttcctgtgtgtaaacagctttgtacagaaagacaaaaatcttggtgggatgcggtttgtactctgattcaca

SEQ ID NO: 222223 - DNA, 201 bp, Homo sapiens
tttgataatcttgattggtgtattttgatgtacagaaatttaaaatttatgtagttaaatctttctttaatttctattgcctttgtatttatagctcttgmctagatagtcttaactgtagtatagactttaacagtgttttctttattttctttttgtttttttagttgcaactactggcccttcagtatattatagtca

SEQ ID NO: 222224 - DNA, 201 bp, Homo sapiens
taaaatgagagaattactgaagccagttctcatcacactgaatgttaaaaattacagttacagcagtgattgcaaattcaaagctctggtgcggataccarcagtgaccataaagttttctaggtgattccactagtttcttattggatgtgtatgtgtagcatctggactaggcactgtagatggatgagtgggggaaat

SEQ ID NO: 222225 - DNA, 201 bp, Homo sapiens
cgcttcacccatttaaagtgtacagttcagtggcttttagtatgttcatagagtattaccactgtcaccacagtcagttttagaagattttcatcactccrtgaggaattccttacctattagcagttacttcccattttacccaaacctctcagccttggcaactgctaatctgtctctgtaggtttgcctcttctgaac

SEQ ID NO: 222226 - DNA, 201 bp, Homo sapiens
caaaagatcatatagaagaataatttgtaaagttgtttaattatcttaagattgtctactttaataacatagttggaagcaaagaaggtaatggaattatytttctattatgttttggcattgtaccttgaatctatttcttcattttgaaaagggggaactggctgggctcaatggctgacgcctgtaatcccagcactt

SEQ ID NO: 222227 - DNA, 201 bp, Homo sapiens
agtttttttctagtttgtcatttgataatcttgattggtgtattttgatgtacagaaatttaaaatttatgtagttaaatctttctttaatttctattgcytttgtatttatagctcttgcctagatagtcttaactgtagtatagactttaacagtgttttctttattttctttttgtttttttagttgcaactactggc

SEQ ID NO: 222228 - DNA, 201 bp, Homo sapiens
tcacttactataatagctgtgtaagttaacctgtctgaaatgtggagataatacttgccttacataattactatgagcatttgtgtatgtgcaggtgggcrtgggtgtgtatcagacatttattagagtatacagtaaacagttaatgaactaaggttactaatagtgtttactgtgggttggctatgtgcaaaagtgctt

SEQ ID NO: 222229 - DNA, 201 bp, Homo sapiens
tttttaaaaaaagttcaattgaaatataattcatataccatacgcttcacccatttaaagtgtacagttcagtggcttttagtatgttcatagagtattaycactgtcaccacagtcagttttagaagattttcatcactccatgaggaattccttacctattagcagttacttcccattttacccaaacctctcagcctt

SEQ ID NO: 222230 - DNA, 201 bp, Homo sapiens
ttgagaacagctgatcagatgggtttttggaggattttagggggagggagattcatttgactgtgcaagatgggcgacagagtgagactccatctgaattwaaaaaaaaatttagaactgcatagtgaaaaagtaggccacaaatattaagttttggacaattacaattacatctctatcttactgtgcaagatagagatg

SEQ ID NO: 222231 - DNA, 201 bp, Homo sapiens
catatttagcagtttttttctagtttgtcatttgataatcttgattggtgtattttgatgtacagaaatttaaaatttatgtagttaaatctttctttaayttctattgcctttgtatttatagctcttgcctagatagtcttaactgtagtatagactttaacagtgttttctttattttctttttgtttttttagttgc

SEQ ID NO: 222232 - DNA, 201 bp, Homo sapiens
tatgtgcaggtgggcgtgggtgtgtatcagacatttattagagtatacagtaaacagttaatgaactaaggttactaatagtgtttactgtgggttggctrtgtgcaaaagtgctttgtgaatgtaattttatttaattacagtaacttagaatggccggtaccattattaatcccttttttataaataaggaaattaaag

SEQ ID NO: 222233 - DNA, 201 bp, Homo sapiens
aggggaagaagattggggaactcatggttcagtatctagacttttcctcattgtcctgtataatcacggccttcacccttgttgggactccacagatttgkagctgatcagatgggtttgttgagaacagctgatcagatgggtttttggaggattttagggggagggagattcatttgactgtgcaagatgggcgacaga

SEQ ID NO: 222234 - DNA, 201 bp, Homo sapiens
cagttactttcttctttattccttttttaatgcttgtgaggtagttgttcttgttgatcacagcaatgctattctcttattcttcatgtcatatttagcartttttttctagtttgtcatttgataatcttgattggtgtattttgatgtacagaaatttaaaatttatgtagttaaatctttctttaatttctattgcct

SEQ ID NO: 222235 - DNA, 201 bp, Homo sapiens
acatttattagagtatacagtaaacagttaatgaactaaggttactaatagtgtttactgtgggttggctatgtgcaaaagtgctttgtgaatgtaatttkatttaattacagtaacttagaatggccggtaccattattaatcccttttttataaataaggaaattaaagaaaggttaggtaacttactcattattatac

SEQ ID NO: 222236 - DNA, 201 bp, Homo sapiens
tatacagctagttattgatagagctgagattcacactccggtggtgtaactccaaagcacttgccagtataatacattgctcccaggcagcgagaaataamaaaattgttccttttacgtacgacagacttctgaaatggtagtagtagtagtgccctttttttttctctttttagcccaggaaagatttagaataaaatc

SEQ ID NO: 222237 - DNA, 201 bp, Homo sapiens; identical to SEQ ID NO: 40501

SEQ ID NO: 222238 - DNA, 201 bp, Homo sapiens
gatgttactgatggaagagcaaaatactggcttgaaagagcagccaaacttttcccaggaagtcctgcaatttataaactaaaggtaaacaaacaaaacakaaagggagaaaacttaagacataaccatttctaatatttggaatttaaattacttttcaatagcaaaccttaagcccaggtgttagtgtttcctttaaaa

SEQ ID NO: 222239 - DNA, 201 bp, Homo sapiens; identical to SEQ ID NO: 40502

SEQ ID NO: 222240 - DNA, 201 bp, Homo sapiens
agaaacataatgctttctataaggagcagttttgatataaaattggatgaattttgtaaagagcaagatgtaatattaaatcaaagttattataagctttrgtgtatagttaggctgttggccagagctcacattgctcttttattccatagctcacttttttttgtgggagttaggctttcagtccttaaagtgactttc

SEQ ID NO: 222241 - DNA, 201 bp, Homo sapiens
aaatttcttttatttatgtagaacagttataaaatgaaatttttaccaggatcagttaaatttataatgggaagattggggagataactatgataaatgtrtatatttttggtgttttataaggtcgatataaaaatcaatatagtttcacaaatgtggttggagtgagaaaaggaatttgtaggcttaaaatgattaatt

SEQ ID NO: 222242 - DNA, 201 bp, Homo sapiens
agtatatataaagggcattctcattagtttggatgcttgcatattattccattgtatggatgtactgtagttttggagtttttaaaaccagggtcctaaarccaggacattagctggcttttactttttttttttttaatgctacttcaagtaatttagcaatgattaacttgtgccatgaattcctgaaagaattgcagt

SEQ ID NO: 222243 - DNA, 201 bp, Homo sapiens
cctgtctttaaaagaaggaggaaaacatttgaacattgcatttactttatttccattaactgtatcttggagatgtttccatgtcagtatatataaagggyattctcattagtttggatgcttgcatattattccattgtatggatgtactgtagttttggagtttttaaaaccagggtcctaaaaccaggacattagctg

SEQ ID NO: 222244 - DNA, 201 bp, Homo sapiens
gttatttactttctccacctccaaagaaactaatgttattgctttcttgtgtgttcttcaggaaatgttttatgcatctccaagtaaacacatatatatcycctgtctttaaaagaaggaggaaaacatttgaacattgcatttactttatttccattaactgtatcttggagatgtttccatgtcagtatatataaaggg

SEQ ID NO: 222245 - DNA, 201 bp, Homo sapiens
ggatctgttgaaggccttcaagaacaggttagggaagtgaaatctcacccttagtgaccagtaacacatcttagccatgccaaacaagtacaatgataaartagcaatctctgattttttttttaagtataccagttttattactagctaaggtagctcttaatcttttatttttaaagatacggtctttgagaaatgtga

SEQ ID NO: 222246 - DNA, 201 bp, Homo sapiens
atcaatatgtattttagatcttgaagtaagcaaagattttaacaaattaaatattctgaattttgtttaattttttttctaacttaacttttccttaaatraaacaggtatttctccttggagtagtatataccagccacttacaattaaaggagaaatgtaattctcaccacagctcctatcagccgttatgcctgcccc

SEQ ID NO: 222247 - DNA, 201 bp, Homo sapiens
gttccctagttatttactttctccacctccaaagaaactaatgttattgctttcttgtgtgttcttcaggaaatgttttatgcatctccaagtaaacacayatatatctcctgtctttaaaagaaggaggaaaacatttgaacattgcatttactttatttccattaactgtatcttggagatgtttccatgtcagtatat

SEQ ID NO: 222248 - DNA, 201 bp, Homo sapiens
tacagtggaattcattgcctgctttacctggaatccgaaaatggctaaaacagcttttccatcatttgccccatgaaacctcaaggcttgaaacaaatgcrcctgaatcaatatgtattttagatcttgaagtaagcaaagattttaacaaattaaatattctgaattttgtttaattttttttctaacttaacttttcct

SEQ ID NO: 222249 - DNA, 201 bp, Homo sapiens
aaatcaaacttgggcttctggctagccttttctaggtcttgatttttcagtgctttccagaggcaattgtttggaacctcttggcacagtttctgtttctytttccatgtacaggcataaaaggtcttttggttgttttctggtaaaactatcataaaacagttcaagcaaatgactattggtagttttgccattaacatg

SEQ ID NO: 222250 - DNA, 201 bp, Homo sapiens
tttggaaagaattatatatacatggtttaaaattctggcggctcttaagaatatgctatgaagactcctttctgttccctagttatttactttctccaccyccaaagaaactaatgttattgctttcttgtgtgttcttcaggaaatgttttatgcatctccaagtaaacacatatatatctcctgtctttaaaagaagga

SEQ ID NO: 222251 - DNA, 201 bp, Homo sapiens
gtcttcagcaccttacttggcttggcttacagtggaattcattgcctgctttacctggaatccgaaaatggctaaaacagcttttccatcatttgccccakgaaacctcaaggcttgaaacaaatgcacctgaatcaatatgtattttagatcttgaagtaagcaaagattttaacaaattaaatattctgaattttgttt

SEQ ID NO: 222252 - DNA, 201 bp, Homo sapiens
aacattttgtttcttattttgtgtgctcttttcaacatatagatgacaaagggctttgacatgatgtttagaaaacttgtgagtaaaaggataggcaataygaatatttctaaaattcaaaatcagaagcttttaggttcataaatcatatattttgaaaaatgaacatgtttggaaagaattatatatacatggtttaaa

SEQ ID NO: 222253 - DNA, 201 bp, Homo sapiens
cataatggtagtcttcagcaccttacttggcttggcttacagtggaattcattgcctgctttacctggaatccgaaaatggctaaaacagcttttccatcrtttgccccatgaaacctcaaggcttgaaacaaatgcacctgaatcaatatgtattttagatcttgaagtaagcaaagattttaacaaattaaatattctg

SEQ ID NO: 222254 - DNA, 201 bp, Homo sapiens
ctgatctttcttagaaaaggcaacagttactttcttctttattccttttttaatgcttgtgaggtagttgttcttgttgatcacagcaatgctattctctyattcttcatgtcatatttagcagtttttttctagtttgtcatttgataatcttgattggtgtattttgatgtacagaaatttaaaatttatgtagttaaa

SEQ ID NO: 222255 - DNA, 201 bp, Homo sapiens
cagagcgagactccatctcaaaaaaaaaaaaaggaaatagtgaattgagatgatttgattgagtggattcacaactaattaactggtcacagattcaactrttgaataattttgtaaaagaggccgggtttatgaattgaggtcagtttcaaaacaaaaagaatgatgtcaacattttgtttcttattttgtgtgctcttt

SEQ ID NO: 222256 - DNA, 201 bp, Homo sapiens
ttggcaaaactaatggcacaaggaaaaatttcaaacccttaagccaattttttaattttatttcaggtgctattcgagcacataatggtagtcttcagcaycttacttggcttggcttacagtggaattcattgcctgctttacctggaatccgaaaatggctaaaacagcttttccatcatttgccccatgaaacctcaa

SEQ ID NO: 222257 - DNA, 201 bp, Homo sapiens
cacaaaacagagggagcagacagtttgtacatcagcatgagtgttgatgtgctttttattttaagccagggaacacattttatgttatttatgacatcctktccatgaatttgtcaggtgatttttgagctgaacattctcagtaatagctttagtttacaaaatacaacctactctttctgcagattttctaggcccact

SEQ ID NO: 222258 - DNA, 201 bp, Homo sapiens
ttgcatatgcaaatgtgcaatacattctttctctgcttttaaaaaatattgtgcctcaatgtgggtgtgctttacctattgccagatgccttgcttttctraatgtttcttcattgttccacttcagcacagagatacctacttcagtctttattaactaccacatatttctgtagaatgaatatataatagaaacatctt

SEQ ID NO: 222259 - DNA, 201 bp, Homo sapiens
cttaaccactttcaagtgtgcaatgcagtagccttatgttgctgtgcaatgtatctccagaaagttttcatcttttatttctatttatttatttattattktgagacatgatcttgctgtcacctgggatggaatgcagtggtgcgattatgggtctctgcaacttcgaactcttgcgctcaatcaatcctcctgcctcag

SEQ ID NO: 222260 - DNA, 201 bp, Homo sapiens
atatatataatgtgaattgtttatgttggcaaaactaatggcacaaggaaaaatttcaaacccttaagccaattttttaattttatttcaggtgctattcragcacataatggtagtcttcagcaccttacttggcttggcttacagtggaattcattgcctgctttacctggaatccgaaaatggctaaaacagcttttc

SEQ ID NO: 222261 - DNA, 201 bp, Homo sapiens
ctggtaaaactatcataaaacagttcaagcaaatgactattggtagttttgccattaacatgggtgccttctagtcattttgtttcctggtaaaacacacmaaacagagggagcagacagtttgtacatcagcatgagtgttgatgtgctttttattttaagccagggaacacattttatgttatttatgacatcctgtcc

SEQ ID NO: 222262 - DNA, 201 bp, Homo sapiens
attacaggtatgagccaccacacctgactgtgaacttttaataataaaaagttagtttccctcttaatccattcactcaggtctcctttcctagatgacarctactgttaggagtttcttgggtgttcagaaatattttttgcatatgcaaatgtgcaatacattctttctctgcttttaaaaaatattgtgcctcaatgt

SEQ ID NO: 222263 - DNA, 201 bp, Homo sapiens
aagattcttgggccatttctgtcaggttgttctgtgttctgtgcctgcttcctccccatagtaatttcaaaatagctatcctcacctctgtaaggtttccraaatcaaacttgggcttctggctagccttttctaggtcttgatttttcagtgctttccagaggcaattgtttggaacctcttggcacagtttctgtttct

SEQ ID NO: 222264 - DNA, 201 bp, Homo sapiens
agaaaagcagttatataattaagatatatataatgtgaattgtttatgttggcaaaactaatggcacaaggaaaaatttcaaacccttaagccaatttttwaattttatttcaggtgctattcgagcacataatggtagtcttcagcaccttacttggcttggcttacagtggaattcattgcctgctttacctggaatcc

SEQ ID NO: 222265 - DNA, 201 bp, Homo sapiens
tagtcttgaactcctggcttcaagtgatccttctgccttgccctcccaaagtgctgggattacaggtatgagccaccacacctgactgtgaacttttaatmataaaaagttagtttccctcttaatccattcactcaggtctcctttcctagatgacaactactgttaggagtttcttgggtgttcagaaatattttttgc

SEQ ID NO: 222266 - DNA, 201 bp, Homo sapiens
gcagacagacatcttgcaagactttaagattcttgggccatttctgtcaggttgttctgtgttctgtgcctgcttcctccccatagtaatttcaaaatagytatcctcacctctgtaaggtttccaaaatcaaacttgggcttctggctagccttttctaggtcttgatttttcagtgctttccagaggcaattgtttgga

SEQ ID NO: 222267 - DNA, 201 bp, Homo sapiens
acattcttcatcactactatttttattaaaatttctagaaataatcaagtgagaatgcatttaataagaacatgagattttgcctaacatagaattccctycagctttgatatagaaaagcagttatataattaagatatatataatgtgaattgtttatgttggcaaaactaatggcacaaggaaaaatttcaaaccctt

SEQ ID NO: 222268 - DNA, 201 bp, Homo sapiens
tccacctccaaagaaactaatgttattgctttcttgtgtgttcttcaggaaatgttttatgcatctccaagtaaacacatatatatctcctgtctttaaargaaggaggaaaacatttgaacattgcatttactttatttccattaactgtatcttggagatgtttccatgtcagtatatataaagggcattctcattagt

SEQ ID NO: 222269 - DNA, 201 bp, Homo sapiens
gagtcagtagtcaattaaagtccctacttaaacttcagactaagattttttttttatttaatattttattttttctttttgctttcatgcagacagacatyttgcaagactttaagattcttgggccatttctgtcaggttgttctgtgttctgtgcctgcttcctccccatagtaatttcaaaatagctatcctcacctc

SEQ ID NO: 222270 - DNA, 201 bp, Homo sapiens
gagattgttaccatgttactatgttgtgtgtagatgagctagcctgttttttaaatgttactttagttctgagcatttttaaacttaaatgttttttgaayattaatgagttcatggtatcccatcacatggaagtactgtaaattctgttcctttatttatgttgtttctggtttatgccattacaaattctaggacact

SEQ ID NO: 222271 - DNA, 201 bp, Homo sapiens
ggagtttcaccatgctggccaggctggtctcgaactcctgactgcgcagaaccttttcaatattgactttcttgtagaaaaacagatttctttactgtacygatggattaatatagtggtgttccattgctttaatgacttaaaggaaaacccatcgttttggggtttcttattaggttaggtgttctttatttggctttt

SEQ ID NO: 222272 - DNA, 201 bp, Homo sapiens
ttccaccaccaattaagaaagtggtgatagaattaaaagccgatgctctagtcacccatatagttacttttggcatgtttctagtaagtgggcattgcctrtgactggacgttttcagtgatggacattcattacttttcaagatagcccagtgcatctttaggtggtttggctcttggtacttccttatatagaataaaa

SEQ ID NO: 222273 - DNA, 201 bp, Homo sapiens
gcactgacatgatgctcaaaggaaatgctcattggagaattttggatttcagattttcagatttgggatgctctacctgctaagtatcctgcaaatattcyaaagtctgaaaaaattcaaaatctgaaatacttctagtctcaagcattttgcataagggatactcaacctgtttaacccgaccaaagcacactatcaaaa

SEQ ID NO: 222274 - DNA, 201 bp, Homo sapiens
caaggctcacttcaaaaacatgttccttgaggcctattaacatttctttcctaaattgtctattcatatggtgcttttaaaagttagattacttttagtakatttattagagccgcacagtttagagtcagtagtcaattaaagtccctacttaaacttcagactaagattttttttttatttaatattttattttttctt

SEQ ID NO: 222275 - DNA, 201 bp, Homo sapiens
actcacacaaaacagatggagaagagtttgtatatcaacatgaatgttaatgtgatttttttaaagcccgcgaacacatttgtgttccttgtgatctcctktgcatgaatttgtcaggtaatttttttgacctgaacattctcataatagcttcagtttgcccaatgcaacctcatcattttgcggatttttcaaggctca

SEQ ID NO: 222276 - DNA, 201 bp, Homo sapiens
ctgccaggttcaagcaattgtcttgcctcagcctcccaagtagctgggactataggcacgtgacaccatgctcggctaattttttgtatttttagtagagrcggagtttcaccatgctggccaggctggtctcgaactcctgactgcgcagaaccttttcaatattgactttcttgtagaaaaacagatttctttactgta

SEQ ID NO: 222277 - DNA, 201 bp, Homo sapiens
tgatagaattaaaagccgatgctctagtcacccatatagttacttttggcatgtttctagtaagtgggcattgcctatgactggacgttttcagtgatggrcattcattacttttcaagatagcccagtgcatctttaggtggtttggctcttggtacttccttatatagaataaaaatattcttcaagccttctacctgt

SEQ ID NO: 222278 - DNA, 201 bp, Homo sapiens
ccacgcctgtacctggcctatctttcataggttatataaattccttggttcccagtttttgcagtcttttccaattcagtttaattaatggttaactgttyattcattatcaaaaaaagtacagtgtaatagataagaccatgttactattagaagtatgggtatcatcaaattaagatttttgattctaaaattattagg

SEQ ID NO: 222279 - DNA, 201 bp, Homo sapiens
atcattttgcggatttttcaaggctcacttcaaaaacatgttccttgaggcctattaacatttctttcctaaattgtctattcatatggtgcttttaaaarttagattacttttagtagatttattagagccgcacagtttagagtcagtagtcaattaaagtccctacttaaacttcagactaagattttttttttattt

SEQ ID NO: 222280 - DNA, 201 bp, Homo sapiens
aatctttctttaatttctattgcctttgtatttatagctcttgcctagatagtcttaactgtagtatagactttaacagtgttttctttattttctttttktttttttagttgcaactactggcccttcagtatattatagtcagtcaccagcatataattccccagtatcttctcagaccagcagctaatgttactccca

SEQ ID NO: 222281 - DNA, 201 bp, Homo sapiens
caattacatctctatcttactgtgcaagatagagatgatgtggcatctcttagggtcttactgttcctgttttcagccctgcatcagttcttgatatttgrcagcttaagtgaattcaggtatttgcttatagtgacatctgctgtcatgtaaagaagtactgcttgcatcagatattgtcctgtttacataacatgggct

SEQ ID NO: 222282 - DNA, 201 bp, Homo sapiens
tttcagtccttaaagtgactttctacttttttccttttctcttttccttctacccttgcagggctctcataagtgcctttgcgtggtgtcacagttagatraaaattgcctgtattttttttaatgtctttgatctgggcatcccgagggtgcctctgtaagtgtgctgagacacaactgtgtagtggtaaccaaacctaa

SEQ ID NO: 222283 - DNA, 201 bp, Homo sapiens
acctcatcattttgcggatttttcaaggctcacttcaaaaacatgttccttgaggcctattaacatttctttcctaaattgtctattcatatggtgctttwaaaagttagattacttttagtagatttattagagccgcacagtttagagtcagtagtcaattaaagtccctacttaaacttcagactaagattttttttt

SEQ ID NO: 222284 - DNA, 201 bp, Homo sapiens
ggtatgtctttaaaatgtctttacttaatttagttgatcatttggttatcgaattctgagtttgaaataatttttttttcgcaattttgaaagcattgctycattttctagaagttctgttgttaggagtccgatgagattcttgttcttggtaacttaaaggttttctggaagtgtcctttcaattgggaaactcatttc

SEQ ID NO: 222285 - DNA, 201 bp, Homo sapiens
cacatttgtgttccttgtgatctcctttgcatgaatttgtcaggtaatttttttgacctgaacattctcataatagcttcagtttgcccaatgcaacctcrtcattttgcggatttttcaaggctcacttcaaaaacatgttccttgaggcctattaacatttctttcctaaattgtctattcatatggtgcttttaaaag

SEQ ID NO: 222286 - DNA, 201 bp, Homo sapiens
tatttaagaattggctaacttttatggcaagattttcagactcttaatcagaggaatactgtggttctagtaagtgcatctgcattgcagctaggtagttracaaagtatcttgaaaccttttagttaagatgaggaaatagccaggcacggtggctcacgcctatgatcttagcactttgggaggctgaggcgggcggat

SEQ ID NO: 222287 - DNA, 201 bp, Homo sapiens
atcaaattacatttccaccaccaattaagaaagtggtgatagaattaaaagccgatgctctagtcacccatatagttacttttggcatgtttctagtaagygggcattgcctatgactggacgttttcagtgatggacattcattacttttcaagatagcccagtgcatctttaggtggtttggctcttggtacttcctta

SEQ ID NO: 222288 - DNA, 201 bp, Homo sapiens
ttaattaatgtcttttatttttagttgcctgtgcccctggagtctgtaaaagagatgcttaattcagtcatgcaggaactcgaagactatagtgaaggagrtcctctctataaaaatggttctttgcgaaatgcagattcagaaataaaacattctacaccgtctcctaccagatattcactatcaccaagtaaaagttac

SEQ ID NO: 222289 - DNA, 201 bp, Homo sapiens
tttacttttggaattttttgcaaatgaaagcccttaattaatgtcttttatttttagttgcctgtgcccctggagtctgtaaaagagatgcttaattcagycatgcaggaactcgaagactatagtgaaggaggtcctctctataaaaatggttctttgcgaaatgcagattcagaaataaaacattctacaccgtctcct

SEQ ID NO: 222290 - DNA, 201 bp, Homo sapiens
gttgcagtgagctgaaatcgtgccactgcagcactgcagcctggcgacagagcgagactccatctcaaaaaaaaaaaaaggaaatagtgaattgagatgayttgattgagtggattcacaactaattaactggtcacagattcaactgttgaataattttgtaaaagaggccgggtttatgaattgaggtcagtttcaaaa

SEQ ID NO: 222291 - DNA, 201 bp, Homo sapiens; identical to SEQ ID NO: 40170

SEQ ID NO: 222292 - DNA, 201 bp, Homo sapiens
agttctttcaacttgtaaatgaactttagatctaatcatgcgtgttccttaaagttgtgtgcttttaactttcttttttagggcagcggtcttaattcttyttatgatcaacgagaatacatagggagaagtgttcattattggaagaaagttttgccattgttgaagataataaaaaagaagaacagtattcctgaacct

SEQ ID NO: 222293 - DNA, 201 bp, Homo sapiens
ttttttgatatgtagttttgggaggcagagtctcttgttgctctggctggagtgcagtggcatgatcatagctcactgcatcctcgaactcctgggctcargtgatcctctcctgcttcagcctcagctcagtagctgggactacaggtgcctgccaccatgcctggctacattgttaaattttttgtaaagacaaggtct

SEQ ID NO: 222294 - DNA, 201 bp, Homo sapiens
ccccatctggtataaggaaagaagttcatttcactgagtgcagggagtaggtaattttcttgaaaaagtacataaaagtacctaaattggtagggtaagarcagtatctaaaagaactaacataactttaagattattttagaaaacatgtaggatgttttattttgtattctttgtatactcaaatttttggtcacaagt

SEQ ID NO: 222295 - DNA, 201 bp, Homo sapiens
tcttgctgtgtcacccgggctggagtgcagttgcataatcatagctcactgtaacgttgaactgggctcaagcttcctagagtgctgggattgtaggtgtsagctactatgcacagcctaaaattttttgatatgtagttttgggaggcagagtctcttgttgctctggctggagtgcagtggcatgatcatagctcactg

SEQ ID NO: 222296 - DNA, 201 bp, Homo sapiens
tacataaaagtacctaaattggtagggtaagagcagtatctaaaagaactaacataactttaagattattttagaaaacatgtaggatgttttattttgtrttctttgtatactcaaatttttggtcacaagttccttttacatttttgttaaggacatcgaagatctttgtatgtgggttcctttttttctttctttctt

SEQ ID NO: 222297 - DNA, 201 bp, Homo sapiens
gggtttcaccatgttagccaggatggtctcgatcttctgacctcgagatccacccgacttggcctctcaaagtgctgggattacaggcataagccaccgarcccggcctgtaaatcttttaaaaacaccgttgatagacagttcacatgttaagtgctaatatttgctcagtagaaacttctgtgttcataaggaattgga

SEQ ID NO: 222298 - DNA, 201 bp, Homo sapiens
agtggcgcaatctcggctcactgcaacttccgcctgccaggttcaagcaattgtcttgcctcagcctcccaagtagctgggactataggcacgtgacaccrtgctcggctaattttttgtatttttagtagagacggagtttcaccatgctggccaggctggtctcgaactcctgactgcgcagaaccttttcaatattga

SEQ ID NO: 222299 - DNA, 201 bp, Homo sapiens
ttacaggcacacaccaccatgcctggctaattttttgtattttttaatagagacggggtttcaccatgttagccaggatggtctcgatcttctgacctcgmgatccacccgacttggcctctcaaagtgctgggattacaggcataagccaccgaacccggcctgtaaatcttttaaaaacaccgttgatagacagttcac

SEQ ID NO: 222300 - DNA, 201 bp, Homo sapiens
gaaaagaaataagtagtcttccaaaaaagcattaaaccacgcttagaaaaatgattgttaattttagagaaggattttttgcttggggagggaaaaaaagrattcattacttttagagaaggcgcctccttctaatataaatctttttttctttttgagacggggttttgctcttgttgcccaggctggagtgcagtggcg

SEQ ID NO: 222301 - DNA, 201 bp, Homo sapiens
aaatgacagaaagattatacctctttatgcttccagaagcacataaccttttcttttcttttcttttcttttcttttcttttcttttcttttcttttcttygagacagagtctcgctctgtcacccaggctggagtgcagtggcgcaatctcggctcactgcaacttccgcctgccaggttcaagcaattgtcttgcctca

SEQ ID NO: 222302 - DNA, 201 bp, Homo sapiens
tcaatctcctgacctagtcatccacctgcctcggcctcccaaagtgctgggattacaggcgtgagccaccacacccagcctttttttttttttttttttttaatgagcttgcataacttttgaaaggaaaagaaataagtagtcttccaaaaaagcattaaaccacgcttagaaaaatgattgttaattttagagaaggat

SEQ ID NO: 222303 - DNA, 201 bp, Homo sapiens
ttatttccatagagatacctaaaaacagaattagagacaaaggccatgaacatctttaagtcttgcaaattgccaaaatgacagaaagattatacctcttyatgcttccagaagcacataaccttttcttttcttttcttttcttttcttttcttttcttttcttttcttttctttgagacagagtctcgctctgtcaccc

SEQ ID NO: 222304 - DNA, 201 bp, Homo sapiens
ctcaatctcctgacctagtcatccacctgcctcggcctcccaaagtgctgggattacaggcgtgagccaccacacccagcctttttttttttttttttttttaatgagcttgcataacttttgaaaggaaaagaaataagtagtcttccaaaaaagcattaaaccacgcttagaaaaatgattgttaattttagagaagga

SEQ ID NO: 222305 - DNA, 201 bp, Homo sapiens
cactgttaataatcatactctgataaaaacttcaacaaaaagtgtcttcattgcaagttatttccatagagatacctaaaaacagaattagagacaaaggmcatgaacatctttaagtcttgcaaattgccaaaatgacagaaagattatacctctttatgcttccagaagcacataaccttttcttttcttttcttttct

SEQ ID NO: 222306 - DNA, 201 bp, Homo sapiens
acacatttgtgttccttgtgatctcctttgcatgaatttgtcaggtaatttttttgacctgaacattctcataatagcttcagtttgcccaatgcaacctyatcattttgcggatttttcaaggctcacttcaaaaacatgttccttgaggcctattaacatttctttcctaaattgtctattcatatggtgcttttaaaa

SEQ ID NO: 222307 - DNA, 201 bp, Homo sapiens
tctcaatctcctgacctagtcatccacctgcctcggcctcccaaagtgctgggattacaggcgtgagccaccacacccagcctttttttttttttttttttttaatgagcttgcataacttttgaaaggaaaagaaataagtagtcttccaaaaaagcattaaaccacgcttagaaaaatgattgttaattttagagaagg

SEQ ID NO: 222308 - DNA, 201 bp, Homo sapiens
gttttctcaacttttccactgttaataatcatactctgataaaaacttcaacaaaaagtgtcttcattgcaagttatttccatagagatacctaaaaacakaattagagacaaaggccatgaacatctttaagtcttgcaaattgccaaaatgacagaaagattatacctctttatgcttccagaagcacataaccttttc

SEQ ID NO: 222309 - DNA, 201 bp, Homo sapiens
taaagcccgcgaacacatttgtgttccttgtgatctcctttgcatgaatttgtcaggtaatttttttgacctgaacattctcataatagcttcagtttgcmcaatgcaacctcatcattttgcggatttttcaaggctcacttcaaaaacatgttccttgaggcctattaacatttctttcctaaattgtctattcatatg

SEQ ID NO: 222310 - DNA, 201 bp, Homo sapiens
cttgacctcgtgatctgcctgccttggtctcccaaagtgctgggattacaggcgcaagccactgcgcctggccttttttttttttttttttttttttttttgagatggaatcttgctctgtcgcccagtctggagtgcagtggcacgatctcggctccctgcaagctccacctcccgagttcacgccattttcctgcctca

SEQ ID NO: 222311 - DNA, 201 bp, Homo sapiens
atccaagttttctcaacttttccactgttaataatcatactctgataaaaacttcaacaaaaagtgtcttcattgcaagttatttccatagagatacctawaaacagaattagagacaaaggccatgaacatctttaagtcttgcaaattgccaaaatgacagaaagattatacctctttatgcttccagaagcacataac

SEQ ID NO: 222312 - DNA, 201 bp, Homo sapiens
tttttttaaagcccgcgaacacatttgtgttccttgtgatctcctttgcatgaatttgtcaggtaatttttttgacctgaacattctcataatagcttcartttgcccaatgcaacctcatcattttgcggatttttcaaggctcacttcaaaaacatgttccttgaggcctattaacatttctttcctaaattgtctatt

SEQ ID NO: 222313 - DNA, 201 bp, Homo sapiens
ccctctggagcctcagtaaatttacttaatctaattggtctagatgttggggtgatttttttttttttgagacggagtctcactctgtcccccaggctggrgttcaatggcgcaatctcagctcactgcaagctccccctcggtgccggggtgattacccttatcttgcctcccgctaagtcacagaggtttggggagttc

SEQ ID NO: 222314 - DNA, 201 bp, Homo sapiens
ttgagaccaagtctctctgtcaccaggctggagtgcagtggcgtgatctcggctcactgcagcctccacctcctgggttcaagtgattctcctgcctcagyctcccgagtagctgggactacaggcccgtgctaccacacccagctaattttttgtatttttaatagagatggcgtttcaccatgttggccaggatggtcg

SEQ ID NO: 222315 - DNA, 201 bp, Homo sapiens
tcccaggttcaagtgattctgctgcctcagtctcccaagtagcgggattacaaatgcccgccatcacgcccggctaattttttgtatttttagtagagacrgggtttcatcatgttggtcaggctggtctcaaactcctgacctcaggtgatccacctgccttggcctcccaaagtgctgggattacaggtgtgagccacc

SEQ ID NO: 222316 - DNA, 201 bp, Homo sapiens
tagtttgtcatttgataatcttgattggtgtattttgatgtacagaaatttaaaatttatgtagttaaatctttctttaatttctattgcctttgtatttrtagctcttgcctagatagtcttaactgtagtatagactttaacagtgttttctttattttctttttgtttttttagttgcaactactggcccttcagtat

SEQ ID NO: 222317 - DNA, 201 bp, Homo sapiens
atatcaacatgaatgttaatgtgatttttttaaagcccgcgaacacatttgtgttccttgtgatctcctttgcatgaatttgtcaggtaatttttttgacytgaacattctcataatagcttcagtttgcccaatgcaacctcatcattttgcggatttttcaaggctcacttcaaaaacatgttccttgaggcctattaa

SEQ ID NO: 222318 - DNA, 201 bp, Homo sapiens
atattttcctgtattccttttgtgtgtgggttgggctggggggagtttgaatgtggtgctgtgggggtggcatgtattttttgttgttgttgttgtttttragaccaagttttgctcttgtcgcccatgctggagtgcagtggtgcgatctcggctcactgtaacctctgcctcccaggttcaagtgattctgctgcctca

SEQ ID NO: 222319 - DNA, 201 bp, Homo sapiens
aatcaaacttgggcttctggctagccttttctaggtcttgatttttcagtgctttccagaggcaattgtttggaacctcttggcacagtttctgtttcttyttccatgtacaggcataaaaggtcttttggttgttttctggtaaaactatcataaaacagttcaagcaaatgactattggtagttttgccattaacatgg

SEQ ID NO: 222320 - DNA, 201 bp, Homo sapiens
acacaaaacagatggagaagagtttgtatatcaacatgaatgttaatgtgatttttttaaagcccgcgaacacatttgtgttccttgtgatctcctttgcrtgaatttgtcaggtaatttttttgacctgaacattctcataatagcttcagtttgcccaatgcaacctcatcattttgcggatttttcaaggctcacttc

SEQ ID NO: 222321 - DNA, 201 bp, Homo sapiens
tgatgctctgttttctagtcagtcacctaaggatacatcttttcttggtagcgatgatattggaaacattgatgtacgagaaccagagcttgaagatttgrctagatacgatgttggtaagttatatgtttcagaggaaatggtctccgtcttaattcttataaattgcccataatcttattacccagaaataacgactta

SEQ ID NO: 222322 - DNA, 201 bp, Homo sapiens
attccacatcatactgatctttcttagaaaaggcaacagttactttcttctttattccttttttaatgcttgtgaggtagttgttcttgttgatcacagcratgctattctcttattcttcatgtcatatttagcagtttttttctagtttgtcatttgataatcttgattggtgtattttgatgtacagaaatttaaaat

SEQ ID NO: 222323 - DNA, 201 bp, Homo sapiens
catggtatcccatcacatggaagtactgtaaattctgttcctttatttatgttgtttctggtttatgccattacaaattctaggacactgtcctagttttrtagggtattcagaatattcagtttatgctcttaccactagtatctgatagtgccattttcgcactttgctaatgctgacttactggtttataaaatcctt

SEQ ID NO: 222324 - DNA, 201 bp, Homo sapiens
aaaagcgggcagtctgcattatatgatgctctgttttctagtcagtcacctaaggatacatcttttcttggtagcgatgatattggaaacattgatgtacragaaccagagcttgaagatttgactagatacgatgttggtaagttatatgtttcagaggaaatggtctccgtcttaattcttataaattgcccataatct

SEQ ID NO: 222325 - DNA, 201 bp, Homo sapiens
tttaaaaataagatgattaaaattaaagattaatgagctcataggagatactcagaagtactgaacagggtgaagaaaactaaaagctaaccaccttattwacatttcctatatttgagagcatttccttctagttctttctctatacatatagtattttttatgagattgttaccatgttactatgttgtgtgtagatga

SEQ ID NO: 222326 - DNA, 201 bp, Homo sapiens
gaaatggtagtagtagtagtgccctttttttttctctttttagcccaggaaagatttagaataaaatctagtttagatgagcacatttgtgtgatggttcmtatagttaaggcaaccccactagccttttgtgatagtatcttctcaacacaagcaaaataacagaaaatctttgtgaaatcaagcttattaaatgtcgta

SEQ ID NO: 222327 - DNA, 201 bp, Homo sapiens
ctgaaatggtagtagtagtagtgccctttttttttctctttttagcccaggaaagatttagaataaaatctagtttagatgagcacatttgtgtgatggtycatatagttaaggcaaccccactagccttttgtgatagtatcttctcaacacaagcaaaataacagaaaatctttgtgaaatcaagcttattaaatgtcg

SEQ ID NO: 222328 - DNA, 201 bp, Homo sapiens
gggcttttgcaatagggagaggccagggtttcatccatctcatccagaagaggagaaattgataaaggagagaggggaatgaaatacagagtagtaatggrcggcttggtcttgagagttggggaaagacgagtttaagtaggtaaggtaaaatggaatttatatgtgatagcatcaggtttctcagtgaaggatgaatct

SEQ ID NO: 222329 - DNA, 201 bp, Homo sapiens
gtgagactctgtctcaaaaaagaaaaatgatgcagaaagatttgtttgacacagggtgggcataaactttcaatttgtaaaaaacatagtatctgtgaagyacaataaaatgtagtgcgataaaatgaggtatgcttggacagcaaaacatcatgttgtacctagtaaatgtatacaatttttatttgtgaattatacctc

SEQ ID NO: 222330 - DNA, 201 bp, Homo sapiens
aaattgttccttttacgtacgacagacttctgaaatggtagtagtagtagtgccctttttttttctctttttagcccaggaaagatttagaataaaatctrgtttagatgagcacatttgtgtgatggttcatatagttaaggcaaccccactagccttttgtgatagtatcttctcaacacaagcaaaataacagaaaat

SEQ ID NO: 222331 - DNA, 201 bp, Homo sapiens
gaggccagggtttcatccatctcatccagaagaggagaaattgataaaggagagaggggaatgaaatacagagtagtaatgggcggcttggtcttgagagytggggaaagacgagtttaagtaggtaaggtaaaatggaatttatatgtgatagcatcaggtttctcagtgaaggatgaatctaggttataagttgaaagt

SEQ ID NO: 222332 - DNA, 201 bp, Homo sapiens; identical to SEQ ID NO: 40388

SEQ ID NO: 222333 - DNA, 201 bp, Homo sapiens
cattttagagtttttacttttggaattttttgcaaatgaaagcccttaattaatgtcttttatttttagttgcctgtgcccctggagtctgtaaaagagakgcttaattcagtcatgcaggaactcgaagactatagtgaaggaggtcctctctataaaaatggttctttgcgaaatgcagattcagaaataaaacattct

SEQ ID NO: 222334 - DNA, 201 bp, Homo sapiens
atataagcacttagaggagcaatgcctggcacacagtgaatgttacatattagctgagctgttactgttattccttaataattaagttctgataattattyagcctgaaaattaaaaaaaaaaattagcacaaggctttgtaggtaagaccattatagatctttctaaatacttaaggtgtgttttgtgtcaccatgaggt

SEQ ID NO: 222335 - DNA, 201 bp, Homo sapiens; identical to SEQ ID NO: 40176

SEQ ID NO: 222336 - DNA, 201 bp, Homo sapiens
cgtggcacccaggcagccggggcaggactatcgcggggagatgcaatactactcagttacgaggtgtgtagtgctagcacgagaaacttggaggacgcgcygacaagccgggctgcagtctccgggtcgccccgccccgccctttccctgccgccgtgcgtgcctcgggggggcggggtctggcacgtcgtgacgcactgc

SEQ ID NO: 222337 - DNA, 201 bp, Homo sapiens
gcccctcaacccgtggcacccaggcagccggggcaggactatcgcggggagatgcaatactactcagttacgaggtgtgtagtgctagcacgagaaacttsgaggacgcgctgacaagccgggctgcagtctccgggtcgccccgccccgccctttccctgccgccgtgcgtgcctcgggggggcggggtctggcacgtcg

SEQ ID NO: 222338 - DNA, 201 bp, Homo sapiens; identical to SEQ ID NO: 40177

SEQ ID NO: 222339 - DNA, 201 bp, Homo sapiens
tcacagacatttcatggggctccactaacaggtgagctggcaagtggataatcgcatattttagtaaaactactttacttccctcttttaagtagataacrtgtgaaatcaccttgtttatatatgtttgttaatatacatgtcaacgtctgtttatatgtgacttcaaaagctgtatttggtgttacggagatttttata

SEQ ID NO: 222340 - DNA, 201 bp, Homo sapiens
gtactctgtactcaacagtatgagttgaatttactagcttttttttttttcctttttttcctttttttttttggtgacagagtcttgctctgtcacccagrctggagtacaatggcacgatctctgctcattgcaacctccgcctcccaagttcaagcgattctcctgccttagcttcctgagtagctgggattacaggca

SEQ ID NO: 222341 - DNA, 201 bp, Homo sapiens
agttgatcatttggttatcgaattctgagtttgaaataatttttttttcgcaattttgaaagcattgctccattttctagaagttctgttgttaggagtcygatgagattcttgttcttggtaacttaaaggttttctggaagtgtcctttcaattgggaaactcatttctttcagttctgtagcatttcttgtattattt

SEQ ID NO: 222342 - DNA, 201 bp, Homo sapiens
tgaaatattatggttatataaagaaagaaaaggagtttggacctgaatcatactgggtttttaagttctgctctatcacttactataatagctgtgtaagwtaacctgtctgaaatgtggagataatacttgccttacataattactatgagcatttgtgtatgtgcaggtgggcgtgggtgtgtatcagacatttattag

SEQ ID NO: 222343 - DNA, 201 bp, Homo sapiens
atcatataaaatctttggaaaatcatttgggttttatattctgagtataaacaatttgactaaaaactattctgtgtgtttaggcatcagaaattgttgartatgaagaagacgcacacataacttttgctatattggatgcagtaaatggaaatatagaagatgctgtgactgcttttgaatctataaaaagtgttgttt

SEQ ID NO: 222344 - DNA, 201 bp, Homo sapiens
gttgatcatttggttatcgaattctgagtttgaaataatttttttttcgcaattttgaaagcattgctccattttctagaagttctgttgttaggagtccsatgagattcttgttcttggtaacttaaaggttttctggaagtgtcctttcaattgggaaactcatttctttcagttctgtagcatttcttgtattatttc

SEQ ID NO: 222345 - DNA, 201 bp, Homo sapiens
tatggttatataaagaaagaaaaggagtttggacctgaatcatactgggtttttaagttctgctctatcacttactataatagctgtgtaagttaacctgyctgaaatgtggagataatacttgccttacataattactatgagcatttgtgtatgtgcaggtgggcgtgggtgtgtatcagacatttattagagtataca

SEQ ID NO: 222346 - DNA, 201 bp, Homo sapiens
ctttggaaaatcatttgggttttatattctgagtataaacaatttgactaaaaactattctgtgtgtttaggcatcagaaattgttgaatatgaagaagaygcacacataacttttgctatattggatgcagtaaatggaaatatagaagatgctgtgactgcttttgaatctataaaaagtgttgtttcttattggaatc

SEQ ID NO: 222347 - DNA, 201 bp, Homo sapiens
ataaacaatttgactaaaaactattctgtgtgtttaggcatcagaaattgttgaatatgaagaagacgcacacataacttttgctatattggatgcagtamatggaaatatagaagatgctgtgactgcttttgaatctataaaaagtgttgtttcttattggaatcttgcactggtaagtagatgcagtacttgagctaa

SEQ ID NO: 222348 - DNA, 201 bp, Homo sapiens
aaatgactattggtagttttgccattaacatgggtgccttctagtcattttgtttcctggtaaaacacacaaaacagagggagcagacagtttgtacatcwgcatgagtgttgatgtgctttttattttaagccagggaacacattttatgttatttatgacatcctgtccatgaatttgtcaggtgatttttgagctgaa

SEQ ID NO: 222349 - DNA, 201 bp, Homo sapiens
taacatgttaattgaaacacatgtatataacatttatgactgtattgtgtatatgtaacagtatatctattaatctttgaaaacataaaaccttttcttawtttttatttttttattttttttgagaccaagtctctctgtcaccaggctggagtgcagtggcgtgatctcggctcactgcagcctccacctcctgggttc

SEQ ID NO: 222350 - DNA, 201 bp, Homo sapiens
ggcaggcacctttgacagctgttagttgttttttctgccctttacagctatacttcatacttctgagtaacacacatatatacttttgttatttttaattycctttctcccattttagacattttcttttcttttttttttttttgagacggagtctcgctctatcgtccaggctggagtgcagtggcgcgatctcggctc

SEQ ID NO: 222351 - DNA, 201 bp, Homo sapiens
aggcagaggttgcagcgagccaagatcctgctgctacactctagcctgggtgacagaggaagactccatctcaaaaaaaaaaaaaaattccttcattattktgtcatgctttaaggcccaggacaggcctaggcaaaagttttgatggccttttgttacatcccagcctttgtataagggcactggcttttagtatttaac

SEQ ID NO: 222352 - DNA, 201 bp, Homo sapiens
cttaataagtagatgtagggcaatggctttatagcctatgatagaagaatatgattgcaatttaacatgttaattgaaacacatgtatataacatttatgrctgtattgtgtatatgtaacagtatatctattaatctttgaaaacataaaaccttttcttattttttatttttttattttttttgagaccaagtctctct

SEQ ID NO: 222353 - DNA, 201 bp, Homo sapiens; identical to SEQ ID NO: 40182

SEQ ID NO: 222354 - DNA, 201 bp, Homo sapiens
ggtaaagcttgattcagaaagatgtgttacttggacaaaatcttaataagtagatgtagggcaatggctttatagcctatgatagaagaatatgattgcartttaacatgttaattgaaacacatgtatataacatttatgactgtattgtgtatatgtaacagtatatctattaatctttgaaaacataaaaccttttct

SEQ ID NO: 222355 - DNA, 201 bp, Homo sapiens
ctctgccatttttgggaacatgataaagatgtaatctcgtattatgggtaaagcttgattcagaaagatgtgttacttggacaaaatcttaataagtagaygtagggcaatggctttatagcctatgatagaagaatatgattgcaatttaacatgttaattgaaacacatgtatataacatttatgactgtattgtgtat

SEQ ID NO: 222356 - DNA, 201 bp, Homo sapiens
ttgatctttttactctgccatttttgggaacatgataaagatgtaatctcgtattatgggtaaagcttgattcagaaagatgtgttacttggacaaaatcytaataagtagatgtagggcaatggctttatagcctatgatagaagaatatgattgcaatttaacatgttaattgaaacacatgtatataacatttatgac

SEQ ID NO: 222357 - DNA, 201 bp, Homo sapiens
tacaatctgtaattttaaagtgatggaaataacttaaatttttttttcagggcacatgttgctaaacttaagtcgtggcaagcaagattttttaaaagagrttgttgaaacttttgccaacaaaagcgggcagtctgcattatatgatgctctgttttctagtcagtcacctaaggatacatcttttcttggtagcgatga

SEQ ID NO: 222358 - DNA, 201 bp, Homo sapiens
cacattttatgttatttatgacatcctgtccatgaatttgtcaggtgatttttgagctgaacattctcagtaatagctttagtttacaaaatacaacctastctttctgcagattttctaggcccacttcaaatgcattgaccatcagatggcatcttggttccttacgtcctttctgtgactgaatgtccataattccac

SEQ ID NO: 222359 - DNA, 201 bp, Homo sapiens
ttgtagacaaatttgaagagtttgatctttttactctgccatttttgggaacatgataaagatgtaatctcgtattatgggtaaagcttgattcagaaagrtgtgttacttggacaaaatcttaataagtagatgtagggcaatggctttatagcctatgatagaagaatatgattgcaatttaacatgttaattgaaaca

SEQ ID NO: 222360 - DNA, 201 bp, Homo sapiens
aatacaatctgtaattttaaagtgatggaaataacttaaatttttttttcagggcacatgttgctaaacttaagtcgtggcaagcaagattttttaaaagwgattgttgaaacttttgccaacaaaagcgggcagtctgcattatatgatgctctgttttctagtcagtcacctaaggatacatcttttcttggtagcgat

SEQ ID NO: 222361 - DNA, 201 bp, Homo sapiens
tttgtttgtagacaaatttgaagagtttgatctttttactctgccatttttgggaacatgataaagatgtaatctcgtattatgggtaaagcttgattcaraaagatgtgttacttggacaaaatcttaataagtagatgtagggcaatggctttatagcctatgatagaagaatatgattgcaatttaacatgttaattg

SEQ ID NO: 222362 - DNA, 201 bp, Homo sapiens
aaataacaaaattgttccttttacgtacgacagacttctgaaatggtagtagtagtagtgccctttttttttctctttttagcccaggaaagatttagaawaaaatctagtttagatgagcacatttgtgtgatggttcatatagttaaggcaaccccactagccttttgtgatagtatcttctcaacacaagcaaaataa

SEQ ID NO: 222363 - DNA, 201 bp, Homo sapiens
catgttatttcccctttgggtatacaaatgagacaacgtgagcaaatacaatctgtaattttaaagtgatggaaataacttaaatttttttttcagggcayatgttgctaaacttaagtcgtggcaagcaagattttttaaaagagattgttgaaacttttgccaacaaaagcgggcagtctgcattatatgatgctctgt

SEQ ID NO: 222364 - DNA, 201 bp, Homo sapiens
gaaagcctgcattgccatgatttgtttgtagacaaatttgaagagtttgatctttttactctgccatttttgggaacatgataaagatgtaatctcgtatkatgggtaaagcttgattcagaaagatgtgttacttggacaaaatcttaataagtagatgtagggcaatggctttatagcctatgatagaagaatatgatt

SEQ ID NO: 222365 - DNA, 201 bp, Homo sapiens
tccagctgtattttttgggttggagggttaggtatgcagtaatcatgttatttcccctttgggtatacaaatgagacaacgtgagcaaatacaatctgtawttttaaagtgatggaaataacttaaatttttttttcagggcacatgttgctaaacttaagtcgtggcaagcaagattttttaaaagagattgttgaaact

SEQ ID NO: 222366 - DNA, 201 bp, Homo sapiens
atgtgatcacgtgtatataaaggcttaaagaacacttaatccacacctcagatgagctgagatgagattattccttaaattgaaaaatgttattgaatagrgttatgcactaagaaatgcttaattaagaacctacacctctggggaattattttgatgataatgatgagaggcaggacgttatataggaaatcttactta

SEQ ID NO: 222367 - DNA, 201 bp, Homo sapiens
actacaaggttggagttgagtggttgcagcagagattgtatgcctgtaaagccagattagtattctcctcctttttgtagaaaaagtttactgattgctartttaggctgtccatgtggaagttaatttatttccccatctggtataaggaaagaagttcatttcactgagtgcagggagtaggtaattttcttgaaaaag

SEQ ID NO: 222368 - DNA, 201 bp, Homo sapiens
cacaatactggtgaggctggtgaaacagggatgttgaatgcactcttgttgaaagcctgcattgccatgatttgtttgtagacaaatttgaagagtttgayctttttactctgccatttttgggaacatgataaagatgtaatctcgtattatgggtaaagcttgattcagaaagatgtgttacttggacaaaatcttaat

SEQ ID NO: 222369 - DNA, 201 bp, Homo sapiens
gagaatattaaacctgtactcttctcatttgctacataagcaccggttttgttgtccagctgtattttttgggttggagggttaggtatgcagtaatcatrttatttcccctttgggtatacaaatgagacaacgtgagcaaatacaatctgtaattttaaagtgatggaaataacttaaatttttttttcagggcacatg

SEQ ID NO: 222370 - DNA, 201 bp, Homo sapiens
agcactgtttctgtcatgatataattaaatgtttaaaattatttgatttttttttcttccaatagaaagaaatgcaggagttgaaactaaatagcagtaastcagcatcccctcatcgttggcccacagagaattatggaccagactcggtgcctgatggatatcaggggtcacagacatttcatggggctccactaacag

SEQ ID NO: 222371 - DNA, 201 bp, Homo sapiens
catgcctctgtttatgtattgtctgtggctgcttacatactacaaggttggagttgagtggttgcagcagagattgtatgcctgtaaagccagattagtawtctcctcctttttgtagaaaaagtttactgattgctagtttaggctgtccatgtggaagttaatttatttccccatctggtataaggaaagaagttcatt

SEQ ID NO: 222372 - DNA, 201 bp, Homo sapiens
aaagttaaaatgaaatagtcaatttgatacagtggaaaataactaagcatacacaatactggtgaggctggtgaaacagggatgttgaatgcactcttgtygaaagcctgcattgccatgatttgtttgtagacaaatttgaagagtttgatctttttactctgccatttttgggaacatgataaagatgtaatctcgtat

SEQ ID NO: 222373 - DNA, 201 bp, Homo sapiens
agatcgagacaccatctcaaaaaaaaaaaaaaaaatcagttatttaaatttaaaagagtaagtttccccagcactgtttctgtcatgatataattaaatgwttaaaattatttgatttttttttcttccaatagaaagaaatgcaggagttgaaactaaatagcagtaactcagcatcccctcatcgttggcccacagaga

SEQ ID NO: 222374 - DNA, 201 bp, Homo sapiens
tgttaatatttattggaatgcagcatgcctctgtttatgtattgtctgtggctgcttacatactacaaggttggagttgagtggttgcagcagagattgtrtgcctgtaaagccagattagtattctcctcctttttgtagaaaaagtttactgattgctagtttaggctgtccatgtggaagttaatttatttccccatc

SEQ ID NO: 222375 - DNA, 201 bp, Homo sapiens
gccaggttcagaaatcagtgtatcagatcagagaataagagtttgtccctgttctcctatggccacttaaatccagaccttttcatctgaaatgcaaataygtttggcatttttcatacacattcctgtcttttttcccccttctgctgtcttatgtagatactgagaatattaaacctgtactcttctcatttgctacat

SEQ ID NO: 222376 - DNA, 201 bp, Homo sapiens
taatccgagctactcagggcgctgaagtgggagaattgcttgagcccaggaggtggaggttgcggtgagccaagattgtgccattgcactccagcctggaygacagatcgagacaccatctcaaaaaaaaaaaaaaaaatcagttatttaaatttaaaagagtaagtttccccagcactgtttctgtcatgatataattaa

SEQ ID NO: 222377 - DNA, 201 bp, Homo sapiens
cagtagctgggactacaggcgccagccaccagggccggctaattttttttttttttttgtatttttagtagagatggagtttcactgtgttagccaggatsgtcttgatctcctgacctcattatccacccagcttggcctcccaaagtgctgggattacaggcatgagccaccgtgcccagccggaaataattcttaaaa

SEQ ID NO: 222378 - DNA, 201 bp, Homo sapiens
caagactagcctggcaaacatggtgaaaccccatctctactattacacaaaaaattagccaggcgtgctggctgacgcctgtaatccgagctactcagggrgctgaagtgggagaattgcttgagcccaggaggtggaggttgcggtgagccaagattgtgccattgcactccagcctggacgacagatcgagacaccatc

SEQ ID NO: 222379 - DNA, 201 bp, Homo sapiens
tgcctcttctgaacatttcacataaatggaatcatatagtatgtggtcttttgtgactggcttctttcatttagcaaggttttcaaggttcatctgtgttrtagcatgtatcagtactttatccgagactatgattttttgattgcttactgtaaacctatggaataaaaaactctgggaacgaggcctggaaataattct

SEQ ID NO: 222380 - DNA, 201 bp, Homo sapiens
ggaggtgaacgtcagaaaggttaatgtaggcaagtgtagaatggaaatgaaggtgtgatcatttaggaggttatttgtttaggtgagagttaataaattargttttgtattaataaatgaaaatgggagcagataaatttttaacaaattaagaatcatattttaaaatcagcaccaggtacctagaactcactggcaaat

SEQ ID NO: 222381 - DNA, 201 bp, Homo sapiens
catttgaacatcaccttgagaattagttgtattttgtttcagcatggggttaagtgaaaagctaatttggggaggtaacgcggaatgtcaggtagtccagrttgcagtgcagaaagaacacactgaaaggatggtcagtgtaatgttagaggactgtgaaagttgaggaaagaagtttagtttgtagatacttgttttttt

SEQ ID NO: 222382 - DNA, 201 bp, Homo sapiens
tggagtcagatctggttcaaattccagctgttattccctgcatccgtttctctcattttaagataggagctaatattgtttacctaacagtgtagatagtrtaaaaattaagagtttaagtgcattggacgtattattatatacataataaattctctgcagctactacttttttccctttcctggtggagcatttgaaca

SEQ ID NO: 222383 - DNA, 201 bp, Homo sapiens
gagtgaaaattaaagttcatctgtcatcagatggctaggttcacatgtattagtataagcacttagcatcactggtatttcagaaaatactgttttagctragaaacaaaataactcaactatgtgatttaccttttttcctaaattttgattttgaaaaccagtgtctccattttgaaaataaattccattgaacaaaaa

SEQ ID NO: 222384 - DNA, 201 bp, Homo sapiens
aaaaagaatttcctgttaagtgtctgttttgtaaggggacattttgtaggttctagggttgggtatggtgctgtcatttagttttcttcagcagagatgargtagccacatagctacactagacggcattgtatctatctgccatcttgtcaaggcagcagagttgtgttaagaaaacatttttggagtcagatctggttc

SEQ ID NO: 222385 - DNA, 201 bp, Homo sapiens
agtccttgtgtagtttagtattaggaagtttatccaaggcagtgacagtcttatctttgtatcgctaagcataacaataataaatgtactctgtactcaayagtatgagttgaatttactagcttttttttttttcctttttttcctttttttttttggtgacagagtcttgctctgtcacccaggctggagtacaatggc

SEQ ID NO: 222386 - DNA, 201 bp, Homo sapiens
taatttaagcatacaagtctctcacctccttgtttacatttattcccaggcatttttttcttttagatgcgattgtaaatggaattgctttcttaatttcmttttctgattgttcgttgctggtacagtagtcccttcttatccacagtattgccttacgtggttttacttagctgtgtcacccgtggtccaaaaatattg

SEQ ID NO: 222387 - DNA, 201 bp, Homo sapiens
tagcaggtttggcctgctgagctaagtttacaaaatttcaaggtgggtacttgaaattttagaagtaggtaaaaagaacctacttctttacttggaagtcyttgtgtagtttagtattaggaagtttatccaaggcagtgacagtcttatctttgtatcgctaagcataacaataataaatgtactctgtactcaacagta

SEQ ID NO: 222388 - DNA, 201 bp, Homo sapiens
ctcagtatgagataacagcagtttttagcagctgggtagcccttagcaaagtattaataactgtggctgtatgaaatgaagtacttaccactacaacatgmatgttaaagaatgccagtttaagcaaagtaccttttgactggtggcatgacacccttgttggtttgttttttaaaatgtactgggatgctgatttgtaat

SEQ ID NO: 222389 - DNA, 201 bp, Homo sapiens
tcaggtagtccagattgcagtgcagaaagaacacactgaaaggatggtcagtgtaatgttagaggactgtgaaagttgaggaaagaagtttagtttgtagrtacttgtttttttgagcagggaattgtcttggctggaggtgaacgtcagaaaggttaatgtaggcaagtgtagaatggaaatgaaggtgtgatcatttag

SEQ ID NO: 222390 - DNA, 201 bp, Homo sapiens
ttctcagatcattcctttgcaatatgtccttaagaatttttgtctttctgtctcttttttttgagacgatcattctgttgcccaggctggagtgcagtggmgcagatctcagtttactgcaacctctgcttgctaggttcaagtgatctcctgcctcagcctcctgagtagctgggattacaggcatgcactgcaacaccc

SEQ ID NO: 222391 - DNA, 201 bp, Homo sapiens
tgttttttaaaatgtactgggatgctgatttgtaatgtacttcattgctctgctatttcaggtctgctcaatgaagacctatgttttatctaatgtttatstttagccactaacgtctgccagtattcaaatgtagtggcaacggcatgtatacaatatggaagagtgtccctgtagggctgttcttttgtgcatggttta

SEQ ID NO: 222392 - DNA, 201 bp, Homo sapiens
atttaaatattgtttgaattatattatcactcaagcatattcaaagtgttttaattatgaaggaattgtagaaatattacggatttaagaaagttttatgrtactacttaaatgtttcttattttctctaatacttttaaagcttgttaaattaattattcagttacagtaacatatttggtattgctttctctctttttc

SEQ ID NO: 222393 - DNA, 201 bp, Homo sapiens
atgtagtggcaacggcatgtatacaatatggaagagtgtccctgtagggctgttcttttgtgcatggtttagaaaaatgttgtatttgaaaatggaccccrtttttaacagccagcattctacagcttgcatattatatatgttgcaccgatcaattttagaagtgtggctactagagtggaacaagaagtgggatctgtt

SEQ ID NO: 222394 - DNA, 201 bp, Homo sapiens
ttcctttgtgatagtgttttcatttaaatattgtttgaattatattatcactcaagcatattcaaagtgttttaattatgaaggaattgtagaaatattasggatttaagaaagttttatggtactacttaaatgtttcttattttctctaatacttttaaagcttgttaaattaattattcagttacagtaacatatttg

SEQ ID NO: 222395 - DNA, 201 bp, Homo sapiens
gctgttcttttgtgcatggtttagaaaaatgttgtatttgaaaatggaccccgtttttaacagccagcattctacagcttgcatattatatatgttgcacmgatcaattttagaagtgtggctactagagtggaacaagaagtgggatctgttgaaggccttcaagaacaggttagggaagtgaaatctcacccttagtga

SEQ ID NO: 222396 - DNA, 201 bp, Homo sapiens
ctttgcccaggctgctacccccatttaccccagctgttgataacacacacagcggcccccagcagggcagcctgtggagataagctcccctgccacctcgytgcaggggctggaggcaagagtgaggaaggttttgatttgcagcatggctagttaaggtggtgatatcagtgaccaggaggaagaaaggccactgactcc

SEQ ID NO: 222397 - DNA, 201 bp, Homo sapiens
ctgagtttaaaagacaatagtgttgttacatgtaatttcctttgtgatagtgttttcatttaaatattgtttgaattatattatcactcaagcatattcaragtgttttaattatgaaggaattgtagaaatattacggatttaagaaagttttatggtactacttaaatgtttcttattttctctaatacttttaaagct

SEQ ID NO: 222398 - DNA, 201 bp, Homo sapiens
cttttgtgcatggtttagaaaaatgttgtatttgaaaatggaccccgtttttaacagccagcattctacagcttgcatattatatatgttgcaccgatcawttttagaagtgtggctactagagtggaacaagaagtgggatctgttgaaggccttcaagaacaggttagggaagtgaaatctcacccttagtgaccagta

SEQ ID NO: 222399 - DNA, 201 bp, Homo sapiens
ccttctgtatatcattctcttattgatttctagtttaattcctttatggtttatgaaaatattttgaataatttcagttctcttaaatgttgtgaggtctstcttggtgaatgtcttctgtgcacttgagaagaaagtagagtctctttttttgctgacattgtgccattggcagttccagtttttttgggctgctgtagc

SEQ ID NO: 222400 - DNA, 201 bp, Homo sapiens
ttcaaagctctggtgcggataccaacagtgaccataaagttttctaggtgattccactagtttcttattggatgtgtatgtgtagcatctggactaggcaytgtagatggatgagtgggggaaattttatttagcttgaaaattgagatagttttggacctcatggttaggtctttctgggaaatttttaattgaaacact

SEQ ID NO: 222401 - DNA, 201 bp, Homo sapiens
attggaaaactcaaaataactagaatatcaattttccgaaattgatctatagatttaacacaacaccagtcaaaacccctccaggaatttttttttttttkggggggggatggagtttcgctctgtcgccaggctggagtgcagtggggcgatctctgctcgctgcaacctctgcctcccaggttcaagtgattctcctgc

SEQ ID NO: 222402 - DNA, 201 bp, Homo sapiens
ctaagtttttgtttataatgaaggagagggacaaatttaacattgtaaaaggaagggcactggttctgcagagcagtgtcatccagtagaaataaaatatwacctgtgtatgtaatttaaaattgtcatttggtgcaatggcttgtgcctataatcccagttacttgggaggctgaggcagagggatcacttgagcccaca

SEQ ID NO: 222403 - DNA, 201 bp, Homo sapiens
tgtcatgatataattaaatgtttaaaattatttgatttttttttcttccaatagaaagaaatgcaggagttgaaactaaatagcagtaactcagcatcccrtcatcgttggcccacagagaattatggaccagactcggtgcctgatggatatcaggggtcacagacatttcatggggctccactaacaggtgagctggca

SEQ ID NO: 222404 - DNA, 201 bp, Homo sapiens
tttgtatagatttttcacaggaaggcagaagacattgaaaatgatgccctttctcctgaagaacaagaagaatgcaaaaattatctgagaaagaccagggrctacctaataaagattatagatgacagtgattcaaatctttcagtggtcaagaaagtaagtagcaggttgttgtatgtacgttcttactgataacccact

SEQ ID NO: 222405 - DNA, 201 bp, Homo sapiens
agaagacattgaaaatgatgccctttctcctgaagaacaagaagaatgcaaaaattatctgagaaagaccagggactacctaataaagattatagatgacrgtgattcaaatctttcagtggtcaagaaagtaagtagcaggttgttgtatgtacgttcttactgataacccactggtcagtgtttttgcgttggtcttat

SEQ ID NO: 222406 - DNA, 201 bp, Homo sapiens
ctttactctcttaggtgttatgcctcaaacataactcccatattgggcgtggcaatccagttaatctggtgtcagtagtgttaaagaacatatgtaatgayaggagattcttttcttgcagtgtaacaagttagatactttgaagcattctttaaagattttctttaataacttgaaggcactgttacacctttcctgtat

SEQ ID NO: 222407 - DNA, 201 bp, Homo sapiens
ttcggcctcccaaagtgctgggattacaggtgtgagccactgtgcccagccttaaccattcacttttgagggacattttggttatttctaggttttggctrttgttcagctgctatgaacaatcaagtacagatttttgaagctgaaaaagcattgaagatgcttccaaagataaatattactgataagtttttctcccca

SEQ ID NO: 222408 - DNA, 201 bp, Homo sapiens
tcacccgtggtccaaaaatattgaatggaagattatataaataaacatttcatgagttttaaattgcaaacagttctgaataacatggtaaaaatctcacrgcctcctgctccgtcctacctaggacacaagtcatccctttgtccgacatattcatgctgtatgtgctcgccacccgctagttacatactagtcatctca

SEQ ID NO: 222409 - DNA, 201 bp, Homo sapiens
tttttttttttttttttttttttgagacagagtcttgcttagtcacccatgctggagtgcagtggtgctacctcggctcactgcaacttctgcctcccggrttctcaggtgatccacccacttcggcctcccaaagtgctgggattacaggtgtgagccactgtgcccagccttaaccattcacttttgagggacattttg

SEQ ID NO: 222410 - DNA, 201 bp, Homo sapiens
acctgtggaattaaagttaaaatgaaatagtcaatttgatacagtggaaaataactaagcatacacaatactggtgaggctggtgaaacagggatgttgartgcactcttgttgaaagcctgcattgccatgatttgtttgtagacaaatttgaagagtttgatctttttactctgccatttttgggaacatgataaagat

SEQ ID NO: 222411 - DNA, 201 bp, Homo sapiens
catggtccacaatttaaccattccctttttttttttttttttttttttttgagacagagtcttgcttagtcacccatgctggagtgcagtggtgctacctyggctcactgcaacttctgcctcccgggttctcaggtgatccacccacttcggcctcccaaagtgctgggattacaggtgtgagccactgtgcccagcctt

SEQ ID NO: 222412 - DNA, 201 bp, Homo sapiens
atatcattttagagtttttacttttggaattttttgcaaatgaaagcccttaattaatgtcttttatttttagttgcctgtgcccctggagtctgtaaaasagatgcttaattcagtcatgcaggaactcgaagactatagtgaaggaggtcctctctataaaaatggttctttgcgaaatgcagattcagaaataaaaca

SEQ ID NO: 222413 - DNA, 201 bp, Homo sapiens
agcaattgacatttcactgagtcttgatgtgtttgaaatgaaggtgtgctctggtatgtaatgacaatatgtgaacaaacctgtggaattaaagttaaaatgaaatagtcaatttgatacagtggaaaataactaagcatacacaatactggtgaggctggtgaaacagggatgttgaatgcactcttgttgaaagcctgc

SEQ ID NO: 222414 - DNA, 201 bp, Homo sapiens
gtatgtgacgtttttttcttttttcattttttttgagacggagtctcgctctattgcccaggttagagttcactggcgcaatcttggctcactgccacctscgcctcccaggttcaagcgattctcctgcctcagccttccgggtagctgggactacaggcacgtgttaccatgtcccgcttatttttgtatttttagtag

SEQ ID NO: 222415 - DNA, 201 bp, Homo sapiens
attcagtcatgcaggaactcgaagactatagtgaaggaggtcctctctataaaaatggttctttgcgaaatgcagattcagaaataaaacattctacaccrtctcctaccagatattcactatcaccaagtaaaagttacaaggtaaacaggaaagaatggaatcatttcattgtgaaattgtttctgttctaagtgtttt

SEQ ID NO: 222416 - DNA, 201 bp, Homo sapiens
gagcaattgacatttcactgagtcttgatgtgtttgaaatgaaggtgtgctctggtatgtaatgacaatatgtgaacaaacctgtggaattaaagttaaaatgaaatagtcaatttgatacagtggaaaataactaagcatacacaatactggtgaggctggtgaaacagggatgttgaatgcactcttgttgaaagcctg

SEQ ID NO: 222417 - DNA, 201 bp, Homo sapiens
attgcacaagtgttactctaataatttttctttttcccctctaaataggaacagcttctagattgtgaaggtgaagatggatggaataaactttttgactkgattcagtcagaactttatgtaagacctgatgacgtccatgtgaacatccggctagtggaggtgtatcgctcaactaaaagattgaaggatgctgtggcc

SEQ ID NO: 222418 - DNA, 201 bp, Homo sapiens
ctctggcaaccattaatctgttctccatctttatactttggtgatttcaaaatgttatgtaaatgtcatcatgaagtatgtgacgtttttttcttttttcrttttttttgagacggagtctcgctctattgcccaggttagagttcactggcgcaatcttggctcactgccacctccgcctcccaggttcaagcgattctc

SEQ ID NO: 222419 - DNA, 201 bp, Homo sapiens
tttccttctacccttgcagggctctcataagtgcctttgcgtggtgtcacagttagataaaaattgcctgtattttttttaatgtctttgatctgggcatyccgagggtgcctctgtaagtgtgctgagacacaactgtgtagtggtaaccaaacctaattgcccagcagaattaactcgaaggagggtttttaaaaaaag

SEQ ID NO: 222420 - DNA, 201 bp, Homo sapiens
caggaactcgaagactatagtgaaggaggtcctctctataaaaatggttctttgcgaaatgcagattcagaaataaaacattctacaccgtctcctaccaratattcactatcaccaagtaaaagttacaaggtaaacaggaaagaatggaatcatttcattgtgaaattgtttctgttctaagtgttttaaatgctgttt

SEQ ID NO: 222421 - DNA, 201 bp, Homo sapiens
ggagcaattgacatttcactgagtcttgatgtgtttgaaatgaaggtgtgctctggtatgtaatgacaatatgtgaacaaacctgtggaattaaagttaaaatgaaatagtcaatttgatacagtggaaaataactaagcatacacaatactggtgaggctggtgaaacagggatgttgaatgcactcttgttgaaagcct

SEQ ID NO: 222422 - DNA, 201 bp, Homo sapiens
taaataggaacagcttctagattgtgaaggtgaagatggatggaataaactttttgacttgattcagtcagaactttatgtaagacctgatgacgtccatrtgaacatccggctagtggaggtgtatcgctcaactaaaagattgaaggatgctgtggcccactgccatgaggcagagaggaacatagctttgcgttcaag

SEQ ID NO: 222423 - DNA, 201 bp, Homo sapiens
tttcattttatcacgtgtagattcataccaccactgcagtcaagatacagaactactctattaccacagagatcttcctcatgctgccccttttgtagtgmtgctatttacttctcttcactatgcctgacctctggcaaccattaatctgttctccatctttatactttggtgatttcaaaatgttatgtaaatgtcatc

SEQ ID NO: 222424 - DNA, 201 bp, Homo sapiens
tgactttctacttttttccttttctcttttccttctacccttgcagggctctcataagtgcctttgcgtggtgtcacagttagataaaaattgcctgtatyttttttaatgtctttgatctgggcatcccgagggtgcctctgtaagtgtgctgagacacaactgtgtagtggtaaccaaacctaattgcccagcagaatt

SEQ ID NO: 222425 - DNA, 201 bp, Homo sapiens
aggagcaattgacatttcactgagtcttgatgtgtttgaaatgaaggtgtgctctggtatgtaatgacaatatgtgaacaaacctgtggaattaaagttaaaatgaaatagtcaatttgatacagtggaaaataactaagcatacacaatactggtgaggctggtgaaacagggatgttgaatgcactcttgttgaaagcc

SEQ ID NO: 222426 - DNA, 201 bp, Homo sapiens
atacatctttttgtactaaagcagcagtgccccgcaggacttaaaatttcttttatttatgtagaacagttataaaatgaaatttttaccaggatcagttraatttataatgggaagattggggagataactatgataaatgtatatatttttggtgttttataaggtcgatataaaaatcaatatagtttcacaaatgtg

SEQ ID NO: 222427 - DNA, 201 bp, Homo sapiens
caggaattttgacattggtacaatgtgtatgtatagttttctttcattttatcacgtgtagattcataccaccactgcagtcaagatacagaactactctrttaccacagagatcttcctcatgctgccccttttgtagtgatgctatttacttctcttcactatgcctgacctctggcaaccattaatctgttctccatc

SEQ ID NO: 222428 - DNA, 201 bp, Homo sapiens
ttaggctgttggccagagctcacattgctcttttattccatagctcacttttttttgtgggagttaggctttcagtccttaaagtgactttctactttttyccttttctcttttccttctacccttgcagggctctcataagtgcctttgcgtggtgtcacagttagataaaaattgcctgtattttttttaatgtctttg

SEQ ID NO: 222429 - DNA, 201 bp, Homo sapiens
taggagcaattgacatttcactgagtcttgatgtgtttgaaatgaaggtgtgctctggtatgtaatgacaatatgtgaacaaacctgtggaattaaagttraaatgaaatagtcaatttgatacagtggaaaataactaagcatacacaatactggtgaggctggtgaaacagggatgttgaatgcactcttgttgaaagc

SEQ ID NO: 222430 - DNA, 201 bp, Homo sapiens
tagtttctgggttgtaagcaactctcagaagggatgaataaggtatataggatggtgtttttggtggcatcatcataaaactagacatagtggaatggtgstctttgggagcatgacttgtttaaaattgcacaagtgttactctaataatttttctttttcccctctaaataggaacagcttctagattgtgaaggtgaa

SEQ ID NO: 222431 - DNA, 201 bp, Homo sapiens
gaattttggatttcagattttcagatttgggatgctctacctgctaagtatcctgcaaatattccaaagtctgaaaaaattcaaaatctgaaatacttctrgtctcaagcattttgcataagggatactcaacctgtttaacccgaccaaagcacactatcaaaatcaggaattttgacattggtacaatgtgtatgtata

SEQ ID NO: 222432 - DNA, 201 bp, Homo sapiens
gcggataccaacagtgaccataaagttttctaggtgattccactagtttcttattggatgtgtatgtgtagcatctggactaggcactgtagatggatgartgggggaaattttatttagcttgaaaattgagatagttttggacctcatggttaggtctttctgggaaatttttaattgaaacacttgtagaaaaagaaa

SEQ ID NO: 222433 - DNA, 201 bp, Homo sapiens
atataaagaaagaaaaggagtttggacctgaatcatactgggtttttaagttctgctctatcacttactataatagctgtgtaagttaacctgtctgaaaygtggagataatacttgccttacataattactatgagcatttgtgtatgtgcaggtgggcgtgggtgtgtatcagacatttattagagtatacagtaaaca

SEQ ID NO: 222434 - DNA, 201 bp, Homo sapiens
agctctttctgagctggctgcattgtgctatctcatagcatttcaggtaagtcttccacttgtaggagcaattgacatttcactgagtcttgatgtgtttkaaatgaaggtgtgctctggtatgtaatgacaatatgtgaacaaacctgtggaattaaagttaaaatgaaatagtcaatttgatacagtggaaaataacta

SEQ ID NO: 222435 - DNA, 201 bp, Homo sapiens
cattatatatgtttctgataggaatttaaaaaattttaattttgaaataattatagatttttttgcacaggaagttgcaaagattgtacagaaagattctrtatgctacttcatttttccccaatgcttatacaggttgagcatttaaaatccgaaatcctaaatgctccagaatctgaaattttttgagcactgacatga

SEQ ID NO: 222436 - DNA, 201 bp, Homo sapiens
agcagttttgatataaaattggatgaattttgtaaagagcaagatgtaatattaaatcaaagttattataagctttggtgtatagttaggctgttggccaragctcacattgctcttttattccatagctcacttttttttgtgggagttaggctttcagtccttaaagtgactttctacttttttccttttctcttttcc

SEQ ID NO: 222437 - DNA, 201 bp, Homo sapiens
gaagtatcgtggagcactaatccatgagcttgaaaagcttggtactagtactgactctgccattaattaatgatcttgggccagtcacttccattgtgacygtttggcttcttatctttaaaatgagagaattactgaagccagttctcatcacactgaatgttaaaaattacagttacagcagtgattgcaaattcaaag

SEQ ID NO: 222438 - DNA, 201 bp, Homo sapiens
agcacatttgtgtgatggttcatatagttaaggcaaccccactagccttttgtgatagtatcttctcaacacaagcaaaataacagaaaatctttgtgaartcaagcttattaaatgtcgtaagtcatagataagtatatgaaatgtctaacgttcaaaccttgttttcttaaaaccttacacatcatataggtccttgta

SEQ ID NO: 222439 - DNA, 201 bp, Homo sapiens
agtaatgttcaatggcgagctctttctgagctggctgcattgtgctatctcatagcatttcaggtaagtcttccacttgtaggagcaattgacatttcackgagtcttgatgtgtttgaaatgaaggtgtgctctggtatgtaatgacaatatgtgaacaaacctgtggaattaaagttaaaatgaaatagtcaatttgat

SEQ ID NO: 222440 - DNA, 201 bp, Homo sapiens
cttgaacccaggaggcggaggttgcagtgagccaagatcacgccattgcactccagcctgggcggcagggcaagactccatctcaaaaaaaaaaaaaaaaagactaaaagatgaacctatcaaaaaataacaacggtttttcaagatatagacaatataataagatataaaaagaaaaaacaaaatgttaaaaagtgggga

SEQ ID NO: 222441 - DNA, 201 bp, Homo sapiens
tacctgtgattttgctaagatacaaactttaaggtagttaggtggccattgaatcaagcagtgaactgaagaaacataatgctttctataaggagcagttytgatataaaattggatgaattttgtaaagagcaagatgtaatattaaatcaaagttattataagctttggtgtatagttaggctgttggccagagctcac

SEQ ID NO: 222442 - DNA, 201 bp, Homo sapiens
tctgtggaagtatcgtggagcactaatccatgagcttgaaaagcttggtactagtactgactctgccattaattaatgatcttgggccagtcacttccatygtgactgtttggcttcttatctttaaaatgagagaattactgaagccagttctcatcacactgaatgttaaaaattacagttacagcagtgattgcaaat

SEQ ID NO: 222443 - DNA, 201 bp, Homo sapiens
acatttctacatgcatgctggttctctgcttttgaagatgggtcagcatagtagtaatgttcaatggcgagctctttctgagctggctgcattgtgctatstcatagcatttcaggtaagtcttccacttgtaggagcaattgacatttcactgagtcttgatgtgtttgaaatgaaggtgtgctctggtatgtaatgaca

SEQ ID NO: 222444 - DNA, 201 bp, Homo sapiens
tgtcaacgtctgtttatatgtgacttcaaaagctgtatttggtgttacggagatttttataatcccaagcagaaaaaacgagccgtatgtgatcacgtgtrtataaaggcttaaagaacacttaatccacacctcagatgagctgagatgagattattccttaaattgaaaaatgttattgaatagagttatgcactaaga

SEQ ID NO: 222445 - DNA, 201 bp, Homo sapiens
cctgtctcaaaaaaaaataattaaaaaataattaaaaaatgaatatctaaactttcaatgctcaaacactgacgatcatccacaaacattaagatcatccrggaaaatgtgaccttaccaaactaactaaataaggcaccagtggccaatcccagactgacagagatatgtgatctttcagacacagaattcaaaatggct

SEQ ID NO: 222446 - DNA, 201 bp, Homo sapiens
aaggtctgttgcgtattacctgtgattttgctaagatacaaactttaaggtagttaggtggccattgaatcaagcagtgaactgaagaaacataatgcttyctataaggagcagttttgatataaaattggatgaattttgtaaagagcaagatgtaatattaaatcaaagttattataagctttggtgtatagttaggct

SEQ ID NO: 222447 - DNA, 201 bp, Homo sapiens
tcttccacaaaatttgagaccttcaaaggtagaaactgttttatttaaaatataagagttcgtggcacagagaaggttcctgagtgattgaactgctaccrtgtactaatcatactctggtctatgagttcattcccagattagctgtggattacatgtgtttcaaatgtatagctaggaattgaaaagtggtctgagctt

SEQ ID NO: 222448 - DNA, 201 bp, Homo sapiens
aaatgaaaggacatttctacatgcatgctggttctctgcttttgaagatgggtcagcatagtagtaatgttcaatggcgagctctttctgagctggctgcrttgtgctatctcatagcatttcaggtaagtcttccacttgtaggagcaattgacatttcactgagtcttgatgtgtttgaaatgaaggtgtgctctggta

SEQ ID NO: 222449 - DNA, 201 bp, Homo sapiens
gctaattgttgtattttttatagagatgggattttgccatgttgcccagggtggccttgaactcctggctcaaagaatcctcctgcttcagcctcccaaaktgctgggattgcaggtgtgagccactgtgcccagcctacatacctcggtcttgaccctttaccatattttgttttgttttgttttgagatggagtctcac

SEQ ID NO: 222450 - DNA, 201 bp, Homo sapiens
tttgtggattttttcccccatttttggcttgggataaatcctaaaggtctgttgcgtattacctgtgattttgctaagatacaaactttaaggtagttagrtggccattgaatcaagcagtgaactgaagaaacataatgctttctataaggagcagttttgatataaaattggatgaattttgtaaagagcaagatgtaa

SEQ ID NO: 222451 - DNA, 201 bp, Homo sapiens
aggcccagctaattgttgtattttttatagagatgggattttgccatgttgcccagggtggccttgaactcctggctcaaagaatcctcctgcttcagccwcccaaattgctgggattgcaggtgtgagccactgtgcccagcctacatacctcggtcttgaccctttaccatattttgttttgttttgttttgagatgga

SEQ ID NO: 222452 - DNA, 201 bp, Homo sapiens
aggaagatagaagatatatacttaccttatattaggctcttggaatttgtggattttttcccccatttttggcttgggataaatcctaaaggtctgttgcrtattacctgtgattttgctaagatacaaactttaaggtagttaggtggccattgaatcaagcagtgaactgaagaaacataatgctttctataaggagca

SEQ ID NO: 222453 - DNA, 201 bp, Homo sapiens
atttttatttttttttagtattctcccaaaacaccacctcgatgggcagaagatcagaattctttactgaaaatgatttgccaacaagtagaggccattahggtaagtcacttaatttctctagctgtactttttattccaagattccttccctggccactctctcactttttttctgaagctggtcagaatgtccccttg

SEQ ID NO: 222454 - DNA, 201 bp, Homo sapiens
gtgttttaaatgctgttttgttatttttatttttttttagtattctcccaaaacaccacctcgatgggcagaagatcagaattctttactgaaaatgattygccaacaagtagaggccattaaggtaagtcacttaatttctctagctgtactttttattccaagattccttccctggccactctctcactttttttctga

SEQ ID NO: 222455 - DNA, 201 bp, Homo sapiens
ttctgttctaagtgttttaaatgctgttttgttatttttatttttttttagtattctcccaaaacaccacctcgatgggcagaagatcagaattctttackgaaaatgatttgccaacaagtagaggccattaaggtaagtcacttaatttctctagctgtactttttattccaagattccttccctggccactctctcac

SEQ ID NO: 222456 - DNA, 201 bp, Homo sapiens
ttgtgaaattgtttctgttctaagtgttttaaatgctgttttgttatttttatttttttttagtattctcccaaaacaccacctcgatgggcagaagatcrgaattctttactgaaaatgatttgccaacaagtagaggccattaaggtaagtcacttaatttctctagctgtactttttattccaagattccttccctgg

SEQ ID NO: 222457 - DNA, 201 bp, Homo sapiens
ggtaagaaaggaaaatggtggtacataaattatgtaactagcagcactgtgactgttaactcttgtacctttttactgtgagactttaatcccttagtttrggtctggcctcatttctctgatggtaatactgtcaaggaacctagaggatatttacttattttagttgttacttgatttgagaaatggaaatttcctgta

SEQ ID NO: 222458 - DNA, 201 bp, Homo sapiens
tcttgaggcttagtttctgggttgtaagcaactctcagaagggatgaataaggtatataggatggtgtttttggtggcatcatcataaaactagacatagyggaatggtgctctttgggagcatgacttgtttaaaattgcacaagtgttactctaataatttttctttttcccctctaaataggaacagcttctagattg

SEQ ID NO: 222459 - DNA, 201 bp, Homo sapiens
tttgcgttcaagtttagaatggaattcgtgtgttgtacagacccttaaggtagataaaagctattgggtctttacatttctatgtaggcaattagcatacmtctttttgtactaaagcagcagtgccccgcaggacttaaaatttcttttatttatgtagaacagttataaaatgaaatttttaccaggatcagttaaatt

SEQ ID NO: 222460 - DNA, 201 bp, Homo sapiens
tatgctcttaccactagtatctgatagtgccattttcgcactttgctaatgctgacttactggtttataaaatcctttgccaatttgtaggaacaaaagtkatatcaatttttaagtttttttaatactagtcatggtcaacaattcatgcaaatggcagttggtagttttgccatcttcaacgtgggtacctcccagttg

SEQ ID NO: 222461 - DNA, 201 bp, Homo sapiens
atatttggaatttaaattacttttcaatagcaaaccttaagcccaggtgttagtgtttcctttaaaaattttcttttaaaaagtgtgttaaaacctttctsagcatctactgtcttattaggcattgttatactttataagtgacatctcatttacctttctggaataattaatattttagggattttacagtttagtagc

SEQ ID NO: 222462 - DNA, 201 bp, Homo sapiens
cataaccatttctaatatttggaatttaaattacttttcaatagcaaaccttaagcccaggtgttagtgtttcctttaaaaattttcttttaaaaagtgtmttaaaacctttctgagcatctactgtcttattaggcattgttatactttataagtgacatctcatttacctttctggaataattaatattttagggattt

SEQ ID NO: 222463 - DNA, 201 bp, Homo sapiens
aactaaaggtaaacaaacaaaacataaagggagaaaacttaagacataaccatttctaatatttggaatttaaattacttttcaatagcaaaccttaagcycaggtgttagtgtttcctttaaaaattttcttttaaaaagtgtgttaaaacctttctgagcatctactgtcttattaggcattgttatactttataagtg

SEQ ID NO: 222464 - DNA, 201 bp, Homo sapiens
gttctaagtgttttaaatgctgttttgttatttttatttttttttagtattctcccaaaacaccacctcgatgggcagaagatcagaattctttactgaawatgatttgccaacaagtagaggccattaaggtaagtcacttaatttctctagctgtactttttattccaagattccttccctggccactctctcactttt

SEQ ID NO: 222465 - DNA, 201 bp, Homo sapiens
gaactgtcagctactttcttagaaatgaaaggacatttctacatgcatgctggttctctgcttttgaagatgggtcagcatagtagtaatgttcaatggcragctctttctgagctggctgcattgtgctatctcatagcatttcaggtaagtcttccacttgtaggagcaattgacatttcactgagtcttgatgtgttt

SEQ ID NO: 222466 - DNA, 201 bp, Homo sapiens
gttcagtggaattaaacccaacacaaaaagatcttgtgttgaagattgcagaattgctttgtaaaaatgatgttactgatggaagagcaaaatactggctsgaaagagcagccaaacttttcccaggaagtcctgcaatttataaactaaaggtaaacaaacaaaacataaagggagaaaacttaagacataaccatttct

SEQ ID NO: 222467 - DNA, 201 bp, Homo sapiens
atattacagttttgatagtgctcttcagtctgtgaaatctttgggtggaaatgatgaactgtcagctactttcttagaaatgaaaggacatttctacatgyatgctggttctctgcttttgaagatgggtcagcatagtagtaatgttcaatggcgagctctttctgagctggctgcattgtgctatctcatagcatttca

SEQ ID NO: 222468 - DNA, 201 bp, Homo sapiens
tgagagcatttccttctagttctttctctatacatatagtattttttatgagattgttaccatgttactatgttgtgtgtagatgagctagcctgtttttwaaatgttactttagttctgagcatttttaaacttaaatgttttttgaacattaatgagttcatggtatcccatcacatggaagtactgtaaattctgttc

SEQ ID NO: 222469 - DNA, 201 bp, Homo sapiens
atatatactcctacatacatacatacaatttatttactaatctttaatttcttttctgatattagcgttcagtggaattaaacccaacacaaaaagatctkgtgttgaagattgcagaattgctttgtaaaaatgatgttactgatggaagagcaaaatactggcttgaaagagcagccaaacttttcccaggaagtcctg

SEQ ID NO: 222470 - DNA, 201 bp, Homo sapiens
caaactagattttctttacatgtcatttctgttaatgtgggtcacacacactggtaagctcagaatcatctttttcttttcttttattcacatccaatatkgttgaaataaaacaaaatgctgtttttccttttttagaaaggcaatacttgttcattatatcaaaatttagaaaatatggaaaaacaaaaaggataaaaa

SEQ ID NO: 222471 - DNA, 201 bp, Homo sapiens
tttcatattacagttttgatagtgctcttcagtctgtgaaatctttgggtggaaatgatgaactgtcagctactttcttagaaatgaaaggacatttctayatgcatgctggttctctgcttttgaagatgggtcagcatagtagtaatgttcaatggcgagctctttctgagctggctgcattgtgctatctcatagcat

SEQ ID NO: 222472 - DNA, 201 bp, Homo sapiens
aatataatttttatttgattcatttccagagaattccaagacacttttattttaacacctttgaagtaacatgttttctctagaagtagaattttttaagrgttggagtgataattttttaacctttatatataagtatatatactcctacatacatacatacaatttatttactaatctttaatttcttttctgatatta

SEQ ID NO: 222473 - DNA, 201 bp, Homo sapiens
aaagagctgagagcgtagggaggaagatagaagatatatacttaccttatattaggctcttggaatttgtggattttttcccccatttttggcttgggatraatcctaaaggtctgttgcgtattacctgtgattttgctaagatacaaactttaaggtagttaggtggccattgaatcaagcagtgaactgaagaaacat

SEQ ID NO: 222474 - DNA, 201 bp, Homo sapiens
gttttgaattaaataaaccatgattattcacagtgcagtaagtgtgtattatctgtttgatattttcatattacagttttgatagtgctcttcagtctgtraaatctttgggtggaaatgatgaactgtcagctactttcttagaaatgaaaggacatttctacatgcatgctggttctctgcttttgaagatgggtcagc

SEQ ID NO: 222475 - DNA, 201 bp, Homo sapiens
ttataatgggaagattggggagataactatgataaatgtatatatttttggtgttttataaggtcgatataaaaatcaatatagtttcacaaatgtggttrgagtgagaaaaggaatttgtaggcttaaaatgattaatttcttaacatttgattaagttttgtaacttactgttcattccacaaaataggaatatctgga

SEQ ID NO: 222476 - DNA, 201 bp, Homo sapiens
ttttgtattcaaatgacacaaatataatttttatttgattcatttccagagaattccaagacacttttattttaacacctttgaagtaacatgttttctcyagaagtagaattttttaagggttggagtgataattttttaacctttatatataagtatatatactcctacatacatacatacaatttatttactaatctt

SEQ ID NO: 222477 - DNA, 201 bp, Homo sapiens
aaatgccgcctagaatggtgaatcttttccagatttactttgatcagatccatcagaggaatccctatctatggcagctgtaacattactaaatgcatttwaaaaaaaattttaaggtggacaggaaggaggatttattggtgagtattaagagggggcaccacagtggaagccctcatgagtgcagggcctgccacttgc

SEQ ID NO: 222478 - DNA, 201 bp, Homo sapiens
gatacggatctgtcttaaagagctgagagcgtagggaggaagatagaagatatatacttaccttatattaggctcttggaatttgtggattttttcccccrtttttggcttgggataaatcctaaaggtctgttgcgtattacctgtgattttgctaagatacaaactttaaggtagttaggtggccattgaatcaagcag

SEQ ID NO: 222479 - DNA, 201 bp, Homo sapiens
gaattattagttgaatgtggaagatgaagcttgaaataaaatttttattttgttttgaattaaataaaccatgattattcacagtgcagtaagtgtgtatyatctgtttgatattttcatattacagttttgatagtgctcttcagtctgtgaaatctttgggtggaaatgatgaactgtcagctactttcttagaaatga

SEQ ID NO: 222480 - DNA, 201 bp, Homo sapiens
tcttttgtgttttttgtattcaaatgacacaaatataatttttatttgattcatttccagagaattccaagacacttttattttaacacctttgaagtaayatgttttctctagaagtagaattttttaagggttggagtgataattttttaacctttatatataagtatatatactcctacatacatacatacaatttat

SEQ ID NO: 222481 - DNA, 201 bp, Homo sapiens
gtctttattaactaccacatatttctgtagaatgaatatataatagaaacatcttagatgcttgtattttattttatcagtttattttaaagcttaatgawcaaatgattataagcataaaatgtaggttatgtgctggcatttgggtatttaagaattggctaacttttatggcaagattttcagactcttaatcagagg

SEQ ID NO: 222482 - DNA, 201 bp, Homo sapiens
aagtataattattggtttgccaaccatttaacaccagctgattctaaaaacactgctgtggggatataaagatgaagaagatacggatctgtcttaaagarctgagagcgtagggaggaagatagaagatatatacttaccttatattaggctcttggaatttgtggattttttcccccatttttggcttgggataaatcc

SEQ ID NO: 222483 - DNA, 201 bp, Homo sapiens
attagatgattcataatttataacatggggaataagaattattagttgaatgtggaagatgaagcttgaaataaaatttttattttgttttgaattaaatraaccatgattattcacagtgcagtaagtgtgtattatctgtttgatattttcatattacagttttgatagtgctcttcagtctgtgaaatctttgggtgg

SEQ ID NO: 222484 - DNA, 201 bp, Homo sapiens
acctataaattgtaagtctaacacggtcagaaatggtgttcttttgtgttttttgtattcaaatgacacaaatataatttttatttgattcatttccagaraattccaagacacttttattttaacacctttgaagtaacatgttttctctagaagtagaattttttaagggttggagtgataattttttaacctttatat

SEQ ID NO: 222485 - DNA, 201 bp, Homo sapiens
gtcacttcctgaactaagtataattattggtttgccaaccatttaacaccagctgattctaaaaacactgctgtggggatataaagatgaagaagatacgsatctgtcttaaagagctgagagcgtagggaggaagatagaagatatatacttaccttatattaggctcttggaatttgtggattttttcccccatttttg

SEQ ID NO: 222486 - DNA, 201 bp, Homo sapiens
gggctggaaataactgggaatatcatttgagaggttaagcatgaagtataggaagtatgcaggataaaaaaaagcattagatgattcataatttataacayggggaataagaattattagttgaatgtggaagatgaagcttgaaataaaatttttattttgttttgaattaaataaaccatgattattcacagtgcagta

SEQ ID NO: 222487 - DNA, 201 bp, Homo sapiens
agaattgtttaacacctataaattgtaagtctaacacggtcagaaatggtgttcttttgtgttttttgtattcaaatgacacaaatataatttttatttgrttcatttccagagaattccaagacacttttattttaacacctttgaagtaacatgttttctctagaagtagaattttttaagggttggagtgataatttt

SEQ ID NO: 222488 - DNA, 201 bp, Homo sapiens
tgttcctaggtggagaggatttcttaactctttcttcatctggctgctagagcctctatcctgaatatttagtcacttcctgaactaagtataattattgrtttgccaaccatttaacaccagctgattctaaaaacactgctgtggggatataaagatgaagaagatacggatctgtcttaaagagctgagagcgtaggg

SEQ ID NO: 222489 - DNA, 201 bp, Homo sapiens
taagatgattaaaattaaagattaatgagctcataggagatactcagaagtactgaacagggtgaagaaaactaaaagctaaccaccttattaacatttcytatatttgagagcatttccttctagttctttctctatacatatagtattttttatgagattgttaccatgttactatgttgtgtgtagatgagctagcct

SEQ ID NO: 222490 - DNA, 201 bp, Homo sapiens
cactgatcttatatttatcctgtgattggagggctggaaataactgggaatatcatttgagaggttaagcatgaagtataggaagtatgcaggataaaaawaagcattagatgattcataatttataacatggggaataagaattattagttgaatgtggaagatgaagcttgaaataaaatttttattttgttttgaatt

SEQ ID NO: 222491 - DNA, 201 bp, Homo sapiens
gaaatagcacattctttaaaaaaatgaatatttgatattgtttgttcctaggtggagaggatttcttaactctttcttcatctggctgctagagcctctakcctgaatatttagtcacttcctgaactaagtataattattggtttgccaaccatttaacaccagctgattctaaaaacactgctgtggggatataaagat

SEQ ID NO: 222492 - DNA, 201 bp, Homo sapiens
aatgaaattatatgatcaggaagaaactacaaaatagtctcccaactttatcctggtttattttgaaatgtgcacctataatcactgatcttatatttatyctgtgattggagggctggaaataactgggaatatcatttgagaggttaagcatgaagtataggaagtatgcaggataaaaaaaagcattagatgattcat

SEQ ID NO: 222493 - DNA, 201 bp, Homo sapiens
ataggtatggaagagatgcgaagaaatagcacattctttaaaaaaatgaatatttgatattgtttgttcctaggtggagaggatttcttaactctttcttyatctggctgctagagcctctatcctgaatatttagtcacttcctgaactaagtataattattggtttgccaaccatttaacaccagctgattctaaaaac

SEQ ID NO: 222494 - DNA, 201 bp, Homo sapiens
actgttaattaaataatgaaattatatgatcaggaagaaactacaaaatagtctcccaactttatcctggtttattttgaaatgtgcacctataatcactratcttatatttatcctgtgattggagggctggaaataactgggaatatcatttgagaggttaagcatgaagtataggaagtatgcaggataaaaaaaagc

SEQ ID NO: 222495 - DNA, 201 bp, Homo sapiens
aaaatattgtgcctcaatgtgggtgtgctttacctattgccagatgccttgcttttctaaatgtttcttcattgttccacttcagcacagagatacctacytcagtctttattaactaccacatatttctgtagaatgaatatataatagaaacatcttagatgcttgtattttattttatcagtttattttaaagcttaa

SEQ ID NO: 222496 - DNA, 201 bp, Homo sapiens
tttctttttgccgtatcagttaagagcaataggtatggaagagatgcgaagaaatagcacattctttaaaaaaatgaatatttgatattgtttgttcctakgtggagaggatttcttaactctttcttcatctggctgctagagcctctatcctgaatatttagtcacttcctgaactaagtataattattggtttgccaa

SEQ ID NO: 222497 - DNA, 201 bp, Homo sapiens
ttcatctgtccaggagataatttgtcaaaattatttctttttgccgtatcagttaagagcaataggtatggaagagatgcgaagaaatagcacattctttwaaaaaatgaatatttgatattgtttgttcctaggtggagaggatttcttaactctttcttcatctggctgctagagcctctatcctgaatatttagtcac

SEQ ID NO: 222498 - DNA, 201 bp, Homo sapiens
ttgaactcctggcttcaagtgatccttctgccttgccctcccaaagtgctgggattacaggtatgagccaccacacctgactgtgaacttttaataataawaagttagtttccctcttaatccattcactcaggtctcctttcctagatgacaactactgttaggagtttcttgggtgttcagaaatattttttgcatatg

SEQ ID NO: 222499 - DNA, 201 bp, Homo sapiens
actaatttaatttaaaaagaaaaaggaatttctgttaaggcatatcttatgataaaatcttcatctgtccaggagataatttgtcaaaattatttcttttygccgtatcagttaagagcaataggtatggaagagatgcgaagaaatagcacattctttaaaaaaatgaatatttgatattgtttgttcctaggtggagag

SEQ ID NO: 222500 - DNA, 201 bp, Homo sapiens
cacaatatgtgatgctctaaggctctatcctagggataagaagcttggtgattctgatttcctgacttggagtggattaaagcaggaaattaagagggagkcaggctttttttttttttttttaggcagtatctgtctctcttgctcaggctggagtgcagcagctggctccatctttgctcactgtaacctctgccttct

SEQ ID NO: 222501 - DNA, 201 bp, Homo sapiens
ggagaatagcttgtataaaagatgtttaattgacacaatatgtgatgctctaaggctctatcctagggataagaagcttggtgattctgatttcctgactkggagtggattaaagcaggaaattaagagggagtcaggctttttttttttttttttaggcagtatctgtctctcttgctcaggctggagtgcagcagctgg

SEQ ID NO: 222502 - DNA, 201 bp, Homo sapiens
gttggagtaaaagaggaccatgcctatatcttaatttgtttttggttagatatctgataccttaatcagatggaaaatagcaatgaataaaaaattaaacygtaattgtaaggcaggagaatagcttgtataaaagatgtttaattgacacaatatgtgatgctctaaggctctatcctagggataagaagcttggtgatt

SEQ ID NO: 222503 - DNA, 201 bp, Homo sapiens
tattggtagttttgccattaacatgggtgccttctagtcattttgtttcctggtaaaacacacaaaacagagggagcagacagtttgtacatcagcatgaktgttgatgtgctttttattttaagccagggaacacattttatgttatttatgacatcctgtccatgaatttgtcaggtgatttttgagctgaacattctc

SEQ ID NO: 222504 - DNA, 201 bp, Homo sapiens
tcacagattcaactgttgaataattttgtaaaagaggccgggtttatgaattgaggtcagtttcaaaacaaaaagaatgatgtcaacattttgtttcttaytttgtgtgctcttttcaacatatagatgacaaagggctttgacatgatgtttagaaaacttgtgagtaaaaggataggcaatatgaatatttctaaaatt

SEQ ID NO: 222505 - DNA, 201 bp, Homo sapiens
gtgctttttattttaagccagggaacacattttatgttatttatgacatcctgtccatgaatttgtcaggtgatttttgagctgaacattctcagtaatarctttagtttacaaaatacaacctactctttctgcagattttctaggcccacttcaaatgcattgaccatcagatggcatcttggttccttacgtcctttc

SEQ ID NO: 222506 - DNA, 201 bp, Homo sapiens
aacagatttagaattgtttaacacctataaattgtaagtctaacacggtcagaaatggtgttcttttgtgttttttgtattcaaatgacacaaatataatytttatttgattcatttccagagaattccaagacacttttattttaacacctttgaagtaacatgttttctctagaagtagaattttttaagggttggagt

SEQ ID NO: 222507 - DNA, 201 bp, Homo sapiens
tacagttacgtgacacagcttggaacagatttagaattgtttaacacctataaattgtaagtctaacacggtcagaaatggtgttcttttgtgttttttgyattcaaatgacacaaatataatttttatttgattcatttccagagaattccaagacacttttattttaacacctttgaagtaacatgttttctctagaag

SEQ ID NO: 222508 - DNA, 201 bp, Homo sapiens
tgagcacaggagatggaggtagcagtgagctgaaatcatgccactgcactccagcctgactgagtgactgagactttgtctccaaaaaaaaaaaaacaacrtgatattgagatgttctcattttatatgttgtatgtcagtcttgctcatgtattaaatgagcaaagaatgaaactacagggataaatgaatatgtaagac

SEQ ID NO: 222509 - DNA, 201 bp, Homo sapiens
gaggccgaggcgggtggatcacgaagtcaggagatcgagaccatcccagctaacaatggtgaaaccttgtctctactaaaaatacaaaaaattagccgggyatgttggcacgcacttacagtcccagctgctcgggaggctgaggcagaagaatcgcttgaacctgggagtcagaggttgcagtaagccaagattgtgcca

SEQ ID NO: 222510 - DNA, 201 bp, Homo sapiens
gtacagttacgtgacacagcttggaacagatttagaattgtttaacacctataaattgtaagtctaacacggtcagaaatggtgttcttttgtgttttttrtattcaaatgacacaaatataatttttatttgattcatttccagagaattccaagacacttttattttaacacctttgaagtaacatgttttctctagaa

SEQ ID NO: 222511 - DNA, 201 bp, Homo sapiens
cagactattttaaacgctgtaatgatctatatagtaaaaagagcaattactgtattgatacgcaaatacctgtcagttatttacttataatttggaaatgstatgtctaatttgagaaattacaactgttaattaaataatgaaattatatgatcaggaagaaactacaaaatagtctcccaactttatcctggtttattt

SEQ ID NO: 222512 - DNA, 201 bp, Homo sapiens
tagccaaacacatgatgcccagagaaatttatataagtaagtcaaatatattttatgaatatcataaaacaggcattggtatcatagtacagttacgtgayacagcttggaacagatttagaattgtttaacacctataaattgtaagtctaacacggtcagaaatggtgttcttttgtgttttttgtattcaaatgacac

SEQ ID NO: 222513 - DNA, 201 bp, Homo sapiens
ggactgacgcagctccgggtgagctttggcggctgcgtcgagtgacaaggtaggcatctcagcgcggacatttgcaatggcccgacggcgcaaatgacackgaaagtccccttgttttgagtatgaggtgtttgtcgctgtccctttgtaagggtccagctccactccactcctcatactcacctccctcgcccccctccc

SEQ ID NO: 222514 - DNA, 201 bp, Homo sapiens
ccgtctcaaaaaaaaaaaaggcagactattttaaacgctgtaatgatctatatagtaaaaagagcaattactgtattgatacgcaaatacctgtcagttayttacttataatttggaaatggtatgtctaatttgagaaattacaactgttaattaaataatgaaattatatgatcaggaagaaactacaaaatagtctcc

SEQ ID NO: 222515 - DNA, 201 bp, Homo sapiens
ttgcatagccaaacacatgatgcccagagaaatttatataagtaagtcaaatatattttatgaatatcataaaacaggcattggtatcatagtacagttaygtgacacagcttggaacagatttagaattgtttaacacctataaattgtaagtctaacacggtcagaaatggtgttcttttgtgttttttgtattcaaat

SEQ ID NO: 222516 - DNA, 201 bp, Homo sapiens
gactccgtctcaaaaaaaaaaaaggcagactattttaaacgctgtaatgatctatatagtaaaaagagcaattactgtattgatacgcaaatacctgtcarttatttacttataatttggaaatggtatgtctaatttgagaaattacaactgttaattaaataatgaaattatatgatcaggaagaaactacaaaatagt

SEQ ID NO: 222517 - DNA, 201 bp, Homo sapiens
gctcacagatttctgggtcttctttatgaattggaagaaaacacagacaaagccgttgaatgttacagggtaagttacaggattcaaatatagcctttgcrtagccaaacacatgatgcccagagaaatttatataagtaagtcaaatatattttatgaatatcataaaacaggcattggtatcatagtacagttacgtga

SEQ ID NO: 222518 - DNA, 201 bp, Homo sapiens
cgactgagccaatcaggtaatagtaatattaaactaatttaatttaaaaagaaaaaggaatttctgttaaggcatatcttatgataaaatcttcatctgtycaggagataatttgtcaaaattatttctttttgccgtatcagttaagagcaataggtatggaagagatgcgaagaaatagcacattctttaaaaaaatga

SEQ ID NO: 222519 - DNA, 201 bp, Homo sapiens
aggcgatagtgagagactccgtctcaaaaaaaaaaaaggcagactattttaaacgctgtaatgatctatatagtaaaaagagcaattactgtattgatackcaaatacctgtcagttatttacttataatttggaaatggtatgtctaatttgagaaattacaactgttaattaaataatgaaattatatgatcaggaaga

SEQ ID NO: 222520 - DNA, 201 bp, Homo sapiens
gtggtcaactctatgtacgtgtttttaagtattatctatttctatgagtacttctgagttatctgtatgaatagcggtagttttgagtaacaatataaacragtttagtggttgctttggtttaagatgtattcttcggttagcatttaaaagtacagttctaagtttaatttacttttgtattacttttaaaaaacagat

SEQ ID NO: 222521 - DNA, 201 bp, Homo sapiens
ttttcctcattgtcctgtataatcacggccttcacccttgttgggactccacagatttggagctgatcagatgggtttgttgagaacagctgatcagatgsgtttttggaggattttagggggagggagattcatttgactgtgcaagatgggcgacagagtgagactccatctgaattaaaaaaaaaatttagaactgca

SEQ ID NO: 222522 - DNA, 201 bp, Homo sapiens
cctgtgaccgactgagccaatcaggtaatagtaatattaaactaatttaatttaaaaagaaaaaggaatttctgttaaggcatatcttatgataaaatctycatctgtccaggagataatttgtcaaaattatttctttttgccgtatcagttaagagcaataggtatggaagagatgcgaagaaatagcacattctttaa

SEQ ID NO: 222523 - DNA, 201 bp, Homo sapiens
tgcactccagcccaggcgatagtgagagactccgtctcaaaaaaaaaaaaggcagactattttaaacgctgtaatgatctatatagtaaaaagagcaattrctgtattgatacgcaaatacctgtcagttatttacttataatttggaaatggtatgtctaatttgagaaattacaactgttaattaaataatgaaattat

SEQ ID NO: 222524 - DNA, 201 bp, Homo sapiens
gcaatttatatgttcatttcttatgtgtggataacactggagaaaaatttggtaaatgtgacatttaatggtaaaatgagtatgtggtcaactctatgtaygtgtttttaagtattatctatttctatgagtacttctgagttatctgtatgaatagcggtagttttgagtaacaatataaacgagtttagtggttgcttt

SEQ ID NO: 222525 - DNA, 201 bp, Homo sapiens
tttcctcattgtcctgtataatcacggccttcacccttgttgggactccacagatttggagctgatcagatgggtttgttgagaacagctgatcagatggktttttggaggattttagggggagggagattcatttgactgtgcaagatgggcgacagagtgagactccatctgaattaaaaaaaaaatttagaactgcat

SEQ ID NO: 222526 - DNA, 201 bp, Homo sapiens
taagaccatgttactattagaagtatgggtatcatcaaattaagatttttgattctaaaattattaggttccaagaccaaagattaaattaataaaaggtraagctggacaaaatctgctggaaatgatggcctgtgaccgactgagccaatcaggtaatagtaatattaaactaatttaatttaaaaagaaaaaggaatt

SEQ ID NO: 222527 - DNA, 201 bp, Homo sapiens
aggtggaggttgcagtgagcttagatcgtgccattgcactccagcccaggcgatagtgagagactccgtctcaaaaaaaaaaaaggcagactattttaaaygctgtaatgatctatatagtaaaaagagcaattactgtattgatacgcaaatacctgtcagttatttacttataatttggaaatggtatgtctaatttga

SEQ ID NO: 222528 - DNA, 201 bp, Homo sapiens
ttactataatcacttctaatttattcgcaaaactgttagtgctttattaaaatgtgatcaggaagaaaaagcaatttatatgttcatttcttatgtgtggwtaacactggagaaaaatttggtaaatgtgacatttaatggtaaaatgagtatgtggtcaactctatgtacgtgtttttaagtattatctatttctatgag

SEQ ID NO: 222529 - DNA, 201 bp, Homo sapiens
gggtttgttgagaacagctgatcagatgggtttttggaggattttagggggagggagattcatttgactgtgcaagatgggcgacagagtgagactccatytgaattaaaaaaaaaatttagaactgcatagtgaaaaagtaggccacaaatattaagttttggacaattacaattacatctctatcttactgtgcaagat

SEQ ID NO: 222530 - DNA, 201 bp, Homo sapiens
aatagataagaccatgttactattagaagtatgggtatcatcaaattaagatttttgattctaaaattattaggttccaagaccaaagattaaattaataraaggtgaagctggacaaaatctgctggaaatgatggcctgtgaccgactgagccaatcaggtaatagtaatattaaactaatttaatttaaaaagaaaaa

SEQ ID NO: 222531 - DNA, 201 bp, Homo sapiens
tcccagcacattggtaagctgaggtgggtggattgtgaggtcaggagttgaagaccagcctggccaacgtagtgaaaccctgtctctactagaaatataaraaaagtttagcggggcatggtggcaggtgcctgtaatcccagctactcagaaggctgagtcaggagaatcacttgaacctgggaggtggaggttgcagtg

SEQ ID NO: 222532 - DNA, 201 bp, Homo sapiens
ctgaggattgactggggaggtctaggcttctggtggtgactcagatggacaggaatgtgtggcattagtcctggtagtctctgaagagagtatgagctacygcagtaatcacagatgcttttcttcacatacagttcttgaggcttagtttctgggttgtaagcaactctcagaagggatgaataaggtatataggatggt

SEQ ID NO: 222533 - DNA, 201 bp, Homo sapiens
tgcattatgataactttaaaaatgtttactataatcacttctaatttattcgcaaaactgttagtgctttattaaaatgtgatcaggaagaaaaagcaatytatatgttcatttcttatgtgtggataacactggagaaaaatttggtaaatgtgacatttaatggtaaaatgagtatgtggtcaactctatgtacgtgtt

SEQ ID NO: 222534 - DNA, 201 bp, Homo sapiens
gtaatagataagaccatgttactattagaagtatgggtatcatcaaattaagatttttgattctaaaattattaggttccaagaccaaagattaaattaakaaaaggtgaagctggacaaaatctgctggaaatgatggcctgtgaccgactgagccaatcaggtaatagtaatattaaactaatttaatttaaaaagaaa

SEQ ID NO: 222535 - DNA, 201 bp, Homo sapiens
taataggccaggcgtagtggctcatgcctgtaatcccagcacattggtaagctgaggtgggtggattgtgaggtcaggagttgaagaccagcctggccaaygtagtgaaaccctgtctctactagaaatataagaaaagtttagcggggcatggtggcaggtgcctgtaatcccagctactcagaaggctgagtcaggaga

SEQ ID NO: 222536 - DNA, 201 bp, Homo sapiens
ctacaacctctgcctcccaggttcaaactatccttgtgcctcagccttccatgtagctggaattaataggtgtgtgccaccacgcctggctctttgttttytttttattatttttagtagagactgggtttcaccatgttggccaggctggtctcgaactcctgacctcaagtgatcagcccaccttggcctcccagagtg

SEQ ID NO: 222537 - DNA, 201 bp, Homo sapiens
ccaaagtgaggatttggagaaacaataggatttagaagaactaatttagaatatagattacaaataataggccaggcgtagtggctcatgcctgtaatccyagcacattggtaagctgaggtgggtggattgtgaggtcaggagttgaagaccagcctggccaacgtagtgaaaccctgtctctactagaaatataagaaa

SEQ ID NO: 222538 - DNA, 201 bp, Homo sapiens
cagatttttgaagctgaaaaagcattgaagatgcttccaaagataaatattactgataagtttttctccccagtaataagcagctggattttaaatattartctaaaacgtgaggtctaattgtgcagatttctttactctcttaggtgttatgcctcaaacataactcccatattgggcgtggcaatccagttaatctgg

SEQ ID NO: 222539 - DNA, 201 bp, Homo sapiens
ataggatttaatttcattcaatgattttttttttagtaaatttgcaatgttttacagccatccccaaaatctaattccaaaatatctctatcaccccaacragagactccattcaggttggcagtcacatgcactcccagatttcccctctgcccagcccttggcaatcactagtctactttctgtgtctttgagtttgcc

SEQ ID NO: 222540 - DNA, 201 bp, Homo sapiens
ccaggctggagtgcaatggcgcagtctcagcccactacaacctctgcctcccaggttcaaactatccttgtgcctcagccttccatgtagctggaattaayaggtgtgtgccaccacgcctggctctttgttttttttttattatttttagtagagactgggtttcaccatgttggccaggctggtctcgaactcctgacc

SEQ ID NO: 222541 - DNA, 201 bp, Homo sapiens
ctctggttgctttattgtaagccactttaaaatcatgcttcacgtttaagtgtttgctttttgcttttacttttcttccaaagtgaggatttggagaaacrataggatttagaagaactaatttagaatatagattacaaataataggccaggcgtagtggctcatgcctgtaatcccagcacattggtaagctgaggtgg

SEQ ID NO: 222542 - DNA, 201 bp, Homo sapiens
gaagctgaaaaagcattgaagatgcttccaaagataaatattactgataagtttttctccccagtaataagcagctggattttaaatattaatctaaaacrtgaggtctaattgtgcagatttctttactctcttaggtgttatgcctcaaacataactcccatattgggcgtggcaatccagttaatctggtgtcagtag

SEQ ID NO: 222543 - DNA, 201 bp, Homo sapiens
gagcctcgctctttcacccaggctggagtgcaatggcgcagtctcagcccactacaacctctgcctcccaggttcaaactatccttgtgcctcagccttcyatgtagctggaattaataggtgtgtgccaccacgcctggctctttgttttttttttattatttttagtagagactgggtttcaccatgttggccaggctg

SEQ ID NO: 222544 - DNA, 201 bp, Homo sapiens
gctgggattacaggtgtgagccaccatgtctggccctttttttttttttttttttttgcgatggagcctcgctctttcacccaggctggagtgcaatggcrcagtctcagcccactacaacctctgcctcccaggttcaaactatccttgtgcctcagccttccatgtagctggaattaataggtgtgtgccaccacgcct

SEQ ID NO: 222545 - DNA, 201 bp, Homo sapiens
tctttactctcttaggtgttatgcctcaaacataactcccatattgggcgtggcaatccagttaatctggtgtcagtagtgttaaagaacatatgtaatgrtaggagattcttttcttgcagtgtaacaagttagatactttgaagcattctttaaagattttctttaataacttgaaggcactgttacacctttcctgta

SEQ ID NO: 222546 - DNA, 201 bp, Homo sapiens
tggccttccaaagtgctgggattacaggtgtgagccaccatgtctggccctttttttttttttttttttttgcgatggagcctcgctctttcacccaggcyggagtgcaatggcgcagtctcagcccactacaacctctgcctcccaggttcaaactatccttgtgcctcagccttccatgtagctggaattaataggtgt

SEQ ID NO: 222547 - DNA, 201 bp, Homo sapiens
aggtagattgcctggccaaaatgaaaatacctatcatctccataggatttaatttcattcaatgattttttttttagtaaatttgcaatgttttacagccwtccccaaaatctaattccaaaatatctctatcaccccaacaagagactccattcaggttggcagtcacatgcactcccagatttcccctctgcccagccc

SEQ ID NO: 222548 - DNA, 201 bp, Homo sapiens
acataaccatttctaatatttggaatttaaattacttttcaatagcaaaccttaagcccaggtgttagtgtttcctttaaaaattttcttttaaaaagtgwgttaaaacctttctgagcatctactgtcttattaggcattgttatactttataagtgacatctcatttacctttctggaataattaatattttagggatt

SEQ ID NO: 222549 - DNA, 201 bp, Homo sapiens
cctggggggacagcggtgggcgggagacctttggcgccggcgcttcctctttctcccggcttgttcccgacgcttgttcccgacggtgctcgctcctgggsccgccctggcccgggctttctggccgatcgcgcaccccgtagtacccgcgcggcctagttctcgggggcttgggcacccgggtgctgtatcggcgggttt

SEQ ID NO: 222550 - DNA, 201 bp, Homo sapiens
ttacattattactgttaaattttggtatgttctgttattctgctagtgaaatatatatagatttgggggggctattccttttcctttttttttttttttttgagacaagggtctcactctggtgcccaggatggaatgcagtggcgctatcacagttcattgtaacctggaactcctggactcgagggatcctcccgcctc

SEQ ID NO: 222551 - DNA, 201 bp, Homo sapiens
tggagtagctgggcctcagaactgtgccgcaactactgacttccatcaagatctctgtcctaccatttcatcttcctactaggctatccccacatggatakataaatggtacctcaagtgaaagaaatcaactacctaaaataggattttccactccaaactagattttctttacatgtcatttctgttaatgtgggtcac

SEQ ID NO: 222552 - DNA, 201 bp, Homo sapiens
gtaaatgtatttccctttggtgtttgggaaattgttgctgtttagtattttgcattatgataactttaaaaatgtttactataatcacttctaatttattygcaaaactgttagtgctttattaaaatgtgatcaggaagaaaaagcaatttatatgttcatttcttatgtgtggataacactggagaaaaatttggtaaa

SEQ ID NO: 222553 - DNA, 201 bp, Homo sapiens
catgaacataactcattgcagtctccaatcctgggctaaagggatgtttccccctctgcctttggagtagctgggcctcagaactgtgccgcaactactgrcttccatcaagatctctgtcctaccatttcatcttcctactaggctatccccacatggatatataaatggtacctcaagtgaaagaaatcaactacctaa

SEQ ID NO: 222554 - DNA, 201 bp, Homo sapiens
aaattactttcttgcttaaagggtaaatgtatttccctttggtgtttgggaaattgttgctgtttagtattttgcattatgataactttaaaaatgtttaytataatcacttctaatttattcgcaaaactgttagtgctttattaaaatgtgatcaggaagaaaaagcaatttatatgttcatttcttatgtgtggataa

SEQ ID NO: 222555 - DNA, 201 bp, Homo sapiens
agtgcaaaggcatgaacataactcattgcagtctccaatcctgggctaaagggatgtttccccctctgcctttggagtagctgggcctcagaactgtgccrcaactactgacttccatcaagatctctgtcctaccatttcatcttcctactaggctatccccacatggatatataaatggtacctcaagtgaaagaaatc

SEQ ID NO: 222556 - DNA, 201 bp, Homo sapiens
gaaatttcctgtatttggtactgtaatgagtaatttttcttctgttcgattttagctggatatagtactgttagaaattactttcttgcttaaagggtaartgtatttccctttggtgtttgggaaattgttgctgtttagtattttgcattatgataactttaaaaatgtttactataatcacttctaatttattcgcaa

SEQ ID NO: 222557 - DNA, 201 bp, Homo sapiens
ttcgttttagagataggaatctcattctcttccacaggctggagtgcaaaggcatgaacataactcattgcagtctccaatcctgggctaaagggatgttyccccctctgcctttggagtagctgggcctcagaactgtgccgcaactactgacttccatcaagatctctgtcctaccatttcatcttcctactaggctat

SEQ ID NO: 222558 - DNA, 201 bp, Homo sapiens
tctccaaaaacaaaaacaaaaaaactcagctctacatacatgagaaaatgagtatgtaaaatataaatttttttttggtattatcgtaaaagtaattttarcttcatggatcccctgaaggggtttttgagcaccctcagagatctttagacctcacttgctctggttgctttattgtaagccactttaaaatcatgcttc

SEQ ID NO: 222559 - DNA, 201 bp, Homo sapiens
gtttgcattttttggtagagacaggtgtcactatgttgcccaggctagtcttgaacttctgagcacagcagtctgcctgcctcggcctcccgtagtgttgrgactacaggtgtgtgttactgctcccagctgggaggcaggcttttaaaggcatccaaaggaagatggaaatgctggtaagaaaggaaaatggtggtacat

SEQ ID NO: 222560 - DNA, 201 bp, Homo sapiens
attattattttgagacagagtctgctctgttgcccaggctagagtgcactggcacgatctcagctcactgcaacctccacctcccaggttcaagcaattcwggtgcctcagccatccaaagaagctgggattacaggcatgcaccaccatacccagttaatttttgcatttttagtagagatagggtttcaacacgttggc

SEQ ID NO: 222561 - DNA, 201 bp, Homo sapiens
caggtgatccacccgcctcggcctcccaaagtgctggaattacttgtgtgagccaccgcacagggccaataatagcattttttatgaaaaataattatttyccaacagcaaaaaagtagtcagaaagtgtcattgcttttgcatttttgtgaatctttttaatgtcttgcttaatagaacatagctagattctcatttact

SEQ ID NO: 222562 - DNA, 201 bp, Homo sapiens
ctggctaaggtttgcattttttggtagagacaggtgtcactatgttgcccaggctagtcttgaacttctgagcacagcagtctgcctgcctcggcctcccrtagtgttgggactacaggtgtgtgttactgctcccagctgggaggcaggcttttaaaggcatccaaaggaagatggaaatgctggtaagaaaggaaaatg

SEQ ID NO: 222563 - DNA, 201 bp, Homo sapiens
gaaatatgaactgcttatccaaaagagaaaagtcttttgagttcctcaagaagattctctctttggatgctgggcgcggtggatgccgggcacctgtatcygagcactttgggaggccgaggcagatggatcactggaggccaggagttcaagaccagcctgtccaacacggtgaaaccccgtctctactaaaaatacaac

SEQ ID NO: 222564 - DNA, 201 bp, Homo sapiens
tgacctcaggtgatccacccgcctcggcctcccaaagtgctggaattacttgtgtgagccaccgcacagggccaataatagcattttttatgaaaaataaytattttccaacagcaaaaaagtagtcagaaagtgtcattgcttttgcatttttgtgaatctttttaatgtcttgcttaatagaacatagctagattctca

SEQ ID NO: 222565 - DNA, 201 bp, Homo sapiens
tggggatacagatgcgcaccaccacacctggctaaggtttgcattttttggtagagacaggtgtcactatgttgcccaggctagtcttgaacttctgagcrcagcagtctgcctgcctcggcctcccgtagtgttgggactacaggtgtgtgttactgctcccagctgggaggcaggcttttaaaggcatccaaaggaaga

SEQ ID NO: 222566 - DNA, 201 bp, Homo sapiens
cgtggtggcacacacctgtaatcccagctactagggaggctaaggcaggagaatcatttgaacctgggagacggagtgttccccaaccaaactgagggtcrggctgctatttctcatggcccaataacaagatgcagatgaactcgggaggaagagagtttttatttctgcaaccagttacagcaagaaggcctggaaatt

SEQ ID NO: 222567 - DNA, 201 bp, Homo sapiens
gaactctgggctcaagcgatccccccaccttggccttccaaagtgctgggattacaggtgtgagccaccatgtctggccctttttttttttttttttttttgcgatggagcctcgctctttcacccaggctggagtgcaatggcgcagtctcagcccactacaacctctgcctcccaggttcaaactatccttgtgcctca

SEQ ID NO: 222568 - DNA, 201 bp, Homo sapiens
aattttttgtatttttagtagagaaggggtttcaccatgttggcaaggctggtcttgaactcctgacctcaggtgatccacccgcctcggcctcccaaagwgctggaattacttgtgtgagccaccgcacagggccaataatagcattttttatgaaaaataattattttccaacagcaaaaaagtagtcagaaagtgtca

SEQ ID NO: 222569 - DNA, 201 bp, Homo sapiens
agtgcagcagctggctccatctttgctcactgtaacctctgccttctgggctcaagagatcttcccacctcagcgccccaagtagctggggatacagatgmgcaccaccacacctggctaaggtttgcattttttggtagagacaggtgtcactatgttgcccaggctagtcttgaacttctgagcacagcagtctgcctg

SEQ ID NO: 222570 - DNA, 201 bp, Homo sapiens
gggacacctcggcagaactgaggctttgggtacggcttgttcttacaataccggtaacaacggacggggcggcggccaatggcgataccaggatcttcagyggcgcgcttaagagaaagagcaatgcatttcttaaaacttaaaccggaggtcaggagtttgagaccagcctgcccaacacggtgaaaccccatctccact

SEQ ID NO: 222571 - DNA, 201 bp, Homo sapiens
tgtggcatttccaagtgtcatttcacctgtactttttaaagtagggtgtcatatctactcaaataggacaacatctgctgttgtcctatttatgcagggtmgaaaagtaatgtaattaaattttccatttctctgaatgtaacatgaatgtgcttttagtagaaactaatttctcagagttgctctgtgtatgcttttttt

SEQ ID NO: 222572 - DNA, 201 bp, Homo sapiens
accacgcctggctaattttttgtatttttagtagagaaggggtttcaccatgttggcaaggctggtcttgaactcctgacctcaggtgatccacccgcctyggcctcccaaagtgctggaattacttgtgtgagccaccgcacagggccaataatagcattttttatgaaaaataattattttccaacagcaaaaaagtag

SEQ ID NO: 222573 - DNA, 201 bp, Homo sapiens
tttttttttttttaggcagtatctgtctctcttgctcaggctggagtgcagcagctggctccatctttgctcactgtaacctctgccttctgggctcaagmgatcttcccacctcagcgccccaagtagctggggatacagatgcgcaccaccacacctggctaaggtttgcattttttggtagagacaggtgtcactatg

SEQ ID NO: 222574 - DNA, 201 bp, Homo sapiens
tttcctggttgtcccatttattccagtgctatcccatattatccatactctgaaaatgtgttatctacaatgtggcatttccaagtgtcatttcacctgtrctttttaaagtagggtgtcatatctactcaaataggacaacatctgctgttgtcctatttatgcagggtcgaaaagtaatgtaattaaattttccatttc

SEQ ID NO: 222575 - DNA, 201 bp, Homo sapiens
tggtataaggaaagaagttcatttcactgagtgcagggagtaggtaattttcttgaaaaagtacataaaagtacctaaattggtagggtaagagcagtatytaaaagaactaacataactttaagattattttagaaaacatgtaggatgttttattttgtattctttgtatactcaaatttttggtcacaagttcctttt

SEQ ID NO: 222576 - DNA, 201 bp, Homo sapiens
gtgattctgatttcctgacttggagtggattaaagcaggaaattaagagggagtcaggctttttttttttttttttaggcagtatctgtctctcttgctcmggctggagtgcagcagctggctccatctttgctcactgtaacctctgccttctgggctcaagagatcttcccacctcagcgccccaagtagctggggata

SEQ ID NO: 222577 - DNA, 201 bp, Homo sapiens
tccctttgccattctattcatcatgcttttttttttcataggttattgcatgaggatctctttaatttcctggttgtcccatttattccagtgctatcccmtattatccatactctgaaaatgtgttatctacaatgtggcatttccaagtgtcatttcacctgtactttttaaagtagggtgtcatatctactcaaatag

SEQ ID NO: 222578 - DNA, 201 bp, Homo sapiens
ctggtataaggaaagaagttcatttcactgagtgcagggagtaggtaattttcttgaaaaagtacataaaagtacctaaattggtagggtaagagcagtayctaaaagaactaacataactttaagattattttagaaaacatgtaggatgttttattttgtattctttgtatactcaaatttttggtcacaagttccttt

SEQ ID NO: 222579 - DNA, 201 bp, Homo sapiens
gcaagaaattgtttggcttcaaatactttttctaaaaattgtcttctgttggagtaaaagaggaccatgcctatatcttaatttgtttttggttagatatstgataccttaatcagatggaaaatagcaatgaataaaaaattaaaccgtaattgtaaggcaggagaatagcttgtataaaagatgtttaattgacacaat

SEQ ID NO: 222580 - DNA, 201 bp, Homo sapiens
gtttcttcttttgatgatttcttttataaaataattttaatatttgaaggcagctgtcacgtcttccctttgccattctattcatcatgcttttttttttyataggttattgcatgaggatctctttaatttcctggttgtcccatttattccagtgctatcccatattatccatactctgaaaatgtgttatctacaatg

SEQ ID NO: 222581 - DNA, 201 bp, Homo sapiens
gccaaatatggcccctgcctaattttgttaatatttattggaatgcagcatgcctctgtttatgtattgtctgtggctgcttacatactacaaggttggarttgagtggttgcagcagagattgtatgcctgtaaagccagattagtattctcctcctttttgtagaaaaagtttactgattgctagtttaggctgtccat

SEQ ID NO: 222582 - DNA, 201 bp, Homo sapiens
tattcttcaagccttctacctgttggtcttgtttcttcttttgatgatttcttttataaaataattttaatatttgaaggcagctgtcacgtcttcccttygccattctattcatcatgcttttttttttcataggttattgcatgaggatctctttaatttcctggttgtcccatttattccagtgctatcccatattat

SEQ ID NO: 222583 - DNA, 201 bp, Homo sapiens
ttgtgggccaaatatggcccctgcctaattttgttaatatttattggaatgcagcatgcctctgtttatgtattgtctgtggctgcttacatactacaagrttggagttgagtggttgcagcagagattgtatgcctgtaaagccagattagtattctcctcctttttgtagaaaaagtttactgattgctagtttaggct

SEQ ID NO: 222584 - DNA, 201 bp, Homo sapiens
tgcatattattccattgtatggatgtactgtagttttggagtttttaaaaccagggtcctaaaaccaggacattagctggcttttactttttttttttttwatgctacttcaagtaatttagcaatgattaacttgtgccatgaattcctgaaagaattgcagtatcaaagtatatctgtgcatttataatttttagagct

SEQ ID NO: 222585 - DNA, 201 bp, Homo sapiens
tttgattttgaaaaccagtgtctccattttgaaaataaattccattgaacaaaaacatcacttggatttgtataaagatgttagtttagagcaggggttgrttagaacttgtgggccaaatatggcccctgcctaattttgttaatatttattggaatgcagcatgcctctgtttatgtattgtctgtggctgcttacata

SEQ ID NO: 222586 - DNA, 201 bp, Homo sapiens
ttgcatattattccattgtatggatgtactgtagttttggagtttttaaaaccagggtcctaaaaccaggacattagctggcttttacttttttttttttwaatgctacttcaagtaatttagcaatgattaacttgtgccatgaattcctgaaagaattgcagtatcaaagtatatctgtgcatttataatttttagagc

SEQ ID NO: 222587 - DNA, 201 bp, Homo sapiens
tttgttttaggcagcaccagtttgatggttgagataatgcaaatgaaatcagttagcttggggttatgatttcccaaatctaagcacacagaaaccagttkgggggttcttctgaggaaaagagggaattagttgaagggatctgtaagcaaacagtaattatggatataagggattatagcattttttgcctgacagaag

SEQ ID NO: 222588 - DNA, 201 bp, Homo sapiens
ttggatgcttgcatattattccattgtatggatgtactgtagttttggagtttttaaaaccagggtcctaaaaccaggacattagctggcttttacttttkttttttttaatgctacttcaagtaatttagcaatgattaacttgtgccatgaattcctgaaagaattgcagtatcaaagtatatctgtgcatttataatt

SEQ ID NO: 222589 - DNA, 201 bp, Homo sapiens
cattctcattagtttggatgcttgcatattattccattgtatggatgtactgtagttttggagtttttaaaaccagggtcctaaaaccaggacattagctkgcttttactttttttttttttaatgctacttcaagtaatttagcaatgattaacttgtgccatgaattcctgaaagaattgcagtatcaaagtatatctg

SEQ ID NO: 222590 - DNA, 201 bp, Homo sapiens
aaatattataacctcaggactaattcttaatgaactttgctgaaattgaaagttgttgctgacaacttaagagcatttcttctcatcgtcatcagccattrtgaacgcccttgttttcttgctgtcagctgtttgagattgtcatgatgatgttaaattatgttcagtcttctgagtgttttgttgattaatttgtgttac

SEQ ID NO: 222591 - DNA, 201 bp, Homo sapiens
atctgtctgtgtgtctattagagtcttgctgtgtcacccgggctggagtgcagttgcataatcatagctcactgtaacgttgaactgggctcaagcttccyagagtgctgggattgtaggtgtgagctactatgcacagcctaaaattttttgatatgtagttttgggaggcagagtctcttgttgctctggctggagtgc

SEQ ID NO: 222592 - DNA, 201 bp, Homo sapiens
ataatcctatttacaatagctgcaaataaaataaaatacctaggaattaacttaaccaaaaaggtgaaagacctctataatgaaaacaataaaatactgaygaaagaaattgaagaggacaccaataaatagaggaatattccatgttcatggattggaagaatcaatattttttaaatgtccatgctacccaaagcaatc

SEQ ID NO: 222593 - DNA, 201 bp, Homo sapiens
gggaggggaggggaggggaggaaagggaagggaatggaagggaagctacaggccaatctcttgataaatgttgatgcaaaaatcctcaacaacatactagyaagcaaattcaccaatatgttaaaaaagatcatttatcatgaccaagtgggatttatcccagggatacaagaatggctcagtgtatgcaaagcaatcaat

SEQ ID NO: 222594 - DNA, 201 bp, Homo sapiens
cttaccacctagttcctccttttccatgggcaggtgggctttggtctgtaccacttttttcaaaagtgagcttttagaggagaaggcagagcagatgtctraatagaaccctccagcaagcatcatcccaaccctctgccctgcaggaacaccaaatggaacaactatctacataaaaaggcacctttataagacacaaag

SEQ ID NO: 222595 - DNA, 201 bp, Homo sapiens
tatgttcttagtagttcttcctaagtgtattctggaataagggatttatcactcagactgatgctaaggaccagcctagattccattgagattgaaaccgyaattagtgttttctgcatgctgctgctttataccaagggcaagaaattgtttggcttcaaatactttttctaaaaattgtcttctgttggagtaaaagag

SEQ ID NO: 222596 - DNA, 201 bp, Homo sapiens
ggctgaggcaggagaatcgcttgaacccgggaggtggaggttgcagtgagctgggattatgccactgcactccagcctggcaacagagtgagactccgtcycaaaaaaaaagaagaaaaaaaaataaaaagaactatacaccccccaaatgggcaacttttctatatgattatatactgaaaataactgtatcaattatat

SEQ ID NO: 222597 - DNA, 201 bp, Homo sapiens
caacttttaattttttttagaagtcaatgaaaggattctattttgcaaagctgtattatgaagctaaagaatatgatcttgctaaaaagtaagtacaaacygtaacatgtattttttttttaaaatcaatgccttttctcattttcttctttgaaataggtaaaaatatgttcttagtagttcttcctaagtgtattctgg

SEQ ID NO: 222598 - DNA, 201 bp, Homo sapiens
aagatcaaaaagacttttatcattaagtaggagagaatatcctctcacaccagtcttattcagtattgtactagaagtttgagatgttgaaataaggcaawaaataaataaataaataaacgtcatacagattggaaagaaagatctaaaactgtccctcttcgcagataacattactgtctgtgtgtaaaatctcaaaga

SEQ ID NO: 222599 - DNA, 201 bp, Homo sapiens
aaaaaacttttaagtgaatgaaagtggcgtatttgaacatcaacttaggacagatttttactacttttgaaaaaatgttggaaaatatttctgtatgaaaygtaaaacaacttttaattttttttagaagtcaatgaaaggattctattttgcaaagctgtattatgaagctaaagaatatgatcttgctaaaaagtaagt

SEQ ID NO: 222600 - DNA, 201 bp, Homo sapiens
ctctactaaaaatacaaaaaattagccgggcacggtggcgggcgcctgtagtcccagctacttgggaggctgatgcaggacaatggcgtgaacctgggagvttgcagtgagttgagatcgtgccactgcactccagcctgggcgacagagcaagactcagcctcaaaacaaacaaacaaacaaacaaacaaaaaaacaaaa

SEQ ID NO: 222601 - DNA, 201 bp, Homo sapiens
tgtgatttaccttttttcctaaattttgattttgaaaaccagtgtctccattttgaaaataaattccattgaacaaaaacatcacttggatttgtataaaratgttagtttagagcaggggttgattagaacttgtgggccaaatatggcccctgcctaattttgttaatatttattggaatgcagcatgcctctgtttat

SEQ ID NO: 222602 - DNA, 201 bp, Homo sapiens
tctcgctctgtcgcccaggctggagtgcaatggcacgatctcagctcactgcaacctctggctcactgcaacctccacctcctgggttcaactgattctcrtgccttagcctcccgagtagctggggttacaggcacccaccatcatgcctggctaatttttgtatttttgtcaagacggggtttcaccatgttagccagg

SEQ ID NO: 222603 - DNA, 201 bp, Homo sapiens
cgcccagctaattttttttttgtatttttttagtagagacggggtttcacgttgttagccaggatggtcttgatctcctgacctcatgatcggcccacctygacctcccaaagtgctgggattacaggcgtgagccaccgcacccggcccaacttaaccactttcaagtgtgcaatgcagtagccttatgttgctgtgcaa

SEQ ID NO: 222604 - DNA, 201 bp, Homo sapiens
tattttttaaaatagtataatcttgagtgaaaattaaagttcatctgtcatcagatggctaggttcacatgtattagtataagcacttagcatcactggtrtttcagaaaatactgttttagctgagaaacaaaataactcaactatgtgatttaccttttttcctaaattttgattttgaaaaccagtgtctccattttg

SEQ ID NO: 222605 - DNA, 201 bp, Homo sapiens
gatgatgatgatgatgatgatgatgatgatgatgatgatgtttgggagatggagtctcgctctgtcgcccaggctggagtgcaatggcacgatctcagctsactgcaacctctggctcactgcaacctccacctcctgggttcaactgattctcgtgccttagcctcccgagtagctggggttacaggcacccaccatcat

SEQ ID NO: 222606 - DNA, 201 bp, Homo sapiens
taattgtgtctcttatcgtaactaagcataggttatcttattttgcgcttccagcagccctgtggatattgagacctgtagagatttaagatacttgttcwgggtcaaatagatagtgcagcagaattttggcagtgggtctgatttagtttctcttgggaacagtggagtaagttacagtctattcctccagaggaggag

SEQ ID NO: 222607 - DNA, 201 bp, Homo sapiens
ttctcatgcctcagcctcccgagtagctgggactacaggtgcccgccaccacgcccagctaattttttttttgtatttttttagtagagacggggtttcaygttgttagccaggatggtcttgatctcctgacctcatgatcggcccaccttgacctcccaaagtgctgggattacaggcgtgagccaccgcacccggccc

SEQ ID NO: 222608 - DNA, 201 bp, Homo sapiens
cgagccgtatgtgatcacgtgtatataaaggcttaaagaacacttaatccacacctcagatgagctgagatgagattattccttaaattgaaaaatgttawtgaatagagttatgcactaagaaatgcttaattaagaacctacacctctggggaattattttgatgataatgatgagaggcaggacgttatataggaaat

SEQ ID NO: 222609 - DNA, 201 bp, Homo sapiens
gaatgttctaactgctatttcatattttattttttaaaatagtataatcttgagtgaaaattaaagttcatctgtcatcagatggctaggttcacatgtaytagtataagcacttagcatcactggtatttcagaaaatactgttttagctgagaaacaaaataactcaactatgtgatttaccttttttcctaaattttg

SEQ ID NO: 222610 - DNA, 201 bp, Homo sapiens
ccctggagacaggatcttgttgtgttgcacaggctggtttcaaactcttggcctcaaagctagcctcccaccttggtctctgaaagtgctagaattaaagktgtgaccaactgcacccagcttatttatgatgatgatgatgatgatgatgatgatgatgatgatgatgatgatgtttgggagatggagtctcgctctgtc

SEQ ID NO: 222611 - DNA, 201 bp, Homo sapiens
tggtagagactgggtttcaccatgttgcccaggctgttcttgaactcctgggctcaagtgatttccccgcctccacttcccaaagtgttgggattataggygtgagccactgcaccggccattattttatttttgagacaaggtctctttctgtctcccaggctggagtgctgtggcgggatcgtggctcactgcagcgtt

SEQ ID NO: 222612 - DNA, 201 bp, Homo sapiens
cgcccaggctggagtttagtggctcttcacaggcctgatcacagctcctgcatggatcaaggagcatcactgcagcttcaaactgcagcttcaaactctcyggctcaagcgaccctcctgcctcaacctccccagtagctgggactacaggcacgtgtgtctgtgccaagtaataccacattttaaaaatccatcttcagt

SEQ ID NO: 222613 - DNA, 201 bp, Homo sapiens
attagccttatggttaaatactcagttttgtcatagtcaagcctaaaatgaatgttctaactgctatttcatattttattttttaaaatagtataatcttkagtgaaaattaaagttcatctgtcatcagatggctaggttcacatgtattagtataagcacttagcatcactggtatttcagaaaatactgttttagctg

SEQ ID NO: 222614 - DNA, 201 bp, Homo sapiens
tgtctgcttgtcttactttcttgaatttattttttgtatgttatgtatttattatttagagagaggatctccctgtgtcacccacgctggagtgcagtgtyacagtcataactcacggcagtgtcaacctcctgggctcaagtgattctccttccttggcctcctgagtagctaggaacacaggcatgctccactatgcct

SEQ ID NO: 222615 - DNA, 201 bp, Homo sapiens
ttacagccatccccaaaatctaattccaaaatatctctatcaccccaacaagagactccattcaggttggcagtcacatgcactcccagatttcccctctrcccagcccttggcaatcactagtctactttctgtgtctttgagtttgcctactctggatatttcatataaatgaaatgatatatgaggttttgtgattgg

SEQ ID NO: 222616 - DNA, 201 bp, Homo sapiens
aattggttttatatgactttcctttttagagaactcttatagttcaagcttgattaaaattagccttatggttaaatactcagttttgtcatagtcaagcytaaaatgaatgttctaactgctatttcatattttattttttaaaatagtataatcttgagtgaaaattaaagttcatctgtcatcagatggctaggttca

SEQ ID NO: 222617 - DNA, 201 bp, Homo sapiens
atgaaaattcttctgttgtctgcttgtcttactttcttgaatttattttttgtatgttatgtatttattatttagagagaggatctccctgtgtcacccasgctggagtgcagtgtcacagtcataactcacggcagtgtcaacctcctgggctcaagtgattctccttccttggcctcctgagtagctaggaacacaggc

SEQ ID NO: 222618 - DNA, 201 bp, Homo sapiens
ttttacggggaagttctaattggttttatatgactttcctttttagagaactcttatagttcaagcttgattaaaattagccttatggttaaatactcagktttgtcatagtcaagcctaaaatgaatgttctaactgctatttcatattttattttttaaaatagtataatcttgagtgaaaattaaagttcatctgtca

SEQ ID NO: 222619 - DNA, 201 bp, Homo sapiens
ctggtttcttttgtttgttaagtgagagagtggtaccacagggtttccaagatttccaaggctgatgaaaattcttctgttgtctgcttgtcttactttcwtgaatttattttttgtatgttatgtatttattatttagagagaggatctccctgtgtcacccacgctggagtgcagtgtcacagtcataactcacggcag

SEQ ID NO: 222620 - DNA, 201 bp, Homo sapiens
agaattactgcaaaggtacgttgactttgagaagaatgctttagtataaattgtagtttttctttttgcagtaagttcattgctctaaacttcttcactgmatcattatttgtataatgtacctaggagttatagttaatacagtgaacaactaggaggcaatcttatttttcttcttttacggggaagttctaattggtt

SEQ ID NO: 222621 - DNA, 201 bp, Homo sapiens
tacacatggtaggaaaagagatttctggaatacctttcctccccaaagaaagctggtttcttttgtttgttaagtgagagagtggtaccacagggtttccragatttccaaggctgatgaaaattcttctgttgtctgcttgtcttactttcttgaatttattttttgtatgttatgtatttattatttagagagaggatc

SEQ ID NO: 222622 - DNA, 201 bp, Homo sapiens
caggaaagtagagaattactgcaaaggtacgttgactttgagaagaatgctttagtataaattgtagtttttctttttgcagtaagttcattgctctaaayttcttcactgaatcattatttgtataatgtacctaggagttatagttaatacagtgaacaactaggaggcaatcttatttttcttcttttacggggaagt

SEQ ID NO: 222623 - DNA, 201 bp, Homo sapiens
ctatgctaatcttatgcttcttacgctttccactagagatgtgcaggaaagtagagaattactgcaaaggtacgttgactttgagaagaatgctttagtayaaattgtagtttttctttttgcagtaagttcattgctctaaacttcttcactgaatcattatttgtataatgtacctaggagttatagttaatacagtga

SEQ ID NO: 222624 - DNA, 201 bp, Homo sapiens
ttcttaacatttgattaagttttgtaacttactgttcattccacaaaataggaatatctggagtctttacagtgtttggagtctgataaaagtgactggcragcaaccaatacagacttactgctggcctatgctaatcttatgcttcttacgctttccactagagatgtgcaggaaagtagagaattactgcaaaggtac

SEQ ID NO: 222625 - DNA, 201 bp, Homo sapiens
ataacttctccattaaataaagtggagtggtggcagaattttgaggattggttattatgacacctctcttacacttagagtcttttttttcccccaaattkaaagtcatttacattagaacctggggatttcagcggaatatggattaactagtgagtaactttggaacatgtgaagctattctgtaaagttaggtttgag

SEQ ID NO: 222626 - DNA, 201 bp, Homo sapiens
gtttggcagaggctggccatctgtgaactgcccatgctttctagaatgtcggagttttggagtgtgatgatgcgtctgtatatcatatctttctagtcttycattgtgctttcatttgttagtcttctcttgttttgccatttttctactccctcacatgtgcttttgcccttaaaaatattcttcgtctgtaatctgagc

SEQ ID NO: 222627 - DNA, 201 bp, Homo sapiens
tctttcattgtgctttcatttgttagtcttctcttgttttgccatttttctactccctcacatgtgcttttgcccttaaaaatattcttcgtctgtaatcygagcactttgggaggccgagagaccagcctgaccaatatggtgaaaatccgtctctattaaaaatacaaaaatgagccgggcgtggtggcagcgcctgta

SEQ ID NO: 222628 - DNA, 201 bp, Homo sapiens
tgttgctgaggattgactggggaggtctaggcttctggtggtgactcagatggacaggaatgtgtggcattagtcctggtagtctctgaagagagtatgarctactgcagtaatcacagatgcttttcttcacatacagttcttgaggcttagtttctgggttgtaagcaactctcagaagggatgaataaggtatatagg

SEQ ID NO: 222629 - DNA, 201 bp, Homo sapiens
gcctggcgacagagcgagactccatctcaaaaaaaaaaaaaggaaatagtgaattgagatgatttgattgagtggattcacaactaattaactggtcacarattcaactgttgaataattttgtaaaagaggccgggtttatgaattgaggtcagtttcaaaacaaaaagaatgatgtcaacattttgtttcttattttgt

SEQ ID NO: 222630 - DNA, 201 bp, Homo sapiens
aaaagttacaaggtaaacaggaaagaatggaatcatttcattgtgaaattgtttctgttctaagtgttttaaatgctgttttgttatttttattttttttwagtattctcccaaaacaccacctcgatgggcagaagatcagaattctttactgaaaatgatttgccaacaagtagaggccattaaggtaagtcacttaat

SEQ ID NO: 222631 - DNA, 201 bp, Homo sapiens
tgtttcttcttttgatgatttcttttataaaataattttaatatttgaaggcagctgtcacgtcttccctttgccattctattcatcatgctttttttttycataggttattgcatgaggatctctttaatttcctggttgtcccatttattccagtgctatcccatattatccatactctgaaaatgtgttatctacaat

SEQ ID NO: 222632 - DNA, 201 bp, Homo sapiens
tttacagccatccccaaaatctaattccaaaatatctctatcaccccaacaagagactccattcaggttggcagtcacatgcactcccagatttcccctcygcccagcccttggcaatcactagtctactttctgtgtctttgagtttgcctactctggatatttcatataaatgaaatgatatatgaggttttgtgattg

SEQ ID NO: 222633 - DNA, 201 bp, Homo sapiens
attcaatgattttttttttagtaaatttgcaatgttttacagccatccccaaaatctaattccaaaatatctctatcaccccaacaagagactccattcasgttggcagtcacatgcactcccagatttcccctctgcccagcccttggcaatcactagtctactttctgtgtctttgagtttgcctactctggatatttc

SEQ ID NO: 222634 - DNA, 201 bp, Homo sapiens
ccaaagattgacagctgaactgagagaccatcacccacagacacaactggccactgggtggtgcacaagtcagacagaactgaatagtcctgtgaagactytggacactgaactgactttggaaccagactgcagaatggaggggtgggaacttgtggcttgaacctaatcaggtagattgcctggccaaaatgaaaatac

SEQ ID NO: 222635 - DNA, 201 bp, Homo sapiens
tctgtagagagaacagtacatggaccagggaatcctcagtgccttaatagatcctaagtacttacttattctttcccatagaggcttacacatggtaggaraagagatttctggaatacctttcctccccaaagaaagctggtttcttttgtttgttaagtgagagagtggtaccacagggtttccaagatttccaaggct

SEQ ID NO: 222636 - DNA, 201 bp, Homo sapiens
cctttttgactccttgactgtaaaatactgatctgatctgtagagagaacagtacatggaccagggaatcctcagtgccttaatagatcctaagtacttabttattctttcccatagaggcttacacatggtaggaaaagagatttctggaatacctttcctccccaaagaaagctggtttcttttgtttgttaagtgaga

SEQ ID NO: 222637 - DNA, 201 bp, Homo sapiens
atttatttctgcctttttgactccttgactgtaaaatactgatctgatctgtagagagaacagtacatggaccagggaatcctcagtgccttaatagatcstaagtacttacttattctttcccatagaggcttacacatggtaggaaaagagatttctggaatacctttcctccccaaagaaagctggtttcttttgttt

SEQ ID NO: 222638 - DNA, 201 bp, Homo sapiens; identical to SEQ ID NO: 40298

SEQ ID NO: 222639 - DNA, 201 bp, Homo sapiens
cctcgtttattacttgaagaattcaatatttatttctgcctttttgactccttgactgtaaaatactgatctgatctgtagagagaacagtacatggaccmgggaatcctcagtgccttaatagatcctaagtacttacttattctttcccatagaggcttacacatggtaggaaaagagatttctggaatacctttcctc

SEQ ID NO: 222640 - DNA, 201 bp, Homo sapiens
actagacatagtggaatggtgctctttgggagcatgacttgtttaaaattgcacaagtgttactctaataatttttctttttcccctctaaataggaacakcttctagattgtgaaggtgaagatggatggaataaactttttgacttgattcagtcagaactttatgtaagacctgatgacgtccatgtgaacatccggc

SEQ ID NO: 222641 - DNA, 201 bp, Homo sapiens
cgcctcggtctccgaaagtgctgggattacaggtgtgagccaccgcacccagcctggtgtgcatcagcattttggactttggagtttatgtaaccaaggakccaggctgtggacctcgtttattacttgaagaattcaatatttatttctgcctttttgactccttgactgtaaaatactgatctgatctgtagagagaac

SEQ ID NO: 222642 - DNA, 201 bp, Homo sapiens
gtatttgcttatagtgacatctgctgtcatgtaaagaagtactgcttgcatcagatattgtcctgtttacataacatgggctgtgctccttcctagctgtrtatctttaaacaaggcatttacctgcttgagcttcagttcccttgtaaagtgagcaggttagaggcaaaagatcatatagaagaataatttgtaaagttg

SEQ ID NO: 222643 - DNA, 201 bp, Homo sapiens
gtggcatcatcataaaactagacatagtggaatggtgctctttgggagcatgacttgtttaaaattgcacaagtgttactctaataatttttctttttccyctctaaataggaacagcttctagattgtgaaggtgaagatggatggaataaactttttgacttgattcagtcagaactttatgtaagacctgatgacgtc

SEQ ID NO: 222644 - DNA, 201 bp, Homo sapiens
aggtgatccgcccgcctcggtctccgaaagtgctgggattacaggtgtgagccaccgcacccagcctggtgtgcatcagcattttggactttggagtttaygtaaccaaggagccaggctgtggacctcgtttattacttgaagaattcaatatttatttctgcctttttgactccttgactgtaaaatactgatctgatc

SEQ ID NO: 222645 - DNA, 201 bp, Homo sapiens
gcagtgagctgagatcgagccactgcactgcagcctggcgacagagcaagactccatctcaaaaaaaaaaaggaaggggggaacaagccttgttcctttaygtgctgtcctgactgctgtgtattatttttgttaagattgctgtagttctttttttttttgagacggaggcttgctctgtcgccagtgctgggattgcag

SEQ ID NO: 222646 - DNA, 201 bp, Homo sapiens
gtttctgggttgtaagcaactctcagaagggatgaataaggtatataggatggtgtttttggtggcatcatcataaaactagacatagtggaatggtgctytttgggagcatgacttgtttaaaattgcacaagtgttactctaataatttttctttttcccctctaaataggaacagcttctagattgtgaaggtgaaga

SEQ ID NO: 222647 - DNA, 201 bp, Homo sapiens
ccagctaatttttgtatttttagtagaaaggaggtttctgcatgttggccaggctggtctcgaactcttggcttcaggtgatccgcccgcctcggtctccraaagtgctgggattacaggtgtgagccaccgcacccagcctggtgtgcatcagcattttggactttggagtttatgtaaccaaggagccaggctgtggac

SEQ ID NO: 222648 - DNA, 201 bp, Homo sapiens
aggagttcaagactagcctggcaaacatggtgaaaccccatctctactattacacaaaaaattagccaggcgtgctggctgacgcctgtaatccgagctastcagggcgctgaagtgggagaattgcttgagcccaggaggtggaggttgcggtgagccaagattgtgccattgcactccagcctggacgacagatcgaga

SEQ ID NO: 222649 - DNA, 201 bp, Homo sapiens
atgagctactgcagtaatcacagatgcttttcttcacatacagttcttgaggcttagtttctgggttgtaagcaactctcagaagggatgaataaggtatwtaggatggtgtttttggtggcatcatcataaaactagacatagtggaatggtgctctttgggagcatgacttgtttaaaattgcacaagtgttactctaa

SEQ ID NO: 222650 - DNA, 201 bp, Homo sapiens
tctgcctcccggattcaagcgattctttgcctcagcctcccaagcagtggggattacaggggtgtgccaccatgcccagctaatttttgtatttttagtaraaaggaggtttctgcatgttggccaggctggtctcgaactcttggcttcaggtgatccgcccgcctcggtctccgaaagtgctgggattacaggtgtgag

SEQ ID NO: 222651 - DNA, 201 bp, Homo sapiens
ggggctcctcacttcccagtaggggcggccgggcagaggcgcccctcagaagaggtgagtttttgacttaggaaagaaaaaagatcatatactggagttgstaagatctatggtaagaacaaatcttttgtccatgaaattgtgaagaaggaaaaagaaatttgtgctagttttgttgtgacaccccaaactgcaaaagtt

SEQ ID NO: 222652 - DNA, 201 bp, Homo sapiens
tctgaagagagtatgagctactgcagtaatcacagatgcttttcttcacatacagttcttgaggcttagtttctgggttgtaagcaactctcagaagggaygaataaggtatataggatggtgtttttggtggcatcatcataaaactagacatagtggaatggtgctctttgggagcatgacttgtttaaaattgcacaa

SEQ ID NO: 222653 - DNA, 201 bp, Homo sapiens
agaaagctggtttcttttgtttgttaagtgagagagtggtaccacagggtttccaagatttccaaggctgatgaaaattcttctgttgtctgcttgtcttrctttcttgaatttattttttgtatgttatgtatttattatttagagagaggatctccctgtgtcacccacgctggagtgcagtgtcacagtcataactca

SEQ ID NO: 222654 - DNA, 201 bp, Homo sapiens
cattctgttgcccacgctggagtgcagtggtgcgatcttggcccactgcagcctctgcctcccggattcaagcgattctttgcctcagcctcccaagcagyggggattacaggggtgtgccaccatgcccagctaatttttgtatttttagtagaaaggaggtttctgcatgttggccaggctggtctcgaactcttggct

SEQ ID NO: 222655 - DNA, 201 bp, Homo sapiens; identical to SEQ ID NO: 40513

SEQ ID NO: 222656 - DNA, 201 bp, Homo sapiens
gagaggggatgcgggattgagtcagatttaaggagatacagagcagtttgaacataaggaccttgttgctgaggattgactggggaggtctaggcttctgrtggtgactcagatggacaggaatgtgtggcattagtcctggtagtctctgaagagagtatgagctactgcagtaatcacagatgcttttcttcacataca

SEQ ID NO: 222657 - DNA, 201 bp, Homo sapiens
gagtagctgtatactctttatcacatggatggaacatactctggttgtatcagcatttttttttttttttttttgagatggaatcattctgttgcccacgytggagtgcagtggtgcgatcttggcccactgcagcctctgcctcccggattcaagcgattctttgcctcagcctcccaagcagtggggattacaggggtg

SEQ ID NO: 222658 - DNA, 201 bp, Homo sapiens
ttatcctgagatgatactgtcttcatttaaggtcaggaggtgatgacagtgctttgagatggtgatgaaggtaacagaacagtgggaggagaggggatgcrggattgagtcagatttaaggagatacagagcagtttgaacataaggaccttgttgctgaggattgactggggaggtctaggcttctggtggtgactcaga

SEQ ID NO: 222659 - DNA, 201 bp, Homo sapiens
acggcagtgtcaacctcctgggctcaagtgattctccttccttggcctcctgagtagctaggaacacaggcatgctccactatgcctggctatttttttcyccctggagacaggatcttgttgtgttgcacaggctggtttcaaactcttggcctcaaagctagcctcccaccttggtctctgaaagtgctagaattaaag

SEQ ID NO: 222660 - DNA, 201 bp, Homo sapiens; identical to SEQ ID NO: 40936

SEQ ID NO: 222661 - DNA, 201 bp, Homo sapiens
ttcagcgtataaccttttgtaccttttacttcaaatggtataaaaagtattgcagcccaccgccatggccgcctacaaactggtgctgatccggcacggcragagcacatggaacctggagaaccgcttcagctgctggtacgacgccgatctgagcccggcgggccacgaggaggcgaagcgcggcgggcaggcgctacg

SEQ ID NO: 222662 - DNA, 201 bp, Homo sapiens; identical to SEQ ID NO: 40938

SEQ ID NO: 222663 - DNA, 201 bp, Homo sapiens
tcagcgagcaacccccagtacgttcgagaagtcgatgcagaatctccagacgaaggtagcagctcccaggagagcccccagcccagccctcgagggacccstccccctccccagagcctcggcacaggcctgggagccagctgcggtgggcacgtagggtgtggaagggtgtgggcacaggggctggtgcgggacggggag

SEQ ID NO: 222664 - DNA, 201 bp, Homo sapiens
ctgcaaccatcagcgagcaacccccagtacgttcgagaagtcgatgcagaatctccagacgaaggtagcagctcccaggagagcccccagcccagccctcragggacccctccccctccccagagcctcggcacaggcctgggagccagctgcggtgggcacgtagggtgtggaagggtgtgggcacaggggctggtgcgg

SEQ ID NO: 222665 - DNA, 201 bp, Homo sapiens
gacccgctctttcctggagtcggttcccgggttgtctccaggaccgattctgcatggcggcgggcgctcactgtcatatctacatcaccaggcacaagccrcatggatccagtggccctggtggccgttggtggtcccaggcgctttcctggaggacatgtgagaagccctgccggcgcatactgggcctggggtagccgc

SEQ ID NO: 222666 - DNA, 201 bp, Homo sapiens
gctgtggttaaagacgctgggccctgctctcgaggccaccttggagggtcactgacccttggccctcactctccccatcccagtgggtgcctgtgtgagtrgaaggggctgcgctgtgtggcgcgttaaggccggctcagggcagacagggagggtggccggccccgtgggtgctgcctctgacagcccgtgcctctcagc

SEQ ID NO: 222667 - DNA, 201 bp, Homo sapiens
aggaatattggcagacagttcatagaaaccccttctggtctgcaggcccagactccccaactgtgtctctggccttgtgcagtgggtgccacttttccacrccctccccagcatgttgactgcagccacccaggtgtgaggtgacctcactgtgggttggatttgcatttctcccatggctgatgattttgagcatctttt

SEQ ID NO: 222668 - DNA, 201 bp, Homo sapiens
cagccagcggcgtggcctcgccattgccctggggcaaagggtgactgggaggtggggggcctggtgaagaagccccaagaagagaaagctcagggcagccrgaagccagccagaagcagagagaagtggaaggagggggagccagttgatgctggggtgtccagagggagagaagaaagatggccaggaggcagctaagcc

SEQ ID NO: 222669 - DNA, 201 bp, Homo sapiens; identical to SEQ ID NO: 40987

SEQ ID NO: 222670 - DNA, 201 bp, Homo sapiens; identical to SEQ ID NO: 40989

SEQ ID NO: 222671 - DNA, 201 bp, Homo sapiens
agggcgtgggcgctgagtctggcccagggttttgtcctgacccaacgactgacatgtcctttccttcccgcgggaggctgggacggccccgcaaaaccacrtaattatagagaccattttcctccccagacgaccagcctgaacaagcacctccaggagctgatggacgggctgacggccaaggtgttccggacctacaac

SEQ ID NO: 222672 - DNA, 201 bp, Homo sapiens
agcttatgttgctgtgcatggtcttctgagacccgctctttcctggagtcggttcccgggttgtctccaggaccgattctgcatggcggcgggcgctcacygtcatatctacatcaccaggcacaagccgcatggatccagtggccctggtggccgttggtggtcccaggcgctttcctggaggacatgtgagaagccctg

SEQ ID NO: 222673 - DNA, 201 bp, Homo sapiens
ctccaggagctgatggacgggctgacggccaaggtgttccggacctacaacgcctccatcactctgcaggagcagctgcgggccctgacgcgcggtgagcmggccccacacccacactcagcgcgggggagcacggcccctgccccagaccgggctccccggctggcccttgttgagtgagcctcggggtggggccgcttc

SEQ ID NO: 222674 - DNA, 201 bp, Homo sapiens
tccaggagctgatggacgggctgacggccaaggtgttccggacctacaacgcctccatcactctgcaggagcagctgcgggccctgacgcgcggtgagcakgccccacacccacactcagcgcgggggagcacggcccctgccccagaccgggctccccggctggcccttgttgagtgagcctcggggtggggccgcttct

SEQ ID NO: 222675 - DNA, 201 bp, Homo sapiens
ccctctcagacccttcagagacttcctgttgctctgaggacactcatcccagccgaccaggcccaccaggcccccaacagcactacctggctggggtcacrtgcaggtctcctggctctggcaggtgggggtgtgatctggaaccttctgtccttgtgcgtctgggggaggctcagaaggtgtgcccatctcactctcccc

SEQ ID NO: 222676 - DNA, 201 bp, Homo sapiens
ccggctctgaagggacccatctggggagaggccctagagcctgggagaggcacgttgcctttcccacttagctgggcttgccctttcccgcttagctgggyttggtgggatccgtgactcagcagcacacgggcctctgcaggtggggggcatgggcgggtacacgggcatggggtctgaggtcaggtagggttgcctccc

SEQ ID NO: 222677 - DNA, 201 bp, Homo sapiens
cctgaaaacccctgaggcttctggcttcagggcctcccctccctgccccgcctcctccaccccgccctgcctcttccacccttccaccctgcccgatcctytgtgggcggcggtcctgcgccctgctgtggtgcctctccactggctgcactgctggacccccttccacccagctcctcggaggcagggctctctcataag

SEQ ID NO: 222678 - DNA, 201 bp, Homo sapiens
agaaaatttttgtatgttgcccaagctactcttgaactcctggctttaagcaatcctgccttggcctcccagagctctgagattaaaagtatgagccaacrtgcctggcccttaggactgtatctataaaggccatattgtatgcaaacagagatagttttactttttcttttccaatcatatgccttttatttcatattt

SEQ ID NO: 222679 - DNA, 201 bp, Homo sapiens
ccccaccccctccaacacccccccaatctccagagctgggcttgccagaagggggcgccctggggagggggaccttggcagggagccctgtggagcctcaytgtgttagtgccttacaaaaggagcccttccctgaaaacccctgaggcttctggcttcagggcctcccctccctgccccgcctcctccaccccgccctgc

SEQ ID NO: 222680 - DNA, 201 bp, Homo sapiens
ccattttcatgtaatataaatgtagtagcaacgttaagtggtaaaggaggagaaagcagtagcgcctgaaatcttctgcagctttctcacgacccgctccmagatcactgtggtcgccacctccacgcaggttgattgtcgtgtgtcatgcagaacatgcttctgaacttacagaataaggcctagcttcttgctcttggc

SEQ ID NO: 222681 - DNA, 201 bp, Homo sapiens
gcttgcctcaatggatagatgatgactggcctggagagttaggatgggctgtagccgccacgctggctgtgtccccccaccccctccaacacccccccaayctccagagctgggcttgccagaagggggcgccctggggagggggaccttggcagggagccctgtggagcctcactgtgttagtgccttacaaaaggagcc

SEQ ID NO: 222682 - DNA, 201 bp, Homo sapiens
tgcagctttctcacgacccgctccaagatcactgtggtcgccacctccacgcaggttgattgtcgtgtgtcatgcagaacatgcttctgaacttacagaakaaggcctagcttcttgctcttggcatagtacgcacgaaagcgtagtttaaagcaatgaggtcatgtcagctggaggccgagcctctggccgctctctcat

SEQ ID NO: 222683 - DNA, 201 bp, Homo sapiens
cactgaggcctttgcactggccatcctgggtgctggacttgctcttcccgcagccctgctgaccgagcctgcccactgcctgccagccacgccccatctcrctcctcttctcccaggcccatctcagaatctaggttcagttgagcccttcgtatgggttttggtgatctgcatccgcaggacccagcgcagtgctggttc

SEQ ID NO: 222684 - DNA, 201 bp, Homo sapiens
tctcacgacccgctccaagatcactgtggtcgccacctccacgcaggttgattgtcgtgtgtcatgcagaacatgcttctgaacttacagaataaggcctrgcttcttgctcttggcatagtacgcacgaaagcgtagtttaaagcaatgaggtcatgtcagctggaggccgagcctctggccgctctctcatacgatgtg

SEQ ID NO: 222685 - DNA, 201 bp, Homo sapiens
tgaggcagcccctgtgtaaggctcctggtcagccaagaggaccccagcgccctggaggctgcacccccatccctcctgctgtggggcccttggtgctccakgcccgagtctctcacaccgcggctcacccgctgccccaaggggctccggcagcaggtccagctcctcccggggcctgtgacagaacagttccagcagggg

SEQ ID NO: 222686 - DNA, 201 bp, Homo sapiens
taatatttaatataatatctaatatttcatgaaagtttatgaaaaattggtgcctttttaaagagagagtcttgctgtgttgctcaggctggtcttgaackcctgggctcaagcagtcctccgaactcagcctcctgaatagctgagactataggcttgcactgcactgcctggctagggtcagtttgttaaatgaattca

SEQ ID NO: 222687 - DNA, 201 bp, Homo sapiens
acggccaaggtgttccggacctacaacgcctccatcactctgcaggagcagctgcgggccctgacgcgcggtgagcaggccccacacccacactcagcgcgggggagcacggcccctgccccagaccgggctccccggctggcccttgttgagtgagcctcggggtggggccgcttctttgggaaatgggctgaggttgtg

SEQ ID NO: 222688 - DNA, 201 bp, Homo sapiens
cgctgttatttattgtatacaaagcaaaaggggcagggtaaagagtgtgagtcatctccagtgataggtgagatcacgtgggtcacatgtccactggacayggggcccttccctgtttggcagccgaggcagagagagagagaacagtttacgccattatttctgcatatcagagacttttagtactttcactaattttct

SEQ ID NO: 222689 - DNA, 201 bp, Homo sapiens
tctgcatatcagagacttttagtactttcactaattttctactgctatctagaaggcagagccaggtgtacaggatggaacatgaaggcagactaggagcrtgaccactgaagcacagcatcacagggagacggttaggcctccggataactgcgggcgagcctgactgatgtcaggccctccacaagaggtggaggagta

SEQ ID NO: 222690 - DNA, 201 bp, Homo sapiens
acatgttgacaccccctgctccatccacgaacaggcacccaccgttgtttgagtttttacatgttgacaccccctgttccatccatgaatgggcagacccrccatcgtttgagtttttacatgtttgtgagtaatgttccatctcaacagcctgggcaacataatgagaccctgtctctcccaaaacaagcaaacaaaaac

SEQ ID NO: 222691 - DNA, 201 bp, Homo sapiens
tgcccaggctggtcttgaactcctgagctcaggcaatctgcctgtctcggcctcccaaagtgctgggattacaggtgtgagtcactactcccagccctattttttttttttttttttttggtgatggagtcttgctctgtcacccaggctagagtgcagtggcgtgatcttggcttactgcaacctctgcctcctgggttc

SEQ ID NO: 222692 - DNA, 201 bp, Homo sapiens
ctctgcgcatgaaatgctggagtttccgaagagctggagagttgacagcctcactggtgcgtgggagatcctgcaggagttcccgccaggtctcgcggttwatcatcattcacttagtgcttccagcgtggcatgtctctgtgacctggtggtgcgctatcagcatacccattcacagctgagggcctgcacagctgccta

SEQ ID NO: 222693 - DNA, 201 bp, Homo sapiens
ggtagattgagtggctgcttttgtctgagctgccaggcaggccacctctgatgccagactcggtcaggagccatgccaccaccatagccaccacgtgggayggttgaccagagcagctccttttgcttgcattccagagaataaggtctccaagttatgtttgggtcgttgttctgctgcagggactcgaagatccccgag

SEQ ID NO: 222694 - DNA, 201 bp, Homo sapiens
gctggcagcttggaccgagagcgttcagaactccatcaagtacatcatgctgaacccttgctcgaagctgaaggtgagcgcagggcttggcagggtgtttyctccccaggaggtccccctgaggacgccggcagggaggtgtgtaagccgggcaccggcagaggcttctgagatgggctgggagtcggccagcccgtgctg

SEQ ID NO: 222695 - DNA, 201 bp, Homo sapiens
ctgcagggactcgaagatccccgagccgccggcggggcaccagtggaaggaggtgcgctccgataacaccgtcacgtggctggcagcttggaccgagagcrttcagaactccatcaagtacatcatgctgaacccttgctcgaagctgaaggtgagcgcagggcttggcagggtgtttcctccccaggaggtccccctgag

SEQ ID NO: 222696 - DNA, 201 bp, Homo sapiens
caccccgacctctgggcctctgtccacggccctgtctcagcttcagggccctctgctctttgtcccctgccatcaacctggggatgccgtctaagcttggygagggcctctcctccctctgtccctggcgctgcccctgctccgtgatgtccgggctgctctgtgatgtccgggcagattggatgcacagactgtccagag

SEQ ID NO: 222697 - DNA, 201 bp, Homo sapiens
acctgaagtggcccctgggaacgagaggccggcctggcccaaagactgagaaaggcctgtggccttagagaagccccttctcacaaagctgctcttttctygtcagccttagcgcccctgcatgtgcttaagtgtcgttccgcttccccagagcacatttgagagtaaacccggtttgaaatggataatttaccatcattg

SEQ ID NO: 222698 - DNA, 201 bp, Homo sapiens
gcacacgggcctctgcaggtggggggcatgggcgggtacacgggcatggggtctgaggtcaggtagggttgcctccctctgcaggccttgttttcctcccycgtgaggtggaggccacactgctcacctgctaggagccacagggaggagccactgtgggagcggggaagaggctcatgcagggcctggcccaggagagtg

SEQ ID NO: 222699 - DNA, 201 bp, Homo sapiens
tctttaggtgggagaaggagaagcacgaagacggggtgaagtggagacagctggagcacaagggcccgtacttcgcacccccatacgagccccttcccgayggagtgcgtttcttctatgaaggtaaggatgcagggagcggctcctccccagcctgcgcttggttccctgggcgtgggctcccagtgggcatctggctcg

SEQ ID NO: 222700 - DNA, 201 bp, Homo sapiens
accaggcccccaacagcactacctggctggggtcacgtgcaggtctcctggctctggcaggtgggggtgtgatctggaaccttctgtccttgtgcgtctgrgggaggctcagaaggtgtgcccatctcactctcccccatcctgatggtgctcccaccctctcgccaaagcctctcccactgaggcctttgcactggccat

SEQ ID NO: 222701 - DNA, 201 bp, Homo sapiens
ctcaggggcgctgacgctcggcatgtgtttcgcgtgcacccgtgggcctcagaggccggtgctgtgctgccctggggacaaccttggagctggggcagcamtggggctgtgggatgcggaggagctagctggcatccaggtgagagccccaggagaggagacgccccctccactgagggaggcagaagattctgggtgagg

SEQ ID NO: 222702 - DNA, 201 bp, Homo sapiens
tcggcatgtgtttcgcgtgcacccgtgggcctcagaggccggtgctgtgctgccctggggacaaccttggagctggggcagcactggggctgtgggatgcrgaggagctagctggcatccaggtgagagccccaggagaggagacgccccctccactgagggaggcagaagattctgggtgagggcataggggccgaggcc

SEQ ID NO: 222703 - DNA, 201 bp, Homo sapiens
tgtgcggagacgagagattgtagaaataaagacacaagacaaagagataaaagaaaggacagctgggcccgggggaccactaccaccaagacgcggagacyggtagtggccccgaatgtctggctgcgctgttatttattgtatacaaagcaaaaggggcagggtaaagagtgtgagtcatctccagtgataggtgagatc

SEQ ID NO: 222704 - DNA, 201 bp, Homo sapiens
gacgagagattgtagaaataaagacacaagacaaagagataaaagaaaggacagctgggcccgggggaccactaccaccaagacgcggagactggtagtgrccccgaatgtctggctgcgctgttatttattgtatacaaagcaaaaggggcagggtaaagagtgtgagtcatctccagtgataggtgagatcacgtgggt

SEQ ID NO: 222705 - DNA, 201 bp, Homo sapiens
cactgttccgcagcccctgggaggaggtggcccacctggagagtcagctgctgtgtcctggtgtgtgtgtaccttcagctgctgagctgctcattctgaawtgatgggacacctaccaggtctgcctgggccctaagagcgagcaattgcagccctcggcctctgcccatggcttccagcagctagatgacatggacactg

SEQ ID NO: 222706 - DNA, 201 bp, Homo sapiens; identical to SEQ ID NO: 40983

SEQ ID NO: 222707 - DNA, 201 bp, Homo sapiens
gctgatgctccagggtggcggcacgcgtggggtggggttggcctagaggagcaggtcccagctacaccaggcggctctggtgtctctgctgcatggaggaygctcgcccttgccgagcaccctgacctggccttcaaggtgggtgagttgcctgcttgcctgggctgacgctgcctcccgcaggtgcaagcggttcagggt

SEQ ID NO: 222708 - DNA, 201 bp, Homo sapiens
ctcactggattcgggttttttctgtcctctgaaattccttctttctccttcaggtgtacaagaacttacagctctttatggagaacaaggacccccgggaygacctcttcgacaggctgaccgtaagccggctcgtgtttcctcagcagtgggcggcggcaggacccagtgagagggcgtgggcgctgagtctggcccagg

SEQ ID NO: 222709 - DNA, 201 bp, Homo sapiens
tagtccatttccctattcgtgggtgtttgattaattcctgttttaggcctttgcatgtgtaaagctgccatgaacattcccacgtgggtgagggcacataygtgtgagttgcctctgacaggacttggggtgaaattgctgggtcacgtgtgtccagcttactagcaacaccaggctgaactgtccacacgcctgccgcgg

SEQ ID NO: 222710 - DNA, 201 bp, Homo sapiens
tttgcatgtgtaaagctgccatgaacattcccacgtgggtgagggcacatatgtgtgagttgcctctgacaggacttggggtgaaattgctgggtcacgtrtgtccagcttactagcaacaccaggctgaactgtccacacgcctgccgcgggtgcgaggcacctttctagtgggcacaaaatgacacctcgccgtgggtg

SEQ ID NO: 222711 - DNA, 201 bp, Homo sapiens
agtactggggaattttgtacaataaaatgtgtgcaagtgcttgtacatcactagaaaaagtccccaggccggccgggcacggtggctcacacctgtaatcycagcactttgggaggctgaggcgggcggatcacaaggtcaggagatcgagaccatcctggctaacacggtgaaaccccatctctactaaaaatacaaaaa

SEQ ID NO: 222712 - DNA, 201 bp, Homo sapiens
gagcagacattgaggctgcaatgagctgtgattgcgcccctgcactccagcctgggcaacagagcaagaccccatctcaaagagaaagaaaagtccctgaygcctgccgtgtcctttgaagcctccaccccgagcatggagtctgctgggctgtcacatccaatcagcgtcccagcctggacccccggttcccgctcgaca

SEQ ID NO: 222713 - DNA, 201 bp, Homo sapiens
cctgggcaacagagcaagaccccatctcaaagagaaagaaaagtccctgacgcctgccgtgtcctttgaagcctccaccccgagcatggagtctgctgggytgtcacatccaatcagcgtcccagcctggacccccggttcccgctcgacaggggaggagaaacaccttcgtgtgctctgaggctgaggactttgggtgag

SEQ ID NO: 222714 - DNA, 201 bp, Homo sapiens
cgccaccacgcctagctaatttttgtatttttagtagagacgggggttttgccatgttggccaggcgggtctcgaactcctggcctcaagtgatccgcccrcctcggcctcccaaagtgctggtattacaggcgtgagtcaccgcgcctggctcctatcagttagttccgagatacacgtggtttcccattttctcacacc

SEQ ID NO: 222715 - DNA, 201 bp, Homo sapiens
taacagaaccagctctatctgtggggtctgcggggagaggctctatttacggggccgcaggaccgtgcgcaggttctgcctattgcacacacgcctccgtyggacatggcgagagcgcgtttctgtccgtcagacatggcgagagcgctctgcatgtctgtccttcagacatggtgagagcgcgtgtctgtggtttttgca

SEQ ID NO: 222716 - DNA, 201 bp, Homo sapiens; identical to SEQ ID NO: 40981

SEQ ID NO: 222717 - DNA, 201 bp, Homo sapiens; identical to SEQ ID NO: 40982

SEQ ID NO: 222718 - DNA, 201 bp, Homo sapiens
gcccaggctggtcttgaactcctgagctcaggcaatctgcctgtctcggcctcccaaagtgctgggattacaggtgtgagtcactactcccagccctattttttttttttttttttttggtgatggagtcttgctctgtcacccaggctagagtgcagtggcgtgatcttggcttactgcaacctctgcctcctgggttca

SEQ ID NO: 222719 - DNA, 201 bp, Homo sapiens
tgggggccgtgtcacgggaggatgccgacaggtgacggtgatgctgctcgggccaccttcctcagggaagcctcccgtgggctcccaggctctgcgtagaygcccttcaggtcctcactggattcgggttttttctgtcctctgaaattccttctttctccttcaggtgtacaagaacttacagctctttatggagaacaa

SEQ ID NO: 222720 - DNA, 201 bp, Homo sapiens
tcccaacactctgggcagccgaggcaggcagatcacttgaggttgggagtttgagaccatcatggccaacatggtgaaaccctgtctctgctaaaaatacaaaaaaaaaaaaaaaaaaaaaaatcatgtgcgtggtggcacatgcctgtagtcccagctactcaggaggcaggagattcacttgaacccgggaggcagagg

SEQ ID NO: 222721 - DNA, 201 bp, Homo sapiens
cccaacactctgggcagccgaggcaggcagatcacttgaggttgggagtttgagaccatcatggccaacatggtgaaaccctgtctctgctaaaaatacaaaaaaaaaaaaaaaaaaaaaaatcatgtgcgtggtggcacatgcctgtagtcccagctactcaggaggcaggagattcacttgaacccgggaggcagaggt

SEQ ID NO: 222722 - DNA, 201 bp, Homo sapiens
ggacccctccccctccccagagcctcggcacaggcctgggagccagctgcggtgggcacgtagggtgtggaagggtgtgggcacaggggctggtgcgggayggggaggggcagccctgtctggacccttttcctgcagatccaggcaaagaaggagcaggtggctgaggccagggcagagctgaggagggcgagggctgag

SEQ ID NO: 222723 - DNA, 201 bp, Homo sapiens
ccaacactctgggcagccgaggcaggcagatcacttgaggttgggagtttgagaccatcatggccaacatggtgaaaccctgtctctgctaaaaatacaaaaaaaaaaaaaaaaaaaaaaatcatgtgcgtggtggcacatgcctgtagtcccagctactcaggaggcaggagattcacttgaacccgggaggcagaggtt

SEQ ID NO: 222724 - DNA, 201 bp, Homo sapiens
aaaatcatgtgcgtggtggcacatgcctgtagtcccagctactcaggaggcaggagattcacttgaacccgggaggcagaggttccagtgagctgagatcrtgcaactgcactccagcctgggtgacaaagcaagactccgtctcaaaaaaaaaaaaaaaaagccaagagaaatttcttaagcatttccagaaggactgtg

SEQ ID NO: 222725 - DNA, 201 bp, Homo sapiens
gctgaacccttgctcgaagctgaaggtgagcgcagggcttggcagggtgtttcctccccaggaggtccccctgaggacgccggcagggaggtgtgtaagcygggcaccggcagaggcttctgagatgggctgggagtcggccagcccgtgctgaggtcatgctgtgccagcaggcacaagccccaaagccaggagtgggca

SEQ ID NO: 222726 - DNA, 201 bp, Homo sapiens
tgggatgagcgccgctgggggcggaggccgcgctcgggggcggggctggccgctgggggcggggcggggctggccgctggggcggggcccagcttgtcgcyctttcccggaggctggcagatgcgcgtggtgcggctgctgcggctccgggcggctctgacgctgctcggggaggtcccccgccgcccggcctcccggggt

SEQ ID NO: 222727 - DNA, 201 bp, Homo sapiens
agcagtgggcggcggcaggacccagtgagagggcgtgggcgctgagtctggcccagggttttgtcctgacccaacgactgacatgtcctttccttcccgcrggaggctgggacggccccgcaaaaccacgtaattatagagaccattttcctccccagacgaccagcctgaacaagcacctccaggagctgatggacgggc

SEQ ID NO: 222728 - DNA, 201 bp, Homo sapiens
ggccatgctgcagaaatgtcctgtctgcctgcaggagcttgggacccaaagagagccccagatggggcagggtgtcttgggaggagggagttctggcctgygcttggagctggggctggctgtgggccctgcattgaggcacatctctccgagggtgcacaggcaggtaggtgctttccaaaaagtgctgctgagctgcag

SEQ ID NO: 222729 - DNA, 201 bp, Homo sapiens
agctgtgactatgatttacaactgaccagtccccggtattttgtggcagcagcacgtatggactgagactttgccctcgcgaatcccgtcacgttcaccaratgagctcccgaccatgtatcctgctctgtccggtcatgacgtttctgcagttgcccttagtgcggtcgtcatccgggttttcatactggagagtttatt

SEQ ID NO: 222730 - DNA, 201 bp, Homo sapiens
ttgtatacaaagcaaaaggggcagggtaaagagtgtgagtcatctccagtgataggtgagatcacgtgggtcacatgtccactggacatggggcccttccytgtttggcagccgaggcagagagagagagaacagtttacgccattatttctgcatatcagagacttttagtactttcactaattttctactgctatctag

SEQ ID NO: 222731 - DNA, 201 bp, Homo sapiens
gcggtctcagctcactgcaacctccgcctcccgggttcaagtgattctcctgcctcagcctcccgagtagctggggttacaggtgcgcgccaccacgcccrgctcatttatttatttagtagaaacggggtttctccatgttggccaggctggtcaaactcctggcctcaagtgatcctcctgccttggcatctcaaagtg

SEQ ID NO: 222732 - DNA, 201 bp, Homo sapiens
ttcttttttttttttttcctttggagacagagcattgctctgtcgccaaggctggagtgcaatggcatgatctcggctcactgcaatctctgcctccaggkttcaagcaattctcctgcctcagcctcctgagtagctgggattacaggcacccgccaccatgcccggctaatttttttgtattttagtagagacggggtt

SEQ ID NO: 222733 - DNA, 201 bp, Homo sapiens
tgaaattccttctttctccttcaggtgtacaagaacttacagctctttatggagaacaaggacccccgggacgacctcttcgacaggctgaccgtaagccrgctcgtgtttcctcagcagtgggcggcggcaggacccagtgagagggcgtgggcgctgagtctggcccagggttttgtcctgacccaacgactgacatgt

SEQ ID NO: 222734 - DNA, 201 bp, Homo sapiens
cggcagggccagagaagtgcaggtctcctcaggtggcgctagtccagcgcggggcctcgcggcctcctcttctcttgccagtgtcctggagaagaagaggyggctcctggagaagctgcaggagcagctggcgcagctgagtgtgcaggccacggacaaggaggagaacaagcaggtggccctgggcacgtccaagctcaa

SEQ ID NO: 222735 - DNA, 201 bp, Homo sapiens
gtgcggtcgtcatccgggttttcatactggagagtttatttaggatggatctcaaagtggaattattgggtgcaaaggttttagccagttttactactgayttgttgtgaagttgcttttggagaactgtgccctccgctgccccacccaactccatgcctgcaataacagaaccagctctatctgtggggtctgcgggga

SEQ ID NO: 222736 - DNA, 201 bp, Homo sapiens
tcagctgtctgagcaccccgacctctgggcctctgtccacggccctgtctcagcttcagggccctctgctctttgtcccctgccatcaacctggggatgcygtctaagcttggtgagggcctctcctccctctgtccctggcgctgcccctgctccgtgatgtccgggctgctctgtgatgtccgggcagattggatgcac

SEQ ID NO: 222737 - DNA, 201 bp, Homo sapiens
ctccagacgaaggtagcagctcccaggagagcccccagcccagccctcgagggacccctccccctccccagagcctcggcacaggcctgggagccagctgyggtgggcacgtagggtgtggaagggtgtgggcacaggggctggtgcgggacggggaggggcagccctgtctggacccttttcctgcagatccaggcaaag

SEQ ID NO: 222738 - DNA, 201 bp, Homo sapiens
ccagcgtggcatgtctctgtgacctggtggtgcgctatcagcatacccattcacagctgagggcctgcacagctgcctaaggccatgctgcagaaatgtcytgtctgcctgcaggagcttgggacccaaagagagccccagatggggcagggtgtcttgggaggagggagttctggcctgcgcttggagctggggctggct

SEQ ID NO: 222739 - DNA, 201 bp, Homo sapiens
ctggggctggctgtgggccctgcattgaggcacatctctccgagggtgcacaggcaggtaggtgctttccaaaaagtgctgctgagctgcagtcgcccagstggacaggtgggtttggagcaaggtctctggctttgaaagccagcttgtgtctgatggtggtgcttggtgccctggtctctgcaggggtgaaagaatgtc

SEQ ID NO: 222740 - DNA, 201 bp, Homo sapiens
tggccaggctgtgtggggcagggcactcgtcgtcccagttggtgctgagaggtctgtgcagagcggtgccttgcttgggtggccgcccagcctcctggtgyactgtggccttcctgtgtgtgcagagggtagattgagtggctgcttttgtctgagctgccaggcaggccacctctgatgccagactcggtcaggagccat

SEQ ID NO: 222741 - DNA, 201 bp, Homo sapiens
gcggctctgacgctgctcggggaggtcccccgccgcccggcctcccggggtgtcccgggctcgcgcaggacgcagaagggcagtggagccaggtaaggtgkcccagtgagcaggcggcgagggccctgagcaccgggcttgggtaggtccagaaaggggagtggcaggcctcgtgggacggccttgccctgcttccggttt

SEQ ID NO: 222742 - DNA, 201 bp, Homo sapiens
gcccacagggagtgggaggtggctgagcgccctgctcggtggacacctgagccacagcaggttgtctttgacacctcgctgatgctccagggtggcggcaygcgtggggtggggttggcctagaggagcaggtcccagctacaccaggcggctctggtgtctctgctgcatggaggacgctcgcccttgccgagcaccctg

SEQ ID NO: 222743 - DNA, 201 bp, Homo sapiens
gggagcactcggtaacggaatgcatgtgatgtagagaaaaaggcgggacataaagcctcgtcaagatcagcggtgtgaaaccaaacgtgtagaggaagatragggaagaagccagaagtcgggagctgtgggctggggcttcccgccgtgtcccggtgcctgtgggtttgtagaatggggttcatcagccatggtgccagg

SEQ ID NO: 222744 - DNA, 201 bp, Homo sapiens
tcccaggcgctttcctggaggacatgtgagaagccctgccggcgcatactgggcctggggtagccgcatggggatgggtctctgcgcatgaaatgctggagtttccgaagagctggagagttgacagcctcactggtgcgtgggagatcctgcaggagttcccgccaggtctcgcggtttatcatcattcacttagtgctt

SEQ ID NO: 222745 - DNA, 201 bp, Homo sapiens
ccgtaagccggctcgtgtttcctcagcagtgggcggcggcaggacccagtgagagggcgtgggcgctgagtctggcccagggttttgtcctgacccaacgrctgacatgtcctttccttcccgcgggaggctgggacggccccgcaaaaccacgtaattatagagaccattttcctccccagacgaccagcctgaacaagc

SEQ ID NO: 222746 - DNA, 201 bp, Homo sapiens
tttggaggggagggtgctgcctcaaggctttttccttgctcattttcaaggtgactgcccttcgcccatggcctgactgattttatgtgtgtgccgcggaytctgtgccctccggggtttctgtctgccccacacctgcgaggctcgcccctgactgcttgtcccgcagcatcttcctggctctggccgggtcgcgtttcc

SEQ ID NO: 222747 - DNA, 201 bp, Homo sapiens
gagctttggcttggctcttgtgctgctgattttagctgcttcagcctattttcttcatctctgctagaaggcatccttctaagaaaagcaaacctcttctyccccagggcaggcccccacgccatgctgtgcccctcccaccagccctcccgtgggccccctgccgagtcacatgcacacctgagtttgctgagctccttt

SEQ ID NO: 222748 - DNA, 201 bp, Homo sapiens
ttgtggcagcagcacgtatggactgagactttgccctcgcgaatcccgtcacgttcaccagatgagctcccgaccatgtatcctgctctgtccggtcatgrcgtttctgcagttgcccttagtgcggtcgtcatccgggttttcatactggagagtttatttaggatggatctcaaagtggaattattgggtgcaaaggtt

SEQ ID NO: 222749 - DNA, 201 bp, Homo sapiens
agagtaaacccggtttgaaatggataatttaccatcattgatcaagggtgggttcccagacgggccgtgggctgagggcggggcttgtgcaggccagtcgrcttcttgctgttctgtgccatgcgtctccctacatctaacaggaacctgccgtgctgtgatctccatgtggccttctcagggattcccttagccctcctc

SEQ ID NO: 222750 - DNA, 201 bp, Homo sapiens
tcccaggtgtgttatgtcctctgagtctattctaaatggtttcttttggatttttttttccttttctgtcagatgctttaggtactgattttctcctctcygcctggctggaacatccgtctgcatcggacgggcttccttctgcacctgtgacctcacaagggctctccttggggaggcaggaccagagcagccctgagt

SEQ ID NO: 222751 - DNA, 201 bp, Homo sapiens
gcagagggtagattgagtggctgcttttgtctgagctgccaggcaggccacctctgatgccagactcggtcaggagccatgccaccaccatagccaccacrtgggacggttgaccagagcagctccttttgcttgcattccagagaataaggtctccaagttatgtttgggtcgttgttctgctgcagggactcgaagatc

SEQ ID NO: 222752 - DNA, 201 bp, Homo sapiens
tggcttactgcaacctctgcctcctgggttcaagcgattctcctgcctcagcctcccgagtagctgagactacagacacacaccactatacctggctaatytttgtattttagtacagatggggtttcaccatgtcggtcaggctggtcttgaactcctgacctcaggtgatccacccacctcggcctcccaaagtgctgg

SEQ ID NO: 222753 - DNA, 201 bp, Homo sapiens
aggcggctctggtgtctctgctgcatggaggacgctcgcccttgccgagcaccctgacctggccttcaaggtgggtgagttgcctgcttgcctgggctgaygctgcctcccgcaggtgcaagcggttcagggtgccagtggagaagatctacagcaaaacacagcgggagaggttcgcctgggctctcgccatggcaggag

SEQ ID NO: 222754 - DNA, 201 bp, Homo sapiens
ccgcccagcctcctggtgcactgtggccttcctgtgtgtgcagagggtagattgagtggctgcttttgtctgagctgccaggcaggccacctctgatgccrgactcggtcaggagccatgccaccaccatagccaccacgtgggacggttgaccagagcagctccttttgcttgcattccagagaataaggtctccaagtt

SEQ ID NO: 222755 - DNA, 201 bp, Homo sapiens
aagggggcgccctggggagggggaccttggcagggagccctgtggagcctcactgtgttagtgccttacaaaaggagcccttccctgaaaacccctgaggmttctggcttcagggcctcccctccctgccccgcctcctccaccccgccctgcctcttccacccttccaccctgcccgatcctctgtgggcggcggtcctg

SEQ ID NO: 222756 - DNA, 201 bp, Homo sapiens
ctggtcttgaactcctgacctcagatgatctgcctgcctcagcctcccaaccagatgatcttaatttgtgtatttatactcattcttacaccaaaaagggytttaaattgcctagaaactacatgtaagatgttaacattttaaatggaagcagatgaagttccagctcgctgccacctcactaacatttttaacaattat

SEQ ID NO: 222757 - DNA, 201 bp, Homo sapiens
cgtgatcttggctcactgtaacctctgcctcctgggttcgagtgattctcctgcctcagcctcccaagtagctgggattacaggcatgtgccaccatgccyggctaattttgtatttttagtagagacggggtttcaccatgttggtcaggctggtcttgaactcctgacctcagatgatctgcctgcctcagcctcccaa

SEQ ID NO: 222758 - DNA, 201 bp, Homo sapiens
aggactttcctcccaaaattttgagaactactgaaccagaatatagtctgacactaataggtagaaatttaaccaaaggagattatgaagctctgcacttsagttaacaaatcacttctcagcttccagttccatctcagaaggaaggaaagggattaaaatccagagaccagaaatgggagcaaagtacaaggtggtgta

SEQ ID NO: 222759 - DNA, 201 bp, Homo sapiens
taggaaagtttgtccctttttgtttttaattttgttttacagattcacaggaatttttttttttttttttttttaatgcacagaaagtttccctggacacwctacccagtttcccccagtgataatatcttgggtaacatcctgtatacattcacattggtgcattcctcagagttgtcagattttgctagttttacgtgc

SEQ ID NO: 222760 - DNA, 201 bp, Homo sapiens
agtacttagagtgaaatacttgcatctgtaatagagacttattttttttttttttttgagacacagtctcaccctgttgcccaggctggagtgcagtggtktgatctccgctcacggcaacctccatctcccaggttcaagtgagttcccattcctcagccccagagctgggaccacaggcgcgcgaatttttgtattttt

SEQ ID NO: 222761 - DNA, 201 bp, Homo sapiens
taatatgggaaaacaaattgcagagtttagtctctgattagcttttaaatttgatatgtgtaagtaagaaatgaaccagcttttactttgaaaccttcctyttctggaaggttttctggccctgtggtatacgcactaacagatctatacaggttgtttgtgatacagcttctatggattttctcaaaagctatgctgagg

SEQ ID NO: 222762 - DNA, 201 bp, Homo sapiens
atggcttccagtggaggcattttggggcagaatacagagatatggaatcaggtgaggagatagaacaatgccttccatttcccgggtgcccttcctagcaygtgtttgctccgttgttttagataaggtctgggggatgagtcaatgtcacaggagctgatgtatagctttgaccttgtgaggggtggtgccaggttaagc

SEQ ID NO: 222763 - DNA, 201 bp, Homo sapiens
ccctcaggaatctgggctgggaccagcctacttaaagataggatgggcagctgggtgtggtggctcacgcctgtaatcccagcacttcgggaggccgaagygggcggatcacctgaggtcaggagttcgaggccagcctgaccaacatggagaaacactgtctctactaaaaatacaaaattagctgggtgtagtggcgca

SEQ ID NO: 222764 - DNA, 201 bp, Homo sapiens
ttttagaaagggcttcaatttggatccagccccaggtctgccttagctctgtattcttggggtattttgttctgtattggcctatcttgactaacaatgarccttggatttgaaacatatcatcagaaacctcagaagacaacattcttaaactggctagagcctggtctgaatggatgaaaaggagagacttttgaagca

SEQ ID NO: 222765 - DNA, 201 bp, Homo sapiens
ggttaggaatttgagaccagcctggccaacatggcgacaccccagtctctactaataacacaaaaaattagccaggtgtgctggtgcatgtctgtaatccyagctactcaggaggctgaggcatgagaattgctcacgaggcggaggttgtagtgagctgagatcgtggcactgtactccagcctgggcgacagagggaga

SEQ ID NO: 222766 - DNA, 201 bp, Homo sapiens
gagatcctttcaaaactcaaagcagccaggtgtggtggctcacgcctgtaatcccaccactttgggaggctgagtcagatcacctgaggttaggaatttgrgaccagcctggccaacatggcgacaccccagtctctactaataacacaaaaaattagccaggtgtgctggtgcatgtctgtaatcctagctactcaggag

SEQ ID NO: 222767 - DNA, 201 bp, Homo sapiens
ttagctgttggattttagtaggaaagtttgtccctttttgtttttaattttgttttacagattcacaggaatttttttttttttttttttttaatgcacaraaagtttccctggacacactacccagtttcccccagtgataatatcttgggtaacatcctgtatacattcacattggtgcattcctcagagttgtcagat

SEQ ID NO: 222768 - DNA, 201 bp, Homo sapiens
gctattagaagtcagtagtctgttctcaacacagcagccagtgagatcctttcaaaactcaaagcagccaggtgtggtggctcacgcctgtaatcccaccrctttgggaggctgagtcagatcacctgaggttaggaatttgagaccagcctggccaacatggcgacaccccagtctctactaataacacaaaaaattagc

SEQ ID NO: 222769 - DNA, 201 bp, Homo sapiens
gcccctcctccgttttcccctgtggaccattccgcttcgcagcgttttcaaaaactggagcgaaagtgatgtgggcggggcaaaggcggcgggaagaggasagcactgaagctggcgcgggaacttggtttcctggtggcctcccatccaatccccacgaaccagctttcctcttaaaccttgaaaagagaaattcgggag

SEQ ID NO: 222770 - DNA, 201 bp, Homo sapiens
ggctttggcccctcctccgttttcccctgtggaccattccgcttcgcagcgttttcaaaaactggagcgaaagtgatgtgggcggggcaaaggcggcgggragaggagagcactgaagctggcgcgggaacttggtttcctggtggcctcccatccaatccccacgaaccagctttcctcttaaaccttgaaaagagaaat

SEQ ID NO: 222771 - DNA, 201 bp, Homo sapiens
ctgcgggacgggtggcgggaaggagggaggcgcggctggggagagcgctcgggagctgccgggcgctgcggaccccgtttagtcctaacctcaatcctgcsagggaggggacgcatcgtcctcctcgccttacagacgccgaaacggagggtcccattagggacgtgactggcgcgggcaacacacacagcagcgacagcc

SEQ ID NO: 222772 - DNA, 201 bp, Homo sapiens
gtttagtctctgattagcttttaaatttgatatgtgtaagtaagaaatgaaccagcttttactttgaaaccttcctcttctggaaggttttctggccctgyggtatacgcactaacagatctatacaggttgtttgtgatacagcttctatggattttctcaaaagctatgctgaggttgggtatggtggctcatgcctgt

SEQ ID NO: 222773 - DNA, 201 bp, Homo sapiens
gactgtaatagatgacctctaaggccatctcatgacatgtgtgattaatgtatgtacctgtcctctctttttgacaattctacagattattcaggacaggkagttgaccaactgcaaagagtgattgacaccatcaaaaccaaccctgacgacagaagaatcatcatgtgcgcttggaatccaagaggttgaaagaacccc

SEQ ID NO: 222774 - DNA, 201 bp, Homo sapiens
ggaatttttttttttttttttttttaatgcacagaaagtttccctggacacactacccagtttcccccagtgataatatcttgggtaacatcctgtatacwttcacattggtgcattcctcagagttgtcagattttgctagttttacgtgcacttgtgtatgtgtgtatttgcaattttagcacgtgtagactcttgtaa

SEQ ID NO: 222775 - DNA, 201 bp, Homo sapiens
ggatcatactcctgtaaaatagaactttgttgatcacatcctgtgtacttgtttcacggacatgaggagcaattacaacaggtcgtacaattatggcaaartaatggccttattttgtttttagcttcagcgagaacccagacctttcccaaagctcaggattcttcgaaaagttgagaaaattgatgacttcaaagctga

SEQ ID NO: 222776 - DNA, 201 bp, Homo sapiens
ttgcgctccaatcatgttacataacctacggcaaggtatcgacaggatcatactcctgtaaaatagaactttgttgatcacatcctgtgtacttgtttcayggacatgaggagcaattacaacaggtcgtacaattatggcaaaataatggccttattttgtttttagcttcagcgagaacccagacctttcccaaagctc

SEQ ID NO: 222777 - DNA, 201 bp, Homo sapiens
ggttagatccaggttttaaaagttactcctttgagggagtttggctgcttttgagtggaggtgacttcaggcttattctctctggctctctgctctggtcrtttttagacatagtaataggttgtgacctgtcttcacatcctaattgccactgtctgttcatcccaggaatcctggctttcatccctttctgttcactgt

SEQ ID NO: 222778 - DNA, 201 bp, Homo sapiens
taaaaatgtaagttcatctgcttcatgagccttaaggaaaaaaactcagaaccagacactttttagccccttccaggttagatccaggttttaaaagttaytcctttgagggagtttggctgcttttgagtggaggtgacttcaggcttattctctctggctctctgctctggtcgtttttagacatagtaataggttgtg

SEQ ID NO: 222779 - DNA, 201 bp, Homo sapiens
ctctgattagcttttaaatttgatatgtgtaagtaagaaatgaaccagcttttactttgaaaccttcctcttctggaaggttttctggccctgtggtataygcactaacagatctatacaggttgtttgtgatacagcttctatggattttctcaaaagctatgctgaggttgggtatggtggctcatgcctgtaatccca

SEQ ID NO: 222780 - DNA, 201 bp, Homo sapiens
ccaggctcctgatgctgtgtaatgtcacaaaatacccctcactctcgatctgtgcaagagaacagctggttgcgctccaatcatgttacataacctacggsaaggtatcgacaggatcatactcctgtaaaatagaactttgttgatcacatcctgtgtacttgtttcacggacatgaggagcaattacaacaggtcgtac

SEQ ID NO: 222781 - DNA, 201 bp, Homo sapiens
accaggctcctgatgctgtgtaatgtcacaaaatacccctcactctcgatctgtgcaagagaacagctggttgcgctccaatcatgttacataacctacgscaaggtatcgacaggatcatactcctgtaaaatagaactttgttgatcacatcctgtgtacttgtttcacggacatgaggagcaattacaacaggtcgta

SEQ ID NO: 222782 - DNA, 201 bp, Homo sapiens
tgcaattttagcacgtgtagactcttgtaaccactacaatcaagttacagaactacactaccaaggttcatctttttaaaatctttgatgttacctttttyggaacagtgaccatgagaggactttcctcccaaaattttgagaactactgaaccagaatatagtctgacactaataggtagaaatttaaccaaaggagat

SEQ ID NO: 222783 - DNA, 201 bp, Homo sapiens
agttacagaactacactaccaaggttcatctttttaaaatctttgatgttacctttttcggaacagtgaccatgagaggactttcctcccaaaattttgaraactactgaaccagaatatagtctgacactaataggtagaaatttaaccaaaggagattatgaagctctgcacttcagttaacaaatcacttctcagctt

SEQ ID NO: 222784 - DNA, 201 bp, Homo sapiens
ctaatttttgtattattagtagagatggggtttcatcatgttggccaggctagtctcaaactcctgacttcaagtgatccacctgcctcagcctccgaaarttctggaattacaggcataagccaccaccctggccataaatattttttgttaattttacattaagtacaatatttaggtccaaacttcaaaagtctgttg

SEQ ID NO: 222785 - DNA, 201 bp, Homo sapiens
agtattcaattatttcttgtcgcttaaaaggcctaataaaattatggttttagtttacagtggtatgaatgcttagctgttggattttagtaggaaagttygtccctttttgtttttaattttgttttacagattcacaggaatttttttttttttttttttttaatgcacagaaagtttccctggacacactacccagtt

SEQ ID NO: 222786 - DNA, 201 bp, Homo sapiens
acacccagctaatttttgtattattagtagagatggggtttcatcatgttggccaggctagtctcaaactcctgacttcaagtgatccacctgcctcagcytccgaaaattctggaattacaggcataagccaccaccctggccataaatattttttgttaattttacattaagtacaatatttaggtccaaacttcaaaa

SEQ ID NO: 222787 - DNA, 201 bp, Homo sapiens
cagcaaccatgggcacttaacatgtcaggtgctgtgaggtactaagcaccagtaccagagagggaagagccacattcaagccaggggattgtccaaaaggrggcattttaactcattttaacttgaaggagaattgaagtgcaaatgtttttccttttcttttttttttgagatggagtctttctctgtcggccaggctgg

SEQ ID NO: 222788 - DNA, 201 bp, Homo sapiens
ccgtaggatgtgaggccagtccccgggcttaatgatgctttaaatcctgcctagtattcaattatttcttgtcgcttaaaaggcctaataaaattatggtyttagtttacagtggtatgaatgcttagctgttggattttagtaggaaagtttgtccctttttgtttttaattttgttttacagattcacaggaatttttt

SEQ ID NO: 222789 - DNA, 201 bp, Homo sapiens
agatgactgctccaaatgtggggcttcagtttagggagaagtggtgggcaggtgggcaggacaaggcaggcatctgcctcagcaaccatgggcacttaacwtgtcaggtgctgtgaggtactaagcaccagtaccagagagggaagagccacattcaagccaggggattgtccaaaagggggcattttaactcattttaac

SEQ ID NO: 222790 - DNA, 201 bp, Homo sapiens
acctgaatcacatcgagccactgaaaattcaggtaagaattagatgttatacttttgggtttggtaccttctcttgataaaaggttgactgtggaacaggyatctgctcaatgctgtgtccaagataaagatgactgctccaaatgtggggcttcagtttagggagaagtggtgggcaggtgggcaggacaaggcaggcat

SEQ ID NO: 222791 - DNA, 201 bp, Homo sapiens
gatctatacaggttgtttgtgatacagcttctatggattttctcaaaagctatgctgaggttgggtatggtggctcatgcctgtaatcccagcactttggragactgagacaggagcaattgcttgaggtctggagttcaataccagcctgggcaacataacaagatgctgttgctacaaaaaaatggaaaagctacacta

SEQ ID NO: 222792 - DNA, 201 bp, Homo sapiens
cttttactttgaaaccttcctcttctggaaggttttctggccctgtggtatacgcactaacagatctatacaggttgtttgtgatacagcttctatggatyttctcaaaagctatgctgaggttgggtatggtggctcatgcctgtaatcccagcactttgggagactgagacaggagcaattgcttgaggtctggagttc

SEQ ID NO: 222793 - DNA, 201 bp, Homo sapiens
ccagcctaccacactgagctcttcagttctttaatatgggaaaacaaattgcagagtttagtctctgattagcttttaaatttgatatgtgtaagtaagamatgaaccagcttttactttgaaaccttcctcttctggaaggttttctggccctgtggtatacgcactaacagatctatacaggttgtttgtgatacagct

SEQ ID NO: 222794 - DNA, 201 bp, Homo sapiens
tgagttcccattcctcagccccagagctgggaccacaggcgcgcgaatttttgtatttttagcagagacggggtttcactatgttggccaggctagtctcraactcaagttggcctcaagtgatctgcccaccctggcgtcccagtgttgggatttcaggcatgagccactgtgcctggccatgtaatagagacttttaat

SEQ ID NO: 222795 - DNA, 201 bp, Homo sapiens
acctgtccctaggaaaagcagatgccaccttggaatgtggggtttgtgtgtgcaatttactagctgggcagagaccagcaacctggagagcaggtgtctcrtctaaggggacagtcacatttcacctccagccacctggaggaatttgggcctggtgatgtcagaattcttcaataaaagcctaaaatctatattttatgt

SEQ ID NO: 222796 - DNA, 201 bp, Homo sapiens
caggtgcttgcaaaaatctctctgttgtctgaatataaactgtaccacaagcgagtgcggatgaacgaggactgcatttaaagataagtttttacactttyatttctctgtggctcgacacttctgatgcctccctttttgttcctgggacacatgcttggtgttgtcttcacacctttgtgacaggattagcactagtgg

SEQ ID NO: 222797 - DNA, 201 bp, Homo sapiens
ttaactcattttaacttgaaggagaattgaagtgcaaatgtttttccttttcttttttttttgagatggagtctttctctgtcggccaggctggagtgtgycgtggtgcgatctcagctcactgcaacctccacctcccgggttcaagcaattcttctgcctcagcctcccaggtagctgggattacaggcacatgccacc

SEQ ID NO: 222798 - DNA, 201 bp, Homo sapiens
tggaagtgttggaaacatgctgctgaggtgatagaaaggaatccatggtcctctgttagttggaaagtatatggaatactatattctacataagatacaayactctctgtgagacaaggataaagtagattttgtcagtgaaattgtgacaagaatcgctgatgggtttagagcctaagtttgcgaggagcactggaagaa

SEQ ID NO: 222799 - DNA, 201 bp, Homo sapiens
acatgggcctcggtgtgcctttcaacatcgccagctacgccctgctcacgtacatgattgcgcacatcacgggcctgaaggtgggctgtctcgggaagggygacttgccagcctaccacactgagctcttcagttctttaatatgggaaaacaaattgcagagtttagtctctgattagcttttaaatttgatatgtgtaa

SEQ ID NO: 222800 - DNA, 201 bp, Homo sapiens
gctctgcacttcagttaacaaatcacttctcagcttccagttccatctcagaaggaaggaaagggattaaaatccagagaccagaaatgggagcaaagtayaaggtggtgtaatcattacagaggtttcctgatgtttccaagtcagtcgtgtgttgagctgctaaactctaaagtaattttaggtggaagtgttggaaac

SEQ ID NO: 222801 - DNA, 201 bp, Homo sapiens
cttggcttcttcctttgagtctctactccactcgggcaagccttcctagacctcctgatttaaaactgtgactctcccccaacctccttggtgtttctccrtagacgaacatcaccatctgatgtatgtcagcctttcccttcccctgttagaagggggacagcaggtagtaaaagtgaaatgtgctgtaagctttatgag

SEQ ID NO: 222802 - DNA, 201 bp, Homo sapiens
gaatacttaaaagcacttggaggtgtttagcctaaaaagcttagttgaggggaatggaagaaaagatctgggagggtggttccaaagaagggatcagactrtcctaaagccctcaggaatctgggctgggaccagcctacttaaagataggatgggcagctgggtgtggtggctcacgcctgtaatcccagcacttcggga

SEQ ID NO: 222803 - DNA, 201 bp, Homo sapiens
gtggtggctcacgcctgtaatcccagcacttcgggaggccgaagtgggcggatcacctgaggtcaggagttcgaggccagcctgaccaacatggagaaacrctgtctctactaaaaatacaaaattagctgggtgtagtggcgcatgcctgtaatcccagctactcgggaggctgaggcaggggaatcgcttgaacctggg

SEQ ID NO: 222804 - DNA, 201 bp, Homo sapiens
ctctactaaaaatacaaaattagctgggtgtagtggcgcatgcctgtaatcccagctactcgggaggctgaggcaggggaatcgcttgaacctgggaggtrgagggtgccgtgagccacgatcgcgccattgcactccagcctgggcaacaagagcgaaactctcaaaaaacaaaaaaaaggatgggttccatatgggtgg

SEQ ID NO: 222805 - DNA, 201 bp, Homo sapiens
gttccatatgggtggtgtcaagtgcccacctcctagcaagtcagcaggggccagaggcccttgtaagtggtgtctcggggggatcaactgagatggcttargatttacctggatgcctgctctgctctccccatctcttccagggatccacaaatgctaaagagctgtcttccaagggagtgaaaatctgggatgccaatg

SEQ ID NO: 222806 - DNA, 201 bp, Homo sapiens
tttgttttacagattcacaggaatttttttttttttttttttttaatgcacagaaagtttccctggacacactacccagtttcccccagtgataatatctkgggtaacatcctgtatacattcacattggtgcattcctcagagttgtcagattttgctagttttacgtgcacttgtgtatgtgtgtatttgcaattttag

SEQ ID NO: 222807 - DNA, 201 bp, Homo sapiens
tttaatgcacagaaagtttccctggacacactacccagtttcccccagtgataatatcttgggtaacatcctgtatacattcacattggtgcattcctcaragttgtcagattttgctagttttacgtgcacttgtgtatgtgtgtatttgcaattttagcacgtgtagactcttgtaaccactacaatcaagttacagaa

SEQ ID NO: 222808 - DNA, 201 bp, Homo sapiens
atttaaaaacaacaacaacaacaaaactctatcaggatatcataagtacttagagtgaaatacttgcatctgtaatagagacttattttttttttttttttgagacacagtctcaccctgttgcccaggctggagtgcagtggtgtgatctccgctcacggcaacctccatctcccaggttcaagtgagttcccattcctc

SEQ ID NO: 222809 - DNA, 201 bp, Homo sapiens
ttttttttttttttttgagacacagtctcaccctgttgcccaggctggagtgcagtggtgtgatctccgctcacggcaacctccatctcccaggttcaagygagttcccattcctcagccccagagctgggaccacaggcgcgcgaatttttgtatttttagcagagacggggtttcactatgttggccaggctagtctcg

SEQ ID NO: 222810 - DNA, 201 bp, Homo sapiens
tatttaaaaacaacaacaacaacaaaactctatcaggatatcataagtacttagagtgaaatacttgcatctgtaatagagacttattttttttttttttttgagacacagtctcaccctgttgcccaggctggagtgcagtggtgtgatctccgctcacggcaacctccatctcccaggttcaagtgagttcccattcct

SEQ ID NO: 222811 - DNA, 201 bp, Homo sapiens
acacctgtaattccaacaactccagaggccaaggcgagaggatcatttgaacccaggaatttgaggctgtagtgagtcatgatcacgccattgcactccakcctgggcaacagagtgagaccctgaatatttaaaaacaacaacaacaacaaaactctatcaggatatcataagtacttagagtgaaatacttgcatctgt

SEQ ID NO: 222812 - DNA, 201 bp, Homo sapiens
ttggtcaggctggtcttgaactcctgacctcagatgatctgcctgcctcagcctcccaaccagatgatcttaatttgtgtatttatactcattcttacacmaaaaagggttttaaattgcctagaaactacatgtaagatgttaacattttaaatggaagcagatgaagttccagctcgctgccacctcactaacattttt

SEQ ID NO: 222813 - DNA, 201 bp, Homo sapiens
ttttagtagagacggggtttcaccatgttggtcaggctggtcttgaactcctgacctcagatgatctgcctgcctcagcctcccaaccagatgatcttaakttgtgtatttatactcattcttacaccaaaaagggttttaaattgcctagaaactacatgtaagatgttaacattttaaatggaagcagatgaagttcca

SEQ ID NO: 222814 - DNA, 201 bp, Homo sapiens; identical to SEQ ID NO: 40993

SEQ ID NO: 222815 - DNA, 201 bp, Homo sapiens; identical to SEQ ID NO: 40995

SEQ ID NO: 222816 - DNA, 201 bp, Homo sapiens; identical to SEQ ID NO: 40996

SEQ ID NO: 222817 - DNA, 201 bp, Homo sapiens; identical to SEQ ID NO: 40998

SEQ ID NO: 222818 - DNA, 201 bp, Homo sapiens
agtaggaaagtttgtccctttttgtttttaattttgttttacagattcacaggaatttttttttttttttttttttaatgcacagaaagtttccctggacwcactacccagtttcccccagtgataatatcttgggtaacatcctgtatacattcacattggtgcattcctcagagttgtcagattttgctagttttacgt

SEQ ID NO: 222819 - DNA, 201 bp, Homo sapiens; identical to SEQ ID NO: 41002

SEQ ID NO: 222820 - DNA, 201 bp, Homo sapiens
gcacacaaaaatggcaagtttaatattatgtgtactttatcacaatgaaaaaagctgctgcgtgggccaagttacttgtgcaggtaagtgttctgcaggtsgttgcctgcacctcagttgtagggtgtccgtaggatgtgaggccagtccccgggcttaatgatgctttaaatcctgcctagtattcaattatttcttgtc

SEQ ID NO: 222821 - DNA, 201 bp, Homo sapiens
atggtgatggtgatggtgatggtgatggtgatggtgatggtgatggtgatggtgatggagatggtgatggtgatggtgatggagatggtgatggtgatggwgatggtgatggtgatggtgatggtgatggtgatggtgatggagatgggtgatggtgatggttgcctaacatcaggaacgtgcttaatgcttctgaattgc

SEQ ID NO: 222822 - DNA, 201 bp, Homo sapiens
atggtgatggtgatggagatggtgatggtgatggtgatggtgatggtgatggtgatggtgatggtgatggtgatggtgatggtgatggtgatggtgatggwgatggtgatggtgatggtgatggagatggtgatggtgatggagatggtgatggtgatggtgatggtgatggtgatggtgatggagatgggtgatggtgat

SEQ ID NO: 222823 - DNA, 201 bp, Homo sapiens
gatccacaaatgctaaagagctgtcttccaagggagtgaaaatctgggatgccaatggatcccgagactttttggacagcctgggattctccaccagagargaaggggacttgggcccagtttatggcttccagtggaggcattttggggcagaatacagagatatggaatcaggtgaggagatagaacaatgccttccat

SEQ ID NO: 222824 - DNA, 201 bp, Homo sapiens
aaagttcgggagatggtgatggagatggagatggtgatggtgatggtgatggtgatggtgatggtgatggtgatggagatggagatggtgatggtgatggwgatggtgatggtgatggtgatggtgatggtgatggtgatggtgatggtgatggtgatggtgatggtgatggtgatggtgatggagatggtgatggtgatg

SEQ ID NO: 222825 - DNA, 201 bp, Homo sapiens
ggagaaagaatgaaacatctcactcctggacttccactttcctgtcactgttggtgtcacctcttactggatgtcacagagcccagcccctcccacctgtscctaggaaaagcagatgccaccttggaatgtggggtttgtgtgtgcaatttactagctgggcagagaccagcaacctggagagcaggtgtctcatctaag

SEQ ID NO: 222826 - DNA, 201 bp, Homo sapiens; identical to SEQ ID NO: 41000

SEQ ID NO: 222827 - DNA, 201 bp, Homo sapiens
gacaagggacaaaatgcccccattgctttgttgtggctttaatctccctttcgaggctgagccacagcgtgctgtaggtggcgctgctgtgaagcgcagtrccagggtcacactccactcccagctctgcagaggtggagaaagaatgaaacatctcactcctggacttccactttcctgtcactgttggtgtcacctctt

SEQ ID NO: 222828 - DNA, 201 bp, Homo sapiens
ctagcaagtcagcaggggccagaggcccttgtaagtggtgtctcggggggatcaactgagatggcttaggatttacctggatgcctgctctgctctccccrtctcttccagggatccacaaatgctaaagagctgtcttccaagggagtgaaaatctgggatgccaatggatcccgagactttttggacagcctgggattc

SEQ ID NO: 222829 - DNA, 201 bp, Homo sapiens
tgtaagtggtgtctcggggggatcaactgagatggcttaggatttacctggatgcctgctctgctctccccatctcttccagggatccacaaatgctaaasagctgtcttccaagggagtgaaaatctgggatgccaatggatcccgagactttttggacagcctgggattctccaccagagaagaaggggacttgggccc

SEQ ID NO: 222830 - DNA, 201 bp, Homo sapiens
cctagcatgtgtttgctccgttgttttagataaggtctgggggatgagtcaatgtcacaggagctgatgtatagctttgaccttgtgaggggtggtgccakgttaagccacaattaagcctcatgaaggccgtttcacactcttttttttttttttttttaattattatactttaagttttagggtacatgtgcacaatgt

SEQ ID NO: 222831 - DNA, 201 bp, Homo sapiens; identical to SEQ ID NO: 41014

SEQ ID NO: 222832 - DNA, 201 bp, Homo sapiens; identical to SEQ ID NO: 41015

SEQ ID NO: 222833 - DNA, 201 bp, Homo sapiens
ctgtaatagagacttattttttttttttttttgagacacagtctcaccctgttgcccaggctggagtgcagtggtgtgatctccgctcacggcaacctccwtctcccaggttcaagtgagttcccattcctcagccccagagctgggaccacaggcgcgcgaatttttgtatttttagcagagacggggtttcactatgtt

SEQ ID NO: 222834 - DNA, 201 bp, Homo sapiens; identical to SEQ ID NO: 41024

SEQ ID NO: 222835 - DNA, 201 bp, Homo sapiens
ttaatatcttaatctcccatcagtgctcagcaattactctgtcttttttttcctgcttcatttttccttcagaactatactttgtatagtattaataaaawtggatcaatctgtattacaattagcaggtatacacatcctccatatatcagtgcagatctttaaagttttgcatgtgttttattttcctttttttttttt

SEQ ID NO: 222836 - DNA, 201 bp, Homo sapiens
cttaatatcttaatctcccatcagtgctcagcaattactctgtcttttttttcctgcttcatttttccttcagaactatactttgtatagtattaataaaaatggatcaatctgtattacaattagcaggtatacacatcctccatatatcagtgcagatctttaaagttttgcatgtgttttattttccttttttttttt

SEQ ID NO: 222837 - DNA, 201 bp, Homo sapiens
tcttaatatcttaatctcccatcagtgctcagcaattactctgtcttttttttcctgcttcatttttccttcagaactatactttgtatagtattaataaaaatggatcaatctgtattacaattagcaggtatacacatcctccatatatcagtgcagatctttaaagttttgcatgtgttttattttcctttttttttt

SEQ ID NO: 222838 - DNA, 201 bp, Homo sapiens
aattccagttgtgttttgggcagattccattgggttttctgtgtacataaacgtgttatctgcaaataatgacaattttacttctcccttttcaatattcrtgactttcagatttcttaaactttattgacatataattgataagcaaatgacttcttttttttgagacagagtcttgctttgtcgcccaggctggagtgt

SEQ ID NO: 222839 - DNA, 201 bp, Homo sapiens
ctcttaatatcttaatctcccatcagtgctcagcaattactctgtcttttttttcctgcttcatttttccttcagaactatactttgtatagtattaataaaaatggatcaatctgtattacaattagcaggtatacacatcctccatatatcagtgcagatctttaaagttttgcatgtgttttattttccttttttttt

SEQ ID NO: 222840 - DNA, 201 bp, Homo sapiens
acccggccaaaatacagttgatttttctaagtttattttcattctttattcttgtaagcaattcacttactaattccagttgtgttttgggcagattccaytgggttttctgtgtacataaacgtgttatctgcaaataatgacaattttacttctcccttttcaatattcgtgactttcagatttcttaaactttattga

SEQ ID NO: 222841 - DNA, 201 bp, Homo sapiens
actcttaatatcttaatctcccatcagtgctcagcaattactctgtcttttttttcctgcttcatttttccttcagaactatactttgtatagtattaataaaaatggatcaatctgtattacaattagcaggtatacacatcctccatatatcagtgcagatctttaaagttttgcatgtgttttattttcctttttttt

SEQ ID NO: 222842 - DNA, 201 bp, Homo sapiens; identical to SEQ ID NO: 41031

SEQ ID NO: 222843 - DNA, 201 bp, Homo sapiens
atactcttaatatcttaatctcccatcagtgctcagcaattactctgtcttttttttcctgcttcatttttccttcagaactatactttgtatagtattaataaaaatggatcaatctgtattacaattagcaggtatacacatcctccatatatcagtgcagatctttaaagttttgcatgtgttttattttcctttttt

SEQ ID NO: 222844 - DNA, 201 bp, Homo sapiens
gtgagctgagatcatgccactgcactccagcctggccaacagagcgagactctgtctcaaaaataaacaaataaataaataaataaataaccctacagtgrcctctaagtgttcaagagaaaggaagagtttcatgtcttttactttcaacagaaagctagaaatgattaagcttagtaaagaaggcctgtgtaaagccaa

SEQ ID NO: 222845 - DNA, 201 bp, Homo sapiens
tttgctgcatgaatgaatcattttgcaaggttttgtaaaggaatttcattaaatttatataactataattgcatctttatagtaatttttcaagtccagarcttgtcatgtcttccagtttatttaggtgctttttttaaaaatatccttaagtaaagctttattctctcattaaagtattacatttttcttgttatgctt

SEQ ID NO: 222846 - DNA, 201 bp, Homo sapiens
tgggattacaagcgtgagccactgcacccagctgtggtgtttttgaaatgtcattttccaattgcttgctagtatataaaaataaagttaatttttataaytgactttgtatcctgtgactttatttcatatattaatttcttaggatattgttaggtatacatgtcatctgcaaataaggacagttttatttcttccttt

SEQ ID NO: 222847 - DNA, 201 bp, Homo sapiens
tgcccaggctagagtgcaatggcgcgatctcggctcgctgcaacctctgcctcccgggttaaagcaattctcttgcctgagctgggattacaggcgcccascaccacgcccagctaacttttgtatttttagtagagatggggtttctccatgttggtcaggctggtctcgaactcccgacctcaggtgatccgcccacct

SEQ ID NO: 222848 - DNA, 201 bp, Homo sapiens
gtacttccttatttatttaggtctctgtttttctcttagcagagttgtagtttttaaacatagaggttttgcatgagtggttttttttttgagacagggtytcactctcacgtatgccggagcacagtggcatggtcatggctcgctgcagctttaaactcccagcctcaagcagtccttccatctcagccttccaagtag

SEQ ID NO: 222849 - DNA, 201 bp, Homo sapiens
attgattattagattgtgttcagcttgtacagtggtggttaaatgtcttttgtttgtctttgaaacaggatgatgattggggaaacatcaaaataaaaaaygtaagtattatcttatgaacgtttattataatgcagtaacctcattatgataccaaaatacattccagatgactttttttcatgtgtatatccagttgtt

SEQ ID NO: 222850 - DNA, 201 bp, Homo sapiens
gttttttagtacttgctaaaagtatttttttatacttatgtgttttttagtatttgatgctgtaaatacaggttactgccttttgtattgtgttaccttaygcagttgaagcaaattatttgaaaccctggctttagtaccacttgtgtttaaaaaaaatttttgtttttttttgagatggagccttgttctgttgcccag

SEQ ID NO: 222851 - DNA, 201 bp, Homo sapiens
tgtacatgcatttgtatgttgaaattcaaagcacttcagcatttttaccaaagccctggttctggaaaactgttcattttttttttttggcctttattgcwtcctacccattaacgaagagctgtttttctttttctttttttttgagacgagtcttgccctgttgcccatgctggagtgcagtggtgctatcttggctca

SEQ ID NO: 222852 - DNA, 201 bp, Homo sapiens
gagtgcagtggcgccatctcggctaactgcaaccaccgcctcccgggctcaagtgactgtcctgcctcagtctcccgaatagctgggataacaggtcaccrccaccatgcgtgacaaatgtttgtatttttggtagagacagtgtttcaccatgttggcgctggtctcgaactcctgacctcaagtgatatgcctgcctcg

SEQ ID NO: 222853 - DNA, 201 bp, Homo sapiens
agtagtattgttttgttttgctttctttagcatcttaattgagatataattaatttattatacaattcagcattttaaagtgtttaatgctttttatagtrtttacaagtttgtgcaaccatcaccaccatcgattttaggacattttccgccccctccaaaagcagtgtcgtactcactggcagtcactcctttaacccc

SEQ ID NO: 222854 - DNA, 201 bp, Homo sapiens; identical to SEQ ID NO: 41035

SEQ ID NO: 222855 - DNA, 201 bp, Homo sapiens
cagaaaagacaagaagatatctattattattattattttttttgggattgagtctccctctgtcactcaggggctggagtgcagtggcgccatctcggctmactgcaaccaccgcctcccgggctcaagtgactgtcctgcctcagtctcccgaatagctgggataacaggtcaccaccaccatgcgtgacaaatgtttgt

SEQ ID NO: 222856 - DNA, 201 bp, Homo sapiens; identical to SEQ ID NO: 41036

SEQ ID NO: 222857 - DNA, 201 bp, Homo sapiens; identical to SEQ ID NO: 41037

SEQ ID NO: 222858 - DNA, 201 bp, Homo sapiens; identical to SEQ ID NO: 41038

SEQ ID NO: 222859 - DNA, 201 bp, Homo sapiens
acatgactttgttctaaaagcatcatttaaattttattttaaaatgtgttgtattaccagatacctctgtgggtcaggagagtggaacactttacagttayctgtattgtgtgaattttttttcctatgaggatgtattaaaagtattagttttattttgtttagactaaaatgaaaccaattaatatttccttagtaatt

SEQ ID NO: 222860 - DNA, 201 bp, Homo sapiens
atcatcctaaaattctataaattactcctcaaaagacagtatcacatggccgtatctgttgtattggagactggcaagccccagctctcaatatacacagygttaacagttactaggttgctgattttctttcattttttttttcttattttttatttatttattttcgagacagagtctcactccctcacccaggctgca

SEQ ID NO: 222861 - DNA, 201 bp, Homo sapiens
aaacaaaaaaccaaaaattagccaggcatggtggtgtgtgcctgtagtcccagctactcagaggctgaggtgggagattgcttgagcctgggaggtcgagyctgcagtgagccatcagtgtgccactgcactccaggctgggtaatagagtgaggccctgtctcaaaaaataaaataaaataaaaagagagtgggatgtat

SEQ ID NO: 222862 - DNA, 201 bp, Homo sapiens
cgagaggtgttttacagctggagatgaggaagaccatcctcacaaatacttagcagaacttgtctttggcaggttctatagagtgggaggtatgggtcccragtgtgatggctcacgcctgtaatcccagtactttgggaggccgaggcaggtatctcacttgagcttaggaatttgagactagcctcggcaacgtggcaa

SEQ ID NO: 222863 - DNA, 201 bp, Homo sapiens
taatagttagcctaatagtagactatattcctgatacattcgtattctttcaatatatagcgctgaatttaatttgctggaacattttaaaaggatttttkggggtcatttgttagtaagactgatttatagcattctgtctccctctggcttttttttttttttttttcctttgtgagggtttggtgttacagttatgct

SEQ ID NO: 222864 - DNA, 201 bp, Homo sapiens
tcatttctggaccctggattcttttccatttatatatatgtctatccttatgtcagtcagtactggtttcaaaaaagaaagaacattttgtttttataccrtcgtatgaaaggaaaagagtaaagaattaattacaaatgttttgagaacctgtaaaatggtctacaaataagggccctttcttccggtgagtataagtgt

SEQ ID NO: 222865 - DNA, 201 bp, Homo sapiens
tttcaactgcagatttccaagtgattttcacagattttattttcaactgtatctgaattatgaaagcattacttcagatatgtgatactttaaataaatayctttataaatgtgtttacacatgttttttgtttgtttgtatataggatgttaaatttcctcttatgttggatatgtatgaactgtgtacaccagaacttc

SEQ ID NO: 222866 - DNA, 201 bp, Homo sapiens
gcagccaaatacagtaggttcttactgctgactttatactcttaatatcttaatctcccatcagtgctcagcaattactctgtcttttttttcctgcttcrtttttccttcagaactatactttgtatagtattaataaaaatggatcaatctgtattacaattagcaggtatacacatcctccatatatcagtgcagatc

SEQ ID NO: 222867 - DNA, 201 bp, Homo sapiens
tgaactttagagttattcttgttacttagcttgagaaggcacatgtctattcattgtctaatattaatggatttacatctttctttagatattggctccartaattgtggatactatgacttacaagcagtactaacacaccagggaaggtctagttcttcaggtcattatgtatcatgggtgaaaaggaaacaaggtaaa

SEQ ID NO: 222868 - DNA, 201 bp, Homo sapiens
gtaaaacttaggtttcctacatttaccatacttactggaacatagttcgaaatataaacatcagtcttctctagttcatgccacggctgtctcttgcctgragccgcacagtagtcttaactgatcatctggcttctgcctttgcccctttgcagtttctctacacagcccgcaatgtcctttttaaaatgacgataggat

SEQ ID NO: 222869 - DNA, 201 bp, Homo sapiens
cagaatgtaattttgtacatgcatttgtatgttgaaattcaaagcacttcagcatttttaccaaagccctggttctggaaaactgttcatttttttttttkggcctttattgcatcctacccattaacgaagagctgtttttctttttctttttttttgagacgagtcttgccctgttgcccatgctggagtgcagtggtg

SEQ ID NO: 222870 - DNA, 201 bp, Homo sapiens
ttgcaacagaaattggaagcaatagaggatgattctgttaaagaggtaattgaaatatatttgtgattatagactttcgttataccttgatttttttttttattttttttcccctcaaaggcttaaaataagttccatcttataggtagatgtgtatttaaatactttagatgctcaatctgtagtcagaatttggaagct

SEQ ID NO: 222871 - DNA, 201 bp, Homo sapiens
cctgggcaacggaccaagactccatctcaaaaaaaaaaaaaattaagtaagtttttgtttgtattaattaaaattaatttacagtcgcgtgtattaaatatgtgactgttttactaaggcaatgtttgctttgtctttaagcccttagagatttgtttgattccatggataaaacttcttccagtattccacctattattc

SEQ ID NO: 222872 - DNA, 201 bp, Homo sapiens
gcctgggcaacggaccaagactccatctcaaaaaaaaaaaaaattaagtaagtttttgtttgtattaattaaaattaatttacagtcgcgtgtattaaatatgtgactgttttactaaggcaatgtttgctttgtctttaagcccttagagatttgtttgattccatggataaaacttcttccagtattccacctattatt

SEQ ID NO: 222873 - DNA, 201 bp, Homo sapiens
atacaaaaaattagccgggaatggtggcgtgtgcctgtaatcccagctactctggaggctgaggcaggagaattgcttgaacccagaaggcggaggttgcrgtgagccgagatcgcgccactgcactccagcctgggcaacggaccaagactccatctcaaaaaaaaaaaaaattaagtaagtttttgtttgtattaatta

SEQ ID NO: 222874 - DNA, 201 bp, Homo sapiens
ttttgagaaggagtctcactctgcctccagactggagtgcagtggcacaatctcggctcactgcagcctccgcctcctgggttcaagtgattctcctaccwcagcctcctgagtagctgggactacaggcgcgtgtcacaacgcccagctagtttttgtatttttattagagacagggtttcatcatgttggccaggatgg

SEQ ID NO: 222875 - DNA, 201 bp, Homo sapiens
aatatatagcgctgaatttaatttgctggaacattttaaaaggattttttggggtcatttgttagtaagactgatttatagcattctgtctccctctggcytttttttttttttttttcctttgtgagggtttggtgttacagttatgctagctctatgtctatcttttcctggaacttttattttctttcatgtttttat

SEQ ID NO: 222876 - DNA, 201 bp, Homo sapiens
ttgttagatgaggctgttcaaatgttgacaaaagccactagaaagtctcttatcttttccttttagctcagttttgtttgttttttctttgtttttttttkgagaaggagtctcactctgcctccagactggagtgcagtggcacaatctcggctcactgcagcctccgcctcctgggttcaagtgattctcctacctcag

SEQ ID NO: 222877 - DNA, 201 bp, Homo sapiens
ctatttgttagatgaggctgttcaaatgttgacaaaagccactagaaagtctcttatcttttccttttagctcagttttgtttgttttttctttgtttttwttttgagaaggagtctcactctgcctccagactggagtgcagtggcacaatctcggctcactgcagcctccgcctcctgggttcaagtgattctcctacc

SEQ ID NO: 222878 - DNA, 201 bp, Homo sapiens
gacctcttgggctcaaggatcctcctgacttggcttcccgagcagctgggacctcaggcatgcaccactatgcccagctgattttttttttttttttttttaagtagagacaagagatggctatgttgctcaggctggtttcaaactcctggcctcaatcaatcctcccagctcagtctgccaaaatactgggattacagg

SEQ ID NO: 222879 - DNA, 201 bp, Homo sapiens
gcttgagcaattcttctgtctcagcctcccaagtagctggaattacaggtgtgtgccaccatgcctgactaatttttgtatttttagtagagacgggtttkgctatattgtcaaggctggtttcaaaatcctcacaagtcatctgcccgcctcagcctcccaaagtgctgggattacaggtgtgagccactgtgcctggct

SEQ ID NO: 222880 - DNA, 201 bp, Homo sapiens
gctcactgcagcctctgcctcccggcttgagcaattcttctgtctcagcctcccaagtagctggaattacaggtgtgtgccaccatgcctgactaattttkgtatttttagtagagacgggttttgctatattgtcaaggctggtttcaaaatcctcacaagtcatctgcccgcctcagcctcccaaagtgctgggattac

SEQ ID NO: 222881 - DNA, 201 bp, Homo sapiens
tattctagacctttgttggatatgtggtttgtgaatattttctcctagtctgtagcttatgttttcatcctcttaacctagggtcttttgcagaagaaagktttttttaatttttatgaaatccagtctatttttttctttagttgcttgtgctattggtgtcatatctaagaaagcattgccgggctcggcatggtggct

SEQ ID NO: 222882 - DNA, 201 bp, Homo sapiens
atctagtgttgtatactttaaatatatactactataagctattgaactatatcactattacttctatgtaaagttgtatttcaaataaaaaaaaaaaaccrtaagtttattccagtttgggagatccattattttcacagcagcttgtccaatatttctgagatgtttcttttctcaggtaaattttggtacttcctctgt

SEQ ID NO: 222883 - DNA, 201 bp, Homo sapiens
ttcactgaaatatttccagttaattaattttatccagtcttaatttttaccaccaaataattaaaacttgtatggtattttgatgtaatgggatttctttmcattttgtctcctcagtccaagatcagccggctgcctgcttacttgaccattcagatggttcgatttttttataaagagaaggaatctgtgaatgccaaa

SEQ ID NO: 222884 - DNA, 201 bp, Homo sapiens
catctgttaggttaacagaggtttctgtgttatgacttttttcaaatttaacaataattcattggtgctgattggcttttatgcataaaacgtaaagaacrggagtttcttgggctctcttaattttcctctagagtgaatattctgataataaacaggaatgacagctttgttatataaaatacaatataaaattctctg

SEQ ID NO: 222885 - DNA, 201 bp, Homo sapiens
gtcccatctgaggtcaaacaagtacttggccttcttgtttcagcttggtaaacaaataccattttagcaggaatgttagaactgttgttttaaaaaaaaawttctgctttttgttggttatttcactgtttaagatgaccccccaagcacagggctgagtgctgtctagtgtttctaggtgtgggaaggctgtgatgtgcc

SEQ ID NO: 222886 - DNA, 201 bp, Homo sapiens
aaatactttagatgctcaatctgtagtcagaatttggaagcttgcatacgacatttaaatttaatgtattatttattaaacttaattcattgttgattttkggtaatgttttttgaaggattttactgtaagggactacatttttaaaaaaatatgtattactaaactggattgtgtggaagaaaatctacattaatattt

SEQ ID NO: 222887 - DNA, 201 bp, Homo sapiens
taatctatatttcttcttgacctttttctttcaaactaatgaaatacttttgagatgctctgttgatggtatatactagatcttaaatcatctgttttttkgagtagtgtataaaatattgttaaaatgtaggcttttatttaaaaaaataattagcttggtagtgatgcccaaatttcagccttccctccaaaaatattt

SEQ ID NO: 222888 - DNA, 201 bp, Homo sapiens
attcactgccaggattacttactttgtctttttttacattacaggatgctaatgaatgttggatacaaatgatgcgagtattgcaacagaaattggaagcmatagaggatgattctgttaaagaggtaattgaaatatatttgtgattatagactttcgttataccttgatttttttttttattttttttcccctcaaagg

SEQ ID NO: 222889 - DNA, 201 bp, Homo sapiens
  misc_feature (1)...(201): n = A,T,C or G
tttgccgagaaaggtgaacaaggacagtatcttcaacaggtaattagggcaaggtatttttcattctgtaaatgtaaaacttaggtttcctacatttaccntacttactggaacatagttcgaaatataaacatcagtcttctctagttcatgccacggctgtctcttgcctggagccgcacagtagtcttaactgatcat

SEQ ID NO: 222890 - DNA, 201 bp, Homo sapiens
agcctggagtgtacattatacttaagttaaacaacttggtacttattttatcgtccagattataaatcaatgatgtctgtcgtttgtgaaaaataatcttyggatttttttggattaaattataattttggcttcaggtttgatttgtataatacatatctttggggttgactctggggatagccagcgacgggttttatc

SEQ ID NO: 222891 - DNA, 201 bp, Homo sapiens
ttttgtttagactaaaatgaaaccaattaatatttccttagtaattttctgtaatgaggttggaaaattttatctcagtttaaaaatgtggaacaatacasataggtttgttttcttaaaaaaactactacagaatgtaattttgtacatgcatttgtatgttgaaattcaaagcacttcagcatttttaccaaagccctg

SEQ ID NO: 222892 - DNA, 201 bp, Homo sapiens; identical to SEQ ID NO: 41040

SEQ ID NO: 222893 - DNA, 201 bp, Homo sapiens
ttggatacaaatgatgcgagtattgcaacagaaattggaagcaatagaggatgattctgttaaagaggtaattgaaatatatttgtgattatagactttcrttataccttgatttttttttttattttttttcccctcaaaggcttaaaataagttccatcttataggtagatgtgtatttaaatactttagatgctcaat

SEQ ID NO: 222894 - DNA, 201 bp, Homo sapiens
gctggcattgtcttcattaccattatagttttaaagaactttgtgctgtattcctagataagttatttttctcatgttgcatgctaaaatgagttgaagcrgtgagttcctcctaagagtccttgtctaatttaaatcatacctctttaatgtaggtaagtctttgctgaaaaatatttcagttcatttgtgctggcgtgg

SEQ ID NO: 222895 - DNA, 201 bp, Homo sapiens
atttatttgagactgagtcttgctctgtcgcccaggctggagtgcataggtacgatcccggctcagtgcaacctctgcctcctgggttcaagcaattctcrtgcctcagcgtcccgagtagctgggattacaggcgagtgccaccatgcctggctaatttttgtatttttattagacacagggtttcatcatgttggccag

SEQ ID NO: 222896 - DNA, 201 bp, Homo sapiens
ttgcctaaacataggcaggcacattttcaggagtttttacatttcaaatttaatttccttcatagatatagggctattcaaatgatctatttcatattgtrtttgtttttgtaaattgttttcccagaattgatccatttcataagcttatcaaatttgtatgtagaattgtttctagtatttattacccttttgatgtct

SEQ ID NO: 222897 - DNA, 201 bp, Homo sapiens
atatactactataagctattgaactatatcactattacttctatgtaaagttgtatttcaaataaaaaaaaaaaaccataagtttattccagtttgggagrtccattattttcacagcagcttgtccaatatttctgagatgtttcttttctcaggtaaattttggtacttcctctgtggttagttttgtgggttagagta

SEQ ID NO: 222898 - DNA, 201 bp, Homo sapiens
atttcttgaaggatatttattattttttcctaagaacatctttagcagagtctacctcattttcattcaccttataaagaattaatttcttatatgtcaargtgactgttaataataacttttaaaataaaaaaagaattttttaattttataaaagggtgtgtatcaactatacatgagattgaaccagttaataaaaca

SEQ ID NO: 222899 - DNA, 201 bp, Homo sapiens
agtaggttcttactgctgactttatactcttaatatcttaatctcccatcagtgctcagcaattactctgtcttttttttcctgcttcatttttccttcaraactatactttgtatagtattaataaaaatggatcaatctgtattacaattagcaggtatacacatcctccatatatcagtgcagatctttaaagttttg

SEQ ID NO: 222900 - DNA, 201 bp, Homo sapiens
tattaattaaaattaatttacagtcgcgtgtattaaatatgtgactgttttactaaggcaatgtttgctttgtctttaagcccttagagatttgtttgatyccatggataaaacttcttccagtattccacctattattctactgcagtttttgcacatggctttcccacagtttgccgagaaaggtgaacaaggacagta

SEQ ID NO: 222901 - DNA, 201 bp, Homo sapiens
gaaggtacagtatgaacctttggcctttagtgaacttcatagcctaatctatgctgaacactgtactagtggtatgctgtcgagaattatagaagtatgcraattaaatgaaactgtgactgctaatggttaccatttattgagtacttattttatgtcaggcttttattatattttctttaattctcagctgtatgttat

SEQ ID NO: 222902 - DNA, 201 bp, Homo sapiens
tagtaagactgatttatagcattctgtctccctctggcttttttttttttttttttcctttgtgagggtttggtgttacagttatgctagctctatgtctrtcttttcctggaacttttattttctttcatgtttttataggactgatctgttgttgaaagccttgcccatgaaattgtctgcactcagcttttttggggt

SEQ ID NO: 222903 - DNA, 201 bp, Homo sapiens
gtaaatggtacttgattcaaaatgagaattttagtgatttatatatgccatgtcattttgtaaaaatggtttaatgatttaatcctttttttttttttttyccaactagatggagttaccatgtggattgacaaaccttggtaacacttgttacatgaatgccacagttcagtgtattcgttctgtgcctgaactcaaaga

SEQ ID NO: 222904 - DNA, 201 bp, Homo sapiens
ccaacaattgtcaaagagtagatacacttaaaaatgtttaagcagctgggtgtggtggctcacacctgtaatcccagcactttgggaggccgaggctggcrgatcacaaggtcaggagttcgagaccagcctggccaacatggtgaaaccctgtctctactaaaaaaaatgcaaaaattagccaggcatggtggcatgctc

SEQ ID NO: 222905 - DNA, 201 bp, Homo sapiens
ttaacttacatatatttagctaatatctgtaataaatatgttcctggcagatagtactatataagtatttactattactattttatgagaaaacagggtcmaagagtagtttaaatgttgggatatttaaatttttaaaatccttcatgtggaaaatacatacattttatcctgaatttaaatgcaaaatcagtttagaaa

SEQ ID NO: 222906 - DNA, 201 bp, Homo sapiens
ggcagagtagcagaacaattacattatgcctgtttgtccctaaacagaggttatgtgttctttgtactgaattaaaacaccctgctttgtttgggaagacmaaggctggcaagaagaaagagagagggagggctcagaagttgtttacagctagtgattgctttgtaaggtcttctggtgagttaagatttaaaaaggatt

SEQ ID NO: 222907 - DNA, 201 bp, Homo sapiens
caaaaaaccaaaaattagccaggcatggtggtgtgtgcctgtagtcccagctactcagaggctgaggtgggagattgcttgagcctgggaggtcgagcctrcagtgagccatcagtgtgccactgcactccaggctgggtaatagagtgaggccctgtctcaaaaaataaaataaaataaaaagagagtgggatgtataat

SEQ ID NO: 222908 - DNA, 201 bp, Homo sapiens
gtcattaaatttaattgtaggtattcttaactgaactaatttcctaattttaatcatcatctggatatttttagtcttctggctatcatttttccctcccygtttttttttttttttaaatctccacttctggtcctaccttttactttgtctcatgtgttcatgccttccaattaagatactgagtaagagagtaagatg

SEQ ID NO: 222909 - DNA, 201 bp, Homo sapiens
aatccaagagaacagactagtccatgactgtgagattcatgctgctgagaggggtaagtggaaagaaggttttctgaagaaggtaaattcttagtagtttkggttcttagctgtccagtagagtcagctgtttaaggacccagatttaaatctccaggagttgagtagatgagaaccaactataggtttaaagggaggtaa

SEQ ID NO: 222910 - DNA, 201 bp, Homo sapiens
tattttatggctgaatagtatttcatggttcattcatgttacagcacacgtaacacctcattcctattttatggctgaatagtatttcatggttcattcaygttacagcacacgtaacacctcattcctattttatggctgaatagtatttcattttatggatatatcacattttatttatccattcattttgttgatgga

SEQ ID NO: 222911 - DNA, 201 bp, Homo sapiens
tattttttaaacattgtgttcagttttgttattcaggaacattttattgagcccctgctttgtgctaagatgctgtagtatttggtgggttcagtctgtayaatgatgataggtgacatttcacatcttgggtattaataaaacatacaagttgagataagctagaggaagagttttgctgtacatgaaggagggcaaggt

SEQ ID NO: 222912 - DNA, 201 bp, Homo sapiens
tattttatggctgaatagtatttcatggttcactcacgttacagcacacgtaacacctcattcctattttatggctgaatagtatttcatggttcattcaygttacagcacacgtaacacctcattcctattttatggctgaatagtatttcatggttcattcatgttacagcacacgtaacacctcattcctattttatg

SEQ ID NO: 222913 - DNA, 201 bp, Homo sapiens
aaaaagttttttttttttccttcttcaggattcagtttaagatcccacattgcatttagttgttatatcttattagtctcttttaatctatatttcttctkgacctttttctttcaaactaatgaaatacttttgagatgctctgttgatggtatatactagatcttaaatcatctgtttttttgagtagtgtataaaata

SEQ ID NO: 222914 - DNA, 201 bp, Homo sapiens
acacctcattcctattttatggctgaatagtatttcatggttcactcacgttacagcacacgtaacacctcattcctattttatggctgaatagtatttcwtggttcattcatgttacagcacacgtaacacctcattcctattttatggctgaatagtatttcatggttcattcatgttacagcacacgtaacacctcat

SEQ ID NO: 222915 - DNA, 201 bp, Homo sapiens
cctagtattgtccattaaaaaagttttttttttttccttcttcaggattcagtttaagatcccacattgcatttagttgttatatcttattagtctctttwaatctatatttcttcttgacctttttctttcaaactaatgaaatacttttgagatgctctgttgatggtatatactagatcttaaatcatctgttttttt

SEQ ID NO: 222916 - DNA, 201 bp, Homo sapiens
tattttatggctgaatagtatttcatggttcattcacgttacagcacacgtaacacctcattcctattttatggctgaatagtatttcatggttcactcaygttacagcacacgtaacacctcattcctattttatggctgaatagtatttcatggttcattcatgttacagcacacgtaacacctcattcctattttatg

SEQ ID NO: 222917 - DNA, 201 bp, Homo sapiens
cataaaacgtaaagaacgggagtttcttgggctctcttaattttcctctagagtgaatattctgataataaacaggaatgacagctttgttatataaaatrcaatataaaattctctgaatctaagcatcatttggggcatagctaaaaaagagcaaacagtatttacactcggaggaatccacaacaacgtaaattattt

SEQ ID NO: 222918 - DNA, 201 bp, Homo sapiens
ttcctattttatggctgaatagtatttcatggttcattcacgttacagcacacgtaacacctcattcctattttatggctgaatagtatttcatggttcaytcacgttacagcacacgtaacacctcattcctattttatggctgaatagtatttcatggttcattcatgttacagcacacgtaacacctcattcctattt

SEQ ID NO: 222919 - DNA, 201 bp, Homo sapiens
atgtgtgtgaggagaaatagtaatcttaaaggatagaaataactggtttcttcattgcataagagaatataacccccacctaattttggacattttaataytgttaaatctttgggttaggtcaatagggttttacagccatgcctttttttttactctctctctaacagctttattgatatagtgtacatatcataaaat

SEQ ID NO: 222920 - DNA, 201 bp, Homo sapiens
acacctcattcctattttatggctgaatagtatttcatggttcattcacgttacagcacacgtaacacctcattcctattttatggctgaatagtatttcwtggttcactcacgttacagcacacgtaacacctcattcctattttatggctgaatagtatttcatggttcattcatgttacagcacacgtaacacctcat

SEQ ID NO: 222921 - DNA, 201 bp, Homo sapiens
tgcaaaaaaggcaagactagtatgattattctcttattatatttaagaaggaaactaaaacataatatgatggccagcatgatccaagtaaactttttttkgggggaaataaaactgtttctttagcgtgaaggcagaatataaattggtagaagctagtaaatggtacttgattcaaaatgagaattttagtgatttata

SEQ ID NO: 222922 - DNA, 201 bp, Homo sapiens
aaaggtcattaaatttaattgtaggtattcttaactgaactaatttcctaattttaatcatcatctggatatttttagtcttctggctatcatttttcccyccctgtttttttttttttttaaatctccacttctggtcctaccttttactttgtctcatgtgttcatgccttccaattaagatactgagtaagagagtaa

SEQ ID NO: 222923 - DNA, 201 bp, Homo sapiens
ccagattataaatcaatgatgtctgtcgtttgtgaaaaataatctttggatttttttggattaaattataattttggcttcaggtttgatttgtataatayatatctttggggttgactctggggatagccagcgacgggttttatcataatccatgtatcattataaaagagggtcttagtgaatattggtgtaaagaag

SEQ ID NO: 222924 - DNA, 201 bp, Homo sapiens
ttagtaatagagaatttaatgctctaaaaatatttgtatttaaatgtaaacaatcactacagttacacaatagacattcacagaaataattttattagtgyttgtttgtttgtttgtttgttatattttttgagacggggtctccctctgtcgcgcaggctggaatgcaagtggtgtgatcacagctcaccacagcctcaa

SEQ ID NO: 222925 - DNA, 201 bp, Homo sapiens
caatgatcttataaaatgtctatgtagaaataaaaggtgatagaataaaggtcattaaatttaattgtaggtattcttaactgaactaatttcctaatttwaatcatcatctggatatttttagtcttctggctatcatttttccctccctgtttttttttttttttaaatctccacttctggtcctaccttttactttgt

SEQ ID NO: 222926 - DNA, 201 bp, Homo sapiens
tcagataagtgcaagaccagctccctcacctccttcaggtctcatggctccaaggccaaagccttaggctttccctgatgaccttattggaacagcacacktcccttcccctgatcacttactgtttccatcctgctttttttcgcttcataacccttatctctacttgaattttatatattcactgctattatgctgagt

SEQ ID NO: 222927 - DNA, 201 bp, Homo sapiens
cttgcctggagccgcacagtagtcttaactgatcatctggcttctgcctttgcccctttgcagtttctctacacagcccgcaatgtcctttttaaaatgamgataggattatgttggccccttgttcagtactccctagtgattttctaccgcagtcctaaatcctctagcccctggctttctctctgagttcatcactac

SEQ ID NO: 222928 - DNA, 201 bp, Homo sapiens
agttaattactgggtcatatgattactatatttaaccttttgaggaactgccagaattttccaaaggagtcccaccgttttacatttcccccagaagggtwtgagggttctgatttctctgtctccttaccagtacttagtattgtatgtctttttgactatagccatccaagaggtatgaagtgttatctcattgttgtc

SEQ ID NO: 222929 - DNA, 201 bp, Homo sapiens; identical to SEQ ID NO: 41025

SEQ ID NO: 222930 - DNA, 201 bp, Homo sapiens
tactcgggaggctgaggcaggtgggtcgcttgaacccgggagcagaggctgcagtgagccgagattgcaccactgcactccagcctgggtgacagagggakactgtgtctcaaaaaaaaaagagaaagggatgaagatttgcgttatatttgggttttttctttaaacatatgtgtagcagtgtatgtgtttttttataac

SEQ ID NO: 222931 - DNA, 201 bp, Homo sapiens
agtttattgcagtttatcttttaatacacatttattactcattgttgtttctagaattgttggtagccaaatgaacattcttaagtatgttgaaatgaatyttgggagactaaaaggttttaaatgccaatgaatgatactattaattttaatggaattaggataatgtattatattcaagagtatataacaaattgaata

SEQ ID NO: 222932 - DNA, 201 bp, Homo sapiens
acggaatcctacaggtcatgcttttcttttgttctggcttgtttcactcagtatctagcttggagatccattcatattattactgactagatcagtaattstgattgctccacaatcttgccgatattgggtgatactagttttttttaaattttgattttagtcactctaatgggtgtgtagtatgtacacatagtttaa

SEQ ID NO: 222933 - DNA, 201 bp, Homo sapiens; identical to SEQ ID NO: 41026

SEQ ID NO: 222934 - DNA, 201 bp, Homo sapiens; identical to SEQ ID NO: 41027

SEQ ID NO: 222935 - DNA, 201 bp, Homo sapiens; identical to SEQ ID NO: 41028

SEQ ID NO: 222936 - DNA, 201 bp, Homo sapiens; identical to SEQ ID NO: 41029

SEQ ID NO: 222937 - DNA, 201 bp, Homo sapiens; identical to SEQ ID NO: 41030

SEQ ID NO: 222938 - DNA, 201 bp, Homo sapiens; identical to SEQ ID NO: 41032

SEQ ID NO: 222939 - DNA, 201 bp, Homo sapiens
acacctcattcctattttatggctgaatagtatttcatggttcactcacgttacagcacacgtaacacctcattcctattttatggctgaatagtatttcwtggttcattcacgttacagcacacgtaacacctcattcctattttatggctgaatagtatttcatggttcactcacgttacagcacacgtaacacctcat

SEQ ID NO: 222940 - DNA, 201 bp, Homo sapiens
taatttgctggaacattttaaaaggattttttggggtcatttgttagtaagactgatttatagcattctgtctccctctggcttttttttttttttttttyctttgtgagggtttggtgttacagttatgctagctctatgtctatcttttcctggaacttttattttctttcatgtttttataggactgatctgttgttg

SEQ ID NO: 222941 - DNA, 201 bp, Homo sapiens
tttgcaatgatcttataaaatgtctatgtagaaataaaaggtgatagaataaaggtcattaaatttaattgtaggtattcttaactgaactaatttcctawttttaatcatcatctggatatttttagtcttctggctatcatttttccctccctgtttttttttttttttaaatctccacttctggtcctaccttttact

SEQ ID NO: 222942 - DNA, 201 bp, Homo sapiens
aggaatttcattaaatttatataactataattgcatctttatagtaatttttcaagtccagaacttgtcatgtcttccagtttatttaggtgctttttttwaaaatatccttaagtaaagctttattctctcattaaagtattacatttttcttgttatgcttattcttagatatatgttggcatttcttctattgtgttt

SEQ ID NO: 222943 - DNA, 201 bp, Homo sapiens
ttatttgttatatttgtgttttcctcccttgattttcttgctagagatttgtattttagttttcaaagaattggctattagatttgttcattcaatttttkgagttgtctgattcatcctacttttgtttgtattaattttttcttatttctgtttaccttaggcttgttttattgtctattttctaacttaaaagtttca

SEQ ID NO: 222944 - DNA, 201 bp, Homo sapiens
gtatggttttttttttgtatttttatttcttatttgttatatttgtgttttcctcccttgattttcttgctagagatttgtattttagttttcaaagaatkggctattagatttgttcattcaattttttgagttgtctgattcatcctacttttgtttgtattaattttttcttatttctgtttaccttaggcttgtttt

SEQ ID NO: 222945 - DNA, 201 bp, Homo sapiens
gtaggtattcttaactgaactaatttcctaattttaatcatcatctggatatttttagtcttctggctatcatttttccctccctgtttttttttttttttaaatctccacttctggtcctaccttttactttgtctcatgtgttcatgccttccaattaagatactgagtaagagagtaagatgttattcatattttaag

SEQ ID NO: 222946 - DNA, 201 bp, Homo sapiens
tggtaatttatattttcctacaaaattgtcctgtctttaaattatttcagcttaagagttattctactattggacctgtatggttttttttttgtattttwatttcttatttgttatatttgtgttttcctcccttgattttcttgctagagatttgtattttagttttcaaagaattggctattagatttgttcattcaa

SEQ ID NO: 222947 - DNA, 201 bp, Homo sapiens
tgtcagtttcattgattgtgtccccccaaaaaaaaaacatttggcctgttcatttattacttcgtttattttttctctttgctttctttctttctacttcrgttttaaattttttaaaattttgaaaatttttatataatcatattttgttgaatgaagtgctgaaacccaggcaaatggtggtgacttttttggtttgtt

SEQ ID NO: 222948 - DNA, 201 bp, Homo sapiens
tcgctgcaacctctgcctcccgggttaaagcaattctcttgcctgagctgggattacaggcgcccaccaccacgcccagctaacttttgtatttttagtaragatggggtttctccatgttggtcaggctggtctcgaactcccgacctcaggtgatccgcccaccttggcctcccagagtgctaggattacaggcgtgag

SEQ ID NO: 222949 - DNA, 201 bp, Homo sapiens
gctgggattacaggcgtgagccaccgtgcttggcctttggggtattttaaatgtacttattctcttctaaagtcagttttggtaatttatattttcctacmaaattgtcctgtctttaaattatttcagcttaagagttattctactattggacctgtatggttttttttttgtatttttatttcttatttgttatatttg

SEQ ID NO: 222950 - DNA, 201 bp, Homo sapiens
gagccgagatcgcgccactgcactccagcctgggcaacggaccaagactccatctcaaaaaaaaaaaaaattaagtaagtttttgtttgtattaattaaawttaatttacagtcgcgtgtattaaatatgtgactgttttactaaggcaatgtttgctttgtctttaagcccttagagatttgtttgattccatggataaa

SEQ ID NO: 222951 - DNA, 201 bp, Homo sapiens
cacgatctcggctcactgcaagctccacctcctggttcacgccattctcctgcctcagcctcccgagtagctgggactacaggtgcctgccaccacacccsgctattttttttgtattttttttagtagagacggggtttcaccatgttagccaggatggtctctatctcctgacctcgtgatcagcccgccttggcctcc

SEQ ID NO: 222952 - DNA, 201 bp, Homo sapiens
tgaacagatgaggaggtaacttatggatgtgcaaagaaagtaatttcttgagatagactctactcctagtgaagaagctgtgaatgttgttgaaatgacartaaaggatttaaaatattacgtaggcttacttgataaagcagcagcaggatttgagaggtttgactccagtttcgaaagaagtcctactgtggataaaat

SEQ ID NO: 222953 - DNA, 201 bp, Homo sapiens
ggtgacagagtgagtccctgtctctaaaaaaaaaaaaaaaaaaaaaattctgtagtgatggcttagtactgctttactgctttgcaatgatcttataaaawgtctatgtagaaataaaaggtgatagaataaaggtcattaaatttaattgtaggtattcttaactgaactaatttcctaattttaatcatcatctggata

SEQ ID NO: 222954 - DNA, 201 bp, Homo sapiens
ttaaggccaccattgagacttcctgctcagaaagattcctttcaaaatattactgcttattgacaatgcatctagtcacttaagagttttgagagacatawacgagatgaatgttgttttcctgtctgctacaacaactattctgcagcccatggatcagtaatttctacttttattatttaagagatacattttgtaagg

SEQ ID NO: 222955 - DNA, 201 bp, Homo sapiens
tttgtagagatgggatttcgccatgttgcccaggctagtcttgaactggactccaaccatccactagccttggcctcccaaagtgctaggattacagcatragccaccatgcctggtctgaattttattagttgtaagtttgttatggagagagataatgccactaaatgttaatgatcatttgaggaattccctctgctt

SEQ ID NO: 222956 - DNA, 201 bp, Homo sapiens
atgggtctataggtgcagcaaaccaccatgacacaatgtttacctgtgtaacaagcatgcacatcctggacatgtaccctggaacttaaaaaaaaaaaaatatatatatatatatatatataaactgaagctagcagaagttggttcacgaggtttaaagaaagaagcaatctctgtaacataaaagtgcaaggtgaaaca

SEQ ID NO: 222957 - DNA, 201 bp, Homo sapiens
acaattctgcagtacatcttgatgcataggattctttggatcaatttctggaagtggagttagtgggttaataaattagagtggatagtttgacctttcaratattggcagttgttatcccaaaaggtagaaaaatatgaatgctacattctgtacatattcatcaatgtaaaatattataatgataaatattttttgact

SEQ ID NO: 222958 - DNA, 201 bp, Homo sapiens
cggcccttatgtcaggatatgatgaaaatgcatcatacatttaattcatacagattgaagatgtgccctgggctggatgtgatggctcatgcctgtgatcmcagtgctttgggaggctgaatctatagcttgaggccagaagtttaagaccagcctgggcaacatagtgagacccgcatctctgcaataaaaaagaaatag

SEQ ID NO: 222959 - DNA, 201 bp, Homo sapiens
ttccttgtactgagaccctagtctgccactgaggatttggtttttgcccttccagtgtatactctgaaagagcgatgcctccaggttgtccggagcctagdcaagcctgagaattacaggagactggacatcgtcaggtcgctctacgaagatctggaagaccacccaaatgtgcagaaagacctggagcggctgacacag

SEQ ID NO: 222960 - DNA, 201 bp, Homo sapiens
cctagtctgccactgaggatttggtttttgcccttccagtgtatactctgaaagagcgatgcctccaggttgtccggagcctagtcaagcctgagaattasaggagactggacatcgtcaggtcgctctacgaagatctggaagaccacccaaatgtgcagaaagacctggagcggctgacacaggagcgcattgcacatc

SEQ ID NO: 222961 - DNA, 201 bp, Homo sapiens; identical to SEQ ID NO: 41081

SEQ ID NO: 222962 - DNA, 201 bp, Homo sapiens; identical to SEQ ID NO: 41350

SEQ ID NO: 222963 - DNA, 201 bp, Homo sapiens
gaggagatggaggccgggcggccgcggcccgtgctgcgctcggtgaactcgcgcgagccctcccaggtcatcttctgcaatcgcagtccgcgcgtcgtgcygcccgtatggctcaacttcgacggcgagccgcagccctacccaacgctgccgcctggcacgggccgccgcatccacagctaccgaggtacgggcccggcg

SEQ ID NO: 222964 - DNA, 201 bp, Homo sapiens; identical to SEQ ID NO: 41086

SEQ ID NO: 222965 - DNA, 201 bp, Homo sapiens; identical to SEQ ID NO: 41087

SEQ ID NO: 222966 - DNA, 201 bp, Homo sapiens; identical to SEQ ID NO: 41088

SEQ ID NO: 222967 - DNA, 201 bp, Homo sapiens; identical to SEQ ID NO: 41089

SEQ ID NO: 222968 - DNA, 201 bp, Homo sapiens; identical to SEQ ID NO: 41090

SEQ ID NO: 222969 - DNA, 201 bp, Homo sapiens
ggtcacctttggctcttcagagatgcagggacacacgatgggcttctggttaaccaaactgaattatttgtgccatctctcaatgttgacggacagcctayttttgccaatatcacactgccaggtactgacgttttactttttaaaaagataaggttgttgtggtaagtacaggatagaccacttgaaaaattaagccca

SEQ ID NO: 222970 - DNA, 201 bp, Homo sapiens
cgttttactttttaaaaagataaggttgttgtggtaagtacaggatagaccacttgaaaaattaagcccagttctcaatttttgcctgatgtcaggcacgktatccaatctttttgtatcctattctctaccataaataaaatggaagtgatgtatttgtacgttatgtgttaaaggtgttatggtgtctcaaaagcactt

SEQ ID NO: 222971 - DNA, 201 bp, Homo sapiens; identical to SEQ ID NO: 41092

SEQ ID NO: 222972 - DNA, 201 bp, Homo sapiens
cctttggctcttcagagatgcagggacacacgatgggcttctggttaaccaaactgaattatttgtgccatctctcaatgttgacggacagcctatttttdccaatatcacactgccaggtactgacgttttactttttaaaaagataaggttgttgtggtaagtacaggatagaccacttgaaaaattaagcccagttct

SEQ ID NO: 222973 - DNA, 201 bp, Homo sapiens
ctcttcagagatgcagggacacacgatgggcttctggttaaccaaactgaattatttgtgccatctctcaatgttgacggacagcctatttttgccaataycacactgccaggtactgacgttttactttttaaaaagataaggttgttgtggtaagtacaggatagaccacttgaaaaattaagcccagttctcaatttt

SEQ ID NO: 222974 - DNA, 201 bp, Homo sapiens
gatgcagggacacacgatgggcttctggttaaccaaactgaattatttgtgccatctctcaatgttgacggacagcctatttttgccaatatcacactgcyaggtactgacgttttactttttaaaaagataaggttgttgtggtaagtacaggatagaccacttgaaaaattaagcccagttctcaatttttgcctgatg

SEQ ID NO: 222975 - DNA, 201 bp, Homo sapiens
tccatcagtagtacaggtagttgttggcaaagcctcttgttcgttccttgtactgagaccctagtctgccactgaggatttggtttttgcccttccagtgwatactctgaaagagcgatgcctccaggttgtccggagcctagtcaagcctgagaattacaggagactggacatcgtcaggtcgctctacgaagatctgga

SEQ ID NO: 222976 - DNA, 201 bp, Homo sapiens
ccatcagtagtacaggtagttgttggcaaagcctcttgttcgttccttgtactgagaccctagtctgccactgaggatttggtttttgcccttccagtgtrtactctgaaagagcgatgcctccaggttgtccggagcctagtcaagcctgagaattacaggagactggacatcgtcaggtcgctctacgaagatctggaa

SEQ ID NO: 222977 - DNA, 201 bp, Homo sapiens; identical to SEQ ID NO: 41099

SEQ ID NO: 222978 - DNA, 201 bp, Homo sapiens
catcagtagtacaggtagttgttggcaaagcctcttgttcgttccttgtactgagaccctagtctgccactgaggatttggtttttgcccttccagtgtakactctgaaagagcgatgcctccaggttgtccggagcctagtcaagcctgagaattacaggagactggacatcgtcaggtcgctctacgaagatctggaag

SEQ ID NO: 222979 - DNA, 201 bp, Homo sapiens
tcagtagtacaggtagttgttggcaaagcctcttgttcgttccttgtactgagaccctagtctgccactgaggatttggtttttgcccttccagtgtataytctgaaagagcgatgcctccaggttgtccggagcctagtcaagcctgagaattacaggagactggacatcgtcaggtcgctctacgaagatctggaagac

SEQ ID NO: 222980 - DNA, 201 bp, Homo sapiens
gttccttgtactgagaccctagtctgccactgaggatttggtttttgcccttccagtgtatactctgaaagagcgatgcctccaggttgtccggagcctaktcaagcctgagaattacaggagactggacatcgtcaggtcgctctacgaagatctggaagaccacccaaatgtgcagaaagacctggagcggctgacaca

SEQ ID NO: 222981 - DNA, 201 bp, Homo sapiens
gtagtacaggtagttgttggcaaagcctcttgttcgttccttgtactgagaccctagtctgccactgaggatttggtttttgcccttccagtgtatactcygaaagagcgatgcctccaggttgtccggagcctagtcaagcctgagaattacaggagactggacatcgtcaggtcgctctacgaagatctggaagaccac

SEQ ID NO: 222982 - DNA, 201 bp, Homo sapiens
  misc_feature (1)...(201): n = A,T,C or G
gccactgaggatttggtttttgcccttccagtgtatactctgaaagagcgatgcctccaggttgtccggagcctagtcaagcctgagaattacaggagacnggacatcgtcaggtcgctctacgaagatctggaagaccacccaaatgtgcagaaagacctggagcggctgacacaggagcgcattgcacatcaacggatg

SEQ ID NO: 222983 - DNA, 201 bp, Homo sapiens
agtagtacaggtagttgttggcaaagcctcttgttcgttccttgtactgagaccctagtctgccactgaggatttggtttttgcccttccagtgtatactstgaaagagcgatgcctccaggttgtccggagcctagtcaagcctgagaattacaggagactggacatcgtcaggtcgctctacgaagatctggaagacca

SEQ ID NO: 222984 - DNA, 201 bp, Homo sapiens; identical to SEQ ID NO: 41106

SEQ ID NO: 222985 - DNA, 201 bp, Homo sapiens; identical to SEQ ID NO: 41108

SEQ ID NO: 222986 - DNA, 201 bp, Homo sapiens
accctagtctgccactgaggatttggtttttgcccttccagtgtatactctgaaagagcgatgcctccaggttgtccggagcctagtcaagcctgagaatkacaggagactggacatcgtcaggtcgctctacgaagatctggaagaccacccaaatgtgcagaaagacctggagcggctgacacaggagcgcattgcaca

SEQ ID NO: 222987 - DNA, 201 bp, Homo sapiens; identical to SEQ ID NO: 41117

SEQ ID NO: 222988 - DNA, 201 bp, Homo sapiens
ccttccagtgtatactctgaaagagcgatgcctccaggttgtccggagcctagtcaagcctgagaattacaggagactggacatcgtcaggtcgctctacdaagatctggaagaccacccaaatgtgcagaaagacctggagcggctgacacaggagcgcattgcacatcaacggatgggagattgaagatttctgttgaa

SEQ ID NO: 222989 - DNA, 201 bp, Homo sapiens
gtggctctttaacaacctttgcttgtcccgataggtcacctttggctcttcagagatgcagggacacacgatgggcttctggttaaccaaactgaattatbtgtgccatctctcaatgttgacggacagcctatttttgccaatatcacactgccaggtactgacgttttactttttaaaaagataaggttgttgtggtaa

SEQ ID NO: 222990 - DNA, 201 bp, Homo sapiens
tgccttttttctttttttttttctttctttctttctttttttttttttttttgagacagcgtctcactttgtcacccaggctggagtgcagtggcgctatctgggctcactgcaagccccacctcctggattcacgccattctcctgcttcagcctcccgagtagctgggactacaggcgcccgccaccacgcccggctaa

SEQ ID NO: 222991 - DNA, 201 bp, Homo sapiens
tttgcccttccagtgtatactctgaaagagcgatgcctccaggttgtccggagcctagtcaagcctgagaattacaggagactggacatcgtcaggtcgcbctacgaagatctggaagaccacccaaatgtgcagaaagacctggagcggctgacacaggagcgcattgcacatcaacggatgggagattgaagatttctg

SEQ ID NO: 222992 - DNA, 201 bp, Homo sapiens; identical to SEQ ID NO: 41121

SEQ ID NO: 222993 - DNA, 201 bp, Homo sapiens
ccttttttctttttttttttctttctttctttctttttttttttttttttgagacagcgtctcactttgtcacccaggctggagtgcagtggcgctatctgggctcactgcaagccccacctcctggattcacgccattctcctgcttcagcctcccgagtagctgggactacaggcgcccgccaccacgcccggctaatt

SEQ ID NO: 222994 - DNA, 201 bp, Homo sapiens; identical to SEQ ID NO: 41123

SEQ ID NO: 222995 - DNA, 201 bp, Homo sapiens
agtacaggtagttgttggcaaagcctcttgttcgttccttgtactgagaccctagtctgccactgaggatttggtttttgcccttccagtgtatactctgraagagcgatgcctccaggttgtccggagcctagtcaagcctgagaattacaggagactggacatcgtcaggtcgctctacgaagatctggaagaccaccc

SEQ ID NO: 222996 - DNA, 201 bp, Homo sapiens
tctcttgcctcagcctcccgaggagcggggattacaggcgtgcgccaccactcctggctaattttttttttagtagagacgggggtttcgtcattttggcyaggctggtctcgaactcctgacctcagatgatccacccgccttggcctcccaaagtgctgagattacaggtgtaagccactgcgcccagccctttgaaag

SEQ ID NO: 222997 - DNA, 201 bp, Homo sapiens
ccacgcccggctaatttttttgtattttttagtagagacggggtttcatcgtgttagccaggatggtctcgatctcctgacctcgtgatccgcccgcctckgcctcccaaagtgctgggattacaggcgtgagccaccgcgcccggcctccttttctttttttttgagacagagtgttgctcttgtcgcccaagctggagt

SEQ ID NO: 222998 - DNA, 201 bp, Homo sapiens
gtagttgttggcaaagcctcttgttcgttccttgtactgagaccctagtctgccactgaggatttggtttttgcccttccagtgtatactctgaaagagcvatgcctccaggttgtccggagcctagtcaagcctgagaattacaggagactggacatcgtcaggtcgctctacgaagatctggaagaccacccaaatgtg

SEQ ID NO: 222999 - DNA, 201 bp, Homo sapiens
ggtagttgttggcaaagcctcttgttcgttccttgtactgagaccctagtctgccactgaggatttggtttttgcccttccagtgtatactctgaaagagbgatgcctccaggttgtccggagcctagtcaagcctgagaattacaggagactggacatcgtcaggtcgctctacgaagatctggaagaccacccaaatgt

SEQ ID NO: 223000 - DNA, 201 bp, Homo sapiens
agttgttggcaaagcctcttgttcgttccttgtactgagaccctagtctgccactgaggatttggtttttgcccttccagtgtatactctgaaagagcgaygcctccaggttgtccggagcctagtcaagcctgagaattacaggagactggacatcgtcaggtcgctctacgaagatctggaagaccacccaaatgtgca

SEQ ID NO: 223001 - DNA, 201 bp, Homo sapiens
tcgttccttgtactgagaccctagtctgccactgaggatttggtttttgcccttccagtgtatactctgaaagagcgatgcctccaggttgtccggagccyagtcaagcctgagaattacaggagactggacatcgtcaggtcgctctacgaagatctggaagaccacccaaatgtgcagaaagacctggagcggctgaca

SEQ ID NO: 223002 - DNA, 201 bp, Homo sapiens
cgaggaggagatggaggccgggcggccgcggcccgtgctgcgctcggtgaactcgcgcgagccctcccaggtcatcttctgcaatcgcagtccgcgcgtcktgctgcccgtatggctcaacttcgacggcgagccgcagccctacccaacgctgccgcctggcacgggccgccgcatccacagctaccgaggtacgggccc

SEQ ID NO: 223003 - DNA, 201 bp, Homo sapiens
cccagccaccggtgtggctctttaacaacctttgcttgtcccgataggtcacctttggctcttcagagatgcagggacacacgatgggcttctggttaacyaaactgaattatttgtgccatctctcaatgttgacggacagcctatttttgccaatatcacactgccaggtactgacgttttactttttaaaaagataag

SEQ ID NO: 223004 - DNA, 201 bp, Homo sapiens; identical to SEQ ID NO: 41145

SEQ ID NO: 223005 - DNA, 201 bp, Homo sapiens; identical to SEQ ID NO: 41146

SEQ ID NO: 223006 - DNA, 201 bp, Homo sapiens
actgagaccctagtctgccactgaggatttggtttttgcccttccagtgtatactctgaaagagcgatgcctccaggttgtccggagcctagtcaagcctkagaattacaggagactggacatcgtcaggtcgctctacgaagatctggaagaccacccaaatgtgcagaaagacctggagcggctgacacaggagcgcat

SEQ ID NO: 223007 - DNA, 201 bp, Homo sapiens; identical to SEQ ID NO: 41148

SEQ ID NO: 223008 - DNA, 201 bp, Homo sapiens; identical to SEQ ID NO: 41149

SEQ ID NO: 223009 - DNA, 201 bp, Homo sapiens; identical to SEQ ID NO: 41150

SEQ ID NO: 223010 - DNA, 201 bp, Homo sapiens; identical to SEQ ID NO: 41151

SEQ ID NO: 223011 - DNA, 201 bp, Homo sapiens; identical to SEQ ID NO: 41153

SEQ ID NO: 223012 - DNA, 201 bp, Homo sapiens
gtttttgcccttccagtgtatactctgaaagagcgatgcctccaggttgtccggagcctagtcaagcctgagaattacaggagactggacatcgtcaggtmgctctacgaagatctggaagaccacccaaatgtgcagaaagacctggagcggctgacacaggagcgcattgcacatcaacggatgggagattgaagattt

SEQ ID NO: 223013 - DNA, 201 bp, Homo sapiens
ccagccaccggtgtggctctttaacaacctttgcttgtcccgataggtcacctttggctcttcagagatgcagggacacacgatgggcttctggttaaccmaactgaattatttgtgccatctctcaatgttgacggacagcctatttttgccaatatcacactgccaggtactgacgttttactttttaaaaagataagg

SEQ ID NO: 223014 - DNA, 201 bp, Homo sapiens
gggcggccgcggcccgtgctgcgctcggtgaactcgcgcgagccctcccaggtcatcttctgcaatcgcagtccgcgcgtcgtgctgcccgtatggctcawcttcgacggcgagccgcagccctacccaacgctgccgcctggcacgggccgccgcatccacagctaccgaggtacgggcccggcgcttaggcccgaccca

SEQ ID NO: 223015 - DNA, 201 bp, Homo sapiens; identical to SEQ ID NO: 41377

SEQ ID NO: 223016 - DNA, 201 bp, Homo sapiens
caggctgagacctcatctcttttttatttttttaaaattttttattatactttaagttctagggtacatgtgcacaacgtgcaggtttgttacatatgtawacatgtgccatgttggtgtgctgcacccatagagacctcgtcttaaaaaaagaaaataacattacttttgaaggtacttaatgcactgaattgtacattt

SEQ ID NO: 223017 - DNA, 201 bp, Homo sapiens; identical to SEQ ID NO: 41181

SEQ ID NO: 223018 - DNA, 201 bp, Homo sapiens
tgcctctgaatagttgctgtactctagtctggtaacacagcaagaccctgtctctctatcttgtcttttttttttttttttttgagacaggatgtcctgcwgttgcctgggctggagtgtggaggctggagtttggtggcatgatcacggctcattgcacccttaacctgggctcaagcagtcctcccagagcttcagctt

SEQ ID NO: 223019 - DNA, 201 bp, Homo sapiens; identical to SEQ ID NO: 41183
  misc_feature (1)...(201): n = A,T,C or G

SEQ ID NO: 223020 - DNA, 201 bp, Homo sapiens; identical to SEQ ID NO: 41185

SEQ ID NO: 223021 - DNA, 201 bp, Homo sapiens
ggaggccgggcggccgcggcccgtgctgcgctcggtgaactcgcgcgagccctcccaggtcatcttctgcaatcgcagtccgcgcgtcgtgctgcccgtawggctcaacttcgacggcgagccgcagccctacccaacgctgccgcctggcacgggccgccgcatccacagctaccgaggtacgggcccggcgcttaggcc

SEQ ID NO: 223022 - DNA, 201 bp, Homo sapiens
ccacgctagaatgcagtggcgcgattgcggctcattgcaacatctgccacctggggtcaagtggttctcttgcctcagcctcccgaggagcggggattacwggcgtgcgccaccactcctggctaattttttttttagtagagacgggggtttcgtcattttggccaggctggtctcgaactcctgacctcagatgatcca

SEQ ID NO: 223023 - DNA, 201 bp, Homo sapiens
aggtgattttacccctaggaatatgggggcactgaaatttttttttttttttgagacgggagtcttgctctgcaagctggagtgcagtggcccacgctagratgcagtggcgcgattgcggctcattgcaacatctgccacctggggtcaagtggttctcttgcctcagcctcccgaggagcggggattacaggcgtgcgc

SEQ ID NO: 223024 - DNA, 201 bp, Homo sapiens; identical to SEQ ID NO: 41187

SEQ ID NO: 223025 - DNA, 201 bp, Homo sapiens; identical to SEQ ID NO: 41188

SEQ ID NO: 223026 - DNA, 201 bp, Homo sapiens; identical to SEQ ID NO: 41190

SEQ ID NO: 223027 - DNA, 201 bp, Homo sapiens; identical to SEQ ID NO: 41347

SEQ ID NO: 223028 - DNA, 201 bp, Homo sapiens
gtctcaaaaaaaaaaaaaacaccaaaccttagaggggcgaaaaaaaattttatagtggaaatacagtaacgagttggcctagcctcgcctccgttacaacrgcctacggtgctggaggatccttctgcgcacgcgcacagcctccggccggctatttccgcgagcgcgttccatcctctaccgagcgcgcgcgaagactac

SEQ ID NO: 223029 - DNA, 201 bp, Homo sapiens; identical to SEQ ID NO: 41080

SEQ ID NO: 223030 - DNA, 201 bp, Homo sapiens; identical to SEQ ID NO: 41084

SEQ ID NO: 223031 - DNA, 201 bp, Homo sapiens
tgcccagccaccggtgtggctctttaacaacctttgcttgtcccgataggtcacctttggctcttcagagatgcagggacacacgatgggcttctggttavccaaactgaattatttgtgccatctctcaatgttgacggacagcctatttttgccaatatcacactgccaggtactgacgttttactttttaaaaagata

SEQ ID NO: 223032 - DNA, 201 bp, Homo sapiens
gtctctctagcagggtagctcagggctttcaaaagtataaaagcagaagtcagcaggcctttttaaggcttcggcctagaattgccagtgtcgcttcatcsacattcagttagttaaagcaatcacaagcccagcccatttcaaggtgaaattactacagaggcatgaacaccatgaggtgtccatagggggccatcagca

SEQ ID NO: 223033 - DNA, 201 bp, Homo sapiens
cgggcggccgcggcccgtgctgcgctcggtgaactcgcgcgagccctcccaggtcatcttctgcaatcgcagtccgcgcgtcgtgctgcccgtatggctcwacttcgacggcgagccgcagccctacccaacgctgccgcctggcacgggccgccgcatccacagctaccgaggtacgggcccggcgcttaggcccgaccc

SEQ ID NO: 223034 - DNA, 201 bp, Homo sapiens
tgaccaggctgatcttgaactcttgagctcaggcagtctgcctgcctcagcctcctaaagtgctaggattacaggcgtgagccactgcgcccagcccaccrttttatttgttcataattctgtagtccaggctgggctcagctaggcagttactctgctggtggtagtcgttggtgtggctgccttttgctggcagctggg

SEQ ID NO: 223035 - DNA, 201 bp, Homo sapiens
tgcccaggctgctcttgaacacctgggctcaggcagtcctcccgccttggcctcccaaagtgctgagattatagataggcatgcaccaccacacctggccytatgtttgtttttcttaaaattttttttgtttgtttctgtttttttgtttgtgcttttttttgccttttttctttttttttttctttctttctttctttt

SEQ ID NO: 223036 - DNA, 201 bp, Homo sapiens; identical to SEQ ID NO: 41107

SEQ ID NO: 223037 - DNA, 201 bp, Homo sapiens; identical to SEQ ID NO: 41110

SEQ ID NO: 223038 - DNA, 201 bp, Homo sapiens; identical to SEQ ID NO: 41111

SEQ ID NO: 223039 - DNA, 201 bp, Homo sapiens
gaggccgggcggccgcggcccgtgctgcgctcggtgaactcgcgcgagccctcccaggtcatcttctgcaatcgcagtccgcgcgtcgtgctgcccgtatsgctcaacttcgacggcgagccgcagccctacccaacgctgccgcctggcacgggccgccgcatccacagctaccgaggtacgggcccggcgcttaggccc

SEQ ID NO: 223040 - DNA, 201 bp, Homo sapiens
gggcgccgaggaggagatggaggccgggcggccgcggcccgtgctgcgctcggtgaactcgcgcgagccctcccaggtcatcttctgcaatcgcagtccgsgcgtcgtgctgcccgtatggctcaacttcgacggcgagccgcagccctacccaacgctgccgcctggcacgggccgccgcatccacagctaccgaggtac

SEQ ID NO: 223041 - DNA, 201 bp, Homo sapiens; identical to SEQ ID NO: 41375
  misc_feature (1)...(201): n = A,T,C or G

SEQ ID NO: 223042 - DNA, 201 bp, Homo sapiens; identical to SEQ ID NO: 41115

SEQ ID NO: 223043 - DNA, 201 bp, Homo sapiens
aatgtttgaggcaggtagatccacctgaggtcaggagttcaagaccagcctgaccaatatggtggaaccctgtctctgctaaaaatacaaaagttagctgcatgtggtggcatgcgcctgtttagtcccagctactcgggaggctgaggcaggagaattgcttgaacctgggaggcggaggtggcagtgagccaagatcac

SEQ ID NO: 223044 - DNA, 201 bp, Homo sapiens; identical to SEQ ID NO: 41116

SEQ ID NO: 223045 - DNA, 201 bp, Homo sapiens; identical to SEQ ID NO: 41382

SEQ ID NO: 223046 - DNA, 201 bp, Homo sapiens
ttaccaaaatttaaaaaattacaagtttacatttcttaaaatttcccatcaaatctgtaagtaaatttatgccccgaggaacaagtgctatatttattctragacaacctcctccttccttaaacagaatcttagggctggaggattgcttcctgccctcttttgtttgtgatgtatgcattttgaaaattctgggccagg

SEQ ID NO: 223047 - DNA, 201 bp, Homo sapiens; identical to SEQ ID NO: 41129

SEQ ID NO: 223048 - DNA, 201 bp, Homo sapiens; identical to SEQ ID NO: 41349

SEQ ID NO: 223049 - DNA, 201 bp, Homo sapiens; identical to SEQ ID NO: 41352

SEQ ID NO: 223050 - DNA, 201 bp, Homo sapiens; identical to SEQ ID NO: 41353

SEQ ID NO: 223051 - DNA, 201 bp, Homo sapiens; identical to SEQ ID NO: 41354

SEQ ID NO: 223052 - DNA, 201 bp, Homo sapiens; identical to SEQ ID NO: 41133

SEQ ID NO: 223053 - DNA, 201 bp, Homo sapiens; identical to SEQ ID NO: 41358

SEQ ID NO: 223054 - DNA, 201 bp, Homo sapiens; identical to SEQ ID NO: 41136

SEQ ID NO: 223055 - DNA, 201 bp, Homo sapiens; identical to SEQ ID NO: 41135

SEQ ID NO: 223056 - DNA, 201 bp, Homo sapiens
gagatggaggccgggcggccgcggcccgtgctgcgctcggtgaactcgcgcgagccctcccaggtcatcttctgcaatcgcagtccgcgcgtcgtgctgcbcgtatggctcaacttcgacggcgagccgcagccctacccaacgctgccgcctggcacgggccgccgcatccacagctaccgaggtacgggcccggcgctt

SEQ ID NO: 223057 - DNA, 201 bp, Homo sapiens; identical to SEQ ID NO: 41361

SEQ ID NO: 223058 - DNA, 201 bp, Homo sapiens
ggagatggaggccgggcggccgcggcccgtgctgcgctcggtgaactcgcgcgagccctcccaggtcatcttctgcaatcgcagtccgcgcgtcgtgctgbccgtatggctcaacttcgacggcgagccgcagccctacccaacgctgccgcctggcacgggccgccgcatccacagctaccgaggtacgggcccggcgct

SEQ ID NO: 223059 - DNA, 201 bp, Homo sapiens; identical to SEQ ID NO: 41363

SEQ ID NO: 223060 - DNA, 201 bp, Homo sapiens; identical to SEQ ID NO: 41364

SEQ ID NO: 223061 - DNA, 201 bp, Homo sapiens
tctaccgccccggggtccattttgcagacggggaactgaggccccttgaggcaggacacatccagggtgacgctgctcgtaagcgtcagagcattcttttwtttttttttttttttctgagacggagtctcgctctgtcgcccaggctggagtgcagtggcgcgatctcgactcactgcagcctccgcctcccgggttcaa

SEQ ID NO: 223062 - DNA, 201 bp, Homo sapiens
ctaccgccccggggtccattttgcagacggggaactgaggccccttgaggcaggacacatccagggtgacgctgctcgtaagcgtcagagcattctttttwttttttttttttttctgagacggagtctcgctctgtcgcccaggctggagtgcagtggcgcgatctcgactcactgcagcctccgcctcccgggttcaag

SEQ ID NO: 223063 - DNA, 201 bp, Homo sapiens
gagtagctgggattacaggcgtgcgccaccgcgcccggctgatttttatatttttagtagagacggggtttcaccatgttggtcaggctggtctcgaactrctgacctcgtgatccgcccgcctcggcctcccaaagtgctgggcttatgggcatgagcctccgcgcccggcccagagcattctttataaggccgaatagt

SEQ ID NO: 223064 - DNA, 201 bp, Homo sapiens
ctaggtaagaggttctagacatgcgtgcgttgagacctggagtcttgggagaggatgcttaaaaggtgattttacccctaggaatatgggggcactgaaatttttttttttttttgagacgggagtcttgctctgcaagctggagtgcagtggcccacgctagaatgcagtggcgcgattgcggctcattgcaacatctgc

SEQ ID NO: 223065 - DNA, 201 bp, Homo sapiens
ctggatctgtcgccagactggagtgctgttgcacaatcttggctcactgcaatctcggactcctggttcaagcgattctcctgcctcagccccccgcgtarctgggactacaagcacccaccaccaagcctggctaattttttgtattcttagtagagacagggtttcaccatgttggccaggatggtctccatctcctgc

SEQ ID NO: 223066 - DNA, 201 bp, Homo sapiens
cccgcgtagctgggactacaagcacccaccaccaagcctggctaattttttgtattcttagtagagacagggtttcaccatgttggccaggatggtctccrtctcctgcgctcgtgatctgcctgcttcggcctcccaaagtgctgggattacaggcgtgctgggatttcggccacaacgtccgaccgaaagtttttaagc

SEQ ID NO: 223067 - DNA, 201 bp, Homo sapiens
cactatgtctggctaatttctttttttatttttatttttagtagagatgaggtcttgctatgttgcccaggctgagacctcatctcttttttatttttttwaaattttttattatactttaagttctagggtacatgtgcacaacgtgcaggtttgttacatatgtatacatgtgccatgttggtgtgctgcacccataga

SEQ ID NO: 223068 - DNA, 201 bp, Homo sapiens
ctaagacaacctcctccttccttaaacagaatcttagggctggaggattgcttcctgccctcttttgtttgtgatgtatgcattttgaaaattctgggccrggcgcagtggctcactcctgtaatcccagcactttgggaggccgaggcgggcggatcacaagatcaggagattgagaccatcctggctaatacggtgaaa

SEQ ID NO: 223069 - DNA, 201 bp, Homo sapiens
ctcttttgtttgtgatgtatgcattttgaaaattctgggccaggcgcagtggctcactcctgtaatcccagcactttgggaggccgaggcgggcggatcayaagatcaggagattgagaccatcctggctaatacggtgaaaccctgtctctactgaaaataacaaaaaattagccgggcgtggtggcgggcacctgtggt

SEQ ID NO: 223070 - DNA, 201 bp, Homo sapiens
ggctttttctctttagtttgcagggtttgctgtgatttgtaatcacgtacttgacctaggcttcccttttccaccatggtagcagaaagggcatgggattkagagctttaagtacgcgctctttgcttactgtcttataccttgagcatgtcacttctctcagacttgttttctcatctgtaaatggatctgttgtgagga

SEQ ID NO: 223071 - DNA, 201 bp, Homo sapiens; identical to SEQ ID NO: 41152

SEQ ID NO: 223072 - DNA, 201 bp, Homo sapiens; identical to SEQ ID NO: 41368

SEQ ID NO: 223073 - DNA, 201 bp, Homo sapiens
gcctgcctcggcctcccaaagtgctgggattacaggtgtgggccaccgtgcccagccaccggtgtggctctttaacaacctttgcttgtcccgataggtcrcctttggctcttcagagatgcagggacacacgatgggcttctggttaaccaaactgaattatttgtgccatctctcaatgttgacggacagcctattttt

SEQ ID NO: 223074 - DNA, 201 bp, Homo sapiens
cgcctgcctcggcctcccaaagtgctgggattacaggtgtgggccaccgtgcccagccaccggtgtggctctttaacaacctttgcttgtcccgataggtbacctttggctcttcagagatgcagggacacacgatgggcttctggttaaccaaactgaattatttgtgccatctctcaatgttgacggacagcctatttt

SEQ ID NO: 223075 - DNA, 201 bp, Homo sapiens
cctgcctcggcctcccaaagtgctgggattacaggtgtgggccaccgtgcccagccaccggtgtggctctttaacaacctttgcttgtcccgataggtcamctttggctcttcagagatgcagggacacacgatgggcttctggttaaccaaactgaattatttgtgccatctctcaatgttgacggacagcctatttttg

SEQ ID NO: 223076 - DNA, 201 bp, Homo sapiens
ctgcctcggcctcccaaagtgctgggattacaggtgtgggccaccgtgcccagccaccggtgtggctctttaacaacctttgcttgtcccgataggtcacstttggctcttcagagatgcagggacacacgatgggcttctggttaaccaaactgaattatttgtgccatctctcaatgttgacggacagcctatttttgc

SEQ ID NO: 223077 - DNA, 201 bp, Homo sapiens
tcggcctcccaaagtgctgggattacaggtgtgggccaccgtgcccagccaccggtgtggctctttaacaacctttgcttgtcccgataggtcacctttgdctcttcagagatgcagggacacacgatgggcttctggttaaccaaactgaattatttgtgccatctctcaatgttgacggacagcctatttttgccaata

SEQ ID NO: 223078 - DNA, 201 bp, Homo sapiens
ctcggcctcccaaagtgctgggattacaggtgtgggccaccgtgcccagccaccggtgtggctctttaacaacctttgcttgtcccgataggtcacctttrgctcttcagagatgcagggacacacgatgggcttctggttaaccaaactgaattatttgtgccatctctcaatgttgacggacagcctatttttgccaat

SEQ ID NO: 223079 - DNA, 201 bp, Homo sapiens
ggcctcccaaagtgctgggattacaggtgtgggccaccgtgcccagccaccggtgtggctctttaacaacctttgcttgtcccgataggtcacctttggcbcttcagagatgcagggacacacgatgggcttctggttaaccaaactgaattatttgtgccatctctcaatgttgacggacagcctatttttgccaatatc

SEQ ID NO: 223080 - DNA, 201 bp, Homo sapiens
gtctgccactgaggatttggtttttgcccttccagtgtatactctgaaagagcgatgcctccaggttgtccggagcctagtcaagcctgagaattacaggwgactggacatcgtcaggtcgctctacgaagatctggaagaccacccaaatgtgcagaaagacctggagcggctgacacaggagcgcattgcacatcaacg

SEQ ID NO: 223081 - DNA, 201 bp, Homo sapiens
tcccaaagtgctgggattacaggtgtgggccaccgtgcccagccaccggtgtggctctttaacaacctttgcttgtcccgataggtcacctttggctcttsagagatgcagggacacacgatgggcttctggttaaccaaactgaattatttgtgccatctctcaatgttgacggacagcctatttttgccaatatcacac

SEQ ID NO: 223082 - DNA, 201 bp, Homo sapiens; identical to SEQ ID NO: 41166

SEQ ID NO: 223083 - DNA, 201 bp, Homo sapiens; identical to SEQ ID NO: 41167

SEQ ID NO: 223084 - DNA, 201 bp, Homo sapiens
ctcccaaagtgctgggattacaggtgtgggccaccgtgcccagccaccggtgtggctctttaacaacctttgcttgtcccgataggtcacctttggctctycagagatgcagggacacacgatgggcttctggttaaccaaactgaattatttgtgccatctctcaatgttgacggacagcctatttttgccaatatcaca

SEQ ID NO: 223085 - DNA, 201 bp, Homo sapiens; identical to SEQ ID NO: 41170

SEQ ID NO: 223086 - DNA, 201 bp, Homo sapiens
aagtgctgggattacaggtgtgggccaccgtgcccagccaccggtgtggctctttaacaacctttgcttgtcccgataggtcacctttggctcttcagagrtgcagggacacacgatgggcttctggttaaccaaactgaattatttgtgccatctctcaatgttgacggacagcctatttttgccaatatcacactgcca

SEQ ID NO: 223087 - DNA, 201 bp, Homo sapiens
gcagtggcgcgatctcggctcacggcaagctccacctcctgggttcacaccattctcctgcctcagcctcccgagtagctgggactacaggcgctcgccaccacacctggctaatttttttgtatttttagtagagacgaggtttcaccacgttagccaggacggtcttgatctcctgacctcatgatccgcctgcctcgg

SEQ ID NO: 223088 - DNA, 201 bp, Homo sapiens
tgctgggattacaggcatcagccacagcacctggcctatgtattttcaatttaacacaatcaagctcacagtgccaatcagaggtgttttttttttttttatttttatttttagagagtctcacagtgtcatccaggctggagtgcagtggtgcgatttcagctcactgcaacctctgcatcctgggttcaagtgattctc

SEQ ID NO: 223089 - DNA, 201 bp, Homo sapiens
tcacagctatttgggaggcttaggtgggaggatcccttgagcccaggagtttgaggctgcagtgagccatgatcataccactgcactccagcccaggtgamagagtgagatcctgtctcaaaaaaagaaaaaaaaaactcaaaaaccccccaaatacatgggtttcataggattcaaactactatgtgtgtatagatcctg

SEQ ID NO: 223090 - DNA, 201 bp, Homo sapiens; identical to SEQ ID NO: 41173

SEQ ID NO: 223091 - DNA, 201 bp, Homo sapiens
aggattcaaactactatgtgtgtatagatcctgttttaaggaagtagatatataaaaatgagcattgctaagttaaatttggtaaatttgccttatagaayaccctcgagtacgtttccagtgagtgtaaaataggaattgggatacccaattcagttgtactagattttctttttttttttttttttgagacggagtctc

SEQ ID NO: 223092 - DNA, 201 bp, Homo sapiens
gccgggcggccgcggcccgtgctgcgctcggtgaactcgcgcgagccctcccaggtcatcttctgcaatcgcagtccgcgcgtcgtgctgcccgtatggcycaacttcgacggcgagccgcagccctacccaacgctgccgcctggcacgggccgccgcatccacagctaccgaggtacgggcccggcgcttaggcccgac

SEQ ID NO: 223093 - DNA, 201 bp, Homo sapiens
gagtgcagtggcgggatctcggctcactgcaagctccgcctcccgggttcacgccattctcctgcctcagcctcccaagtagctgggactacaggcgcccrccactacgcccggctaattttttgtatttttagtagagacggggtttcaccgttttagccgggatggtctcgatctcctgacctcgtgatccgcccgcct

SEQ ID NO: 223094 - DNA, 201 bp, Homo sapiens; identical to SEQ ID NO: 41177

SEQ ID NO: 223095 - DNA, 201 bp, Homo sapiens; identical to SEQ ID NO: 41381

SEQ ID NO: 223096 - DNA, 201 bp, Homo sapiens
cccaaagtgctgggattacaggtgtgggccaccgtgcccagccaccggtgtggctctttaacaacctttgcttgtcccgataggtcacctttggctcttcrgagatgcagggacacacgatgggcttctggttaaccaaactgaattatttgtgccatctctcaatgttgacggacagcctatttttgccaatatcacact

SEQ ID NO: 223097 - DNA, 201 bp, Homo sapiens
cgggatctcggctcactgcaagctccgcctcccgggttcacgccattctcctgcctcagcctcccaagtagctgggactacaggcgcccgccactacgccmggctaattttttgtatttttagtagagacggggtttcaccgttttagccgggatggtctcgatctcctgacctcgtgatccgcccgcctcggcctcccaa

SEQ ID NO: 223098 - DNA, 201 bp, Homo sapiens
ggtgtggctctttaacaacctttgcttgtcccgataggtcacctttggctcttcagagatgcagggacacacgatgggcttctggttaaccaaactgaatwatttgtgccatctctcaatgttgacggacagcctatttttgccaatatcacactgccaggtactgacgttttactttttaaaaagataaggttgttgtgg

SEQ ID NO: 223099 - DNA, 201 bp, Homo sapiens
tcccgggttcacgccattctcctgcctcagcctcccaagtagctgggactacaggcgcccgccactacgcccggctaattttttgtatttttagtagagayggggtttcaccgttttagccgggatggtctcgatctcctgacctcgtgatccgcccgcctcggcctcccaaagtgctgggattacaggcgtgagccaccg

SEQ ID NO: 223100 - DNA, 201 bp, Homo sapiens
tgaggatttggtttttgcccttccagtgtatactctgaaagagcgatgcctccaggttgtccggagcctagtcaagcctgagaattacaggagactggacrtcgtcaggtcgctctacgaagatctggaagaccacccaaatgtgcagaaagacctggagcggctgacacaggagcgcattgcacatcaacggatgggaga

SEQ ID NO: 223101 - DNA, 201 bp, Homo sapiens
tgggccaccgtgcccagccaccggtgtggctctttaacaacctttgcttgtcccgataggtcacctttggctcttcagagatgcagggacacacgatgggyttctggttaaccaaactgaattatttgtgccatctctcaatgttgacggacagcctatttttgccaatatcacactgccaggtactgacgttttactttt

SEQ ID NO: 223102 - DNA, 201 bp, Homo sapiens
ctgcctcagcctcccaagtagctgggactacaggcgcccgccactacgcccggctaattttttgtatttttagtagagacggggtttcaccgttttagccrggatggtctcgatctcctgacctcgtgatccgcccgcctcggcctcccaaagtgctgggattacaggcgtgagccaccgcgcccggcctagattttctaa

SEQ ID NO: 223103 - DNA, 201 bp, Homo sapiens
cccttccagtgtatactctgaaagagcgatgcctccaggttgtccggagcctagtcaagcctgagaattacaggagactggacatcgtcaggtcgctctasgaagatctggaagaccacccaaatgtgcagaaagacctggagcggctgacacaggagcgcattgcacatcaacggatgggagattgaagatttctgttga

SEQ ID NO: 223104 - DNA, 201 bp, Homo sapiens
gcttcagcagctgggactacaggtgtgcaccaccaagcctggctaattttttgcattttagtggagacgggggtttcaccatgttgaccaggctgatcttraactcttgagctcaggcagtctgcctgcctcagcctcctaaagtgctaggattacaggcgtgagccactgcgcccagcccaccattttatttgttcataa

SEQ ID NO: 223105 - DNA, 201 bp, Homo sapiens; identical to SEQ ID NO: 41184

SEQ ID NO: 223106 - DNA, 201 bp, Homo sapiens; identical to SEQ ID NO: 41388

SEQ ID NO: 223107 - DNA, 201 bp, Homo sapiens
aggccgggcggccgcggcccgtgctgcgctcggtgaactcgcgcgagccctcccaggtcatcttctgcaatcgcagtccgcgcgtcgtgctgcccgtatgvctcaacttcgacggcgagccgcagccctacccaacgctgccgcctggcacgggccgccgcatccacagctaccgaggtacgggcccggcgcttaggcccg

SEQ ID NO: 223108 - DNA, 201 bp, Homo sapiens; identical to SEQ ID NO: 41192
  misc_feature (1)...(201): n = A,T,C or G

SEQ ID NO: 223109 - DNA, 201 bp, Homo sapiens
accgtgcccagccaccggtgtggctctttaacaacctttgcttgtcccgataggtcacctttggctcttcagagatgcagggacacacgatgggcttctgsttaaccaaactgaattatttgtgccatctctcaatgttgacggacagcctatttttgccaatatcacactgccaggtactgacgttttactttttaaaaa

SEQ ID NO: 223110 - DNA, 201 bp, Homo sapiens
aatggatttaaaatttgggatttgggccaggatcaaagttcttgacctcatagtttcaagcatttattttttatatatatatatatgtatatatatacgtrtatatatatatagcattttattttatctatataaaataaaaaattatatatgtatgtatatgtgtatagtatatatacgtgtacatacactgtatacgtc

SEQ ID NO: 223111 - DNA, 201 bp, Homo sapiens
tgtatatatatacgtatatatatatatagcattttattttatctatataaaataaaaaattatatatgtatgtatatgtgtatagtatatatacgtgtacrtacactgtatacgtcgtatacatacatgtatatacacatacatacatatacatatacagacacacacatatatatataatttccaaacaggctttactaa

SEQ ID NO: 223112 - DNA, 201 bp, Homo sapiens
tgaggcaagagaatcacttgaacctgggaggcagaggtttcagtgagctgagatggcaccactgcactccattctggacagcagagcaagactccatctcaaaaaaaaaaaaaaaaaaaaaaaacttggaaagtgggattccttaacacctttggatttttccaaagtaatcactatgttttggaatgtctaatctcatca

SEQ ID NO: 223113 - DNA, 201 bp, Homo sapiens
gaggcaagagaatcacttgaacctgggaggcagaggtttcagtgagctgagatggcaccactgcactccattctggacagcagagcaagactccatctcaaaaaaaaaaaaaaaaaaaaaaaacttggaaagtgggattccttaacacctttggatttttccaaagtaatcactatgttttggaatgtctaatctcatcat

SEQ ID NO: 223114 - DNA, 201 bp, Homo sapiens
aggcaagagaatcacttgaacctgggaggcagaggtttcagtgagctgagatggcaccactgcactccattctggacagcagagcaagactccatctcaaaaaaaaaaaaaaaaaaaaaaaacttggaaagtgggattccttaacacctttggatttttccaaagtaatcactatgttttggaatgtctaatctcatcatc

SEQ ID NO: 223115 - DNA, 201 bp, Homo sapiens
cacttgaacctgggaggcagaggtttcagtgagctgagatggcaccactgcactccattctggacagcagagcaagactccatctcaaaaaaaaaaaaaamaaaaaaaaacttggaaagtgggattccttaacacctttggatttttccaaagtaatcactatgttttggaatgtctaatctcatcatcttggtctttttg

SEQ ID NO: 223116 - DNA, 201 bp, Homo sapiens
gctgtagataaagccctggtagacaatttccaaaagaaatcaatttattgtttttactaccaaagtggaaacatgatataatttcagaaacaaataaaaamcccacctgaattctgtgggagataagttcccacattctcgggacatcaaagaacataattctgacctatcatcaatacctttgtttttctccctaaacac

SEQ ID NO: 223117 - DNA, 201 bp, Homo sapiens
ctccccgcaggagttgatagtactgagtgggctgcaagactgaaattggcttggtttcaagagggaggaggaggcagctctatgcagatttcttgtgaacrgagagattggacatctctctgcaactactggcacagcttgcctgctgaccaagtggatgaagtcaaagcaaaacctgatgctgagaagtgaagctcatga

SEQ ID NO: 223118 - DNA, 201 bp, Homo sapiens
gattcttagcttatagcttacaaaataaaaaggattgtcaaaataccaagcttggaaaatcatgttcctgttatagaaaacataaacattcctacagactmgaattcttaccaatttctttgtctaattaaccacattctgtcataacggaaaacggataaaaaggaatgaagctagccttttattttattttctgttttg

SEQ ID NO: 223119 - DNA, 201 bp, Homo sapiens
ctgtaacctctgcctcctgggttcaagtgattctcctgcttcagcctcctgagtagctgagactacaggtacatgccaccatgctcagctgatttttgtattttttttttttttttgagatggagactcactgtgtcacccaggctggagtgcagtggcatgatcttggctcactgcaaccactgcctcccaggttcaagt

SEQ ID NO: 223120 - DNA, 201 bp, Homo sapiens
cagtttttatagggttctgcacactccagggtaatgcagagaaagcaaccaagagttttgactatcccctgaccacccccccaccacctccccgcaggagytgatagtactgagtgggctgcaagactgaaattggcttggtttcaagagggaggaggaggcagctctatgcagatttcttgtgaacagagagattggaca

SEQ ID NO: 223121 - DNA, 201 bp, Homo sapiens
ctctctgcctccatgcttagctgtttaacatgacattcattcatcaaaaataaatgtccaagtcaatggagtgtttctgtaacagatattagtcaccttaracttgttactcatagcccataaactcttatcattctttctcagataacccagttgaccctacattagtagaaattgagagctctgagttcatttttgttg

SEQ ID NO: 223122 - DNA, 201 bp, Homo sapiens
aggctgtttgttacccacacaatgggtgggtttgattgcttggtggatgacagtccatttaccataatcgaggattcaacaaggagattttattacttgtrataagaagaatgctgaggatagttcccaaagcaaaaccttcctgaacaatggtgaaaacaagcttttattgggctggttaactgagtcattgtatgttga

SEQ ID NO: 223123 - DNA, 201 bp, Homo sapiens
cctggcctgggtgctaagtccctcactgcccggggccggccggcttctctgagtgtggggcctgccaagcccacgcccacccagaactttcactggcccamgagcaccacacgcagcccgggttcccacccgtgcctctccttccacacctccccgcaagcagagggggctggctccatacttggccagcccagagagggg

SEQ ID NO: 223124 - DNA, 201 bp, Homo sapiens
accatggcacactgtctattatttttggttagtagggagtatgagtactggcagatggttatgcagagctatgacttttttcaggtaatttttccccataraattttattagggattttcctcaagaattctaaaaagtcactcaaagtcaggtgaaaagtgaggggaggagtatagaggtgtccaggcttttgactgggt

SEQ ID NO: 223125 - DNA, 201 bp, Homo sapiens
aaagctcaaggtataacacttacaagtgagtgctttttcacagtggatacccaaaaacccagggaccctaagctacattttgtctgcactgaaaatctagwcttaaatagccaccttcatcagtgatcttagctagatattctggataacttgctgcagcttctccatcagctgctgctgcttcatcttgcactttttttt

SEQ ID NO: 223126 - DNA, 201 bp, Homo sapiens
aaaacgctcttttacctaaaaaacaataagaggttataacccctcagagaccacgagcctgtggtgtgttagcatttgttcaacaaacagtgggctctttmtgtatgccaggcagtgctttggacatcagttgaaagacaatactttcatgagtaattcatgatttcatgaggaggtcctactgcaagtatagtattgaag

SEQ ID NO: 223127 - DNA, 201 bp, Homo sapiens
aaggttaatattaataatgatttattttaaggcattcccaaatttgcataattctccttttggagatacccttttatctccagtgcaagtctggatcaaartgatagaaattccatgcagtgctatctctgatgccatgaattggtcactaagaagaattgacttttccattgagtttcccataactagggccaagttaaa

SEQ ID NO: 223128 - DNA, 201 bp, Homo sapiens
tatgtgtttgttaaaaagtaaatgaaaaattaaaacaatagcctgagtataaaactgggttacttaaaagtacttgtagttttacattgactgcctggaasgcagaattataaagtaaaagacagtgttagacaatatttccaaggctctccagtttgtaaagatttgttaatggatctcccagttcccttcctgtttctt

SEQ ID NO: 223129 - DNA, 201 bp, Homo sapiens
aatagcctgagtataaaactgggttacttaaaagtacttgtagttttacattgactgcctggaacgcagaattataaagtaaaagacagtgttagacaatmtttccaaggctctccagtttgtaaagatttgttaatggatctcccagttcccttcctgtttctttctcttgctgccttccttttctgattctctttttct

SEQ ID NO: 223130 - DNA, 201 bp, Homo sapiens
catttgctacatcctttatctcctctgcgcccctccctctactttttatggtttgtatgtttgttttgggaggagtgcatgtgtgtgtgtttgtgtgtgcrtgcgtgcatgtgtgtgtgtgtgtgtgtgtgtgtgtgtgtgtgtgtgtgtgtagtatttcagagaaaatcccaggctttatgccgttttactcctaaacct

SEQ ID NO: 223131 - DNA, 201 bp, Homo sapiens
aatttctttgagcttccgaaaaaattttaaaatcaacttgtcgagttttggttttaaaaagcagttggactttttaattggaattatgatgaatcaatttrgagaaactgacatttgatatcaggtctccctacccataaacttggtatctccctccatttatttaactcttatgagtacttttcaataagttttatataa

SEQ ID NO: 223132 - DNA, 201 bp, Homo sapiens
taagtaatcatgtatgtaccatgcagtggtctagatactgaacatagagaagtgagcaatggcatgccccatcttgcatagaatttacattcaaggtatgrtagaataggattttttcaactttgacccagctgacattttgagcaagataatactttgtagtaaagggctaccctttgtattgtagaatacatagcggca

SEQ ID NO: 223133 - DNA, 201 bp, Homo sapiens
aatatgaaattttattttcaagaacttaatgttacagttttattattaaagcatcagtatgtttttaaggtttgtcattatgatgtaccaatatcttttcycagtgctgccagctgctaggtggttcctccacacttgcaatacctaaatagctgcttgttgtcagctgattaaaagcgtggattttgtgggcaatgtacg

SEQ ID NO: 223134 - DNA, 201 bp, Homo sapiens
gtattattgctggaaagcttatataataatacctcataaaatatcatgcttttattacaaggaaaaaacctcatttgttgttaataaattatataaattawttttctcacaagtgcctaaatcaggcctaaaataagtcaaaataattacctgtagttgcagtggccttctgcagggcaatggactaaatgacttttttta

SEQ ID NO: 223135 - DNA, 201 bp, Homo sapiens
tttttaagctcctcttgagcctttggtttcagttttaatcgaactaaaacttatataagtaatgtgattaggatcacatagctaataaggccagggtcagrattagaactcctggcctcctaatttccagtcctgcagcccctactcttcacacctgaaccaactgagctatgaagtgatcttggtaagtgcacagtaatt

SEQ ID NO: 223136 - DNA, 201 bp, Homo sapiens
gtttctctgtgttttagggttgcagattcctctaaagagggctgcaagtgacataagggaatgaatggtccaggtgggtacacaattaataagagaacagrtctctgtccaacggggacaacaccactgtttgagttcaacttactatcatgtggggaaaaaaatgtttaatgtaatcagatcttctagtgagccaagaga

SEQ ID NO: 223137 - DNA, 201 bp, Homo sapiens
gaagaattaaccatgtcagtaacgaaaaggtggaccattgcagcatctgtcattattgtttctcattttgccttcttcttcctgtcttctccccattgccrtctcattttctctgcagccatgagcaggaactgtatgcaaagtacaaaagactgtattcctgaaacagaacttgttgaccccattttcttgactcttatt

SEQ ID NO: 223138 - DNA, 201 bp, Homo sapiens
cccaaagatttctgattctgtaatagtcctgtttcagtaattcttaatttgaagtttatagaaattagtgggtattggaaccttctgaaatgaaatacagrtacttacctttatgtgtaattgtgcttctggtgggggcgggggagatgggcttttattaaaaaatacaatgtcactgaagtaaataaaacttttaatgaa

SEQ ID NO: 223139 - DNA, 201 bp, Homo sapiens
gaaggacaaagccaaagggcagtttttatagggttctgcacactccagggtaatgcagagaaagcaaccaagagttttgactatcccctgaccaccccccmaccacctccccgcaggagttgatagtactgagtgggctgcaagactgaaattggcttggtttcaagagggaggaggaggcagctctatgcagatttcttg

SEQ ID NO: 223140 - DNA, 201 bp, Homo sapiens
gggtttgataatttatttgtttaaaatttgatataatttatctagaaaatctttaaatctggatcacactgggcatctaaacctttaaattaaaatacatsctgcaactttggtcctgcagcagtttttctcagtagagaatgaggaattagcttaaagctggtaagtgtgccaaccctaggttaaagctttacatctgtt

SEQ ID NO: 223141 - DNA, 201 bp, Homo sapiens
taatccattttggtttgattttttttgtgtatggtgagagataggggtttagtttcatttttcatatatagttatccagttttcccagcaccatttattgaaaagactctccttttcccattgcgtgttattgatgcctttgtcaaagataaggtggctgtaaatgcgtggatttatacctgagttctctcatctgtttca

SEQ ID NO: 223142 - DNA, 201 bp, Homo sapiens
cctaaagaagtattgtgtcatagatggggaaccaagatgcttattgaaagacacaggaaggggaacatcacactccggggacagttttggggtggggggakgggggaggaatagcattaggagatatacctaatgctaaatgaggagttaatgggtgcagcacaccaacatggcacatgtatacatatgtaacaagcctgc

SEQ ID NO: 223143 - DNA, 201 bp, Homo sapiens
aatcctaactaggtccttccagtgataccttgcacacagagatacatcctatgtctgtatcagtatttttcttcaaattgcaactctgatccatcagtggsttgtaaaatcaaattagcgagaccaacatcctttgctaccatagtataggatgggaagggtatggaatgaggctggagtacattacatgtaaaaaattgt

SEQ ID NO: 223144 - DNA, 201 bp, Homo sapiens
aaaaaattgttttttgaacctttccttcctgttatacatgtacacatcattgtgtagtgctgtaaaatgcatttcttactgtgggtcgtggagaaaaatgyttgaaatcagcagttagtttttaaagtagattacaggtgatgtacatctaaaaatttagccaattctaggattataatggtttggaatttgctgactttt

SEQ ID NO: 223145 - DNA, 201 bp, Homo sapiens
aattttgttacttattatttaccataagtggtttaaaatatacgtggcaaaacattctttagagctttgattgcaataattatcacataaccaacacctcytaagtattacgtacttaagaaggaacttgaactttatcttaacacaatagcattgacaaattactcacaaaattagtagttgtggaagaaaataggtata

SEQ ID NO: 223146 - DNA, 201 bp, Homo sapiens
gttcccctccctgtgtccatgtgttctcattgttcaactcccacttatgagtgacaacatgtggtgtttggttttctgtccccatgttactttgatgagamtgatggtttccggcttcatccatgtccctacaaaggacgtgaactcatccttttttatggctgcatagtattccatggtgtatatgtgccacattttctt

SEQ ID NO: 223147 - DNA, 201 bp, Homo sapiens
ctcaatctcctgggcccaagggaacctcctgcttcagcttcctgagtagctaagactataggtgtgtactaccacatctagctaatttttttatttttatkttttattttgtagatgtgaggttttgctgtgttgtccaggctggtcttaagcttcctcctggcctcaagcagttatcctgccttgacatcccaaaatgct

SEQ ID NO: 223148 - DNA, 201 bp, Homo sapiens
cagtaactaaagaagcagctagctggggtatctactcttgtaggggagcaggtagcctttctgggaggagagcacatattaactgacttaaacacctttgtttttttttttttctgtatttgctttaagtgatactgaatttgatggctttttctttggcttgctaaggataaaatgtagaaaatttaattctgcttggat

SEQ ID NO: 223149 - DNA, 201 bp, Homo sapiens
ttaaacatttgtgtttctacctctggcctgtagtccttggactcttgttccataggcgtagggttgtgaatggcaaaagaggatcttggtgttcttttatkaagtgataccaacatatttcacttctaggataatgacaatattggcaatatgaatcttaacatgagagttaactgattaactttttgtgtttttatggaa

SEQ ID NO: 223150 - DNA, 201 bp, Homo sapiens
aaatttgttgaattagttaaatgcatgtaactgtgccctaagcaaaatgtttattacccccacttcatggatcagaaaactgagctccatggaggttaagytgcgcacaggccacaaaggaagtaggtagcagaaccagaatctaaacccagttctaaactgagccttttatctccaattatagagaaggttgaggttgct

SEQ ID NO: 223151 - DNA, 201 bp, Homo sapiens
gttggagatagcagtgagctataatgatgccactatactccagcctgggcaacagagggagaccctgtctctgaaaaacaaaacaaaaattaaaaaggagmaaccagattaatgtttcttaagagaacatttcttacatcattccactccaaaaaagatgttgaagtacatgtgcatgctttgaaagctaacctgcaggtg

SEQ ID NO: 223152 - DNA, 201 bp, Homo sapiens
gatgtttaaacaatattcactagaatattctgtgtgctgagatttaagttattcaaagattatacatgttaagtgagagttttcaagtcatgttgaaacakttgtttacttttttaactgacttgggtttttttgcctttagtaatctcacaatagtaatagtgaatatatatatgtgtgagggttttttttgttttgttt

SEQ ID NO: 223153 - DNA, 201 bp, Homo sapiens
ggctaaggcaggagaatcgcttaaacctaggaggcgcaggctgtagtaagacgagatcgcaccattgcactccagcctgggtaacagagagagactccatytcaaaaaaaaaaaaaaagcaatttcattctcagcataaaatctttagataactcctttatagtttgttaagtttggagtttcaaatgtggtggaatttac

SEQ ID NO: 223154 - DNA, 201 bp, Homo sapiens
taattttagggtgtatgttagttattggtgcagtgctctcaaattggttttaagaaaagagcacttgaaatctcaaagaggggattttttttttttatgtrtactaacaacctgtttaaataaactgtagtttcatagtgagcctaatgatgttaaccataccattttagagctttgttacatgatttactgattcatggc

SEQ ID NO: 223155 - DNA, 201 bp, Homo sapiens
tgtccaaacgttatcagccagtcgatgggtgcaccagcaataatcattctgttttcaatgcaattgtctaggtagatctaactgctggtcttattaggccmccacttcatgatggtgtttattgagcctgatagagcattctttttttttttttttttttttttgagatggagtctcgctctgtcgcccaggctggattgc

SEQ ID NO: 223156 - DNA, 201 bp, Homo sapiens
ccaaacgttatcagccagtcgatgggtgcaccagcaataatcattctgttttcaatgcaattgtctaggtagatctaactgctggtcttattaggccaccmcttcatgatggtgtttattgagcctgatagagcattctttttttttttttttttttttttgagatggagtctcgctctgtcgcccaggctggattgcaat

SEQ ID NO: 223157 - DNA, 201 bp, Homo sapiens
cgcaacctactcatctgacaaagggctaatatccagaatctacaatgaactcaaaaaatttacaagagaaaaaacaaacccgcttggagttggcgtgtagygttaaaagctaaactccaaaggcttttggggctctattgctcttggggacacattgaaataaagaaatgtagagggcactcagagactggactgtgttag

SEQ ID NO: 223158 - DNA, 201 bp, Homo sapiens
gagcactttgcagatggatatcaggttaattgttatattgaaaagtgaaggagtacattctactaacagtctttctgctgagaaaaatctaattattgccrttaaggtggcattaagttagtaaattgggtaaataaacagttaaaatccccaaatttcttataacatgccataattgctttgcttgaaaatagttatcgg

SEQ ID NO: 223159 - DNA, 201 bp, Homo sapiens
cgaatgtagccctgcatttgcagtctttggattctaggtggctggttagttggtgagtaagggagactgtaggggtgcagtggagtgagggagttggcaayagcctgagcctgtaggggaaaagtgagatggtttagaaaatgtgagaaagtaggactgtaagagtttgagaatcaggctcccttgactaaggtggggcag

SEQ ID NO: 223160 - DNA, 201 bp, Homo sapiens
aaacttccaagatagaaaagtaaagggaaaaaagactgaaataaactgaacagaatatccaagaactgtggaacaacaataggtgtatcatatgcatgatragaataccaaacgaagtaaaaaaggaaaggaacagattaaatatttgaagcaggaacaacagaaattttcctgcaaattaatgtcccacactaaaccaca

SEQ ID NO: 223161 - DNA, 201 bp, Homo sapiens
caagaactgtggaacaacaataggtgtatcatatgcatgatgagaataccaaacgaagtaaaaaaggaaaggaacagattaaatatttgaagcaggaacarcagaaattttcctgcaaattaatgtcccacactaaaccacagattcaggaagctcagaaagcattaggataaatgcaaaaaaaaaaaaaaaagctacaca

SEQ ID NO: 223162 - DNA, 201 bp, Homo sapiens
attaaatatttgaagcaggaacaacagaaattttcctgcaaattaatgtcccacactaaaccacagattcaggaagctcagaaagcattaggataaatgcaaaaaaaaaaaaaaaagctacacatagtcatatcatattcaaattacagaaaatcagtgattaaaaatctggaatgaagcctgatggggtgtgcagggaga

SEQ ID NO: 223163 - DNA, 201 bp, Homo sapiens
acatgcaagtggtgaactggaagaaggtgacagattcagctgcaagtgctgaagggaaatctttgcctgaaggtagggcagtttcctaagagtggcacagyccattgctttaagcatgaacattttggtgtcaggctcaagttagcaggcgaatgtagccctgcatttgcagtctttggattctaggtggctggttagttg

SEQ ID NO: 223164 - DNA, 201 bp, Homo sapiens
aaggcattcccagtggaaatgggaagaggctgtgactggacataaacctaactactgtgtcattttactactcatgggagccattttatagaagaaagtgtttttttttttgtttttgtttttgagacagagtcttgctctgttgcccagactggagtgcagtggcaccataccagcccactgcaacctccgcctcccagg

SEQ ID NO: 223165 - DNA, 201 bp, Homo sapiens
ttcaaaatttaattaatataattcatcccgtcaacaggctaaagaaaattctcaggatcatatcaataaagaaagggcacttgacaaaattcaacacctaktcatgataaagacttggtaaactaggaatagaagagaacttccttaacaacattctgctcttacagcattgtactagaagtcctagctaatgtagtgaga

SEQ ID NO: 223166 - DNA, 201 bp, Homo sapiens
ttttaattcccataccccttttatcttttaagatatcctgaaactgtattctttcatgtatccaaatttctttacggtgattattatgctcgttgatttamaattaatcaactaagctttattgcaaacaaataaaattttttagtatattttaagacagtgtaaaatttgatttttgcatttttgttgtcagtttgcttt

SEQ ID NO: 223167 - DNA, 201 bp, Homo sapiens
agtaggttgtctaaaacaatagttgccaccagccagctttccagtttttcaggaaaatgctatgagtacaatatattaatatggatagatttaaatcattaaaaaaacttctctgatgcctgtgagctgtggtatatgtcagctgttaattttcttatccttttcttagataacattttatttaatagagctgtcttataa

SEQ ID NO: 223168 - DNA, 201 bp, Homo sapiens
cctgacatcaagattatactatcagtgaagccagagaagctatacttattcattgtagacattcttatctttttaaattttttatattaaaaaaaaaaaagaggctgggcattgtgtatcacgcctgtaatcccagtgctttgggaggccgaggtgggtggatcacgaacgaggtcaggagttcaagaccagcctggccaa

SEQ ID NO: 223169 - DNA, 201 bp, Homo sapiens
aacaactttgttttaataagtttgtttaaggctcatttttaataaatgaaatccacatacagtatcatgtgatgtagactgcaattttgctattagataamtggggaaaggaactatataaaggttattatttaaataaacaaataattgaaccatagttctattaaaagtaaaagaaacgtttaactatagtgtcatctg

SEQ ID NO: 223170 - DNA, 201 bp, Homo sapiens
ttttaaaagattacaaaagcagactataaattaatcccttttttttttttacatcatgtgattagaagtgtaggaagaaaacataccacgatgttaacagyagttttctttgcgtggatttatacacgagatggtctttactttcaacttcctgtcttgcatattgtctgaggtggttttctaaattattattaattactg

SEQ ID NO: 223171 - DNA, 201 bp, Homo sapiens
agaaatttcattttcagggaaatagttttcagatttaaataactgtaaagagctgagttattctttgacttggatttaaaaaaaaagaaaaaaagtgtccygaagtcatttcctgccagtttgtccccccaactttttttcctgctcttcctgtaactggttcttgttacggcaatgtagctgtatatttaaatcctaaga

SEQ ID NO: 223172 - DNA, 201 bp, Homo sapiens
acatcatgtgattagaagtgtaggaagaaaacataccacgatgttaacagcagttttctttgcgtggatttatacacgagatggtctttactttcaacttyctgtcttgcatattgtctgaggtggttttctaaattattattaattactgttttatagttagtgtgtataattttacaggtggaaaaaaaattttttaat

SEQ ID NO: 223173 - DNA, 201 bp, Homo sapiens
tgcatgagtgaggggtgcattttcagtgacaagtataacacttgaaatctgaagaattgttggtcttccatacagcgtacttggaatgaaacaaaggtttacaacaagttactacaagaggtagaaatagaactagggaacaatttgtttcatctactcaagtctgttgaagtataataattaacttctgaccattcttgg

SEQ ID NO: 223174 - DNA, 201 bp, Homo sapiens
gcatgagtgaggggtgcattttcagtgacaagtataacacttgaaatctgaagaattgttggtcttccatacagcgtacttggaatgaaacaaaggtttacaacaagttactacaagaggtagaaatagaactagggaacaatttgtttcatctactcaagtctgttgaagtataataattaacttctgaccattcttggc

SEQ ID NO: 223175 - DNA, 201 bp, Homo sapiens
aacattagcttttgatgatttttctcattttccctagtggatcctccttacctgactgctctaatatacccaaattcccaataccaaaaataggggaaatrtaaatcggggaaagagtgaaattagagaattggagggaaaagagtagaatctgggatctttaggaacctaagttactttttttttaattgctttgctttt

SEQ ID NO: 223176 - DNA, 201 bp, Homo sapiens
agatattgcatattaacgactttataaaacaaactgtgaatacatttgtcattatagattttcctaaccctctgcaaccaacagagctttcttgtagagcrgtgtattacagctttcctttcaaaatgtatttgtacattggccaaggaagcatctcttcattgtgaagatgttacaaatatcttgataggggaagaaact

SEQ ID NO: 223177 - DNA, 201 bp, Homo sapiens
catgagtgaggggtgcattttcagtgacaagtataacacttgaaatctgaagaattgttggtcttccatacagcgtacttggaatgaaacaaaggtttacaacaagttactacaagaggtagaaatagaactagggaacaatttgtttcatctactcaagtctgttgaagtataataattaacttctgaccattcttggcc

SEQ ID NO: 223178 - DNA, 201 bp, Homo sapiens
tggtggtggttgttgttgtttgagacggagtctctatcgcccaggctggagtgcagtggcgccatctcagctcactgcaagctccgcctgccgggttcacrccatgctcctgcctcagcctcccgagtagctgggaccacaggcgcccatcaccacgctgggctaattttttgtatttttagtagagatggggttttactg

SEQ ID NO: 223179 - DNA, 201 bp, Homo sapiens
ggtatatctcctagtgctatccctccctcctgccgccaccccacgatgggccctggtgtgtgatgttccccttcctgtgtccaggtgttctcattgttcarttcccacctatgaatgagaacatgcggtgtttggttttttgtccttgtgatagtttgctgagaatgatggtttccagcttcatctatgtccctgcaaagg

SEQ ID NO: 223180 - DNA, 201 bp, Homo sapiens
tccatttgcatggaatattttttttctatccttttattttcagtctctttgtgtctttataggtgaagtgtgtttcttgtaggcaatggatcattgggtctttttttttttttttttttttgagggcatctcgctctgttcccaggctggcgtgcagtggcgcaatctcagcttactgtaacctctgcctcctgggttcaa

SEQ ID NO: 223181 - DNA, 201 bp, Homo sapiens
acgattccatttatatagcgttcttgaaatgacaaagttgtggagatgaggacagagttgtagttgccaggaattgaagtaaagggagaaggcaactatgkctatcgcagggtaccatgaagaatgtttgtgatagagttgtttgtgtgttgactggtggtattcacacaaatctatacatgtgataaaattacatagaac

SEQ ID NO: 223182 - DNA, 201 bp, Homo sapiens
ccatttgcatggaatattttttttctatccttttattttcagtctctttgtgtctttataggtgaagtgtgtttcttgtaggcaatggatcattgggtctttttttttttttttttttttgagggcatctcgctctgttcccaggctggcgtgcagtggcgcaatctcagcttactgtaacctctgcctcctgggttcaag

SEQ ID NO: 223183 - DNA, 201 bp, Homo sapiens
aacatggcaaaaccctgtctctactaaaaatacaaaaattagctgggtgtggtggcgggcacctctaatcccagctacttgggaggctgaggcaggacaaycgcttgaacccgggaggtggaggttgcagtgagcaaagatcacgccactgcactccagcctgggcaacagagcgaaactctatctcaaaaaaaaaaaaaa

SEQ ID NO: 223184 - DNA, 201 bp, Homo sapiens
gggtcttctcattagtgtttttaagacctatcatttgccaaaaaggaaaaagtatagtgtggtaaaaaaaataatgaaaaatcattttagatgggaaagtrcgtttaaagaatgaattaagttatcctgccaaataataataaaaattcaagttgaatagcttaatctttaattagatgcctactagaagatgttaatttg

SEQ ID NO: 223185 - DNA, 201 bp, Homo sapiens
ttgttgtttagagaaacaaatatttcacttaaacaaacatcattctttactcacatgtcttttactcagaactatttgcccaagaaatgattcagagtttytttgtttcccttacttgaggaatttctgaagtcaagaacatttagatttttttttttttttttttttttttttttggattcggagttttactcttgttgc

SEQ ID NO: 223186 - DNA, 201 bp, Homo sapiens
acttaaacaaacatcattctttactcacatgtcttttactcagaactatttgcccaagaaatgattcagagtttctttgtttcccttacttgaggaatttytgaagtcaagaacatttagatttttttttttttttttttttttttttttggattcggagttttactcttgttgcccaggctggagtgcaatggtgcgatc

SEQ ID NO: 223187 - DNA, 201 bp, Homo sapiens
ctttcagaaagtcagcatagctttttgtctatattgacatcaacacactaggtcagcctatgcgtctaagagaaacatgtcaacatggctgtcttactgcrtttctcattgtttttctctagagtgatatcccttgaaggtcatattacagatcgttttatcaaaggcatgtcaacaatagtaactgggcaatggttggtt

SEQ ID NO: 223188 - DNA, 201 bp, Homo sapiens
atttttaaaaatttttcaaagaacttgatctgattgaaaagtcactgtatcttatgaaaattctcttcagtttatgtttagaagacttcattttggagttwcccttaaaaattaccagtgacctatttttgttgtcattgttcttgttgtttagagaaacaaatatttcacttaaacaaacatcattctttactcacatgt

SEQ ID NO: 223189 - DNA, 201 bp, Homo sapiens
cagtcccgatagttcaatgtgttgcttatttcactgatagaatgtggatgcattttataaacttagagaatttagaaaactcataaataaggaaaattggragttcttatccatgatcatgaggtacattggagaagagttggctgggcgcaggggctcatgcctataatcccagcactttgggaggccgaggcgggtgga

SEQ ID NO: 223190 - DNA, 201 bp, Homo sapiens
tgctatttctttattggttcatttgttttgctatttagatttatttccccattcagtctacatttataatgtggtggtctgttaatacagtaagcttgttrttggtaaatggagtcattctagtgaaatttattgtcagaaacacctgtacctgatttataactaatgcagcatggattttactttatgcaaattaaacaa

SEQ ID NO: 223191 - DNA, 201 bp, Homo sapiens
gacctgctaaaactttgttactttcataacttaaatatacgtcctttgataggtttgattcttttaaagatggttaaaactagactttaccatatttgctracatatgggataccttaaaaagtgcttttaaagtttaaagtttcacccttatctcttatctaactaaaagggcctttggagaaattacttccatttggta

SEQ ID NO: 223192 - DNA, 201 bp, Homo sapiens
tgaacttggctttgaagaatgggtgggatttggaaaggtaaaaggaaatagggatggctttacgtaagagaatgaatgagagcagaaacataaaaggggaraatttagtatagttattcttgggacagtgagtttaacaggttggccctccttcccatgtgggaggtaagatttgttaggactttctaggaagggtgttaa

SEQ ID NO: 223193 - DNA, 201 bp, Homo sapiens
atggtctcaatctcttgacctcatgatccacccgcctcgacctcccaaagtgctgggattacaggcgtgagccaccatgcccagccaataaaatttatttaaaaaaaaaaaaaaaaaagctatactgaacaagatagggccacctcaaaagtaaacgtgaaaagaaagattagaatcattgataaggcattggtattaaaa

SEQ ID NO: 223194 - DNA, 201 bp, Homo sapiens
gcaagggttctatcctgaggccttcacagatccactgatcaataaatgttttcatactactgctgagttagaggtgctgggcagttggttagaattgctcrttaccttggtgccttgcacaccagcttagatggatagagtgggtcaaattgatgctttatccttacagacctctaacaggtagattcactgccccttata

SEQ ID NO: 223195 - DNA, 201 bp, Homo sapiens
gtttccttcagttctgctctgattttagttatttcttgccttctgctagcttttgaatgtgtttgctcttgcttctctagctcttttagttgtgatgttasggtgtcaattttagatctttcctgctttctcttgtgggcatttagtgctataaatttccctctacacactgctttgaatgtgtcccagagattctggtat

SEQ ID NO: 223196 - DNA, 201 bp, Homo sapiens
cctgctttctcttgtgggcatttagtgctataaatttccctctacacactgctttgaatgtgtcccagagattctggtatgttgtgtctttgttctcgttggtttcaaagaacatctttatttctgccttcatttcgttatgtacccagtagtcattcaggagcaggttgttcagtttccatgtagttgcacggttttgag

SEQ ID NO: 223197 - DNA, 201 bp, Homo sapiens
tccctttcgtgggggtgtattgctgatctctgttgaaggagctgtttgaaagtcagagagccctgaactttaaactttgagacctgtatactagaccatgstagggtggggaagagggttcagtttgttttgccatcacaacacaattaccggggactcagctggctgacccttctgtttgccagaccacaacacaaatga

SEQ ID NO: 223198 - DNA, 201 bp, Homo sapiens
acggttttgagtgagtttcttaatcctgagttctagtttgattgcactgtggtctgagaggcagtttgttgtaatttctgttcttttgcatttgctgaggwgtgctttacttccacctatgtggtcagttttggagtaggtgtggtgtggtgctgaaaagaatgtatactctgttgatttggggtggagagttctgtagat

SEQ ID NO: 223199 - DNA, 201 bp, Homo sapiens
taattatgctcacagttttgtgagctgtacaggcttctgcttctggggaggcctcaggaaacttacaatcatggcagaaggtgaaggggaaggaggcacakcttcacatggcctgcaggagagagacagtgaagtgggaggtgctacaaactttcaaacaaccatatcttattagaactctatcacaaggacaggaagggg

SEQ ID NO: 223200 - DNA, 201 bp, Homo sapiens
ctacagggttggaaagaaccttctcaggacccttggtgagagatgttggagggatggtgagtggttattccaaggtactagagtattcagtttccctttcrtgggggtgtattgctgatctctgttgaaggagctgtttgaaagtcagagagccctgaactttaaactttgagacctgtatactagaccatgctagggtgg

SEQ ID NO: 223201 - DNA, 201 bp, Homo sapiens
ggtttaaagtctgttttatcagagactaggattgcaacccctgccttttttgtcttccatttgcttggtagatcttcctccatccctttgttttgagcctrtgtgtgtctctgcacgtgagatgggtttcctgaatacagcacactggtgggtcttgactctttatccaatttgccagtctgtgtcttttaattggagcat

SEQ ID NO: 223202 - DNA, 201 bp, Homo sapiens
caggtccctcctccaacactgaggattacaattaaacatgacatttgggtggggacacaaccaaaccatatcagtagccttctttccttgaacttgccctrgagagcctccttattcttgctccacatggaccattcaggattttgctattcactgtgtatttttaagtcatttctcctgcccacctcctttcctgccagt

SEQ ID NO: 223203 - DNA, 201 bp, Homo sapiens
tgcatttctcagtgaaggattctgcctgttgaagagaagaatgtaatctattgccaattggggttttgtatttgaagtcctctgatttctaaaataagcayaaattgttttcttgtctttcatcttcacagcctttctatgcatagaaatcttgaatatggtctttttctggcaagtgtctgaataagggtttacaatgcc

SEQ ID NO: 223204 - DNA, 201 bp, Homo sapiens
tgttttcctttggcttagtcagtctacagggttggaaagaaccttctcaggacccttggtgagagatgttggagggatggtgagtggttattccaaggtaytagagtattcagtttccctttcgtgggggtgtattgctgatctctgttgaaggagctgtttgaaagtcagagagccctgaactttaaactttgagacctg

SEQ ID NO: 223205 - DNA, 201 bp, Homo sapiens
ctcttctcgagaagtatctttgtggtgttctctgtatttcctgaatctgaatgttggcctgccttgctagattggggaagttctcctggataatatcctgyagagtgttttcccacttggttccattctccccgtcactttcaggtacacccatcagacgtagatttggtcttttcacatagtcccatatttcttggaggc

SEQ ID NO: 223206 - DNA, 201 bp, Homo sapiens
ctttgaggccctcagtgactccatagtctgtaatagtagttctatcatggtgattctagttgttcattagattctgattcatctggtctgatttgggatcyaggcctttttgttgttggggcagggtgggagttccagaagctgttcaagctctttttaaagcagtggactccttttattcaaagagtatttaaagaaatt

SEQ ID NO: 223207 - DNA, 201 bp, Homo sapiens
ccctccttgcttccttgagatctcagcatttagtgaagtgaaaagttctctgctcacaagaaagatcctccccccaatccggggtttgacagacaggtctrtatggtgtgattccatggatatgtggtatataatatgccagaatgtttgacctaccaggtaggaatctaaccatatcttcctccacaagcactaacattt

SEQ ID NO: 223208 - DNA, 201 bp, Homo sapiens
gtctctactaaaaatacaaaaaaattagctggatgtggtggcaggggcctatagtcctagctacttttgaggctgaggcaggagaattgcttgaacctggraggcagaggttgcagtgagtggagatcgcaccactgcactccagcctgggcaacagagcaaggctctttgtcaaaaaaaagaacaacaaaaaacaaaaaa

SEQ ID NO: 223209 - DNA, 201 bp, Homo sapiens
aatattgctcacatgagcccttgctgagaaatctactggaaaatgagtttcagacaaccaaaatgaaaaacaaattgtagagacatcagaataaggactgrtgaaattttgtttcttagcacttagatacaggaccatgtgactgagtcctggccaccgacaaggggtagcagaaatacaaggtacttccaagcaccatcc

SEQ ID NO: 223210 - DNA, 201 bp, Homo sapiens
tatgtataattgagtaaagctgcaggaaagaaaagcacttaggaaatgcctcttcagattttcaagatcttttcacacctctcttggagaaaagaatttaaaaaaaaaaaacctaaatggattctaattattttctttatctgtggtattttgttttgttaaatagtgtgttatataatgaatagtggaattgggttcagt

SEQ ID NO: 223211 - DNA, 201 bp, Homo sapiens
caccgtgttggccaggctggtcttgaacttgattacccaagtatttcttttttaaaaatatttttaattgaggtaaaatatacatacatgatttaccatckttaccatttttagtgtaaagttcagtgaatatacatttatatatttatattctttttttcctcttgatccccccactccccttcctggcctctggtaact

SEQ ID NO: 223212 - DNA, 201 bp, Homo sapiens
ctttgggagaccaagggaggaggcttgcttgaggccaggagtttgagaccagcctaggcaacatagtgagaccctgtttctacaaaacatttaaaaattartggggtctggtggcatgtgcctgcggtcccagctattcaagaggctgaggtgggatgattgagcccagatcaaggctgcagtgagctgtgatcatgccct

SEQ ID NO: 223213 - DNA, 201 bp, Homo sapiens
atatacccagtaatggaatggctgggtcaaatagtacttctagttctaggtccttgaggaatcaccacactgtcttccacaatggttgaactagtttacaktcccaccaacagtgtaaaagtgttcctatttctccacatcctctccagcacctgttgtttcctgactttttaatgatcgccattctaactggtgtgagat

SEQ ID NO: 223214 - DNA, 201 bp, Homo sapiens
ttgagtggctgaggcagaatgatcacttgagcccaggagatcagaaccagcctgggcaaaatagggaaagcccatctgtacaaatatatatatatatatattttttttttaattagctgagcatggtggcacatgcctgtggttccagctactcaagaggttgaggtgggaggattgcttgagcccaggagatggaggctg

SEQ ID NO: 223215 - DNA, 201 bp, Homo sapiens
atggtgaggaggggacaaggtgtgctaatttgtctggtagaagagtgtctgaggtagaaaagggcatgctgacatgttagagggaccagtgggagattagwgtgactggagaggagtgagccatggaaagagtgggaggagatgagagagaggaagtaggggattgagccatgatgaatcccgtaggatatggtaaagact

SEQ ID NO: 223216 - DNA, 201 bp, Homo sapiens
tgagtggctgaggcagaatgatcacttgagcccaggagatcagaaccagcctgggcaaaatagggaaagcccatctgtacaaatatatatatatatatattttttttttaattagctgagcatggtggcacatgcctgtggttccagctactcaagaggttgaggtgggaggattgcttgagcccaggagatggaggctgc

SEQ ID NO: 223217 - DNA, 201 bp, Homo sapiens
gtcaaaagaatgtatgagccaactctaaggagctctcagtggccaaattagggacactttgagcactataataatgggccataacccataaaataaaaagwagtatccagatataattaagtaaattcaaaggggagaaaggaacacactttcttgccatggaattccaattagtaaatgaagagtcattgatataggaaa

SEQ ID NO: 223218 - DNA, 201 bp, Homo sapiens
ttctagtgtaagaaatattaaccaaatacttgaaagtcagtaattggcgaaactgccttctttgatttagggggacatcctgcattttgttggcggtctaraaacaaagatttattgtttccaatgatttggataaatagggtattctttgattcaaaattattagatacaacattttagcaaatatatgaagtatcaatg

SEQ ID NO: 223219 - DNA, 201 bp, Homo sapiens
tcaaaagaatgtatgagccaactctaaggagctctcagtggccaaattagggacactttgagcactataataatgggccataacccataaaataaaaagargtatccagatataattaagtaaattcaaaggggagaaaggaacacactttcttgccatggaattccaattagtaaatgaagagtcattgatataggaaat

SEQ ID NO: 223220 - DNA, 201 bp, Homo sapiens
atgagtatctgagtctggctgagtctggggtttttatttgctcagaatggaggaagtaggtgctgactggtccatggtcgggcctggaaaaagcaccattygactggctaaaaggcgtcaatgaagttctcactctaagttgcagactccaccttggattggcagcccagtccccagacttcaggctgttcctggcttgaa

SEQ ID NO: 223221 - DNA, 201 bp, Homo sapiens
gctctcagtggccaaattagggacactttgagcactataataatgggccataacccataaaataaaaagaagtatccagatataattaagtaaattcaaasgggagaaaggaacacactttcttgccatggaattccaattagtaaatgaagagtcattgatataggaaattaccatttgaaaagaaacactacagtaata

SEQ ID NO: 223222 - DNA, 201 bp, Homo sapiens
gaaagtcttcacattcttttctactgcctataagtcggatatttgactgttttaaatattgtgtcgtctccattagcatttgttctccactatagcaaagraaatgaccctgaggacactatgttttgactaccaagaaagaattctcgtctggccctgacttaacgtcacaatgcacagggatagaaaacttgtttgtat

SEQ ID NO: 223223 - DNA, 201 bp, Homo sapiens
gttggaggagggaggaaagctattgacagaaacactatttatttctgtctagctaaaaagaggatttaagcattatggggggtactttgatttagtttagtttttttttttttttgagacagggtcttgttttgttgcccaggctggagtgcagtggcacaatcatggctcactgcagcctcaagcccctgggcccaagtg

SEQ ID NO: 223224 - DNA, 201 bp, Homo sapiens
tggtagcataactagtggtctgacatgaaaaactcttaaaacttaccctatattgggtctttaactgctattttatgttaaaaccttacatattagtatgwatatatatatgtgaatgcatacatatacaaactacattttcttatttttaaaatatcttaaggtacatgaaggagttaacatgttcatgaaacattgtga

SEQ ID NO: 223225 - DNA, 201 bp, Homo sapiens
cgtggcactcacctgtagtcccatctactcaggaggctgaggcaggagaatcgcttgaacctggggaacagaggttgcagtgagccgagatggcgccactacactctagccggggcgacagagactccatctaaaaaaagaaaaaaagttctgaagtgaacatgtgtattacttttaaagtaaacttttgtgaagtatgtg

SEQ ID NO: 223226 - DNA, 201 bp, Homo sapiens
tattaccatttcaacatgtagttgttcattaataattattaaattaataggtaaatagtaattattaaaattattaatgagctattttactttcttttgcrttaagtcttcaaacttaggtatatattttacacatacagcacatttcaatttgccctagccacatttcaagtgcttagtagccacatggctaccatatta

SEQ ID NO: 223227 - DNA, 201 bp, Homo sapiens
gcctcccgagtagctgggattacaggcacctgccaccacactcggcctattttttgtatttttagtggagacagggtttcgccatgttggccaggctggtsttgaactcctgacctcaggtgatccacctgcttcagcctcccaaggtgctggattacaaccgtgagccaccacgcccggccagaagttcctttacatttt

SEQ ID NO: 223228 - DNA, 201 bp, Homo sapiens
caaagggtattgagtgatccactcactggtcccataaaacagtgaacactggaaactctgagagaaacactctaagcacataaaatttaaggacaataaartgatactggaagaaatattcttgtaaagaggaaaaccttctgtagtactgagccagatgaagcttcagttttggcattttcctaaccttacaggaaaggg

SEQ ID NO: 223229 - DNA, 201 bp, Homo sapiens
gacaataaaatgatactggaagaaatattcttgtaaagaggaaaaccttctgtagtactgagccagatgaagcttcagttttggcattttcctaaccttayaggaaagggcttttatggaaccagatcaagacatggaacagacaccctgtgttgattgtctgtaaatttgaaaacaaattatatttcattgtccacttga

SEQ ID NO: 223230 - DNA, 201 bp, Homo sapiens
aaaagatcatcatgggaaaggtagactgtaagtgtgaattattgatacttttcatttttcctcaccctaagagacagtgcctgaaataggtacctttcttwtcccacttgtcaaggctgagaaacttaatacataccataatcacaacttttgagatagaattgaattgctgtcattcaaaacagcaggacatcttacaac

SEQ ID NO: 223231 - DNA, 201 bp, Homo sapiens
catttaccatcttgaagattatcccatatttgtatgtgtagatctttgttagaatcacataatattatattgaacaagtgtaccataagttttcctgtgaytgacatacagggattttttttaatcttttgccatcacaaataacgtttcactgagtatctttgtacatactgtctttgtggacttctgcaaatatatccg

SEQ ID NO: 223232 - DNA, 201 bp, Homo sapiens
ttattttccactactcccagttggtaaagtcagaaatgctgacattagcaacaggtgcatcttggtttcattacattagtcagtggatccatcttgatacrgattttctctttctctagagaatagatggatctggaaagtaggtatttgaatgattttctgttggtactcaatctcttaaaatgattggcatgtcactgg

SEQ ID NO: 223233 - DNA, 201 bp, Homo sapiens
agtaaagggctaccctttgtattgtagaatacatagcggcatgcctgatctctacccactaaatgccaatagcaatctcccctgtccctcattgtgacaasaaaaatttctccagatgttgccaagtataccctgaaggaggggatcaccctgttgagaaccactgtgttagcactgacatccatatctactggtgactag

SEQ ID NO: 223234 - DNA, 201 bp, Homo sapiens
ctactcttcacacctgaaccaactgagctatgaagtgatcttggtaagtgcacagtaattcagttttttgcctacagcctttctttcctgcctgcctgcctttttttttttttttctatttattttattatttttgttttttgagacagtcttaccctgtcacccaggctggagtgcagtggcacgatctcagctcactgc

SEQ ID NO: 223235 - DNA, 201 bp, Homo sapiens
ttcatgttttctgaagcttactctcaaatagttgtagggacaaaataaacttggggtgtgtgtgtgtgtgtgtgtgtgtgtgtgtgtgtacatatatatakagagagagatacatacatatgtatagagagagagataaagcagatttagcaagctgttaacagttggtgagtctgtttactataggtttgaattttttta

SEQ ID NO: 223236 - DNA, 201 bp, Homo sapiens
gtaatcctgtacattattttcattttacatttatcaaatctgtaaatatgctgcgtcttacagaattgccttggggagtgtgagacctataaaaaatgtaragaaaagaaacgaaaaggaggacattctccttctgtttgtgtttatgtcactgtctttagttaaacagcaagtgtgatatggtcagtcatttattacatg

SEQ ID NO: 223237 - DNA, 201 bp, Homo sapiens
gtggcactcacctgtagtcccatctactcaggaggctgaggcaggagaatcgcttgaacctggggaacagaggttgcagtgagccgagatggcgccactacactctagccggggcgacagagactccatctaaaaaaagaaaaaaagttctgaagtgaacatgtgtattacttttaaagtaaacttttgtgaagtatgtgg

SEQ ID NO: 223238 - DNA, 201 bp, Homo sapiens
aatgttcagcaagtatgtttgtagtggttgaacggagttgccaaaagtagtgtaatgcaataacagtaagacaatgaaattatagggtaacaaatacactrtgacattttagtggaagaggtgttagggccttaagtggtttttttaatgatagaataatagcatggctaaaatatgtgctatgttgtattgttatcttgt

SEQ ID NO: 223239 - DNA, 201 bp, Homo sapiens
ggtggaacagccgtttttaaatccgtatgtgattatgttattggataacttgtcctaaggcacaaaaactcatttgtagaaaactcatataaccagctaattttttttttttttttttttgaggcagagtctcgctctgttgcccaggctggagtgcagtggcacgatctcagctcactgcaagctccgcctcccgggttc

SEQ ID NO: 223240 - DNA, 201 bp, Homo sapiens
ttaatgatagaataatagcatggctaaaatatgtgctatgttgtattgttatcttgttggaatttgatttttaaaaatgcagacacattaaacagtgtttyttcatggtttacattatttcttgtcgtcattggttgtgactaggtaagaatgggtgatttgaggcaatgatgttaaatgtaaaactctctctccctttat

SEQ ID NO: 223241 - DNA, 201 bp, Homo sapiens
gaaaaattgcctttatgatgagctggggaagtaaacagacatcataattgctatgaagaaaaccagggatgagttttagtgtggggttctagttttatttygggttgagaaagcttttctaaggaggtgaaatcttaattgagagcaaaaagttgttaggtacataaggtgtgggggaccattagtattacaaactgcatg

SEQ ID NO: 223242 - DNA, 201 bp, Homo sapiens
tgctgcatggtttttcatggccactggtggaattctgtgatgggggaacaggaaatctggacacagaagggtgggaataaaatgagcctgtgctgctttcaaaaaaaaaaaaaaaaagaatagtccataggctaaagcttattgctagggttaccacctagaacagggaagcttaattgtgaattagaaagtagatttttt

SEQ ID NO: 223243 - DNA, 201 bp, Homo sapiens
tcccgggttcgcgccgttctcctgcctcagcctccggagtagctgggactacaggcgcccgccaccacgcccggctaattttgtgcatttttagtagagamagggtttcaccatgttagccaggatggtctcgatatcctgacctcaggtgatctgcccgcctcggccttccaaagtgctgggattacaggcgtgagccac

SEQ ID NO: 223244 - DNA, 201 bp, Homo sapiens
gctgcatggtttttcatggccactggtggaattctgtgatgggggaacaggaaatctggacacagaagggtgggaataaaatgagcctgtgctgctttcaaaaaaaaaaaaaaaaagaatagtccataggctaaagcttattgctagggttaccacctagaacagggaagcttaattgtgaattagaaagtagattttttt

SEQ ID NO: 223245 - DNA, 201 bp, Homo sapiens
attcactcccttgattttgtttatccaattgttcagatctccaatatccttactaatctttagtctggttgacctatcagttactgtggtgaaaatgtccstctttgattatagctatgtcattttctccttataattttgcacatttttactttgtatacttttggctatattgttagatacagcacattcagaattgtt

SEQ ID NO: 223246 - DNA, 201 bp, Homo sapiens
aagccagaagagagtggggacaaatattcaacattcctaaagaaatgaattttcagcccataatttcatatccagccaaactaagcttcataagtgaaggrgaaataaaatactttacagagaagcaaatgctgagagattttgtcaccaccaggcctgccctaaaagagctcctgaaggaagcactaaacatggaaagga

SEQ ID NO: 223247 - DNA, 201 bp, Homo sapiens
atctggtgtttgactggatgctggatgccctggtggagtggcagcacctgcagagatctgcatgtgtgtttttcttggttcagagctattttgaacatagrgtaccaaaagactgtctttagaaccctgagatttttgtatatttcaacttaaaatttaagaacatttatgaacataatattaatcaataatattcacatc

SEQ ID NO: 223248 - DNA, 201 bp, Homo sapiens
aaatattcaacattcctaaagaaatgaattttcagcccataatttcatatccagccaaactaagcttcataagtgaaggagaaataaaatactttacagasaagcaaatgctgagagattttgtcaccaccaggcctgccctaaaagagctcctgaaggaagcactaaacatggaaaggaacaaccggtaccagccactgc

SEQ ID NO: 223249 - DNA, 201 bp, Homo sapiens
atttactaaaaaaccattttggccagaatggtttcaaagtttttagttccattaaaaactagtggacatttcccaaaaactagtactagatgagtgtcagrgttgattaaagtttagaaattgttttaagaactttaattcagctgatatttagttgctagcccacatgtcctgaagattttcaaccatctttggtttgga

SEQ ID NO: 223250 - DNA, 201 bp, Homo sapiens
attgcccagggacgggcaggagacagatgccttcctcttgtctcaactgcaagaggcatgccttcctcttatactaatcctcctcagcacagaccctttaygggtgtcgggctgggggagggtcaggtctttcccttcccacgaggccatatttcagactgtcacatggagagaaaccttggacaatacctggctttccta

SEQ ID NO: 223251 - DNA, 201 bp, Homo sapiens
caatttcataagtggaggtctgcaacaaaatagatgtacttaagcaagatgaagctccattgctttatcttgcttaagacgggtttaataggaatttcttytggctgtttcccgtgcccccccccccccccactttttttttttttttttttttttaagatattagagtctcatgaggcccagactggactctaattccta

SEQ ID NO: 223252 - DNA, 201 bp, Homo sapiens
ggtaaagggatcaattcaacaagaagagctaactatcctaaatatatatgcacccaatacaggagcacccagattcataaagcaagtccttagtgacatasaaagagacttagactcccacacaataataatgggagactttaacaccccgctgtcaacattagacagatcaacgagacagaaagttaacaaggataccca

SEQ ID NO: 223253 - DNA, 201 bp, Homo sapiens
agcacccagattcataaagcaagtccttagtgacatacaaagagacttagactcccacacaataataatgggagactttaacaccccgctgtcaacattaracagatcaacgagacagaaagttaacaaggatacccaggaattgaactcagctctgcaccaagcgacctaatagacatctacagagctctccaccccaaa

SEQ ID NO: 223254 - DNA, 201 bp, Homo sapiens
gaatatacatttttttcagcaccacaccacacctattgcaaaattgaccacataattggaagtaaagctctcctcagcaaatgtaaaagaacagaaattayaacaaactgtctctcagacctcagtgcaatcaaactagagctcaggattaagaaactcactcaaaaccgtgcaactacatggaaactgaacatcctgctc

SEQ ID NO: 223255 - DNA, 201 bp, Homo sapiens
cccattagccgtcactcttcactactctcccctcactccctggcaaccacttacccattttatttttttattaattttttttttgagacagggtcttgctmtgtcactcaggctggaatgcagtggtatcaatcatatttttattttttgtagagatcgagtcccactacgttgcccaggctggtgctccctgagcttccc

SEQ ID NO: 223256 - DNA, 201 bp, Homo sapiens
gctcttcttagtttttaatccctgatttctttaaaaagtatgtttctagatatgtgataattcagtctggactttgtgaatctaaatatttgcctttactwcggcaatttggatgctccttggctctttggaattctgtatgtgggctgacgctgaaatagagtgttttcatataatgccataccccattctctttcccct

SEQ ID NO: 223257 - DNA, 201 bp, Homo sapiens
actcatcactccaataagaattttaagtctggttaaaatattaaacatgaattgacaccacagtggtttggtatcatgcacgttagaaataactgctcaarttaaatgctgatgtttaattcttttgttatctttataggaatggttctccagtattattttattactgattttttaatgattatcctagactgggtaatt

SEQ ID NO: 223258 - DNA, 201 bp, Homo sapiens
ttacagcctttttctcaagcgttggttagattaactgaacttctgaatacctttgtggtattttaaaaatctgaaatcacttgtctacaaatagtatttcttttttttttttggccttaaagttttaataatgaaatttttctatgtagtcctctttaaaatatttaagtatagtaggaagcagcagagtttgttccacct

SEQ ID NO: 223259 - DNA, 201 bp, Homo sapiens
gtatttattcattttcacactcgggagttttagttgccactccatatcagtggcacagccatgatgatttttcccttgtccaatcatgaaggtttaaaaamacctgtacagtttttagtctcttattatgatatcaattaaggtgattttataggaagaatatcaattaagggtgattttataggaagaaaaatgtaccct

SEQ ID NO: 223260 - DNA, 201 bp, Homo sapiens
aaattgaccacataattggaagtaaagctctcctcagcaaatgtaaaagaacagaaattataacaaactgtctctcagacctcagtgcaatcaaactagarctcaggattaagaaactcactcaaaaccgtgcaactacatggaaactgaacatcctgctcctgaatgactactgggtacataacgaaatgaaggcagaaa

SEQ ID NO: 223261 - DNA, 201 bp, Homo sapiens
gtcattaaccaatattttaggtactgtggagatacaaaaaagatgagatagtggaaagatgttgagattgtaaccatttacataaaaatgggagggtcatmggaaaaaactccatagagcacttactgtctgataaaagagggtatataattgataagttttacaatgtttgaaagaagatgcaaagaaaatattgagttc

SEQ ID NO: 223262 - DNA, 201 bp, Homo sapiens
tctcctcagcaaatgtaaaagaacagaaattataacaaactgtctctcagacctcagtgcaatcaaactagagctcaggattaagaaactcactcaaaacygtgcaactacatggaaactgaacatcctgctcctgaatgactactgggtacataacgaaatgaaggcagaaataaagatgttctttgaaaccaacgagaa

SEQ ID NO: 223263 - DNA, 201 bp, Homo sapiens
gatgttgagattgtaaccatttacataaaaatgggagggtcataggaaaaaactccatagagcacttactgtctgataaaagagggtatataattgataarttttacaatgtttgaaagaagatgcaaagaaaatattgagttctcatatgtggtaaacattatgctgaatattgtcatattctcatttatttaaatttca

SEQ ID NO: 223264 - DNA, 201 bp, Homo sapiens
cataccagaatctctgggacacattcaaagcagtgtgtagagggaaatttatagcactaaatgcccacaagagaaagcaggaaagatccaaaattgacacyctaacatcacaattaaaagagctagaaaaacaagagcaaacacattcaaaacctagcagaaggcaagaaataactaaaatcagagcagaactgaaggaaa

SEQ ID NO: 223265 - DNA, 201 bp, Homo sapiens
accatcatatctgttatcttagcatcttaaaccttttatgaggtctaccaaataattggttttgtttcctcttgacctttgtaaaatgaagaaaaaccatrcctctttgagttcataaactgtgttttgcatatttacacacatacatcttttatcctcccaccaattatttgacctgaggttgaacacttaatggataag

SEQ ID NO: 223266 - DNA, 201 bp, Homo sapiens
ataccagaatctctgggacacattcaaagcagtgtgtagagggaaatttatagcactaaatgcccacaagagaaagcaggaaagatccaaaattgacaccstaacatcacaattaaaagagctagaaaaacaagagcaaacacattcaaaacctagcagaaggcaagaaataactaaaatcagagcagaactgaaggaaat

SEQ ID NO: 223267 - DNA, 201 bp, Homo sapiens
tttgtttgaaaagaatataaacttagaacaagactagaacattatgaaacaacttccacgtaatgtcacaccaggacaagttattatcaagtgatcttacrtgatagtcactagtacttcaggagataagtttgccggaggaagtatatcaacaatttactaaaaaaccattttggccagaatggtttcaaagtttttagt

SEQ ID NO: 223268 - DNA, 201 bp, Homo sapiens
aggagacttcaggtgaatagctacccataagttgttgaaaataatcaatatttatatttattggcatccagtcaataaatatatatgagctagtcttgttstatcacccaagctggcatgcagtggtgtgatcatggctcgccgaagcctccacatcctgggctcaagtggggctcaagtgatccttccacctcagcctcc

SEQ ID NO: 223269 - DNA, 201 bp, Homo sapiens
agcactaaatgcccacaagagaaagcaggaaagatccaaaattgacaccctaacatcacaattaaaagagctagaaaaacaagagcaaacacattcaaaasctagcagaaggcaagaaataactaaaatcagagcagaactgaaggaaatagagacacaaaaaacccttcaaaaaagtaatgaatccaggagctggttttt

SEQ ID NO: 223270 - DNA, 201 bp, Homo sapiens
tgaggtttcaccatgttggccaggctggtatagaactcctgacaggtgatccacctgcctcagcctcccaaagtgctgggattacaggcgtgagccaccgygcccgaccccaatcttatatttggttttatttctcccatttgtctctctaaatcccttagttgataagttaattacactatctttgtttgaaaagaatat

SEQ ID NO: 223271 - DNA, 201 bp, Homo sapiens
gctcgccgaagcctccacatcctgggctcaagtggggctcaagtgatccttccacctcagcctcccaagtagttgggactacaggtgtatgccaccatgcstggctaattttttttttttttttttttttcgagatggagtctcgctctgtcgcccaggctggagtgcagtggcgcaatctcggctcactgcaagctccgc

SEQ ID NO: 223272 - DNA, 201 bp, Homo sapiens
taaggccagcatcatcctgataccaaagccgggcagagacacaaccaaaaaggagaattttagaccaatatccttgatgaacattgatgcaaaaatcctcrataaaatactagcaaaccgaatccagcagcacatcaaaaagcttatccaccatgatcaagtgggcttcatccctgggatgcaaggctggttcaagatatg

SEQ ID NO: 223273 - DNA, 201 bp, Homo sapiens
agcctcccgaatagctgggattacaggcgtgcactaccacgcccggctaatttgtgtatttttagtagaaatgaggtttcaccatgttggccaggctggtmtagaactcctgacaggtgatccacctgcctcagcctcccaaagtgctgggattacaggcgtgagccaccgcgcccgaccccaatcttatatttggtttta

SEQ ID NO: 223274 - DNA, 201 bp, Homo sapiens
tcggctcactgcaagctccgcctcccaggttcacgccattgacctgcctcagcctcctgagtagctgggactacaggcgcccgccaccatgcctggctaatttttttttttttttttttttgtatttttagtagagacggggtttcagtatgttggccaggatggtcttgatctcctgacctcatgatccgcccacctcag

SEQ ID NO: 223275 - DNA, 201 bp, Homo sapiens
aagatatgcaaatcaataaatgtactccagcatataaacagaaccaaagacaaaaaccaccatgattatctcaatagatgcagaaaaggcctttgacaaarttcaacaacacttcatgctaaaaactctcaataaattaggtattgatgggacgtatctccaaataataagagctatctatgacaaacccacagccaatat

SEQ ID NO: 223276 - DNA, 201 bp, Homo sapiens
agtcttgttatgttgcccacgttggtcttgaaatcctagacccaagcagtcctcctgcctcagctcccaaagtgcctttctgggctttttattcttttttsattttcttcagaaagccagttcctaaataataaaaaaagtaaaagaatttatttattctctttttattccaatttattaattaatactcaaatattaatg

SEQ ID NO: 223277 - DNA, 201 bp, Homo sapiens
attaggaaaagaggaagtcaaattgtccctgtttgcagatgacatgatagtatatctagaaaaccccatcgtgtcagcccaaaatctccttaagctgatamgcaacttcaacaaagtctcaggatacaaaatcaatgtacaaaaatcacaagcattcttatacaccaatagcagacaaacagagagccaaatcatgagtga

SEQ ID NO: 223278 - DNA, 201 bp, Homo sapiens
tgagataccatctcacaccagttagaatggcaatcactaaaaagtcaggaagcaacaggtgctggagaggatgtggagaaataggaacacttttacactgytggtgggaatgtaaactagttcaaccattgtggaagacagtgtggcaattcctcagggatctagaactagacataccatttgacccagccatcccattac

SEQ ID NO: 223279 - DNA, 201 bp, Homo sapiens
gcaatggtaggatcaggtaactttctagtgtgatcagtcatcaggatcttctgctaatttggaggaggatgctatgatatgtgtctcctcaaaattcttaygttgaaatctcatccccagcgcaataatattaagaggtgaggcctttacaaagtgattaggtcatgaaagtggagctgtgataagtgggattagtgccct

SEQ ID NO: 223280 - DNA, 201 bp, Homo sapiens
aacttaaagtataataataatgaaagacaaaaaagaagtcatgcttcctcttatatccaaatgccaacttggtaagaagggaggagataactgtagggagrggtagaaatttttatggattaaacagccaaagcaaagtgttttaaatcagaagatactgagatgcctttttaaatgacaaggttgatttttttcctgtga

SEQ ID NO: 223281 - DNA, 201 bp, Homo sapiens
cacaatcgagtcaccacctaccaggccccacctccaacaatggggattacagttgaacatgagatttgggtggggacacagattcaaactatatcacattscaatggtaggatcaggtaactttctagtgtgatcagtcatcaggatcttctgctaatttggaggaggatgctatgatatgtgtctcctcaaaattcttat

SEQ ID NO: 223282 - DNA, 201 bp, Homo sapiens
taaataaataagaattgcttcccttccctcatttgagctttcagaaacagggatggtggtaaaccgttcatgaaggatccacctccacaatcgagtcaccrcctaccaggccccacctccaacaatggggattacagttgaacatgagatttgggtggggacacagattcaaactatatcacattgcaatggtaggatcag

SEQ ID NO: 223283 - DNA, 201 bp, Homo sapiens
tgaaaataaatgtgtagattaaaattcaggttattttaatttgatggctaaaataaaatgtgtgtattaactcagatttttttttttttaaattttgagayggagtcttgctctttcgcgcagactggagtgcagtggcatgatctcggctcactgcaagctctgcctcctgggttcatgccattctcctgcctcagcctc

SEQ ID NO: 223284 - DNA, 201 bp, Homo sapiens
ggtctgcaacaaaatagatgtacttaagcaagatgaagctccattgctttatcttgcttaagacgggtttaataggaatttcttctggctgtttcccgtgcccccccccccccccactttttttttttttttttttttttaagatattagagtctcatgaggcccagactggactctaattcctaggcacaagtgatcctc

SEQ ID NO: 223285 - DNA, 201 bp, Homo sapiens
gtctgcaacaaaatagatgtacttaagcaagatgaagctccattgctttatcttgcttaagacgggtttaataggaatttcttctggctgtttcccgtgcccccccccccccccactttttttttttttttttttttttaagatattagagtctcatgaggcccagactggactctaattcctaggcacaagtgatcctcc

SEQ ID NO: 223286 - DNA, 201 bp, Homo sapiens
caccagacttgctttacaagatgtcttgaagggagtgctagatatagaaaggaaagactgtgttaccaaccatcacaaaaacacatttaagaacgtagacyagtaatgctataaagcagcaacacaatcaagtctgtgtgataaccagctaacaacatgatgatgaaatcagacctgcatataccaatattaaccttgaat

SEQ ID NO: 223287 - DNA, 201 bp, Homo sapiens
tctgcaacaaaatagatgtacttaagcaagatgaagctccattgctttatcttgcttaagacgggtttaataggaatttcttctggctgtttcccgtgcccccccccccccccactttttttttttttttttttttttaagatattagagtctcatgaggcccagactggactctaattcctaggcacaagtgatcctccc

SEQ ID NO: 223288 - DNA, 201 bp, Homo sapiens
aaacgtttaaaagattgggtagtagttagagtctgagtaactaacattttaataaataatagaatctataaccaattgtgtacttttttattttaaaaaawttttttaatagaaatggggttttgctccattgcctaggcttgagtgcagtgacacaatcatggctcactgcagcctaaacctcctgggctcaagtgatcc

SEQ ID NO: 223289 - DNA, 201 bp, Homo sapiens
atgtacttaagcaagatgaagctccattgctttatcttgcttaagacgggtttaataggaatttcttctggctgtttcccgtgcccccccccccccccactttttttttttttttttttttttaagatattagagtctcatgaggcccagactggactctaattcctaggcacaagtgatcctcccacctcagcctccgta

SEQ ID NO: 223290 - DNA, 201 bp, Homo sapiens
tgggaggccaaggcgggtggatcatttgaggtcaggagttcaagaccagcctgcccaacatggtgaaatcctgtctctactaaaaatataaaaattagcckgctgtggtggtggacacctgtaatcccagctactcaggaggctgaggcaggagaatcgcttgaaccctggaaatggaggttgcagtgagccgagatcacg

SEQ ID NO: 223291 - DNA, 201 bp, Homo sapiens
caaaaattacctgggcgtggtggcatgtgcctgtagtctcagctacctgggaagctgatgtgggaggatctcttgagcccaggaggccaaggttgcaatgwgtagagattgtgccactgcactccagcctgggtgacagagcaagaacctgtctcaaaaaaattaaaaaggaaaaaaagaaaagtaatggaactcagtatt

SEQ ID NO: 223292 - DNA, 201 bp, Homo sapiens
attatgaagtagctcctcacatctgaagaaatgttccacagagattccaccatgtttcttcaagattatgtatttatttatttttttattttatttttttwattatactttaagttttagggtacatgtgcacattgtgcaggttagttacatatgtatacatgtgccatgctggtgcgctgcacccactaactcgtcatc

SEQ ID NO: 223293 - DNA, 201 bp, Homo sapiens
catgtggttgaggccacagggaaccattggtaaggatttctctctcacataggaagcttgttttaggtgggcagtacatttgaaacccacttggaggtctstctaatgttgacagtggggtgttaaagtctcccattgttattgtgtgggagtctaagtctctttgtaggtctctaaggacttgctttatgaatctgggtg

SEQ ID NO: 223294 - DNA, 201 bp, Homo sapiens
tgtccatgtgatctcattgttcaattcccacctatgagtgagaatatgcggtgtttggttttttgttcttgcgatagtttactgagaatgatgatttccartttcatccatgtccctacaaaggacatgaactcatcattttttatggctgcatagtattccatggtgtatatgtgccacattttcttaatccagtctatc

SEQ ID NO: 223295 - DNA, 201 bp, Homo sapiens
aaaccgaatccagcagcacatcaaaaagcttatccaccatgatcaagtgggcttcatccctgggatgcaaggctggttcaatatatgcaaatcaataaacrtaatccagcatataaacagaaccaaagacaaaaaccacatgattatctcaacagatgcagaaaaggcctttgacaaaattcaacaactcttcatgctaaa

SEQ ID NO: 223296 - DNA, 201 bp, Homo sapiens
ttatgattgtcagtttatgattattttattaggtatattttatgaaatatcaacaaactaaggtgatttacactactcttcataattacgaatactttaatttttttttttttttttttttttgagacgaagtctcgctctgtagcccaggctggagtgcagtggcgcgatctcggctcaccgcagccaccacctatcggg

SEQ ID NO: 223297 - DNA, 201 bp, Homo sapiens
catgattatctcaacagatgcagaaaaggcctttgacaaaattcaacaactcttcatgctaaaagctctcaataaattaggtattgatgggacgtatctcmaaataataagagctatctatgacaaacccacaggcaatatcatactgaatgggcaaaaactggaagcattccctttgagaactggcacaagacagggatt

SEQ ID NO: 223298 - DNA, 201 bp, Homo sapiens
tatgattgtcagtttatgattattttattaggtatattttatgaaatatcaacaaactaaggtgatttacactactcttcataattacgaatactttaatttttttttttttttttttttttgagacgaagtctcgctctgtagcccaggctggagtgcagtggcgcgatctcggctcaccgcagccaccacctatcgggt

SEQ ID NO: 223299 - DNA, 201 bp, Homo sapiens
agagctatctatgacaaacccacaggcaatatcatactgaatgggcaaaaactggaagcattccctttgagaactggcacaagacagggattccctctctyaccactcctattcaacatagtgttggaagttctggccagggcaattaggcaggagaaggaaataaagggtattcaattaggaaaagaggaagtcaaattg

SEQ ID NO: 223300 - DNA, 201 bp, Homo sapiens
atgattgtcagtttatgattattttattaggtatattttatgaaatatcaacaaactaaggtgatttacactactcttcataattacgaatactttaatttttttttttttttttttttttgagacgaagtctcgctctgtagcccaggctggagtgcagtggcgcgatctcggctcaccgcagccaccacctatcgggtt

SEQ ID NO: 223301 - DNA, 201 bp, Homo sapiens
aaatcctttataactcactgcatcccttccttaggaactcttaatacatctgcctcatcccatttatctgtgtcttgaaagggaataaacaggacccaaayggtagattatcccaatgtacaacaattcagcatgagaaattccatgttaatgacattgttacagtataaaagaaccttttaaatctgagacttggtttta

SEQ ID NO: 223302 - DNA, 201 bp, Homo sapiens
tttaaactaagttattctttgttattgtaccaatatgatttttttttaggctgctgaatagggaaatagtatatccatcaatgaaatgcattatttctttaaaaaaaaaaaaggaaaaatttcagtttcatgccatataaaactattaataaattaacctcacaatttatctaagcccttaacgtgctcaaagtgatggtt

SEQ ID NO: 223303 - DNA, 201 bp, Homo sapiens
acgcctgtaatcccagtactttaggaggccaaggcaggcggatcatgaggtcaggagttcaagaccagcctgaccaacatggtgaaaccccgtctctactaaaaatacaaaaattagctgggtggggcacatgcctgtaatcccagctactcaggagactgaggcaggagaatcacttgaacctgggaggtggaggttgca

SEQ ID NO: 223304 - DNA, 201 bp, Homo sapiens
cacatcccttgtaagttggattcctagatattttattctctttgaagcaattgtgaatgggagttcactcatgatttggctctctgtttgtctcttattgstgtataagaatgcttgtgatttttgtacattgaatttgtatcctgagactttgctgaagttgcttatcagcttgaggagattttgggctgagacagcggg

SEQ ID NO: 223305 - DNA, 201 bp, Homo sapiens
ttattggtggtgatgttccttatagtaacaatgatgaacttttatagagcacttcctgtatgccagacaggaacccattaactcatttaatctttacagtygtttaagtactcatcttatccacattgtgtggatgaagaaactgaagtataattagataaatttacccaaagccacactattgagattctacttgagggc

SEQ ID NO: 223306 - DNA, 201 bp, Homo sapiens
atgtttcttttgaaatgcagaccatggttccaagaagtttatgctcacagaatcaggagccttgcattgaaaaggtgtaagtcttgctaatagcctaaaaktctatttttttcacccaactgcagcattaaatattggaggtaagactacagacctaaagagcagactgggaagcaacaaattatcttattggtggtgatg

SEQ ID NO: 223307 - DNA, 201 bp, Homo sapiens
tttctgtgctgtaccctgtgtcgagcactgggatgtaacagtgtgcaatacaaagtccttgtccttaaggaattgataatctagctgggaaggcctacttsatgaattacagatgagtttagcacaaattgtcattgagagatgctgtgtgctttaggacgatttcacataggagtctaacccagactgggagttcaggga

SEQ ID NO: 223308 - DNA, 201 bp, Homo sapiens
ggttgaattcatccctctgcttttgtgaatagcgctgcagtgaatgtacaagtgcaagtgtctttttggtagaacaatctattttcctttgggtatatacmcagtaatgagactgttgtgtcaaatggtagttttgttttgatgacattatttagagggacatgagagtcctataccctggggtgaaatgctttaattgct

SEQ ID NO: 223309 - DNA, 201 bp, Homo sapiens
aaatacgcaaagatatttctaaactagtgcagtgaatatagagagcctttataaacatgcatcaaaccagaaaatattaaagaaagatggactgctttgamttcttaaattttttaaatttatatttggccagagacatcataagctaggttaaaggacaaatcatatactgggagaaaatattttttccacacataatag

SEQ ID NO: 223310 - DNA, 201 bp, Homo sapiens
atatgaatcttaacatgagagttaactgattaactttttgtgtttttatggaattgctcaattggttatcataaatagattttgttaaattccagcctttrtgtaatttctaagcacatttcatttgtatgtcttatttcagtgctggacccaaaggagacaacatttatgaatggaggtcaactatattgggacccccag

SEQ ID NO: 223311 - DNA, 201 bp, Homo sapiens
atcagactagtcattccccagaggtccttctaactttgaaattttgtctctgacatcacaaataatttcatgctttcattaaacatttgtgtttctacctmtggcctgtagtccttggactcttgttccataggcgtagggttgtgaatggcaaaagaggatcttggtgttcttttatgaagtgataccaacatatttcac

SEQ ID NO: 223312 - DNA, 201 bp, Homo sapiens
tgttgtttccaattttgctattataaatagtgcttcaataaacattattctcaatgtcttctggtgatacacacatgtaaaagtttctctgtagtgtatamctgggagtatagttgctatgttgtaaaataggtgtacagttgacccttgaacaactcagggtttagaggtaccagccccctgtgccatcaaaaattcatg

SEQ ID NO: 223313 - DNA, 201 bp, Homo sapiens
tggatttacccatttttctgtcagtagccatttgtgttgtttccaattttgctattataaatagtgcttcaataaacattattctcaatgtcttctggtgrtacacacatgtaaaagtttctctgtagtgtatacctgggagtatagttgctatgttgtaaaataggtgtacagttgacccttgaacaactcagggtttag

SEQ ID NO: 223314 - DNA, 201 bp, Homo sapiens
taggcatttaagatgtgtatgtaggtgtcatggattatctggtctggcatgatgctagaagggcagttctcattagaagtactaatttaacctgagaatgrtgtctcttgttcgacaaccacataagtctctagatttgccctttctgagacttcgcatcatgtaaattacataaatctggtgtttgactggatgctggat

SEQ ID NO: 223315 - DNA, 201 bp, Homo sapiens
aactggaagcattccctttgagaactggcacaagacagggattccctctctcaccactcctattcaacatagtgttggaagttctggccagggcaattagrcaggagaaggaaataaagggtattcaattaggaaaagaggaagtcaaattgtccctgtttgcagatgacatgattgtatatctagaaaaccccattgtct

SEQ ID NO: 223316 - DNA, 201 bp, Homo sapiens
ccatttcctgtctggctaccaccccagcagcaatgagctaggcaggtccctgcctctgggtccttgactgtggtcaagactctttccacccccctcctccttttttttttttttttttgcctctccagtggatgaatttgctccttttgtgtagtgggctctccctgtcacaagatgtccctcatctaaggtgagggtcag

SEQ ID NO: 223317 - DNA, 201 bp, Homo sapiens
acgcccacccagaactttcactggcccacgagcaccacacgcagcccgggttcccacccgtgcctctccttccacacctccccgcaagcagagggggctggctccatacttggccagcccagagaggggctcccacagtgcagcagcggactgatgggctcctcaagggtggccagagcagacgccaaggccgaggaggcg

SEQ ID NO: 223318 - DNA, 201 bp, Homo sapiens
cgcccacccagaactttcactggcccacgagcaccacacgcagcccgggttcccacccgtgcctctccttccacacctccccgcaagcagagggggctggctccatacttggccagcccagagaggggctcccacagtgcagcagcggactgatgggctcctcaagggtggccagagcagacgccaaggccgaggaggcgc

SEQ ID NO: 223319 - DNA, 201 bp, Homo sapiens
gcctgtaatcccagaactttgggaggccaaggtgggcagaacacttgaggtcaggagtttgagaccagcctggccaaatacagggaaaccccgtctttacyaaaaaatacaaaaattacctgggagtggtggtgcacacctgtagtcccagcaggctgaggcaggagaatcacttgaactcaggaggtggaggttgcaatg

SEQ ID NO: 223320 - DNA, 201 bp, Homo sapiens
tttgatacccttttaagttatgaaactcatattgttgaagaaatacctggattcattaagaaaatgatttttttccctctttctttcccctcttcttcttmtctcttcctttcccgacccccttcctttcctggaaggtctttctgttatatgaacagagtgacgagtccctctctgttgcccactgtgttgcggcaggct

SEQ ID NO: 223321 - DNA, 201 bp, Homo sapiens
tccaaacctcggcagtaaaaaaccagtcatagcaaattattagatgtgatttatgacttattgatagcattaggatagcagtcacatgttcattttccagttttttttaataatttgataattttaaaaggatactaaattatcccttctttactgttcttagaatttatgttcattttactgatgaggtcttgagtcatc

SEQ ID NO: 223322 - DNA, 201 bp, Homo sapiens
ttcttttataatagcactaatcccatcgtcagggacccaccctcatgacctaatataacctcagttacttccaaatggcctcacctccaaattctgtaacrctggggacttgagttgcaatatatgaattttagggagacaaatattcagtcaatagcagaggtaacacttacgttagtgaggaagaatttttaaagattt

SEQ ID NO: 223323 - DNA, 201 bp, Homo sapiens
cttccaaatggcctcacctccaaattctgtaacactggggacttgagttgcaatatatgaattttagggagacaaatattcagtcaatagcagaggtaacacttacgttagtgaggaagaatttttaaagatttcatgtttgttttagatataactacttaaaatacatgggaatgtttctgtaatataaaaaaatgccat

SEQ ID NO: 223324 - DNA, 201 bp, Homo sapiens
ttccaaatggcctcacctccaaattctgtaacactggggacttgagttgcaatatatgaattttagggagacaaatattcagtcaatagcagaggtaacacttacgttagtgaggaagaatttttaaagatttcatgtttgttttagatataactacttaaaatacatgggaatgtttctgtaatataaaaaaatgccatt

SEQ ID NO: 223325 - DNA, 201 bp, Homo sapiens
tccaaatggcctcacctccaaattctgtaacactggggacttgagttgcaatatatgaattttagggagacaaatattcagtcaatagcagaggtaacacttacgttagtgaggaagaatttttaaagatttcatgtttgttttagatataactacttaaaatacatgggaatgtttctgtaatataaaaaaatgccattg

SEQ ID NO: 223326 - DNA, 201 bp, Homo sapiens
aaaaccactgaactcatgaagatagagagtagaagaatggttaccagaggctggaaaaggtagttggtgtcagagggagggaagtgagcacagctaatggrtacaaacagttagaaagaatgaaaaagacctagtgtttgctagcacaacagggtgactataataaaaaataatttaattgtacatgttaaaataactaaa

SEQ ID NO: 223327 - DNA, 201 bp, Homo sapiens
tattgctggtagttgtcagtcactatatctagctaattttcgataatatcttttggttcatttattcatttaggcattcattcagtactaattcggccctstttctgtgctgtaccctgtgtcgagcactgggatgtaacagtgtgcaatacaaagtccttgtccttaaggaattgataatctagctgggaaggcctactt

SEQ ID NO: 223328 - DNA, 201 bp, Homo sapiens
tacaagattttaaacttctgatatattttaactgaaagaaggtgaaaaaaaatattaaatccaagaatgagaatttagagtgaaataaaaatgaaaaaaascaagaaatatgttacgacttttagagctagatgtgaaacatactgatataaaatttcagtgttctattaagtgactttagtgctcataaaagatgtcaca

SEQ ID NO: 223329 - DNA, 201 bp, Homo sapiens
atatttatgggatacaggagatattttgacacaggcttacacatcaaggtaaatgtggtatccatcccctcaagcatttatcctttgtgttacaaacaatmcagttatactccttcatatggtttggatctgtgtctccaccaaatctcatgttgaattgtaatcgccagtgttggaggtagggcctggtgggaggcgatt

SEQ ID NO: 223330 - DNA, 201 bp, Homo sapiens
gtttttctgcatctaggtggtcccatctgtgggtgatgggagacagtgtcaggtcattaggtactagattctcataaggaatacacagcctagatccttcrcatgtgcacttcacagtagggtttgcattcctgtgagaatctattgccaccgctgatgtgacagaagaggacattagcatgcaagatgtcatacagctgg

SEQ ID NO: 223331 - DNA, 201 bp, Homo sapiens
ataattatataactcaccatcatgtagaatcagtgggagccctgagcttgtttttctgcatctaggtggtcccatctgtgggtgatgggagacagtgtcargtcattaggtactagattctcataaggaatacacagcctagatccttcacatgtgcacttcacagtagggtttgcattcctgtgagaatctattgccacc

SEQ ID NO: 223332 - DNA, 201 bp, Homo sapiens
gtcttcgtatctaattggcagatgtagtgacaggataagagtcttcactttagaattagagcagtggtcccccacctttttggcactagggaccagtttcrtagaagacagtttttcaacagacggcatgggtcggggagatggttttgggatgattcaagcacgttacatttattatacactttatttatattattacat

SEQ ID NO: 223333 - DNA, 201 bp, Homo sapiens
ccaaatggcctcacctccaaattctgtaacactggggacttgagttgcaatatatgaattttagggagacaaatattcagtcaatagcagaggtaacacttacgttagtgaggaagaatttttaaagatttcatgtttgttttagatataactacttaaaatacatgggaatgtttctgtaatataaaaaaatgccattgt

SEQ ID NO: 223334 - DNA, 201 bp, Homo sapiens
ttcaagtaatccagttgtactccctgaggtctgttctaaatttataattattactgactgtagccaccctgttgttctatcaaatactagatcttattcatttttttttcatttttctatagcttcttgttggaaaaaaaaatatatatatatatatttatatatttacctgttaaccatctccactccccccaccccatg

SEQ ID NO: 223335 - DNA, 201 bp, Homo sapiens
tttataattattactgactgtagccaccctgttgttctatcaaatactagatcttattcatttttttttcatttttctatagcttcttgttggaaaaaaawatatatatatatatatttatatatttacctgttaaccatctccactccccccaccccatgcctcccactactctccctagcttctggtaaccatctttct

SEQ ID NO: 223336 - DNA, 201 bp, Homo sapiens
tataattattactgactgtagccaccctgttgttctatcaaatactagatcttattcatttttttttcatttttctatagcttcttgttggaaaaaaaaatatatatatatatatttatatatttacctgttaaccatctccactccccccaccccatgcctcccactactctccctagcttctggtaaccatctttctac

SEQ ID NO: 223337 - DNA, 201 bp, Homo sapiens
acacattttaggattactttttctgtttctgtggagaatgtcgttggtattttgatagagaatgcatttaatctgtagattgccttcagtagtatggacgktttaacagtattgattcttccaatcaatactgtttttttggtgtgtatgtgtccttttcagtttatttcaccagtgttttgtagtttttattgtagagag

SEQ ID NO: 223338 - DNA, 201 bp, Homo sapiens
tctgtttcttctaggttttcagatggattggcatatctttgctcatagtgcccctaatgatcctttggatttctgcagtgttggttgtaatgtctctctctttttttttttttttacatctctgattttattcatttgggtgttttctctttttttcttagttcacctggctaaagacttgtcaattttctttctcttttc

SEQ ID NO: 223339 - DNA, 201 bp, Homo sapiens
gaggtgggaagatcgcttgagcctaggagttcaaggctgcagtcagctatgaacaatgcactgccctccagcctgggagacagagcaagaccctgtctttaaaaaaaaaaaaaaaaaaacgtgagcctagggctgcttctagcctatagaatatcttttgctgactagatgcagattctccttggggtagatgcatagctt

SEQ ID NO: 223340 - DNA, 201 bp, Homo sapiens
tggctagtggaagtttgggaatacctacacgagagggagtttggagcagtattccggttggaacagggtttatgtagcttgtacgttgcacagcctttggrtttgttgtatacattgtaatatgcaccacttgcacttctattaagagtctagggattgccttaaagctggattttcataggaagtgcacatttggtaatt

SEQ ID NO: 223341 - DNA, 201 bp, Homo sapiens
gtattccatggtgtatatgtgccacattttcttaatccagtctgtcattgttggacatttaggttggttccaagtctttgctattgtgaatagtgccgcartaaacatacgtatgcatgtgtcttcatagcagcatgatttataatcctttgggtatatacccagtaatgggatggctgggtcaaatggtatttctagttc

SEQ ID NO: 223342 - DNA, 201 bp, Homo sapiens
gttcatatccttcacccactttttgatggggttgtttgtttttttcttgtaaatttgtttgagatcattgtagattctggatattagccctttgtcagatragtaggttgcaaaaattttctcccattctgtaggttgcctgttcactctgatggtagtttcttttgctgtgcagaagctctttagtttaattagatccca

SEQ ID NO: 223343 - DNA, 201 bp, Homo sapiens
tgcttttgagaccagctaatacacttaactacactgtatgagctgtgggtgttccgcttatttttattacaggctttattactgtgcaattttgttgtacrttaacaatcatccactttaaactagtgcttaaatacttattgaatgtggtagccaaagagcaaaaaaaagatctcaatgtaacatccaattgcttactaa

SEQ ID NO: 223344 - DNA, 201 bp, Homo sapiens
cttatgatgcctttaatactttattcctgtgataagatgtgaatggaaggaaaaaataaatattactttttggtggaaaagtgtacccagttgtttattcrtacagaaaataattattgaatgtcagtttctgtatgccaggcactgtttcaggcacctaggatactgtggtggaccaaaatcttatactcatatcttttc

SEQ ID NO: 223345 - DNA, 201 bp, Homo sapiens
cttaatctctggtgtcctgtcaagcagggtagtttatcataatggttacctttctggtttttttacttcagtcttcgtatctaattggcagatgtagtgayaggataagagtcttcactttagaattagagcagtggtcccccacctttttggcactagggaccagtttcatagaagacagtttttcaacagacggcatgg

SEQ ID NO: 223346 - DNA, 201 bp, Homo sapiens
agtaagaatgggccaacttggcccacatactgtagtacaagctgataagtagtcattagaagatgatgatctaagactactaaataagctctcacagacargtcatatgaaaccacgtttatatctaatgatttaagtgtaaagcatgtaggcaaacgctactagtcatcacactgtaatgtacagctttcagtacagaaa

SEQ ID NO: 223347 - DNA, 201 bp, Homo sapiens
cctgttccctgcccctgccagcttcacagagcatgcagccccagatgtgcctcccccactgtggccagtgtctccacagtggccaatccggttgcgctacyaccgccatcaatagtataaacttacatagccattactatgagccaggcactgttctaggcaccttacatatattaattcatttgatgctcacatcaactt

SEQ ID NO: 223348 - DNA, 201 bp, Homo sapiens
ctttcagcaggcaggttgtaccaatgagtatctgagtctggctgagtctggggtttttatttgctcagaatggaggaagtaggtgctgactggtccatggycgggcctggaaaaagcaccattcgactggctaaaaggcgtcaatgaagttctcactctaagttgcagactccaccttggattggcagcccagtccccaga

SEQ ID NO: 223349 - DNA, 201 bp, Homo sapiens
cccatttgtcaattttggcttttgttgccattacttttggtgttttagacatgaagtccttgcccatgcctatgtcctgaatggtattgcctagcttttcytctagggtttttatggttttaggtctaacgtttaagtctttaatccatcttgaattaatttttgtataaggtgtaaggaagggatgcagtttcagctttc

SEQ ID NO: 223350 - DNA, 201 bp, Homo sapiens
ttacttttggtgttttagacatgaagtccttgcccatgcctatgtcctgaatggtattgcctagcttttcttctagggtttttatggttttaggtctaacrtttaagtctttaatccatcttgaattaatttttgtataaggtgtaaggaagggatgcagtttcagctttctacctatgggtagccagttttcccagcacc

SEQ ID NO: 223351 - DNA, 201 bp, Homo sapiens
gtgtaaggaagggatgcagtttcagctttctacctatgggtagccagttttcccagcaccatttattaaatagggaatcctttccccattgcttgtttttstcaggtttgtcaaagatcagacaatgagggctctgttctgttccattggtctatatctctgttttggtaccagtaccatgctgttttggttactgtagcc

SEQ ID NO: 223352 - DNA, 201 bp, Homo sapiens
tgtgaaaaaagtcattggtagcttgatggggatggcattgaatctataaattaccttgggcagtatggccattttcacaatattgattcttcctacccatkagtatggaatgttcttccatttctttgtatcctcttttatttcattgagcagtggtttgtagttctccttgaagaggtccttcacatcccttgtaagttg

SEQ ID NO: 223353 - DNA, 201 bp, Homo sapiens
ggtccttcacatcccttgtaagttggattcctagatattttattctctttgaagcaattgtgaatgggagttcactcatgatttggctctctgtttgtctsttattgctgtataagaatgcttgtgatttttgtacattgaatttgtatcctgagactttgctgaagttgcttatcagcttgaggagattttgggctgaga

SEQ ID NO: 223354 - DNA, 201 bp, Homo sapiens
agctcttattattttgagatacgtcccatcaatacctaatttattgagagcttttagcatgaagagttgttgaattttgtcaaaggccttttctgcatctrttgagataatcatgtggtttttgtctttggttctgtttatatgctggattacgtttattgatttgcatatattgaaccagccttgcatcccagggatgaa

SEQ ID NO: 223355 - DNA, 201 bp, Homo sapiens
tttagcatgaagagttgttgaattttgtcaaaggccttttctgcatctgttgagataatcatgtggtttttgtctttggttctgtttatatgctggattaygtttattgatttgcatatattgaaccagccttgcatcccagggatgaagcccacttgatcatggtggataagctttttgatgtgctgctggattcggttt

SEQ ID NO: 223356 - DNA, 201 bp, Homo sapiens
gagattcaacttcttcctggtttagtcttgggaggatgtatatgtcagggaattaatccatttcttccagattttctagtttatttgcatagaggtgtttrtagtattctctgatggtagtttgtatttctgtgggatcagtgttgatatccccgttatcattttttattgcatctatttgattcttctctcttctttatt

SEQ ID NO: 223357 - DNA, 201 bp, Homo sapiens
tgtatatgtcagggaattaatccatttcttccagattttctagtttatttgcatagaggtgtttatagtattctctgatggtagtttgtatttctgtgggwtcagtgttgatatccccgttatcattttttattgcatctatttgattcttctctcttctttattagtcttgctggcggtctatcaattttgttgatgttt

SEQ ID NO: 223358 - DNA, 201 bp, Homo sapiens
ggaaattggtgcatttgaacacaaattttagctttgagcttcctggcagccagtggggtgtgtgtgtgtgtgtgtgtgtgtgtgtgtgtgtgtgtgtgtgygcagctatggatatctctctaggaaatttatcaggtgatgtttttgtttgagaaaaggagtagtatttagttacctgggaaatcacttctagatgccaac

SEQ ID NO: 223359 - DNA, 201 bp, Homo sapiens
attttttattgcatctatttgattcttctctcttctttattagtcttgctggcggtctatcaattttgttgatgttttcaaaaaaccagctcctggtttcrttaatcttttgaaggtttttttgtgtctctgtttccttcagttctgctctgattttagttatttcttgccttctgctagcttttgaatgtgtttgctctt

SEQ ID NO: 223360 - DNA, 201 bp, Homo sapiens
agatactgagatgcctttttaaatgacaaggttgatttttttcctgtgatgatttgaaatagcgacttgtaactagaaacaagtttagaaaatacagttayttttttttgtttgtttgtttcatgccctggattgtggctgaccagtttatacctactgtgctggaaaagtttaaattataaattactgtcacagtctccg

SEQ ID NO: 223361 - DNA, 201 bp, Homo sapiens
gccagagaagctatacttattcattgtagacattcttatctttttaaattttttatattaaaaaaaaaaaagaggctgggcattgtgtatcacgcctgtartcccagtgctttgggaggccgaggtgggtggatcacgaacgaggtcaggagttcaagaccagcctggccaagatggtgaaaccccatctctactaaaaat

SEQ ID NO: 223362 - DNA, 201 bp, Homo sapiens
tcctgttcaaatgtagttatgtgatactttgtgaaaatagggccttaatatttaggggttaaaattaattcaaaatattttcagtaagaatgggccaactyggcccacatactgtagtacaagctgataagtagtcattagaagatgatgatctaagactactaaataagctctcacagacaagtcatatgaaaccacgtt

SEQ ID NO: 223363 - DNA, 201 bp, Homo sapiens
tagtaacttgtttactactgctactaccactaccaccactgcttctactactattattgttaaattttcatagtatgtaactattttctttttaaattggktcttctcattagtgtttttaagacctatcatttgccaaaaaggaaaaagtatagtgtggtaaaaaaaataatgaaaaatcattttagatgggaaagtacg

SEQ ID NO: 223364 - DNA, 201 bp, Homo sapiens
ttaaccactatacgtagaaatatcttcctgttcaaatgtagttatgtgatactttgtgaaaatagggccttaatatttaggggttaaaattaattcaaaayattttcagtaagaatgggccaacttggcccacatactgtagtacaagctgataagtagtcattagaagatgatgatctaagactactaaataagctctca

SEQ ID NO: 223365 - DNA, 201 bp, Homo sapiens
attgttaaattttcatagtatgtaactattttctttttaaattgggtcttctcattagtgtttttaagacctatcatttgccaaaaaggaaaaagtatagygtggtaaaaaaaataatgaaaaatcattttagatgggaaagtacgtttaaagaatgaattaagttatcctgccaaataataataaaaattcaagttgaat

SEQ ID NO: 223366 - DNA, 201 bp, Homo sapiens
atatgtcagtagaaacttccaagatagaaaagtaaagggaaaaaagactgaaataaactgaacagaatatccaagaactgtggaacaacaataggtgtatyatatgcatgatgagaataccaaacgaagtaaaaaaggaaaggaacagattaaatatttgaagcaggaacaacagaaattttcctgcaaattaatgtccca

SEQ ID NO: 223367 - DNA, 201 bp, Homo sapiens
cgtctatgaccagcagcgcctctgcttgagttttgctcatgcctgctggatttgttccacccactcggcccagcaggctgcactcagcttgcactactggmctggatcccacacctgccaagggtgagccaggcacaaagtggcgaggggtgtgtgagtgagcaatcatgaggtctgcccactgtgcacagccaggtacac

SEQ ID NO: 223368 - DNA, 201 bp, Homo sapiens
aacaaaaacaaaaacaaacaaaaaaaaaacctctcttgtttttgttgaagtagtaatgtgtgtatatcatggaggtgagaggattaattgtaaagccactrtttcagagtatgtgggaactttggcctggcgctgccttcagatgttataggatggatgatgcaaaactgaaggtattcttcactgaattataaaccaaga

SEQ ID NO: 223369 - DNA, 201 bp, Homo sapiens
ctccaccaagagccttcagagctcaattaattaccttccatcacttttctgtggaacagaaaaggaagataaacctatgtcatgctgcccacgctgttctygactccctttgaccgaaaacccatctgtcttcctaacctttgctgatggactaaaggaaagaaggaaggataggtgatgaaatctgaaatctgtgcctgt

SEQ ID NO: 223370 - DNA, 201 bp, Homo sapiens
tagcagatcttctgtaaaatctgtgtttgttttgcttacaaagagaaggtagtggcagaaatctgagaggcaataatagctactgtagaaaattgatgtasataccatgactagtgaactctgtatagtattaaatcaccaactcgagtgctagaagtcacttctataaatgttttacaacagccaactgcaaaatctcac

SEQ ID NO: 223371 - DNA, 201 bp, Homo sapiens
taatgaaatcttcctgacatggtatgcgggggacctatcaggactagcttcaggttcatggtgaattttccagttaatacttcattttccagtggtgtcarataaatgaggtacagctatatttttgaaagattacctgtttggcatttaacatcattcctctgggattttaccctgttttgaatggaaggtagccttttt

SEQ ID NO: 223372 - DNA, 201 bp, Homo sapiens
aagcacaaattgttttcttgtctttcatcttcacagcctttctatgcatagaaatcttgaatatggtctttttctggcaagtgtctgaataagggtttacaatgccttgtttatctgacaagcaaccatgttggcaaatatttcaaggctccagtaatactaatgtgagtctttaggtaaaggaagctggttatctgtctg

SEQ ID NO: 223373 - DNA, 201 bp, Homo sapiens
aaaacggttcttaatagaaatgtaaaggaatttaataagtatatattctgttcttaagcctttgaaaaccatgagagattacttttataaaaatatatatatttttttttgcgtgaactccacttcttggagctcaagttcttggcccaaattgtctctgcaaatctgtattatgaaagtctattcttaggtatggttttt

SEQ ID NO: 223374 - DNA, 201 bp, Homo sapiens
cttctccatatcttcaccttcatgttcacagctgagttatcaccttcccatactaggaaagtcagtatgtaaagtcagtttcttaaaggcttggtttttcygtgtgtctgcttacataatgaaggttcattggtttacagttcttgtttaagatgtcctttgcatgttaggttcattggtttgcagttcttgattaaaatg

SEQ ID NO: 223375 - DNA, 201 bp, Homo sapiens
aggatctgtctatgaaggaggggtgttctttcttgacattaccttttcaccagactatccgtttaaaccccctaaggtcagtatgaagttttcattgattkttagcaatatggattatatttctagatacatatacttattcttaaatatgcattctagggatgcatgtctattctgttgtcacagacagcttcccaggat

SEQ ID NO: 223376 - DNA, 201 bp, Homo sapiens
aaaagtacatcttaagctgggcattccatcaataatagactattttctggagatgttaaaaatcactgttatgatagatctgtcatgataatatttagacrctgtgactcttcagaacaacagtgaagaaagaagatgtgatgtgatgattacagcagtaatgactctgagcatcagatttagtggtatttaagttatgct

SEQ ID NO: 223377 - DNA, 201 bp, Homo sapiens
ttaccttttcaccagactatccgtttaaaccccctaaggtcagtatgaagttttcattgatttttagcaatatggattatatttctagatacatatacttrttcttaaatatgcattctagggatgcatgtctattctgttgtcacagacagcttcccaggattgatagtgtataaaatgaaacaatgtaaaaaattgtag

SEQ ID NO: 223378 - DNA, 201 bp, Homo sapiens
agtcccagtaagatgagtagggtaccttagttggaaatgcagaaatcacccaccttccgtgttgatcttgctgggacctgcaccccagagctgttctattyggccatcttcaagccaggctctaatttttgtatttttagtaaagacggggttttaccatgttggccaggctgttctcgaactcctcacctccggttacat

SEQ ID NO: 223379 - DNA, 201 bp, Homo sapiens
acctctggcctgtagtccttggactcttgttccataggcgtagggttgtgaatggcaaaagaggatcttggtgttcttttatgaagtgataccaacatatytcacttctaggataatgacaatattggcaatatgaatcttaacatgagagttaactgattaactttttgtgtttttatggaattgctcaattggttatca

SEQ ID NO: 223380 - DNA, 201 bp, Homo sapiens
gcagccctcgctgcgcctcccccactacagctggcatccgtacagcagctgctgcagagaggccactgccgccatgaacagagcaagaccttgtctcaggaaaaaaaaaaaaaaaagaagaggattcagagatccaagaaaggcataaaggtggaaaataaaagccattttaaatgctgtaaaattgcttagtacagaaaa

SEQ ID NO: 223381 - DNA, 201 bp, Homo sapiens
tttgtgtcttacagcagcctcagctgtgctttattattcaaaggttaatgcaaactgagaagtggataaattaaatctgcctggcagccaacaacccaacrtgttagcagacactgtaagatggggatgggcagtgtaagttatttccattattgcagcactgccaaaagcaaaaaccactaaatccttcaaagatagccg

SEQ ID NO: 223382 - DNA, 201 bp, Homo sapiens
tgacagcaccaccccaagtgtgtgcacacccagctcggtcgcagcagtgcccaggctcagctacagctttgctctgcactggagcaggtgctgggattggraagaggccagggagtaggagcaggcacttccaagcctgcaggggcagggggctttccaggtcctgagagcacagggatatccgagtcagaaccactgctg

SEQ ID NO: 223383 - DNA, 201 bp, Homo sapiens
aagatgcatgtgaaagaaaataaaagcaataagataacgacagccaaaaaaaaaaaaagtttttttcagaccgggtgtggtagctcacacctgtaatcccrgcactttgggaggctgaggtgggaggattatttgaggtcaggagtttgaactagtgaaacctaatatggtgaaactccgtctctgctaaaaatgcaaaag

SEQ ID NO: 223384 - DNA, 201 bp, Homo sapiens
tctattctcaaccttttgtttcagctttaacatttctatcctttcaaatgctactctatcccgtccacctgcatcaaatgagtaatagcgttttacaagtmgtagcaatttttctgaatgtaagacaatgagtggccatctttagaaggaaattgctttttaagaatcaggctatcgtttctcatttgaactaattagttg

SEQ ID NO: 223385 - DNA, 201 bp, Homo sapiens
gactgttggttgtctataatatattctattctcaaccttttgtttcagctttaacatttctatcctttcaaatgctactctatcccgtccacctgcatcaratgagtaatagcgttttacaagtagtagcaatttttctgaatgtaagacaatgagtggccatctttagaaggaaattgctttttaagaatcaggctatcg

SEQ ID NO: 223386 - DNA, 201 bp, Homo sapiens
caatttttaaaaagtaatgtacagtaaattttatgatcaccttctaattgcaagtgaattggcttttgtttttgaattgacagcttccctttgaaattcatttacttatgcttttttaaaaagtgtgttgattttaaaaatcagcatgaaaactagtatgaggatagggagaaagtacaaatgttacactcagctgactga

SEQ ID NO: 223387 - DNA, 201 bp, Homo sapiens
aatttgctgactttttgtaggtcatatcagtaaataaaacccttttccatatttctgaaattatattcttcttttttattattattatactttaagttccrggatacatgtgcagaacgtgcaggtttgttacataggtgtacacgtgccatggtggtttgctgcacccatcaacccatcatctacattaggtatttctcc

SEQ ID NO: 223388 - DNA, 201 bp, Homo sapiens
gataaatagggtattctttgattcaaaattattagatacaacattttagcaaatatatgaagtatcaatggcttttgtaatcttaacatataaataatgasagttagatttggatttgggttttgatcttcccaaaggaaaattaaattcatcaaagcaaagaagcccagctggcataagcacttgacagattcaaaaaag

SEQ ID NO: 223389 - DNA, 201 bp, Homo sapiens
gtaactgaagggcattgacaaaatggttttttgaacagaaatagaggaaagggccttatatgtagcaaaataaaaatgaaactaagcattagagaaacctytctagtgtaagaaatattaaccaaatacttgaaagtcagtaattggcgaaactgccttctttgatttagggggacatcctgcattttgttggcggtctag

SEQ ID NO: 223390 - DNA, 201 bp, Homo sapiens
tctgaactaaacagaactgtatagttgatattttaacttaaaatattacctgtttggcctacctaatttttacttgagagaaaaataacattaatacctaytttctttgtcaaatctctataacaccctttaattactacatttttagtagcagtgatttgctgacatttgtgcaacccctatgttgtgatccatatactt

SEQ ID NO: 223391 - DNA, 201 bp, Homo sapiens
taccccatacattttagtacagtaggcatgggataaaagaaacactcgagaagctagcctttcctcagctttcctagaatggagactgcctcctaaaataytcagaagtcagaaattattttaaaactaaagtgttaatgagcaaatttaaataaagttggtctgtaaatatgtacttcagagctgaacttagtactctct

SEQ ID NO: 223392 - DNA, 201 bp, Homo sapiens
taaaatattttagtgatcttaaaacttgaccactctggaagaatggagaagttctgtatttggcaagaataaaaagtattacaaagcatcctgcttctgcrttaagtggtagtttacaacaaagctgctgatcttaattgtgcatttaaaaaaacaggaatcttgttaaaaatttttatttctgtgatgctaccccataca

SEQ ID NO: 223393 - DNA, 201 bp, Homo sapiens
caggtctgaaaaaagtgttgtaaacctgctcatgaggttcagacaaaacttctgtgcataaattaggagttggtgttgtctaggagtttgtgaagattaartttttcagggttctgatttcatgaaatgtcattctagatttctgtcaatctcaattataggatgatagaagtatgctgatttctcgcttaataattatgt

SEQ ID NO: 223394 - DNA, 201 bp, Homo sapiens
tatctgcagacattgcccttcttggtgagatactgctgtcttctgcttcagagtcccttcctcagccacactatttggtagtgactccttatttagcctayatcttgtaatttactgtggttaccattcttgggaggccattttaagatttcttaaagtgacccagagaaatcgtagcttggtatttactaaatgtgtttg

SEQ ID NO: 223395 - DNA, 201 bp, Homo sapiens
ttgacccagctgacattttgagcaagataatactttgtagtaaagggctaccctttgtattgtagaatacatagcggcatgcctgatctctacccactaartgccaatagcaatctcccctgtccctcattgtgacaacaaaaatttctccagatgttgccaagtataccctgaaggaggggatcaccctgttgagaacca

SEQ ID NO: 223396 - DNA, 201 bp, Homo sapiens
tcagtgggttgtaaaatcaaattagcgagaccaacatcctttgctaccatagtataggatgggaagggtatggaatgaggctggagtacattacatgtaawaaattgttttttgaacctttccttcctgttatacatgtacacatcattgtgtagtgctgtaaaatgcatttcttactgtgggtcgtggagaaaaatgttt

SEQ ID NO: 223397 - DNA, 201 bp, Homo sapiens
atataaagcaatatgtttatttcaggttatttccagtttattttcttcatttcttttttcttttctctcttccagacatcactacttcttgtagtgatttscttttaaaaccaaactatttttctttttaaattagttttaaataggtaatatatatacacagtaaaaagttcaaacagcacaaaaggtatgcagtcctcc

SEQ ID NO: 223398 - DNA, 201 bp, Homo sapiens
ttgttttgtaaatgaccaatttaatccattttatattgagatttacttgttttactttgaggctcattctctgtgttctggaggtagcttactgtagtacrgctaaataaatgatttttgattctttaatccaggatctaaaatgtccactgaggcacaaagagttgatgacagtccaagcactagtggaggaagttccga

SEQ ID NO: 223399 - DNA, 201 bp, Homo sapiens
actttatcataaattaacttagtgaaactacactagagctaaaactgttactttaccttgaatataaagggagaaaatgctaagaacatttgattactgtaaaaaaaaaaaaaaaaaccctgaaattgcgaacttctctattggaaatttaaaaaaaatcattttgttgaaattgctatactcttgtggtagtgactaacc

SEQ ID NO: 223400 - DNA, 201 bp, Homo sapiens
aatcgagtcaccacctaccaggccccacctccaacaatggggattacagttgaacatgagatttgggtggggacacagattcaaactatatcacattgcartggtaggatcaggtaactttctagtgtgatcagtcatcaggatcttctgctaatttggaggaggatgctatgatatgtgtctcctcaaaattcttatgtt

SEQ ID NO: 223401 - DNA, 201 bp, Homo sapiens
tatgaacatttcatgtataaattttgtatgttttcattttagaatacattttgaatggatgaaggaaaagttttagcaactcccaaagctgcattgttttktaaatgaccaatttaatccattttatattgagatttacttgttttactttgaggctcattctctgtgttctggaggtagcttactgtagtacagctaaat

SEQ ID NO: 223402 - DNA, 201 bp, Homo sapiens
taagttatgggtattttttcaagtatgtataggatttaatttgtttaggaaaaagcactctaaggtaatgggtgtgtgttagtcattctgtaagagctccrcattattactctgctggacctgtctgccagtaccccggctagctgaaattcaggcacatggagcatcacttatccccctgaattatgttaatattaggaa

SEQ ID NO: 223403 - DNA, 201 bp, Homo sapiens
gccattttaaatgctgtaaaattgcttagtacagaaaaaggatttctaccttcctaactttccagtaactgaagggcattgacaaaatggttttttgaacwgaaatagaggaaagggccttatatgtagcaaaataaaaatgaaactaagcattagagaaacctttctagtgtaagaaatattaaccaaatacttgaaagt

SEQ ID NO: 223404 - DNA, 201 bp, Homo sapiens
tctggagccatggctgggtggctgcagctgtgcctagcagcacagggctcctgccccgccagcttagtagagggtggggctcccgcctgatcccagccccsaccggttccatggagggtgcagccctcgctgcgcctcccccactacagctggcatccgtacagcagctgctgcagagaggccactgccgccatgaacaga

SEQ ID NO: 223405 - DNA, 201 bp, Homo sapiens
ccgcctaggaacctatctgcttttcataccatccatggcacccaggctgtctgtgccaagaggcgcccacaggtccatgccaagctgcccgcagtgccccyggcctccctcctgcactcgtaggtgtctaaagtctggaaggagcctgtgcagcagggggctggtgtgtcagtgctgccctgagcatgttcatacccagct

SEQ ID NO: 223406 - DNA, 201 bp, Homo sapiens
ccaaacttctttgtcttacaaggccctacgtgatctctctgcctgcctcatcacatgcaggccctcctaggcctcctttttgaccttatgatttgccagtrcatttgactggaacatgtttgatccagttcttcatgtggtcaataccttctcattgttcaggactgttcagagttagatcctgagaggtacattttctga

SEQ ID NO: 223407 - DNA, 201 bp, Homo sapiens
gggactcctagactgtaaaagacaggcaacaacataaccaggggtaaggataatttattttgctggttaggagtgaaaccaggttttacaaagtggctaaytctgagaaaatggcaacagactgatcaccaaaggaaatttaaacaaatatatgacaattagagagtgatagaagaggatagtgatattcaaaagaaataa

SEQ ID NO: 223408 - DNA, 201 bp, Homo sapiens
agcaaatgatgattaaatttagagaagtagacgaaatcaacaactatatagaatgaaatagaagccgattgacttttaagagatgagcattttatccccctttttttttttctgtttaactggtaagcattgcagtggcactgcatacctttttcaatgcagatgtatattattttaggcatattatggattaaattggca

SEQ ID NO: 223409 - DNA, 201 bp, Homo sapiens
taatgtataattttggaatttattgttgaagggggctttggtgatatctaatccaccttcctcatcttcataaattaaggatctgaaaagtttaaatttayatatggtcacatttaccctggtcacacaactggaatggcagtctagaataaaactatgctgtttccacttatgtggtaataatgcgttagaccaattaca

SEQ ID NO: 223410 - DNA, 201 bp, Homo sapiens
aataaaattaaaaaaaaaatctgagaaaaaaaagttaatttaaactttagcacatcgtatggttaacactaggtaaaatttcccttttgaagtcactaatrtgaaatacataccacatttgttttctgcagcagtagagctaatatactttgacctttttttcccaaatgatactttataagtcttcaggggagagattga

SEQ ID NO: 223411 - DNA, 201 bp, Homo sapiens
aagcacagaaacactaaatctctgttgtcaatcaggttatgctaaattatgctgcataacaaacaacatcaaaatttcagttatttaacacaggtctccarcccctggtgccagtttatggacaaactgtcttctgaaaaactggtccctggtgccaaaaaggttgaggaccgctgatttaacccatcaaaagtttatttc

SEQ ID NO: 223412 - DNA, 201 bp, Homo sapiens
ttcttgactagtgatgactcttaagattttactgttaggatttgaacacttgtaggtcctttagtatacagaaaacattagatatatttaatgggatagcwtaagtaatttccattctcattcttttcttgagttttaaagtctaaacccatagacttacacacttagtctttgtccactagtcagaatgtttacactttg

SEQ ID NO: 223413 - DNA, 201 bp, Homo sapiens
ttattcctgttccactgcatcacttatgattatttgggacctggatgaagcagtttcattgtaatgttgtattagtcgaatctgtgattttataaaatacraattaaatttcttataaaatgaagtttgtcactcatatttgtctaaatttgtttaaaaataaaaatcctagctaaactcttgcctatcccagaaatgaat

SEQ ID NO: 223414 - DNA, 201 bp, Homo sapiens
atcttcagttggtgcttagccagtttattcctgttccactgcatcacttatgattatttgggacctggatgaagcagtttcattgtaatgttgtattagtygaatctgtgattttataaaatacaaattaaatttcttataaaatgaagtttgtcactcatatttgtctaaatttgtttaaaaataaaaatcctagctaaa

SEQ ID NO: 223415 - DNA, 201 bp, Homo sapiens
tcatggtagtacttactgtcttgtttcttctagggaatacaaaagtcttgatttttattctagacaatttaagaagaccaatttgggtcatttggcatgaycccagggctagctcaggtgtaagtaatacggggtgagcatcccaaattcgaaaattcaaaacactttgtaattcacaactttttcagcaccaacataaca

SEQ ID NO: 223416 - DNA, 201 bp, Homo sapiens
tatagttacccatttatttttatgttactggttagtcatggtagtacttactgtcttgtttcttctagggaatacaaaagtcttgatttttattctagacratttaagaagaccaatttgggtcatttggcatgaccccagggctagctcaggtgtaagtaatacggggtgagcatcccaaattcgaaaattcaaaacact

SEQ ID NO: 223417 - DNA, 201 bp, Homo sapiens
aaattttctcttattcagttagttgaaagggtcggtaggatacctttaaaactttaaaaaactttaaatacatttagtgcctgcacttaataatttgtatstaagctgagttcaagatgtctaaaactggaagctatgagaaatttctgtttttcctcccagtctaacatactgttttttggacagaatccccatgtgact

SEQ ID NO: 223418 - DNA, 201 bp, Homo sapiens
aagctgcgaccttggatttgtgtatagtctggactactagggattattgtggctttagctggactctttgattaatccaccccggcatcccccatctcctrttaagcttttgactagtctgtgtctattggtatcatactcagctgtttgtctccactaattcctaacagtattagtttcctagggctgctgtaacaaatt

SEQ ID NO: 223419 - DNA, 201 bp, Homo sapiens
ggttgtcatagtcatctttctccccttagtttctcacattcagtcgcaggtactactgttctttcaacagtgtttcactttattagtcccttcttccctgygtccattgaaggagttcaagttgttattatctccaactggatgtgcttaagcagtagcccctgttcttctttcctcttatatattactccactctaattc

SEQ ID NO: 223420 - DNA, 201 bp, Homo sapiens
aggctgctagtagaattcctactggttagtagaacagtaaattcaaacaggttggaatgccagttcttcaagatgtttggaaaatgcagttcaactcagamacaggacttaaattaaatttggacacctgattattattaccttagttaagagttcagaaacaactcttctttcctcatgcctttattcaagtacactgac

SEQ ID NO: 223421 - DNA, 201 bp, Homo sapiens
taattattatgtgtgatgatttggtcagtttatgaagatctttgacacatatttattaaccatgagttattaaaattaatagttctaattgcagtacaaaygaaatcacagttgcttgtctacaatgtatataagtgtagagagaagtagagttaattgcatactgactggtcataaaattagctgctctgataattaaga

SEQ ID NO: 223422 - DNA, 201 bp, Homo sapiens
atggttcactgcagcctcaaccttgtgggctcaagtgatcttccctcctcaaccttctgactggctagggctacagacacatgccaccatgcccagctaattttttttttttcattattttgtagagacggagttttaccatgttgcccacgcaggtctcttaactcccaggctgagcctgagccaccacacccagccatg

SEQ ID NO: 223423 - DNA, 201 bp, Homo sapiens
gtcactaataaaaaattaattttagggtgtatgttagttattggtgcagtgctctcaaattggttttaagaaaagagcacttgaaatctcaaagaggggattttttttttttatgtatactaacaacctgtttaaataaactgtagtttcatagtgagcctaatgatgttaaccataccattttagagctttgttacatga

SEQ ID NO: 223424 - DNA, 201 bp, Homo sapiens
gacattgttctttaatctcatcataaaacagagcaagtaggatatcaaaaccaaaaacctacagatagcaacaacctcaaagctaagtatccttataaacycccaaatactagcaggtaaggacaaactgccaacaactacaaaatcagtgtgggatcagtaaatgtgtggaaggaagcaaatgtaaggaaacaaggtggt

SEQ ID NO: 223425 - DNA, 201 bp, Homo sapiens
tcatcttcacagcctttctatgcatagaaatcttgaatatggtctttttctggcaagtgtctgaataagggtttacaatgccttgtttatctgacaagcamccatgttggcaaatatttcaaggctccagtaatactaatgtgagtctttaggtaaaggaagctggttatctgtctggcacatgggaagacttaagagcat

SEQ ID NO: 223426 - DNA, 201 bp, Homo sapiens
aacatttattagtgtggatcatgtctgaatgctcaggctatttatctctttaacactatttcatataagtagttgtctttaataattgtagaatgtcttarcctgtttggaatgccgtaacaaaataccataaactgggtggcttataaacaacagaaatttctttctcatttttctggaggctgggaagtccaagattga

SEQ ID NO: 223427 - DNA, 201 bp, Homo sapiens
aaaaaaggtcttgaccactgtgcaggtgagcatcaagctttacacatttttttccccattttttttctggaaagaataaaaagattcagatgacatctgakacaacctggtataaacagccctagtctagctgctacacagctgcttagttctggttctgtgaccttagctaagatcccagtgtccacaaatgtaaatgat

SEQ ID NO: 223428 - DNA, 201 bp, Homo sapiens
tggtcaacatggtgaaacccggtctctattttcaaaaatgcaaaaattagctggatgtggtggtgcacgcctgtagttccagctactcaggaggctgaggyttgagaattgcttgaacccgggaggtggaggttgcagtgagccgagattgcctgggcgacaaagtgagattccgtctccaaaaaaaaaaaaaaaaaagcc

SEQ ID NO: 223429 - DNA, 201 bp, Homo sapiens
aggtatgggggactgaggtacatagattcagagtgggtgaggctagggtaagaatgatacctgggccctgaggagggaataagttccctttatcttagagrtgaaacaaaatagaactttcacaaaggccaaagagtaatccctaaaactgcaggctgttgctagggtttctctgggtatagcctgcaaaacccacagacc

SEQ ID NO: 223430 - DNA, 201 bp, Homo sapiens
aaactgagggacaggctgatctgcctagaatatattggatcttgctatgtaaatggtttgtatacattcagaatcaaattaacaaaagataaaaaagactwgtgaaattgaaattatttgacttcttgaacaaatataattatttttgcacagttaccactagtactttgcaatacttgatctaagcattcaaacaccacc

SEQ ID NO: 223431 - DNA, 201 bp, Homo sapiens
tgtgattcgtttgttgttctactggaatgcattgtattcccttcttatttttaagcccccctacttctagttttcgcctttcttaaaaggcaatttctaasattgtgtttcttttaaagccaataagtaattgtgaaagacaaactcagagcctgttgaatttcaacaaaagttaagtattttgtaggacatacaacaata

SEQ ID NO: 223432 - DNA, 201 bp, Homo sapiens
acaccacactgtagaggaggaagaaaaacatctcaccaacggcagacagcagaaactaatggttttcaactgttgctgatctaatcaatcatggtgctatratataatcagttctgtgtgattcgtttgttgttctactggaatgcattgtattcccttcttatttttaagcccccctacttctagttttcgcctttctta

SEQ ID NO: 223433 - DNA, 201 bp, Homo sapiens
agaatatagcagttttcaatataatagattcaatacaacaactttttgtgtgtttataattttgttacttattatttaccataagtggtttaaaatatacrtggcaaaacattctttagagctttgattgcaataattatcacataaccaacacctcttaagtattacgtacttaagaaggaacttgaactttatcttaac

SEQ ID NO: 223434 - DNA, 201 bp, Homo sapiens
ctttatttggacacctggtattaaactcttattggttattaatatttgggacaggttaatgaagacaatattttacagaatatagcagttttcaatataayagattcaatacaacaactttttgtgtgtttataattttgttacttattatttaccataagtggtttaaaatatacgtggcaaaacattctttagagcttt

SEQ ID NO: 223435 - DNA, 201 bp, Homo sapiens
ttattcatactatggctttaccttcatagtaataccagtggatatctatggcatcttcctcctgtgttttgatgtttcattttgcccagtaagaacctccstatattgcatgcttaaatgataaagtatctcagtaataaataaagcagagttgaacctgccaagttgaccgacagttcactggtagaagaagagctatat

SEQ ID NO: 223436 - DNA, 201 bp, Homo sapiens
actctcccccaggtgtgcagccttgaatgatggaaatatcctcatgagattctgaaagaggaggaaacgaattttgcccttaaataggtgtcagtacagckgcacttatttgcacatttctagttctgcctctgactagagatcaattgtgatgactttgaatttgtagaccatctgcctgtcagtgcacttaaaattgca

SEQ ID NO: 223437 - DNA, 201 bp, Homo sapiens
ctcctctttgctaggcaccagtctaggcagacagagtaggtaagtgacattaggaacaggacaagattaagtgacacctgggtgctacaaggctgaagaamggaccagaccaattctacgtcagatttcaatgtgaaaaaaaatacttttgatgccttcccgtctcatcttttgcatccctcattatctcttattctcctg

SEQ ID NO: 223438 - DNA, 201 bp, Homo sapiens
tactccccactttctagcctccgactcttgaaagcttccaagaaacacatccagaggtcacatattgggcaaccgaaggctcatgtgaaaaagccttagarccacaaaaaccttgcgcctcagtcattaatgtaatttggggcagattttatgaagcaaactaacgcctttgaatttttttttttcagttttaacgtgagt

SEQ ID NO: 223439 - DNA, 201 bp, Homo sapiens
ctgaggcaggtggatcacctgaggtgaggagttcaacaccagcctggccaacatgatgaagccacatctctattaaaaatacaaaaattagctgggtgtcrtggcactcacctgtagtcccatctactcaggaggctgaggcaggagaatcgcttgaacctggggaacagaggttgcagtgagccgagatggcgccactac

SEQ ID NO: 223440 - DNA, 201 bp, Homo sapiens
aggacttagtctaaaatggaaaaaaaaaagcaagacgcaagactgaatatgtagtatattcaatttaaaaactttctggccaggagcagtggctcacgcgygtaatcccagtactttgggaggctgaggcaggtggatcacctgaggtgaggagttcaacaccagcctggccaacatgatgaagccacatctctattaaaa

SEQ ID NO: 223441 - DNA, 201 bp, Homo sapiens
catcacaagacgacaatggtatgaataaccaatgtttacttcatacaggggctacttaaggaggtcactatatctcaatgtgaaaactccaatgaaccagkcactatgttcaattgaaatcaacctagagaaccttatctctctgcataaatgctcctgctgcatggtttttcatggccactggtggaattctgtgatggg

SEQ ID NO: 223442 - DNA, 201 bp, Homo sapiens
gagccaaggcctacaactggcgaccccaagagcccacttggtgcttttctctattgtggccgggcacaagacaaagtacccttaatctttcttctactttyctcaagcagaaggagtctctcccatagccaccacagctgggaatgttctgggtcatacctaatggtggcacgcctcagagtctcgctcaaggcccacggc

SEQ ID NO: 223443 - DNA, 201 bp, Homo sapiens
ctgtgtttgcttaaggtcctagagctttgccgtcagcagttggcaaaaccaaccaggcttcagggtgatgccttcccttaggtcctgtatgggtccagaartgccatccaagagcgagggcccggaggtggaaaccttagaaatttacctggttctctgtgctactgcacctgagctgccaccgaaaccacaagacaaagt

SEQ ID NO: 223444 - DNA, 201 bp, Homo sapiens
aaacagaaaagtaaacagacagctaaaaggcagtactggcacacctcgtttgacagtgcttttgtgtttcacatatactgttgttattgttttttttttttaacaaattgaaggttagtagcaagcccgtgtctgtcagccccatttttccaacagcgtgtgctctttcatgtctctgtgtcacattttggtaattctcac

SEQ ID NO: 223445 - DNA, 201 bp, Homo sapiens
aagtatttattgtagtctttgcagtctttggttgtttgtaaccgtcatttatgggaaggctttccaggtatttgttggaacttgagtgctgtaatctaagwttgtagtccctgcaactgtatttccattagaggataccctaagcttagtaatgctgtgattcttgcagacctgtagaggtaccatcttggtggtctttgt

SEQ ID NO: 223446 - DNA, 201 bp, Homo sapiens
agctgatgatgacacactgtcattgaaacaatttcacaaactaaagctgtgtgcaatgcttaaacaaaacactttgactgaataaaaaaaaatgtggtacrtatatgcaatggagtactattcaacagtaaaaaagaatgagatcctatgatttgcaacaacatggacggagctggaggtcattatgttaagtgaaataag

SEQ ID NO: 223447 - DNA, 201 bp, Homo sapiens
ttgtccaggctggtctcatactcctgggctcaagtgatcctctcgcctctacctcctaaagtgttgggattacaggtgtgagccactgtggcccgccatagttattatttttgttgggtttatgtttttatctttctactaaagatatgagtagttacatcacaattagtgttataatattctttgtttttctgtgtactt

SEQ ID NO: 223448 - DNA, 201 bp, Homo sapiens
gtgtctttataggtgaagtgtgtttcttgtaggcaatggatcattgggtctttttttttttttttttttttgagggcatctcgctctgttcccaggctggmgtgcagtggcgcaatctcagcttactgtaacctctgcctcctgggttcaagtgattctcctacctcagcttcctgagtagctgggattacaggcgcatac

SEQ ID NO: 223449 - DNA, 201 bp, Homo sapiens
atttcttcattgacccactggtcattcaggagcatattgtttaatttccatgtgtttatatagttttaaaaattcctcattattgatttctagttttactstattgtcatcagagaagatacctgatactatttcttttttggtggagaatgttttgagaattgttttgtggccttacatatgttctgttcttgagaatga

SEQ ID NO: 223450 - DNA, 201 bp, Homo sapiens
atcgaatagtatctaacgccgtcacctcaacattgacacttggattttacaatcgaaaaaagctgaaccttgacttagtaggattatcactcaggtggcaratgtccaaacgttatcagccagtcgatgggtgcaccagcaataatcattctgttttcaatgcaattgtctaggtagatctaactgctggtcttattaggc

SEQ ID NO: 223451 - DNA, 201 bp, Homo sapiens
ggcacatgccaccatacccagctagtttaaatgtgaaatcaggctttttaaatgtgaaatttttaaacatgaaattaagagaaattatttaaacagcatgyttaaacaatacatatttgaaattaaaataatgcattgttagtgttatggaaattccaatctgaaacagcataataaaacaactctaattattcagtaatt

SEQ ID NO: 223452 - DNA, 201 bp, Homo sapiens
tgaggaatactacaaaacactgctaaaaaaaaaaaaataataatagatgacaaacaaatggaaatacatttcatgttcatggattggaagagtcaatattktgaaaatgaccatactgcccaaagcaatctacagattcagtgcaattcctatcaaaacaccaaaatcctttttcacagaattagagaagacagtcctaaa

SEQ ID NO: 223453 - DNA, 201 bp, Homo sapiens
aatcagattctcatcttacagagatccctctacatgcgttctgcaaaatgtatgtggggagcacaaccagatggctgttgaaggtaaaagatgatagcttggactaaggtgggaaacagatagaagtggataaatcaaattatatttaggggataaaatagacatgacttaatgatttattggataagaagtatgagggag

SEQ ID NO: 223454 - DNA, 201 bp, Homo sapiens
atagcaaataaaacaggagttaccaaggttgtagtgtggggaaggaactggaaagatgtaggtcaaaggatataaagtaacaagtagaaaggtctcgtgtrcaacataaggactatagttaataatagtgtcttcaggatttttttctaaatgagtagattatagctgtcttgccatgggggtggggagggaaatgggtaa

SEQ ID NO: 223455 - DNA, 201 bp, Homo sapiens
gatggtctcaatctcttgacctcatgatccacccgcctcgacctcccaaagtgctgggattacaggcgtgagccaccatgcccagccaataaaatttattwaaaaaaaaaaaaaaaaaagctatactgaacaagatagggccacctcaaaagtaaacgtgaaaagaaagattagaatcattgataaggcattggtattaaa

SEQ ID NO: 223456 - DNA, 201 bp, Homo sapiens
taggacttagtctaaaatggaaaaaaaaaagcaagacgcaagactgaatatgtagtatattcaatttaaaaactttctggccaggagcagtggctcacgcktgtaatcccagtactttgggaggctgaggcaggtggatcacctgaggtgaggagttcaacaccagcctggccaacatgatgaagccacatctctattaaa

SEQ ID NO: 223457 - DNA, 201 bp, Homo sapiens
atgttactgtctctgggaagaacattctaggctaaggaaccagctagtgcagaaggcaggaacccactttgcccaccaggtaacaggagaaagatcaagamgctagtagagtatggtgaaaaggtaagtctagagaaatgagcaggagttagaatacaaaacactttggaggctaagaattatggatgaaaagaaaacaag

SEQ ID NO: 223458 - DNA, 201 bp, Homo sapiens
atgaaacattgtgacatggaaatgtacttaggacttagtctaaaatggaaaaaaaaaagcaagacgcaagactgaatatgtagtatattcaatttaaaaamtttctggccaggagcagtggctcacgcgtgtaatcccagtactttgggaggctgaggcaggtggatcacctgaggtgaggagttcaacaccagcctggcc

SEQ ID NO: 223459 - DNA, 201 bp, Homo sapiens
agggattcttagcttatagcttacaaaataaaaaggattgtcaaaataccaagcttggaaaatcatgttcctgttatagaaaacataaacattcctacagrctagaattcttaccaatttctttgtctaattaaccacattctgtcataacggaaaacggataaaaaggaatgaagctagccttttattttattttctgtt

SEQ ID NO: 223460 - DNA, 201 bp, Homo sapiens
atgtgaatgcatacatatacaaactacattttcttatttttaaaatatcttaaggtacatgaaggagttaacatgttcatgaaacattgtgacatggaaakgtacttaggacttagtctaaaatggaaaaaaaaaagcaagacgcaagactgaatatgtagtatattcaatttaaaaactttctggccaggagcagtggct

SEQ ID NO: 223461 - DNA, 201 bp, Homo sapiens
tttctttttccttctttataatttcatagatagaacatcgtttcttaccatagtaacctcagcgtaggatttttcctttcctgttcaagttaagaacgttyatcttttcacttaaagaaagcagtttatgccttctctttggcatatttaaattgccagcatcatttgcactttggggctattattaaataaaataagagt

SEQ ID NO: 223462 - DNA, 201 bp, Homo sapiens
gagcactataataatgggccataacccataaaataaaaagaagtatccagatataattaagtaaattcaaaggggagaaaggaacacactttcttgccatrgaattccaattagtaaatgaagagtcattgatataggaaattaccatttgaaaagaaacactacagtaataattgttttaggtgagaacagttagtggac

SEQ ID NO: 223463 - DNA, 201 bp, Homo sapiens
atgagagggcctagaagcagtgacatcatagctccagtcaatacacccagtaccagatcttgggtttaagtgccaggcaccaataaaaggaaccagagttscttggaaaaactgaattggggactgggactgggactggggaagtacaggatgaaagtggcaaaatgttcaaaaaatgatgggagcatgtcaaaagaatgt

SEQ ID NO: 223464 - DNA, 201 bp, Homo sapiens
aatgttatcattctgtgaaaaggagggtatgtcaggaggtctggtgagggcagtagggaggaaaaagacttgaaggaccataatttactacaaaatgcctrtgatctaacagagttaggatggacaagttctttttatgccgtctcttgagttctgttctccacagcacgctggcacacccctttactcaaatagcaacta

SEQ ID NO: 223465 - DNA, 201 bp, Homo sapiens
gacttgaatgatatataagagttagcaggactaaggcggggatgtagggagaaggagtacttatagtttagtgggaacagtatgtgcaagaactggagtaygaaagaagaattcaaaaaggttaatataggtggaatgtagagaatattgagtgacttgaagctataaagattggtaggagttagatcatgcagtgtattt

SEQ ID NO: 223466 - DNA, 201 bp, Homo sapiens
gaatgtatgttttgaatctatattaaaatttttgagagactttagaaagtttagtgtaaaagtcgtgtttataaaatatgggaattctagtgcacactgascagttaaaatttatattcagattgttgatttagaataacactgtaacttgatcctagttataatctttattaggctaggtgataactgttacccaaatgg

SEQ ID NO: 223467 - DNA, 201 bp, Homo sapiens
ttaattcttcttttgctgtgctttcaaatgggttattttgtgggtctcaaatatatttccttaaatatttggtgaatccttggagttagaagagaaaggamtattaccatcattttattagtgctggtcaattctgatgggggtaaaaattaaagaagctgatatggtaaagacgaagaaaaaataaaaatatggggagac

SEQ ID NO: 223468 - DNA, 201 bp, Homo sapiens
gcattctttaaaaatcttgcaaaaagaatgtcagcagtttggaagaaaattccaggggcagttgtggagagaaatttcaagatacactacctcaacaatgytcttgatggcacaaaggactacattttgtggaaaaacaattatctctgagctgaaaaatgattcagaagaattaaactccaagtgtgaagaagttttagt

SEQ ID NO: 223469 - DNA, 201 bp, Homo sapiens
ctatttgactcagtttttttcacctgcaagagaaaaaattaagaccctacaaagctttcctagccttcatttgtttccattacaagagaatgatgaatgacagtgttaaaataatttgacagtatttataatcttgtgtattattgttagtaatagtaggagcagtagtatctcgtagtagttcgcagtgtagaaaatatt

SEQ ID NO: 223470 - DNA, 201 bp, Homo sapiens
gatgtcggatcgctgcagcctcgacctcctgggcatcgatcctcctacctcatcctcctgagtagctgggactacaagtgctgtgccattatgcctggctratttttgtatttttagtagagatggggcttcatgatgttgcccaggatggtcttgaactcctgggctcaagcagtccacctgcctcaacccccacaagca

SEQ ID NO: 223471 - DNA, 201 bp, Homo sapiens
gtaggacacatctcaccatcaatcatcacaagacgacaatggtatgaataaccaatgtttacttcatacaggggctacttaaggaggtcactatatctcartgtgaaaactccaatgaaccaggcactatgttcaattgaaatcaacctagagaaccttatctctctgcataaatgctcctgctgcatggtttttcatggc

SEQ ID NO: 223472 - DNA, 201 bp, Homo sapiens
acatgtaccctagaacttaaagtataataaaaaaaagaaggggttcataagcaccctgtaaacactgaagcctattcaaaaggagaggggtaggacacatytcaccatcaatcatcacaagacgacaatggtatgaataaccaatgtttacttcatacaggggctacttaaggaggtcactatatctcaatgtgaaaactc

SEQ ID NO: 223473 - DNA, 201 bp, Homo sapiens
aatggggaatgaaaaggaaagagacaagattctttggacaaggcagaaggaagaagttgaaggattcaagttaaaggataaccttgagccgggcattatgrcttctacctgtaatctcaaggacttgggagactgaggcaggaggatcacttgagccctggagttcaagaccagcctggtcaatataacaaggcacccctg

SEQ ID NO: 223474 - DNA, 201 bp, Homo sapiens
gaaaaatgtagacttttcctttcttttcggtatgttccttttacttttctactcattatagagtcatgaacaactatggaaaaacacactttgttgattcyttgtgatgtttttgaaaacttcgttcatatatgaaaacttctaattcaccttgctttctgaaggagaagactaagttacatatgagccctgttttgagta

SEQ ID NO: 223475 - DNA, 201 bp, Homo sapiens
aaaagctgttggagaagaatggggaatgaaaaggaaagagacaagattctttggacaaggcagaaggaagaagttgaaggattcaagttaaaggataaccytgagccgggcattatggcttctacctgtaatctcaaggacttgggagactgaggcaggaggatcacttgagccctggagttcaagaccagcctggtcaat

SEQ ID NO: 223476 - DNA, 201 bp, Homo sapiens
gctaaagacctgaaatcccccaagaggctgctggtacaagtcccacagtccaaaggctgaagaacctggagtctgatgtccaagcacaggtggaggaaaasatgtactgttccagaagagagagaaagtaaaaagaagagcaagcaaactgaatatcccccttctgtctgctttgttttagctgtgctcacagccagttgg

SEQ ID NO: 223477 - DNA, 201 bp, Homo sapiens
taaccatgtctaagaagaacaaaatgcaaaatattactgatacccttactttggaattattgtcaggattaagtgagatgaaatatgtgtagtaactagarcaatgtcagacattcagatattagtttccttctcttataagcccctatgtagtttttatttctttaggatgacagacatgagttctcccattattttctc

SEQ ID NO: 223478 - DNA, 201 bp, Homo sapiens
atttataggaggacaaaatcagtttgatcttgaatatgcttaaattttgcacgcttgtacatttctcccaacttaccaagtggcaccttctagggaaacasgtttcaagaattgtatccttaagtttttaccaactcccccccaaatactgtagtaataagtggctttggcttgaatagtgggatgtccacaagtgttaga

SEQ ID NO: 223479 - DNA, 201 bp, Homo sapiens
cttttaaaaaatatatactgttgcagtttcatagctgtcaatgtcttctctttctgaggatattaattaataaattcttcctccctctgtatagtcattcwtcaagttgcttttttctgacgctttcaggtctagtaatctttggttggttgagtgtatttaattgtggaccaggttacttgaatctcctaaggcattatt

SEQ ID NO: 223480 - DNA, 201 bp, Homo sapiens
tcatctaagactttctgaattttgttagatcctgccatttcttgttttacacaggaggctgccagctatcaactgattgaattgattacttcattaaagcyagaaatacagatctgatgagttttgcaattaattgtatagaaagctgggcttggaaaaagaagaggatgcactgagtagcagagtagacctgatgctcag

SEQ ID NO: 223481 - DNA, 201 bp, Homo sapiens
tgaataagcatagtttgtccatcattgtttcaattaaaaatggcattccataacagctaattcagcttgcagctttaacaggtatacaaatgctttccttygagacagccatcgtatttaggtatgcagtagaaatgctttatgcatgctcaaaggatggtttttaatacaattaataatttttgctgctttatcaagaac

SEQ ID NO: 223482 - DNA, 201 bp, Homo sapiens
agcaggaggtgagccagtgaagcttcatgtgtatttacagttgtccctcattgctggcattaccgcctgagctctgcctcccgtcagatcagcgatggcaytggattctcataggagcgcaaactttattgtgaactgtgcatgtgagggatctaggttgcttgctccttattagaatctaatgcatgatgatctgtcact

SEQ ID NO: 223483 - DNA, 201 bp, Homo sapiens
gatctccagctgcgtgctgggagaaccactactgtcttcaaagctcagttggaaatgcagaaatcaccagtcttctgcgtggctgacactgggagctgtasacgggagctgttcctattcggccatcttggctcctccccttccttaatgtttcttcgcttaattaatctttcttcccaatgtagttcatttcttagtttc

SEQ ID NO: 223484 - DNA, 201 bp, Homo sapiens
cctcccaaagtgctgggattacaggcgtgagccaccatgcccagccaataaaatttatttaaaaaaaaaaaaaaaaaagctatactgaacaagatagggcyacctcaaaagtaaacgtgaaaagaaagattagaatcattgataaggcattggtattaaaaaccagcttatcctagatttaagatgaaagcggtattgtgg

SEQ ID NO: 223485 - DNA, 201 bp, Homo sapiens
ctttacagcttgatgcccgagtctcagactcatgtaaaagcaaatctggtaaatgaattcagattatgacgtttgtaccatcctgaaatcagtctccaagraaaggttcaagataccaacttatcagcagatttttttctgaaataaagactctcttcatggttaatttatagaatcttattcttactgtaacttttaaat

SEQ ID NO: 223486 - DNA, 201 bp, Homo sapiens
gattactttactaccatagatttccctttctgtctttaagtttgttattttgaatcactttcaactttttctgtgacacactagtgaggaactgttcagaktgaattcactaggtggctagcatcttagagtcaaaacataaaatgttgaaattgattaactagagatagtaatgtcaatttttaagtaattaaacattgt

SEQ ID NO: 223487 - DNA, 201 bp, Homo sapiens
tgatatttgaaaaagagatgtgaaaactttatttctaaaagttcctatagtggttatcaatggcctcagatggacttatcatttgtaggttaacatttggrtgaaatatgtcttaactcaaaagtgggaataattcttttccttaatgtgaaaccagaaattacacctctgttggggaatttctaatagtatttttattag

SEQ ID NO: 223488 - DNA, 201 bp, Homo sapiens
tcatgtcttccactcatgtatttaatgccttttccatcttaactaataggcatttatcacgtttctttttccttctttataatttcatagatagaacatcrtttcttaccatagtaacctcagcgtaggatttttcctttcctgttcaagttaagaacgtttatcttttcacttaaagaaagcagtttatgccttctcttt

SEQ ID NO: 223489 - DNA, 201 bp, Homo sapiens
tccaggctttagaaataaagactttgaaagagctcttctcttattttattgtatggaagtaaacattgaaaaataaagaatccttacaaaagtaaacttartctacgttgctggcagaatacatttattctataggaggtaggtgacagctgtttttaaaactttgacacataagtacaagaaagattagaatcctgtggt

SEQ ID NO: 223490 - DNA, 201 bp, Homo sapiens
aatattcagaagtcagaaattattttaaaactaaagtgttaatgagcaaatttaaataaagttggtctgtaaatatgtacttcagagctgaacttagtacyctcttttcacagctctaaatgtaatactttcaattacatgaactcattagtctctattagcatacttccaggctttagaaataaagactttgaaagagct

SEQ ID NO: 223491 - DNA, 201 bp, Homo sapiens
ttgcagctcataaaggtggcgcggacccaaagaatgagcagcagcaagatttattgcaaagagccaaagaacaaagcttccacagcgtggtaaggggaccygagtgggttgctgccgctggctcgggcagcctgcttttattcccttatctgaccccacccacagcctactgattggcccattttatggagagctgattgg

SEQ ID NO: 223492 - DNA, 201 bp, Homo sapiens
ataaccacttcttttctcccataggtaaccactgtttgttataatcacttcctggattttctttatagttttaccatctcaatacatgggatcatataccrtctacattttggtgtctggcttctttgttggacattaagtttttaagatttatccatgttgtagggaactgtaatttgttcattttctttgaagtagtat

SEQ ID NO: 223493 - DNA, 201 bp, Homo sapiens
acagttaaatgcattaatatcatgtaaagtgctaattataagaatctctggcatatagtgattgctcagcaaatgcaatcagtttctgaccttcatcttcmtcattaagggtaaaagaagtagtgtaaaacgtaagtactataggagctcagaaaggagaggaatgccggaggccctgaatcaccatgaacactttccttg

SEQ ID NO: 223494 - DNA, 201 bp, Homo sapiens
ggcacatgatattgaaccttaattttaggtgttataccacagtggctaaactagagttctgattgtgaactttcatgactccagtgcccaggttcattctsctgttccatgatatttttcttcttgccagaatgacatgttaacatttcgttagtaattgagtactttgctttcactgggcatttcttagtcctgcgttct

SEQ ID NO: 223495 - DNA, 201 bp, Homo sapiens
tttttatttcttggctcaagttcagattcccacacgtggtggagaccacggatacgtaacaatgtctagggcatgactgttgtattcacacccactatcasaattcccttgtcctactcttacccactgaagaggaatgtgaacagaaaagactttggggggtggaattgatatattttgcagtactagttactagtgggt

SEQ ID NO: 223496 - DNA, 201 bp, Homo sapiens
ttccacagtcaaaggcaggcagaatggtctataaactgaaaccactgggttatttttatttcttggctcaagttcagattcccacacgtggtggagaccayggatacgtaacaatgtctagggcatgactgttgtattcacacccactatcacaattcccttgtcctactcttacccactgaagaggaatgtgaacagaaa

SEQ ID NO: 223497 - DNA, 201 bp, Homo sapiens
cttgaatttccaaacataattctgtggtttgaccagtcttaagtaaatatgatgttgagttagggtcctggtagataggattctgtcagcacatccacggsgtagaaagcctggtgctttccacctgttactggtctgcgcggtcacaaccaagaagccaggtttctacaactcatgttcttgtctttaatgatgtatctt

SEQ ID NO: 223498 - DNA, 201 bp, Homo sapiens
cctttaaagaattcaataaatttcaaattgaccatttaaggatataagcaagaatactcactaaaagtagctataagtgaaatattggtaaataaaattaraaggatcatttattctattaatattatttgccccaagtagttaatgaggtgtgtattttccgtaagactgcattgtttgtttttttctaggcctaagaca

SEQ ID NO: 223499 - DNA, 201 bp, Homo sapiens
agaagaatgtatattctgttgatttggggtggagagttctgtagatgtctaagaagtatcttttagtgtgctcagcaagtcatgttattttctttgatgtrtttcttctttgaagcttttaacctctttgtttatctgtattgcatcctttaaagaattcaataaatttcaaattgaccatttaaggatataagcaagaat

SEQ ID NO: 223500 - DNA, 201 bp, Homo sapiens
gaaatctaaataaacatgaccataggcctctaatatgtggcctctgctctgaatcttgaagagcttatagctctcatagcttcaaacatttctaaatagamgatagagatctaaattctagttccctttcagtaagttttcagctggtgacctggacaaaatcacaattctttgacccttagtaggctgatatttgaattg

SEQ ID NO: 223501 - DNA, 201 bp, Homo sapiens
atacttaaatatggttaaaatacccttggcagtaaggatgttagattaaatgacttcccacctgttccagtctttctgatttttctttcacaaatgttactttttttttttttttgagtcagggtcttgctctgttggccaggcttgactgctgtggcatgatcatgactccctgcagcctcaatctcctgggcccaaggg

SEQ ID NO: 223502 - DNA, 201 bp, Homo sapiens
aatttgattatagcttcactaaatatacaagtgaatataatgaaatggaatttcatgcaactcaattaaattagcttctttaccaccatattaattatccwaattttattaatttgaaatattttcttacattgttactttaacaacaaatgcgtcttcaaattaatcatctcttctgtgtattgaagaatagttcttttg

SEQ ID NO: 223503 - DNA, 201 bp, Homo sapiens
aggtgttctacctttgaatagccagctttcagtccactcaattcttgattggaataaggtgatctgccagagtattgctttgattttgctattgttacacyagcctctaaatcagcaaagctattgagcccaataattaagtcctctgtgtggaccctaggaataataatcaaaccagtggggaggaaaagccctcctctt

SEQ ID NO: 223504 - DNA, 201 bp, Homo sapiens
tgatctgatgatatcttattggctatgattaaccagaatatgtgatatttaaacgttgaaaatgcattaaaggatcaagaaaacagcttgtctttatgactttttttttttaagttttaaaaacactgagccaaattttggatttaacattcccaagctatggcctaagagaaagacaaatttaacagaatgagagtaaat

SEQ ID NO: 223505 - DNA, 201 bp, Homo sapiens
ataaacaaatggaaggtagacttgagtgtagctttcttctgaaatgggaagagagtagaagtaaaagcagaaaagaaaaatgaggctgttgcttataaaayttgaaaacgtttaaaagattgggtagtagttagagtctgagtaactaacattttaataaataatagaatctataaccaattgtgtacttttttattttaa

SEQ ID NO: 223506 - DNA, 201 bp, Homo sapiens
acaagaaacctacctgacatcaagattatactatcagtgaagccagagaagctatacttattcattgtagacattcttatctttttaaattttttatattaaaaaaaaaaaagaggctgggcattgtgtatcacgcctgtaatcccagtgctttgggaggccgaggtgggtggatcacgaacgaggtcaggagttcaagac

SEQ ID NO: 223507 - DNA, 201 bp, Homo sapiens
aagcatgcataaccagactggagaggtgactgggaccagcaagcagctgttctatcctgaactctaaataaggcctgctgaagggggactaggggtaaaasatggaataagctaaagaacaacagagaaaccatgaattttagtgaaaataaaatgaatccccttttgccatatctcctccagtgcataggctcactgcct

SEQ ID NO: 223508 - DNA, 201 bp, Homo sapiens
tcaggctggtctcaaactctcaacctcaggtgatctgtctgccttggcctcccaaagtgctgggattacaggtgtgaggtattattttttaagtaggagtwtttggacctaaacaggcagaattcttcaacaaagtacaatgaaaggcatttctttgacagtagcctgaatttggaggctcatttgcaaaggcactttcca

SEQ ID NO: 223509 - DNA, 201 bp, Homo sapiens
ttgatgaaccacagatgctgctgtctgatcgttcctctggaagttttgtctcagaggagtacccggccgtgtgaggtgtcagtccaccccctactgagagrtgcctcccaggtaggctacttgggggtcagggacccacttgaggaggcagtctgcctgttctcagatctccagctgcgtgctgggagaaccactactgtc

SEQ ID NO: 223510 - DNA, 201 bp, Homo sapiens
agaccttaatggggaattcactgaagtataagaattaattctctatgattattctccctatggcttattagaaaaagattgaatgagctattattaaaatmataatatgtatctttcctctagagtaagactaataactgtcatagcaggctcttctccatttatttcgtctttagaaccatcttttttaattttatttaa

SEQ ID NO: 223511 - DNA, 201 bp, Homo sapiens
tcccagctacttgagaggctgaggcaggagaatcgcttgaacctgggaggtggagattgcagtgagccaagattgcaccattgcactccagcctgggcaasaagagcgaaactccgtctcaaaaaaatcaggataattatgtatcctttttgtggtggtggttgtgattattaaatatttggcacagtgccagtcacataa

SEQ ID NO: 223512 - DNA, 201 bp, Homo sapiens
ggcctggcgagagttcgagtgtggcacgggcagtctggcactgctgggggatccggcgctccctggcctgggtgctaagtccctcactgcccggggccggycggcttctctgagtgtggggcctgccaagcccacgcccacccagaactttcactggcccacgagcaccacacgcagcccgggttcccacccgtgcctctc

SEQ ID NO: 223513 - DNA, 201 bp, Homo sapiens
cgcccgccaccgcacccggctaattttttgtatttttagtagagacggggtttcaccgtgttaaccaggatggtcttgatctcctgacctcgtgattcgcycaccttggcctcccaaagtgctgagattacaggcccagataatttttgtatttttagtagggatggggttttgccgtgttgcctaggctgctcaaactcc

SEQ ID NO: 223514 - DNA, 201 bp, Homo sapiens
tggcgggctgcaggtcccgagccctgccccgcggggaggtggctgaggcctggcgagagttcgagtgtggcacgggcagtctggcactgctgggggatccrgcgctccctggcctgggtgctaagtccctcactgcccggggccggccggcttctctgagtgtggggcctgccaagcccacgcccacccagaactttcact

SEQ ID NO: 223515 - DNA, 201 bp, Homo sapiens
ttgctggcttcaggagtgaagctacagaccttcacggtgagtgttgcagctcataaaggtggcgcggacccaaagaatgagcagcagcaagatttattgcwaagagccaaagaacaaagcttccacagcgtggtaaggggacccgagtgggttgctgccgctggctcgggcagcctgcttttattcccttatctgacccca

SEQ ID NO: 223516 - DNA, 201 bp, Homo sapiens
ctgtttctgagactgtaatgtatgtgtaaatcacctggaggtcttgttaaaagtgtagaccttgttttagagatctgggatggggcctaagattctaacargctccttaggtgatgccaatgtaggtttgaggacctctcttttttttaatttttatttttttgaactaggggcttgctttgttgcctaggctggtctcca

SEQ ID NO: 223517 - DNA, 201 bp, Homo sapiens
ttgaagctggtgacgctgcaaagggtccaaggcttgccctctctgctagtctagatcactgtttctgagactgtaatgtatgtgtaaatcacctggaggtcttgttaaaagtgtagaccttgttttagagatctgggatggggcctaagattctaacaagctccttaggtgatgccaatgtaggtttgaggacctctcttt

SEQ ID NO: 223518 - DNA, 201 bp, Homo sapiens
cagggtaggttctgatacaggtaccaactgagtgtttcggtctctgaagctttcagtcttttaacttgccagaaaagaaggaaatggtttgactgaatggrttattactggcatctgatatttctagcttcctgtgtgagaaagtgctctgtcaggtctgatttgtgtggatttttgttactagttacaatgtttaacagt

SEQ ID NO: 223519 - DNA, 201 bp, Homo sapiens
agaaatttaggtcggtggttctctgaccaagcacagtggttcacgcctgtaatcccagcactttgggaggccgaggtgggatcgcttgagctcaggagttygagcctgagcaacgtagtgaggccctatctctacagaaaattttaaaattagctgggcatggtggcacacacttatagtctcagcagatgtgtgccacca

SEQ ID NO: 223520 - DNA, 201 bp, Homo sapiens
ttcctctgtattgtgtgagatcaaaacaaatgccatatcatacacgtatgcaagctttcagaaatttaggtcggtggttctctgaccaagcacagtggttyacgcctgtaatcccagcactttgggaggccgaggtgggatcgcttgagctcaggagttcgagcctgagcaacgtagtgaggccctatctctacagaaaat

SEQ ID NO: 223521 - DNA, 201 bp, Homo sapiens
gcctgtagtcccaactattctgagaggctgaggtgggaggattgcctgagcccaggagttgtaggctgcagtgagctgtgatggcaccactgcattccagsctgggtgacatagcaagatcctgtctgtttaaaaaagaaggagaaggaggagaaacatgtttttcttaaactttctttaatttggttttatgttaatgtt

SEQ ID NO: 223522 - DNA, 201 bp, Homo sapiens
tcatttctcctttgttttttaaaaaacgtaatcatgaaaagttaataaatgataagaaagagtcctaaattagggggctataaattaattttaattcttcyattaactgtaacctgggccttaggatttaattagattcagtcactaaatgtttagtgaatgcttactatgtgaaggctgttctgggctctaaggctatgt

SEQ ID NO: 223523 - DNA, 201 bp, Homo sapiens
aagttccctttatcttagaggtgaaacaaaatagaactttcacaaaggccaaagagtaatccctaaaactgcaggctgttgctagggtttctctgggtatrgcctgcaaaacccacagaccttttggaaagtcttgtttggagcaaagtgccatctctgtcatagcacagtagtaatgaataaaggatgaaggacaaagcc

SEQ ID NO: 223524 - DNA, 201 bp, Homo sapiens
ttgggcaaccgaaggctcatgtgaaaaagccttagagccacaaaaaccttgcgcctcagtcattaatgtaatttggggcagattttatgaagcaaactaamgcctttgaatttttttttttcagttttaacgtgagtataattacttccactcctttttccactttccagtctctccgagttgcgtccctaaaggatcctg

SEQ ID NO: 223525 - DNA, 201 bp, Homo sapiens
  misc_feature (1)...(201): n = A,T,C or G
gtgataaaagcctctattttgaagcagagatttgtgaaaattactaggaaaagtatgacattggtgatgtattactctccctcatctgcaggtcccactgntatctctatattggttctgttctttaatagatcataatttcagccttaatctgaaatacctaatgccctgcaaggctctctgagactagtggttttcaaa

SEQ ID NO: 223526 - DNA, 201 bp, Homo sapiens
tataacctcagttacttccaaatggcctcacctccaaattctgtaacactggggacttgagttgcaatatatgaattttagggagacaaatattcagtcartagcagaggtaacacttacgttagtgaggaagaatttttaaagatttcatgtttgttttagatataactacttaaaatacatgggaatgtttctgtaata

SEQ ID NO: 223527 - DNA, 201 bp, Homo sapiens
agatctaccggaggaaggagaaaggaaaaaaacctttattttccaagttagcaatctgcagttttgggaaacctagcttctggggaaactgaaagcacacrcttggctgaagggagggaaatagcagcatttaagccttccagggtctgtcttacatattcatcagatttggggaatgtctgtgaatgtttacagggaaag

SEQ ID NO: 223528 - DNA, 201 bp, Homo sapiens
gctattaaactaataaaactcaagtgaatagtcaaatatccagtcggcttttatgatttgggattaaagtaacaaaaatagctgataaatgagtggaaaakgtatgcaaatagaatggatcaattgttaccttctgggaaaagagaataactgcttttcagagagcaattttctaaatcaacactcatcaaagtatactta

SEQ ID NO: 223529 - DNA, 201 bp, Homo sapiens
tttttaagagacatggtcttactctgtcactcaagctgttgtgcagtggcactatcatggctcactcactgcagctggggactcctgggctcaagtgatcmtcccacctcagcctcctgagtagctgggactacaggcatatgccacctcacctggctaattttaaaatttttgtagagatggggtctcactgtgttgttc

SEQ ID NO: 223530 - DNA, 201 bp, Homo sapiens
aatccctattgaggataacagtcaatagttaattacataagctttgaggactgatttctagactagtgagaaatagccatgacaaaaacagtctcacttgygtaaattatttgcacaatatttttctcttcttgggcgtgatacccattttagtcagtgttctaaagctattaaactaataaaactcaagtgaatagtcaa

SEQ ID NO: 223531 - DNA, 201 bp, Homo sapiens
gcttttgtgtttcacatatactgttgttattgttttttttttttaacaaattgaaggttagtagcaagcccgtgtctgtcagccccatttttccaacagcrtgtgctctttcatgtctctgtgtcacattttggtaattctcacaatatttcaaactttattattatatcctttatggtgatctgtgatcagtgatctctg

SEQ ID NO: 223532 - DNA, 201 bp, Homo sapiens
aagaggaaaataaaaataacagattaaaaaatggtttatggaggccaggtgcagtggctcatgcctgtaatcccagaactttgggaggccaaggtgggcaraacacttgaggtcaggagtttgagaccagcctggccaaatacagggaaaccccgtctttaccaaaaaatacaaaaattacctgggagtggtggtgcacac

SEQ ID NO: 223533 - DNA, 201 bp, Homo sapiens
tttcaacagcttttatgtacatctcttatgtacatgtgtattgccaaatgaaagcctgtttttcttcctaaaaatgactagatattatataactctatagrtaatgttcttatgagggcacacataatcaccaccactcacaatacctagttttggaatcttaattattccttccataatattttcttaatctgctataat

SEQ ID NO: 223534 - DNA, 201 bp, Homo sapiens
accatattaacaattatccttagatgaacctttacaagttaagtggtagataaaaaaggaagagactgaaaaagtgtttaagaaaacatttactagcaacytacgtggccactgaaatatttaaaagaaactaattgaagttaacttttcattttataacagtgattgaaaatcaactgctttgtctgcccaaagcattct

SEQ ID NO: 223535 - DNA, 201 bp, Homo sapiens
gtatgaatcttagagtgagatcctgatgcagacttgtgtgttcaaaggatcatgctattttttcctttgtacttagaattaagcttgagtgcagcaaatgyataaaatcacaagtagagtgtgggttgtgttttgaagtctttaataattattttctattttataaaaaataaaatagaaagttattcaagatatttcagg

SEQ ID NO: 223536 - DNA, 201 bp, Homo sapiens
aattaacctaggtttccatcaatggatgattggataaagaaaatgtggtgtatgtatgtaacatggaatactattcagccataaaaaagaatgaaatcatstctgttgcagcaacatggatagaactggatctcagctcactgcaacctctgcctccagggtgcaaacaattctcctgtcccagcctcccgagtagctgag

SEQ ID NO: 223537 - DNA, 201 bp, Homo sapiens
tggctatctggcatgtacacagattggttgttggagagccttcatgattttccattattcatttccttcagacagctcctttagtaacttaggtacatccyaccttcccccaccaagacacaatcagtaaactgattagaattatagttttatggaaaaaatacacttcatttattctaatttttgattttaaattttagt

SEQ ID NO: 223538 - DNA, 201 bp, Homo sapiens
ttatctggcttgtgatgccagtgaaagtaaggtggctatctggcatgtacacagattggttgttggagagccttcatgattttccattattcatttccttyagacagctcctttagtaacttaggtacatcctaccttcccccaccaagacacaatcagtaaactgattagaattatagttttatggaaaaaatacacttc

SEQ ID NO: 223539 - DNA, 201 bp, Homo sapiens
aaacttagaagtcagagaacacccaacttttttttttgtcacagtgtttggaaaacttaagtttgtatttgaaatagaatatatgttgcccagcagatccygattcattaaaaatttgaatttgagcttctctctatcatgataatgcttgcctccatgtcatctgatttccagagactacgtatctgagaggatgtcact

SEQ ID NO: 223540 - DNA, 201 bp, Homo sapiens
atcacagccagttacagatttctttgttccttttctactcccactgcttcacttgactagccatatatgtatgcgtgtatgtatatatgtaataaagtgtratccagatgttaacaaacttgattcttcttactgactgaatcattattgttcagaaaccctttgatacaatgggaaaaaaaatgctgttgatataagaag

SEQ ID NO: 223541 - DNA, 201 bp, Homo sapiens
catatgttttcttctaggagttttatggtttcagggtacaatgtttaagccttactgtggtcttgaatttttgtctttagcttcagaaggcaaaaagctcytctggaattttgccagcttgtttttctgagtgtacagagggaaattacttcctactgatgaggaaaagcaggcagaagttgctgttacagaacaagagat

SEQ ID NO: 223542 - DNA, 201 bp, Homo sapiens
atagaagatagagatctaaattctagttccctttcagtaagttttcagctggtgacctggacaaaatcacaattctttgacccttagtaggctgatatttraattggagacagttctgtttccagttcagctcggggagctttccattctaaaactcatgatcttattgttttaaatctctattttttaactggcctcaca

SEQ ID NO: 223543 - DNA, 201 bp, Homo sapiens
aatcactggggaaaaacatttaaaagcatgtgactttaaaatttaaaaactgtatgtaataagattttgaagaaagaaaagttaataggatttatgtaacraaagaaaataattgtgacagaaaactgggctaaggaaattggtgcatttgaacacaaattttagctttgagcttcctggcagccagtggggtgtgtgtgt

SEQ ID NO: 223544 - DNA, 201 bp, Homo sapiens
tataatttaatattatcattattttgtctagcattaatttggtatctataataaataattgattttagccttaacttagctgtagagtcctaaggattatrtatttatatattttttctattagacaggcattttcttgtctcctttcacaacatacgtggttcagtaaaacataaaatcacttgtcaatagttagtatta

SEQ ID NO: 223545 - DNA, 201 bp, Homo sapiens
tgtctttacatggtgttcgcccctatatgtgtatgcccaaattttcctcctcttacaaggatatcagtcatactggtttagggtcgactctgattaacttrcagatttgggaaggggattaggacttcaacttttttgggaggggctggcacaattcagtccataaagagcttgttctttaccagctgtgccacttggatc

SEQ ID NO: 223546 - DNA, 201 bp, Homo sapiens
ggcagggtcagccttttagttctcttcaggccatcaactgattggataagggcgactcacattagggagggcaatttgcttccaattcagctgtttatctyatcaaaaaacaccctcacagacacacttggaataatgtttgaccaaatgtctggacactttgtgccccagtcaagttgacacataaaattaatcatcaca

SEQ ID NO: 223547 - DNA, 201 bp, Homo sapiens
ctatctatctatctatatctcagagagagagagagagagagattgagtgtaaggaattggctcatgcaattatggagaccaagtgccaagatatggagacrgcaagctggagactcaggagagctgtggcgtagtagtttctgtccaagtccagaggcctgagaaccaggagagccagtagtataagttctagtctgaaag

SEQ ID NO: 223548 - DNA, 201 bp, Homo sapiens
gctgttcctgattcgatctgcttgcatctcttctaacttgtgagtgacttggaaggagcagacttcatcttacttctattcatttctcaattaactatgastaacatacactaggcacccaaaaagttaagatgatagcagtaatgaagagaaatggaccttgagtttcagaaacttgtattctaatggaccttcaaaaga

SEQ ID NO: 223549 - DNA, 201 bp, Homo sapiens
gaagtatagagtacatacagagaagcagacagggtaggttctgatacaggtaccaactgagtgtttcggtctctgaagctttcagtcttttaacttgccaraaaagaaggaaatggtttgactgaatggattattactggcatctgatatttctagcttcctgtgtgagaaagtgctctgtcaggtctgatttgtgtggat

SEQ ID NO: 223550 - DNA, 201 bp, Homo sapiens
tataagtaaaataataccttttcatgtgtccagaatttggacttttttttattgaaagtaagtgtacactttttcttattgaaagagtgtgaagagtttcyatatagaaacctatggatgtagtattttcatctgtagaaagaggcttaacagtctctaagtttcctttcacatctttaactgtcagtgatttgtcactgc

SEQ ID NO: 223551 - DNA, 201 bp, Homo sapiens
tagagtcccttctgtataactgtgctgaccccagaaatgccttgtcctggtgcaggccccgagtagctcatccatttcctgtctggctaccaccccagcarcaatgagctaggcaggtccctgcctctgggtccttgactgtggtcaagactctttccacccccctcctccttttttttttttttttttgcctctccagtg

SEQ ID NO: 223552 - DNA, 201 bp, Homo sapiens
tgatcccacaaagaaattttagaatataatgccaaagcatcatttggtaagaattctgtgagagatcatgatgatgtggcccaagtatgcatggtttggtmtgattcatacataaaatccagataacttaggagaatgaaatggatggcctgtacatttgccagtcaatccttggttttgtatatacttcagaaatcaaat

SEQ ID NO: 223553 - DNA, 201 bp, Homo sapiens
gtcgggtacatgatcttacataattcttacattaatcatatgatgtaggtactaccattacctatgttttgctgtcgagaaaatgttggaagagttaagtwtcttaccaaaatttaacattctgggagacagaggtagactgcaaaccctaggaagtcttacctttgctccctaatctctacagagggaaatgcaaattag

SEQ ID NO: 223554 - DNA, 201 bp, Homo sapiens
tggactgaagtggcgcgatcatagcccattgcagccaactcctgggcttaaggaatcatcttgcctcagcctcccaagtagttaggactacaggtgcatgycaccacacccagctaattaaaaaatgtttttttgtggagatgtggtctcattatgttgcctaggctggtctcaaacttctggcttcatgcagtcctccgc

SEQ ID NO: 223555 - DNA, 201 bp, Homo sapiens
aatatgtaattggaaaaagaatgttttaatagctttttcagataattgtggatatttttcttcaataatacaccaaaagttaacaagtggtaatttctgtrggttaattgctatgtggaatctgaaatcatatcagtgaacttttcattgttttcattctttgttacattgaaatctaccagcctgccttaataccgggta

SEQ ID NO: 223556 - DNA, 201 bp, Homo sapiens
cgtaagtgtggtgaaattatagcagaaggggtaaatattttcaaataaagatcgtggaatcaaaaacatagagaccttttaagttttgatgtcaaaaaccrctgtttttttccacattattaaaattagcagttaagtttttttcatctccaggctttatactcttaaaaattactggattatatctgtgaatatttgttg

SEQ ID NO: 223557 - DNA, 201 bp, Homo sapiens
ataactacaacaaagaaaacctcaactacaatctcattgctcaacaaatctccgattctttcctttctgtttggttagtcctctccacagccagttcttcstttcttactcctgtggtatctaaagacagcccctcagaaccacttttcttttttttcctggcctgtgctgtctcttgagatcctttacttatgtctcagt

SEQ ID NO: 223558 - DNA, 201 bp, Homo sapiens
ctaggtaagaatgggtgatttgaggcaatgatgttaaatgtaaaactctctctccctttatgatcatgacctcgaattttctggtcagtgtttacttttargaaagaaaagtgcttacctggaaatggttaatgttataaagatacatggacaaagaggagaaaaataacctcttaccttatgctgctgctttgggtctgg

SEQ ID NO: 223559 - DNA, 201 bp, Homo sapiens
gtgccactgcactccagcctgggtgacagagcaagaacctgtctcaaaaaaattaaaaaggaaaaaaagaaaagtaatggaactcagtatttggtaagcartgtaactgtggtagaatttttttttttttttaaagcttaggaattacatctgaaagtcttttaaaaagtataatattctacttagaaattcagggtcatt

SEQ ID NO: 223560 - DNA, 201 bp, Homo sapiens
aagaggaccctcgagagttttcccaattctgaaacaaaagtgaaattcaccagctttgcctattaacttttctctgctttatagtgtcaataagaggtgtsgatggaaacacatggaattagatcagtagactgcaaaatcctgcttaagttcattaaatatagtactagtctggaattctcttttctcacaaaagtaaat

SEQ ID NO: 223561 - DNA, 201 bp, Homo sapiens
aatttaggggccaaaggctgtattacatgtgtgaatataacatacagaaaaattaccttacatcatatataccctgtggaaattatttggatgattcagcrtattggaagaggttgatggggccctaaccatgaaaaacttcagtgtaagattttaaggtaagaggaccctcgagagttttcccaattctgaaacaaaagt

SEQ ID NO: 223562 - DNA, 201 bp, Homo sapiens
ttttaaaattgaacattgtagtggaaaagacgtcacaagtcactttagggtatggaaaagtgtggaacaggggcataaatattaccaaccagcacttctgygggcagtcttcccacatccagtgaggccccctaaatcactgtctacttccttgtatatgtgtgtgtgcgtttgtgcacatgcatgcatacatgtgttcat

SEQ ID NO: 223563 - DNA, 201 bp, Homo sapiens
cttgtctctactaaaaatacaaaaaattagccgggcgtggtggcgggcgcctgtagtcccagctactcgggaggctgaggcaggagaatggcgtgaacccrggaggcggagcttgcattgagctgagattgttccactgcactccagcctgggtgacagagagagactctgtctcaaaaaaagaaaaaaaaaaaaaaaaaa

SEQ ID NO: 223564 - DNA, 201 bp, Homo sapiens
ggcccagactggactctaattcctaggcacaagtgatcctcccacctcagcctccgtagtagctgggactataggcacaggccaccatggctggttttacwttttttttggttcatggtacatttgaaaccaaaacatacccaatatctagtcatattaaaattacttttatctctctctctcttaatttggagaaaatag

SEQ ID NO: 223565 - DNA, 201 bp, Homo sapiens
aagacagcttctgagagtatttattagtaaacttgctttcccaaaacagcttttgagtttagttctggagacagcactgtgctgcctatcatagaccactrtaaagagatcattctgttttcctgctctttagaataaagctagcatatgagttgcaaccacctaatttttctttcgttcttaatttctggttacagagtt

SEQ ID NO: 223566 - DNA, 201 bp, Homo sapiens
attcctattcacaaaattctcattcaagatattgtgttgttctaatggaaattataggatactgtgggattatatggaaagggtttgggggtgtttgatcstggctggggaggagtagccaagaaggacttgctataggaggccacagtgagctgggttttcaaagataagtagaaattagaagagagaatggatgtgagg

SEQ ID NO: 223567 - DNA, 201 bp, Homo sapiens
tggtgatccacccacctcggtctcccaaagtgctggtattacaggcgtgagccaccacacctggccaccagattttcttaaaccatattatttatgtcccygcagtagaaagaacacatcaaatctgcagcattgccttgtcattcattatggagtgtattttactttcatatctaaattgattaatcagcttgtaaagag

SEQ ID NO: 223568 - DNA, 201 bp, Homo sapiens
taatagcattataataactacaacaaagaaaacctcaactacaatctcattgctcaacaaatctccgattctttcctttctgtttggttagtcctctccayagccagttcttcgtttcttactcctgtggtatctaaagacagcccctcagaaccacttttcttttttttcctggcctgtgctgtctcttgagatccttta

SEQ ID NO: 223569 - DNA, 201 bp, Homo sapiens
gcagcagcagaaccaggatctagaaacaagatagctcagttccaaagcatctctgcaatgcccaggaaaggcgccaaccagggcaaggcttttccgtctgyttctttctgaggtttctccatatttttatttattgtactaatagcattataataactacaacaaagaaaacctcaactacaatctcattgctcaacaaat

SEQ ID NO: 223570 - DNA, 201 bp, Homo sapiens
ttctgcatctgcgatgaaactattgaatgcattgtctcttatgatactctgttccctttataagaattaatgtgataaattattcaagaatttagtttcasagaaaagtttctttccttatgatatggcatacttccttctatcagtcattaagaattatatattctgttgagtttttctgtttgctttggctgcaagaaa

SEQ ID NO: 223571 - DNA, 201 bp, Homo sapiens
aactcagatttttttttttttaaattttgagacggagtcttgctctttcgcgcagactggagtgcagtggcatgatctcggctcactgcaagctctgcctyctgggttcatgccattctcctgcctcagcctcccaagtagctgggactacaggcacccgccaccacacctggctaatttttttgtatttttagtagagat

SEQ ID NO: 223572 - DNA, 201 bp, Homo sapiens
cttattcatttttttttcatttttctatagcttcttgttggaaaaaaaaatatatatatatatatttatatatttacctgttaaccatctccactcccccsaccccatgcctcccactactctccctagcttctggtaaccatctttctacgctctgcctctatgaactcaattgtttaatttttagctcctacaaataag

SEQ ID NO: 223573 - DNA, 201 bp, Homo sapiens
tgaaagtttatgtgaatgtgtattggttagcaaaatgctggcatagtttttaagaggagttattaacatgataaaatttaaatatacattgaggacctatrttatttatttagggtactgaattatttgtatccatctctttttcctttatctaaaacaggtaattgaggaatatttttaattcaatcctgtgagttcttg

SEQ ID NO: 223574 - DNA, 201 bp, Homo sapiens
aatgagataagtcctccaaaaccactgatagcttgatgccctaacaaaacccagttgtctaaatatttcaccatgacttcaaactagtctcaaacttaacrtaattgatctgcatgtttcattctcagtcctcaagagtacattgcttaagatgtttcttctataagtatagggtgaaagtgcagataaatccaagtgtgc

SEQ ID NO: 223575 - DNA, 201 bp, Homo sapiens
gggattacaggcacgtgccgccgcatccagctgatttttgtatttttagtagagacgaggtttcaccgtgttgctcagtctggtcttgaactcctgatctstggtgatccacccacctcggtctcccaaagtgctggtattacaggcgtgagccaccacacctggccaccagattttcttaaaccatattatttatgtccc

SEQ ID NO: 223576 - DNA, 201 bp, Homo sapiens
ttacttctatcagtttcttatgattaactgtgttgtgtattccctcccattagaatgtgaatatctgaaagacacttacagtttgaaaagtgcctggaacrtagtaaatgttcaataaattgcacttcattgatatttgttggcaacataacattattaccactcctcagaagcctgccacatcttccctatcatttatac

SEQ ID NO: 223577 - DNA, 201 bp, Homo sapiens
agcgattctcctgcctcagcctcctcagtagctgggattacaggcacgtgccgccgcatccagctgatttttgtatttttagtagagacgaggtttcaccrtgttgctcagtctggtcttgaactcctgatctctggtgatccacccacctcggtctcccaaagtgctggtattacaggcgtgagccaccacacctggcca

SEQ ID NO: 223578 - DNA, 201 bp, Homo sapiens
aaatttacaagttgtgtatacatacatattttcctgttgaagacttgatgactgactgaaaatgtaccagggtgtcatcaccataaaagttgttgcatctrtgaactatacagcagtgtgtatgatggtgtgagttataataaactattcattagttttttgctgcatagttttaggatgctgtaacagtgatcttgagga

SEQ ID NO: 223579 - DNA, 201 bp, Homo sapiens
tataatggtctaattgtgtatctcttattgtaagcctctggtagtctctttggtgatagttgggctattaatcatacatttacattcgaatcatcatccartttctcagttgtcagaaagttaaagagcagcctctctgtaattttaaaaacatgcagtcttggaaacttaagaaagttgtcgacatgttcatgcaaccca

SEQ ID NO: 223580 - DNA, 201 bp, Homo sapiens
gttttggttactatggccttgtagtatagtttgaagtcaggtagtgtgatgcctccagctttgttcttttggcttaggattgacttggcaatgcgggctcytttttggttccatatgaactttaaagtagttttttccaattctgtgaagaaagtcattggtagcttgatggggatggcattgaatctataaattaccttg

SEQ ID NO: 223581 - DNA, 201 bp, Homo sapiens
tcaggtagtgtgatgcctccagctttgttcttttggcttaggattgacttggcaatgcgggctcttttttggttccatatgaactttaaagtagttttttycaattctgtgaagaaagtcattggtagcttgatggggatggcattgaatctataaattaccttgggcagtatggccattttcacgatactgattcttcct

SEQ ID NO: 223582 - DNA, 201 bp, Homo sapiens
catcatgcttctaattaaaaaaagattatttgtaaagacagggtcttgctatgttgcccacgctggtctcaaactcctgggctcagtcctcccacctctgyctcccaaagcactgggattactgtgcctagcctgtgacaggagcttttaattcatcgtgtgtgtatcagcttcagggagctgatgaacccttctgaaatg

SEQ ID NO: 223583 - DNA, 201 bp, Homo sapiens
gttccatatgaactttaaagtagttttttccaattctgtgaagaaagtcattggtagcttgatggggatggcattgaatctataaattaccttgggcagtrtggccattttcacgatactgattcttcctacccatgagcatggaatgttcttccatgtgtttgtgtcctcttttatttcattgagcagtggtttgtggtt

SEQ ID NO: 223584 - DNA, 201 bp, Homo sapiens
cagcctcctgagtagctgggattacaggtgcccgccaccaagcctggctaatttttgtattttcagtaggacggggtttctccatattggtcaggctggtytcaaactctcaacctcaggtgatctgtctgccttggcctcccaaagtgctgggattacaggtgtgaggtattattttttaagtaggagtatttggaccta

SEQ ID NO: 223585 - DNA, 201 bp, Homo sapiens
agtagttttttccaattctgtgaagaaagtcattggtagcttgatggggatggcattgaatctataaattaccttgggcagtatggccattttcacgataytgattcttcctacccatgagcatggaatgttcttccatgtgtttgtgtcctcttttatttcattgagcagtggtttgtggttctccttgaagaggtcctt

SEQ ID NO: 223586 - DNA, 201 bp, Homo sapiens
ctgagtgtattttttttttttttttgagacggagtctcgctctgtcaccaggctggagtgcaatggcatgatctcggctcaccagaacctctgcctcccgygtacaagcgattctcctgcctcagcctcctgagtagctgggattacaggtgcccgccaccaagcctggctaatttttgtattttcagtaggacggggttt

SEQ ID NO: 223587 - DNA, 201 bp, Homo sapiens
aatttgacttcctcttttcctaattgaataccctttatttctttctcctgcctaattgccctggccagaacttccaacactatgttgaataggagtggtgrgagagggcatccctgtcttgtgctagttttcaaagggaatgcttccagtttttgcccattcagtatgatattggctgtgggtttgtcatagatagctctt

SEQ ID NO: 223588 - DNA, 201 bp, Homo sapiens
tgttgtttcctgactttttaatgattgccattctaactggtgtgagatggtatctcattgtggttttgatttgcatttctctgatggccagtgatgatgaycatttttttcatgtgtctgttggctgcatacatgtcttcttttgagaagtgtctgttcatatcctttgcccactttttgatggggttgtttgtttttttc

SEQ ID NO: 223589 - DNA, 201 bp, Homo sapiens
tcgaccaaactgttgttaaattcctgggctcaaacagtcctcctgcctcagcctcccagagtgctgggcttatagccactgcacctgaccagtaaagataytttgagctttgagtagtacctggttattatcggttaaaaatgaaacattttataagtcttttgttctattgaaaaaccacagtggaatatgtgtgtcttc

SEQ ID NO: 223590 - DNA, 201 bp, Homo sapiens
atagcatgtgtgagggccaaaagttttgtcctgttacctctgacaagatggagcaaaacttagaggtctagagggttgatttaagcttccaaaaacaaaaraaagaaagaaagaaaaagaaaagaaaagagaaagaaggaaggaaggaaagaggttttttctgtttttttttaccattcctaagaacaaccatgtgtttgt

SEQ ID NO: 223591 - DNA, 201 bp, Homo sapiens
ttattacactctcatgaacagtgagaaacttggagatttcttttgtatgtccttatcccaaaaataggcatggcttttttttttttttttttttttttttttcagtgaaagaggtttgcagctggactgggagaattaaggtgagaaaggtcaacaggttacagaggccagtgcaacagggcttgttagacgtaatcaaag

SEQ ID NO: 223592 - DNA, 201 bp, Homo sapiens
ttaactcagatttttttttttttaaattttgagacggagtcttgctctttcgcgcagactggagtgcagtggcatgatctcggctcactgcaagctctgcytcctgggttcatgccattctcctgcctcagcctcccaagtagctgggactacaggcacccgccaccacacctggctaatttttttgtatttttagtagag

SEQ ID NO: 223593 - DNA, 201 bp, Homo sapiens
tattacactctcatgaacagtgagaaacttggagatttcttttgtatgtccttatcccaaaaataggcatggcttttttttttttttttttttttttttttcagtgaaagaggtttgcagctggactgggagaattaaggtgagaaaggtcaacaggttacagaggccagtgcaacagggcttgttagacgtaatcaaaga

SEQ ID NO: 223594 - DNA, 201 bp, Homo sapiens
tgcagttgacttttctgtatttgtgtgctttagcctccttaatgaagatttttacagtcaaagtggaagagggccaactttttattgttagtacagcaacrtaattaactatacaaggtttgtttattatagctgagtactagaacaatgcttcaaagaggaaaacgtacagagaagattagtaaataacatagcaatgtg

SEQ ID NO: 223595 - DNA, 201 bp, Homo sapiens
tttaattagatcccatttgtcaattttggcttttgttgccattgcttttggtgttttagacatgaagtccttgacccccatccctatgtcctgaatggtawtgcctaggttttcttctagggtttttatggttttaggtctaacgtttaagtctttaatccatcttgaattaatttttgtataaggtgtaaggaagggatc

SEQ ID NO: 223596 - DNA, 201 bp, Homo sapiens
ttgtatatcttatatataattatatacatatatatgtatacatatatacacacacatatatatgtatacatatatacgcacatatatgtatacatatatacgcacatatatgtatacatatatacacacatatatatatacatgtatatacacatatatatgtatacatatatatatatatatgtataatactttataaaa

SEQ ID NO: 223597 - DNA, 201 bp, Homo sapiens
tttttagtctcttattatgatatcaattaaggtgattttataggaagaatatcaattaagggtgattttataggaagaaaaatgtaccctgcatttcattkggaaaaaaaaaaaagaatcaactattaaatgaggaaattaaaaaaaagtttaggtttaaaaagaaacatacttaggagaaacttttaagctgcatatgcc

SEQ ID NO: 223598 - DNA, 201 bp, Homo sapiens
tgtatatcttatatataattatatacatatatatgtatacatatatacacacacatatatatgtatacatatatacgcacatatatgtatacatatatacgcacatatatgtatacatatatacacacatatatatatacatgtatatacacatatatatgtatacatatatatatatatatgtataatactttataaaat

SEQ ID NO: 223599 - DNA, 201 bp, Homo sapiens
atatatgtatacatatatacacacacatatatatgtatacatatatacgcacatatatgtatacatatatacgcacatatatgtatacatatatacacacwtatatatatacatgtatatacacatatatatgtatacatatatatatatatatgtataatactttataaaatacctggatacctggtgggtatagactaa

SEQ ID NO: 223600 - DNA, 201 bp, Homo sapiens
tatatgtatacatatatacacacacatatatatgtatacatatatacgcacatatatgtatacatatatacgcacatatatgtatacatatatacacacatatatatatacatgtatatacacatatatatgtatacatatatatatatatatgtataatactttataaaatacctggatacctggtgggtatagactaat

SEQ ID NO: 223601 - DNA, 201 bp, Homo sapiens
ccagacatgcttccatcttagggtctctgcactggctatttcctcaaatgtcatctcggtgaggctaaccctgatcaccctacctcaatacacccaattayttttactccgctttttctttccgtaggagttaacacctcctaacatttacttctatcagtttcttatgattaactgtgttgtgtattccctcccattaga

SEQ ID NO: 223602 - DNA, 201 bp, Homo sapiens
gttataagaccaagcaatcctacaactaaatatatacccaagagaaataaaaacatatgtccacataaaaaggtgtacacaaatgttccttgcagcattattttgtaatagccaaaaagtgaaaacagcctacatgtccatcagttgataaatggataaatataactgatatattcatacaatggaaaataatttgataat

SEQ ID NO: 223603 - DNA, 201 bp, Homo sapiens
gccgctacgctggcctcttccctgtccctcaaatgtgccagacatgcttccatcttagggtctctgcactggctatttcctcaaatgtcatctcggtgagkctaaccctgatcaccctacctcaatacacccaattacttttactccgctttttctttccgtaggagttaacacctcctaacatttacttctatcagtttc

SEQ ID NO: 223604 - DNA, 201 bp, Homo sapiens
tcttgttcatttattcactaaaagcctgctgagcactttcatctccttagtgtcaaaacctgagttttgtcacaagatccgccactgtgaaattgagcaartaccattcctttaccagatttactccacctgccttgtaggatcatacatgatcatgtatatgaaagcttctagaacactaaagcattgtgcaaatgtaaa

SEQ ID NO: 223605 - DNA, 201 bp, Homo sapiens
atcattccatccacaagtactcagaactgtggggacatggaataaatatgagatatggcctcttgactttagtttataatctttattgttgaaaaaagccyggttcccttgaaatagttagagaaaaatattggaaagcatatagaaggaagtgtggtatagtagtaagataattcatctagtagtcttgttcatttattc

SEQ ID NO: 223606 - DNA, 201 bp, Homo sapiens
gaaaattgtatttctcgatagaaaggaagtggtcagatcatgccagccaaacaaatctgtcaggctttgaaatatagaaccgttaggtaagatactgagawaaaggataaagtaagatcagcctaaatgtttcagtctagttaagttgatttgtatattacttagaaatttcattttcagggaaatagttttcagatttaa

SEQ ID NO: 223607 - DNA, 201 bp, Homo sapiens
tgaacagaaatctttcagcaacaaaagagaaaattgtatttctcgatagaaaggaagtggtcagatcatgccagccaaacaaatctgtcaggctttgaaayatagaaccgttaggtaagatactgagaaaaaggataaagtaagatcagcctaaatgtttcagtctagttaagttgatttgtatattacttagaaatttca

SEQ ID NO: 223608 - DNA, 201 bp, Homo sapiens
atgttgcccaggctggtctcaaactcctggactcaagcaatccttgcatctcgtcctcccaaagtgctgagattacaggcatgggccattgtacccggctmtcttatcttctttatatagatatctaataagatgtaaaatactgacctgcattatctccatgttaacatttacacttcaaaatctgtaaacggacccacg

SEQ ID NO: 223609 - DNA, 201 bp, Homo sapiens
aaaaaaaaaaaagaggctgggcattgtgtatcacgcctgtaatcccagtgctttgggaggccgaggtgggtggatcacgaacgaggtcaggagttcaagascagcctggccaagatggtgaaaccccatctctactaaaaatacaaaaattagccaggtgcagtggcaggtgcctgtaatcccagctactcggagggctga

SEQ ID NO: 223610 - DNA, 201 bp, Homo sapiens
gctagctgcccaaagtctctaggaccccaaagagattatgagagagaacgttgagaggtctggaatgaattatacatactcttataatgaactttctccarcttgtccttgagcagctgtctccatcccatccctcaagtgctttggaacccacatcttataacaatggaaagatagataaccttttattttaatgtgttt

SEQ ID NO: 223611 - DNA, 201 bp, Homo sapiens
cttttattagttggtcctaagtaagttttatagcattatgataggcagttggtgacagcttagtcatgtgttctttcttgagtaataattaaagtattaayatttttccttttcattatattttatgcatcatggtttgatatatgcttgaaatatttactaaattagatattgctgcatgtggtccatcccacatataaa

SEQ ID NO: 223612 - DNA, 201 bp, Homo sapiens; identical to SEQ ID NO: 41392

SEQ ID NO: 223613 - DNA, 201 bp, Homo sapiens
gtcttttttgatgatgcagctcaacaaccataaatacattcgggactcacaggttgacattttaatcattccatccacaagtactcagaactgtggggacmtggaataaatatgagatatggcctcttgactttagtttataatctttattgttgaaaaaagcccggttcccttgaaatagttagagaaaaatattggaaa

SEQ ID NO: 223614 - DNA, 201 bp, Homo sapiens
taaagtcttatacaaactcttgaggggaaatttttttttagcgttttccgctttagtttgtcttttttgatgatgcagctcaacaaccataaatacattcrggactcacaggttgacattttaatcattccatccacaagtactcagaactgtggggacatggaataaatatgagatatggcctcttgactttagtttata

SEQ ID NO: 223615 - DNA, 201 bp, Homo sapiens
taacagggtcttaattcatttgttaatatttcttcagaacgtgggcttaaattttgttttaaagtcttatacaaactcttgaggggaaatttttttttagygttttccgctttagtttgtcttttttgatgatgcagctcaacaaccataaatacattcgggactcacaggttgacattttaatcattccatccacaagta

SEQ ID NO: 223616 - DNA, 201 bp, Homo sapiens
tttttcatgtatacaacactcattaattggggttgtgtttattggtgaaaacatttttttcttaaaatgaaatctttaatttttttatattaattatactyagtatgaggcacttttgcttcattcttacaggtaggcgaattgtagaggtcttacgtctttgctgggcctgccaccatcaatagtttaggagaataatag

SEQ ID NO: 223617 - DNA, 201 bp, Homo sapiens
attaaataattcatttttcatgtatacaacactcattaattggggttgtgtttattggtgaaaacatttttttcttaaaatgaaatctttaatttttttayattaattatactcagtatgaggcacttttgcttcattcttacaggtaggcgaattgtagaggtcttacgtctttgctgggcctgccaccatcaatagttt

SEQ ID NO: 223618 - DNA, 201 bp, Homo sapiens
ttaatatgtttcatgtaatagacaaatatttttatgtagttactaaggcagataacttctgcatgtcttatttttctctaaaaaggtaagcatacatatamgtatcttgttacttgtgtgtgaccctagattgcttggttgtcagtatctcttaataaagattttccctttcatctgtttgtagaagcctcatcagctggg

SEQ ID NO: 223619 - DNA, 201 bp, Homo sapiens
tattattcattatcttcttaatatgtttcatgtaatagacaaatatttttatgtagttactaaggcagataacttctgcatgtcttatttttctctaaaawggtaagcatacatatacgtatcttgttacttgtgtgtgaccctagattgcttggttgtcagtatctcttaataaagattttccctttcatctgtttgtag

SEQ ID NO: 223620 - DNA, 201 bp, Homo sapiens
agttccttcatctgtaaaaccacatggggttgtgtgaggattatatgagttaatacatgtaaagcactcagagtagtgcctggcatataagggctcaaaawttgttagttgttgatgctgttgttgctgtttataaggcttgcgtgcatttcttttcttcatttgttttgggaatggtgaaggcatataatgtattattca

SEQ ID NO: 223621 - DNA, 201 bp, Homo sapiens
gaagttattgctggtagcatgtcagtttacatgtgtctagctcccatctctggaacacataattaagtgtggtcgacatatattcttcttcatttttgccrttgagaaagctgtcagaaatgttacatctggagaacaggaaagactaccctcaaagccagcgttggcctaagtgtactcttaaacatttcctgtggatgt

SEQ ID NO: 223622 - DNA, 201 bp, Homo sapiens
tcaaaatcccaagggcattgttcacataaatttaaaaaaaaaatcctaaaacttaccaaagaccctaaatagccagagcaatcctgaggtggggttgaggkgggaagagatatcacacttcctaattttaaattttatttcaaagctatagtatatagctatagtaatcaaaacagtgcagtactggcacaaaaacagaca

SEQ ID NO: 223623 - DNA, 201 bp, Homo sapiens
ttagtcccaaaagattgtatccttcttcctaccagtcacaagtccaggcctcttggaacgtctgactgacttgcttcaaattagggttcttgcaaaccccrtctttgggtttgtttgattaactagagtgctcacagaactcagggaaccatgtttgccagtatattacaaaggatattttaaaaggatacaagtaaacag

SEQ ID NO: 223624 - DNA, 201 bp, Homo sapiens
atttttgtagacatgaggaggctttctcaaaagccgtatccatctaataaataaattcagtaaagttacaggatataaaatttaaaatctagatagaaaartccatggcatttctgtacacaagtgacaacctagccaagaaaagaaatcaaaacaatcccatttatgatagcatttaaaaattaaaatacttaggaataa

SEQ ID NO: 223625 - DNA, 201 bp, Homo sapiens
agagattccatgaaatcagcaagttttaaacaccctcagtgtgggcagtaaatgcagtatgagcacagtgactacaaagatcagttactggaaatgaccamgttggaacagtgaggggcagactattgtatggtcttaaattggctttagagtcagattaattcagcagatttgaagagcatcatttcatgccagtgtcta

SEQ ID NO: 223626 - DNA, 201 bp, Homo sapiens
tactactgagttcaggaaacagttggattgggggtgtgtttaataagtagcacaattaagatgtgagaaggaaaaactgaagaaaaggaaattctctcagwgtaatgctttattagctccaattttccccttgtctcttatctgaagcaagtgatttttttccatttgcttaaaaataaagcatttgcgcacagaatgtta

SEQ ID NO: 223627 - DNA, 201 bp, Homo sapiens
cttccaagaaaagctaactaatagaagtatatcatgtcttgctttttcacaagatgtaaaatacgggaatacatgtagactaagaatggtaaatttttaarttacctcgtttgtaagggaaaaaagattccccttttttctcatttacatttaaaataaatcctcaatattatatggaactatttataatatagtgaaacc

SEQ ID NO: 223628 - DNA, 201 bp, Homo sapiens
acttcataataataaaaaattataagttgactccattaaaaaaaagctgaaaaacagctgattaaatcctattgtatgtaaaactgaattttgttttatgygtgcttctagataaatagtgatagagttcttgagtgttttaatgaagtgttttaatgcaggtgaatgctttggactgatgtcaacagtgaatgttaatga

SEQ ID NO: 223629 - DNA, 201 bp, Homo sapiens
tcctctgtatcacagagaagctaacttgttcaaatgctattatgatctgctactgctaaagtttgtattaggtttacgagcaggggaatgacagagaatcyttattactttttggaagaaaagactaaggtaaaatgatttatttggattttgatttttggtctagtaattgaacaagtaaaaggaggaagtaaaccaaaa

SEQ ID NO: 223630 - DNA, 201 bp, Homo sapiens
ttatcatattattcttaataaatagtaacaaccaagttatttggtttagggagaaaatctgccatgaggtatctttgtgtctgtggcacacagccacactrtttatgccattatgaacctgcaaagctcactgtgtctgcagtgaaagctgcagatgaaatctgataggatctcttggcattttcacttctacgattatac

SEQ ID NO: 223631 - DNA, 201 bp, Homo sapiens
ataaactattaacatattaacagatataatagatgttaatattaatataatttatgtgtggttctataagaatagacacttcgatatcatgatagaaagaktcttgattatgatgcaacttgaatatattaaacactaaactttcagcttatgatgccattaacagaacttttaacttatgatgcctttaatactttattc

SEQ ID NO: 223632 - DNA, 201 bp, Homo sapiens
gtcatcatccaaaggataacttgctcctctgtatcacagagaagctaacttgttcaaatgctattatgatctgctactgctaaagtttgtattaggtttaygagcaggggaatgacagagaatccttattactttttggaagaaaagactaaggtaaaatgatttatttggattttgatttttggtctagtaattgaacaa

SEQ ID NO: 223633 - DNA, 201 bp, Homo sapiens
tagctatagtcagaagctcaaagctcagaagctaggttaaagcagagatggtgagcaatggcatgagtgaaactcatcccggttagcaagtccaagatagrtagaagtagagtgtgaaactatgtttgtgaacgtgcagttctgatgacaaaggtgcaagaggaatggaaatgcatggcttggatcacactttaagaaaaa

SEQ ID NO: 223634 - DNA, 201 bp, Homo sapiens
aaatagaagacttcacagcaaggaaagttgtcagagatgaagaggggcattacataatggtaaacgggtcaatacttcaagaagacgtagcaatccttaaygtgtatgtgcataacaacagcatatcaaaatatgtaggacaaaaacttacagaactataaagagaaatagatgatttggctattaaatagttagagactt

SEQ ID NO: 223635 - DNA, 201 bp, Homo sapiens
gaaccaggccaacctggagtttttctggtttaaaatgataatcttatgcattgaaggtgagagggccgattaaataaaaattttcccaacgttgaacgcargtagaatttattgcttggtatgatttctgagtttactgatcttacttttatgtaaaaacaaagataacaattttgtgtaggaaaaattctaataggactt

SEQ ID NO: 223636 - DNA, 201 bp, Homo sapiens
taaaatgtagaaaatttaattctgcttggattaatgaacatatttttagaatcttgtacaaattgtagcactaatgaaaggtcctctgctccaggcataakgtttcatttaagaatgaaaaagcaaattgagctaatgtattgtgtaagaggtttgtagttaaatacataaaatgatgtcagtttgatttcagctggagct

SEQ ID NO: 223637 - DNA, 201 bp, Homo sapiens
tatttttaagacacttatttctgttttgagatgagatcagcattggaaccaggccaacctggagtttttctggtttaaaatgataatcttatgcattgaargtgagagggccgattaaataaaaattttcccaacgttgaacgcaggtagaatttattgcttggtatgatttctgagtttactgatcttacttttatgtaa

SEQ ID NO: 223638 - DNA, 201 bp, Homo sapiens
tccttgataagaactcttggtctaattttacttataactgctttaattactttataacacactaatgccataatctatataatgcttgcatgtccagtgcrtgtatttatttctagatcagtgattgtaataggtactaggtgcttaaaaatacctatactggaatataagcaattacattttttcaaaatgtatggagtc

SEQ ID NO: 223639 - DNA, 201 bp, Homo sapiens
gctgcagcttactgtcaccagtccagtgttgccaggactactatttttcaagagaaaccaagattccatgtttctttatgaaaatttttaaactgagcagrtaaacaagcatatctgaagaatagattatcttttctgtcagtttgtgacctgggtgatgctgtcttctgagtcctcagccctatgttggaacaaagaaaa

SEQ ID NO: 223640 - DNA, 201 bp, Homo sapiens
aaaggcaccacagactattagatctgtcttagctcagcttccccactaagaagagccggaagcagagcagcatgtgctgtttattagggaacataatcccragaagtagagtgagaaacaaggagaatatggtttggtaggggtggagagtcaatacatggataagctattgtggtacctgccaccactcagtcctgtagg

SEQ ID NO: 223641 - DNA, 201 bp, Homo sapiens
gggtgctaagtccctcactgcccggggccggccggcttctctgagtgtggggcctgccaagcccacgcccacccagaactttcactggcccacgagcaccrcacgcagcccgggttcccacccgtgcctctccttccacacctccccgcaagcagagggggctggctccatacttggccagcccagagaggggctcccaca

SEQ ID NO: 223642 - DNA, 201 bp, Homo sapiens
gtggctcatgcctgtaatcccagaactttgggaggccaaggtgggcagaacacttgaggtcaggagtttgagaccagcctggccaaatacagggaaacccygtctttaccaaaaaatacaaaaattacctgggagtggtggtgcacacctgtagtcccagcaggctgaggcaggagaatcacttgaactcaggaggtggag

SEQ ID NO: 223643 - DNA, 201 bp, Homo sapiens
ctacctttagaggaactgaaaatgaatttatttgcttatttcagagagattttcagttattagatgggtgatggtagtactagaattatatttcccagatkctggaccctaaacaaatgaagcagatttttatcagcttttgtcctcttcacccatagattgtgactcatttttcctctctttgccctcttgaaaccagtg

SEQ ID NO: 223644 - DNA, 201 bp, Homo sapiens
gaaaactcataaataaggaaaattgggagttcttatccatgatcatgaggtacattggagaagagttggctgggcgcaggggctcatgcctataatcccarcactttgggaggccgaggcgggtggatcatttgaggtcagcagtttgagaccagcctgacgaacatggtgaaaccccgtctctactaaaaatacaaaaaa

SEQ ID NO: 223645 - DNA, 201 bp, Homo sapiens
tttatatccatatcttcatttgtactttcatactacatatatttttgtcagccagctcagagtcttttcgagggaggcatattattggtaaacgtacaatrtgaataactgaaagtttatgtgaatgtgtattggttagcaaaatgctggcatagtttttaagaggagttattaacatgataaaatttaaatatacattga

SEQ ID NO: 223646 - DNA, 201 bp, Homo sapiens
tatgtggtatgagattagagtccaatttcattccttttggcttgtgtagacccagtgtcccagcaccattcgttgaaaagactattttttacactgaattrtcttgatacccttgttggaaatcagtggatcataaatgtgaagatttattgctgaattctcaatttggttccattggtctgtatgtctgttcttatgtca

SEQ ID NO: 223647 - DNA, 201 bp, Homo sapiens
cttttgcccccccccccttttttttttttttgagttgtctctctctgtcactcaggctggagtgcagtggcgtgatctctgctcactgtaacctctgcctmctgggttcaagtgattctcctgcttcagcctcctgagtagctgagactacaggtacatgccaccatgctcagctgatttttgtatttttttttttttttt

SEQ ID NO: 223648 - DNA, 201 bp, Homo sapiens
tgacaggatttcattcttttttatggttgaattaaatattccattgtgtgtatataccacattttctttattcattcatttgttaatgggcactcaggttsgttccatattttagctattgtgaatggtacttgggtaaacatggaggtgcagatatctctttgatacattaatctcctttctttttgatatatactgata

SEQ ID NO: 223649 - DNA, 201 bp, Homo sapiens
gtactttaaaggagcattaataataaatacggggatagagagtaggaggtaagttggctattttagataacatgggcaggttaagttcttcctgagagacracacttgaatggtagagaaagtggtcaactggagcagaatgccccatctgaaggaagaatctactctgctgcttcccagctgcagcttactgtcaccagt

SEQ ID NO: 223650 - DNA, 201 bp, Homo sapiens
aaatagaagtagaagttggtacttaatattgaacagactacaccaaagaagtaggttaagagagaatcttttaagagaaacaattttcttaggtactttamaggagcattaataataaatacggggatagagagtaggaggtaagttggctattttagataacatgggcaggttaagttcttcctgagagacgacacttga

SEQ ID NO: 223651 - DNA, 201 bp, Homo sapiens
tatcctctaatgagctgttttgttgtattgaatgaagtaattaataatttttttaattataaatatttatattccaaatagaagtagaagttggtacttartattgaacagactacaccaaagaagtaggttaagagagaatcttttaagagaaacaattttcttaggtactttaaaggagcattaataataaatacgggg

SEQ ID NO: 223652 - DNA, 201 bp, Homo sapiens
gctaaatatatcatctgagaatctgtaattgaatttaacaaatattttagtgcatctttgcagtaggcattaaactctacataattaggtgatggctggtrtctgttacagtctagcacaactggcttaggaggcaagtcttattcttgcagcactattcacagtcacaaaaatatggaattaacctaggtttccatcaat

SEQ ID NO: 223653 - DNA, 201 bp, Homo sapiens
tcggtagatacattaaaactccacagtttccctgcctaacaggtgggaggtgggggcggaattaatttaagaaatattctttgctacatttgctagctcayaggcccaagtgttcttacagtacagataagagaggctatttctggaagccctgagtaccttgaggcctttcattacatatttgaaacatgcccaggatga

SEQ ID NO: 223654 - DNA, 201 bp, Homo sapiens
cgtgcagttttttgttacataggtataccagtgccatggtggtttgctgcacccatcaacctgtcacctacattaggtatttctccaaatgttattcctcygctaagccccctaccgccccgccgacaggccccgatgtgtgatgttcccctccctgtgtccatgtgttctcatcgttcaactcccacttatgagtgagaa

SEQ ID NO: 223655 - DNA, 201 bp, Homo sapiens
gaaatcacccaccttccgtgttgatcttgctgggacctgcaccccagagctgttctatttggccatcttcaagccaggctctaatttttgtatttttagtraagacggggttttaccatgttggccaggctgttctcgaactcctcacctccggttacattattcttgtatagagttgtcagccaagatagtaaccagaga

SEQ ID NO: 223656 - DNA, 201 bp, Homo sapiens
ttgctctgagttacaaggtaagtgggactgccaggatttggacgcttcatctctggatctgaagcatactttctttaccaccatgttacggtaatagattsatgttttacaaaagatatttctttattattcttcaacaagcatttattaagtgtctctgtgtgcaggtcacttttgctgttagtcttctggttgaattgt

SEQ ID NO: 223657 - DNA, 201 bp, Homo sapiens
tgtggtgggccctacccagtttgaacttctggcgattttgtttacactgtgaggggaaaaaccacctactaaagcctcaataatggcgggtgtccctcccstgcccaaggtccagcatcccaggtcgacttcagactgctgtgctggcagtgagaatttcaagccagtggatcttagcttgctgggctccgtgggggtggg

SEQ ID NO: 223658 - DNA, 201 bp, Homo sapiens
cattaagaagttaagtaacttgctctgagttacaaggtaagtgggactgccaggatttggacgcttcatctctggatctgaagcatactttctttaccacyatgttacggtaatagattcatgttttacaaaagatatttctttattattcttcaacaagcatttattaagtgtctctgtgtgcaggtcacttttgctgtt

SEQ ID NO: 223659 - DNA, 201 bp, Homo sapiens
tcagagatgccctgccccagaaaggaggaatcttgagagacagtgtggctacagcggcgctttgcaagctgtggtgggccctacccagtttgaacttctgkcgattttgtttacactgtgaggggaaaaaccacctactaaagcctcaataatggcgggtgtccctcccctgcccaaggtccagcatcccaggtcgacttc

SEQ ID NO: 223660 - DNA, 201 bp, Homo sapiens
gcctcccccactgtggccagtgtctccacagtggccaatccggttgcgctactaccgccatcaatagtataaacttacatagccattactatgagccaggyactgttctaggcaccttacatatattaattcatttgatgctcacatcaactttctggagtagctactttttcagagatggacaactgtaacattaagaag

SEQ ID NO: 223661 - DNA, 201 bp, Homo sapiens
ttaggaatgtaaatcctcaggcctcaccccacatttacagaattaacaactttgagtggggagccagaaccttgtgtttaacaagccttcctggtgaatcygatgcagctaaagcattatcattcctttttataattgttggcccttacccaatttaaggcaaatttcaagaaaaaactgacaacctaaagaagtattgtg

SEQ ID NO: 223662 - DNA, 201 bp, Homo sapiens
cagagcatgcagccccagatgtgcctcccccactgtggccagtgtctccacagtggccaatccggttgcgctactaccgccatcaatagtataaacttacrtagccattactatgagccaggcactgttctaggcaccttacatatattaattcatttgatgctcacatcaactttctggagtagctactttttcagagat

SEQ ID NO: 223663 - DNA, 201 bp, Homo sapiens
acacctgattattattaccttagttaagagttcagaaacaactcttctttcctcatgcctttattcaagtacactgacaacatactttagtgcagtggttytcaaggtatggtttaaggaccccagcatcaccattgcctgggaacttgttaggaatgtaaatcctcaggcctcaccccacatttacagaattaacaactt

SEQ ID NO: 223664 - DNA, 201 bp, Homo sapiens
ccaccctaccaactcggtagggtccggggctcccactgggatcacctgttccctgcccctgccagcttcacagagcatgcagccccagatgtgcctccccmactgtggccagtgtctccacagtggccaatccggttgcgctactaccgccatcaatagtataaacttacatagccattactatgagccaggcactgttct

SEQ ID NO: 223665 - DNA, 201 bp, Homo sapiens
gtgtactcacaacgttgtgcaactgtcactgtcattacttccaaaacattttcatcatcctagaaaggaaccccacatccattagcattctccattccccyctcccccccagcttctggcaaccacgaatcgactttctgtctctatggatttgtctattctgggcattttgtataaatggaatcatacaaggtgtggcct

SEQ ID NO: 223666 - DNA, 201 bp, Homo sapiens
atcacggttctccagagtacttttgcaattctttattacgtcatttaaggccctacactatctaacctcagccatcctggtatatctgctgttcttccaargggcaacccgctttcttctccctgcctttttccatgaagtgcctttagcctgttatgctttatctccctataccagttaaaatccacttcacctttccag

SEQ ID NO: 223667 - DNA, 201 bp, Homo sapiens
tatgtggattttattatgtgtttcctatttagaaatttccactagtgcctatcaaacttttaatgtacacaccaatcatccaaggaccttgtcaaaaatgyagtttctcattcagtaagtttgcccagtgctgcttcttactggaccacactttgaggccctcagtgactccatagtctgtaatagtagttctatcatggt

SEQ ID NO: 223668 - DNA, 201 bp, Homo sapiens
aagcatccccttactctgctccctttgtggattacctctcctatcacacatgcctctcaaaaccctgccttttggttccctgggtagttgttagtctgctwtcacatgtaaagattatatgtgagggaacatctgtgggttttacctgtttagtcagagagtggagaacgattttttctactggttgtctgggtaggggtg

SEQ ID NO: 223669 - DNA, 201 bp, Homo sapiens
ctatagtgtcatctgaaatttggaggtttactttgtctttgagccttagtgacatcattactagttcatatgtaagctcttcataaatagagcaaaatgtrtattacaggttttaatttttaaatgtagaagtcacacataataagcccttcaaacagtttcagggaagatatctactttagttaattttctgacttggga

SEQ ID NO: 223670 - DNA, 201 bp, Homo sapiens
aaatgaatcatgtacagtttataaacttacagtaataatattcaaagaatgtttcactcaaatagaacaaatatttctttgttaggtaaaaccgtttaacytaagactttttgtcactcttaggactgtattacatcaaagccgtttcagatggcagatcattgtttagcttttggtggtcaatgattataagtggatgga

SEQ ID NO: 223671 - DNA, 201 bp, Homo sapiens
aagtcgtagtgttccttccacaggttgcatgcactggtagtctcatcctttagatgcatcctcaaaaccctggcagaaattgcaactttattgtttgttgratgtgattctttatacagtattagtatttcaaactaatataccaaagggaaatgttattaaaatgtaacgttttaatgaaataaattgttaagagtgaag

SEQ ID NO: 223672 - DNA, 201 bp, Homo sapiens
tccagctttagaaattttaattagtgctgtcagtggttcagtgaagtcgtagtgttccttccacaggttgcatgcactggtagtctcatcctttagatgcrtcctcaaaaccctggcagaaattgcaactttattgtttgttggatgtgattctttatacagtattagtatttcaaactaatataccaaagggaaatgtta

SEQ ID NO: 223673 - DNA, 201 bp, Homo sapiens
tattggagggatcccatttattctagtagtttgttgtcttgaaaaagaagtagaatgaaattgtttgagtttaaatatttttgctcaaattcttgttttgktttttaaagatactttaatcagttattattgatatactgtcacagtaattaccagacaacaggcatccagctattaataaccccatatttaagaaccaag

SEQ ID NO: 223674 - DNA, 201 bp, Homo sapiens
tccccctatgcccctttagtagtctgttttattggtatacactctgcagccccctcttgcctgtctcaacctgtttgatttacacccatttgttttgtctygcagaaatatattgaaatttctcactcattggtgaccaccacccttctctttgctgtttattcctttttgcattttctgtatgtcccctacccacccagt

SEQ ID NO: 223675 - DNA, 201 bp, Homo sapiens
ttttagtttgcttcatatttcatctgtgattttcttatgcagctttttttccttctgggatttctgattacttccccctatgcccctttagtagtctgttktattggtatacactctgcagccccctcttgcctgtctcaacctgtttgatttacacccatttgttttgtctcgcagaaatatattgaaatttctcactca

SEQ ID NO: 223676 - DNA, 201 bp, Homo sapiens
aattgtagaattaataattgtaatgcagtaattatagaattaataagctggtatagaactatgatttgaaaaatctcatttgtgatattatagaatagtgktatataatacagaaaacatttaagtgggtatttaaacagcagtagaaattaatttctgtctcagagttaggaggaaagattacagttacatcttagatgc

SEQ ID NO: 223677 - DNA, 201 bp, Homo sapiens
ttgtgaggactaaatgtgataaagcatttatttggcacatagtaagctctcaaaactgatgctgtcactgatagactttatgtcagttaaaatctacggtsatatttttcaagtctgtttggtacaaactttggaaaaatgaggtatatgttaaccttggaggccttaatgctattgttaaactagaaatactcagatgcc

SEQ ID NO: 223678 - DNA, 201 bp, Homo sapiens
aaatgcagttcaactcagaaacaggacttaaattaaatttggacacctgattattattaccttagttaagagttcagaaacaactcttctttcctcatgcytttattcaagtacactgacaacatactttagtgcagtggttctcaaggtatggtttaaggaccccagcatcaccattgcctgggaacttgttaggaatgt

SEQ ID NO: 223679 - DNA, 201 bp, Homo sapiens
ttgtgtttttaaagaaaagatagttgtccttgttaaaaattattttgccttatgaaggaccttgtttgtatactagatcattttggaaaggtaaagttaartttcgtagtagtgacagcagcaagactaaattggtttcagagcactttcaaaggtgcagcgctctttgcagttgatgtttcctgctaagcatttttgaag

SEQ ID NO: 223680 - DNA, 201 bp, Homo sapiens
taagtgtagagagaagtagagttaattgcatactgactggtcataaaattagctgctctgataattaagattcttgtgcaagcaacacttagatgacagtrtggaccccatatctagccaactgagtacaaggaaaagtagaaagctccccccaagatggtgcagaattagttaccagttataatcccatatttaaatagg

SEQ ID NO: 223681 - DNA, 201 bp, Homo sapiens
tgccaaataactaactgaatgttattatataaatattgttagtttaattgctaagtgtttaggagatattaggacatacctataatttcttcagactatartaactctaatctgtacttttattggcacttgtttgtaattctagtcaattctggtctcttaaacagaaaggtagtgaactaatgttgacaccatttagtt

SEQ ID NO: 223682 - DNA, 201 bp, Homo sapiens
tatgaagatctttgacacatatttattaaccatgagttattaaaattaatagttctaattgcagtacaaacgaaatcacagttgcttgtctacaatgtatrtaagtgtagagagaagtagagttaattgcatactgactggtcataaaattagctgctctgataattaagattcttgtgcaagcaacacttagatgacagt

SEQ ID NO: 223683 - DNA, 201 bp, Homo sapiens
tcaggaaaaaaaaaaaaaaaagaagaggattcagagatccaagaaaggcataaaggtggaaaataaaagccattttaaatgctgtaaaattgcttagtacmgaaaaaggatttctaccttcctaactttccagtaactgaagggcattgacaaaatggttttttgaacagaaatagaggaaagggccttatatgtagcaaa

SEQ ID NO: 223684 - DNA, 201 bp, Homo sapiens
aagatcaggtgcaaatatttcacatcacagaacaaaaacattaggaaagggcaagacaatgtctgttccaggcctaaggaaaagcaggattcaggcagcaygctcttccgcctcagttgaggctgtgggttgagccctctctgctcctgaactgttgataaaagtcagggtcagcaaagtcagaagcagtttggctgatga

SEQ ID NO: 223685 - DNA, 201 bp, Homo sapiens
ttgcagtttattatgaggattagggttgaataatgttattataaagtgtgtatgtagtaccttcatcttttctactaattttattcccgaaataaccctgygaaattagaatatgtattatctgcccttaaaagatggaaaaacaagtgtatgtagaagtagtatgaatcctgtccagtgtacaaagtggagatatatgta

SEQ ID NO: 223686 - DNA, 201 bp, Homo sapiens
tcagcttactcatgactgccttctaaagactgcctctttcaggaatcctaatagaaaaagcaactaagagaaagaaaatgaatcacgtcagaggttacagmaattataacctacaccatctttcacaactagaacatcatataaagctgtttcattatttttcttactccttttacacatttttcttactcctctttgtct

SEQ ID NO: 223687 - DNA, 201 bp, Homo sapiens
agctgggttgtgatagcacccaggcccacccacaactttgctccacctcagagtggatgcccagagctgggagaggccagggagtgggaacaggtactttsaagcctatgggggcagggagcttcctaggcccccaagagtgcagggatgccttggtctggagccatggctgggtggctgcagctgtgcctagcagcacag

SEQ ID NO: 223688 - DNA, 201 bp, Homo sapiens
ttcctcagaaaagaaagcgcttccaaaatgtcagattaattattcctatacaactgtaataactactttctctttttcttctcttcatatttgttctttartagatcctggagcttaatgtgtattatggctgttgaatttttcatgtcatattggtgaataattcacacaataagcagtacaagagtttgcctaaattac

SEQ ID NO: 223689 - DNA, 201 bp, Homo sapiens
ccctgtttctacaaaacatttaaaaattaatggggtctggtggcatgtgcctgcggtcccagctattcaagaggctgaggtgggatgattgagcccagatsaaggctgcagtgagctgtgatcatgcccttacactccagcctggacaacagagcaagaccctgtctcaaaaaagaaaaataaattttaaaaaattaattt

SEQ ID NO: 223690 - DNA, 201 bp, Homo sapiens
tgaaaaaagcaaactatctctatgtgaactattactactccactgataaaatgctgaaagaaatattaccgtcatatacaagtctaaaaaaaattgctgcrgataaagtcttatgaaactccattaatgtagtttcacagggattcttagcttatagcttacaaaataaaaaggattgtcaaaataccaagcttggaaaat

SEQ ID NO: 223691 - DNA, 201 bp, Homo sapiens
agatgaagaaactgaatctcaaagatgttaagtaattcatccaaaaagagaattccagcccaagtccagctaactcccaaacccatatattctttccacartacaactcatggatcatggaactagaataagccttagaaataatctaagcctcttgttttgttaggaaagagaggctcagagttgcaaagttagttatcc

SEQ ID NO: 223692 - DNA, 201 bp, Homo sapiens
gactactataaaatgaaatttaaacatttagcatgtaaccaatttaaatatttacaaaatcgtatggacaactcagttttcttttcctgctcaacaatacyttacattataatgtactgtttatcatttgcatcatgaaacatttttattcacattaatatattgctagtgtggaaatggaagaagaaaacagttgatgtc

SEQ ID NO: 223693 - DNA, 201 bp, Homo sapiens
ttgttccatgaaagggtcatatatgcaaagtgactcctaaactcagaaggagccaagaaacctaaggataaggctcgcaaatccagtttttcaggaaatgrtaatttatttgggaacttacagatggaagcatactcttgggtggcagcaagacaggtagatctgcacaccactactgcccagaccggggcttttatacca

SEQ ID NO: 223694 - DNA, 201 bp, Homo sapiens
agtatatgaactgtttatttctggaatttttcatttaatatttttgggctacagttgacctcaggcaactaaaacctcagaaagggaaattgtggataagrgaaggactactataaaatgaaatttaaacatttagcatgtaaccaatttaaatatttacaaaatcgtatggacaactcagttttcttttcctgctcaaca

SEQ ID NO: 223695 - DNA, 201 bp, Homo sapiens
ccttcaccactctgcaatacacaacactgttgaccacattcttctcctcgaagtgctccttctctcagcttctgtgataccatatgcccctgagtttcctyttgtctggttgctctttctcaccctcctcatctgttgccaatacctttaaatgtcagtaagtgtttctcagaactccctcctaactcccctccttttgca

SEQ ID NO: 223696 - DNA, 201 bp, Homo sapiens
ttggccaaagttctgagtatggcacttccctccttgcttccttgagatctcagcatttagtgaagtgaaaagttctctgctcacaagaaagatcctccccscaatccggggtttgacagacaggtctatatggtgtgattccatggatatgtggtatataatatgccagaatgtttgacctaccaggtaggaatctaacca

SEQ ID NO: 223697 - DNA, 201 bp, Homo sapiens
agaaggaagatgataacggtacgctgttcagaaggttcttgtgaggactaaatgtgataaagcatttatttggcacatagtaagctctcaaaactgatgcygtcactgatagactttatgtcagttaaaatctacggtgatatttttcaagtctgtttggtacaaactttggaaaaatgaggtatatgttaaccttggagg

SEQ ID NO: 223698 - DNA, 201 bp, Homo sapiens
aaaataccttaaaatcatatttcttgggtgatatgtcaaagaccaaattctgcttatgaaagatgtactgctttatgtgtgaacatgagtttttcaagtaygtgggtcatctttattttactacagtatatagagaaagtacggattattcaaacctaatgatagatttcacgagggaaaaatatagaagatatttttctg

SEQ ID NO: 223699 - DNA, 201 bp, Homo sapiens
tatctaatttaagaacatttttatcaccgcacagggaagcatcatacccattagccgtcactcttcactactctcccctcactccctggcaaccacttacmcattttatttttttattaattttttttttgagacagggtcttgctctgtcactcaggctggaatgcagtggtatcaatcatatttttattttttgtagag

SEQ ID NO: 223700 - DNA, 201 bp, Homo sapiens
tttttgtacttagcaagttggctagtcgaggtttttcacagttgtgggaccaaagggcttagcacagcgcctggtagagagtagacccttaatcatttttktcttattttctgtaacagcattattgatatataattcacatactataaaatttaccctttaaaaatgtacaactctgtagttcttagaatatttattatt

SEQ ID NO: 223701 - DNA, 201 bp, Homo sapiens
cagaaacagttttatttcaagttgtaatttgattaagagtaatcaaaaggatccatttcaaaaggaatttgttcagtgtacctataatttttaaagatatrttttttgctgttaatggtacttattaagtataggtattttgtttttaaaaaggtgtctgagaagatagctatacagtgctgaaagtgattattaggtgac

SEQ ID NO: 223702 - DNA, 201 bp, Homo sapiens
ggcagtagaaatttgagtttcagattatggctcagatcacatcattgagtaatctttttaagtaattatataactatggcattcgatagtatgtaaatgcmcataaataagaatattgagaagaatgtgtggctttataactaatgttatacacaactgaaactctcagcatagtttattaaatcatagtttattaagctg

SEQ ID NO: 223703 - DNA, 201 bp, Homo sapiens
tctaccagtataatgcttctgctcaaattcagcccagttcccctgagagaggtcttttctatcacccatccagtcaaactggaaaactaactgtggctctrcttactcacgaagttggcagtaacaacgttttaagaaggacccttcaaaaaacattccaatttgccagttgcagggggaaaaaacgtaggctctaaatta

SEQ ID NO: 223704 - DNA, 201 bp, Homo sapiens
ggagtttcaattttcctacaccactgttgcccttaagtatccaaaacattcggggtgactacagcctccttcaagccagacagtatgcaacagatcattgwtttctatcccattctttggaaaacctgagctaatatgatgtttctttcaaagggtataatataaatatgtaataacccctgataattgggtgcctaacaa

SEQ ID NO: 223705 - DNA, 201 bp, Homo sapiens
aatggggttgcagttctattggagtttcaattttcctacaccactgttgcccttaagtatccaaaacattcggggtgactacagcctccttcaagccagasagtatgcaacagatcattgttttctatcccattctttggaaaacctgagctaatatgatgtttctttcaaagggtataatataaatatgtaataacccct

SEQ ID NO: 223706 - DNA, 201 bp, Homo sapiens
attccctcccattagaatgtgaatatctgaaagacacttacagtttgaaaagtgcctggaacatagtaaatgttcaataaattgcacttcattgatatttrttggcaacataacattattaccactcctcagaagcctgccacatcttccctatcatttatacctctccccaagcctgatgtttttgtttcttgtcttaat

SEQ ID NO: 223707 - DNA, 201 bp, Homo sapiens
cttcatcattagtgagcagagagcatggtgtagtaatcatctattgatgcataacaaattacccttaaaacttagtggctgaaaataacaaacattatctscagattccagagtggcttagctgggtgtttctggctcaaggactttcaagagtttgcagttaagatgttgatcagggcttcattatctgaaggcttagct

SEQ ID NO: 223708 - DNA, 201 bp, Homo sapiens
ccttgatcatattatttaacagcagagcctaaattagatctgtcagttaatttcctatatacagcttgcctgaggtagcatgaaagcagccatagaaaatrtttaaactaatgaatgtggttgtattttaatataatgttatcaaaaacggactgcagtcctgctttggtttgtgggctatagactgctgatccctgttct

SEQ ID NO: 223709 - DNA, 201 bp, Homo sapiens
tgcagttagtacagtttagatacattgcggtgatttgaaataaggcaccaggagttttacctgctgttgtttttgcatcagcagtataaatgtccactcastgaaaatggtgaatgaggtcttagttttattatgaaaatagttttgacttccttgactccctgaaaaggtctctgggatgctcagagggaggtccgtgtg

SEQ ID NO: 223710 - DNA, 201 bp, Homo sapiens
cagttcgtacatacctctctctaaatgcattgaggaaaattatatctcttacgtaaatcatctaagactttctgaattttgttagatcctgccatttcttrttttacacaggaggctgccagctatcaactgattgaattgattacttcattaaagctagaaatacagatctgatgagttttgcaattaattgtatagaaa

SEQ ID NO: 223711 - DNA, 201 bp, Homo sapiens
aataagagttacttgaacacaacactgagatatcctgataactgagatctggtaactgagatggctgcctaagtgactaaagggcagatagtgtacacaaygtagatgcactgggcaaggggatgatttacgtcctgtatgggctggagtagggtggtaggaggtttcatcatgctactcaaaatggtgtgcagttaggtt

SEQ ID NO: 223712 - DNA, 201 bp, Homo sapiens
gataaatactatcatttttctcctcggtctgttatatagccacttcttacaatgttgatttctattgttcagttgaactcaaaagaaacttggggccaggygcggtggctcacacctgtaatcccagcactttgggaggccaaggctggtggatcacctgaggtcaggagttcgagaccagcctggccaacatggtgaaac

SEQ ID NO: 223713 - DNA, 201 bp, Homo sapiens
tagttagtattcacagctggataggtgtcatctttatgcattatggttttcaggtgatgtttaatttcagttccttcactgccagttattcaagggccagmtaatattcctatggggtggggggctgggggaaggtggtgttctgttttgctaatgtgtatttcttagatatacatatttttcaggatttattccctcact

SEQ ID NO: 223714 - DNA, 201 bp, Homo sapiens
tccctaattctttctagaatgataaatactatcatttttctcctcggtctgttatatagccacttcttacaatgttgatttctattgttcagttgaactcraaagaaacttggggccaggcgcggtggctcacacctgtaatcccagcactttgggaggccaaggctggtggatcacctgaggtcaggagttcgagaccag

SEQ ID NO: 223715 - DNA, 201 bp, Homo sapiens
gagacaaaataattgtgtaaagataaaaaaatgaaatatgaaatataatgaaagaagtaactaatttaaaaaaaacacaaatttagaaaagaaccagtgamctttattcattataggtatgttccagaaacattctatataaactgaatttttataaattgcaaaagaaggaatctgtttgccccttatcaagtcatacca

SEQ ID NO: 223716 - DNA, 201 bp, Homo sapiens
ataagaaagctctccaagtttcctttcatcatattgttgttaggatttaaacatatcaatttgtgggggacacaaacattctatccataacaagttccaayattctacatcagtcatctcagagagaagataatagataaagaatggatattgttctttttaagctcactagggattcctaacttatctacaggaaacagt

SEQ ID NO: 223717 - DNA, 201 bp, Homo sapiens
gttggtgaacattttaatataatggtttttttaagctccagactccaggagatgcctgtttcttttttcattctcagacattgttactttcgttcagttgmagatgtcacacatacctattcccttgtgtagagtgaaaactaatttctccctaattctttctagaatgataaatactatcatttttctcctcggtctgtt

SEQ ID NO: 223718 - DNA, 201 bp, Homo sapiens
tggtagctattttaattattactattatttttggttacaacttactgtttatacatgtggtattttttaactttatggtaagaacataggggaaaaatatsattaccctcaagtatgcatacaaagtttggaaatttttatagtatttgtgaatactctgctactttcaaagaatgtctcttttgtgtgttgtacacatag

SEQ ID NO: 223719 - DNA, 201 bp, Homo sapiens
taaactgtagtgtaattgcagtgctccagattaactaccctcaagcagtaaactatattggttgcagtatagaaaggatgtctgcttagtatctgcataayatcaaccattgacataattttttagatttatttttaggaccttccaaatacaggatactattctaaaacctaataagaataggggagatatatatatata

SEQ ID NO: 223720 - DNA, 201 bp, Homo sapiens
ggtgaatccagaatcttctttaatttctaatgctaacaagggcatagtcttaagttttctgtttactttattctgaactgcaaaactaggaaggagaatckgggtataagtgctctctgttctgtcagctcacatgcttcgtagcataagcaggtgtgtgatgattatttcagagcaaaaggaaagacttagtaaaatttg

SEQ ID NO: 223721 - DNA, 201 bp, Homo sapiens
gagggcctcaaagtagcttcttgatctcattaagttgttctctcccctcaccattgtttctctaaaatgtttggctggctttttaaaaatagtacataaastgtattatttctccttaattaccacacagtgtaatgtggtaaccattggatgccttatcaaatatgtttgagattgagcccatttaaaatttattccaat

SEQ ID NO: 223722 - DNA, 201 bp, Homo sapiens
agagaacatgcagttgtcatggaataacatgaattggcttgtttttaacctgagttcgtgcattcatataaagcttggccatgggtcaagttctttcttasattttgaattgcctatttgacatctctagttgaacatccagtagtcatctcaaacttaacaaatccagaaccaaattattgattaccccattctacatca

SEQ ID NO: 223723 - DNA, 201 bp, Homo sapiens
tcagtaaatgttgcatttactgaatgttgcattaatgaaaaacttgcctttacttgtaagtgccccttacttaaaattatctctttttcccccttaaaacrttaattctttcagagtatactctagtaagggtgttaaaagaaaaaaaaagatgataactaaaccaaacaacaataaggtgggaatgattagtggctgcac

SEQ ID NO: 223724 - DNA, 201 bp, Homo sapiens
ggacaagtataggccacaagtgctaagtgaggatgcggcagaagtggcgatggaggccaaatcttacagagccttgggaagcctgtgaaggaagattatcrtaaaagcaagaaagtgacacaatcagattctcatcttacagagatccctctacatgcgttctgcaaaatgtatgtggggagcacaaccagatggctgttg

SEQ ID NO: 223725 - DNA, 201 bp, Homo sapiens
tttccctactcctctttgctaggcaccagtctaggcagacagagtaggtaagtgacattaggaacaggacaagattaagtgacacctgggtgctacaaggytgaagaaaggaccagaccaattctacgtcagatttcaatgtgaaaaaaaatacttttgatgccttcccgtctcatcttttgcatccctcattatctctta

SEQ ID NO: 223726 - DNA, 201 bp, Homo sapiens
tcatggctcactgtaatcacgaccccctgggctccagtgaacctcctacctcagcctcccaagaagctgggaccacaggtacatgccaccacacccagctrttttttgttttttgttttttttttttttttttgtagagatgggttctcactgtgttgcccaggcttggtctcaaactcctcggctcaggccatcctcctg

SEQ ID NO: 223727 - DNA, 201 bp, Homo sapiens
ctcttctacttactagctgcttagccttgggtgaactgttgaacctctttatttctcagtttcctcttatagtttaaaaaaaaacaaaacaggaagaagargagggagggggatgatattaagagcatctaccttatggagttttatgatgttaataaacaaatgtatggagagttttagaacagaatattgcatggtcta

SEQ ID NO: 223728 - DNA, 201 bp, Homo sapiens
gggtgacagactgagaccctgtctcaaaaaagaaggttcacagaaggggaagggaaaagacttagatgatgtggatggcttaattaaaaattttgagtggmgtttaataataattcagtatgatgtttatactctaaatagcataactgaaagaaatgctcttggaacttagcagtgacaatgtaattggtcatttgtcat

SEQ ID NO: 223729 - DNA, 201 bp, Homo sapiens
cctttccctactcctctttgctaggcaccagtctaggcagacagagtaggtaagtgacattaggaacaggacaagattaagtgacacctgggtgctacaargctgaagaaaggaccagaccaattctacgtcagatttcaatgtgaaaaaaaatacttttgatgccttcccgtctcatcttttgcatccctcattatctct

SEQ ID NO: 223730 - DNA, 201 bp, Homo sapiens
atcttgttatgaacccagttaatgaagtgtttgcactattatgcatttggatttttagttgactcattaaaataaactaaataaattaataaataaattamattcaggtatttcttgccatctgattttcttttgtttcctaagcttatatactgagagatactgcattaaccgcatatttttggcttctgaaatttgaag

SEQ ID NO: 223731 - DNA, 201 bp, Homo sapiens
agtcctttccctactcctctttgctaggcaccagtctaggcagacagagtaggtaagtgacattaggaacaggacaagattaagtgacacctgggtgctasaaggctgaagaaaggaccagaccaattctacgtcagatttcaatgtgaaaaaaaatacttttgatgccttcccgtctcatcttttgcatccctcattatc

SEQ ID NO: 223732 - DNA, 201 bp, Homo sapiens
aatgtgattttcatgtactgtatagggttttttgtataacaaactaatttcatccaattctggttgcattgtaaacttgggggtgagctaaagtgatttgwcataaatatcccactatggaatttattctgaatgaattgtagcatatttctcatttttaataatataaggttaatatcattcagtatgaaatatattttc

SEQ ID NO: 223733 - DNA, 201 bp, Homo sapiens
aaatagttcaacagttattaaaaactgcttttttgagaacttttagctcttctccaacttgtaatcatgagaaaataagtgagtagtaacaggaccataaygtttttacaaatccagacacctttatgaaacatttaaactatccagaacgtaaaaaggagaagaaacaaaggctgttgaacagtaggagggctatataaa

SEQ ID NO: 223734 - DNA, 201 bp, Homo sapiens
ccatttgcatgttttcaagattcatcgttttgtattgtgtattcttgagagtctactaaaatatttttatttaaaagtacgaaaggaagtgctagggtttycctcaaagtatctcgcggttctaaaggattttacgctcttcttagtttttaatccctgatttctttaaaaagtatgtttctagatatgtgataattcagt

SEQ ID NO: 223735 - DNA, 201 bp, Homo sapiens
ttcttccccttggaccataaaagtctacaggggttgaattggaataatcggaaagcaacagattttatgacatgcctaaaattgcctttatccagtgatayactcctcatccttaagcaatcttctatgcctccaacctctttttccttaggatccttcttctcaggacaatgcttggctcctcatttaaatatgacactc

SEQ ID NO: 223736 - DNA, 201 bp, Homo sapiens
gagaagtgacaccatgtgacttacatggctagatgagaaaaggctatcttctgtctggttttcttgggatgcttgtttttggaacccaaccactatgctgkgtggaagccaagcagcccatggaaagtcctggtggggaggaattgaggacctcacccacaattcctattgagatcctagctgacagccaacaccaacttg

SEQ ID NO: 223737 - DNA, 201 bp, Homo sapiens
atttcaaaaatcctaggacccttaaaaacttgcctgtgcctactctgcctgtgctctctgagtggaagaacaaagcctggatgacagcacatcttttttartatgacgtactgaatattttaagcccacggttgagacctacctctcagaaaaaaaaaaaaaaaaagattcttttcaaaatactagtactcaaagatctaa

SEQ ID NO: 223738 - DNA, 201 bp, Homo sapiens
aaaaatacaaaaattagctgggtggggcacatgcctgtaatcccagctactcaggagactgaggcaggagaatcacttgaacctgggaggtggaggttgcrgtgagccaagatcgtgccactgcactccagcctgggcgacagagcaagactccatttccaaaaaaaaaaaaaaaagaaaaagaaaaagaaaaaaacataa

SEQ ID NO: 223739 - DNA, 201 bp, Homo sapiens
gatggcctcttcttccaaaagaaggctgtttgttacccacacaatgggtgggtttgattgcttggtggatgacagtccatttaccataatcgaggattcarcaaggagattttattacttgtaataagaagaatgctgaggatagttcccaaagcaaaaccttcctgaacaatggtgaaaacaagcttttattgggctggt

SEQ ID NO: 223740 - DNA, 201 bp, Homo sapiens
taaagaggacaaaaaaattcctgaaaaactgaaacttagtttcaagcaaatggaattgggccttatgctgctttttccaaaacacctgataattctcagcyacctaagaaaaattaccaaacctttttcaaagaaattaaggtctgtgctgcaatactgttctttgcagtattggctcataatcacattagggagtaaata

SEQ ID NO: 223741 - DNA, 201 bp, Homo sapiens
tgctataaaataacttaaaggtatagttttctatactctttaattttacagaagggaggcagcattctgagatatttgcatattgtgtaagattatgttgstaaatgtaagtatttaatttgttagaatcatagactcctagaacttgaggaataagaggagacttgttttacctttgtcagttttgttctgtttgaattt

SEQ ID NO: 223742 - DNA, 201 bp, Homo sapiens
tcaagtgattctcctgcctcagcctcccaagtagctgggaccacgggcgcacactaccacacctggccaatgaaaaatacttctaatgatggttgttaacygctttaaagaaataatttaatactttttatgatgtttgtattacattgtcctttgatttgagttgcaactgttatttacaccttctttccctgtttgcaa

SEQ ID NO: 223743 - DNA, 201 bp, Homo sapiens
aatgaaacaatgtaaaaaattgtaggttattcctccaccccagctttttactgatttcattgttttttttctcctcctttttctcctcattatctcctttytttgttatatgttttaatgtaacattaaaacaccatgttttatgggtgaaaatgggggcataaggttgggccagggtgagtaccagagcccagaaaatca

SEQ ID NO: 223744 - DNA, 201 bp, Homo sapiens
tatatacccaaagtattaacaaatgaaaaacaaagactacagttttagcctactttctctttccacatatttcacttctcatttaaaaattgtatgcatcyttgaagactagaactgaggtgcttacaacagtggtttgaggatattttaaaatccctttttatatatttctgaatctggaaagggaatcattgatgatct

SEQ ID NO: 223745 - DNA, 201 bp, Homo sapiens
ccatattggccaggctggtcttgaactcctgacctcgtgatccgcccacctcggcgtccaaaagtgctgggattacaggcgtgagccaccacacctggccyctggatgtaatttttaaaaccagactcatttcaaattctgtcttagtgtaatttagatttttgtgtcttgacaataatgaaaaatatttcttcttttttt

SEQ ID NO: 223746 - DNA, 201 bp, Homo sapiens
gaagtttgaatgtgccttcctataactggcaagtgctacttctggtagagtatcctaatggtttaatatataccattttaaatatgtcagttaaatcaacstagttgtggtgttttcaacttatttaaaatattgaattttttgttaaaatgagcaactattttttaattcatccatttccgttggaaacaatatgtttgg

SEQ ID NO: 223747 - DNA, 201 bp, Homo sapiens
aaaaagggagcaacatttctaccctggaaaatttgctctttggacatttgatgtaatttttattcttatttatttatttttgagatggactctcactctgwcacccaggctggagtgcagtggtgcgatcttggctcactgcaacctccacctctggggttcaagcaattctcttgcttcagcctcccgagtagctgggac

SEQ ID NO: 223748 - DNA, 201 bp, Homo sapiens
atgtattctggatttcctggaacaggccaactttttggtatttcatcctgtttttcccataagtgcactaatactgcttagactctatgtcccatttttartagtatccttagaaaaataactgctcttcaaagtaaatgataggtaaaatattttggagcatttggcagtggggaaataataagtattcttaaggcttag

SEQ ID NO: 223749 - DNA, 201 bp, Homo sapiens
ttcccaggctggtctccaactcctggtctcaagcagtcttgccaccccagccttcaaaagtgctgggattacaggtgtgagccactgcgcctgaccttgawgtcttacactaaaaaagggagcaacatttctaccctggaaaatttgctctttggacatttgatgtaatttttattcttatttatttatttttgagatgga

SEQ ID NO: 223750 - DNA, 201 bp, Homo sapiens
aaatggttgagttgctactgcataattctgtgttggtcaaagatgagaacaactttatccctgatgggagaaagacattttaatgttatcattctgtgaaraggagggtatgtcaggaggtctggtgagggcagtagggaggaaaaagacttgaaggaccataatttactacaaaatgcctatgatctaacagagttagga

SEQ ID NO: 223751 - DNA, 201 bp, Homo sapiens
tagtgtcacgagcatggctcactacagcctcgacctcctgggctcaaccagtcctcctgcctcagcctcccgagtagctgggactacaaggcatgttctgycacacccagctaatttttgtattttctgtagagttggggtttctccatgtttcccaggctggtctccaactcctggtctcaagcagtcttgccaccccag

SEQ ID NO: 223752 - DNA, 201 bp, Homo sapiens
cattttatttctttttaatgagaatataaaacaccttacattagtatagtatgtgcagtgctattactaaaacaataaatttagcacttactaattataayatggtatttacaagtttcaaagttttattccagtaggtgggttactgaaattacagattaattaaatttgtagttttactggctgagaataaatgacttt

SEQ ID NO: 223753 - DNA, 201 bp, Homo sapiens
gactggagtatagtgtcacgagcatggctcactacagcctcgacctcctgggctcaaccagtcctcctgcctcagcctcccgagtagctgggactacaagkcatgttctgccacacccagctaatttttgtattttctgtagagttggggtttctccatgtttcccaggctggtctccaactcctggtctcaagcagtctt

SEQ ID NO: 223754 - DNA, 201 bp, Homo sapiens
ctactttacgttttaatttgcaacttaatatgtatatagaagtaattacacacattaaaataactttttcattttatttctttttaatgagaatataaaayaccttacattagtatagtatgtgcagtgctattactaaaacaataaatttagcacttactaattataatatggtatttacaagtttcaaagttttattcc

SEQ ID NO: 223755 - DNA, 201 bp, Homo sapiens
ggcagaaaccccagccctataatggggaaggtcccaccagtgcggaggccccacatggggacccctccccctagtgaggaaatgtacccctgaagaggcaycctcctggccactgggcccactgctaccctgccacgtgagtacagcaatggctttgaggacctcagcaattttttcatttattggtggccatttgtctgt

SEQ ID NO: 223756 - DNA, 201 bp, Homo sapiens
attgttagccacatttttagatatcaacagactgcttacatggatttcttaaaaattttttggagaataaaacaacagatctttgtttccattgaccattrcatcatcattattttagtaccaaatctcagaatgttcacaagaagtaactggatggaatttaaatatttgcttcttattttcaactctgattttaaaaat

SEQ ID NO: 223757 - DNA, 201 bp, Homo sapiens
tcagtcagcaactactgatttcatttcaacagagcaaacacaaacatactgaacttagattttagaaaaataactttgtgtatgatggttcacagaaccartggtgatggttcacaatgatgcttaaaggttcatcaagccctgccaataaaattagtctgggaacatttaatatgtttgtcacaataaaatgttctatat

SEQ ID NO: 223758 - DNA, 201 bp, Homo sapiens
catcaaatatcaataagtacgtttgcaaaaaactgagctgatagttgagacttttattttaggattgaaaaaaacaatctgagaattaaattcatatactkgtctacaattataaattacaaataatttattatatggttaaaacaatcatgctttttattttgcttctacctcttttatttaaaaagtagctgtaagaat

SEQ ID NO: 223759 - DNA, 201 bp, Homo sapiens
agtcttcagttcttctttcagatcagaaatagtatccccaaatggaaaggccccataatagatgaatttttataaagggcctaagtatttgaatattactrtaagacatcattattatagcagagtgacacgatgttccaaagtattcccatagtcatccagaaaagttcagcatgtttatgctgtacagtaacaaaaaga

SEQ ID NO: 223760 - DNA, 201 bp, Homo sapiens
tgctatgtaattgttcaaatagacataagaaaataattagaatatgatgtagtattttgatggtagtgttcaaaatatttctggagagcatagaagaagarataataatgaaatcttcctgacatggtatgcgggggacctatcaggactagcttcaggttcatggtgaattttccagttaatacttcattttccagtggt

SEQ ID NO: 223761 - DNA, 201 bp, Homo sapiens
caccacacccagctaagttttttgtttgtttttggagacagggtctcactgtgtcacccagactggagtatagtgtcacgagcatggctcactacagcctygacctcctgggctcaaccagtcctcctgcctcagcctcccgagtagctgggactacaaggcatgttctgccacacccagctaatttttgtattttctgta

SEQ ID NO: 223762 - DNA, 201 bp, Homo sapiens
tttttctgtttaactggtaagcattgcagtggcactgcatacctttttcaatgcagatgtatattattttaggcatattatggattaaattggcatctgtyggccactctgtaaacctaattattatttatttatttggaaaagatactgaggttttttttgttttgttttgttttacaagtgttggggtgtaacttgctt

SEQ ID NO: 223763 - DNA, 201 bp, Homo sapiens
cgtgaaagtatttcaacttttacagtaacattaaatacttgggatctagatattttctatttaaaataaatttctctcaccaattggagggtgataatttrtaattcaaatgtgttacctaattttgtataaaataccttttcctggttatgtttcctttctttatcctcatctttcttgtaatgtagacagaaaagtgca

SEQ ID NO: 223764 - DNA, 201 bp, Homo sapiens
accgtgcccggccttactttaaaatcttaaacactggttttactatatgagcgtattaatggcatatttgggagagaagttgatattcatattttaaaatractccaaatttttatcttgagcgaagtagtattcactatacataatttattattttacattttctattcctaaccaaattagacattttaaaaaactctg

SEQ ID NO: 223765 - DNA, 201 bp, Homo sapiens
atgtattcctttctgcaggccaaaacagccttgcagctgcatgtgaggaagaaaggttattaggaaactttgacagtatagcaaagtaaatataaaatcartgttcagaggagtaagtttctgtttttaaaaattatctctttaattaaaggcagtatttttttttctaatggataagccagttgtgaagaagtttttatc

SEQ ID NO: 223766 - DNA, 201 bp, Homo sapiens
tagaaaaatgtattcctttctgcaggccaaaacagccttgcagctgcatgtgaggaagaaaggttattaggaaactttgacagtatagcaaagtaaatatmaaatcaatgttcagaggagtaagtttctgtttttaaaaattatctctttaattaaaggcagtatttttttttctaatggataagccagttgtgaagaagt

SEQ ID NO: 223767 - DNA, 201 bp, Homo sapiens
cttacatgctgtttcctctgcctgacacatttcattctccctgctttccttaggtattatctgatttccctgactaggtcagatcagccatatgttactgmatgatgtgcatctttttttcagtacttacaacagtagtagttttatattaattttctgtgtttatttaattaatgccagtctctatgtaagttccctgag

SEQ ID NO: 223768 - DNA, 201 bp, Homo sapiens
atgtacctatatgtaaaatatttatagatagctctcaatttttaaaaagtaatgtacagtaaattttatgatcaccttctaattgcaagtgaattggcttytgtttttgaattgacagcttccctttgaaattcatttacttatgcttttttaaaaagtgtgttgattttaaaaatcagcatgaaaactagtatgaggata

SEQ ID NO: 223769 - DNA, 201 bp, Homo sapiens
ccttacatgctgtttcctctgcctgacacatttcattctccctgctttccttaggtattatctgatttccctgactaggtcagatcagccatatgttactrcatgatgtgcatctttttttcagtacttacaacagtagtagttttatattaattttctgtgtttatttaattaatgccagtctctatgtaagttccctga

SEQ ID NO: 223770 - DNA, 201 bp, Homo sapiens
tgctatgtggccaaaccctgtcctctgcagagaccagcaagtcaaacccatgtttctcagagcttggttacatgagctcttggtagcacatgtacctataygtaaaatatttatagatagctctcaatttttaaaaagtaatgtacagtaaattttatgatcaccttctaattgcaagtgaattggcttttgtttttgaat

SEQ ID NO: 223771 - DNA, 201 bp, Homo sapiens
ttggtgtagtttagaactcaattgtaataggcctcaaaaagtttgggatttccctttccccagtgcagttatccatgcaaaacagtccttacatgctgttycctctgcctgacacatttcattctccctgctttccttaggtattatctgatttccctgactaggtcagatcagccatatgttactgcatgatgtgcatct

SEQ ID NO: 223772 - DNA, 201 bp, Homo sapiens
ccttccataatattttcttaatctgctataatgtgagatatatgactacagctgagagatattaaaagcagaacaggaaaccacagaagtttcttaaaatraaaatacaaactgagctcagaaacatgatttttatatacatatctgaaaaagaaatgtagccagtgagcagaatatactcaaagccaaccacaaataagc

SEQ ID NO: 223773 - DNA, 201 bp, Homo sapiens
gtgtttggaatcatttcacagcaacataacaggattcttactagtctcaggcatccttcctagatttggatgttagtcatacttttctctaattactataktcacccaaacatacatgcagctgactggcattgggtccgtgttctgtttctgaccatggatagcttaccaacctacaaggaaatcaagcccctgacttgg

SEQ ID NO: 223774 - DNA, 201 bp, Homo sapiens
catctgccaaacttcttttaccacagttctttaggtctgctcctgaataaggctgcagtgcaacagcagttcatatttggctagatcggaaatcctttttkccttgacagttggtcatgaaggagaaaggcgttagtgatgtgggagtctgagttacctgtgaatgtaattttttcatgcctcctgaatgtgcctgtgcct

SEQ ID NO: 223775 - DNA, 201 bp, Homo sapiens
ccggttgttctcatctgccaaacttcttttaccacagttctttaggtctgctcctgaataaggctgcagtgcaacagcagttcatatttggctagatcggmaatcctttttgccttgacagttggtcatgaaggagaaaggcgttagtgatgtgggagtctgagttacctgtgaatgtaattttttcatgcctcctgaatg

SEQ ID NO: 223776 - DNA, 201 bp, Homo sapiens
gagtaaaagaacatatgtatattttaataaagacctcattaaacattagtaacaataggataaggaatattaactgaaacagacaggaaatcagggtgaaratcaggcagaactgatccttttatttacaccaaactaaatgcactaaagagaagttttaatgaacttaaggagaataccaaaacatttctaaatttaaaa

SEQ ID NO: 223777 - DNA, 201 bp, Homo sapiens
ttctctcaccaattggagggtgataatttgtaattcaaatgtgttacctaattttgtataaaataccttttcctggttatgtttcctttctttatcctcayctttcttgtaatgtagacagaaaagtgcagtttgtagtaagctgacctctgaattgctctttgggagcgtagttacaagggattaaaggggccctctgca

SEQ ID NO: 223778 - DNA, 201 bp, Homo sapiens
ctcatgccctaagaaggacttcaggctgcccatttaaaaaaattgagatataatttaaataccatacaattcactcttttaaattatgcaattcagtagtytctagtgtactcacaacgttgtgcaactgtcactgtcattacttccaaaacattttcatcatcctagaaaggaaccccacatccattagcattctccatt

SEQ ID NO: 223779 - DNA, 201 bp, Homo sapiens
ttgaaacagtatgagtttaacattttcttattagtttaggacctcattctcaacctcagttatgataccgtaatatagtgatcaattatggaactactaasttatcgaggtaataggactcttgtctcatgccctaagaaggacttcaggctgcccatttaaaaaaattgagatataatttaaataccatacaattcactc

SEQ ID NO: 223780 - DNA, 201 bp, Homo sapiens
tatctcctgggataggagtatttcagatactcctcccgagtagctgggattacaggcgcccaccaccacacctggcaaatttttgtattttttttagtaargatggggtttcaccaagttggccaggctggtctcaaactcctggcctcaaatgatctgcccgcctcagcctcccaaagtgctgtgattacaggctagttt

SEQ ID NO: 223781 - DNA, 201 bp, Homo sapiens
aggggagaataacgtgaacagatctcagagggagtatactcgataggtaagatacgtgaaccacaaagtgagtaagttccaaaattattaaaggcgttgcycaattaggatggaagccgtcttctgtggaaaatagtctaattaaagattgaggtgtacctttttacaacctttgtaccatagaggtcaagcctatagaga

SEQ ID NO: 223782 - DNA, 201 bp, Homo sapiens
tatgatttcatgaatcacatagtttattgccatacaaagagaattttttccttaggttcctggtgcgtaaagaaggggagaataacgtgaacagatctcasagggagtatactcgataggtaagatacgtgaaccacaaagtgagtaagttccaaaattattaaaggcgttgcccaattaggatggaagccgtcttctgtg

SEQ ID NO: 223783 - DNA, 201 bp, Homo sapiens
gatttgttttgtgtggtagaagtaaggagatgatcaaggtatgatttcatgaatcacatagtttattgccatacaaagagaattttttccttaggttcctrgtgcgtaaagaaggggagaataacgtgaacagatctcagagggagtatactcgataggtaagatacgtgaaccacaaagtgagtaagttccaaaattatt

SEQ ID NO: 223784 - DNA, 201 bp, Homo sapiens
gtataaaatctttataatagaatacttaaacgtttcaattaggaatttcagcttaataaaattacatgtttaaatttgtcgtattcccagctcttttaaaktaaagaaccaatcatgggccttcattttgaacattgttttaaaatcatgttaaatgtagaaaacaaataatgattaaaaacagagatattggttttagga

SEQ ID NO: 223785 - DNA, 201 bp, Homo sapiens
ttagttggtgtcagcagggggttagcagcactcaatttaaccttgctatttgtattctgttttgaatttttttcttttctcatttaacttccttacatggwttctccattttaaagattgtgcatgcaccatggggtctgtacagtgaaagactgtagtacagataagcatacaatagaagcacatttaaagataatgtga

SEQ ID NO: 223786 - DNA, 201 bp, Homo sapiens
tctctgaattaaatatattttcaaagtagcatgttttctaccaagcgaggtattttattgttatttaattattgacatccttgaaataagagtggctttgyatttaagaggtatatgagggaacacagctgaaaaacaagagcatttttgttagaaatatattggggataggtgctggggtgggagggagactcactaagc

SEQ ID NO: 223787 - DNA, 201 bp, Homo sapiens
gtatctctaaacctaaaacaagtttttatagaggaaattttaggtaaattttgtataattttttaaaagttgtcagaaatctttattttacatctgttccscctttagatactaatatccccatgtgggaaatggaaaatgtaagttctccatgctgttgtaagggctgtaaacatttctcaaaagctatatcaacgcagt

SEQ ID NO: 223788 - DNA, 201 bp, Homo sapiens
tttgtcttgtgttagaggtaagcattaaggtcctatgagtctcctacttcagcagtcatatacagaagatagaaacttaattttgattgcatccagtgatstttttatataccctgaaagcatgatgttttataattctggtctagtgtgtttgcagttttgtttttatttatatgtatctctaaacctaaaacaagtttt

SEQ ID NO: 223789 - DNA, 201 bp, Homo sapiens
ataagtaaagggatggagaaaaattgcccaagcaaatggaaaacagaaaaaaggaggggttggcattctactttctgacaaaatagacgttaaaccaccartgatcagaaaacacaaagaaaggcattacgtaatggcaacaggccaaattcaacaagaagacttaattattctaaatatatatgtacccacccctggagc

SEQ ID NO: 223790 - DNA, 201 bp, Homo sapiens
tacccagtgtagctccatccattaaagaggcaaggtgggagttgtctgagcctttttcctctagaatcaaaggtgcacataccacagatctcaaaaaatgygaagaggtagattacgcaatatgacaatctttttttttttttctggaaagacggtctcgctctttcgcccagctggagtacagtggcgcaatcatggctc

SEQ ID NO: 223791 - DNA, 201 bp, Homo sapiens
gtttgttgagggtttttaacatgatgatatgttgaattttaaaagccttttctgcatctgttgagatgatcacgtggttttttgtttgcgttgtttatgcratgaatcacatttgttgatttgcatgtgttgaaccaaccttgcatcccaaagttaaagtctacttgatcatggtggatttgcttttttgtatgctgctgg

SEQ ID NO: 223792 - DNA, 201 bp, Homo sapiens
gtatatgtccctgtttgcttgtttttaagctttgtagaaatagtatcctactgtatagattctttttagtcttaattttttattaaatgtatttttaagaytcattcatgttaatctgtatattgtcactgctatatagtattcctttgggtggatttacccatttttctgtcagtagccatttgtgttgtttccaatttt

SEQ ID NO: 223793 - DNA, 201 bp, Homo sapiens
aagtccagtagttgaggtcagcaactcacatatgagttctgataaggtgtgatgtgacattcgcaaggggaggggtaccactgtcacattctctaggggakgagggagaaaacactccagcttcttcttatagcagaacataaatcattcacatagcaaactatgtaagtgtttggaatcatttcacagcaacataacagg

SEQ ID NO: 223794 - DNA, 201 bp, Homo sapiens
actagacgttcaccatgactttctataattcccctccctcctcttttttgcccctgctcttcctttcttccttcctttccattgatgcttagatagtgttrccaaagcaaaaagtagtagctataattaccctcaatgaggaaaccaaggacagaggaactaagtaacttgtccagcattatgcatcaagcaaattgtggt

SEQ ID NO: 223795 - DNA, 201 bp, Homo sapiens
ggatgtggtggtgcacgcctgtagttccagctactcaggaggctgaggcttgagaattgcttgaacccgggaggtggaggttgcagtgagccgagattgcmtgggcgacaaagtgagattccgtctccaaaaaaaaaaaaaaaaaagccattgtaggatagtagtaattttaaaaacatagaggacaaacaaaaagtactt

SEQ ID NO: 223796 - DNA, 201 bp, Homo sapiens
taaatgaggagttaatgggtgcagcacaccaacatggcacatgtatacatatgtaacaagcctgcacattgtgcacatgtaccctaaaacttaaagtatartaataataaaattaaaaaaaaaatctgagaaaaaaaagttaatttaaactttagcacatcgtatggttaacactaggtaaaatttcccttttgaagtcac

SEQ ID NO: 223797 - DNA, 201 bp, Homo sapiens
aatggtagagaaagtggtcaactggagcagaatgccccatctgaaggaagaatctactctgctgcttcccagctgcagcttactgtcaccagtccagtgtygccaggactactatttttcaagagaaaccaagattccatgtttctttatgaaaatttttaaactgagcaggtaaacaagcatatctgaagaatagattat

SEQ ID NO: 223798 - DNA, 201 bp, Homo sapiens
atggtgtatatgtgccacattttcttaatccagtctatcattgatggacatttgggttggttccaagtctttgctattgtgaatagtgccgcaataaacawacgtgtgcatgtgtctttatagcagcatgatttataatcctttgggtatatacccagtaatatataccaggtgtatatttggctgggtcaaatggtattt

SEQ ID NO: 223799 - DNA, 201 bp, Homo sapiens
ttgatgttcatgccgattttctaggtgtgcttcatttttttttttttttcatttgtctcctctgactgaaaattttcaaatagcctgtcttcaagctcacyaaatcttgcttttgcttgatgaattctattatgagactgatacattcttcagtatgtcagttgcatttttcaactacaggatttctgctggatgcttttt

SEQ ID NO: 223800 - DNA, 201 bp, Homo sapiens
tcaaggacttgggagactgaggcaggaggatcacttgagccctggagttcaagaccagcctggtcaatataacaaggcacccctgtctctataaaagtacrtacatgcatgcatactcatacacataaaagataatgtcagttgatggcatgagtgtgaaagcagagctgtgtgaaacatcactaaggataagataataag

SEQ ID NO: 223801 - DNA, 201 bp, Homo sapiens
ctccctccagcttttttgaggtataattgacaataaaattgtgtatatttaaggtatatgacatggtgatttgatacatgtttatattgtgaaacttaccrtaaccaagttagctaacacgtgtatcaccttacgtagttaccaattttttttatgtttgtgtgtgtgagagagaacattaggatgtactctcttagcaaa

SEQ ID NO: 223802 - DNA, 201 bp, Homo sapiens
taaaatacctttgtcagttctattaattggttagatatttattttaaatttcttatcaaaatgaaagcaatattgcaaatgattgtttttaatacagactktgaggctactgaaactggaaagtttatggttcagcagtgtctgcagcccagagagagaaataggacttcctcaaggatgtggagtttaaaagcaaaacca

SEQ ID NO: 223803 - DNA, 201 bp, Homo sapiens
aggggccaaaatggtgaactagtagcacctaatgtgcaccactctcatggagataaaacaaaagggctagttaaccctgaccctgtaggctgatgatctgmgaaaccacattagggtccatcaaggcagcagggggacacagagagcagagaggaacaaagaagggcatcaatctatctgggctcagtgtggagccaggag

SEQ ID NO: 223804 - DNA, 201 bp, Homo sapiens
atgtaatttaaaagttttaattgtatacatacttaatctcataaatagtgggtacatatctgagaataatttcataaaaaagctccttaaaacgaattcaytttaaatcaaattcaggaagaaggggccaaaatggtgaactagtagcacctaatgtgcaccactctcatggagataaaacaaaagggctagttaaccctg

SEQ ID NO: 223805 - DNA, 201 bp, Homo sapiens
tactcagccattaaaaggaatgaagtatgttctttgcagcaacttagatggagctggtggacattattctaagtgaagtaactcagaaatggaaaaccaartattctatgttctcatttgtaagtggaagctaagctatgaggatgcaaaggcataagagtggtatggatgttggggactcaaggaaaggttgggagcagg

SEQ ID NO: 223806 - DNA, 201 bp, Homo sapiens
actcttcacacatttgctcacagaaatcttctgtgttgatttttgttgtggtgtgagagcagaggaactgtggttttccgtacacagaatggtcgatatayatatagatatttggctttggtctaattttgtaagtggtcatttaattagcattttcattttgtgatggcatttgatttcctatgtactgtgtttttttca

SEQ ID NO: 223807 - DNA, 201 bp, Homo sapiens
aaactcttcacacatttgctcacagaaatcttctgtgttgatttttgttgtggtgtgagagcagaggaactgtggttttccgtacacagaatggtcgatayatatatagatatttggctttggtctaattttgtaagtggtcatttaattagcattttcattttgtgatggcatttgatttcctatgtactgtgttttttt

SEQ ID NO: 223808 - DNA, 201 bp, Homo sapiens
tgaagacagacactccagacatgtgttagtccatttgcattgctataaaggaataactgaggctgggcaatttataaagaaaaagttttatttggctcacrgttctgcagggtgtacaagaagtatagtgccagcatctgcttctggaagggcctcaggaagcttccaatcaatggtggagagtgaaggcaagtcacatgg

SEQ ID NO: 223809 - DNA, 201 bp, Homo sapiens
ttggcattttatgttgagtagtgtacatttgatttcactgtttaccttgtataagattaaaactaaccttagcaggccacttttgaccgtgggcaggtcaragacgtaagtgtggtgaaattatagcagaaggggtaaatattttcaaataaagatcgtggaatcaaaaacatagagaccttttaagttttgatgtcaaaa

SEQ ID NO: 223810 - DNA, 201 bp, Homo sapiens
ctgaaagtcacaccaacatctgtgctgaaagttaatttgatcaccaatggccagtggtttaatcaatcatgcttatgttatgaaacctccataataactcraagggtttggagaactgcttgatgactgatcacgcagagggtggtatgcccaggaaaggcatggaagctctgtgccccttccccccataccttgccctat

SEQ ID NO: 223811 - DNA, 201 bp, Homo sapiens
aaaagtagctataagtgaaatattggtaaataaaattagaaggatcatttattctattaatattatttgccccaagtagttaatgaggtgtgtattttccrtaagactgcattgtttgtttttttctaggcctaagacagtatagcatgtgtgagggccaaaagttttgtcctgttacctctgacaagatggagcaaaact

SEQ ID NO: 223812 - DNA, 201 bp, Homo sapiens
aacttagacatataagttgattttagttcaattaagaaaatttgtataacagaaactatgttctaattatagaagaacaatgaaaattagtgtttattggyattttttgtatgtacaatagcacataatttttacaaaaaaatagtaaattgcttctatcagtttttctaagggactctcttagtccttggcagacaagtc

SEQ ID NO: 223813 - DNA, 201 bp, Homo sapiens
taccattcaacccagcaatccctttattgggtatatacctgaaggaatataaatcattctccacaaagacgcatgtgtgtgctcatcacagcactattcaygatagcaaagtcttggaatcaacctaaatacccatcagtggtagaccagataatgcagtatggatataccatggaatactatgcagccattaaaaaagaa

SEQ ID NO: 223814 - DNA, 201 bp, Homo sapiens
atggtgaggaacagcacaccctggggcctgtcagagggggcagggaaggggagcatcaggaagaataactaatggatgctgggattaatacctaggtgatrggatgatctgtgcagcaaaccaccatggcacgtgtttatctgtgtaacaaacatgcacatcctgcacatgtacccctgaacttaaaagttaaaaaaaaat

SEQ ID NO: 223815 - DNA, 201 bp, Homo sapiens
agcaaactagcacagaaacaaaccaaacaccacatgttctcacttataaatgggagctgaatgatgagagtacatggaaacatggtgaggaacagcacacmctggggcctgtcagagggggcagggaaggggagcatcaggaagaataactaatggatgctgggattaatacctaggtgataggatgatctgtgcagcaaa

SEQ ID NO: 223816 - DNA, 201 bp, Homo sapiens
ctttaccaggagtagattccatcttaagtaatcactttctttgcttattcctaagaagcaactcttcatttgttcaagtttgatcataagattgcagcaawtcaatatctttaggctccacttataattctagttctcttgctatttctaccatctttgcagttacttcctccattgaaatcaaacccctcaaatcatcca

SEQ ID NO: 223817 - DNA, 201 bp, Homo sapiens
gattttcagttgactttgcccagatccatcagaggaatcactgcgaatgggagctattgccttacaaaatgtatttcttcaataataacacttgaaagtcraaattactctttggtttatgggctacagaatggttgttgagttagcaggtatgaaagcaacattcatctccttatacatctccaccagagctcttcggtg

SEQ ID NO: 223818 - DNA, 201 bp, Homo sapiens
cgcctgtaatcccagtactttaggaggccaaggcaggcggatcatgaggtcaggagttcaagaccagcctgaccaacatggtgaaaccccgtctctactaaaaatacaaaaattagctgggtggggcacatgcctgtaatcccagctactcaggagactgaggcaggagaatcacttgaacctgggaggtggaggttgcag

SEQ ID NO: 223819 - DNA, 201 bp, Homo sapiens
ctgctaaaagagcattaattgtaacatacccttagacagtgctgtggggccagagcccaaaagcacttctgcacctgcttgcctgtgtgctccctctcccrcaaggggtttgagctcagtggtggccaggtaagcgagccatacccctgttgcaagtcccacaaaggggtcaagggaactctcccatcttgttatcttgtt

SEQ ID NO: 223820 - DNA, 201 bp, Homo sapiens
ggaggctgcagcagggtgcagggcagtcagaccaggaccatggaactcagcgtcctcctcttccttgcactcctcacaggactcttgctactcctggttcwgcgccaccctaacacccatgaccgcctcccaccagggccccgccctctgccccttttgggaaaccttctgcagatggatagaagaggcctactcaaatcc

SEQ ID NO: 223821 - DNA, 201 bp, Homo sapiens
aggctgcagcagggtgcagggcagtcagaccaggaccatggaactcagcgtcctcctcttccttgcactcctcacaggactcttgctactcctggttcagygccaccctaacacccatgaccgcctcccaccagggccccgccctctgccccttttgggaaaccttctgcagatggatagaagaggcctactcaaatcctt

SEQ ID NO: 223822 - DNA, 201 bp, Homo sapiens
aggagttcgagaccagcctggccaacatggtgaaaccttgtctctactaaaaatacaaatattagctgggcatagtgatgcgtgcctgtaatctcagctayccaggaggctgaggaaggagaatcacttgaatccaggaggcagaggttgcagtgagccaaaatcttaccactgcactccatcctgggtgacagagtgaga

SEQ ID NO: 223823 - DNA, 201 bp, Homo sapiens
cagactggtcttaaactcctgggctcaagcaatccacctgcctcggcctcccaaagtgctaggattacatgtgtgagccaccgcacccggccaagactctygagaaaatacaacacatcagggagactgttatgatggctctcaggagggtaatacgaagaaaatgaagtcactgggcctgtaataaactttgaggaatgt

SEQ ID NO: 223824 - DNA, 201 bp, Homo sapiens
gaactccttggaggttcaattagctgcaaaattcaagatgtcccttaatgtataacttagcctcagattccatacaactgtcacccaaataccaccaagartgagcacccaggaacccaactggaaccttttctgaacagaaaccaacttatcttcgtcgattttgaggttgatagtaatttcagttattgactgttttgg

SEQ ID NO: 223825 - DNA, 201 bp, Homo sapiens
tccatacaactgtcacccaaataccaccaagagtgagcacccaggaacccaactggaaccttttctgaacagaaaccaacttatcttcgtcgattttgagrttgatagtaatttcagttattgactgttttggcttttaactatgggaggtattaggaaactctcagggaaacaatttggaaagcagcagtgagctaggcc

SEQ ID NO: 223826 - DNA, 201 bp, Homo sapiens; identical to SEQ ID NO: 41398

SEQ ID NO: 223827 - DNA, 201 bp, Homo sapiens
gaaactctcagggaaacaatttggaaagcagcagtgagctaggccaaatagcaagttctggacctgtgaggagaaagaacagagtaagcaaacctcaagayactcaaggtaggcactcgtggtgttggaaaagagggtcacctactggcattagagcagagatcagttagatttgtttacccataagtctgcatagctcct

SEQ ID NO: 223828 - DNA, 201 bp, Homo sapiens; identical to SEQ ID NO: 41399

SEQ ID NO: 223829 - DNA, 201 bp, Homo sapiens
cctaggttttcttctagggtttttatggttttaggtctaacgtttaagtctttaatccatcttgaattgattttgtatactaaaatgagttttcaaaaggwtctttgtggctaccttattagttcatagaaagtggaggcttgtctggaatgatattaaagaatttttttcattttaattgttttagagacagggtctcag

SEQ ID NO: 223830 - DNA, 201 bp, Homo sapiens; identical to SEQ ID NO: 41403

SEQ ID NO: 223831 - DNA, 201 bp, Homo sapiens
ctcgtgtctcagattcaacccgtatgcattgagtcacagttttctcttccgtcagttaagatcatgacaatgagaatgtgtgcccctaaggtggttgtgargattaaatgggatattgcatacagctagtatataataagtgctcattaaatggcaactaccttgatccactcattcatttattcacgaatccaataacaa

SEQ ID NO: 223832 - DNA, 201 bp, Homo sapiens
gtgaccttctgtgtccacagggaagcggatttgtcttggtgaaggcatcgcccgtgcggaattgttcctcttcttcaccaccatcctccagaacttctccrtggccagccccgtggccccagaagacatcgatctgacaccccaggagtgtggtgtgggcaaaatacccccaacataccagatccgcttcctgccccgctg

SEQ ID NO: 223833 - DNA, 201 bp, Homo sapiens; identical to SEQ ID NO: 41411

SEQ ID NO: 223834 - DNA, 201 bp, Homo sapiens; identical to SEQ ID NO: 41414

SEQ ID NO: 223835 - DNA, 201 bp, Homo sapiens
gacttcctgacccccaggtccccatcatatgctctcatacaccagctgcccctccttactgagcctatgtccttgatagtgctgcatttacctgtgatccygtggctgagctctccctcacacttccagacaaggaaggcctgtgaggtatcagcacagtgctgaacatagtacctggtacacaataggcatttagtaaat

SEQ ID NO: 223836 - DNA, 201 bp, Homo sapiens
ccaccccacaacagtccccagagtgtgatgtttcccttcctgtgtccatgtgatctcattgttcaattcccacctatgagtgagaatatgtggtgtttggtttttttgttcttgcgatagtttactgagaatgatgatttccaatttcatccatgtccctacaaaggacatgaactcatcattttttatggctgcatagta

SEQ ID NO: 223837 - DNA, 201 bp, Homo sapiens; identical to SEQ ID NO: 41416

SEQ ID NO: 223838 - DNA, 201 bp, Homo sapiens
gtgtatatgtgccacattttcttaatccagtctatcattgttggacatttgggttggttccaagtctttgctattgtgaataatgccgcaataaacatacrtgtgcatgtgtctttatagcagcatgatttatagtcctttgggtatatacccagtaatgggatggctgggtcaaatggtatttctagttctagatccctg

SEQ ID NO: 223839 - DNA, 201 bp, Homo sapiens; identical to SEQ ID NO: 41418

SEQ ID NO: 223840 - DNA, 201 bp, Homo sapiens
gtgtctgttcatgtctttcgcccactttttgatggggttgtttttttcttgtaaatttgtttgagttcattgtagattctggatattagccctttgtcagwtgagtaggttgcgaaaattttctcccattttgtaggttgcctgttcactctgatggtagtttcttttgctgtgcagaagctctttagtttaattagatcc

SEQ ID NO: 223841 - DNA, 201 bp, Homo sapiens
agaattgcttgaacccaggaggcggagtttgccctgagctgagattgcatcattgcactccatcatgggcaacaaaagtgaaactccatctcaaaaaaaamccaaacagaaacaaacaaacaaacaaaattagtgatagtgatgctcagcctggggaaagcatttgtccagtggcacacaactgggaaaaggggaagctga

SEQ ID NO: 223842 - DNA, 201 bp, Homo sapiens
aacccaggaggcggagtttgccctgagctgagattgcatcattgcactccatcatgggcaacaaaagtgaaactccatctcaaaaaaaaaccaaacagaarcaaacaaacaaacaaaattagtgatagtgatgctcagcctggggaaagcatttgtccagtggcacacaactgggaaaaggggaagctgagatccagcagg

SEQ ID NO: 223843 - DNA, 201 bp, Homo sapiens
aagtgctgggattacaagcatgagccaccatgcctggccactttacatatttaatccagtaacattacacacgcaattgcccacacccccataggtagtcyccaggtcttgcatacgggatgcctggaagcaaaatatgccttttgcagccattattcagatacatttcctatatttagtagtgattatgttattagctag

SEQ ID NO: 223844 - DNA, 201 bp, Homo sapiens
ggctccctttgtctctgcctgagctttttccagcaccctttgttcttatttttctcccaatctgtggtttagaatctactgggggttccttgcacctctgrgaatcagtggaagccatagaccctccctgtctcatacgcatcagtcccattcacaatttatatacaattgggcttttccccccttgagctcttgaagcct

SEQ ID NO: 223845 - DNA, 201 bp, Homo sapiens
tacaaatgaggtgtatgctgactaacagccacccctggtgtggatgtgattggcagttccgagagaaatatggggacgtcttcacggtacacctgggaccsaggcccgtggtcatgctgtgtggagtagaggccatacgggaggcccttgtggacaaggctgaggccttctctggccggggaaaaatcgccatggtcgacc

SEQ ID NO: 223846 - DNA, 201 bp, Homo sapiens
ggggaaaaatcgccatggtcgacccattcttccggggatatggtgagagcctcagaggcactgggagggggcgggtggggggtgcatcagggaagggagtwtatgggaggaagaaggactcagagccttcttccaacttcttctacaaccaacccacacctcccctgcaccccaggtgtgatctttgccaatggaaaccgc

SEQ ID NO: 223847 - DNA, 201 bp, Homo sapiens
ctatctgaagtttctttttttttttttgtcttcagacggagtcttcctgtgttgcccaggctggagtgcagtgtcacgatcacagctcactgcaacctctscctcccaggttcaagtgattctcctgcctcagcctcccgagtacctgaaactatgggcgcatgccaccatgcctggctatttttttttatttttagtaga

SEQ ID NO: 223848 - DNA, 201 bp, Homo sapiens
cccaggctggagtgcagtgtcacgatcacagctcactgcaacctctgcctcccaggttcaagtgattctcctgcctcagcctcccgagtacctgaaactaygggcgcatgccaccatgcctggctatttttttttatttttagtagagactgggtttcaccgtgttagccaggatggtgctgatcttctgaccttgtgata

SEQ ID NO: 223849 - DNA, 201 bp, Homo sapiens
agggaaagagagagatgccaggtgtataatgtccaagagttactcaaagaggctggatgtgatgactctcacctgtaatcccagtactttgggaagctcargcaggaggattgcttgaggccaagagttggagaacagcctgggcaacataatgagatcctgtctctacacaatatagaaaagaagtgagccacgcatggt

SEQ ID NO: 223850 - DNA, 201 bp, Homo sapiens
tggcagacaatcacacagagataggtgacagcctgatgttccccaggcacttcagtctgtgtccttgacctgctgcttcttcctaggggccctcatggacsccaccttcctcttccagtccattaccgccaacatcatctgctccatcgtctttggaaaacgattccactaccaagatcaagagttcctgaagatgctgaa

SEQ ID NO: 223851 - DNA, 201 bp, Homo sapiens
ataataaaataaagaacggcaggggggagacaaatatacacacagagagacagaaagaaacaaaggcaaagagaaattgaggcagagaaaattagagagasagacagacaaagcttaggaaaaggtctgcagaggaatgagagaagacaggcaagtgagaaccagagagaggctgcactaacctgatgttcttgggtcctt

SEQ ID NO: 223852 - DNA, 201 bp, Homo sapiens
agaaagtggaggcttgtctggaatgatattaaagaatttttttcattttaattgttttagagacagggtctcagtctgttacccaggctggagtacaatgrcacagtcatagctcactgcagccttgaactcctgtgctcaggagattctcccaccttagcctccagagtagctgggactaaaagtgtgagccaccatgcc

SEQ ID NO: 223853 - DNA, 201 bp, Homo sapiens
tttagagacagggtctcagtctgttacccaggctggagtacaatggcacagtcatagctcactgcagccttgaactcctgtgctcaggagattctcccacyttagcctccagagtagctgggactaaaagtgtgagccaccatgccccactatttatttttgtagagatgtgtttgggggacggtctcactatgttgccta

SEQ ID NO: 223854 - DNA, 201 bp, Homo sapiens
atcctgaaacaggaaaaatgtcagagaacaacatggaggaatgagtgggaggagaagtcagagcggtaatagggccacgtcatgtaggaccatgtgaaccmtcagtggagacttcagatcttattctcagcaaagtgggaatattgtaggccttggtgagcacgtggatattaattattttacattttagtggggttaccc

SEQ ID NO: 223855 - DNA, 201 bp, Homo sapiens
gccaagtagcaagaatgccccgaaaccctgcaccctgttcttttctattcactatccacctaccatcttgatcatgggttgattttatctgtgtatgaacytcttttttgtttttgtttgtttgttcctgagattgaattttgctctgtcgcccaggctggagtgcagtggcactatctcgcctcactgcaacctccgcct

SEQ ID NO: 223856 - DNA, 201 bp, Homo sapiens
tggatctcaggctgagactagaagacagcctagagacacagacacagacacatggccagaaacacataccccacacataccccagaaacaaacacaaggcrgtaaccaaaccttaagcctccttagcacaagccaagtgctattctaagaatttttacaattgtctcctttaacctcacaagagccctttgagggaggtgc

SEQ ID NO: 223857 - DNA, 201 bp, Homo sapiens
ggttttcaccatgttggtcaggctggactcaaactcctgacctcgtgatcagcctgcctcagcctcccaaattgctgggattacagatgtgagtcaccacrcctggccctgtgtttgaacttcatacacataaaattatgatgcattgactcttttgtgcctagttgcttccactcaacattatgcctgtgagtttcagcc

SEQ ID NO: 223858 - DNA, 201 bp, Homo sapiens
ttgatgagcattttattaagaaagcttctgtgaatattttgttcattttttggtgaacacacatacacatttttgctgggcatgtacctgggagtgaagtrgctggtttcctgggtatccatttgttcagcttcaggaaatactgcccagcagttccccaagtggctgcacagtaatcccaccttatccactggagatatc

SEQ ID NO: 223859 - DNA, 201 bp, Homo sapiens
agagatacgcggttggatgtgtagaggacagagaaaagcaaactgggccagatagtgtcaaagacctttaggccaacggagggcagccagggagatgggcrtatacacagcaaggctacagcctcccctgaccctccccttccttccctactgtggacgcaggagaaatccaacgcacacagtgaattcagccaccagaac

SEQ ID NO: 223860 - DNA, 201 bp, Homo sapiens
gttcaatggaattacgcgtgacgtgctggtacataattagctgttacggttattctcatgtttaccattactgagtgatggcagacaatcacacagagatrggtgacagcctgatgttccccaggcacttcagtctgtgtccttgacctgctgcttcttcctaggggccctcatggaccccaccttcctcttccagtccat

SEQ ID NO: 223861 - DNA, 201 bp, Homo sapiens
acttcagtctgtgtccttgacctgctgcttcttcctaggggccctcatggaccccaccttcctcttccagtccattaccgccaacatcatctgctccatcrtctttggaaaacgattccactaccaagatcaagagttcctgaagatgctgaacttgttctaccagactttttcactcatcagctctgtattcggccaggt

SEQ ID NO: 223862 - DNA, 201 bp, Homo sapiens
tagaatttcactcttctctgccatcctctgttacatcctgggtacctgcctgccactgaaagaatgaggtaaaagaggtggtggcacgaatcaaatagatyttgctgtgccaatgagagagagcagactagcccatgtcagtgccaggagagtggaggagagagggagagcaggagaggagtgtgggtagggagtgctcat

SEQ ID NO: 223863 - DNA, 201 bp, Homo sapiens; identical to SEQ ID NO: 41405

SEQ ID NO: 223864 - DNA, 201 bp, Homo sapiens; identical to SEQ ID NO: 41406

SEQ ID NO: 223865 - DNA, 201 bp, Homo sapiens
tataaactggagctaataatcaaattgcatctgcctcacattgttgtagtgagagttcaatggaattacgcgtgacgtgctggtacataattagctgttayggttattctcatgtttaccattactgagtgatggcagacaatcacacagagataggtgacagcctgatgttccccaggcacttcagtctgtgtccttgac

SEQ ID NO: 223866 - DNA, 201 bp, Homo sapiens; identical to SEQ ID NO: 41407

SEQ ID NO: 223867 - DNA, 201 bp, Homo sapiens
cagtcagaccaggaccatggaactcagcgtcctcctcttccttgcactcctcacaggactcttgctactcctggttcagcgccaccctaacacccatgacmgcctcccaccagggccccgccctctgccccttttgggaaaccttctgcagatggatagaagaggcctactcaaatcctttctgagggtaagacacagacg

SEQ ID NO: 223868 - DNA, 201 bp, Homo sapiens; identical to SEQ ID NO: 41409

SEQ ID NO: 223869 - DNA, 201 bp, Homo sapiens
ccttggaggggtgaatgggcatgaagaggtgtctgggtatgagccacaggtatagaatttcactcttctctgccatcctctgttacatcctgggtacctgyctgccactgaaagaatgaggtaaaagaggtggtggcacgaatcaaatagatcttgctgtgccaatgagagagagcagactagcccatgtcagtgccagga

SEQ ID NO: 223870 - DNA, 201 bp, Homo sapiens
atgcttctctaattcaggtacataacactggtttattaaataggttatcataggtaatttgatggtgccattgcactccagcctgggtaacagattgagamcctgtctctgaattggaactgcacgggggcactgtccttggaggggtgaatgggcatgaagaggtgtctgggtatgagccacaggtatagaatttcactc

SEQ ID NO: 223871 - DNA, 201 bp, Homo sapiens
tgggcaggagagaaacacagagagccagggaaagagagagatgccaggtgtataatgtccaagagttactcaaagaggctggatgtgatgactctcacctrtaatcccagtactttgggaagctcaggcaggaggattgcttgaggccaagagttggagaacagcctgggcaacataatgagatcctgtctctacacaata

SEQ ID NO: 223872 - DNA, 201 bp, Homo sapiens
attagttataaaccatttagtaatcttagaatagtcacctcatcaatattttttcactgtttggatcattttctctcttctatgatgagtcatggaatacrgagcttttagtaatggaaattttaagaactcaggaaggaccaggcggccatctagggtctccatgagtgcatgcttcacattggaattacagactctaaa

SEQ ID NO: 223873 - DNA, 201 bp, Homo sapiens; identical to SEQ ID NO: 41419

SEQ ID NO: 223874 - DNA, 201 bp, Homo sapiens
aaatgatctaccaagtgccagaaatatatcacctgaggtttttgttgtcttactagaattatggatttgataaaccaaatattagttataaaccatttagyaatcttagaatagtcacctcatcaatattttttcactgtttggatcattttctctcttctatgatgagtcatggaatacggagcttttagtaatggaaat

SEQ ID NO: 223875 - DNA, 201 bp, Homo sapiens
cactgcagcctcaaactcctgggcccatgtgatcctcccacttcagcccctggactatttcaactgggactacaggcatgtgccaccatgtctagctacattttttttttttttttttttgtagagacagggtctccttatgttgcccaggctggtcttgaattcctgatccttttgaatcaggctcccgaagtgctgggt

SEQ ID NO: 223876 - DNA, 201 bp, Homo sapiens
caggctggtcttgaattcctgatccttttgaatcaggctcccgaagtgctgggtttagaggtatgggcccctgtgcccacccagggctttttaatttatayaagcaattgattgaacacctactctgcccagcccctacccctgggatttaactgtactcactcccagagtcagaggtggggcctgagaggaggtgcagag

SEQ ID NO: 223877 - DNA, 201 bp, Homo sapiens; identical to SEQ ID NO: 41420

SEQ ID NO: 223878 - DNA, 201 bp, Homo sapiens
atttctccttctccctctgtgtttttttttttaactttccccagattgtaaaggcagtcttctgctcttttaaaacaaaatactaaaatgtctccttattkattaacctggaaatatgcctattacatattaaatttaagaatatcaagctgcagaacagtatgcatagctgtagtttgttgttgttgttgttttcagaca

SEQ ID NO: 223879 - DNA, 201 bp, Homo sapiens
aatttacatctgactatatatgtttgcatttttgcaattatttgcaataaattaggcattccattcttcatcaaagtaatagaaataacctccaaaatacrtagtcctaacatgtcagcaggcttatcttgtgtaagaatcattttattaatatctgacacagcaagggagatgaggagaggtgggaagagggagagaaaa

SEQ ID NO: 223880 - DNA, 201 bp, Homo sapiens
ggaaggggaagatggggagggaagaagaaagactagggaggggagaatagggaaagggaggagagaacatgaggaaggaaagaaagatgaggtgaaaggarggagaaaatagggaggaggaactgagacagggagagaggggaggtgggaagacagaatgaaagacagagggagagagagagaagactggctgaggaagga

SEQ ID NO: 223881 - DNA, 201 bp, Homo sapiens
aaatacagcaacaagagaaaaaactcacagaggcagaaagagacggggacaaaaagagagaaacacatcaaagagatgtggagagagatagaaacagagtyaggaagactaaagagaggctgagagagatgagttagagatacgcggttggatgtgtagaggacagagaaaagcaaactgggccagatagtgtcaaagacc

SEQ ID NO: 223882 - DNA, 201 bp, Homo sapiens
ttctgagctgcagaaatggggctatgggtaccacctggatgagagaggggatgctggcttcctattctgggagcactgtaggctctgggctagattccaaycaagccaattctgttggtggatgcatggatgcatgaagaatctgtccatgcgttctcccactgttttcttccatcacttaaggattttttgttctaaggt

SEQ ID NO: 223883 - DNA, 201 bp, Homo sapiens
tccccccttgagctcttgaagcctgtggatctcaggctgagactagaagacagcctagagacacagacacagacacatggccagaaacacataccccacasataccccagaaacaaacacaaggcagtaaccaaaccttaagcctccttagcacaagccaagtgctattctaagaatttttacaattgtctcctttaacct

SEQ ID NO: 223884 - DNA, 201 bp, Homo sapiens
atgaagaatctgtccatgcgttctcccactgttttcttccatcacttaaggattttttgttctaaggtttttgtttgtttgtttgttttttgttttttggtttttttttttttgtcttttttgagacagagtctcgctctgtcacccaggctggagtgcagtggcatgctcttggcttactgcaagcttcacttccagggt

SEQ ID NO: 223885 - DNA, 201 bp, Homo sapiens
tgggctgttagggtatttatcacccaaacagtgtacattgtacccattaagtaatttctcatcattcaccccccttctgctccctcactcttctgagtctycactgtgtatcattcctctctctgtgtccatgtgtacacattttgtagcactcactcatgagtgagaacatgcaatatttgactttctgtgccatcactt

SEQ ID NO: 223886 - DNA, 201 bp, Homo sapiens
atttcatctattcattctttaattcattaattaaagaatgtataattactgattctttcatttatgattcatctaaggacatatactgtcattcatttatktggattacttgatccacaagttgatcctttgaaacagtggtatgttgatggactatttgtcattgattcattggctcattcattcattcattcatgcatt

SEQ ID NO: 223887 - DNA, 201 bp, Homo sapiens
ttccagtaggagtggatctgattgccatcaatcaataatacctgagaccaagggactccaatcaattcagcatgctttgcctaatgatatttgtttgtaayactgttgcgggacaatcaaagactggagagaccaaaaaaggttcaggagagtttattaaattaaggtgatcaccggttcagccagacatacatccagaaa

SEQ ID NO: 223888 - DNA, 201 bp, Homo sapiens
tattattaggggcataggccctctattactattttacaagagatctatctatgtctttccagtaggagtggatctgattgccatcaatcaataatacctgwgaccaagggactccaatcaattcagcatgctttgcctaatgatatttgtttgtaatactgttgcgggacaatcaaagactggagagaccaaaaaaggttc

SEQ ID NO: 223889 - DNA, 201 bp, Homo sapiens; identical to SEQ ID NO: 41400

SEQ ID NO: 223890 - DNA, 201 bp, Homo sapiens; identical to SEQ ID NO: 41401

SEQ ID NO: 223891 - DNA, 201 bp, Homo sapiens
ctattattaggggcataggccctctattactattttacaagagatctatctatgtctttccagtaggagtggatctgattgccatcaatcaataatacctkagaccaagggactccaatcaattcagcatgctttgcctaatgatatttgtttgtaatactgttgcgggacaatcaaagactggagagaccaaaaaaggtt

SEQ ID NO: 223892 - DNA, 201 bp, Homo sapiens
tgagtagctaggaatacaggtgtgcaccaccacacccagctaattttttgtatttttaggagagacgggattttgccatgttggccaggctcatcttgaaytcctgacctcaaggaatccacccacctcaacctccaaaattgctgggattacaggcatgagccaccatgcctggcctgaaatgcctctttaaaatgagat

SEQ ID NO: 223893 - DNA, 201 bp, Homo sapiens
cagtcttgagtttcatcagtgacttcagtgatccagggtttggcccagcccccggttttgcgcagtacagtgacctccttccacattttatcttcaatgaraattgggaacatgtgtggtgatggcttgaatgtcaatgtcttctctcaattttgctatctgaagtttctttttttttttttgtcttcagacggagtcttc

SEQ ID NO: 223894 - DNA, 201 bp, Homo sapiens
ggaattatctgtgttgtcatggggattttccaggtgtcatttacaactacctgtggacaagatgaggtgctaccctcatcttagaattagggatggtggcygggcatggcagcccatgcctataatctcagcactttgggaggctgaagcaggtggatcaactgaggtcgggagttcgagaccaacctgaccaacatggag

SEQ ID NO: 223895 - DNA, 201 bp, Homo sapiens
cggttattctcatgtttaccattactgagtgatggcagacaatcacacagagataggtgacagcctgatgttccccaggcacttcagtctgtgtccttgayctgctgcttcttcctaggggccctcatggaccccaccttcctcttccagtccattaccgccaacatcatctgctccatcgtctttggaaaacgattccac

SEQ ID NO: 223896 - DNA, 201 bp, Homo sapiens
gagataggtgacagcctgatgttccccaggcacttcagtctgtgtccttgacctgctgcttcttcctaggggccctcatggaccccaccttcctcttccaktccattaccgccaacatcatctgctccatcgtctttggaaaacgattccactaccaagatcaagagttcctgaagatgctgaacttgttctaccagactt

SEQ ID NO: 223897 - DNA, 201 bp, Homo sapiens; identical to SEQ ID NO: 41415

SEQ ID NO: 223898 - DNA, 201 bp, Homo sapiens; identical to SEQ ID NO: 41417

SEQ ID NO: 223899 - DNA, 201 bp, Homo sapiens
tctcttttgtgctctgtccctttatttctcaggctggccgacacttagggagaacagaaaagaacctacgtggaatattgggggtgaattttgcccgatayctggctgaatttcccctgataatgccactctctatgtccatgtgtacacattgtttagcacccacttatgaatgagaacatgtgatattcactttctgtg

SEQ ID NO: 223900 - DNA, 201 bp, Homo sapiens
gtgagatgggagagtgtggaagggatggaaaaggaggaggtgggtagacgggaaacagctcacaggcagcaaggcagttggggtcgtactttgggtgggaytccacagacaagcttgggaattcctttctggcttatatattaactacagaagcttctggaattttataaggtgaaatggagaggagacagactggagggt

SEQ ID NO: 223901 - DNA, 201 bp, Homo sapiens
gcaagacaagaaaagtactggagattggggtttgaggagtctatgcaattatttttatttttaaaaatctttgtggctacatagcaggtgtatatatttawgtggtaagtgagatatttcgatacagacatacaatgtataatcacagacatacaatgtagacaggcataaagtgtatagtcacatataataataacatca

SEQ ID NO: 223902 - DNA, 201 bp, Homo sapiens
atccatttattggtttgttcatttattcatcaatctttccatccatgaattgatctattgattgattgattgatgtttttatccagttgttcatgaattcmtctattgttctattacactgttatatacctgaggaccaagaatagtgtctcaactatattataaacacaataaatattagttcattttctactcatctta

SEQ ID NO: 223903 - DNA, 201 bp, Homo sapiens
aataagaggagagagagtaggaaaaggaaggaggaggggagaaaggagggaaaggagagaaacagaataagagataggaaaaagagagagtgacataaaamgagaggaagaaagaatgaacaagacaaataaggtatctttagagggagatgaaaagaaagaatgagagagaaagagattggggagaaatcagattcaaat

SEQ ID NO: 223904 - DNA, 201 bp, Homo sapiens
tgttacggttattctcatgtttaccattactgagtgatggcagacaatcacacagagataggtgacagcctgatgttccccaggcacttcagtctgtgtcsttgacctgctgcttcttcctaggggccctcatggaccccaccttcctcttccagtccattaccgccaacatcatctgctccatcgtctttggaaaacgat

SEQ ID NO: 223905 - DNA, 201 bp, Homo sapiens
aaatgaacgtggcacatccactcaaagatttgcatctggtttcagagcagcttcctaaaagtccaccctgaattgtaggttaaaggccagtcttatgcaartctgttgcagtggacatttgtgtctgggcttagggacatggcagagcgaagtgtatgcacctgccctgtgcccacactggtgaccttctgtgtccacagg

SEQ ID NO: 223906 - DNA, 201 bp, Homo sapiens; identical to SEQ ID NO: 41422

SEQ ID NO: 223907 - DNA, 201 bp, Homo sapiens
ggatctcaggctgagactagaagacagcctagagacacagacacagacacatggccagaaacacataccccacacataccccagaaacaaacacaaggcartaaccaaaccttaagcctccttagcacaagccaagtgctattctaagaatttttacaattgtctcctttaacctcacaagagccctttgagggaggtgcc

SEQ ID NO: 223908 - DNA, 201 bp, Homo sapiens
catcctctactctttggctggttaaaagaaaaactttagacaaattaaacttagcagagtctatctgaacaaagaaacaattcatgaattgggcagcacamggaaccagtaaaggttcagagagctccatccagcaatgtggtcaggcactatttatccacagggaaaggaactgaggtactgaaacagcctgattggtta

SEQ ID NO: 223909 - DNA, 201 bp, Homo sapiens
ctagaagacagcctagagacacagacacagacacatggccagaaacacataccccacacataccccagaaacaaacacaaggcagtaaccaaaccttaagsctccttagcacaagccaagtgctattctaagaatttttacaattgtctcctttaacctcacaagagccctttgagggaggtgccattctccccatatgag

SEQ ID NO: 223910 - DNA, 201 bp, Homo sapiens
gtgagccttgggtgtagattgcagaaggaaataagacaaagggctcatctgggcaggaccttgaaggttgcaggaggagtttggatttatggtctagcacygggaaggtggaaaaggtcttgacgtgctctgacttgtcccagttctcatcctctactctttggctggttaaaagaaaaactttagacaaattaaacttag

SEQ ID NO: 223911 - DNA, 201 bp, Homo sapiens
ccaccacacctggctaatttttttttttttcttttcgagacagagcctcgctctgttgcctaggctggagtgcagtggcacaatctcagctcactgcaacytccacctccctggttcaagcaattcccctgcctcagcctcctgtagctgggattacaggcgcctgccgctatgccaggctaatgtttttgtatttttagt

SEQ ID NO: 223912 - DNA, 201 bp, Homo sapiens
ccaatggggcactgaaaaagactgaagcttttatccccttctccttaggtaagctggacccacaatttctttcccagacaccagagggcaggtactatccycaacttgagaaaaacaacgagagatactgattatttgagcacttaatatattctgattgcttcacctgccttatcccattccatcttcactacaacccta

SEQ ID NO: 223913 - DNA, 201 bp, Homo sapiens; identical to SEQ ID NO: 41402

SEQ ID NO: 223914 - DNA, 201 bp, Homo sapiens
cctagagacacagacacagacacatggccagaaacacataccccacacataccccagaaacaaacacaaggcagtaaccaaaccttaagcctccttagcasaagccaagtgctattctaagaatttttacaattgtctcctttaacctcacaagagccctttgagggaggtgccattctccccatatgagaagtgaagaac

SEQ ID NO: 223915 - DNA, 201 bp, Homo sapiens; identical to SEQ ID NO: 41412

SEQ ID NO: 223916 - DNA, 201 bp, Homo sapiens
tgggcatcaacattacttctgtcaccatcataatggacttgtctgctctcagtatggaattcacaatggacaatgtcaacgtagttgagtgattctttacmttttcttcatgtttttgttgttcccactgtaatgagcccactggatgtacaaagaatggctgcatatgagcatttaagactctttttttttctgagacag

SEQ ID NO: 223917 - DNA, 201 bp, Homo sapiens
tctgccccaccaccccccaagcacacccagagctgcaggctctagcgcatcccagccagtgtctcctgcagctcagcaggtaaagggccccggtgagggargcagagaaggagggggtgtctcccaagagagggtgggtcgccagctccaatctctgtctctgagactggctaggaatcttttttgctgtttcctctgaga

SEQ ID NO: 223918 - DNA, 201 bp, Homo sapiens
agaacaacctctgccccaccaccccccaagcacacccagagctgcaggctctagcgcatcccagccagtgtctcctgcagctcagcaggtaaagggccccrgtgagggaagcagagaaggagggggtgtctcccaagagagggtgggtcgccagctccaatctctgtctctgagactggctaggaatcttttttgctgttt

SEQ ID NO: 223919 - DNA, 201 bp, Homo sapiens
caccatgttggccaggctggtctcaaactcctgacctcaagtgatccgcctgcctcggcctcccagagtgctgggattacaggcgtgagccaccgtgcccrgcctcagtctctcttggtctgccctttgcagcctacccgtctctttgtgtggctctaatattccctgcctctcttattctctctctctctctctccatct

SEQ ID NO: 223920 - DNA, 201 bp, Homo sapiens
ttacaggtgtgagccactgcacccagccccaaactttatttcaaagacaaatctctgttcaaaggaagctatgtgacaagacccaataaatgatggaaggraggagggaccaacagaaggaaggaggaagaaaggaaaaaggaaagaaggaaggaaaggaaggagggagggagggaaagaatgaaggaaggaaggaaggat

SEQ ID NO: 223921 - DNA, 201 bp, Homo sapiens
ccctgtccctgcctacctaatccacactgaccccattcgcccctgaacacccttcgtcctcctccaaaaccctcctactctgtctggtccccagttgtacracatcttcccgagcctcctggactgggtgcctgggccgcaccaacgcatcttccagaacttcaagtgcctgagagacctcatcgcccacagcgtccacga

SEQ ID NO: 223922 - DNA, 201 bp, Homo sapiens
ctctccctatctctgtgtttgtctgtctctgtccctgtgtgtcttgatctctctttatcactgtctctgtatgacagtctcttgacagacaggtgatgatagatagataatagacagatgatacacagatgatagattatgaagatagtagatagatgatagatatagatagataatagatgatagataatagacagatca

SEQ ID NO: 223923 - DNA, 201 bp, Homo sapiens
tcccaagccctagctacagacatctcagacccttaaatccagaagctcaggcctttgccaggaccccatctcatatcatagtggactagaccccttcaccrtgacaaatccccttcctagaacccctccctggaagccctggggtctggaacttcatctggaggatcccctgggcctaaacgctattctcagggacccctc

SEQ ID NO: 223924 - DNA, 201 bp, Homo sapiens
tgatagatgatagatagatagatagatgatagatagatgttgatagatgttagataatagatgagaaacaaagaaagaaagaaaaagaaaaaagaaagaargaaaaagaaaggaaggaaggaaggaaagaaagagtgatagatgatagatggctgataggtagacagacatctgtagatatgtagatcgctcactgttttt

SEQ ID NO: 223925 - DNA, 201 bp, Homo sapiens
gagcccagctaagagcttatgttttcctctgggaatgtgtggcccagattccagcagggtttgcatcccatctgtcaccccctagctgtgttgccttgggyatgttactccacttctctgtgcctcaatgtccacatctataaaatggagataatactaaggcctgcctcttggagttgttagaattaattgcgatgtaat

SEQ ID NO: 223926 - DNA, 201 bp, Homo sapiens
cctgccctgcccttctccgttccccagctctcccagggaaagaaagttaaacccagctgggaccgaatgggcccccagcagcagttgtactggtctagagkgaaggggcctccattcctggctcacatccccacccctctaccaatgcaggagaaggaggacccactgagccacttccacatggataccctgctgatgacc

SEQ ID NO: 223927 - DNA, 201 bp, Homo sapiens
aaccctgtctctacttaaaatacaaaaattagctgggtgtggtggtgggcgcatgtagtccccgctactctggaggctgagacaggaaaatcacttgaacmcaggaggcggaggttgcagtgagccgagattgcaccattgtacagagagagactctgtctcaaaaaaaataatgataataatttaacagccaggggcagt

SEQ ID NO: 223928 - DNA, 201 bp, Homo sapiens
ggtgtgcgccaccaagcccagctaatttttctattttgttgtggagattgggtttcaccatgttgcccagatggtctcaaactcctgggctcaagcgatcmgtccgcctgggcctcccaagtgctgggattacaggcgtgagccaccgcgcccggccagctctagctaattctcacgtgcgccccagcagtggcgccccgc

SEQ ID NO: 223929 - DNA, 201 bp, Homo sapiens
acccaggaggcggaggttgcagtgagccgagattgcaccattgtacagagagagactctgtctcaaaaaaaataatgataataatttaacagccaggggcrgttgctcacacctgtaatcccagcactttgggagatctaggcgggcagattacctgaagtcaggagttcaagattagcctgaccaacatggtgaaaccct

SEQ ID NO: 223930 - DNA, 201 bp, Homo sapiens
acactaccacacctggttaatgttttgtatttttagtagagatggggttttgccatgttggtcaggctggtctcaaactcctaacctcaggtgatccaccyacctcggcatcccaacgtgctgggattacaggcaagagccactgctcctggcccaaactgaattctgctgctactttcccccaatcccagccccatctcc

SEQ ID NO: 223931 - DNA, 201 bp, Homo sapiens
ctgaccaacatggtgaaaccctgtctctactaaaaatacaaaattagccaggaatggtggcacatgtttgtaatcccagctactctggaggctgaggcagragaatcacttgaacccgggaggcggaggttgcagtgagccaagatcatgtcattgcactccagcctgggcaacaagaacaaaactccatctcaaaaaatg

SEQ ID NO: 223932 - DNA, 201 bp, Homo sapiens
gtagagatggggttttgccatgttggtcaggctggtctcaaactcctaacctcaggtgatccacctacctcggcatcccaacgtgctgggattacaggcamgagccactgctcctggcccaaactgaattctgctgctactttcccccaatcccagccccatctcctaacccaattacctattgaaatttccagttcccag

SEQ ID NO: 223933 - DNA, 201 bp, Homo sapiens
gctactctggaggctgaggcaggagaatcacttgaacccgggaggcggaggttgcagtgagccaagatcatgtcattgcactccagcctgggcaacaagarcaaaactccatctcaaaaaatgaataaataataattataataattattatttaacttgggccaggcacattggctcacacctgtaatcccatcactttgg

SEQ ID NO: 223934 - DNA, 201 bp, Homo sapiens
agccctgccctggagccccagccatgtgcctgccagggaaccctacctctcccatgcagcctggcccacacacacagctctgtctgctgctccacctcccyaagctccatctctgggtgtatcccctgctctgcccctgatctccagccctcccacacagtccacccactcgacctaccgtccagccagtagagccccaaa

SEQ ID NO: 223935 - DNA, 201 bp, Homo sapiens
gcttgaggccaggagttcaagaccagcctggacaacatggcaagaccctttctctactgaaaatgttaaaattacctagatgtggtgtggtgtgcatctgyggtcccagctacttgggaggctgaggtgggatgatcacttgagctcaggagtttgaggttacagtgagtatgatcatgccactgcactccagtctgggca

SEQ ID NO: 223936 - DNA, 201 bp, Homo sapiens
atgggtgaatctgtgacgtccccagctgctgtcttcctttcctcttatgttttcctctgggaatgtggggttgcagcctctaacctcatcttatctcaccrccgctccccatcctgccacccctgcagggcgccgtctgtgcctgggagagtcgctggcgcgcatggagctctttctgtacctcaccgccatcctgcagag

SEQ ID NO: 223937 - DNA, 201 bp, Homo sapiens; identical to SEQ ID NO: 41429

SEQ ID NO: 223938 - DNA, 201 bp, Homo sapiens
tcaccatggacagcataagcacagccatcttactcctgctcctggctctcgtctgtctgctcctgaccctaagctcaagagataagggaaagctgcctccrggacccagacccctctcaatcctgggaaacctgctgctgctttgctcccaagacatgctgacttctctcactaaggtgcaaggcccttagcttgggtgat

SEQ ID NO: 223939 - DNA, 201 bp, Homo sapiens; identical to SEQ ID NO: 41433

SEQ ID NO: 223940 - DNA, 201 bp, Homo sapiens
gggcaatggtaagcctcgtccttgtctcctccgctctcggccttttccatattgagggagggggtgagggtgagagactgttgtctcaatcttgttgacaytcagggctgctgacatcactgatgacaccaaatgcaatgcagcgaggcagtgttggtctatggcaaattctctcccaccttcctcacctccagatcccac

SEQ ID NO: 223941 - DNA, 201 bp, Homo sapiens
ctcaaactcctaacctcaggtgatccacctacctcggcatcccaacgtgctgggattacaggcaagagccactgctcctggcccaaactgaattctgctgytactttcccccaatcccagccccatctcctaacccaattacctattgaaatttccagttcccagttcttgctttcaatcttaaactcactaccatcacca

SEQ ID NO: 223942 - DNA, 201 bp, Homo sapiens
gagataagggaaagctgcctccgggacccagacccctctcaatcctgggaaacctgctgctgctttgctcccaagacatgctgacttctctcactaaggtrcaaggcccttagcttgggtgatggtggaaggataaggaggaggggtcccatggccacaggcccccctgtaacttctgtcttcctaccctcagctgagcaa

SEQ ID NO: 223943 - DNA, 201 bp, Homo sapiens
ctgaattctgctgctactttcccccaatcccagccccatctcctaacccaattacctattgaaatttccagttcccagttcttgctttcaatcttaaactsactaccatcaccaaaacaaccccatcacatatctacccaaccccaagttcaagctcagtcccaatctatcaatcctcctcatcctacccaactccatcca

SEQ ID NO: 223944 - DNA, 201 bp, Homo sapiens
acacccagcccaatacaatggaaaggagtttgggagcctcccagccctcctacactgctaagtccacctcctcacccacacagggcaccgatgtcatcacmctccttaacaccgtccactacgaccccagccagttcctgacgccccaggagttcaaccccgagcattttttggatgccaatcagtccttcaagaagagtc

SEQ ID NO: 223945 - DNA, 201 bp, Homo sapiens
aaggtaagtcccaggggagatggaaaggagggatcagcgatgtcctctcccactttgccctccacacgccagcagctgccttcaccatggacagcataagcacagccatcttactcctgctcctggctctcgtctgtctgctcctgaccctaagctcaagagataagggaaagctgcctccgggacccagacccctctcaa

SEQ ID NO: 223946 - DNA, 201 bp, Homo sapiens
gattccaaactctgtctctctcccagcaaataccatgaaaggggacctgggtggcagtggcctcaggatgagttcccggttaagctggtcccctcctcttstccccaggcatcgccttctccagtggggatcgatggaaggtcctgagacagttctctatccagattctacggaatttcgggatggggaagagaagcattg

SEQ ID NO: 223947 - DNA, 201 bp, Homo sapiens
catcttatctcaccgccgctccccatcctgccacccctgcagggcgccgtctgtgcctgggagagtcgctggcgcgcatggagctctttctgtacctcacygccatcctgcagagcttttcgctgcagccgctgggtgcgcccgaggacatcgacctgaccccactcagctcaggtcttggcaatttgccgcggcctttcc

SEQ ID NO: 223948 - DNA, 201 bp, Homo sapiens; identical to SEQ ID NO: 41431

SEQ ID NO: 223949 - DNA, 201 bp, Homo sapiens
tggctgcagagatggagacactggctagttttgccctcacctttagggtggctagggtgggacaaattgtatcctggagacaggcttgaaggtaaaggctkcgaggacctgaagccagagaggcagagaaaccaagacagagaaaaaggcagcaggaccaggcgaggtggctcacacctgtaatcccagcactttgggagg

SEQ ID NO: 223950 - DNA, 201 bp, Homo sapiens
tgtggtcttcaaactttatttatttatttatttatttatttatttttgagatggagtctcgttctgttgcccaggctggaaagcaatgacgcaatctcagytcactgcaatctccgcctcccaggttgatgccattctcctgcctcagcctcctgagtagctgggactacagacacctgccaccatgcccagctaattttt

SEQ ID NO: 223951 - DNA, 201 bp, Homo sapiens
ggcccatcagtggcagaaatggacttgaacccagagaaaaagaaacaagtgccccaaataccaaaggaacccagcccccatccctggcccatcattttgcracagccccatgactaccccaaaaccaggcccaggctccaactggcaaagcaaaaaaaaaaaacaaagaaagaaagaaagctttgccccatcccaggaggg

SEQ ID NO: 223952 - DNA, 201 bp, Homo sapiens
aggctggaaagcaatgacgcaatctcagctcactgcaatctccgcctcccaggttgatgccattctcctgcctcagcctcctgagtagctgggactacagrcacctgccaccatgcccagctaatttttgtatttttagtagagactgggtttcaccatgttggccaggctggtcttgaatgcctgacctcatgatccagc

SEQ ID NO: 223953 - DNA, 201 bp, Homo sapiens
gcattgaggagcgaatcctagaggagggcagcttcctgctggcggagctgcggaaaactgaaggtcaggaattttttttaacaggctggatggcacgatctttttttttttaacaggctggatggcagccttgacctcctgggcccaaaccatcctcccacctcaacctcccgaatagctggtacttcaggtgtgctccac

SEQ ID NO: 223954 - DNA, 201 bp, Homo sapiens
tgcatgaggtctggtgtgctgcacatcgcgtcttcctgatccattgcactccttaccctcaggcgagccctttgaccccacgtttgtgctgagtcgctcastgtccaacattatctgttccgtgctcttcggcagccgcttcgactatgatgatgagcgtctgctcaccattatccgccttatcaatgacaacttccaaat

SEQ ID NO: 223955 - DNA, 201 bp, Homo sapiens
ttcccccatccctccaatctgtaccctgtctgcagggcagaggcagatgtggcatgtctttttgtacccacagagcttgttctatggcacgcccttttctrggctttttgtatcatttcttagtacattgtaatagattcaaaccagtcttggctgaattaaagtgaggatgagagtcatttaggatggggagaagggagc

SEQ ID NO: 223956 - DNA, 201 bp, Homo sapiens
gcatgaggtctggtgtgctgcacatcgcgtcttcctgatccattgcactccttaccctcaggcgagccctttgaccccacgtttgtgctgagtcgctcagkgtccaacattatctgttccgtgctcttcggcagccgcttcgactatgatgatgagcgtctgctcaccattatccgccttatcaatgacaacttccaaatc

SEQ ID NO: 223957 - DNA, 201 bp, Homo sapiens
ggctgcagagatggagacactggctagttttgccctcacctttagggtggctagggtgggacaaattgtatcctggagacaggcttgaaggtaaaggctgygaggacctgaagccagagaggcagagaaaccaagacagagaaaaaggcagcaggaccaggcgaggtggctcacacctgtaatcccagcactttgggaggc

SEQ ID NO: 223958 - DNA, 201 bp, Homo sapiens
gaggaaacagtgggcggggaaagggctgtgaatggcccgcccagggcccgccccctcccatctgaccccacccagagttacacggccacgcccactccccyccactgagcatttatggccgccattgcctccttcccactccccctcagccccaacccccaccccggacctggctgccctttgagaccctgtccctgccta

SEQ ID NO: 223959 - DNA, 201 bp, Homo sapiens
cacacaacccaacactcaggcccttgcacaagccaagctttcgccctcactgacccacttcctcccagaccctggctaattcttttttttttttcctcttcccccccccccttttttttttttttttttttttttgagacggaatcttgctctgtcacccaggctgaagtgcagtggcctgatcccagctcactgcaacct

SEQ ID NO: 223960 - DNA, 201 bp, Homo sapiens
caacactcaggcccttgcacaagccaagctttcgccctcactgacccacttcctcccagaccctggctaattcttttttttttttcctcttcccccccccycttttttttttttttttttttttttgagacggaatcttgctctgtcacccaggctgaagtgcagtggcctgatcccagctcactgcaacctcctcctcct

SEQ ID NO: 223961 - DNA, 201 bp, Homo sapiens
gcctggcaacagagtgaggcctgactctacaaaaagtcaaaaagtggggcaggaggattgcttgatcctgggaggtcgaggctgcaatggggtatcattgygccactgcattcccgcctgggagacgggagtgagaccctgtcagaagaagaaagaaaaaagaagaaggagagggagagggagagggaggagggggaggag

SEQ ID NO: 223962 - DNA, 201 bp, Homo sapiens
aacactcaggcccttgcacaagccaagctttcgccctcactgacccacttcctcccagaccctggctaattcttttttttttttcctcttccccccccccyttttttttttttttttttttttttgagacggaatcttgctctgtcacccaggctgaagtgcagtggcctgatcccagctcactgcaacctcctcctcctg

SEQ ID NO: 223963 - DNA, 201 bp, Homo sapiens
ccctggctcctgcattagatgggtcccagctgccccaggatttgaaatcagagagctctggtacaatattacaatattacaatattgtgtattaggtacasgttccatccttcatgctcccttccctggcttgatctgatgaccttacctgtccaggtacaccagatgcaaagaggtggagacagggcacttgagaaagtc

SEQ ID NO: 223964 - DNA, 201 bp, Homo sapiens
cactcaggcccttgcacaagccaagctttcgccctcactgacccacttcctcccagaccctggctaattcttttttttttttcctcttcccccccccccttttttttttttttttttttttttgagacggaatcttgctctgtcacccaggctgaagtgcagtggcctgatcccagctcactgcaacctcctcctcctggg

SEQ ID NO: 223965 - DNA, 201 bp, Homo sapiens
gcttatttttcttgcctatctctcttattcatgcatttaataatcaataagcaggccaggcacgatggctcacacctgtaatcccagcactttgggaggcygaggtgagtggatctcctgaggtcaggagtttggtaccagcctggccaacatggtgaaacctcatctctattaaaaatacaaaaattaggccaggcgcag

SEQ ID NO: 223966 - DNA, 201 bp, Homo sapiens
atgtacacagtgcacctgggacccaggcgggtggtggtcctcagcgggtaccaagctgtgaaggaggccctggtggaccagggagaggagtttagtggccscggtgactaccctgcctttttcaactttaccaagggcaatggtaagcctcgtccttgtctcctccgctctcggccttttccatattgagggagggggtga

SEQ ID NO: 223967 - DNA, 201 bp, Homo sapiens
caagtaggtggcttctctctctgcaatgcaaccccatggttggcaacacttgattttttcctgtcactgtttctgcctgtgcccttcctctctgtctccgkctctttctctctctctctctctctttttttttttttttttttttttgaggctggagtgcagtggttcaatctcagctcactgcaacctccacctcctggg

SEQ ID NO: 223968 - DNA, 201 bp, Homo sapiens
aagcacagccatcttactcctgctcctggctctcgtctgtctgctcctgaccctaagctcaagagataagggaaagctgcctccgggacccagacccctcycaatcctgggaaacctgctgctgctttgctcccaagacatgctgacttctctcactaaggtgcaaggcccttagcttgggtgatggtggaaggataagga

SEQ ID NO: 223969 - DNA, 201 bp, Homo sapiens
gcccacctcagcctcccaaagtgctgggattacaggcatgaaccactgcactaggccctcccaccctctcactgaaattctctgaaattctcccgtttggrgtgacgatagcaaccccaggcatgtaccctcccaacctgggacccgacctaataccctaacatcctgctgacagtggctgtttttgcggggcaggcgtcc

SEQ ID NO: 223970 - DNA, 201 bp, Homo sapiens
gtaacagcccagagtgatcaggttcttaatggggaaacagaggcagagtgataggatggtcgtgagggaagcccatggtcctatggaagcttgaaggagayccctaagctggagggtccagaagggcttactggaaggagccagggagattccaaactctgtctctctcccagcaaataccatgaaaggggacctgggtgg

SEQ ID NO: 223971 - DNA, 201 bp, Homo sapiens
cactggctagttttgccctcacctttagggtggctagggtgggacaaattgtatcctggagacaggcttgaaggtaaaggctgcgaggacctgaagccagwgaggcagagaaaccaagacagagaaaaaggcagcaggaccaggcgaggtggctcacacctgtaatcccagcactttgggaggctgaggcgggaggatcgc

SEQ ID NO: 223972 - DNA, 201 bp, Homo sapiens
gagggaagcccatggtcctatggaagcttgaaggagacccctaagctggagggtccagaagggcttactggaaggagccagggagattccaaactctgtcyctctcccagcaaataccatgaaaggggacctgggtggcagtggcctcaggatgagttcccggttaagctggtcccctcctcttctccccaggcatcgcct

SEQ ID NO: 223973 - DNA, 201 bp, Homo sapiens
ttccaacttcttctgcaaccaactcacacctcccctgcactgcaggcatgctctttgccaatggaaaccgctggaaggtgcttcggcgattctctgtgacyaccatgagggacttcgggatgggaaagcggagtgtggaggagcggattcaggacgaggctcagtgtctgatagaggaacttcggaaatccaagggtgagt

SEQ ID NO: 223974 - DNA, 201 bp, Homo sapiens; identical to SEQ ID NO: 41452

SEQ ID NO: 223975 - DNA, 201 bp, Homo sapiens; identical to SEQ ID NO: 41453

SEQ ID NO: 223976 - DNA, 201 bp, Homo sapiens
tttccgggtgattcccattgggaacacaaagaggcattggcgccagtgaaattatttcctgattttggggaactggctcacaaactcaacaattgcttgtyttttttcctagggtataagcctttgctaaagccattcacagattattgtactatggattttcttgtaaggaaagggaaagggttaggacagcaagaaaca

SEQ ID NO: 223977 - DNA, 201 bp, Homo sapiens
taagcctttgctaaagccattcacagattattgtactatggattttcttgtaaggaaagggaaagggttaggacagcaagaaacagggaagaaaggataaragataatgctttcatgatggaagagaaatcttgatccacagtcttggaaaagctgtcctcatataagatgccaactgcttcttgggaaaaactttcctgg

SEQ ID NO: 223978 - DNA, 201 bp, Homo sapiens
tcctctaggtattcatgaccgtctattatgattgcatctcttgggggtaggggaaagagggagggcatgagcaagtgtgtgtcaaggctgaggaaggtggygctgttgcttctccatttcccaataagcttccagattccttttggagccagagggatgcgggctcgtgtctcagattcaattcttatgcgttgagtcaca

SEQ ID NO: 223979 - DNA, 201 bp, Homo sapiens
cattgttctctgtattactcatatttacccagagagaaaaatatatcactataatttgtaaaattcatatgtttaatggaaggagcaaaactgttctccasttattacaattatttttgaaacataaaaaaagttgtgaagatttcatcttaatatggacatttatctgttctcaaataatacttttataatttcttatgc

SEQ ID NO: 223980 - DNA, 201 bp, Homo sapiens; identical to SEQ ID NO: 41448

SEQ ID NO: 223981 - DNA, 201 bp, Homo sapiens
tggtacacaataggcgtttagcaaatatgtgtatagaaacaaatgaaggagtcagtgagtgaaagctccaagcctgactcagcagaactgacagtcggccrgggcctgcaaagtgctaccaggcccccagtagggggtcgcagatctaaggatccctccccaccaaatagagtcccatcacataggtgaaggtctcaagtg

SEQ ID NO: 223982 - DNA, 201 bp, Homo sapiens
aaagcattgggataagttttgaatagacatgtttgaccctctccccttcttcgttgcagcaaagatttccattttctcacagggagggcttggggtaaatwgtttgttttgttgttgttgttgttgtttgaggatgtgggtgggtcatcttggttaatgtcagtgcaagaacagtgtccgttcctcattattggggttcct

SEQ ID NO: 223983 - DNA, 201 bp, Homo sapiens
gcctcaacatcccaaagcattgggataagttttgaatagacatgtttgaccctctccccttcttcgttgcagcaaagatttccattttctcacagggaggrcttggggtaaatagtttgttttgttgttgttgttgttgtttgaggatgtgggtgggtcatcttggttaatgtcagtgcaagaacagtgtccgttcctcat

SEQ ID NO: 223984 - DNA, 201 bp, Homo sapiens
caaaatgccatacacagaggcagtcatccgtgagattcagagatttgctgaccttctccccatgggtgtgccccacattgtcacccaacacaccagcttcygagggtacaccatccccaaggtaagactggctgcacccccacatccctcctgtgtgggcatcctggattttcttaatccccaaactcaaccttttgttag

SEQ ID NO: 223985 - DNA, 201 bp, Homo sapiens
caattgagtccccttgtttttgtttttttctttttcttttttgtgctgtgtgtgtggagggtgggcagggaatggcaatatcttttgatcttgtgatcctycctcaggacacggaagtatttctcatcctgagcactgctctccgtgacccacactactttgaaaaaccagacgccttcaatcctgaccactttctggatg

SEQ ID NO: 223986 - DNA, 201 bp, Homo sapiens
aaaatcgaataattcaaagctcaggcaataaagatagttcaatagtattagagtccaattggtcatatactttgttcagagcacaatggtgattaaggacyagagcttgctataaaataacttgatttacagaggcatttgtttttgtagttcacctggtaacacatgtcatagtaccttggagacccactagaagaaaca

SEQ ID NO: 223987 - DNA, 201 bp, Homo sapiens
cctctctgtctgcccatctataatttggagctaataatcaaattgcatctgcctcacattgttgtagtgagagttcagtggaattacacgtgacgtgctgrtacataattagctgttatggttattctcatgtttaccattactgagtgatggcagacaatcacacagagataggtgacagcctgatgttccccaggccct

SEQ ID NO: 223988 - DNA, 201 bp, Homo sapiens
caacactcaaagatgtggtggcttatgcctgtaatcccaacactttgggaggctgaggtgggaggattgcttgaagccaggagttcaaaaccagcctgggsaactgaacaagaccctgtctccacaaaaattttttaaaaatttagccaggcatggtggcctgtgcctgtagtcccagctacttgggagactgaagcagga

SEQ ID NO: 223989 - DNA, 201 bp, Homo sapiens
caggcactatttatccatagggaaaggaactgaggtacagaaacagcctgattggttacagctctgtgtttgccttatctgagcatgtctgggcagcttgyagcctgtgactggctgaagcttggctgccctgattgtccaaggttacttgttacaagaatatactctcaagttacattgcagtttgtttacatgttgagt

SEQ ID NO: 223990 - DNA, 201 bp, Homo sapiens
tcctgagagacagagttgatgagaatgaatgtgaaagagagggagagagagaatgaatcaggctttgggcttgatctctgctcttctgctcctggatgtctttttttttttttttttttttttgagacggagtctcgctctctcagccaggctggggtggagtggtgccatcttggcttactgcaacctccatctcctggg

SEQ ID NO: 223991 - DNA, 201 bp, Homo sapiens
atgctaacctccaaaaacttatagaagaaacatttccacctactgcagaaacagtgccacccactgcgcctttaggggaaggtccagaatggccacccccrcctcagccttatgaatttttggaatgggagcctgagacatgacttgctgctcccattgttgcatgccccacaattaactatgttgaagggaagcttcagg

SEQ ID NO: 223992 - DNA, 201 bp, Homo sapiens
ttggtcaatagaaagtagtgtccctgctgaaaggtctctttttaaaaaattttctttccttcttttttcttttttttaattttgagacagagtcttgctcygtcacccaggctggagtgcagtggcatgatctcagctcactgcaacctccacctcctgggttcaagcgattctcctgcctcagcctcctgagtagctagg

SEQ ID NO: 223993 - DNA, 201 bp, Homo sapiens
taaagctcctcacctgaagaaattcaaggatacaagacaataaggaacagcatttcttcattttctcccattgctccttctccctgttttttttttttttwaaaaaaaaaactttccacagattataaaggtaatcttctgctcttttaaaagaaaataataaaatgtctccttattgattaacctggaaatatgcctatt

SEQ ID NO: 223994 - DNA, 201 bp, Homo sapiens
tcactgtgtgtaaagcacttcacgcctccccactggtgcttcaccctggggctggaatgaggacccgatcttagtgtcagatgacacagcacagcaagacmcaggtcgttgggtcagaaaagtccatgctgcctcctctccccggtcaggaaagtacagcttccacctcttaaaagtcaggattgtttgcttctcctgggt

SEQ ID NO: 223995 - DNA, 201 bp, Homo sapiens
acccaggtccttgggttggacaggtctgtgctggcacctctccagggtcaggaaagcacagcttccacctcttaaaaatcaggactgtttgtcttctcctsctgggtcaaagtaacttcagggtcaggatcctggatccagcaaagagtttggttaacattgcaagaaagatgttgcctcatggtcaaaagtcaggcctag

SEQ ID NO: 223996 - DNA, 201 bp, Homo sapiens
gggagtgtagcagggcaacaggttgggagaaggtcagcacagaaacatgtgagcaaaggaatctgtatcatgaataagttcaaggaaacgtactgtgcccrgatgtgcacacaggctagatttatgtttctctttacccaaacatcttagtttagcaaagagtaacagagcagtattgctgccagcatatctcgcttccag

SEQ ID NO: 223997 - DNA, 201 bp, Homo sapiens
ggaaagggttaggacagcaagaaacagggaagaaaggataagagataatgctttcatgatggaagagaaatcttgatccacagtcttggaaaagctgtccdcatataagatgccaactgcttcttgggaaaaactttcctggtcagctttgccttaaggtctcaacagacataaagttctaggagtctagaaggacccttt

SEQ ID NO: 223998 - DNA, 201 bp, Homo sapiens
tgaggcaggagaatggtgtgaacccgggaggcggagcttgcagtgagccgagactgcaccactgcactccagcctgggcgacagaccgagactccgtctcaaaaaaaaaaaaaaaaaaaaaaaaaaaaagcaaaagcaaaaccacagatcataagaagtatggggtgagggtgatattcgtagtattttatcaaccatctc

SEQ ID NO: 223999 - DNA, 201 bp, Homo sapiens
gctggtcttgaattcctgatccttttgcctcaggctcccaaagtgctgggattagaggtatgagccactgtgcccacccagggctttttaatttatacaarcaattgattaaacacctactctgcccagcccctacccctgggatttagctgtattcactcccagagtcagaggtggggccggagaggaggtgcagagtga

SEQ ID NO: 224000 - DNA, 201 bp, Homo sapiens
tattaaataactaataacataaccactatcaaatatttccagtgagtgcaaaaaagcaagtggcaattgatgtctagaatatcaagatatagctttccackcctcctttggggtttccgggtgattcccattgggaacacaaagaggcattggcgccagtgaaattatttcctgattttggggaactggctcacaaactca

SEQ ID NO: 224001 - DNA, 201 bp, Homo sapiens; identical to SEQ ID NO: 41456

SEQ ID NO: 224002 - DNA, 201 bp, Homo sapiens
tacaaatgatgaatgtgataattgtcatacatatatatttatcttagacacttagtcaaaacatgtggtttttggttatgagttagacactgtcactttasctggaagatacaaagtaattgggtcatagactctcaaattatggaacacttagatttttcaggggaatgacatggagggagccaaggagtcttatgatta

SEQ ID NO: 224003 - DNA, 201 bp, Homo sapiens
caaattactcaacctctctgtctgcccatctataatttggagctaataatcaaattgcatctgcctcacattgttgtagtgagagttcagtggaattacaygtgacgtgctggtacataattagctgttatggttattctcatgtttaccattactgagtgatggcagacaatcacacagagataggtgacagcctgatgt

SEQ ID NO: 224004 - DNA, 201 bp, Homo sapiens
gagatagatcaaaggagatatagagtcagtgagtgaggggttcagaggcagaggggagtggggaagtggggttcccatggagggattggggcccaggaggsgctctctccctgtgacctgctagctcagccctaggcaaacctcaccaccccttctttcttgcagctgtttgagctcttctctggcttcttgaaatacttt

SEQ ID NO: 224005 - DNA, 201 bp, Homo sapiens
cccagcgcccccagggacctcatcgacacctacctgctccacatggaaaaagtggggtctgggagaggaaaaagggaagggaggggagggagggcaagatrgagaggtgagaagagggagggaaaaggggtagggaaggggaagatggggagtgaagaacaaagattagggaggggagaatagtgaaaaggaggagagcag

SEQ ID NO: 224006 - DNA, 201 bp, Homo sapiens
tgggagaggaaaaagggaagggaggggagggagggcaagatagagaggtgagaagagggagggaaaaggggtagggaaggggaagatggggagtgaagaasaaagattagggaggggagaatagtgaaaaggaggagagcagatgaggaaggaaagaaagatgaggtgaaaggaaggagaaaataggaggaactgagatgg

SEQ ID NO: 224007 - DNA, 201 bp, Homo sapiens
attacactgttatatacctgaggaccaagaatagtgtctcacctataatatacacacaataaatattagtttattttctactcatcttagagagggtgttytgatttgtggcctggagttcttaatctgaaattccatgcaaaatcgtgttatgtgtgtgcatatgtgtgtgtgtacctgtgcatgtgggaagaggatcca

SEQ ID NO: 224008 - DNA, 201 bp, Homo sapiens
  misc_feature (1)...(201): n = A,T,C or G
atgcctgcaacatgcttggaactgcctggcacaaaggacatgctcacaggggcaattattattataattagacataattatgataagtgctctaaaggganctttgggagcacaaaataggaaataccagctaatcttgtggtgggtcattaaggaaaagcttaccagaggaactggcttccaagccgagatgttcatggg

SEQ ID NO: 224009 - DNA, 201 bp, Homo sapiens
tggcacaaaggacatgctcacaggggcaattattattataattagacataattatgataagtgctctaaagggaactttgggagcacaaaataggaaatascagctaatcttgtggtgggtcattaaggaaaagcttaccagaggaactggcttccaagccgagatgttcatgggtgggcgtcaatcaatgattgcaaagt

SEQ ID NO: 224010 - DNA, 201 bp, Homo sapiens
  misc_feature (1)...(201): n = A,T,C or G
ggcacaaaggacatgctcacaggggcaattattattataattagacataattatgataagtgctctaaagggaactttgggagcacaaaataggaaatacnagctaatcttgtggtgggtcattaaggaaaagcttaccagaggaactggcttccaagccgagatgttcatgggtgggcgtcaatcaatgattgcaaagtg

SEQ ID NO: 224011 - DNA, 201 bp, Homo sapiens
gagggaaaggagagaaacagaataagagataggaaaaagagagagtgacacaagaagagaggaagaaagaatgaaggagacaaataaggtatctttagagrgagatgaaaagaaagaaggagagagagagagattggggagcaatcagattcaaatagatggagataggaggttaagcaagatggaagaaagccaaaaaag

SEQ ID NO: 224012 - DNA, 201 bp, Homo sapiens
ccaccagcaccactctccgctacggcttcctgctcatgctcaaataccctcatgtcgcaggtgggccagggacagccagtcaagggggtcttctggactgsagaaatggggctatgggtaccacctggatgagagaggggatgctggcttcctattccgggatcactgtaggctctggactagcttccaatcaagccaatt

SEQ ID NO: 224013 - DNA, 201 bp, Homo sapiens
aaagtggaggcttgtcaggaacgatattgaatttttcatttaaattgttttagagacagggtctcagtctgttacccaggctggagtgcaatggcacagtsatagctcactgcaaccttgaactcctgggctcaggagattctcccgccttagcctccagagtagctgggactacaggtgtgaacgaccatgccccactat

SEQ ID NO: 224014 - DNA, 201 bp, Homo sapiens; identical to SEQ ID NO: 41451

SEQ ID NO: 224015 - DNA, 201 bp, Homo sapiens
tcaggaacgatattgaatttttcatttaaattgttttagagacagggtctcagtctgttacccaggctggagtgcaatggcacagtgatagctcactgcarccttgaactcctgggctcaggagattctcccgccttagcctccagagtagctgggactacaggtgtgaacgaccatgccccactatttttttttattttt

SEQ ID NO: 224016 - DNA, 201 bp, Homo sapiens; identical to SEQ ID NO: 41454

SEQ ID NO: 224017 - DNA, 201 bp, Homo sapiens
tcaaattactcaacctctctgtctgcccatctataatttggagctaataatcaaattgcatctgcctcacattgttgtagtgagagttcagtggaattacrcgtgacgtgctggtacataattagctgttatggttattctcatgtttaccattactgagtgatggcagacaatcacacagagataggtgacagcctgatg

SEQ ID NO: 224018 - DNA, 201 bp, Homo sapiens
ttgccaatggaaaccgctggaaggtgcttcggcgattctctgtgaccaccatgagggacttcgggatgggaaagcggagtgtggaggagcggattcaggaygaggctcagtgtctgatagaggaacttcggaaatccaagggtgagtcctgggagacgaataggaaagaaaggcaatgaaacactgagagatgcaggcacg

SEQ ID NO: 224019 - DNA, 201 bp, Homo sapiens
tatgcaaatctcttgcagtggacatacatgtctgggcttagggacatggcagagcgaagtgtatgcacctgccctgtgcccatgctggtgaccttctgtgyccacagggaagcggatttgtcttggtgaaggcattgcccgtgcggaattgttcctcttcttcaccaccatcctccagaacttctccgtggccagccccgt

SEQ ID NO: 224020 - DNA, 201 bp, Homo sapiens
actacagacatttaacaaataatgacctgtgttttccttgccctgggtgaagtgctgatgagctggcagtgagcaagcaggccaggtgggatgttctgccygggtgcagctggaggggtcatcaaagaatcactaggttatttttgagttctccataactgggtgtctgtgggacatgtaggtgacgggtctctggctagt

SEQ ID NO: 224021 - DNA, 201 bp, Homo sapiens
taccattgagaatctataggaagtccagtgagccttgggtgtagattgcggaagggaataagacaaagggctcagctgggcaggaccttgaaggctgtggraggagtttggatttatggtctagcactggggaggtggagaaggtcttgacgtgctctgacttgtcccagttctcatcctccactctttggctggttaaga

SEQ ID NO: 224022 - DNA, 201 bp, Homo sapiens
ctatttgagcaaagaaacaattcatgaattgggcagcacacggaaccaggaaaggttcagagagctccacccagcaatgtgatcaggcactatttatccayagggaaaggaactgaggtacagaaacagcctgattggttacagctctgtgtttgccttatctgagcatgtctgggcagcttgtagcctgtgactggctga

SEQ ID NO: 224023 - DNA, 201 bp, Homo sapiens
cagtatggaattcacaatggacaatgtcaaagtagttgagtgattctttgttttcttcatgtttttgttattcatactgtaatgaagccattggatgtacmaagaatggctgcatatgagcatttaagactctctctcttttttttttttttttgagacagggtctcactctgtcacccaggctggagtgctgtggcatga

SEQ ID NO: 224024 - DNA, 201 bp, Homo sapiens
agaaaaagacaggagtagggctgccaggggcagaaagaaaggtataacccaagccaaaagggtactgcagccaaagaaattcgaaaggtgtccaaacagayggccccagagatggggagggcgtgatgagagggagataataagcatcaggctgttgtggaaaatgttaggtcacacaaagagttacagaagaacaggccc

SEQ ID NO: 224025 - DNA, 201 bp, Homo sapiens
ttgtccaacaacttggcaggcatagggaatgcctgaaaactcacacttgacatggcctttccaaggtttgcagattatgaaacactgaagtgaagggaaargctccctttgtctctgcctcagctttttccagctccctttgttctcatttttctcccaatctgtggtttagaacctactgggggttccttgcacctctga

SEQ ID NO: 224026 - DNA, 201 bp, Homo sapiens
caagcaattcccctgcctcagcctcctgagtagctgggattacaggcacctgccaccacgcctagctaatttttttgtatttttagtagagacagggtttygccatgttggccaggttggtcttgaactcctgacctcaagtgatctgcccgccttggcctcccaaagtgctggaattacaggcatgagccactatgtcca

SEQ ID NO: 224027 - DNA, 201 bp, Homo sapiens; identical to SEQ ID NO: 41457

SEQ ID NO: 224028 - DNA, 201 bp, Homo sapiens; identical to SEQ ID NO: 41458

SEQ ID NO: 224029 - DNA, 201 bp, Homo sapiens
gcagtgaaacagttgttaaggggtctaagaatgtaaggcaggagaccagtgaaggggctttgcagagatcaatgcagggcatttgtaagtaaacttaaacrtttttctaatttttatgtcaagtttttattgaaattgaacatcactataaaaagtgcacagctcaatgaattttcacaaactgaacatactcatgtaatt

SEQ ID NO: 224030 - DNA, 201 bp, Homo sapiens
catacacatttgtgctgggcatgtacctgagagtgaagtggatggtttcccagttatccatttgttcagcttcaggaaatactgcccagcggttccccaartggctgcacagtaatcccaccttatccaccggagatatgttctgagacccccagtggatgcctgaaaccccaaataatgctgagccctatatatactctt

SEQ ID NO: 224031 - DNA, 201 bp, Homo sapiens
gtagaggacagagaaaagcaaattgggccagataatgtcaaagaccttcaggcaaacggagggcagccagggagacaggcgtgtgcacagcaaggctacarcctctcctgaccctgccctcccctccctactgtggacgcaggagaaatccaacccacacagtgaattcagccaccagaacctcatcatcaacacgctctc

SEQ ID NO: 224032 - DNA, 201 bp, Homo sapiens
ctgatgttccccaggcccttcagtctgtgtccttgacctgctgcttcttcctaggagccctcgtggaccccaccttcctcttccattccattaccgccaasatcatctgctccatcatctttggaaaacgcttccactaccaagatcaagagttcctgaagacgctgaacttgttctgccagagtttcttactcatcagct

SEQ ID NO: 224033 - DNA, 201 bp, Homo sapiens
cattactgagtgatggcagacaatcacacagagataggtgacagcctgatgttccccaggcccttcagtctgtgtccttgacctgctgcttcttcctaggrgccctcgtggaccccaccttcctcttccattccattaccgccaacatcatctgctccatcatctttggaaaacgcttccactaccaagatcaagagttcc

SEQ ID NO: 224034 - DNA, 201 bp, Homo sapiens
tgtggagtagaggccatacgggaggccctggtggacaacgctgaggccttctctggccggggaaaaatcgtcatcatggacccagtctaccagggatatgrtgagggcttcagaggcactgggagggggcaggtgggggtgcatcagggaagggagtatatggggggaagaaggactcagagccttcttccaacttcttct

SEQ ID NO: 224035 - DNA, 201 bp, Homo sapiens
ctctatatccagccaggtccaggagagggagaaggagagggagggtgggggtgaggtgaacatccaggacacacgagaaaaggatgacctgacttgggggytcagaaatgcagcttatccctggaagaaatgcagagaccacgtggagtcagggacatggagacctggagggaggggaggcggtgagacagggatagagac

SEQ ID NO: 224036 - DNA, 201 bp, Homo sapiens
gtcgcaggtgggccagggacagccagtcaagggggtcttctggactgcagaaatggggctatgggtaccacctggatgagagaggggatgctggcttcctrttccgggatcactgtaggctctggactagcttccaatcaagccaattctgttggtggatgcatggacgcatgaagaatctgtccatgcgttctcccattg

SEQ ID NO: 224037 - DNA, 201 bp, Homo sapiens
ttagtagggatggggtttcaccatgttagccaggatggtctcgatctcctgatcttgtgatgtacaaatttagggagtacatatgcagttttgttatgtgygtaggttttgtaatggtcaagttagggccgttagggtatttatcacccgaacagtgtacattgtacccattaagtaatttctcatcattcacctccccct

SEQ ID NO: 224038 - DNA, 201 bp, Homo sapiens
ggacaacgctgaggccttctctggccggggaaaaatcgtcatcatggacccagtctaccagggatatggtgagggcttcagaggcactgggagggggcagstgggggtgcatcagggaagggagtatatggggggaagaaggactcagagccttcttccaacttcttctgcaaccaactcacacctcccctgcactgcagg

SEQ ID NO: 224039 - DNA, 201 bp, Homo sapiens; identical to SEQ ID NO: 41460

SEQ ID NO: 224040 - DNA, 201 bp, Homo sapiens; identical to SEQ ID NO: 41462

SEQ ID NO: 224041 - DNA, 201 bp, Homo sapiens; identical to SEQ ID NO: 41461

SEQ ID NO: 224042 - DNA, 201 bp, Homo sapiens; identical to SEQ ID NO: 41464

SEQ ID NO: 224043 - DNA, 201 bp, Homo sapiens; identical to SEQ ID NO: 41463

SEQ ID NO: 224044 - DNA, 201 bp, Homo sapiens
gtctgcagggcagaggcagatgtggcatgtctttttgtacccacagagcttgttctatggcacgcccttttctgggctttttgtatcatttcttagtacaytgtaatagattcaaaccagtcttggctgaattaaagtgagaatgagagtcatttaggatggggagaagggagctggctgcagagatggagacactggcta

SEQ ID NO: 224045 - DNA, 201 bp, Homo sapiens
gctgaacattgactacacattgacacaaaaaagggaacaacaaacagcagggcctacttgagggtaagatgggaggagggtgaggaccgaaaaactacctrtcgggtgctatgcttattacctgggtgatgaaataatgtgtacaccaaaccctcaccattgctgaagagactggcggctaaatagagcagtgggtgaaat

SEQ ID NO: 224046 - DNA, 201 bp, Homo sapiens
catgagccaccgcgcccggccagctctagctaattctcacatacgccccagcagtggcgcccagcgctgggaggctttgactagacccctccccacatacrgacacacctcttcccagcctggtttgataccctccaccccacttcccccttcccctccagcccacgtgcaggaggagatcaaccttgtggtgggacacgt

SEQ ID NO: 224047 - DNA, 201 bp, Homo sapiens; identical to SEQ ID NO: 41467

SEQ ID NO: 224048 - DNA, 201 bp, Homo sapiens
gctctagctaattctcacatacgccccagcagtggcgcccagcgctgggaggctttgactagacccctccccacatacggacacacctcttcccagcctgrtttgataccctccaccccacttcccccttcccctccagcccacgtgcaggaggagatcaaccttgtggtgggacacgtgcggctgccagcgctgaaggac

SEQ ID NO: 224049 - DNA, 201 bp, Homo sapiens
ttcccccatccctccaatctgtaccccgtctgcagggcagaggcagatgtggcatgtctttttgtacccacagagcttgttctatggcacgcccttttctrggctttttgtatcatttcttagtacattgtaatagattcaaaccagtcttggctgaattaaagtgagaatgagagtcatttaggatggggagaagggagc

SEQ ID NO: 224050 - DNA, 201 bp, Homo sapiens
tgggcccccagcagcagttgtactggtctagagtgaaggggtctccatccctggctcatatccccacccctctaccacggcagaagaaggaggacccgctragccacttccacatggataccctgctgatgaccacacataacctgctctttggcggcaccgagacggtgggcaccacgctgcgccacgccttcctggcat

SEQ ID NO: 224051 - DNA, 201 bp, Homo sapiens; identical to SEQ ID NO: 41471

SEQ ID NO: 224052 - DNA, 201 bp, Homo sapiens
gggctaaagttacagattaacagcatctcaaggcaaagtaattttcttagtacagatcaaaatggagtttcgtatgtcttccttttctacatagacacagyaacagtctgatctctctttcttttccctacagtctcaaactcccgggctcaagtgatccatccacctcagcctcccaagtgctgggattataggcatgag

SEQ ID NO: 224053 - DNA, 201 bp, Homo sapiens
caggaggagatcaaccttgtggtgggacacgtgcggctgccagcgctgaaggaccgcgcggccatgccttacacagacatggtgatccacgaggtgcagcrctttgcagacatcatccccatgaacttgccgcaccgcatcactagggacacggcctttcacggcttcctgatacccaaggtgcgctaggcctggcaaacg

SEQ ID NO: 224054 - DNA, 201 bp, Homo sapiens
cacaggccatttactggtgtcaggctgggggatggtcaggtctttcccttcccacaaggccatatctcaggctgtctcagttggaggaaaccttggacaayacccaggctttcttgggcagaggtccctgcagctttccgcagtacactgtgcccaagaatggagaatggcgatgacatttaccaagcatactgcctgtaa

SEQ ID NO: 224055 - DNA, 201 bp, Homo sapiens
cagagccttgctgtgttgccctggctggtctccaactcctgggctcaatcaatcctctcacctcggcctcccaaagtgctggggttacaggtgtgagccamcgctcccgcctccacctgcttagtcttgctttgtgcccaccgtgtccaccactgcatgctggcttcagagcccagctaacagtcctcccagaactctgcc

SEQ ID NO: 224056 - DNA, 201 bp, Homo sapiens
atgggtgaatctgtgacgtccccagctgctgtcttcctttcctcttatgttttcctctgggaatgtggggttgcagcctctaacctcatcttatctcaccrccgctccccatcctgccacccctgcagggcaccgtctgtgcctgggagagtcgctggcgcgcatggagctctttctgtacctcaccgccatcctgcagag

SEQ ID NO: 224057 - DNA, 201 bp, Homo sapiens
aaacattttccaatatgtgttggcagcttagatgtcatttgttgactcttctaccaaggacgggtgggggaaggtaataagaagccctaaagctgtgtctrgttttgtaacaagcacgtgagtccataaaaccaaatgcctgcatgagatgtaattgtccacgtgctctcccccttggaaagaggctgaaacctttgactc

SEQ ID NO: 224058 - DNA, 201 bp, Homo sapiens
gcaaaggaatccaggttacaaataagtccaagggaaggtactgtgcccagatgtgtaggtaggccagatttatgcttctctccacccaaatatctcagtgyagcaaagagtaacagagcagcattgccaccagcatagctcacctccagccacagggtggttttctcctatctcagaacagaaggaatgtatgatcgggtt

SEQ ID NO: 224059 - DNA, 201 bp, Homo sapiens
cgtgcaccaccacactcaatacactcagctaattttttattttttgtacagacagagccttgctgtgttgccctggctggtctccaactcctgggctcaakcaatcctctcacctcggcctcccaaagtgctggggttacaggtgtgagccaccgctcccgcctccacctgcttagtcttgctttgtgcccaccgtgtcca

SEQ ID NO: 224060 - DNA, 201 bp, Homo sapiens
ggcgggccttgcagtgagcagagaccgcaccactgcactccagcctgggcgacagagtgagactccatctcaaaaaaaaaaaaaaaagaaaaaaaattagscaggaaatggtggcacatgcctgtaatcccagctcctctggaggctgaggcaggagaatcacttgaatccaggagatggagcttgcagtgggccgagatc

SEQ ID NO: 224061 - DNA, 201 bp, Homo sapiens
gtagagatgggggtttcaccatgttgaccaagctggtcttgaacttgtgacctcaagcgatccaccctccttggcctcccagtgtgctgggattacaggcrtgagccaccacacccagctgaggctatgctcttaactacatttactccccttcctgccctttcccctcaatctgcagacagggtactaagaccaactggg

SEQ ID NO: 224062 - DNA, 201 bp, Homo sapiens
agcaaaggaatccaggttacaaataagtccaagggaaggtactgtgcccagatgtgtaggtaggccagatttatgcttctctccacccaaatatctcagtrtagcaaagagtaacagagcagcattgccaccagcatagctcacctccagccacagggtggttttctcctatctcagaacagaaggaatgtatgatcgggt

SEQ ID NO: 224063 - DNA, 201 bp, Homo sapiens
acacacacatacatacatacatacacacatacacacatacatacatcatacatacatacatacatcatacatacatacatacacacatacacacatacatrcacacatacatacacacacatacacatacatacacacatacacacatgcatacatacacacatacatacacacacacatacagacatacatacacacata

SEQ ID NO: 224064 - DNA, 201 bp, Homo sapiens
ccgggtgtggtggtgggcgcccatagtcccagctactcctgaggagaaacaggaaaatcacttgaacccgggagccggaggttgcggcgagccgagattgyaccattgtactccagcctcggcaacaaagcgagactctgtctcaaaaaaaataatgataataatttaacagccaggggcagttactcacacctgtaatcc

SEQ ID NO: 224065 - DNA, 201 bp, Homo sapiens
ctaacttttgtattttttagtagagatgggggtttcaccatgttgaccaagctggtcttgaacttgtgacctcaagcgatccaccctccttggcctcccartgtgctgggattacaggcgtgagccaccacacccagctgaggctatgctcttaactacatttactccccttcctgccctttcccctcaatctgcagacag

SEQ ID NO: 224066 - DNA, 201 bp, Homo sapiens; identical to SEQ ID NO: 115324

SEQ ID NO: 224067 - DNA, 201 bp, Homo sapiens
gagcaaaggaatccaggttacaaataagtccaagggaaggtactgtgcccagatgtgtaggtaggccagatttatgcttctctccacccaaatatctcagtgtagcaaagagtaacagagcagcattgccaccagcatagctcacctccagccacagggtggttttctcctatctcagaacagaaggaatgtatgatcggg

SEQ ID NO: 224068 - DNA, 201 bp, Homo sapiens
gaggctatgctttttttttttttttttgagacagtctcactctgtcacccaggctggaatgcagtggcacaatctcggctcactgaaacctctgcctcccrggttcaagtgactctcctgcctcaacctcccgagtagctaggattataggcacctaccaccacacctggctaacttttgtattttttagtagagatgggg

SEQ ID NO: 224069 - DNA, 201 bp, Homo sapiens
tgagcaaaggaatccaggttacaaataagtccaagggaaggtactgtgcccagatgtgtaggtaggccagatttatgcttctctccacccaaatatctcagtgtagcaaagagtaacagagcagcattgccaccagcatagctcacctccagccacagggtggttttctcctatctcagaacagaaggaatgtatgatcgg

SEQ ID NO: 224070 - DNA, 201 bp, Homo sapiens
agcagtggcgcccagcgctgggaggctttgactagacccctccccacatacggacacacctcttcccagcctggtttgataccctccaccccacttcccccttcccctccagcccacgtgcaggaggagatcaaccttgtggtgggacacgtgcggctgccagcgctgaaggaccgcgcggccatgccttacacagacatg

SEQ ID NO: 224071 - DNA, 201 bp, Homo sapiens
agtctcgctgtttcgcccaggctggagtgcaattgcgcgatctcagctcactgcaagcttcgcctcccgggttcaggccattctcctgcctcagcctcccragtagctggaactacaggcacccgccaccacgcccggctaattttttgtgtttttagtagagacagggtttcaccatgttagccaggaaggtctcgatct

SEQ ID NO: 224072 - DNA, 201 bp, Homo sapiens
gccccagcagtggcgcccagcgctgggaggctttgactagacccctccccacatacggacacacctcttcccagcctggtttgataccctccaccccactwcccccttcccctccagcccacgtgcaggaggagatcaaccttgtggtgggacacgtgcggctgccagcgctgaaggaccgcgcggccatgccttacacag

SEQ ID NO: 224073 - DNA, 201 bp, Homo sapiens
tgtgagcaaaggaatccaggttacaaataagtccaagggaaggtactgtgcccagatgtgtaggtaggccagatttatgcttctctccacccaaatatctcagtgtagcaaagagtaacagagcagcattgccaccagcatagctcacctccagccacagggtggttttctcctatctcagaacagaaggaatgtatgatc

SEQ ID NO: 224074 - DNA, 201 bp, Homo sapiens
aggaagatcttagggacctagaaataaaaacagcaccttcaaggcgttgagcttccctgtgcctgatgctgtgctaaggataacttttcatggagtgtgcwatgcagtcttcacaaatctgtgataaaggttctatgatcatccacattttacatgtgagcaaacagagtcagaatcattaagattcaaccactgaaagta

SEQ ID NO: 224075 - DNA, 201 bp, Homo sapiens
catgtgagcaaaggaatccaggttacaaataagtccaagggaaggtactgtgcccagatgtgtaggtaggccagatttatgcttctctccacccaaatatstcagtgtagcaaagagtaacagagcagcattgccaccagcatagctcacctccagccacagggtggttttctcctatctcagaacagaaggaatgtatga

SEQ ID NO: 224076 - DNA, 201 bp, Homo sapiens
gatccacgaggtgcagcgctttgcagacatcatccccatgaacttgccgcaccgcatcactagggacacggcctttcacggcttcctgatacccaaggtgygctaggcctggcaaacgacatcaggcaacctaagaggaggcatcccaggctcttgcagctcgcaagcagtatcccaggcactagcaatcaacaccccagg

SEQ ID NO: 224077 - DNA, 201 bp, Homo sapiens
ggggagccataaggaggacgaggaagatcttagggacctagaaataaaaacagcaccttcaaggcgttgagcttccctgtgcctgatgctgtgctaaggakaacttttcatggagtgtgcaatgcagtcttcacaaatctgtgataaaggttctatgatcatccacattttacatgtgagcaaacagagtcagaatcatta

SEQ ID NO: 224078 - DNA, 201 bp, Homo sapiens
acatgtgagcaaaggaatccaggttacaaataagtccaagggaaggtactgtgcccagatgtgtaggtaggccagatttatgcttctctccacccaaatatctcagtgtagcaaagagtaacagagcagcattgccaccagcatagctcacctccagccacagggtggttttctcctatctcagaacagaaggaatgtatg

SEQ ID NO: 224079 - DNA, 201 bp, Homo sapiens
tgtccaccacatgtcctaattgtgtgggcttggcctccaggatatcatcttcttcctgcacccttgactttcaaggaaggaacaaatatggagaataaagkggggagccataaggaggacgaggaagatcttagggacctagaaataaaaacagcaccttcaaggcgttgagcttccctgtgcctgatgctgtgctaagga

SEQ ID NO: 224080 - DNA, 201 bp, Homo sapiens
ctgtctgctactccacctccccaagctccacctctgggtataacccctgctctgcctctgatctccagccctcccacacagtccacccactcgatccaccrtccagcaagtagggtcccgaaactgctcctgaaatcccatcaggtcctggattccaggcctccctgaagccccacccacacaacccaacgcccaggccct

SEQ ID NO: 224081 - DNA, 201 bp, Homo sapiens
cacattcaactcattcttttaactttttatagagagggagtcttgctatgttgcccaggctagtctcaaactcctgtgctcaagcaatcctccttcctcarcctcccaatatattctgggattacaggtgtgacccaccacacccagcctacattatcttttcttactcagtccctcctgcctccctctaaaaaggatccc

SEQ ID NO: 224082 - DNA, 201 bp, Homo sapiens
gagcagcagtggatctaagaacaggtgaatgtccaccacatgtcctaattgtgtgggcttggcctccaggatatcatcttcttcctgcacccttgactttyaaggaaggaacaaatatggagaataaaggggggagccataaggaggacgaggaagatcttagggacctagaaataaaaacagcaccttcaaggcgttgag

SEQ ID NO: 224083 - DNA, 201 bp, Homo sapiens; identical to SEQ ID NO: 41468

SEQ ID NO: 224084 - DNA, 201 bp, Homo sapiens
cctgtgcctgatgctgtgctaaggataacttttcatggagtgtgcaatgcagtcttcacaaatctgtgataaaggttctatgatcatccacattttacatrtgagcaaacagagtcagaatcattaagattcaaccactgaaagtacctagcacagatgtagtagtcagatctgtttgactctagaggctatgcttttttt

SEQ ID NO: 224085 - DNA, 201 bp, Homo sapiens
acatttgccgggtccggagccgacggggtatcctttttctggctggtgtgtgtgtggaggggcgtgcttcagtggttcaacacgctgtatctcccttagtyaccggtttcatagtaaatgattaaagctcgtgctacggaaggcgtggggtggtggtggtgggggggaccacgcaataagccagggttcctgctttccagc

SEQ ID NO: 224086 - DNA, 201 bp, Homo sapiens
atgccatttgcctaaagctgtggccccttcccagaagagagggacagggaaatgctgtttggggggctgccaggcgggccagctttagcctgcaaatgacrggtgtcgtttgtgtcccatgggggctacctcaggcctttcctttctcccttcaaggattttcttattcaggggaagcctacctctgcaaaactgtttgtc

SEQ ID NO: 224087 - DNA, 201 bp, Homo sapiens; identical to SEQ ID NO: 41472

SEQ ID NO: 224088 - DNA, 201 bp, Homo sapiens
caggggccttagtgatcaccagtgggtctgtctgtcccccaacactctgtctcagactccggcctttgcatgtttcctgagacctcttgctcccagatccyctgaggaggagacaggttggcagtggaaagagtgtgggttttggagcctccagatgaacttcgaatcctagttctacctctttgtagctgtgagacatcg

SEQ ID NO: 224089 - DNA, 201 bp, Homo sapiens
gcctcagccttccgaatagctgggattacaggtgtgcaccaccacggccagataatttttgtatttttagtagagatggtgtttcaccacattggccaggstgatcttggactcctgacctcaagagtcccacctcggcctcccaaagtgctgggattacaggtgtgggccatcatgcccggccactaactgccaattatt

SEQ ID NO: 224090 - DNA, 201 bp, Homo sapiens
ggcacataggtatggggcaggccatcagttttgtctttacacaggcccaggggccttagtgatcaccagtgggtctgtctgtcccccaacactctgtctcrgactccggcctttgcatgtttcctgagacctcttgctcccagatcccctgaggaggagacaggttggcagtggaaagagtgtgggttttggagcctccag

SEQ ID NO: 224091 - DNA, 201 bp, Homo sapiens
tgtttggagcgatgggaagtggaaagagctctccctctctgtccagacaggccagtggggagctgcctggcaagctgctctctagctgtgggctctaggcygatctcttaatccttggcaggaaggcagaacttgataccctggagagggaaggactgaagcccagtttattcaggtcccagaatatccacactcaggagg

SEQ ID NO: 224092 - DNA, 201 bp, Homo sapiens
agatagagaactgctggcagttcaaggtccctgagaccaccccctttcaccaaaatggcccaggtcagtacagccagttctcagctctcctgggcccccaytggttgcctgccctgtagtcgttattccttctaccttcattggaggatgtggagggcaaggggcagagcttgctcaatcaactaagactgacttttaagt

SEQ ID NO: 224093 - DNA, 201 bp, Homo sapiens; identical to SEQ ID NO: 41478

SEQ ID NO: 224094 - DNA, 201 bp, Homo sapiens
tcatttaatccttgcatgaactcagtgaggtaggtctgtttcccctgttacacagaagagacagtggaggctgggagatgtcagataattcgcccaagatsctgcaggtaataaatggcagagttgggtttcagtccaaagcctgactcctgggccgagactcttacacctttgctacattgccagtgatattttcctaaa

SEQ ID NO: 224095 - DNA, 201 bp, Homo sapiens
taagtatttaaggtgatagatgttaattatgttgatttaatcatttcactcgtgtgtgtgtgtatatgtatatatagagagaaaatattgctttgtacctyatataaaattataatttgtccatttataatatttaataataaaagtaaattattagggacgtacttagagctacaaagatgctgaattgtttataatggc

SEQ ID NO: 224096 - DNA, 201 bp, Homo sapiens
tggatggcagaaaaatgggttaacatccttagtatacaggaacctcttgcatatgagttaatcagaagcagccacagataccaatagaaaaatgggctaayaatgaaaaattcaccccccaaaatgcagattgccattgaagataggaaatatgttcaaacttattagtagtcaaatgtaagctcaatttgcacctataga

SEQ ID NO: 224097 - DNA, 201 bp, Homo sapiens
ttcactctcgagaatgtaaataagtagaattttgtgtcacataaaatagtctatgcaaaaaaggatattcactgccttttgtgatagagactaaaataaccatcaggagtatagctgttctggggactctgaagcaacagtgtaaaatgatatggtagtctaacgtattctgatttagaaagatgtccaagacaaagaaag

SEQ ID NO: 224098 - DNA, 201 bp, Homo sapiens
tttattttctaaatttgctattattagacttctaattactcagctggatagaagcagaaaggtctcattcttgtactaactgccgatttttttttttttttgagacggagtttagctctgttgcccaggctgtagtgcagtggtacaatctctgctcactgcagcctccacctcctgggttcaagtgattctcctgcctca

SEQ ID NO: 224099 - DNA, 201 bp, Homo sapiens
ctgtaaggcaagatcatacctttgcacacttgtggacctgtgtgtatttctttcctctttttttctctttttcttaatggagacagggtctccctatgttkcccaggctggtctcaaactgggctcaagggatcctcctgccttggcttcccaaagtgctaggattataggcgtgggccaccacgcccagcccctgtgtgt

SEQ ID NO: 224100 - DNA, 201 bp, Homo sapiens
tacaggaaaaagagtaagagaaggctgattaggaatttcactgttctcagccagatgcagtgacctgtaagcccagaactttgggaggctgaggcaggcgsatcactttgaactcaggagttcgagactagcctgggcaacgtggcgaaaccccgctctgcaaaaaaatacaaaaattagctaggcatgatggcacatgcc

SEQ ID NO: 224101 - DNA, 201 bp, Homo sapiens
cctcactgccctggagaaagagaggaatgacaccacctgtcccgttgctgactctaaggcttttatgagaatacacaaaagagaatagatacttgaaaccrctggaatgacagtttatctggtgattttcttataaagttctattgttactagtttcctcctctatctgtactgttgcttctctttgattttgtctcactg

SEQ ID NO: 224102 - DNA, 201 bp, Homo sapiens
ttgtctttctgttgctggcttattttacttaatcatctccagttctatccatgttgttgcaaatgacaggatctcattgtgtgtgtgtgttttttttttttaatttataaatttttaaacccccagccccacaaaacacacccccatataccctcatttctagttctttacacatggttgagattatccgtaattactgga

SEQ ID NO: 224103 - DNA, 201 bp, Homo sapiens
caacctccacctcctgggttcaagcaattctcctgtctcagcctcccaagtagctgggactacaggtgcccgccaccatgcccagctaattttggtattttagtagagacagggtttcaccatattggccaggctggtcccgaacttctgaccttgtgatccgcccacttcagcctcccaaagtgctgggattacaggcgt

SEQ ID NO: 224104 - DNA, 201 bp, Homo sapiens
taataaatggcagagttgggtttcagtccaaagcctgactcctgggccgagactcttacacctttgctacattgccagtgatattttcctaaaaagtcacrtatggaaaaaagcatcggaaacacgtgtcactactttcaacccttcttcattacttaaacagttgcactgtgccaaatcagctctgtcttaagactcatt

SEQ ID NO: 224105 - DNA, 201 bp, Homo sapiens; identical to SEQ ID NO: 41498

SEQ ID NO: 224106 - DNA, 201 bp, Homo sapiens
tcacttgagcccaggaggtggaggttgcagtgagccgagatagtgccattgcactccagcctggatgacagagtgagaccctgtctcaaaataaatgaatraataaataatggtggactgcgtatttccaaattgctaaaagagtaaattttaaatgttctcaccacacaaaatgataagtatttaaggtgatagatgtta

SEQ ID NO: 224107 - DNA, 201 bp, Homo sapiens
ggtacttagccaattggtaagaagctaaagagtctgccatgcagtccaacagccatgctgactaaactcaccagttctttcattgttttgatgttgaacasctgtctttaatacacttttctgtactcctgagaatgttctagttaccatgctgaaatgtttaaatacctacattttaaaattagaactaaaatataattg

SEQ ID NO: 224108 - DNA, 201 bp, Homo sapiens
tggccctggaggaatggggaagggactggacacgaggagggacagagcaggcagatgggggctctgcttccttcggacagggacttcgtccaacaggcgaragctttgggtattcatccactgcagaaagtgagaagtccaactgaggctgaggcaccccatgacctcctcacctctgactccggccctctagtggtcgag

SEQ ID NO: 224109 - DNA, 201 bp, Homo sapiens
acacaggatactatgtgatgcatatgaaccattttatatgatgcagggtacagtatgcacaggggataatttattttctaaatttgctattattagacttytaattactcagctggatagaagcagaaaggtctcattcttgtactaactgccgatttttttttttttttgagacggagtttagctctgttgcccaggctg

SEQ ID NO: 224110 - DNA, 201 bp, Homo sapiens
ggtgtcagcgcagagtgcacccccgccccaatgcccagtgttcaatgctgcattcttggccagtgaacaggacctggccagatgggtgtgttccggcatcsccaggcagaggggcaggggttgccgcctcgagcacaggccaagtttcagagcactagtgtgtatcagttctccgggattacaacggaatacctttgagga

SEQ ID NO: 224111 - DNA, 201 bp, Homo sapiens
agctgtctttaatacacttttctgtactcctgagaatgttctagttaccatgctgaaatgtttaaatacctacattttaaaattagaactaaaatataatkggtttgttaattaggaggacactggagagttggctgtgagaagttgtgactttgataagtcgatcttttaaaagtaagggcagttgctctacatttgact

SEQ ID NO: 224112 - DNA, 201 bp, Homo sapiens
tgtgtttttttttttttttttttttttttttgagacagggtctcactctgtcacccaggcatgttcatggctcactgcaggcccaacctcttgagctcaastgatccacccacctgagcctcctgagtagctgggactgcaggcatgtgccaccatgcccagctaatttttgtatttttagtagagacaggatttcaccac

SEQ ID NO: 224113 - DNA, 201 bp, Homo sapiens
gtcatatgttttatgtctctcttcacgtagtcagaagctgctttagatttgggaaggctggggcttatctgttaccccttgttctaggttgtttctcattstaggttgttacagaggaaaactctagtaggttttgataaatgactatttcttacatcaaagtactatcctgcattatttgggattgtaatacattcctat

SEQ ID NO: 224114 - DNA, 201 bp, Homo sapiens
gtctaggtgggagggtgtgtctgcgacgggcttcccctggattaggtctttatttcttgtaacaagtcagcaaattaggaaaacaaacaaaacaaacagasccggataagccccccccatgtgaacccctgggctgtgaaagtttttgcctgtgtgggtcgttctgtgtggcgcctggtgtgtgggtcccaactcctgttg

SEQ ID NO: 224115 - DNA, 201 bp, Homo sapiens
gtaaaaactgatattttcatttcacaaagttaaatataaaatgaactcaaaagtgtcaaaatgactgcacaatagaaatgaggtttcaggccaggcgtggkggctcatgcctgtaatcccagcactttgggaggccaagggaggcggatcacagggtcaagagattgagaccctcctggctaacacggtgaacacccgttt

SEQ ID NO: 224116 - DNA, 201 bp, Homo sapiens
attcatgcgattataaaaggtgttccatggtgagcaggtctatgcaaacctaccttcaaaggccaagggagctgagaggctgaagaaagagactgacaaakccagtttctcagaaagaaatatttaatagagacttagaaacagaaacgatgtctaggtaggccaagagatggtggattctcacaaccaacctccagaaag

SEQ ID NO: 224117 - DNA, 201 bp, Homo sapiens
cctgtgatgtttcaaacaaaataaagttcaatctttctccttcaatgtggactgaaattaccttcctagaaaattcattaaagtctgagggccgtggctcrtgcctataatcccaacattttagggggctgaggcaggataattgcttgagcccaggagttcgatactagcccaggcaacagagcaagacccctgtctcta

SEQ ID NO: 224118 - DNA, 201 bp, Homo sapiens
aagacataaaccaatagctcacaagagaagaaaaacaaatagccaatgaaaacacactctgtaaagacatgtgaataaaaactttgtttttcaacctatcmagttgaaaaggagaaaggaaagtaaatactctctgccccatttttgggaatgaaaactgaaacaaccagtttggaggttaatttgccaaagactctttgg

SEQ ID NO: 224119 - DNA, 201 bp, Homo sapiens
gaggaacacaaaattccatccgatcgggttcttcccccgtaggagtttacagtccagttggaagatgaatagagctggccagaatgcaagtagaaaatggratgtgcatataaatcatgaaatgtgagtgaggagtgttagaaaggtgcccaactacccggctgtttgacctgagcttcccagataggcaaggtttctgtg

SEQ ID NO: 224120 - DNA, 201 bp, Homo sapiens
gggctgtgttactcaaacacccatcttgccagtaattacttctttcctggctgacctctgctttctgtgcaagtgttctcccctccctttattctcctgcscctgctcttttacatttttttctttctttctttttttttttttttcaaatttgttccaatctagaaaacccatcctctttcaaatggcataatggttggg

SEQ ID NO: 224121 - DNA, 201 bp, Homo sapiens
atgggtttggagttccccattgcttatcaagagctttttaattgctttggttctttagtttttctttttgcaaaaatccttcctgtcactttaactaaaaaccaaagatttgttttctattgataagcagactagagaaaaactgccttattttcagaagcatgtcttcattcaaagcttaggcttcaatagaaattcaga

SEQ ID NO: 224122 - DNA, 201 bp, Homo sapiens; identical to SEQ ID NO: 41480

SEQ ID NO: 224123 - DNA, 201 bp, Homo sapiens
catgcagaatttgacagacaagtagggtatgtaggcttcagttggttctactttcagagagttaagatggaatgaggcagctcatggcactacaggtcagktgccttctctccaaaatgttcactcatgcatgtgggcactcattgtatttgaataacagcaacagtgcctccctcagtttggaacctctagtccacttgc

SEQ ID NO: 224124 - DNA, 201 bp, Homo sapiens
gtaatctcagtactttgggaggccaaggctggaggatcatttgaggtcaggagttcaagacgagcctggacaacacaacaagacccccaattctactaaawttttttttttaattagccagatgtggtaatgcatgcctctgtagtcccagctactcaggaggctgaggtgggaggatcacttgagtgcaggaattcaaag

SEQ ID NO: 224125 - DNA, 201 bp, Homo sapiens; identical to SEQ ID NO: 41481

SEQ ID NO: 224126 - DNA, 201 bp, Homo sapiens; identical to SEQ ID NO: 41482

SEQ ID NO: 224127 - DNA, 201 bp, Homo sapiens; identical to SEQ ID NO: 41483

SEQ ID NO: 224128 - DNA, 201 bp, Homo sapiens
tatctcatttaatccttgcatgaactcagtgaggtaggtctgtttcccctgttacacagaagagacagtggaggctgggagatgtcagataattcgcccamgatcctgcaggtaataaatggcagagttgggtttcagtccaaagcctgactcctgggccgagactcttacacctttgctacattgccagtgatattttcc

SEQ ID NO: 224129 - DNA, 201 bp, Homo sapiens; identical to SEQ ID NO: 41484

SEQ ID NO: 224130 - DNA, 201 bp, Homo sapiens
aaaaaggtgggaagcattgctttaagcccctcggggtcagaggccccatggagaattgggcttttgcggttttgttgtgcagtttggggtttcaagagatkagatctaatggtatgaaaacaaagccaacaaagtagctctccacgggggtgtccgtttccagaaagagcacatgtgttggcagctgtgggtgctacagag

SEQ ID NO: 224131 - DNA, 201 bp, Homo sapiens; identical to SEQ ID NO: 41485

SEQ ID NO: 224132 - DNA, 201 bp, Homo sapiens
aagaggtgacagggaggagctttttggaagatctaggcttgcaggaagagatgggggccagtagagtactggttgccagtgtggacccccacactggactsccagggcccaacttcagctctgccacttcccagcaaggggcttaaccttcggaaacctgtttccttatctgtcagatggagattatgatagtacctcctt

SEQ ID NO: 224133 - DNA, 201 bp, Homo sapiens
gcaggtgactgctttagtgtgtgtatttgtgttaggggttgatcctgagaactttcaggtttctggcttgtgcaccctgattgagtggtgatatcttctastgagatggtgaatacaggaggagttgcagttttgattgggaagaaatgaatttagttcagaaatgttgaatttgagatgcttctggttcagctaaaagga

SEQ ID NO: 224134 - DNA, 201 bp, Homo sapiens
caaagggtgattgttgtagatgacctttggccttctagagcaggctgctttccacttgacctctgctgctattagcagacaaagagagagaatgggagagrgagtgtattggacttcagtccccatcatgtgcactgcctggggacatcccagcacactcagagcaccactgccaaagggaacacttcccctctgttggcc

SEQ ID NO: 224135 - DNA, 201 bp, Homo sapiens
cttacccaatgaccgatgtcttccttatatgcttctcggtggtaaatccagcctcatttcaaaatgtgaaagaggagtgggtaccggaacttaaggaataygcaccaaatgtaccctttttattaataggaactcaggtatgtctggtttgattttctgcattttagaataagctctttggtctgtcgtagaggctgctct

SEQ ID NO: 224136 - DNA, 201 bp, Homo sapiens
gcatgtgccaccatgcccagctaatttttgtatttttagtagagacaggatttcaccacattgggaagactggtcttgaactcctggactcaagcaatctycccacctcggcctcccaaagtgctgggattacaggtgtgagccaccgcacctggccatgtgtgatatttttaaagtaaggttgtcattatcacatatcga

SEQ ID NO: 224137 - DNA, 201 bp, Homo sapiens; identical to SEQ ID NO: 41474

SEQ ID NO: 224138 - DNA, 201 bp, Homo sapiens
ggtgttggatggcacctctacagaggagagaacttagatccagagtcacttgaagttgaccccacttacaaaaccagggctttccatatatggccgtaatyactctttttagtggaggatcataagatatagaccaagcaggatgaacatattagtaaggctcaaatactactgttttcacccaatgctggacaccattgg

SEQ ID NO: 224139 - DNA, 201 bp, Homo sapiens; identical to SEQ ID NO: 41475

SEQ ID NO: 224140 - DNA, 201 bp, Homo sapiens; identical to SEQ ID NO: 41476

SEQ ID NO: 224141 - DNA, 201 bp, Homo sapiens; identical to SEQ ID NO: 41477

SEQ ID NO: 224142 - DNA, 201 bp, Homo sapiens; identical to SEQ ID NO: 41479

SEQ ID NO: 224143 - DNA, 201 bp, Homo sapiens
tattaaatacataattcagctgcactgctataaagatttctccaaattatggtaatctgagatggctttatataattattttgtttaaagaaaataggaarcttagaacaaagacattcatgtaaaggaagtcattcacaagtgtttgccaccaaaatgacaagggcccaagcactggaggccagcctgggcaagatagtg

SEQ ID NO: 224144 - DNA, 201 bp, Homo sapiens
tcaatttggttatccagctgtttactcaacaagtccatctacatggctgagtatctcaaaattaacatgtctaagatatgattcttcttttaccctccaarcctgtcctcccagttactcaggtcagaagccctcagctgggtgcagtggctcacacctgtaatcccagcactttgggagcccgaggcgggcagaattacc

SEQ ID NO: 224145 - DNA, 201 bp, Homo sapiens
tctggaaggacatatactagtattttaaaatcccctctggggttatgaacatggatgatgaatgtattctttttgcatagctgtattttataattttcttyataatgatgtgtttatgtcatgccaattgtataaacatgatcttatatatttgtgattttttttctccctcccagataggagcatgctgctatgtggaat

SEQ ID NO: 224146 - DNA, 201 bp, Homo sapiens
tagaattggcaaaaaatgagaaattaattataatacccgtgtagtaaaatggacactctgttgtactattggtcattgaatcaaagcagtcttgacagtaygcaaaatccttaaaatcatggacacttttgatcaagcaattccatatgtaagagtttatcctaagcaaatcattaggatgttggtcaaagtgtacagtgt

SEQ ID NO: 224147 - DNA, 201 bp, Homo sapiens
tgccttggctccattagtgtgctatgtggcctagggctgtgcgcccagtaggctctgcaggtatttcttgatgcggcctaaacaccaagctatttctctcscgcatattaaggggctcgatagacaggacgcctggacagggctctgttcattgtggctgaggttagcactcctctgggtggtgacagaccctgtccctga

SEQ ID NO: 224148 - DNA, 201 bp, Homo sapiens
tctcaaagttttggaattataggcatgagccactgtacctgtctagtttgttttttgatggtatatcatctctgatttctctgaggatattaatgatagtrtttcaaattttttgtctctctgtgtaatctctaattttgatctctttcaggtagttcctcaaatgtctatctgtgtttacaagagtggcattgagcacat

SEQ ID NO: 224149 - DNA, 201 bp, Homo sapiens; identical to SEQ ID NO: 41502

SEQ ID NO: 224150 - DNA, 201 bp, Homo sapiens
acctccagcaaactccaacagacctgcagctgtgagtcctgactgttagaaggaaaactaacaaacagaaaggacatccacaccaaaaccccatctgtacrtcaccatcatcaaagaccaaaggtagataaaaccacaaagatagggagaaaccagagcagaaaagctgaaaattctaaaaatcacagcacctcttctcct

SEQ ID NO: 224151 - DNA, 201 bp, Homo sapiens; identical to SEQ ID NO: 41565

SEQ ID NO: 224152 - DNA, 201 bp, Homo sapiens
actttgggaggcgaaggcaggcaagtcacttgaggtcaggagttcgagaccagcctggccaacatggtgaaaccccatctctaccaaataatataaaaagyaggtggctgtggtggtgcgcaactgtaattccagctacttgggaggctgaggcaggagaattgcttgaacccaggaagtggaggttagagtgagctgaga

SEQ ID NO: 224153 - DNA, 201 bp, Homo sapiens
aactcctaaatacatatgcacctggcactcccagccggccacagcctgacacgccgcgcggccccccagtctcccgcggccgctcccccaggcatggcacrgggcctcgcctcactatggcagcagcacggcacagcacgctcgacttcatgctcagtgccaaagctgatggtgagaccattctaaaaggcctccagtcca

SEQ ID NO: 224154 - DNA, 201 bp, Homo sapiens
tcatgtcctttgtagggacatggatgaagctggaaaccatcattctgagcaaactgtcgcaaggacagaaaaccaaacaccacatgtcctcactcataggygggaattgaacaataagaacacttggacacagggtggtgaacatctcacactgggacctgtcatggggtggagggaggtgagagggatagcattaggaga

SEQ ID NO: 224155 - DNA, 201 bp, Homo sapiens
aatatttagtttcttgttagctggtcttcagttgacttggttctctatccagttacagccatggtgcatgttgcatgcagtcgtctatacattatttaaaygggcttaaatattaaatgtgttacccaccaataataaaatagacccttatgaaaactataaaaacaaaacacacaaaaaaagccattgggtacatttgtt

SEQ ID NO: 224156 - DNA, 201 bp, Homo sapiens
tgggtctcctgaatacagcacactgatgggtcttgactctttatccaatttgccagtctgtgtcttttaattggagcatttagcccatttaaatttaaggktaatattgttaatatttacatttaagtttaattatgtgtgaatttgatcctgtcattatgatgttagttggttattttgcttgttagttgatgcagtttc

SEQ ID NO: 224157 - DNA, 201 bp, Homo sapiens
agttctgctctgagcttagttatttcttgccttctgctagcttttgaatttgtttgctcttgcttctctagttcttttaattgtgatgttagggtgtcaaytttagatctttcctgctttcttttgtgggcatttagtgctatacatttccctccacacactgcctttaaatgtgtcccagagattctggtatgttgtgtc

SEQ ID NO: 224158 - DNA, 201 bp, Homo sapiens
gtgatatcgcctttatcatgttttattgcatctatttggttcttctctcttttcttctttattagtcttgctagtggtctatcaattttgttgatcttttmaaaaaaccagctcctggattcattgatgttttcaagggtttttggtgtctccatctacttcagttctgctctgagcttagttatttcttgccttctgcta

SEQ ID NO: 224159 - DNA, 201 bp, Homo sapiens
gtcatcatggcccgttctcaatgagctgttgggtacacctcccagacggggtggtggccaggcagaggggctcctcacttcccagaaggggcggccgggcrgaggcaccccccacctccctcccagagggggcggctggccgggcgggggctgaccccccacctccctcccggatggggaggctggccgggcgggggctga

SEQ ID NO: 224160 - DNA, 201 bp, Homo sapiens
cagaggggcacccagctgtatgaggtgtcagttggcccctactgggagatgtctcccagttagactacataggggtcagggacccacttgagggggcagtytgtccattctcagagctcaaacactgtgctgggagaaccactgctctcttcagagctgtcagacagggatgtttaagtctgcagaagtttctgctgcctt

SEQ ID NO: 224161 - DNA, 201 bp, Homo sapiens
cgggatgtccgagtggccaatgcctcagctgctgaagattcagcctttcagagagctgtgctgatggagaagccagatgtggtagtggggaccccatctcrcatattaagccacttgcagcaagacagcttgaaactccgtgactccctggagcttctggtggtggacaaggctgatcttttttccttggctttgaggaag

SEQ ID NO: 224162 - DNA, 201 bp, Homo sapiens
gaggaccctgcagccttccacagtgtttgtgtccctgggtacttgagattagggagtggtgatgactcttaatgagcatgccgccttcaagcatctgtttracaaagcacatcttgcaccgcccttaatccatttaaccctgagtggacacagcacatgtttcagagagcacagggttgggggtaaggtcatagatcaaca

SEQ ID NO: 224163 - DNA, 201 bp, Homo sapiens
tttcagcttttctgctctgatttctccccatctttgtggttttatctacctttggtctttgatgatggtgaagtacagatagggttttggcatggatgtcytttttgttgatgttgatgctattcctttctgtttgttagttttcctcctaacagtcaagtccctcagctgcaggtctgttggagtttgctggaggtccac

SEQ ID NO: 224164 - DNA, 201 bp, Homo sapiens
gagcgcaaggctggtctcgaactccagacctcaagttatccgcctgcctcggcctcccaaagtgctaggattacaggtgtgagctaccacacctggccctmtgcatgtattttaaagtagtaatgcatgcaggaacatacacaaacacgcactaatggacagtctgaggagcacagagccagtagagaaacttgtcaagga

SEQ ID NO: 224165 - DNA, 201 bp, Homo sapiens
ggtgctgccccccacctccctcccggatcgggcggctggccggcagggggctaacatttaagtctttaatccatcttaaattaatttttgtacaaggtgtyaggaagggatccagtttcagctttctacatatggttagccatatgtagaaatggccatctacaattggccagcaccatttattaaacagggaatcctttc

SEQ ID NO: 224166 - DNA, 201 bp, Homo sapiens
tcctcttacctcaactgcaaagaagccttcctctttcactactcctcctcagcacagaccctttacgggtgtcaggctgggggatggtaaggtctttcctytcccatgaggccatatctcaggctgtctcagtgggggaaaaccttggacaatacccaggctttcttgggcagaggtccctgcggctttccgcagtgcatt

SEQ ID NO: 224167 - DNA, 201 bp, Homo sapiens
gtggacacagcacatgtttcagagagcacagggttgggggtaaggtcatagatcaacagcatcccaaggcagaagaatttttcttagtacagaacaaaatkaagtctcccatgtctactcctttctacacagacacagcaacaatctgatttctctatcttttccccacctttcccccttttctattccacaaaactgcca

SEQ ID NO: 224168 - DNA, 201 bp, Homo sapiens
ttatatatacatttatagaattatatgtaatatttatatataatatatatttatatatgtacatatatattgtatatatatgctatatatatatatatatatttattttttttttttttttttttttttttgtagagactggatttcgccatgtcgctggtgctggtcttgaacttcctggactcaagcaatccacctgcc

SEQ ID NO: 224169 - DNA, 201 bp, Homo sapiens
taacctttttctttgtgtcagacattattataggtactgtggatccaaggccaggtgcagtggctcatgcctgtaatgccagcactttgggaggccgaggygggaggatcacctgaggtcaggagttcaagaccagcctgaccaacatggagaaacctcgtctctactaaaaatacaaaaatttgctgggcgtggttgtgg

SEQ ID NO: 224170 - DNA, 201 bp, Homo sapiens
gtgtgcacatatgtttcatttctcttgggtatatacctaggagtagaattattgcatcatatggtaactctatgtttaactttttttttttttttttttttaaagacggagtctcgctctgttgccaggctggagtgcagtggcgcagtctcagctcattgcaaccttcacctcccaggttcaagcgatattcctgcctca

SEQ ID NO: 224171 - DNA, 201 bp, Homo sapiens
gcatgcgccaccacgcctggctaattttttgtatttttagtagagacggggtttcaccgtgttagccaggatggtctcgatctcctgaccttgtgatccgyccgcctcggcctcccaaagtgctgggattacaggtgtgagccagcgcgcctggcccaagacctagcttttaaaaaatcactttctctatttctctgttga

SEQ ID NO: 224172 - DNA, 201 bp, Homo sapiens
gacggggtttcatcatgttggccaggatggtcttgatctcctgaccttgtgatctgcccgcctcggcctcccaaagtgctgggattacaggcgtgagccaycgcgcccggcccagtcttgattttttacttcccaatgttatttttacattaccattgctgccccaatccagagaagagtttcaaaaatgatttcagcaat

SEQ ID NO: 224173 - DNA, 201 bp, Homo sapiens
ggattacaggcatgcgccaccacgcctggctaattttttgtatttttagtagagacggggtttcaccgtgttagccaggatggtctcgatctcctgacctkgtgatccgtccgcctcggcctcccaaagtgctgggattacaggtgtgagccagcgcgcctggcccaagacctagcttttaaaaaatcactttctctattt

SEQ ID NO: 224174 - DNA, 201 bp, Homo sapiens
tggctgcgctgttgctgaggtgacttcagtgggactgggagttggtgcctgcggccctccggagatctgaactggcccctcacgttttgctgataactgtytatcctgtgcctgggcagggaaaggacccatgggtgtggaggccaagcgctcggggatcctagagaccccttttcccgtcccccccagccgctccggtgc

SEQ ID NO: 224175 - DNA, 201 bp, Homo sapiens; identical to SEQ ID NO: 41569

SEQ ID NO: 224176 - DNA, 201 bp, Homo sapiens
tcttgttacagtcctagtgagaaacgaagaggatatagactatagcaatggattggaatgaattttcctagctgttaatgataggattgggtgatgccatcatatggggggggtggtgaaagaaaagaaatcaaggatgacttaggttatagtttggtagttgggtggtaataatcattaaccagaacttttgtatacaaa

SEQ ID NO: 224177 - DNA, 201 bp, Homo sapiens
aacacttgaaatctattcttagtgattttcaagtatgcaatgccttggttttgtgtgtgtgtgtgtgtgtggtttttttttttttttttttttttttttttgagacagagtctcaccctgtcgcccaggctggagtgcagtggcgcaatctcagctcactgtaacctctgcctcctgggttcaagcgattctcctggctca

SEQ ID NO: 224178 - DNA, 201 bp, Homo sapiens
agctgggattacaggcatgcgccaccacgcctggctaattttttgtatttttagtagagacggggtttcaccgtgttagccaggatggtctcgatctcctraccttgtgatccgtccgcctcggcctcccaaagtgctgggattacaggtgtgagccagcgcgcctggcccaagacctagcttttaaaaaatcactttctc

SEQ ID NO: 224179 - DNA, 201 bp, Homo sapiens
ggattataggcatgagccatcacgcccagtccctgtatttgttttctattgctactataacaagtatcacaaacttagtggcttaaaataacacagatgtrttgtcttaccattctttaggttagaagtacaacacaggtctcattaggctaaaattaagttgtttgcaggggctgcattcttttccagaggctccttgcc

SEQ ID NO: 224180 - DNA, 201 bp, Homo sapiens
tgatagttgacttgccagaagatctaatgggggagtgaggagtgaaagagtaggatgttatagggtctgtggcattctagggaatatccctgcctactacygctacccagtaggactcactctctataaaacattgtccttatttaagcaaaacaactctttgtggaatctgcttgactcctaatctcctagttagaagca

SEQ ID NO: 224181 - DNA, 201 bp, Homo sapiens
atcagctgatcagcttcctctgttcatattttggctcaggcagagacttgccctatatttgtctttgtctcaatatgggggtaagagaggggaggttttayaaaattgcagaacttagagcttttctgccctggttcttgcctgtgatggtaatctttttgttgagggaagtgaagaacctaagggtccttaagtctgctt

SEQ ID NO: 224182 - DNA, 201 bp, Homo sapiens
gagagggaggacatttccattaatgacttcctattccacagaacaaagctctgtaaagaaaatcagctgatcagcttcctctgttcatattttggctcagrcagagacttgccctatatttgtctttgtctcaatatgggggtaagagaggggaggttttataaaattgcagaacttagagcttttctgccctggttcttg

SEQ ID NO: 224183 - DNA, 201 bp, Homo sapiens
atgaggttttgccatgttgtccaggctggtctcaaactcctggccataagtgatccacccacctcggcctcccaaagtgctgggattataggcatgagccrtcacgcccagtccctgtatttgttttctattgctactataacaagtatcacaaacttagtggcttaaaataacacagatgtattgtcttaccattcttta

SEQ ID NO: 224184 - DNA, 201 bp, Homo sapiens
ggaaggctgagaatttcccaaatcattaagtcctgtttttttgtttgtttgtttgttttatttaagagacagggtttcactgtgccacccaggctggagtrtagtagtggtgtgatcatagctcgttgtaaccttgaactcctggactcaagtgatcttcctgactcagcctcctgagtagctgggactacaggtgcatgc

SEQ ID NO: 224185 - DNA, 201 bp, Homo sapiens
ttttttttttttgagagagaatttcttgttgcccaggcttgagtgcgatggcgcaatcttggctcaccgcaacctctgcctcctgggttcaagtgattctmctgcctcagtctcccgagtagctgggattacaggcgcccgccaccacatctggctaatttgtatttttagtagagacgaggtttctccatgttggtcagg

SEQ ID NO: 224186 - DNA, 201 bp, Homo sapiens
cacaagtttttaataacatgttcctaatttcctcctgagcctttactagctgaattaacattcatattttcctttttgaaatacaatttgtataccatacsgttcacacattgaaagcatacagtttagtggcttttgttaaatgcagagttgttcagccatcaccacaattttagaatattttctttttctttctttttt

SEQ ID NO: 224187 - DNA, 201 bp, Homo sapiens
aaagaaacactacatttcttagccatcaccaccaatcgtttgtccctcccagctctagacaatcagttatttactttccatcttataaacttacctattcygaacatttcatttaaatgtagtgataaaatatgtggtcctttgtgactggcttcttttacttaccataatgttttcagcgttcatccatgttttagcata

SEQ ID NO: 224188 - DNA, 201 bp, Homo sapiens
gaatcatgctgagaggagatatctattcctttaggtagaattactttctgagacaggaactgttaatgtcctatttactgaaattccttttttttttttttgctttgtccacagatgtgggacctaggaaaaggcctgaagattccccagctataccagtctggagtggttgtcctggttcttactgtgttgtcctctatg

SEQ ID NO: 224189 - DNA, 201 bp, Homo sapiens
gtggtgggcacctgtcatccccactactcaggaggctgaagcaggagactcgcttgaacttgggaggtggaggttgcagtgagccaagattgcaccactayactccagcctgggtgacagaatgagactctgtctcaagaaaaaaagaaaacaaaaatcttctccatttcaaaatggtttagaattgtatgaggtgccagg

SEQ ID NO: 224190 - DNA, 201 bp, Homo sapiens
ggcatgatcatggcttactgcagccttgacttcccaggcttaagtgatcctcccaggtcagcctcccaagtacctgggactataggcatgtaccaccatgsctgactaatttttaaatattttctagaaatggagtttggccatgttgctcaggctggctttgagctcctgggctcaagctgtcctcccacttcggcctcc

SEQ ID NO: 224191 - DNA, 201 bp, Homo sapiens
agcttaaaacatcaacaaaagttccagactcataaaaacatatgcattaaatatgtacaattttttcatgtttcaattatacccaataaaggtattttttwaaaaaaatcaaagatagcccaaatgtgttagagacataagaccggaatgtgattgaaattaagtaaggcaataattcagttggtagtattatattctttc

SEQ ID NO: 224192 - DNA, 201 bp, Homo sapiens
cggatgttgaaaggaggaataacatactaaaacatatggcacatttagtttatgatgagatcccaagtagtctgtctcccatcataaacttgaacatgagyttaaatcttctccttttcaaggccgggtgcagtggctcacacctgtaatctcagcactttgggaggcaaaggtgggcagatcacttgaggtcaggagttc

SEQ ID NO: 224193 - DNA, 201 bp, Homo sapiens
taagttatttattttaactatagagattttatggctaatatataaattttaaaaagcatgttaacactagtttgactttaaaatagaatttattaaaaagraacttgacaatttttgtttgtttgtttttttttgagatggagtcttgccctgtcgcccaggctggagtgcaatggtgccatcgtggcccactgcacttct

SEQ ID NO: 224194 - DNA, 201 bp, Homo sapiens
atgaacccgggaggcagaggttggagtgagctgagactgtggcatgggactccagcctgggtgacagagcaagaccctgttccgggggggtaaaaaaaaaagtgaaaagacaggaatgcaaaagctggtgattttttgttttgttttgttttgttttaagaaaatattacctattcaggagaattgcttggacccgggaag

SEQ ID NO: 224195 - DNA, 201 bp, Homo sapiens
aaccccgcactttgagaggccaaggcaggtggattgcttaagaccaggagtttgagaacagcctggctaacatggcgaaatcccatctctactaaaaatayaaaaaattagctgggtgtaggtggcacattcctgtaacgtgggctacttgggagactgaagcacgagaatcgcttgaacccaggaggcagaggttgcagt

SEQ ID NO: 224196 - DNA, 201 bp, Homo sapiens
catgaacccgggaggcagaggttggagtgagctgagactgtggcatgggactccagcctgggtgacagagcaagaccctgttccgggggggtaaaaaaaaaagtgaaaagacaggaatgcaaaagctggtgattttttgttttgttttgttttgttttaagaaaatattacctattcaggagaattgcttggacccgggaa

SEQ ID NO: 224197 - DNA, 201 bp, Homo sapiens
aaatacaaaaattaggcggacctggtggcaggcacctgtaatcccagctactcaggaggctgaggcaggagaatctcatgaacccgggaggcagaggttgsagtgagctgagactgtggcatgggactccagcctgggtgacagagcaagaccctgttccgggggggtaaaaaaaaaagtgaaaagacaggaatgcaaaag

SEQ ID NO: 224198 - DNA, 201 bp, Homo sapiens
tttcaccatcttggccaggctggtcttaaattcctgacctcatgatccatccgcctcggcctcccaaagtgctgagattacaggcatgagccacaacgctyggcctttatttttatttttggttaaacttaaaaaatttttttatttacttattttaattggcaaataaaaattgtatatatggtgtacaacacgatgttt

SEQ ID NO: 224199 - DNA, 201 bp, Homo sapiens
tttggaatcttccaatttcctcacctctttagggtttcaagtctttcagatcaatatttgttctgtctttttcatgctgataattattctctttgacaagwaaaataattgtgcaatctgtttcacactcttgtcatcaattagcataaaattgttcatcccagttaggaggctgactgtgtcagaatacaattttaaaac

SEQ ID NO: 224200 - DNA, 201 bp, Homo sapiens; identical to SEQ ID NO: 41570

SEQ ID NO: 224201 - DNA, 201 bp, Homo sapiens
tgaaaggtgacacatgcttttgcagctgagtcatttttaacagcctcttttttgtctgtagaaatttcggggtatgacagtcttcttttcatcttctctctgtcacttttagtctatgctggcagtatttctgttggtataacattcttaagaacattgttgggaccaggcgcgatggctcacatctgtaatcctagcact

SEQ ID NO: 224202 - DNA, 201 bp, Homo sapiens
gtgaaaggtgacacatgcttttgcagctgagtcatttttaacagcctcttttttgtctgtagaaatttcggggtatgacagtcttcttttcatcttctctctgtcacttttagtctatgctggcagtatttctgttggtataacattcttaagaacattgttgggaccaggcgcgatggctcacatctgtaatcctagcac

SEQ ID NO: 224203 - DNA, 201 bp, Homo sapiens
tgtgaaaggtgacacatgcttttgcagctgagtcatttttaacagcctcttttttgtctgtagaaatttcggggtatgacagtcttcttttcatcttctctctgtcacttttagtctatgctggcagtatttctgttggtataacattcttaagaacattgttgggaccaggcgcgatggctcacatctgtaatcctagca

SEQ ID NO: 224204 - DNA, 201 bp, Homo sapiens
ttgtgaaaggtgacacatgcttttgcagctgagtcatttttaacagcctcttttttgtctgtagaaatttcggggtatgacagtcttcttttcatcttctctctgtcacttttagtctatgctggcagtatttctgttggtataacattcttaagaacattgttgggaccaggcgcgatggctcacatctgtaatcctagc

SEQ ID NO: 224205 - DNA, 201 bp, Homo sapiens
gttatacaacttattctaagacttcagtcttgatttttttttttttttttgagatggagtcccgctctgtcaccaggctggagtgcagtggcccaatcccrgctcactgcaacctctgcctcgcgggttcaagcgattctcctgcctcagcctcccgagtagctgggatcacaggcgtgcgccactacgcccagctaattt

SEQ ID NO: 224206 - DNA, 201 bp, Homo sapiens
cagcccttaatccatttaaccctgagttgacacagcacatgtctaagggagcacagggttggaggtagggttacagattaaaatggagtctcttatgtctrctttctatacggacaccttaacaatctgatctctctttcttttccccatagtccacactaggattcaatgccaagaaaggtatatttttcattagtggta

SEQ ID NO: 224207 - DNA, 201 bp, Homo sapiens
ccaggtcagcctcccaagtacctgggactataggcatgtaccaccatgcctgactaatttttaaatattttctagaaatggagtttggccatgttgctcargctggctttgagctcctgggctcaagctgtcctcccacttcggcctcccaaagttctgggattacggctcactccctctttatcttaaggttgtcttatt

SEQ ID NO: 224208 - DNA, 201 bp, Homo sapiens
gagcttgcagtgagctgagattgcgccactgcactccagcctgggagacagagcgagactccgtctcaaaaaataaaataaaataaaaaattagcctggartggtggcatgcatctatagtctcagctactagggaggctgatgtagggaggattgcccaggaattcaaggctgcagtgagctgtcactgtgccactgcac

SEQ ID NO: 224209 - DNA, 201 bp, Homo sapiens
ggaggttgctgtgagctgagatcgtgccattgcactccagcctgggcaataggagcgaaactctgtcttaaaataaataaataaataaataaataaataawgtactgtggtactatggatccaaaatattttgatagtttgagctcaaagtctagcagggagataaatagattaattattaaaccacataagaaatattga

SEQ ID NO: 224210 - DNA, 201 bp, Homo sapiens
tgtcagacattattataggtactgtggatccaaggccaggtgcagtggctcatgcctgtaatgccagcactttgggaggccgaggcgggaggatcacctgrggtcaggagttcaagaccagcctgaccaacatggagaaacctcgtctctactaaaaatacaaaaatttgctgggcgtggttgtgggtgcctgtgggtgct

SEQ ID NO: 224211 - DNA, 201 bp, Homo sapiens
ttttttttttttttttttttttttttgagacagagtctcaccctgtcgcccaggctggagtgcagtggcgcaatctcagctcactgtaacctctgcctccygggttcaagcgattctcctggctcagcctcccaagcagctaggactacaggcgtgtgccaccatgccaggctaattttgtatttttagtagagacggggt

SEQ ID NO: 224212 - DNA, 201 bp, Homo sapiens
atttcctcaattgcaagacagtctccaaagtacaaccatcacaatgttactatctaaaccgtaggtcccattcaaattttgccacttgtcccattaatgtyctttataggcctaagattgaacctagaattatatattacatttagttgtcatgtctctttttcctgcagtatgggagagatttttagtctttccttattt

SEQ ID NO: 224213 - DNA, 201 bp, Homo sapiens
gttgtccttgaaattgttgcaagcctcagctccttctgggtttcggtctcctgattcttcttaccaaattatgctatcgttctctgtccttggttatgtgkctgttcttccaccttttatatttctgttgttaaatctgagttgatcagagtggtatgtggctcttcttccaccttttatatttctcttgttaaatctgag

SEQ ID NO: 224214 - DNA, 201 bp, Homo sapiens
acaactctttgtggaatctgcttgactcctaatctcctagttagaagcaatttgagggttgaggtggaggcatcttctcatcttgatttttttttttttttctgggcttccatcttttctctgaactgactcctaatttaggcagttttacattcagactgtgggtgtatgtgtgtatgtgtgtgttaaggcgccatgtat

SEQ ID NO: 224215 - DNA, 201 bp, Homo sapiens; identical to SEQ ID NO: 41571

SEQ ID NO: 224216 - DNA, 201 bp, Homo sapiens
actccatccagcctgggcaacaagagcgaaattccgtctcaaaaaaaaaaaaaaaaatacaaaaattagctgggggtggtggcatgtgcctgtaatcccasctacttgggaggctgaggcaggagaatccaggaggcagaggttgcagtgagccaagatcatgccactgcactctagcctgggtgacaaaagtgaaactca

SEQ ID NO: 224217 - DNA, 201 bp, Homo sapiens
acctgggaggtggagcttgcagtgagctgagatcatgccactgcactccagcctgggcgacagagtgagagtccgtctcaaaaaaaaaaaaaaaaaaaaaactgtttagaaagtcttgcagttaaatgtttatgaactttgtatgaccacagaacttttttttttttggcccatacaatggctttcaacattctgagagca

SEQ ID NO: 224218 - DNA, 201 bp, Homo sapiens
ttggcatgtcggccctgttactccctgggaactttgagtcttatttggaacttgtgaagtccctgtgtctggggccagcactgatccacacagctaagttygcacttgtcttccctctcatgtatcatacctggaatgggatccgacacttggtaagttaattcgggatttgcacattttctctgtgaagggagtggggag

SEQ ID NO: 224219 - DNA, 201 bp, Homo sapiens
gggcaacgtggcaaaacttcatctctaccaaaaatacaaaaaattagctgggcatggtgatgggtgcctgtagtcccagctacttgggaggctgaggcagraggattgcttgaacctgggaggtcaaggcctcagtgagctgagattgtgccactgcactccagcctaggtgacaaagtgagaccctgtctcaaaaaatta

SEQ ID NO: 224220 - DNA, 201 bp, Homo sapiens
agagaggggaggttttataaaattgcagaacttagagcttttctgccctggttcttgcctgtgatggtaatctttttgttgagggaagtgaagaacctaarggtccttaagtctgcttttattttttcttctagcaagtactggctgtgagtgtgggacaggattttgtgttttctgtgacagtctgcagtttttggcctc

SEQ ID NO: 224221 - DNA, 201 bp, Homo sapiens
ttgttatgggtattgggacatctggactttctgttgttggagtttgtccttgcaggtattaccaagctgcttccttagctgtaaacatgttagaaccgtgkgttgtcactggcaaggaatgtgccttgctagttttaagatggagtttatttatttattttatttatttttttgagacggagtcttgctctgtctcccaag

SEQ ID NO: 224222 - DNA, 201 bp, Homo sapiens
cagcttcctctgttcatattttggctcaggcagagacttgccctatatttgtctttgtctcaatatgggggtaagagaggggaggttttataaaattgcaraacttagagcttttctgccctggttcttgcctgtgatggtaatctttttgttgagggaagtgaagaacctaagggtccttaagtctgcttttattttttc

SEQ ID NO: 224223 - DNA, 201 bp, Homo sapiens
ggtgtcctcagaaagcaagtgggggaacatgctgtctttgagtttctttttttcttctctctttctctctctttttttttttaaatatatatatatatatwttaggtctttaaggttttattttattttattttaatttttaattttttttttttctttttttttgagacagagtctcgttctgtcgaccaggctggagtg

SEQ ID NO: 224224 - DNA, 201 bp, Homo sapiens
aatttttttttttttgtattttttagtagagatggggtttcaccatgttggccagcctggtcttgaactcttggcttcccaaagtgctgggattacaggcrcgagccactgcacatggcaggaatcatttaatagattggaaactgtccatgttgcctcctatgtgacctcatcgtctgctcaaaactggtttctaaaatt

SEQ ID NO: 224225 - DNA, 201 bp, Homo sapiens
tttattagaaactactcaattatatagtagggtgtcctcagaaagcaagtgggggaacatgctgtctttgagtttctttttttcttctctctttctctctctttttttttttaaatatatatatatatatattaggtctttaaggttttattttattttattttaatttttaattttttttttttctttttttttgagaca

SEQ ID NO: 224226 - DNA, 201 bp, Homo sapiens
gttggccagccttacaggtgcctgccaccacacccagcaaatttttttttttttgtattttttagtagagatggggtttcaccatgttggccagcctggtsttgaactcttggcttcccaaagtgctgggattacaggcgcgagccactgcacatggcaggaatcatttaatagattggaaactgtccatgttgcctccta

SEQ ID NO: 224227 - DNA, 201 bp, Homo sapiens
aagcaggagactcgcttgaacttgggaggtggaggttgcagtgagccaagattgcaccactatactccagcctgggtgacagaatgagactctgtctcaakaaaaaaagaaaacaaaaatcttctccatttcaaaatggtttagaattgtatgaggtgccaggggtcccagttttatgtatcatattagttgtaacttatg

SEQ ID NO: 224228 - DNA, 201 bp, Homo sapiens
aggtaatatttcttattattttcaagttacttggagttgtagcttttcaactagaaaatggtatcaaggacactgatactgtcattgtttttatatcttayttttaatctatcccttcacccctaaaaatagagaagttgatatactaaagttgatctctaaatgtgtattgatttttgattctcttatcttgcagacacg

SEQ ID NO: 224229 - DNA, 201 bp, Homo sapiens
ttttttttttttttggtatttttagtagagacgggattttgccatgttggccagccttacaggtgcctgccaccacacccagcaaatttttttttttttgwattttttagtagagatggggtttcaccatgttggccagcctggtcttgaactcttggcttcccaaagtgctgggattacaggcgcgagccactgcacatg

SEQ ID NO: 224230 - DNA, 201 bp, Homo sapiens
ccactactcaggaggctgaagcaggagactcgcttgaacttgggaggtggaggttgcagtgagccaagattgcaccactatactccagcctgggtgacagratgagactctgtctcaagaaaaaaagaaaacaaaaatcttctccatttcaaaatggtttagaattgtatgaggtgccaggggtcccagttttatgtatca

SEQ ID NO: 224231 - DNA, 201 bp, Homo sapiens
tctctatttctctgttgaacattaccaactctgattattcttattcttttgtcttgcattatttgtgtttgattaactctattttgcatttttaggtaatrtttcttattattttcaagttacttggagttgtagcttttcaactagaaaatggtatcaaggacactgatactgtcattgtttttatatcttacttttaat

SEQ ID NO: 224232 - DNA, 201 bp, Homo sapiens
ttcaagtgattctcctgccttagcctcccaagtagctgagattacaggtgcccacaaccacggccagctaatttttttttttttttggtatttttagtagwgacgggattttgccatgttggccagccttacaggtgcctgccaccacacccagcaaatttttttttttttgtattttttagtagagatggggtttcacca

SEQ ID NO: 224233 - DNA, 201 bp, Homo sapiens
tcaccatgtcggccaggcttgtctcaacctcctgacctcaagtgacccacccaccttggcctcccatagtgctgggattacaggcatgagctaccacgccrgcccttaggaattgagttttgaaggatgagtttaacaggctctgagggaggctctattcagagaacagcatgagcaaaggcatgtggtcaaaagatggtt

SEQ ID NO: 224234 - DNA, 201 bp, Homo sapiens
caaaaattagctgggcgttgtggtgggcacctgtcatccccactactcaggaggctgaagcaggagactcgcttgaacttgggaggtggaggttgcagtgrgccaagattgcaccactatactccagcctgggtgacagaatgagactctgtctcaagaaaaaaagaaaacaaaaatcttctccatttcaaaatggtttag

SEQ ID NO: 224235 - DNA, 201 bp, Homo sapiens
cctagcttttaaaaaatcactttctctatttctctgttgaacattaccaactctgattattcttattcttttgtcttgcattatttgtgtttgattaactytattttgcatttttaggtaatatttcttattattttcaagttacttggagttgtagcttttcaactagaaaatggtatcaaggacactgatactgtcatt

SEQ ID NO: 224236 - DNA, 201 bp, Homo sapiens
atgctttactttacctcagtacgtgagtactcttgacctcaagagaggttgtggggaagcagatgggcagaatacatcatgatgagattagtgtgacaacrctggaaataaaagaacagttatgtgctgtcacactgagttttaatcatcagttggacagcttcatgaaggctcttttagatgttttcttttcatttgctg

SEQ ID NO: 224237 - DNA, 201 bp, Homo sapiens
ctttttctttgtgtcagacattattataggtactgtggatccaaggccaggtgcagtggctcatgcctgtaatgccagcactttgggaggccgaggcgggwggatcacctgaggtcaggagttcaagaccagcctgaccaacatggagaaacctcgtctctactaaaaatacaaaaatttgctgggcgtggttgtgggtgc

SEQ ID NO: 224238 - DNA, 201 bp, Homo sapiens; identical to SEQ ID NO: 41587

SEQ ID NO: 224239 - DNA, 201 bp, Homo sapiens
cagagtttgctgctgcccattcaaatttagcaagtgtactgcagcagcagggaaaactgcaggaagctctgatgcattataaggaggctattcggtaagakacactaacagccttatttttaaaattatttttaattttaaaatgtttgacattcggcacattgcagatgctaaaatggctttaaataacaacggaataag

SEQ ID NO: 224240 - DNA, 201 bp, Homo sapiens
agatatacataacgtgcagaacactctagtgctttacatagtttcaagcatttccatttttaagttaaatataccatatttttacatttttttggtttacrtttctaactttttgttttcccccctccttccctcaaatgttttgatgattctccagaaccaacgaaacgtatgctttccttccaagggttagctgagttg

SEQ ID NO: 224241 - DNA, 201 bp, Homo sapiens
ttgctgatgcctactctaatatgggaaacactctaaaggagatgcaggatgttcagggagccttgcagtgttatacgcgtgccatccaaattaatcctgcmtttgcagatgcacatagcaatctggcttccattcataaggtactactgtttattataatatgtgcagtttaacacctaaaatttaacttttggaaatttt

SEQ ID NO: 224242 - DNA, 201 bp, Homo sapiens
tgagttccgactttgggaatcatcctacttctcaccttatgcagtctattccaggcatgcacaatcctgataaatttgaggtaagactagtgtttctctasaatcactatttgtttaaaaaagaaaaaacccacaatgttggcttgtcaccatgaggcatggaaacctagtgtcttttggaaagatttgagccagaaagat

SEQ ID NO: 224243 - DNA, 201 bp, Homo sapiens
ttggctgtgttttcaatgcacaaggggaaatttggcttgcaattcatcactttgaaaaggttagtcattaaattaataattggtatttttgaagtgcttaygcatgtagtgtttttactagaactaaataataggtcttagccagtgacattatatctttgtttctctggcggtataggcagtatgtgacttacagagaac

SEQ ID NO: 224244 - DNA, 201 bp, Homo sapiens
ctgtactttgttggcagactttttggttcacctgatggatgatactatacaaccacaaaagctgtttatcagtagaattaagtgattttggaaaccataayatagttccagagcaaatcatatatatgatgatttttcggcacagttgacaaaatttcactttctaggacttaagtctctttcacccatggaacagtttgg

SEQ ID NO: 224245 - DNA, 201 bp, Homo sapiens
tacttcatatgtatgtacgtgtctagatgttgtggctggtgggggtgggaggctctaggaggaaaggcaggaaactgatgcaatcttaggagaaatagttytacaggaaaatcttgctcatttctatctccttttattctcacgattttcccttgtatacagtgccctcctcctttgtctattaaaaccctactcatcctt

SEQ ID NO: 224246 - DNA, 201 bp, Homo sapiens
ggctcacgtgtataatcctttgggaggctgaggtggaaggattgcttgagaccatcatgggcaacatagtgagaccccatccctaccaaaaaaaaaaaaaagattacaaatttcaaataccaatttctctgtgatatgttgttattcatacattcaatccagaagtgaactctccttcctttgtgttctgtttctttaatg

SEQ ID NO: 224247 - DNA, 201 bp, Homo sapiens; identical to SEQ ID NO: 41590

SEQ ID NO: 224248 - DNA, 201 bp, Homo sapiens
ggtaagagacactaacagccttatttttaaaattatttttaattttaaaatgtttgacattcggcacattgcagatgctaaaatggctttaaataacaacrgaataagttagcattacagtgggttaaagatttttgtattggagaaataaaacctttggcttctcttttagaatcagtcctacctttgctgatgcctact

SEQ ID NO: 224249 - DNA, 201 bp, Homo sapiens
catcgacctcaaagcatttcttgatagtctaccagatgtgaaaattgtcaaggtcagaacctagtcagtattgtcattgaaataaagttaactgcattcaygatcttttccctaatgatgcatttttttttcagatgaagtgtcctgatggaggagacaatgcagatagcagtaacacagctcttaatatgcctgttattc

SEQ ID NO: 224250 - DNA, 201 bp, Homo sapiens
aaataaaacttaatggacacatagctatgcctacttgtttacacattgtctgtggctgctttcaagctacagcagaagaactgagcagctatgacagtccrtgtggccacagaaccaaaaatatttgctatctggccctttacagaaaagaccgatttatattaggcaaagaaagttaggcaagtgtgaggtaactttctt

SEQ ID NO: 224251 - DNA, 201 bp, Homo sapiens
ccacacccttcccttcgcgaggttgccagccctgttcacttcctatccttgggggagaaaccaccccgatgctgctgctttggcgttgaccaccctgccckcccaattctcgctttgtgttactttctcgatgtattcctccgccgccgcctctgggtctgccatccccattcttcagcccagtatctctttattcacagg

SEQ ID NO: 224252 - DNA, 201 bp, Homo sapiens
tattatataatgagcaatagcacagatctcaaactgtttgagttgcatatgggccataccttcttttctgtaacgtgcatacccatgcattaacacttgtygccttttccagatctgctcactttagcactctggcaattaaacagaacccccttctggcagaagcttattcgaatttggggaatgtgtacaaggaaagag

SEQ ID NO: 224253 - DNA, 201 bp, Homo sapiens
aatagtgtcttatccgtaattgtagggagtgggattaataattagtccgtgctcctctccccacgtctccaccgtgattttcaaaggtttaagattctgtrctggattctgtactagcttgccctttttaatgtgttatttatttgagaaagctgtcgtttcaagtgttaaaatagcagataagcggcattgaaaagtgac

SEQ ID NO: 224254 - DNA, 201 bp, Homo sapiens
gttggggtacctgctcgtgattgctgcctctgggtgctgagcttgaaaaatgatacttaaatatttgaacttgaaatttttccagtaccgggtttcaactsagccgccaacgcacatctgctctcttgcccacttgtgacatgcccagctgccagtttttctccttccttttgtggtggtggttatattatcagtatgact

SEQ ID NO: 224255 - DNA, 201 bp, Homo sapiens
aagtcaaaagtttagaaatgcgtatgtacttaaaatggtgaaattgcttttagctggtctgcgttatgctaaaatatttgttttatttagcaagttatatwaaaaagcataaaaattcttattgcaagaaactacatcaattttaaaataacacgtataaagtacagagcacatgacttttttctgttgtgattaactttg

SEQ ID NO: 224256 - DNA, 201 bp, Homo sapiens
tttctgttgtatatttcgattcttctctgttctgctttttgttaaggttgctgtgcaaatgtcacatttaaatatgtgagtgcttattgtgcatacaatgmtttgttaggaaatggggagatgtgttgtgggggaagttgcgggttataatataagacaggacctgacccgtaaaggaaaaaatggtgtaagttccttgga

SEQ ID NO: 224257 - DNA, 201 bp, Homo sapiens
ttctctagattgtctgtgattggacagactatgatgagcgaatgaagaagttggtcagtattgtggctgaccagttagagaagaataggttgccttctgtrcatcctcatcatagtatgctatatcctctttctcatggcttcaggaaggctattgctgagaggcacggcaacctgtgcttagataaggtgtgattctttt

SEQ ID NO: 224258 - DNA, 201 bp, Homo sapiens
atccacctgcctcagcctcccaaagtgctgggattacaggcatgagccactgcccccagccataattttgtttttagaaaatgtttccctatagaattttytaaaatgcgggaggaaaccatgctctgtccatactgcttcatacctacaagtgttagatttgctcgtacttttttttttttttttttttttttttgagac

SEQ ID NO: 224259 - DNA, 201 bp, Homo sapiens
tttcggtccttgatacagaagtgattcatcataaccttgaataacatagttggacaaatatttgagatgtgtgtgtgtgtgtgtgtgtgtgtgtgtgtgtrtatatatatatatatatatatatatttccttttttttttgagacaagagtctctgtcgcccaggctggagtgcagtggcacgatctcggctaactgcagt

SEQ ID NO: 224260 - DNA, 201 bp, Homo sapiens
cctactcatccttcaaggcccagcttaaacttctcttatgagctcatcatctagttctcttaaaattctttactactgagtgggcatttagtgtgtgccttgtcttttcacatagattgtaagccccttgatgataaggattctatatcttttccctatagttccaggcatgttattgaattgagtaacagtttgcctgaa

SEQ ID NO: 224261 - DNA, 201 bp, Homo sapiens
tgagcctttgtctctttgcctttgtccttaccctagaacctcctgtaccatgtggtcggctggaccgactggaaccttgccctgaaccccgaaggaggacycaattgggtgcgtaactttgtcgacagtcccatcattgtagacatcaccaaggacacgttttacaaacagcccatgttctaccaccttggccacttcagg

SEQ ID NO: 224262 - DNA, 201 bp, Homo sapiens
cacttcctgtgtcatgtgactctcctagtcatcacatgacccatccacattgggaagccagaattacttgcaggagtaacctagtgcctatagctatggcrggtacctgcatccttgtttttgtttagtggatcctctatccttcagagactctggaacccctgtgctcttctcctcatctagtgaccctgaggtgatgga

SEQ ID NO: 224263 - DNA, 201 bp, Homo sapiens
tcggtggtgtgtgtctgcaatgccacatactgtgactcctttgaccccccgacctttcctgcccttggtaccttcagccgctatgagagtacacgcagtgrgcgacggatggagctgagtatggggcccatccaggctaatcacacgggcacaggtaaccattacacccctcaccccctgggccaggctgggtcctcctag

SEQ ID NO: 224264 - DNA, 201 bp, Homo sapiens
gcctttgtctctttgcctttgtccttaccctagaacctcctgtaccatgtggtcggctggaccgactggaaccttgccctgaaccccgaaggaggacccawttgggtgcgtaactttgtcgacagtcccatcattgtagacatcaccaaggacacgttttacaaacagcccatgttctaccaccttggccacttcaggtga

SEQ ID NO: 224265 - DNA, 201 bp, Homo sapiens
tgtctctagatacccctgattcaccgagccctgcagttggcccagcgtcccgtttcactccttgccagcccctggacatcacccacttggctcaagaccartggagcggtgaatgggaaggggtcactcaagggacagcccggagacatctaccaccagacctgggccagatactttgtgaagtaagggatcagcaaggat

SEQ ID NO: 224266 - DNA, 201 bp, Homo sapiens
ctttgtctctttgcctttgtccttaccctagaacctcctgtaccatgtggtcggctggaccgactggaaccttgccctgaaccccgaaggaggacccaatwgggtgcgtaactttgtcgacagtcccatcattgtagacatcaccaaggacacgttttacaaacagcccatgttctaccaccttggccacttcaggtgagt

SEQ ID NO: 224267 - DNA, 201 bp, Homo sapiens
gtctctagatacccctgattcaccgagccctgcagttggcccagcgtcccgtttcactccttgccagcccctggacatcacccacttggctcaagaccaakggagcggtgaatgggaaggggtcactcaagggacagcccggagacatctaccaccagacctgggccagatactttgtgaagtaagggatcagcaaggatg

SEQ ID NO: 224268 - DNA, 201 bp, Homo sapiens
tgtctctttgcctttgtccttaccctagaacctcctgtaccatgtggtcggctggaccgactggaaccttgccctgaaccccgaaggaggacccaattggktgcgtaactttgtcgacagtcccatcattgtagacatcaccaaggacacgttttacaaacagcccatgttctaccaccttggccacttcaggtgagtgga

SEQ ID NO: 224269 - DNA, 201 bp, Homo sapiens
ctctagatacccctgattcaccgagccctgcagttggcccagcgtcccgtttcactccttgccagcccctggacatcacccacttggctcaagaccaatgkagcggtgaatgggaaggggtcactcaagggacagcccggagacatctaccaccagacctgggccagatactttgtgaagtaagggatcagcaaggatgtg

SEQ ID NO: 224270 - DNA, 201 bp, Homo sapiens
ttgcctttgtccttaccctagaacctcctgtaccatgtggtcggctggaccgactggaaccttgccctgaaccccgaaggaggacccaattgggtgcgtamctttgtcgacagtcccatcattgtagacatcaccaaggacacgttttacaaacagcccatgttctaccaccttggccacttcaggtgagtggagggcggg

SEQ ID NO: 224271 - DNA, 201 bp, Homo sapiens
ctagatacccctgattcaccgagccctgcagttggcccagcgtcccgtttcactccttgccagcccctggacatcacccacttggctcaagaccaatggarcggtgaatgggaaggggtcactcaagggacagcccggagacatctaccaccagacctgggccagatactttgtgaagtaagggatcagcaaggatgtggg

SEQ ID NO: 224272 - DNA, 201 bp, Homo sapiens
tttgtccttaccctagaacctcctgtaccatgtggtcggctggaccgactggaaccttgccctgaaccccgaaggaggacccaattgggtgcgtaactttbtcgacagtcccatcattgtagacatcaccaaggacacgttttacaaacagcccatgttctaccaccttggccacttcaggtgagtggagggcgggcaccc

SEQ ID NO: 224273 - DNA, 201 bp, Homo sapiens
gacagatcataatcagcattgtacttctgtggaggaaatatccatggcgtggacactagggagctgcaagggcacttcaccagggaggaaggagtcctgtmtggtacccccctcactggcctctgagtgcagtggaggtacagcaaggaacttttcctgccaaggcccccttgcctgggcccagccagtagcctgttgctg

SEQ ID NO: 224274 - DNA, 201 bp, Homo sapiens
tagatacccctgattcaccgagccctgcagttggcccagcgtcccgtttcactccttgccagcccctggacatcacccacttggctcaagaccaatggagmggtgaatgggaaggggtcactcaagggacagcccggagacatctaccaccagacctgggccagatactttgtgaagtaagggatcagcaaggatgtggga

SEQ ID NO: 224275 - DNA, 201 bp, Homo sapiens
gtccttaccctagaacctcctgtaccatgtggtcggctggaccgactggaaccttgccctgaaccccgaaggaggacccaattgggtgcgtaactttgtcdacagtcccatcattgtagacatcaccaaggacacgttttacaaacagcccatgttctaccaccttggccacttcaggtgagtggagggcgggcaccccca

SEQ ID NO: 224276 - DNA, 201 bp, Homo sapiens
atacccctgattcaccgagccctgcagttggcccagcgtcccgtttcactccttgccagcccctggacatcacccacttggctcaagaccaatggagcggkgaatgggaaggggtcactcaagggacagcccggagacatctaccaccagacctgggccagatactttgtgaagtaagggatcagcaaggatgtgggatca

SEQ ID NO: 224277 - DNA, 201 bp, Homo sapiens
ggtaagaggcggtggacaatgggattcccacagggcagcttttgggcactggacgttccctaacctgaggctctctgaagaggaaggttaggaatcctctsagcttcggtgggctggactcactgtgggaattcaatcgccccccccacccactaagggtgtgctggcgggaaagcgctgagacgcatgcgtagttctcgc

SEQ ID NO: 224278 - DNA, 201 bp, Homo sapiens
caccgagccctgcagttggcccagcgtcccgtttcactccttgccagcccctggacatcacccacttggctcaagaccaatggagcggtgaatgggaaggrgtcactcaagggacagcccggagacatctaccaccagacctgggccagatactttgtgaagtaagggatcagcaaggatgtgggatcaggactggcctcc

SEQ ID NO: 224279 - DNA, 201 bp, Homo sapiens
ccgagccctgcagttggcccagcgtcccgtttcactccttgccagcccctggacatcacccacttggctcaagaccaatggagcggtgaatgggaaggggycactcaagggacagcccggagacatctaccaccagacctgggccagatactttgtgaagtaagggatcagcaaggatgtgggatcaggactggcctccca

SEQ ID NO: 224280 - DNA, 201 bp, Homo sapiens
cccaggcgctgagagagcagggtcagacactcccgagcctctcggtacagctgtaggggcgacacaggtaggcttgcagctgcgggaacagtgccacctcygcacctaagcactcccattcctggccagcatccttggggctcatctcatacaatagcccccggtctcagagctacctccttctccagctcttcctcgtcc

SEQ ID NO: 224281 - DNA, 201 bp, Homo sapiens
cctgcagttggcccagcgtcccgtttcactccttgccagcccctggacatcacccacttggctcaagaccaatggagcggtgaatgggaaggggtcactcragggacagcccggagacatctaccaccagacctgggccagatactttgtgaagtaagggatcagcaaggatgtgggatcaggactggcctcccatttagc

SEQ ID NO: 224282 - DNA, 201 bp, Homo sapiens
ccagcgtcccgtttcactccttgccagcccctggacatcacccacttggctcaagaccaatggagcggtgaatgggaaggggtcactcaagggacagcccrgagacatctaccaccagacctgggccagatactttgtgaagtaagggatcagcaaggatgtgggatcaggactggcctcccatttagccatgctgatctg

SEQ ID NO: 224283 - DNA, 201 bp, Homo sapiens
aagaagttgaggggaaagggcatagcctctgcataccacttccgggtcacttccacgtagttcttggtgtctatccaaaaagtatgtacctggattgggtrggcaggaagaaacaggtaggtctgagccagtgcacctgtctgattcaaggtgggcttctgacccccatgctttcctgagcctgtgtgtgggtctgtgtgt

SEQ ID NO: 224284 - DNA, 201 bp, Homo sapiens; identical to SEQ ID NO: 41619

SEQ ID NO: 224285 - DNA, 201 bp, Homo sapiens
gcctgcgtcggcctcccaaagtgctgggattacaggcatgagccactgcacccggccatcaattttttttttttttaaatggagtcttgctctgtcacccrggttggagtgtaacagtgcaatcttggctcattgcaacctccgcctcttgggttcaagcgattctcctgcctcagcctcctgagtagctgggactacagg

SEQ ID NO: 224286 - DNA, 201 bp, Homo sapiens
aataaataattgtgttcggagtcagcatcattcttcctgaagttcaccactcctttgccaagaacacttcctgaaacactgacaagcaggaccttgaatartggggtatggttggtaacaactcactcattcaacaaacattgagcacctattttgtgcttgcctctaaatgaagagctggttgtattatttattttttta

SEQ ID NO: 224287 - DNA, 201 bp, Homo sapiens
gccttgtcctaatgaatgtgggagaccaggccatgggcacccaaaggcagctaagccctgcccgggagagtagttgaggggtggagagggacttgcttttyagtcattcctcattctgtcctcaggaatgtcccaagccttcgggtagggtaagcatcatggctggcagcctcacaggattgcttctacttcaggcagtgt

SEQ ID NO: 224288 - DNA, 201 bp, Homo sapiens
aggtgagtgatggctcacgcctataatcccagcaccttgggaggctgaggcaggtggattgcttgacctcaggaattcgagaccagcctgggcaacatagsaagaccccatctctaaaaataaatttcaaaaattagttgggcatggtggcatgtacctgtagtcccagctactatggaggctgaggtgggaggatccaat

SEQ ID NO: 224289 - DNA, 201 bp, Homo sapiens
ccaccgtaagccctcttttctacttccactctttctgtaggtggccctactactaacgtccatggctttaagtaccatctttctatgtgttaatgcataastccagccttgacctctcttgagcgccatccaactcagcatatctggttggatgtctaatgagtatttcaaattcaacatggccacaactgaactaactga

SEQ ID NO: 224290 - DNA, 201 bp, Homo sapiens
tcgctcagacaccattaccacatacacattccacccatacccccaggtctcagcctgccctaccttcccaggctccagtccctgttcctcagcatcccccwccacatcctgagtaagctttgtccccagataacctcttcagcatgatccttaaatctccctaagcctcagtttctcccctgtggaatgggggtaagaatc

SEQ ID NO: 224291 - DNA, 201 bp, Homo sapiens
tcttcactacctttgtctctagatacccctgattcaccgagccctgcagttggcccagcgtcccgtttcactccttgccagcccctggacatcacccactyggctcaagaccaagggagcggggaatgggaaggggccactcaagggacagcccagagacatctaccaccagacctgggccagatacattgtgaagtaagg

SEQ ID NO: 224292 - DNA, 201 bp, Homo sapiens
ggtctggcccactttcttggctggatcattcatgacctttctcttgccaggttcctggatgcctatgctgagcacaagttacagttctgggcagtgacagstgaaaatgagccttctgctgggctgttgagtggataccccttccagtgcctgggcttcacccctgaacatcagcgagacttcattgcccgtgacctaggt

SEQ ID NO: 224293 - DNA, 201 bp, Homo sapiens
tgtgtctgcaatgccacatactgtgactcttgaccccccgacctttcctgccctaggtgccttcagccgctacaagagcagaagcagtgggcattggatgragctgagtacaggaccatacaggctaattgcaccggcacaggtaaccattacacccttcaccccccgggccaggctgggtcctcctagaggtaaacggtg

SEQ ID NO: 224294 - DNA, 201 bp, Homo sapiens
gacatcacccacttggctcaagaccaatggagcggtgaatgggaaggggtcactcaagggacagcccggagacatctaccaccagacctgggccagatacwttgtgaagtaagggatcagcaaggatgtgggatcaggactggcctcccatttagccatgctgatctgtgtcccaaccctcaacctagttccacttccaga

SEQ ID NO: 224295 - DNA, 201 bp, Homo sapiens; identical to SEQ ID NO: 41640

SEQ ID NO: 224296 - DNA, 201 bp, Homo sapiens; identical to SEQ ID NO: 41641

SEQ ID NO: 224297 - DNA, 201 bp, Homo sapiens; identical to SEQ ID NO: 41642

SEQ ID NO: 224298 - DNA, 201 bp, Homo sapiens
gctgaaaatgagccttctgctgggctgttgagtggataccccttccagtgcctgggcttcacccctgaacatcagcgagacttcattgcccgtgacctagrtcctaccctcgccaacagtactcaccacaatgtccgcctactcatgctggatgaccaacgcttgctgctgccccactgggcaaaggtggtaaggcctgga

SEQ ID NO: 224299 - DNA, 201 bp, Homo sapiens
agccttctgctgggctgttgagtggataccccttccagtgcctgggcttcacccctgaacatcagcgagacttcattgcccgtgacctaggtcctaccctygccaacagtactcaccacaatgtccgcctactcatgctggatgaccaacgcttgctgctgccccactgggcaaaggtggtaaggcctggacctccatggt

SEQ ID NO: 224300 - DNA, 201 bp, Homo sapiens
tgctgggctgttgagtggataccccttccagtgcctgggcttcacccctgaacatcagcgagacttcattgcccgtgacctaggtcctaccctcgccaacrgtactcaccacaatgtccgcctactcatgctggatgaccaacgcttgctgctgccccactgggcaaaggtggtaaggcctggacctccatggtgctccag

SEQ ID NO: 224301 - DNA, 201 bp, Homo sapiens
gctgggctgttgagtggataccccttccagtgcctgggcttcacccctgaacatcagcgagacttcattgcccgtgacctaggtcctaccctcgccaacartactcaccacaatgtccgcctactcatgctggatgaccaacgcttgctgctgccccactgggcaaaggtggtaaggcctggacctccatggtgctccagt

SEQ ID NO: 224302 - DNA, 201 bp, Homo sapiens
aaacccagcactttgggaagccgaggcgggtgatcacctgaggtcaggagtttaagaccaccctggccaacgtgttgaaaccctgtgtctactaaaatacaaaaaaaaaaaattatctgggcatgatggtgggtgtctgtaatcccagctactcaggaggctgagaagggagaatcagttgaacccgggagatggtggttg

SEQ ID NO: 224303 - DNA, 201 bp, Homo sapiens
ctagaagttccagaagcctgtgtgcaaggtccaggatcagttgctcttcctttgcaggtactgacagacccagaagcagctaaatatgttcatggcattgytgtacattggtacctggactttctggctccagccaaagccaccctaggggagacacaccgcctgttccccaacaccatgctctttgcctcagaggcctgt

SEQ ID NO: 224304 - DNA, 201 bp, Homo sapiens
tagctcctctaaggatgtgcctcttaccatcaaggatcctgctgtgggcttcctggagacaatctcacctggctactccattcacacctacctgtggcgtygccagtgatggagcagatactcaaggaggcactgggctcagcctgggcattaaagggacagagtcagctcacacgctgtctgtgactaaagagggcacaa

SEQ ID NO: 224305 - DNA, 201 bp, Homo sapiens
tggccatgctgatctgtgtcccaaccctcaacctggttccacttccagatctgcctgtcctcagctcacctttctaccttctgggcctttcaaacttggayctgtcagtcttgcccactccatcaggcttcctgttctctcggtctggcccactttcttggctggatcattcatgacctttctcttgccaggttcctggat

SEQ ID NO: 224306 - DNA, 201 bp, Homo sapiens
tcccctttggccatgctgatctgtgtcccaaccctcaacctggttccacttccagatctgcctgtcctcagctcacctttctaccttctgggcctttcaamcttggatctgtcagtcttgcccactccatcaggcttcctgttctctcggtctggcccactttcttggctggatcattcatgacctttctcttgccaggtt

SEQ ID NO: 224307 - DNA, 201 bp, Homo sapiens
ttggccatgctgatctgtgtcccaaccctcaacctggttccacttccagatctgcctgtcctcagctcacctttctaccttctgggcctttcaaacttggrtctgtcagtcttgcccactccatcaggcttcctgttctctcggtctggcccactttcttggctggatcattcatgacctttctcttgccaggttcctgga

SEQ ID NO: 224308 - DNA, 201 bp, Homo sapiens
tcctccctgctccctagctcctctaaggatgtgcctcttaccatcaaggatcctgctgtgggcttcctggagacaatctcacctggctactccattcacayctacctgtggcgtcgccagtgatggagcagatactcaaggaggcactgggctcagcctgggcattaaagggacagagtcagctcacacgctgtctgtgac

SEQ ID NO: 224309 - DNA, 201 bp, Homo sapiens
cagaagcctgtgtgcaaggtccaggatcagttgctcttcctttgcaggtactgacagacccagaagcagctaaatatgttcatggcattgctgtacattgktacctggactttctggctccagccaaagccaccctaggggagacacaccgcctgttccccaacaccatgctctttgcctcagaggcctgtgtgggctcca

SEQ ID NO: 224310 - DNA, 201 bp, Homo sapiens
agaagcctgtgtgcaaggtccaggatcagttgctcttcctttgcaggtactgacagacccagaagcagctaaatatgttcatggcattgctgtacattggyacctggactttctggctccagccaaagccaccctaggggagacacaccgcctgttccccaacaccatgctctttgcctcagaggcctgtgtgggctccaa

SEQ ID NO: 224311 - DNA, 201 bp, Homo sapiens
cccaggcgctgagagagcagggtcagacactcccgagcctctcggtacagctgtaggggcgacacaggtaggcttgcagctgtgggaacagtgccacctcyccacctaagcactcccattcctggccagcatccttggggctcatctcatacaatagcccccggtctcagagctacctccttctccagctcttcctcgtcc

SEQ ID NO: 224312 - DNA, 201 bp, Homo sapiens
gctcttcctttgcaggtactgacagacccagaagcagctaaatatgttcatggcattgctgtacattggtacctggactttctggctccagccaaagccaycctaggggagacacaccgcctgttccccaacaccatgctctttgcctcagaggcctgtgtgggctccaagttctgggagcagagtgtgcggctaggctcc

SEQ ID NO: 224313 - DNA, 201 bp, Homo sapiens
cttcctttgcaggtactgacagacccagaagcagctaaatatgttcatggcattgctgtacattggtacctggactttctggctccagccaaagccacccyaggggagacacaccgcctgttccccaacaccatgctctttgcctcagaggcctgtgtgggctccaagttctgggagcagagtgtgcggctaggctcctgg

SEQ ID NO: 224314 - DNA, 201 bp, Homo sapiens
tttgcaggtactgacagacccagaagcagctaaatatgttcatggcattgctgtacattggtacctggactttctggctccagccaaagccaccctagggragacacaccgcctgttccccaacaccatgctctttgcctcagaggcctgtgtgggctccaagttctgggagcagagtgtgcggctaggctcctgggatcg

SEQ ID NO: 224315 - DNA, 201 bp, Homo sapiens; identical to SEQ ID NO: 41672

SEQ ID NO: 224316 - DNA, 201 bp, Homo sapiens
cattgctgtacattggtacctggactttctggctccagccaaagccaccctaggggagacacaccgcctgttccccaacaccatgctctttgcctcagagrcctgtgtgggctccaagttctgggagcagagtgtgcggctaggctcctgggatcgagggatgcagtacagccacagcatcatcacggtaagccaccccag

SEQ ID NO: 224317 - DNA, 201 bp, Homo sapiens
tgctgtacattggtacctggactttctggctccagccaaagccaccctaggggagacacaccgcctgttccccaacaccatgctctttgcctcagaggcckgtgtgggctccaagttctgggagcagagtgtgcggctaggctcctgggatcgagggatgcagtacagccacagcatcatcacggtaagccaccccagtct

SEQ ID NO: 224318 - DNA, 201 bp, Homo sapiens
ctagaacctcctgtaccatgtggtcggctggaccgactggaaccttgccctgaaccccgaaggaggacccaattgggtgcgtaactttgtcgacagtcccwtcattgtagacatcaccaaggacacgttttacaaacagcccatgttctaccaccttggccacttcaggtgagtggagggcgggcacccccattccatacc

SEQ ID NO: 224319 - DNA, 201 bp, Homo sapiens
tagaacctcctgtaccatgtggtcggctggaccgactggaaccttgccctgaaccccgaaggaggacccaattgggtgcgtaactttgtcgacagtcccaycattgtagacatcaccaaggacacgttttacaaacagcccatgttctaccaccttggccacttcaggtgagtggagggcgggcacccccattccatacca

SEQ ID NO: 224320 - DNA, 201 bp, Homo sapiens
aagaccaagggagcggggaatgggaaggggccactcaagggacagcccagagacatctaccaccagacctgggccagatacattgtgaagtaagggatcarcaaggatgtgggatcaggactggcctcccctttggccatgctgatctgtgtcccaaccctcaacctggttccacttccagatctgcctgtcctcagctca

SEQ ID NO: 224321 - DNA, 201 bp, Homo sapiens
ggtcggctggaccgactggaaccttgccctgaaccccgaaggaggacccaattgggtgcgtaactttgtcgacagtcccatcattgtagacatcaccaagsacacgttttacaaacagcccatgttctaccaccttggccacttcaggtgagtggagggcgggcacccccattccataccaggcctatcatctcctacatc

SEQ ID NO: 224322 - DNA, 201 bp, Homo sapiens
gctataactgccattaagccatttgtacaattaatcacaacagtgataagagcgacaaaggagctattcgggtggctgaggcgggaggatcttttgagccyaggagttcgagaccagcctggggaatagagcgagatcctgtctcaaaaaaagggggagaaaaagtgacaaagaagttgtgagggctatgagtttgcgtta

SEQ ID NO: 224323 - DNA, 201 bp, Homo sapiens
gtcggctggaccgactggaaccttgccctgaaccccgaaggaggacccaattgggtgcgtaactttgtcgacagtcccatcattgtagacatcaccaaggwcacgttttacaaacagcccatgttctaccaccttggccacttcaggtgagtggagggcgggcacccccattccataccaggcctatcatctcctacatcg

SEQ ID NO: 224324 - DNA, 201 bp, Homo sapiens
cgatgcagaaaagcagggtcagtgcccagcagcatggctccaggcctagagagccagggcagagcctctgcaggagttatggggtgggtccgtgggtgggygacttcttagatgagggtttcatgggaggtaccccgagggactctgaccatctgttcccacattcagcaagttcattcctgagggctcccagagagtggg

SEQ ID NO: 224325 - DNA, 201 bp, Homo sapiens
aggtaccccgagggactctgaccatctgttcccacattcagcaagttcattcctgagggctcccagagagtggggctggttgccagtcagaagaacgaccbggacgcagtggcactgatgcatcccgatggctctcctgttgtggtcgtcctaaaccggtgagggcaatggtgaggtctgggaagtgggctgaagacagcg

SEQ ID NO: 224326 - DNA, 201 bp, Homo sapiens
ccccgagggactctgaccatctgttcccacattcagcaagttcattcctgagggctcccagagagtggggctggttgccagtcagaagaacgacccggacscagtggcactgatgcatcccgatggctctcctgttgtggtcgtcctaaaccggtgagggcaatggtgaggtctgggaagtgggctgaagacagcgttggg

SEQ ID NO: 224327 - DNA, 201 bp, Homo sapiens
attcagcaagttcattcctgagggctcccagagagtggggctggttgccagtcagaagaacgacccggacgcagtggcactgatgcatcccgatggctctsctgttgtggtcgtcctaaaccggtgagggcaatggtgaggtctgggaagtgggctgaagacagcgttgggggccttggcaggatcacactctcagcttct

SEQ ID NO: 224328 - DNA, 201 bp, Homo sapiens; identical to SEQ ID NO: 41696

SEQ ID NO: 224329 - DNA, 201 bp, Homo sapiens; identical to SEQ ID NO: 41805

SEQ ID NO: 224330 - DNA, 201 bp, Homo sapiens
acaggacacacagttctagacctggtatggggagagatccccaggtggcgccagcctggccctgaatagggctctatcccagggctgcataaagggcacaytcagtgccccacagctcttcaggcccctcctgtgcctggctgccctcccaccctacccttttgtacctctgagaaggctctggccccacgcacagcccca

SEQ ID NO: 224331 - DNA, 201 bp, Homo sapiens
ccccccccacccactaagggtgtgctggcgggaaagcgctgagacgcatgcgtagttctcgcgtctggcacccgctccctttccaatacgcttgcgccccrtctgtgctacggatggtcagggagagttgtccgtcttcaaatggaccaatgagacttgtggaggggctctgagtcccgcctctggatgagtgaccgtctc

SEQ ID NO: 224332 - DNA, 201 bp, Homo sapiens
cccacagctcttcaggcccctcctgtgcctggctgccctcccaccctacccttttgtacctctgagaaggctctggccccacgcacagccccactgtcacyagggccagtatctgtctcagggacctcctatccagagcctgagccagccccagccccagccccagctccagctgctccatctgaacctgtatcttcttcc

SEQ ID NO: 224333 - DNA, 201 bp, Homo sapiens
ctaatgaagaagagattataaaatcttcaagtctttatatccacttgctttttgaggggtggagtgggaagaaggttatgtaattcatacgttcttcagasatgtgacaaacattcacggagcccggcgacgagcgtcggggttgggattcgcactggagctgcagatgggtgccaggatggactggtccctaccctccgc

SEQ ID NO: 224334 - DNA, 201 bp, Homo sapiens
caactctgggtgcttctctcttcactacctttgtctctagatacccctgattcaccgagccctgcagttggcccagcgtcccgtttcactccttgccagcycctggacatcacccacttggctcaagaccaatggagcggtgaatgggaaggggtcactcaagggacagcccggagacatctaccaccagacctgggccag

SEQ ID NO: 224335 - DNA, 201 bp, Homo sapiens
cttcaagtctttatatccacttgctttttgaggggtggagtgggaagaaggttatgtaattcatacgttcttcagacatgtgacaaacattcacggagccsggcgacgagcgtcggggttgggattcgcactggagctgcagatgggtgccaggatggactggtccctaccctccgcttgaacctaggaggcggaggttgc

SEQ ID NO: 224336 - DNA, 201 bp, Homo sapiens
tcaagtctttatatccacttgctttttgaggggtggagtgggaagaaggttatgtaattcatacgttcttcagacatgtgacaaacattcacggagcccgrcgacgagcgtcggggttgggattcgcactggagctgcagatgggtgccaggatggactggtccctaccctccgcttgaacctaggaggcggaggttgcag

SEQ ID NO: 224337 - DNA, 201 bp, Homo sapiens
acagatgagaggaagccaattgccctttagaaatatggctgtgattgcctcacttcctgtgtcatgtgacgctcctagtcatcacatgacccatccacatygggaagccggaattacttgcagggctaacctagtgcctatagctaaggcaggtacctgcatccttgtttttgtttagtggatcctctatccttcagagac

SEQ ID NO: 224338 - DNA, 201 bp, Homo sapiens
ttcctgagggctcccagagagtggggctggttgccagtcagaagaacgacccggacgcagtggcactgatgcatcccgatggctctcctgttgtggtcgtsctaaaccggtgagggcaatggtgaggtctgggaagtgggctgaagacagcgttgggggccttggcaggatcacactctcagcttctcctccctgctccct

SEQ ID NO: 224339 - DNA, 201 bp, Homo sapiens
gccaccctaggggagacacaccgcctgttccccaacaccatgctctttgcctcagaggcctgtgtgggctccaagttctgggagcagagtgtgcggctagrctcctgggatcgagggatgcagtacagccacagcatcatcacggtaagccaccccagtctcccttcctgcaaagcagacctcagacctcttactagtttc

SEQ ID NO: 224340 - DNA, 201 bp, Homo sapiens; identical to SEQ ID NO: 41915

SEQ ID NO: 224341 - DNA, 201 bp, Homo sapiens
aagaagttgaggggaaagggcatagcctctgcataccacttccgggtcacttctacgtagttcttggtgtctatccaaaaagtatgtacctggattgggtrggcaggaagaaacaggcaggtctgagccagtgcacctgtctgattcaaggtgggcttctgacctccatgctctcctgagtctctgtgtgggtctgtgtgt

SEQ ID NO: 224342 - DNA, 201 bp, Homo sapiens
gctggtctggtccactttcttggccggatcattcatgacctttctcttgccaggttcctggatgcctatgctgagcacaagttacagttctgggcagtgasagctgaaaatgagccttctgctgggctgttgagtggataccccttccagtgcctgggcttcacccctgaacatcagcgagacttcattgcccgtgaccta

SEQ ID NO: 224343 - DNA, 201 bp, Homo sapiens
ccctagaacctcctgtaccatgtggtcggctggaccgactggaaccttgccctgaaccccgaaggaggacccaattgggtgcgtaactttgtcgacagtcycatcattgtagacatcaccaaggacacgttttacaaacagcccatgttctaccaccttggccacttcaggtgagtggagggcgggcacccccattccata

SEQ ID NO: 224344 - DNA, 201 bp, Homo sapiens
ctgagcctgtgtgtgggtctgtgtgttcccgaaccctccccggctggccatggatgctgggaggtctgggcacactcaccagcaccgggagcaacttctcytccaggagagacatgaaggccagggtgtctgccccttgccgagctgacagatcataatcagcattgtacttctgtggaggaaatatccatggcgtggaca

SEQ ID NO: 224345 - DNA, 201 bp, Homo sapiens
ttcaggcccctcctgtgcctggctgccctcccaccctacccttttgtacctctgagaaggctctggccccacgcacagccccactgtcaccagggccagtwtctgtctcagggacctcctatccagagcctgagccagccccagccccagccccagctccagctgctccatctgaacctgtatcttcttccaagccaccca

SEQ ID NO: 224346 - DNA, 201 bp, Homo sapiens
ggcccctcctgtgcctggctgccctcccaccctacccttttgtacctctgagaaggctctggccccacgcacagccccactgtcaccagggccagtatctrtctcagggacctcctatccagagcctgagccagccccagccccagccccagctccagctgctccatctgaacctgtatcttcttccaagccacccattac

SEQ ID NO: 224347 - DNA, 201 bp, Homo sapiens
ccctcctgtgcctggctgccctcccaccctacccttttgtacctctgagaaggctctggccccacgcacagccccactgtcaccagggccagtatctgtcycagggacctcctatccagagcctgagccagccccagccccagccccagctccagctgctccatctgaacctgtatcttcttccaagccacccattaccct

SEQ ID NO: 224348 - DNA, 201 bp, Homo sapiens
acgcccagggccccccagcttgttccctcagtgcccagctcttggctatttctttcacttcattccatcgcccagacaccattaccacatacacattccayccatacccccaggtctcagcctgccctaccttcccaggctccagtccctgttcctcagcatcccccaccacatcctgagtaagctttgtccccagataac

SEQ ID NO: 224349 - DNA, 201 bp, Homo sapiens
aagaagaacttttgagagcccaggcgctgagagagcagggtcagacactcccgagcctctcggtacagctgtaggggcgacacaggtaggcttgcagctgygggaacagtgccacctccgcacctaagcactcccattcctggccagcatccttggggctcatctcatacaatagcccccggtctcagagctacctccttc

SEQ ID NO: 224350 - DNA, 201 bp, Homo sapiens
gcctcacttcctgtgtcatgtgacgctcctagtcatcacatgacccatccacatcgggaagccggaattacttgcagggctaacctagtgcctatagctawggcaggtacctgcatccttgtttttgtttagtggatcctctatccttcagagactctggaacccctgtggtcttctcttcatctaatgaccctgagggga

SEQ ID NO: 224351 - DNA, 201 bp, Homo sapiens
tggtgtctatccaaaaagtatgtacctggattgggtgggcaggaagaaacaggcaggtctgagccagtgcacctgtctgattcaaggtgggcttctgaccyccatgctctcctgagtctctgtgtgggtctgtgtgtgcccgtcccctccccggctggccatggatgctgggaggtctgggcacactcaccagcaccggga

SEQ ID NO: 224352 - DNA, 201 bp, Homo sapiens
cttgcagggctaacctagtgcctatagctaaggcaggtacctgcatccttgtttttgtttagtggatcctctatccttcagagactctggaacccctgtgstcttctcttcatctaatgaccctgaggggatggagttttcaagtccttccagagaggtaagagagagagctcccaatcagcattgtcacagtgcttctgg

SEQ ID NO: 224353 - DNA, 201 bp, Homo sapiens
atccaaaaagtatgtacctggattgggtgggcaggaagaaacaggcaggtctgagccagtgcacctgtctgattcaaggtgggcttctgacctccatgctytcctgagtctctgtgtgggtctgtgtgtgcccgtcccctccccggctggccatggatgctgggaggtctgggcacactcaccagcaccgggatcaacttc

SEQ ID NO: 224354 - DNA, 201 bp, Homo sapiens
gctaacctagtgcctatagctaaggcaggtacctgcatccttgtttttgtttagtggatcctctatccttcagagactctggaacccctgtggtcttctcytcatctaatgaccctgaggggatggagttttcaagtccttccagagaggtaagagagagagctcccaatcagcattgtcacagtgcttctggaatcctgg

SEQ ID NO: 224355 - DNA, 201 bp, Homo sapiens
agtatgtacctggattgggtgggcaggaagaaacaggcaggtctgagccagtgcacctgtctgattcaaggtgggcttctgacctccatgctctcctgagyctctgtgtgggtctgtgtgtgcccgtcccctccccggctggccatggatgctgggaggtctgggcacactcaccagcaccgggatcaacttctcctccag

SEQ ID NO: 224356 - DNA, 201 bp, Homo sapiens
attcctcattctgtcctcaggaatgtcccaagcctttgagtagggtaagcatcatggctggcagcctcacaggattgcttctacttcaggcagtgtcgtgrgcatcaggtgagtgagtcaaggcagtggggaggtagcacagagcctcccttctgcctcatagtcctttggtagccttccagtaagctggtggtagacttt

SEQ ID NO: 224357 - DNA, 201 bp, Homo sapiens
agtgcctatagctaaggcaggtacctgcatccttgtttttgtttagtggatcctctatccttcagagactctggaacccctgtggtcttctcttcatctartgaccctgaggggatggagttttcaagtccttccagagaggtaagagagagagctcccaatcagcattgtcacagtgcttctggaatcctggcactggaa

SEQ ID NO: 224358 - DNA, 201 bp, Homo sapiens
agcaactttctaacagtaactttcccgacccagacaccacaaagctagcacaacggagctcagatgcaggctaggactcggtccatgcctcaggaaccagrgaaagccatcctcacactccctggatccagggaacccacgcccagggccccccagcttgttccctcagtgcccagctcttggctatttctttcacttcat

SEQ ID NO: 224359 - DNA, 201 bp, Homo sapiens
aagttccagaaagtgaagggatttggaggggccatgacagatgctgctgctctcaacatccttgccctgtcaccccctgcccaaaatttgctacttaaatygtacttctctgaagaaggtgaggaggaaggggacaagatgacatagagccattgaaacttttcatttttcttttctttttttaaaatttttttgaggcag

SEQ ID NO: 224360 - DNA, 201 bp, Homo sapiens
taaggcaggtacctgcatccttgtttttgtttagtggatcctctatccttcagagactctggaacccctgtggtcttctcttcatctaatgaccctgaggkgatggagttttcaagtccttccagagaggtaagagagagagctcccaatcagcattgtcacagtgcttctggaatcctggcactggaatttaatgaatga

SEQ ID NO: 224361 - DNA, 201 bp, Homo sapiens
gccatcttcactcactgtaacctctgcctcctgagttcaagcaattctcctgcctcagccttccaagtagctgggattataggcgcctgccaccaggcccrgctgatttttctatttttagtagagacggggtttcgccaggctgttctcgaactcctgaactcaagtgatccacctgcctcggcttcccaaagtgctggg

SEQ ID NO: 224362 - DNA, 201 bp, Homo sapiens
tcctcacactccctggatccagggaacccacgcccagggccccccagcttgttccctcagtgcccagctcttggctatttctttcacttcattccatcgcycagacaccattaccacatacacattccatccatacccccaggtctcagcctgccctaccttcccaggctccagtccctgttcctcagcatcccccaccac

SEQ ID NO: 224363 - DNA, 201 bp, Homo sapiens
ggccctgactcagacactattaggactggcaagtgataagcagagtcccatactctcctattgactcggactaccatatcttgatcatccttttctgtagraatcggatataacatcatccgggtacccatggccagctgtgacttctccatccgcacctacacctatgcagacacccctgatgatttccagttgcacaac

SEQ ID NO: 224364 - DNA, 201 bp, Homo sapiens
tcgaagttgaaatgggtgggaagagtggtggggagcatcctgatttggggtgggcagagagttgtcatcagaagggttgcagggagagctgcacccaggtktctgtgggccttgtcctaatgaatgtgggagaccgggccatgggcacccaaaggcagctaagccctgcccaggagagtagttgaggggtggagaggggct

SEQ ID NO: 224365 - DNA, 201 bp, Homo sapiens
atccttaaatctccctaagcctcagtttctcccctgtggaatgggggtaagaatctctttctctgaatgcccctgtgttaggaaataatttagaatacttyggaaacaaaaagctctgttcacacctaagcaatcagggcagtggccctggccttgccaggaacttaggcttttatctggatcctctttccaggcctctca

SEQ ID NO: 224366 - DNA, 201 bp, Homo sapiens
agacactattaggactggcaagtgataagcagagtcccatactctcctattgactcggactaccatatcttgatcatccttttctgtaggaatcggatatracatcatccgggtacccatggccagctgtgacttctccatccgcacctacacctatgcagacacccctgatgatttccagttgcacaacttcagcctccc

SEQ ID NO: 224367 - DNA, 201 bp, Homo sapiens
catcctgatttggggtgggcagagagttgtcatcagaagggttgcagggagagctgcacccaggtttctgtgggccttgtcctaatgaatgtgggagaccrggccatgggcacccaaaggcagctaagccctgcccaggagagtagttgaggggtggagaggggcttgcttttcagtcattcctcattctgtcctcaggaa

SEQ ID NO: 224368 - DNA, 201 bp, Homo sapiens
attaggactggcaagtgataagcagagtcccatactctcctattgactcggactaccatatcttgatcatccttttctgtaggaatcggatataacatcayccgggtacccatggccagctgtgacttctccatccgcacctacacctatgcagacacccctgatgatttccagttgcacaacttcagcctcccagaggaa

SEQ ID NO: 224369 - DNA, 201 bp, Homo sapiens
aagggttgcagggagagctgcacccaggtttctgtgggccttgtcctaatgaatgtgggagaccgggccatgggcacccaaaggcagctaagccctgcccrggagagtagttgaggggtggagaggggcttgcttttcagtcattcctcattctgtcctcaggaatgtcccaagcctttgagtagggtaagcatcatggct

SEQ ID NO: 224370 - DNA, 201 bp, Homo sapiens
aggactggcaagtgataagcagagtcccatactctcctattgactcggactaccatatcttgatcatccttttctgtaggaatcggatataacatcatccrggtacccatggccagctgtgacttctccatccgcacctacacctatgcagacacccctgatgatttccagttgcacaacttcagcctcccagaggaagat

SEQ ID NO: 224371 - DNA, 201 bp, Homo sapiens
gtttctgtgggccttgtcctaatgaatgtgggagaccgggccatgggcacccaaaggcagctaagccctgcccaggagagtagttgaggggtggagagggrcttgcttttcagtcattcctcattctgtcctcaggaatgtcccaagcctttgagtagggtaagcatcatggctggcagcctcacaggattgcttctactt

SEQ ID NO: 224372 - DNA, 201 bp, Homo sapiens
gtccattctccatgtcttcatcagacctcactctgcttgtactccctccctcccaggtgcccgcccctgcatccctaaaagcttcggctacagctcggtgstgtgtgtctgcaatgccacatactgtgactcctttgaccccccgacctttcctgcccttggtaccttcagccgctatgagagtacacgcagtgggcgacg

SEQ ID NO: 224373 - DNA, 201 bp, Homo sapiens
gaaaatgagccttctgctgggctgttgagtggataccccttccagtgcctgggcttcacccctgaacatcagcgagacttcattgcccgtgacctaggtcbtaccctcgccaacagtactcaccacaatgtccgcctactcatgctggatgaccaacgcttgctgctgccccactgggcaaaggtggtaaggcctggacct

SEQ ID NO: 224374 - DNA, 201 bp, Homo sapiens
ctgtgtgcaaggtccaggatcagttgctcttcctttgcaggtactgacagacccagaagcagctaaatatgttcatggcattgctgtacattggtacctgsactttctggctccagccaaagccaccctaggggagacacaccgcctgttccccaacaccatgctctttgcctcagaggcctgtgtgggctccaagttctg

SEQ ID NO: 224375 - DNA, 201 bp, Homo sapiens
ggcaggaagaaacaggcaggtctgagccagtgcacctgtctgattcaaggtgggcttctgacctccatgctctcctgagtctctgtgtgggtctgtgtgtkcccgtcccctccccggctggccatggatgctgggaggtctgggcacactcaccagcaccgggatcaacttctcctccaggagagacatgaaggccagggt

SEQ ID NO: 224376 - DNA, 201 bp, Homo sapiens
agaaatctctctccagtcccactatcagaggccaactgctgtcttccagtctccttcagcctgtgctcctctccctccctgactgacaggcagaaggtacygtgcctctggatatccccacagtgccctgagctgcatctcttgctgactgctttaatacatcacagtgacattgtgtgtgtctctgccaccagactattg

SEQ ID NO: 224377 - DNA, 201 bp, Homo sapiens; identical to SEQ ID NO: 41635

SEQ ID NO: 224378 - DNA, 201 bp, Homo sapiens
tcaccgagccctgcagttggcccagcgtcccgtttcactccttgccagcccctggacatcacccacttggctcaagaccaatggagcggtgaatgggaagkggtcactcaagggacagcccggagacatctaccaccagacctgggccagatactttgtgaagtaagggatcagcaaggatgtgggatcaggactggcctc

SEQ ID NO: 224379 - DNA, 201 bp, Homo sapiens
tctggtccactttcttggccggatcattcatgacctttctcttgccaggttcctggatgcctatgctgagcacaagttacagttctgggcagtgacagctkaaaatgagccttctgctgggctgttgagtggataccccttccagtgcctgggcttcacccctgaacatcagcgagacttcattgcccgtgacctaggtcc

SEQ ID NO: 224380 - DNA, 201 bp, Homo sapiens
tgacattgtgtgtgtctctgccaccagactattgctccttgatgctctgggtcacctgcatctagcatggcatatatctagtgctcaataaatgtgtattgtacagaattgactgaacttctctcactggcagccccctctatccaaatcacccacctctttttgaaggtgggtgatgatcttgtgtggtactgaggtgac

SEQ ID NO: 224381 - DNA, 201 bp, Homo sapiens
cagcgtcccgtttcactccttgccagcccctggacatcacccacttggctcaagaccaatggagcggtgaatgggaaggggtcactcaagggacagcccgragacatctaccaccagacctgggccagatactttgtgaagtaagggatcagcaaggatgtgggatcaggactggcctcccatttagccatgctgatctgt

SEQ ID NO: 224382 - DNA, 201 bp, Homo sapiens; identical to SEQ ID NO: 41745

SEQ ID NO: 224383 - DNA, 201 bp, Homo sapiens
gtgtctgtgggccttgtcctaatgaatgtgggagaccaggccatgggcacccaaaggcagctaagccctgcccgggagagtagttgaggggtggagagggrcttgcttttcagtcattcctcattctgtcctcaggaatgtcccaagccttcgggtagggtaagcatcatggctggcagcctcacaggattgcttctactt

SEQ ID NO: 224384 - DNA, 201 bp, Homo sapiens
ggtccaggatcagttgctcttcctttgcaggtactgacagacccagaagcagctaaatatgttcatggcattgctgtacattggtacctggactttctggmtccagccaaagccaccctaggggagacacaccgcctgttccccaacaccatgctctttgcctcagaggcctgtgtgggctccaagttctgggagcagagt

SEQ ID NO: 224385 - DNA, 201 bp, Homo sapiens
attgtgtgtgtctctgccaccagactattgctccttgatgctctgggtcacctgcatctagcatggcatatatctagtgctcaataaatgtgtattgtacrgaattgactgaacttctctcactggcagccccctctatccaaatcacccacctctttttgaaggtgggtgatgatcttgtgtggtactgaggtgacctct

SEQ ID NO: 224386 - DNA, 201 bp, Homo sapiens
gttatcctttacaaacttttacacctctcctgaactggttaacagtagagggccccaagggtctcacgtaagccttctttgtttttgttttttttcttttmttttattttttatatatttttttgagacggagtcttgctctgttgcccgggctggagtgcagttgcacgatctcggctcactgcaagctctgcctcccag

SEQ ID NO: 224387 - DNA, 201 bp, Homo sapiens
ttagccaggatggtctcgatctgctgacctcgtgatctgcctgcgtcggcctcccaaagtgctgggattacaggcatgagccactgcacccggccatcaattttttttttttttaaatggagtcttgctctgtcacccaggttggagtgtaacagtgcaatcttggctcattgcaacctccgcctcttgggttcaagcgat

SEQ ID NO: 224388 - DNA, 201 bp, Homo sapiens
ctggacatcacccacttggctcaagaccaatggagcggtgaatgggaaggggtcactcaagggacagcccggagacatctaccaccagacctgggccagayactttgtgaagtaagggatcagcaaggatgtgggatcaggactggcctcccatttagccatgctgatctgtgtcccaaccctcaacctagttccacttcc

SEQ ID NO: 224389 - DNA, 201 bp, Homo sapiens
cagcgagacttcattgcccgtgacctaggtcctaccctcgccaacagtactcaccacaatgtccgcctactcatgctggatgaccaacgcttgctgctgcyccactgggcaaaggtggtaaggcctggacctccatggtgctccagtgaccttcaaatccagcatccaaatgactggctcccaaacttagagcgatttctc

SEQ ID NO: 224390 - DNA, 201 bp, Homo sapiens
ctgcatccctaaaagcttcggctacagctcggtggtgtgtgtctgcaatgccacatactgtgactcctttgaccccccgacctttcctgcccttggtaccktcagccgctatgagagtacacgcagtgggcgacggatggagctgagtatggggcccatccaggctaatcacacgggcacaggtaaccattacacccctca

SEQ ID NO: 224391 - DNA, 201 bp, Homo sapiens
cctcaacaaacactcgttaagatactaacgtggcagagtggggccttgtaaacagtttcaggaccctgtgcttgtaagagcaacgtggtgccctcccaagraagacagggaggatgcaggagcactgcccagagatggcgtcaggctgcaagacatcttgaataattcaccatcgtaacaacccagcctcaggaagagatg

SEQ ID NO: 224392 - DNA, 201 bp, Homo sapiens
cctctcccacatgtgacccttacctacactctctggggacccccagtgttgagcctttgtctctttgcctttgtccttaccctagaacctcctgtaccatktggtcggctggaccgactggaaccttgccctgaaccccgaaggaggacccaattgggtgcgtaactttgtcgacagtcccatcattgtagacatcaccaa

SEQ ID NO: 224393 - DNA, 201 bp, Homo sapiens
aaagcttcggctacagctcggtggtgtgtgtctgcaatgccacatactgtgactcctttgaccccccgacctttcctgcccttggtaccttcagccgctaygagagtacacgcagtgggcgacggatggagctgagtatggggcccatccaggctaatcacacgggcacaggtaaccattacacccctcaccccctgggcc

SEQ ID NO: 224394 - DNA, 201 bp, Homo sapiens
ccgtctcttttccaagtgaggccccgccccgcctccccagggctgcttttctcgcggcacgggtggtggggctgcttcttgacttccgcgcctagtgcgcrgggccccattctccagtcccgcccacgcgcctttggaggctgcggtgggatttccttttgccttcggttggggctgctgtttctcttcgccgacggtagg

SEQ ID NO: 224395 - DNA, 201 bp, Homo sapiens
cattcctgagggctcccagagagtggggctggttgccagtcagaagaacgacccggacgcagtggcactgatgcatcccgatggctctcctgttgtggtcrtcctaaaccggtgagggcaatggtgaggtctgggaagtgggctgaagacagcgttgggggccttggcaggatcacactctcagcttctcctccctgctcc

SEQ ID NO: 224396 - DNA, 201 bp, Homo sapiens
aagcttcggctacagctcggtggtgtgtgtctgcaatgccacatactgtgactcctttgaccccccgacctttcctgcccttggtaccttcagccgctatragagtacacgcagtgggcgacggatggagctgagtatggggcccatccaggctaatcacacgggcacaggtaaccattacacccctcaccccctgggcca

SEQ ID NO: 224397 - DNA, 201 bp, Homo sapiens
atgtacctggattgggtgggcaggaagaaacaggcaggtctgagccagtgcacctgtctgattcaaggtgggcttctgacctccatgctctcctgagtctstgtgtgggtctgtgtgtgcccgtcccctccccggctggccatggatgctgggaggtctgggcacactcaccagcaccgggatcaacttctcctccaggag

SEQ ID NO: 224398 - DNA, 201 bp, Homo sapiens
cttcctaaagttgtcattcacatataccctccagaattttatagggtgtataatctgtaacaactcggaggaagccaattgccctttagaaatatggctgyaattgcctcacttcctgtgtcatgtgactctcctagtcatcacatgacccatccacattgggaagccagaattacttgcaggagtaacctagtgcctata

SEQ ID NO: 224399 - DNA, 201 bp, Homo sapiens
agggctcccagagagtggggctggttgccagtcagaagaacgacccggacgcagtggcactgatgcatcccgatggctctcctgttgtggtcgtcctaaascggtgagggcaatggtgaggtctgggaagtgggctgaagacagcgttgggggccttggcaggatcacactctcagcttctcctccctgctccctagctcc

SEQ ID NO: 224400 - DNA, 201 bp, Homo sapiens
tcggctacagctcggtggtgtgtgtctgcaatgccacatactgtgactcctttgaccccccgacctttcctgcccttggtaccttcagccgctatgagagyacacgcagtgggcgacggatggagctgagtatggggcccatccaggctaatcacacgggcacaggtaaccattacacccctcaccccctgggccaggctg

SEQ ID NO: 224401 - DNA, 201 bp, Homo sapiens
ccttttatagatgaaatagaggcttagagtgattgatttactgaaggtcaaacagccagtaaatggtgtagcaaggattccaaccttgccgtctcactaaractgtacaaaaaaagatacaaacaacagacaaatagttcccaggcgcctcccaagttgccaggcactgcatttacctcactgacccctttgaggttgtgg

SEQ ID NO: 224402 - DNA, 201 bp, Homo sapiens
tccagaattttatagggtgtataatctgtaacaactcggaggaagccaattgccctttagaaatatggctgcaattgcctcacttcctgtgtcatgtgackctcctagtcatcacatgacccatccacattgggaagccagaattacttgcaggagtaacctagtgcctatagctatggcaggtacctgcatccttgtttt

SEQ ID NO: 224403 - DNA, 201 bp, Homo sapiens
ggctacagctcggtggtgtgtgtctgcaatgccacatactgtgactcctttgaccccccgacctttcctgcccttggtaccttcagccgctatgagagtabacgcagtgggcgacggatggagctgagtatggggcccatccaggctaatcacacgggcacaggtaaccattacacccctcaccccctgggccaggctggg

SEQ ID NO: 224404 - DNA, 201 bp, Homo sapiens
gtgcccctgcatccctaaaagcttcagtacagctcggtggtctgtgtctgcaatgccacatactgtgactcttgaccccccgacctttcctgccctaggtrccttcagccgctacaagagcagaagcagtgggcattggatggagctgagtacaggaccatacaggctaattgcaccggcacaggtaaccattacaccctt

SEQ ID NO: 224405 - DNA, 201 bp, Homo sapiens
tctcctattgactcggactaccatatcttgatcatccttttctgtaggaatcggatataacatcatccgggtacccatggccagctgtgacttctccatcygcacctacacctatgcagacacccctgatgatttccagttgcacaacttcagcctcccagaggaagataccaagctcaaggtaggcattctagctttttc

SEQ ID NO: 224406 - DNA, 201 bp, Homo sapiens
ctacagctcggtggtgtgtgtctgcaatgccacatactgtgactcctttgaccccccgacctttcctgcccttggtaccttcagccgctatgagagtacamgcagtgggcgacggatggagctgagtatggggcccatccaggctaatcacacgggcacaggtaaccattacacccctcaccccctgggccaggctgggtc

SEQ ID NO: 224407 - DNA, 201 bp, Homo sapiens
ccagcgtcccgtttcactccttgccagcccctggacatcacccacttggctcaagaccaagggagcggggaatgggaaggggccactcaagggacagcccrgagacatctaccaccagacctgggccagatacattgtgaagtaagggatcagcaaggatgtgggatcaggactggcctcccctttggccatgctgatctg

SEQ ID NO: 224408 - DNA, 201 bp, Homo sapiens
ggtgtgtgtctgcaatgccacatactgtgactcctttgaccccccgacctttcctgcccttggtaccttcagccgctatgagagtacacgcagtgggcgayggatggagctgagtatggggcccatccaggctaatcacacgggcacaggtaaccattacacccctcaccccctgggccaggctgggtcctcctagaggta

SEQ ID NO: 224409 - DNA, 201 bp, Homo sapiens
tccagggtgccatggatcccacagttgggacttgaaacctctctaggctgggggtggtagctcatggctataattccagcactttgggaacccaaggtggktggatcacttgaacctaaggagttcaagatgagcctgggaaacatggtgaaaccctaactctacaaaaaaaaaaatagaaaagttagccgggtgtggtgg

SEQ ID NO: 224410 - DNA, 201 bp, Homo sapiens; identical to SEQ ID NO: 41919

SEQ ID NO: 224411 - DNA, 201 bp, Homo sapiens
ccatggagtttcccgctgggtactgatacccttattccctgtggatgtcctcaggcctgctactgaccctgcagccagaacagaagttccagaaagtgaasggatttggaggggccatgacagatgctgctgctctcaacatccttgccctgtcaccccctgcccaaaatttgctacttaaatcgtacttctctgaagaag

SEQ ID NO: 224412 - DNA, 201 bp, Homo sapiens
ttattccctgtggatgtcctcaggcctgctactgaccctgcagccagaacagaagttccagaaagtgaagggatttggaggggccatgacagatgctgctrctctcaacatccttgccctgtcaccccctgcccaaaatttgctacttaaatcgtacttctctgaagaaggtgaggaggaaggggacaagatgacatagag

SEQ ID NO: 224413 - DNA, 201 bp, Homo sapiens
tggccaggatgattgcgaactcctgacctcgtgatctgcccacatcggcctcccaaagtgctgggattacatgcgtgagccactgacacttttctttgccmtttctttggaccctgacttctgcccatccctgacatttggttcctgttttaatgccctgtgaaataagatttcgccgcctatcatctgctaactgctacg

SEQ ID NO: 224414 - DNA, 201 bp, Homo sapiens
ttagctactaaggaatgtgcccctcacagggctgacctacccacagctgcctctcccacatgtgacccttacctacactctctggggacccccagtgttgmgcctttgtctctttgcctttgtccttaccctagaacctcctgtaccatgtggtcggctggaccgactggaaccttgccctgaaccccgaaggaggaccca

SEQ ID NO: 224415 - DNA, 201 bp, Homo sapiens
attctccatgtcttcatcagacctcactctgcttgtactccctccctcccaggtgcccgcccctgcatccctaaaagcttcggctacagctcggtggtgtstgtctgcaatgccacatactgtgactcctttgaccccccgacctttcctgcccttggtaccttcagccgctatgagagtacacgcagtgggcgacggatg

SEQ ID NO: 224416 - DNA, 201 bp, Homo sapiens
accctaggggagacacaccgcctgttccccaacaccatgctctttgcctcagaggcctgtgtgggctccaagttctgggagcagagtgtgcggctaggctyctgggatcgagggatgcagtacagccacagcatcatcacggtaagccaccccagtctcccttcctgcaaagcagacctcagacctcttactagtttcacc

SEQ ID NO: 224417 - DNA, 201 bp, Homo sapiens
caggctccagtccctgttcctcagcatccccctccacatcctgagtaagctttgtccccagataacctcttcagcatgatccttaaatctccctaagcctyagtttctcccctgtggaatgggggtaagaatctctttctctgaatgcccctgtgttaggaaataatttagaatactttggaaactggaaaagctctgttc

SEQ ID NO: 224418 - DNA, 201 bp, Homo sapiens
acgcccagggccccccagcttgttccctcagtgcccagctcttggctatttctttcacttcattccatcgctcagacaccattaccacatacacattccayccatacccccaggtctcagcctgccctaccttcccaggctccagtccctgttcctcagcatccccctccacatcctgagtaagctttgtccccagataac

SEQ ID NO: 224419 - DNA, 201 bp, Homo sapiens
ggcaactttctaacagtaacttccccgacccagacaccacaaagctagcacaacggagctcagatgcaggctaggactcggtccatgcctcaggaaccagrgaaagccatcctcacactccctggatccagggaacccacgcccagggccccccagcttgttccctcagtgcccagctcttggctatttctttcacttcat

SEQ ID NO: 224420 - DNA, 201 bp, Homo sapiens
gggcatagcctctgcataccacttccgggtcacttccacgtagttcttggtgtctatccaaaaagtatgtacctggattgggtaggcaggaagaaacaggyaggtctgagccagtgcacctgtctgattcaaggtgggcttctgacccccatgctttcctgagcctgtgtgtgggtctgtgtgttcccgaaccctccccgg

SEQ ID NO: 224421 - DNA, 201 bp, Homo sapiens
gcagctgtagccgttccatgtactgccgctgcatgcggccaggcaggaagaagttgaggggaaagggcatagcctctgcataccacttccgggtcacttcyacgtagttcttggtgtctatccaaaaagtatgtacctggattgggtaggcaggaagaaacaggtaggtctgagccagtgcacctgtctgattcaaggtgg

SEQ ID NO: 224422 - DNA, 201 bp, Homo sapiens
ccaggcgctgagagagcagggtcagacactcccgagcctctcggtacagctgtaggggcgacacaggtaggcttgcagctgtgggaacagtgccacctccscacctaagcactcccattcctggccagcatccttggggctcatctcatacaatagcccccggtctcagagctacctccttctccagctcttcctcgtcct

SEQ ID NO: 224423 - DNA, 201 bp, Homo sapiens
aagaagaacttttgagagcccaggcgctgagagagcagggtcagacactcccgagcctctcggtacagctgtaggggcgacacaggtaggcttgcagctgygggaacagtgccacctccccacctaagcactcccattcctggccagcatccttggggctcatctcatacaatagcccccggtctcagagctacctccttc

SEQ ID NO: 224424 - DNA, 201 bp, Homo sapiens
tggggagagatccccaggtggcgccagcctggccctgaatagggctctatcccagggctgcataaagggcacattcagtgccccacagctcttcaggcccytcctgtgcctggctgccctcccaccctacccttttgtacctctgagaaggctctggccccacgcacagccccactgtcaccagggccagtatctgtctca

SEQ ID NO: 224425 - DNA, 201 bp, Homo sapiens; identical to SEQ ID NO: 41677

SEQ ID NO: 224426 - DNA, 201 bp, Homo sapiens
ggccaggatgattgcgaactcctgacctcgtgatctgcccacatcggcctcccaaagtgctgggattacatgcgtgagccactgacacttttctttgcccwttctttggaccctgacttctgcccatccctgacatttggttcctgttttaatgccctgtgaaataagatttcgccgcctatcatctgctaactgctacgg

SEQ ID NO: 224427 - DNA, 201 bp, Homo sapiens
actatgcagaggggaagtggaaggagatgtttggacttctaaactcaatagagcaggagaggcaaatgtagaatgtgctcaggaaatatctgtgagatgawtgaacttgagggaagtaaggtactagatattacctgccctacccagaacaaatcctgtgcaatgtttccttgaaaagtgagaagtctggaaggggtggct

SEQ ID NO: 224428 - DNA, 201 bp, Homo sapiens
cctcccaaagtgctgggattacatgcgtgagccactgacacttttctttgccctttctttggaccctgacttctgcccatccctgacatttggttcctgtyttaatgccctgtgaaataagatttcgccgcctatcatctgctaactgctacggactcaggctcagaaaggcctgcgcttcacccaggtgccagcctccac

SEQ ID NO: 224429 - DNA, 201 bp, Homo sapiens
gaaatgatcaattttgcttggagtgtatctagaaagacttcactgagatcatttaaagaacaaaaaggatggctggggtccagcgcagtggctcatgcctrtaatcccagcactttcggataccaaggcagcagatcacctgaggtccagagtttcagaccagcctggccaacatagtgaaaccccatctctactaaaaat

SEQ ID NO: 224430 - DNA, 201 bp, Homo sapiens
gtgagccactgacacttttctttgccctttctttggaccctgacttctgcccatccctgacatttggttcctgttttaatgccctgtgaaataagatttcsccgcctatcatctgctaactgctacggactcaggctcagaaaggcctgcgcttcacccaggtgccagcctccacaggttccaacccaggagcccaagttc

SEQ ID NO: 224431 - DNA, 201 bp, Homo sapiens
gtccagcgcagtggctcatgcctgtaatcccagcactttcggataccaaggcagcagatcacctgaggtccagagtttcagaccagcctggccaacatagygaaaccccatctctactaaaaataaaaaaattagctgagcatgttggagggcacctgtaatcccagctacttgggaggctgaggcaggagaatcactcga

SEQ ID NO: 224432 - DNA, 201 bp, Homo sapiens
taggactggcaagtgataagcagagtcccatactctcctattgactcggactaccatatcttgatcatccttttctgtaggaatcggatataacatcatcygggtacccatggccagctgtgacttctccatccgcacctacacctatgcagacacccctgatgatttccagttgcacaacttcagcctcccagaggaaga

SEQ ID NO: 224433 - DNA, 201 bp, Homo sapiens
ctctactaaaaataaaaaaattagctgagcatgttggagggcacctgtaatcccagctacttgggaggctgaggcaggagaatcactcgaacccaggaggyggaggttgcagtgagccaagatcacgccactgcactccagcctgggcaacagagtgagactctgtctcaaaaaacaacaacaacaaaaaatacaaacaag

SEQ ID NO: 224434 - DNA, 201 bp, Homo sapiens
ggactaccatatcttgatcatccttttctgtaggaatcggatataacatcatccgggtacccatggccagctgtgacttctccatccgcacctacacctakgcagacacccctgatgatttccagttgcacaacttcagcctcccagaggaagataccaagctcaaggtaggcattctagctttttcaggccctgagggcc

SEQ ID NO: 224435 - DNA, 201 bp, Homo sapiens
actaccatatcttgatcatccttttctgtaggaatcggatataacatcatccgggtacccatggccagctgtgacttctccatccgcacctacacctatgmagacacccctgatgatttccagttgcacaacttcagcctcccagaggaagataccaagctcaaggtaggcattctagctttttcaggccctgagggccct

SEQ ID NO: 224436 - DNA, 201 bp, Homo sapiens
gatctgcctgtcctcagctcacctttctaccttctgggcctttcagccttgggcctgtcaatcttgcccactccatcaggcttcctgttctctcggtctgrcccactttctttttatttttcttcttttttttttttttgagaaggagtctctctctctgtcacccaggctggagtgctgtggcgccatcttcactcactg

SEQ ID NO: 224437 - DNA, 201 bp, Homo sapiens
tgttccaactctgggtgcttctctcttcactacctttgtctctagatacccctgattcaccgagccctgcagttggcccagcgtcccgtttcactccttgmcagcccctggacatcacccacttggctcaagaccaatggagcggtgaatgggaaggggtcactcaagggacagcccggagacatctaccaccagacctgg

SEQ ID NO: 224438 - DNA, 201 bp, Homo sapiens
tctgggtgcttctctcttcactacctttgtctctagatacccctgattcaccgagccctgcagttggcccagcgtcccgtttcactccttgccagcccctrgacatcacccacttggctcaagaccaatggagcggtgaatgggaaggggtcactcaagggacagcccggagacatctaccaccagacctgggccagatac

SEQ ID NO: 224439 - DNA, 201 bp, Homo sapiens
cttctctcttcactacctttgtctctagatacccctgattcaccgagccctgcagttggcccagcgtcccgtttcactccttgccagcccctggacatcamccacttggctcaagaccaatggagcggtgaatgggaaggggtcactcaagggacagcccggagacatctaccaccagacctgggccagatactttgtgaa

SEQ ID NO: 224440 - DNA, 201 bp, Homo sapiens
ccagtctccttcagcctgtgctcctctccctccctgactgacaggcagaaggtactgtgcctctggatatccccacagtgccctgagctgcatctcttgcygactgctttaatacatcacagtgacattgtgtgtgtctctgccaccagactattgctccttgatgctctgggtcacctgcatctagcatggcatatatct

SEQ ID NO: 224441 - DNA, 201 bp, Homo sapiens
tcttcactacctttgtctctagatacccctgattcaccgagccctgcagttggcccagcgtcccgtttcactccttgccagcccctggacatcacccactyggctcaagaccaatggagcggtgaatgggaaggggtcactcaagggacagcccggagacatctaccaccagacctgggccagatactttgtgaagtaagg

SEQ ID NO: 224442 - DNA, 201 bp, Homo sapiens
gcggccaggcaggaagaagttgaggggaaagggcatagcctctgcataccacttccgggtcacttctacgtagttcttggtgtctatccaaaaagtatgtmcctggattgggtgggcaggaagaaacaggcaggtctgagccagtgcacctgtctgattcaaggtgggcttctgacctccatgctctcctgagtctctgtg

SEQ ID NO: 224443 - DNA, 201 bp, Homo sapiens
gctagtatgtgttccaactctgggtgcttctctcttcactacctttgtctctagatacccctgattcaccgagccctgcagttggcccagcgtcccgtttsactccttgccagcccctggacatcacccacttggctcaagaccaatggagcggtgaatgggaaggggtcactcaagggacagcccggagacatctaccac

SEQ ID NO: 224444 - DNA, 201 bp, Homo sapiens
gggtaggcaggaagaaacaggtaggtctgagccagtgcacctgtctgattcaaggtgggcttctgacccccatgctttcctgagcctgtgtgtgggtctgwgtgttcccgaaccctccccggctggccatggatgctgggaggtctgggcacactcaccagcaccgggagcaacttctcctccaggagagacatgaaggcc

SEQ ID NO: 224445 - DNA, 201 bp, Homo sapiens
gttccagaagcctgtgtgcaaggtccaggatcagttgctcttcctttgcaggtactgacagacccagaagcagctaaatatgttcatggcattgctgtacrttggtacctggactttctggctccagccaaagccaccctaggggagacacaccgcctgttccccaacaccatgctctttgcctcagaggcctgtgtgggc

SEQ ID NO: 224446 - DNA, 201 bp, Homo sapiens
ctcctattgactcggactaccatatcttgatcatccttttctgtaggaatcggatataacatcatccgggtacccatggccagctgtgacttctccatcckcacctacacctatgcagacacccctgatgatttccagttgcacaacttcagcctcccagaggaagataccaagctcaaggtaggcattctagctttttca

SEQ ID NO: 224447 - DNA, 201 bp, Homo sapiens
actcggactaccatatcttgatcatccttttctgtaggaatcggatataacatcatccgggtacccatggccagctgtgacttctccatccgcacctacayctatgcagacacccctgatgatttccagttgcacaacttcagcctcccagaggaagataccaagctcaaggtaggcattctagctttttcaggccctgag

SEQ ID NO: 224448 - DNA, 201 bp, Homo sapiens
ttgatcatccttttctgtaggaatcggatataacatcatccgggtacccatggccagctgtgacttctccatccgcacctacacctatgcagacacccctsatgatttccagttgcacaacttcagcctcccagaggaagataccaagctcaaggtaggcattctagctttttcaggccctgagggccctgatgtctgggg

SEQ ID NO: 224449 - DNA, 201 bp, Homo sapiens; identical to SEQ ID NO: 41690

SEQ ID NO: 224450 - DNA, 201 bp, Homo sapiens
tcctttgcaggtactgacagacccagaagcagctaaatatgttcatggcattgctgtacattggtacctggactttctggctccagccaaagccaccctakgggagacacaccgcctgttccccaacaccatgctctttgcctcagaggcctgtgtgggctccaagttctgggagcagagtgtgcggctaggctcctggga

SEQ ID NO: 224451 - DNA, 201 bp, Homo sapiens; identical to SEQ ID NO: 224330

SEQ ID NO: 224452 - DNA, 201 bp, Homo sapiens
tccagccaaagccaccctaggggagacacaccgcctgttccccaacaccatgctctttgcctcagaggcctgtgtgggctccaagttctgggagcagagtstgcggctaggctcctgggatcgagggatgcagtacagccacagcatcatcacggtaagccaccccagtctcccttcctgcaaagcagacctcagacctct

SEQ ID NO: 224453 - DNA, 201 bp, Homo sapiens; identical to SEQ ID NO: 41696

SEQ ID NO: 224454 - DNA, 201 bp, Homo sapiens
agccaaagccaccctaggggagacacaccgcctgttccccaacaccatgctctttgcctcagaggcctgtgtgggctccaagttctgggagcagagtgtgsggctaggctcctgggatcgagggatgcagtacagccacagcatcatcacggtaagccaccccagtctcccttcctgcaaagcagacctcagacctcttac

SEQ ID NO: 224455 - DNA, 201 bp, Homo sapiens
gaatgtgcccctcacagggctgacctacccacagctgcctctcccacacgtgacccttacctacactctctggggacccccagtgttgcgcctttgtctcyttgcctttgtccttaccctagaacctcctgtaccatgtggtcggctggaccgactggaacccatcattgtagacatcaccaagcacacgttttacaaaca

SEQ ID NO: 224456 - DNA, 201 bp, Homo sapiens
ctttctaccttctgggcctttcaaacttggatctgtcagtcttgcccactccatcaggcttcctgttctctcggtctggcccactttcttggctggatcaytcatgacctttctcttgccaggttcctggatgcctatgctgagcacaagttacagttctgggcagtgacagctgaaaatgagccttctgctgggctgttg

SEQ ID NO: 224457 - DNA, 201 bp, Homo sapiens
ccctgtcaccccctgcccaaaatttgctacttaaatcgtacttctctgaagaaggtgaggaggaaggggacaagatgacatagagccattgaaacttttcrtttttcttttctttttttaaaatttttttgaggcagaatctcactctgcccattctgtcggcgagacaggagtgcagtggtgtgatctcccctcacagca

SEQ ID NO: 224458 - DNA, 201 bp, Homo sapiens
gacccccagtgttgagcctttgtctctttgcctttgtccttaccctagaacctcctgtaccatgtggtcggctggaccgactggaaccttgccctgaaccycgaaggaggacccaattgggtgcgtaactttgtcgacagtcccatcattgtagacatcaccaaggacacgttttacaaacagcccatgttctaccacctt

SEQ ID NO: 224459 - DNA, 201 bp, Homo sapiens
cagtgttgagcctttgtctctttgcctttgtccttaccctagaacctcctgtaccatgtggtcggctggaccgactggaaccttgccctgaaccccgaagraggacccaattgggtgcgtaactttgtcgacagtcccatcattgtagacatcaccaaggacacgttttacaaacagcccatgttctaccaccttggccac

SEQ ID NO: 224460 - DNA, 201 bp, Homo sapiens; identical to SEQ ID NO: 224291

SEQ ID NO: 224461 - DNA, 201 bp, Homo sapiens; identical to SEQ ID NO: 224398

SEQ ID NO: 224462 - DNA, 201 bp, Homo sapiens; identical to SEQ ID NO: 224262

SEQ ID NO: 224463 - DNA, 201 bp, Homo sapiens; identical to SEQ ID NO: 224401

SEQ ID NO: 224464 - DNA, 201 bp, Homo sapiens; identical to SEQ ID NO: 224402

SEQ ID NO: 224465 - DNA, 201 bp, Homo sapiens; identical to SEQ ID NO: 224404

SEQ ID NO: 224466 - DNA, 201 bp, Homo sapiens; identical to SEQ ID NO: 224407

SEQ ID NO: 224467 - DNA, 201 bp, Homo sapiens; identical to SEQ ID NO: 224306

SEQ ID NO: 224468 - DNA, 201 bp, Homo sapiens; identical to SEQ ID NO: 224305

SEQ ID NO: 224469 - DNA, 201 bp, Homo sapiens; identical to SEQ ID NO: 41919

SEQ ID NO: 224470 - DNA, 201 bp, Homo sapiens; identical to SEQ ID NO: 224409

SEQ ID NO: 224471 - DNA, 201 bp, Homo sapiens; identical to SEQ ID NO: 224307

SEQ ID NO: 224472 - DNA, 201 bp, Homo sapiens; identical to SEQ ID NO: 41915

SEQ ID NO: 224473 - DNA, 201 bp, Homo sapiens; identical to SEQ ID NO: 224292

SEQ ID NO: 224474 - DNA, 201 bp, Homo sapiens; identical to SEQ ID NO: 224320

SEQ ID NO: 224475 - DNA, 201 bp, Homo sapiens; identical to SEQ ID NO: 224293

SEQ ID NO: 224476 - DNA, 201 bp, Homo sapiens; identical to SEQ ID NO: 224287

SEQ ID NO: 224477 - DNA, 201 bp, Homo sapiens; identical to SEQ ID NO: 224286

SEQ ID NO: 224478 - DNA, 201 bp, Homo sapiens; identical to SEQ ID NO: 224288

SEQ ID NO: 224479 - DNA, 201 bp, Homo sapiens; identical to SEQ ID NO: 224322

SEQ ID NO: 224480 - DNA, 201 bp, Homo sapiens; identical to SEQ ID NO: 224383

SEQ ID NO: 224481 - DNA, 201 bp, Homo sapiens; identical to SEQ ID NO: 224455

SEQ ID NO: 224482 - DNA, 201 bp, Homo sapiens; identical to SEQ ID NO: 224456

SEQ ID NO: 224483 - DNA, 201 bp, Homo sapiens
ctgtgtcagccgctccaggtctttctgcacatttgggtggtcttccagatcttcgtagagcgacctgacgatgtccagtctcctgtaattctcaggcttghctaggctccggacaacctggaggcatcgctctttcagagtatacactggaagggcaaaaaccaaatcctcagtggcagactagggtctcagtacaaggaa

SEQ ID NO: 224484 - DNA, 201 bp, Homo sapiens
gatgtgcaatgcgctcctgtgtcagccgctccaggtctttctgcacatttgggtggtcttccagatcttcgtagagcgacctgacgatgtccagtctcctstaattctcaggcttgactaggctccggacaacctggaggcatcgctctttcagagtatacactggaagggcaaaaaccaaatcctcagtggcagactagg

SEQ ID NO: 224485 - DNA, 201 bp, Homo sapiens
ctgtggatgcggcggcccgtgccaggcggcagcgttgggtagggctgcggctcgccgtcgaagttgagccatacgggcagcacgacgcgcggactgcgatkgcagaagatgacctgggagggctcgcgcgagttcaccgagcgcagcacgggccgcggccgcccggcctccatctcctcctcggcgcccagttcctccggg

SEQ ID NO: 224486 - DNA, 201 bp, Homo sapiens
atcgtccctgctgggtcgggcctaagcgccgggcccgtacctcggtagctgtggatgcggcggcccgtgccaggcggcagcgttgggtagggctgcggctmgccgtcgaagttgagccatacgggcagcacgacgcgcggactgcgattgcagaagatgacctgggagggctcgcgcgagttcaccgagcgcagcacgggc

SEQ ID NO: 224487 - DNA, 201 bp, Homo sapiens
cgccgggcccgtacctcggtagctgtggatgcggcggcccgtgccaggcggcagcgttgggtagggctgcggctcgccgtcgaagttgagccatacgggcrgcacgacgcgcggactgcgattgcagaagatgacctgggagggctcgcgcgagttcaccgagcgcagcacgggccgcggccgcccggcctccatctcctc

SEQ ID NO: 224488 - DNA, 201 bp, Homo sapiens
actcccatgctagcgaggtgaaatataacagtttaatattacagaaatgcctacatccctaaaatgaaaccagttgtttagataaatgcaggctttgagaytgcaaataatgtttcaaagatcatttaagaggaaggggtggccaagcacggtggcttgtgcctgtaatcccggcactttgggaggccgaggtgggcggat

SEQ ID NO: 224489 - DNA, 201 bp, Homo sapiens
gttttaccatgttggccaggctggtctcgaactcctgacctcaggtgatctgcccacctcgacctcccaaagtgctgggattacaggcgtgagccaccatkcccggcctgattttttttttttttttttttttgaggcagggtcttgctctgtcccccaggctggagtgcagtggcatactcatggctcactgcagcctcc

SEQ ID NO: 224490 - DNA, 201 bp, Homo sapiens
tgggcttaatttttcaagtggtctatcctgtacttaccacaacaaccttatctttttaaaaagtaaaacgtcagtacctggcagtgtgatattggcaaaartaggctgtccgtcaacattgagagatggcacaaataattcagtttggttaaccagaagcccatcgtgtgtccctgcatctctgaagagccaaaggtgacc

SEQ ID NO: 224491 - DNA, 201 bp, Homo sapiens
agaactgggcttaatttttcaagtggtctatcctgtacttaccacaacaaccttatctttttaaaaagtaaaacgtcagtacctggcagtgtgatattgghaaaaataggctgtccgtcaacattgagagatggcacaaataattcagtttggttaaccagaagcccatcgtgtgtccctgcatctctgaagagccaaagg

SEQ ID NO: 224492 - DNA, 201 bp, Homo sapiens
aagtgcttttgagacaccataacacctttaacacataacgtacaaatacatcacttccattttatttatggtagagaataggatacaaaaagattggatamcgtgcctgacatcaggcaaaaattgagaactgggcttaatttttcaagtggtctatcctgtacttaccacaacaaccttatctttttaaaaagtaaaacg

SEQ ID NO: 224493 - DNA, 201 bp, Homo sapiens
aaaattgagaactgggcttaatttttcaagtggtctatcctgtacttaccacaacaaccttatctttttaaaaagtaaaacgtcagtacctggcagtgtgrtattggcaaaaataggctgtccgtcaacattgagagatggcacaaataattcagtttggttaaccagaagcccatcgtgtgtccctgcatctctgaagag

SEQ ID NO: 224494 - DNA, 201 bp, Homo sapiens
ccctgtgaagaggtgccttccaccatgattgttaagtttcctgaggcctccccagctgtgagcaactgtgtcaattaaacctcttttctttattaattacmcagtcttgggtattccttcataacagcatgagaacagactaatacgagcccttaccacagttcctatcagaggtttctgagcatggaatagctacaacaa

SEQ ID NO: 224495 - DNA, 201 bp, Homo sapiens
catcaggcaaaaattgagaactgggcttaatttttcaagtggtctatcctgtacttaccacaacaaccttatctttttaaaaagtaaaacgtcagtacctrgcagtgtgatattggcaaaaataggctgtccgtcaacattgagagatggcacaaataattcagtttggttaaccagaagcccatcgtgtgtccctgcatc

SEQ ID NO: 224496 - DNA, 201 bp, Homo sapiens
tccagatcttcgtagagcgacctgacgatgtccagtctcctgtaattctcaggcttgactaggctccggacaacctggaggcatcgctctttcagagtatwcactggaagggcaaaaaccaaatcctcagtggcagactagggtctcagtacaaggaacgaacaagaggctttgccaacaactacctgtactactgatgga

SEQ ID NO: 224497 - DNA, 201 bp, Homo sapiens
ttccagatcttcgtagagcgacctgacgatgtccagtctcctgtaattctcaggcttgactaggctccggacaacctggaggcatcgctctttcagagtayacactggaagggcaaaaaccaaatcctcagtggcagactagggtctcagtacaaggaacgaacaagaggctttgccaacaactacctgtactactgatgg

SEQ ID NO: 224498 - DNA, 201 bp, Homo sapiens
gcggcccgtgccaggcggcagcgttgggtagggctgcggctcgccgtcgaagttgagccatacgggcagcacgacgcgcggactgcgattgcagaagatgmcctgggagggctcgcgcgagttcaccgagcgcagcacgggccgcggccgcccggcctccatctcctcctcggcgcccagttcctccgggccggactcttc

SEQ ID NO: 224499 - DNA, 201 bp, Homo sapiens
cttccagatcttcgtagagcgacctgacgatgtccagtctcctgtaattctcaggcttgactaggctccggacaacctggaggcatcgctctttcagagtmtacactggaagggcaaaaaccaaatcctcagtggcagactagggtctcagtacaaggaacgaacaagaggctttgccaacaactacctgtactactgatg

SEQ ID NO: 224500 - DNA, 201 bp, Homo sapiens
gtcttccagatcttcgtagagcgacctgacgatgtccagtctcctgtaattctcaggcttgactaggctccggacaacctggaggcatcgctctttcagartatacactggaagggcaaaaaccaaatcctcagtggcagactagggtctcagtacaaggaacgaacaagaggctttgccaacaactacctgtactactga

SEQ ID NO: 224501 - DNA, 201 bp, Homo sapiens
tgtgtcagccgctccaggtctttctgcacatttgggtggtcttccagatcttcgtagagcgacctgacgatgtccagtctcctgtaattctcaggcttgamtaggctccggacaacctggaggcatcgctctttcagagtatacactggaagggcaaaaaccaaatcctcagtggcagactagggtctcagtacaaggaac

SEQ ID NO: 224502 - DNA, 201 bp, Homo sapiens
gtggtcttccagatcttcgtagagcgacctgacgatgtccagtctcctgtaattctcaggcttgactaggctccggacaacctggaggcatcgctctttcrgagtatacactggaagggcaaaaaccaaatcctcagtggcagactagggtctcagtacaaggaacgaacaagaggctttgccaacaactacctgtactac

SEQ ID NO: 224503 - DNA, 201 bp, Homo sapiens
  misc_feature (1)...(201): n = A,T,C or G
catccgttgatgtgcaatgcgctcctgtgtcagccgctccaggtctttctgcacatttgggtggtcttccagatcttcgtagagcgacctgacgatgtccngtctcctgtaattctcaggcttgactaggctccggacaacctggaggcatcgctctttcagagtatacactggaagggcaaaaaccaaatcctcagtggc

SEQ ID NO: 224504 - DNA, 201 bp, Homo sapiens
tggtcttccagatcttcgtagagcgacctgacgatgtccagtctcctgtaattctcaggcttgactaggctccggacaacctggaggcatcgctctttcasagtatacactggaagggcaaaaaccaaatcctcagtggcagactagggtctcagtacaaggaacgaacaagaggctttgccaacaactacctgtactact

SEQ ID NO: 224505 - DNA, 201 bp, Homo sapiens
gggctgcggctcgccgtcgaagttgagccatacgggcagcacgacgcgcggactgcgattgcagaagatgacctgggagggctcgcgcgagttcaccgagsgcagcacgggccgcggccgcccggcctccatctcctcctcggcgcccagttcctccgggccggactcttccgggccggactcctcggcgcccgactcctc

SEQ ID NO: 224506 - DNA, 201 bp, Homo sapiens
tgtgcaatgcgctcctgtgtcagccgctccaggtctttctgcacatttgggtggtcttccagatcttcgtagagcgacctgacgatgtccagtctcctgtmattctcaggcttgactaggctccggacaacctggaggcatcgctctttcagagtatacactggaagggcaaaaaccaaatcctcagtggcagactagggt

SEQ ID NO: 224507 - DNA, 201 bp, Homo sapiens
aagcactgacaccatgaacctaagtaattttgcctagggctctccttgacagctcactgcacagagatggtgtatcctggtggcctccagcaggattaagkgaccagcagtgatgctggacccccagctacattaacaacatgaaaacactgtagagaaaaatcccaaagtaggccagacgcagtggctcatgcctgtaat

SEQ ID NO: 224508 - DNA, 201 bp, Homo sapiens
aggcgagcagatcacttgaagtcaggagttcgagaccagccggccaacatggtgaaaccctgtctctacgaaaaatattaaaaattagacaggcatggtgrcgtgcacctgtaatcccagctactcaggaggctgaggcaggagaattgcttgaacccaggaggtggaggttgcagtgagctaacgccactgcactccagc

SEQ ID NO: 224509 - DNA, 201 bp, Homo sapiens
gtagctgtggatgcggcggcccgtgccaggcggcagcgttgggtagggctgcggctcgccgtcgaagttgagccatacgggcagcacgacgcgcggactgsgattgcagaagatgacctgggagggctcgcgcgagttcaccgagcgcagcacgggccgcggccgcccggcctccatctcctcctcggcgcccagttcctc

SEQ ID NO: 224510 - DNA, 201 bp, Homo sapiens
gccaaggcgagcagatcacttgaagtcaggagttcgagaccagccggccaacatggtgaaaccctgtctctacgaaaaatattaaaaattagacaggcatsgtggcgtgcacctgtaatcccagctactcaggaggctgaggcaggagaattgcttgaacccaggaggtggaggttgcagtgagctaacgccactgcactc

SEQ ID NO: 224511 - DNA, 201 bp, Homo sapiens
ttcaacagaaatcttcaatctcccatccgttgatgtgcaatgcgctcctgtgtcagccgctccaggtctttctgcacatttgggtggtcttccagatctthgtagagcgacctgacgatgtccagtctcctgtaattctcaggcttgactaggctccggacaacctggaggcatcgctctttcagagtatacactggaagg

SEQ ID NO: 224512 - DNA, 201 bp, Homo sapiens
ttaccacaacaaccttatctttttaaaaagtaaaacgtcagtacctggcagtgtgatattggcaaaaataggctgtccgtcaacattgagagatggcacavataattcagtttggttaaccagaagcccatcgtgtgtccctgcatctctgaagagccaaaggtgacctatcgggacaagcaaaggttgttaaagagccac

SEQ ID NO: 224513 - DNA, 201 bp, Homo sapiens
tgtaagtttcaacagaaatcttcaatctcccatccgttgatgtgcaatgcgctcctgtgtcagccgctccaggtctttctgcacatttgggtggtcttccdgatcttcgtagagcgacctgacgatgtccagtctcctgtaattctcaggcttgactaggctccggacaacctggaggcatcgctctttcagagtatacac

SEQ ID NO: 224514 - DNA, 201 bp, Homo sapiens
cagaaatcttcaatctcccatccgttgatgtgcaatgcgctcctgtgtcagccgctccaggtctttctgcacatttgggtggtcttccagatcttcgtagvgcgacctgacgatgtccagtctcctgtaattctcaggcttgactaggctccggacaacctggaggcatcgctctttcagagtatacactggaagggcaaa

SEQ ID NO: 224515 - DNA, 201 bp, Homo sapiens
caaaagctgagatgaaacagtgtaagtttcaacagaaatcttcaatctcccatccgttgatgtgcaatgcgctcctgtgtcagccgctccaggtctttctrcacatttgggtggtcttccagatcttcgtagagcgacctgacgatgtccagtctcctgtaattctcaggcttgactaggctccggacaacctggaggcat

SEQ ID NO: 224516 - DNA, 201 bp, Homo sapiens
ctttcaaagggctgggcgcagtggcttacacctgtaatctcagcactttgggaggccaaggcgggtggatcatctgaggtcaggagttcgagaccagcctrgccaaaatgacgaaacccccgtctctactaaaaaaaaaattagccaggagtggtggcgcacgcctgtaatccccgctcctcgggaggctgaggcaagaga

SEQ ID NO: 224517 - DNA, 201 bp, Homo sapiens
gggtggtcttccagatcttcgtagagcgacctgacgatgtccagtctcctgtaattctcaggcttgactaggctccggacaacctggaggcatcgctcttycagagtatacactggaagggcaaaaaccaaatcctcagtggcagactagggtctcagtacaaggaacgaacaagaggctttgccaacaactacctgtact

SEQ ID NO: 224518 - DNA, 201 bp, Homo sapiens
cacatttgggtggtcttccagatcttcgtagagcgacctgacgatgtccagtctcctgtaattctcaggcttgactaggctccggacaacctggaggcatbgctctttcagagtatacactggaagggcaaaaaccaaatcctcagtggcagactagggtctcagtacaaggaacgaacaagaggctttgccaacaactac

SEQ ID NO: 224519 - DNA, 201 bp, Homo sapiens
acatttgggtggtcttccagatcttcgtagagcgacctgacgatgtccagtctcctgtaattctcaggcttgactaggctccggacaacctggaggcatcvctctttcagagtatacactggaagggcaaaaaccaaatcctcagtggcagactagggtctcagtacaaggaacgaacaagaggctttgccaacaactacc

SEQ ID NO: 224520 - DNA, 201 bp, Homo sapiens
tgcacatttgggtggtcttccagatcttcgtagagcgacctgacgatgtccagtctcctgtaattctcaggcttgactaggctccggacaacctggaggcrtcgctctttcagagtatacactggaagggcaaaaaccaaatcctcagtggcagactagggtctcagtacaaggaacgaacaagaggctttgccaacaact

SEQ ID NO: 224521 - DNA, 201 bp, Homo sapiens
tgtcagccgctccaggtctttctgcacatttgggtggtcttccagatcttcgtagagcgacctgacgatgtccagtctcctgtaattctcaggcttgactrggctccggacaacctggaggcatcgctctttcagagtatacactggaagggcaaaaaccaaatcctcagtggcagactagggtctcagtacaaggaacga

SEQ ID NO: 224522 - DNA, 201 bp, Homo sapiens
tttgtttattttttctatttttctttttattgtagagacagggttttgctgttggccaggctggtgttgaacttctggcctcaagtgatccatccgccacrgcctcccaaagtgctgggaggcataagcctcagcacccagcccccacaccatgtttttgagatggtgtctcactctgtcaccaaggctggaatgcagtgg

SEQ ID NO: 224523 - DNA, 201 bp, Homo sapiens
gggcccgtacctcggtagctgtggatgcggcggcccgtgccaggcggcagcgttgggtagggctgcggctcgccgtcgaagttgagccatacgggcagcamgacgcgcggactgcgattgcagaagatgacctgggagggctcgcgcgagttcaccgagcgcagcacgggccgcggccgcccggcctccatctcctcctcg

SEQ ID NO: 224524 - DNA, 201 bp, Homo sapiens
cttatctttttaaaaagtaaaacgtcagtacctggcagtgtgatattggcaaaaataggctgtccgtcaacattgagagatggcacaaataattcagtttrgttaaccagaagcccatcgtgtgtccctgcatctctgaagagccaaaggtgacctatcgggacaagcaaaggttgttaaagagccacaccggtggctggg

SEQ ID NO: 224525 - DNA, 201 bp, Homo sapiens
cgattgcagaagatgacctgggagggctcgcgcgagttcaccgagcgcagcacgggccgcggccgcccggcctccatctcctcctcggcgcccagttcctmcgggccggactcttccgggccggactcctcggcgcccgactcctccccgccgtcttcttcagggccgtactcttcgacgcctgcctcctccgcgcctacc

SEQ ID NO: 224526 - DNA, 201 bp, Homo sapiens
ctgcggctcgccgtcgaagttgagccatacgggcagcacgacgcgcggactgcgattgcagaagatgacctgggagggctcgcgcgagttcaccgagcgcrgcacgggccgcggccgcccggcctccatctcctcctcggcgcccagttcctccgggccggactcttccgggccggactcctcggcgcccgactcctcccc

SEQ ID NO: 224527 - DNA, 201 bp, Homo sapiens
atgcgctcctgtgtcagccgctccaggtctttctgcacatttgggtggtcttccagatcttcgtagagcgacctgacgatgtccagtctcctgtaattctmaggcttgactaggctccggacaacctggaggcatcgctctttcagagtatacactggaagggcaaaaaccaaatcctcagtggcagactagggtctcagt

SEQ ID NO: 224528 - DNA, 201 bp, Homo sapiens
caggcacggtggcccacacacctgtaatcccaccattttgggaggctgaggtgggcggatcacctgaggtcaggagtttgaaaccagcctggccaacatgrcgaaacactgtctctactaaaagtacaaaaattggccagcgtggtggcaggcgcctgtaatcccagctactcaggaggattacgtgaacccaggaggcag

SEQ ID NO: 224529 - DNA, 201 bp, Homo sapiens
gtgcgcgtgcgcagaaggatcctccagcaccgtaggccgttgtaacggaggcgaggctaggccaactcgttactgtatttccactataaaattttttttcrcccctctaaggtttggtgttttttttttttttgagacagggtctcactctgtcgcccgggctggagtgcagtggcgcgagcttggctcactgcagccttg

SEQ ID NO: 224530 - DNA, 201 bp, Homo sapiens
ggcggatcacctgaggtcaggagtttgaaaccagcctggccaacatgacgaaacactgtctctactaaaagtacaaaaattggccagcgtggtggcaggcrcctgtaatcccagctactcaggaggattacgtgaacccaggaggcagaggttgcagtgagccgagatggcgccactgcactccagcctgggtgacaagag

SEQ ID NO: 224531 - DNA, 201 bp, Homo sapiens
ggccaacatgacgaaacactgtctctactaaaagtacaaaaattggccagcgtggtggcaggcgcctgtaatcccagctactcaggaggattacgtgaacycaggaggcagaggttgcagtgagccgagatggcgccactgcactccagcctgggtgacaagagtgagactccatctcaaaaaaacaaaacaaaacaaaac

SEQ ID NO: 224532 - DNA, 201 bp, Homo sapiens
tacggatgtagaatggatgtattatacatccattaaaagcagatgccaatgccttcttaaaattaaacgatatgctgcaattcccactgaattacttatayaaacctccttacatacaagctgtcctgacttactaggaagcaaaaatgccaccaccttctcctgataaatacttctctaatgggcaggcattaaattaca

SEQ ID NO: 224533 - DNA, 201 bp, Homo sapiens
tcagtaccatcaaaagctgagatgaaacagtgtaagtttcaacagaaatcttcaatctcccatccgttgatgtgcaatgcgctcctgtgtcagccgctcchggtctttctgcacatttgggtggtcttccagatcttcgtagagcgacctgacgatgtccagtctcctgtaattctcaggcttgactaggctccggacaac

SEQ ID NO: 224534 - DNA, 201 bp, Homo sapiens
ggctatctgcttttcaaagagtagacacttagcttgtgccttataaaactaataatcttccttggattgtggctaaattgtgtgaatgctggtatttcaamagactgtaagcatcatgtctgattcaatgctgtatgttttattggagtttaacatgcctacatagtaaatacttggtaaatgtgctgaatgaccaaatga

SEQ ID NO: 224535 - DNA, 201 bp, Homo sapiens
ttagcttgtgccttataaaactaataatcttccttggattgtggctaaattgtgtgaatgctggtatttcaaaagactgtaagcatcatgtctgattcaakgctgtatgttttattggagtttaacatgcctacatagtaaatacttggtaaatgtgctgaatgaccaaatgattcccaagatgagctagtcagctgaaag

SEQ ID NO: 224536 - DNA, 201 bp, Homo sapiens
ccttatctttttaaaaagtaaaacgtcagtacctggcagtgtgatattggcaaaaataggctgtccgtcaacattgagagatggcacaaataattcagttkggttaaccagaagcccatcgtgtgtccctgcatctctgaagagccaaaggtgacctatcgggacaagcaaaggttgttaaagagccacaccggtggctgg

SEQ ID NO: 224537 - DNA, 201 bp, Homo sapiens
aaatcttcaatctcccatccgttgatgtgcaatgcgctcctgtgtcagccgctccaggtctttctgcacatttgggtggtcttccagatcttcgtagagckacctgacgatgtccagtctcctgtaattctcaggcttgactaggctccggacaacctggaggcatcgctctttcagagtatacactggaagggcaaaaac

SEQ ID NO: 224538 - DNA, 201 bp, Homo sapiens
tgggtcgggcctaagcgccgggcccgtacctcggtagctgtggatgcggcggcccgtgccaggcggcagcgttgggtagggctgcggctcgccgtcgaagwtgagccatacgggcagcacgacgcgcggactgcgattgcagaagatgacctgggagggctcgcgcgagttcaccgagcgcagcacgggccgcggccgccc

SEQ ID NO: 224539 - DNA, 201 bp, Homo sapiens
ttcagaccgtgctatcgtccctgctgggtcgggcctaagcgccgggcccgtacctcggtagctgtggatgcggcggcccgtgccaggcggcagcgttgggyagggctgcggctcgccgtcgaagttgagccatacgggcagcacgacgcgcggactgcgattgcagaagatgacctgggagggctcgcgcgagttcaccga

SEQ ID NO: 224540 - DNA, 201 bp, Homo sapiens
aaatgtacaattcagtgcattaagtaccttcaaaagtaatgttattttctttttttaagacgaggtctctatgggtgcagcacaccaacatggcacatgtwtacatatgtaacaaacctgcacgttgtgcacatgtaccctagaacttaaagtataataaaaaattttaaaaaaataaaaaagagatgaggtctcagcctg

SEQ ID NO: 224541 - DNA, 201 bp, Homo sapiens
ggcggcagcgttgggtagggctgcggctcgccgtcgaagttgagccatacgggcagcacgacgcgcggactgcgattgcagaagatgacctgggagggctmgcgcgagttcaccgagcgcagcacgggccgcggccgcccggcctccatctcctcctcggcgcccagttcctccgggccggactcttccgggccggactcc

SEQ ID NO: 224542 - DNA, 201 bp, Homo sapiens
  misc_feature (1)...(201): n = A,T,C or G
gctgtggatgcggcggcccgtgccaggcggcagcgttgggtagggctgcggctcgccgtcgaagttgagccatacgggcagcacgacgcgcggactgcgantgcagaagatgacctgggagggctcgcgcgagttcaccgagcgcagcacgggccgcggccgcccggcctccatctcctcctcggcgcccagttcctccgg

SEQ ID NO: 224543 - DNA, 201 bp, Homo sapiens
aagctgaagctctgggaggactgcttgagcccaggttaagggtgcaatgagccgtgatcatgccaccaaactccagcctccacactccagcccaggcaacwgcaggacatcctgtctcaaaaaaaaaaaaaaaaaagacaagatagagagacagggtcttgctgtgttaccagactagagtacagcaactattcagaggca

SEQ ID NO: 224544 - DNA, 201 bp, Homo sapiens
ccgcccggcctccatctcctcctcggcgcccagttcctccgggccggactcttccgggccggactcctcggcgcccgactcctccccgccgtcttcttcarggccgtactcttcgacgcctgcctcctccgcgcctacctcggcctcgtcccagttctccgccctccggggcattccctccgcgatccagaccacccgggc

SEQ ID NO: 224545 - DNA, 201 bp, Homo sapiens
ggcctaagcgccgggcccgtacctcggtagctgtggatgcggcggcccgtgccaggcggcagcgttgggtagggctgcggctcgccgtcgaagttgagccwtacgggcagcacgacgcgcggactgcgattgcagaagatgacctgggagggctcgcgcgagttcaccgagcgcagcacgggccgcggccgcccggcctcc

SEQ ID NO: 224546 - DNA, 201 bp, Homo sapiens
tggatcatctgaggtcaggagttcgagaccagcctggccaaaatgacgaaacccccgtctctactaaaaaaaaaattagccaggagtggtggcgcacgccwgtaatccccgctcctcgggaggctgaggcaagagaaccacttgaccccaggtggcagatgttgcaatgagccgcaatcgcgccactgcattctagcgtgg

SEQ ID NO: 224547 - DNA, 201 bp, Homo sapiens
gcgcacgcctgtaatccccgctcctcgggaggctgaggcaagagaaccacttgaccccaggtggcagatgttgcaatgagccgcaatcgcgccactgcatyctagcgtgggccactgcactccagcttgcagagcaagactcccgtctcaaaaaaaaaaaaaaatttcagtgcccccatattcctaggggtaaaatcacct

SEQ ID NO: 224548 - DNA, 201 bp, Homo sapiens
ggctcgcgcgagttcaccgagcgcagcacgggccgcggccgcccggcctccatctcctcctcggcgcccagttcctccgggccggactcttccgggccggrctcctcggcgcccgactcctccccgccgtcttcttcagggccgtactcttcgacgcctgcctcctccgcgcctacctcggcctcgtcccagttctccgcc

SEQ ID NO: 224549 - DNA, 201 bp, Homo sapiens
aaaaaaatgtgaaaagggtagtcaaaatgctggatcagagaggctcatcacctgatgccttaggagaaaatgacagtatgagtgaacctcaggagttggayatctccacaaaagcactgacaccatgaacctaagtaattttgcctagggctctccttgacagctcactgcacagagatggtgtatcctggtggcctccag

SEQ ID NO: 224550 - DNA, 201 bp, Homo sapiens
gatgcggcggcccgtgccaggcggcagcgttgggtagggctgcggctcgccgtcgaagttgagccatacgggcagcacgacgcgcggactgcgattgcagragatgacctgggagggctcgcgcgagttcaccgagcgcagcacgggccgcggccgcccggcctccatctcctcctcggcgcccagttcctccgggccgga

SEQ ID NO: 224551 - DNA, 201 bp, Homo sapiens
ggatgcggcggcccgtgccaggcggcagcgttgggtagggctgcggctcgccgtcgaagttgagccatacgggcagcacgacgcgcggactgcgattgcasaagatgacctgggagggctcgcgcgagttcaccgagcgcagcacgggccgcggccgcccggcctccatctcctcctcggcgcccagttcctccgggccgg

SEQ ID NO: 224552 - DNA, 201 bp, Homo sapiens
cgtgctatcgtccctgctgggtcgggcctaagcgccgggcccgtacctcggtagctgtggatgcggcggcccgtgccaggcggcagcgttgggtagggctrcggctcgccgtcgaagttgagccatacgggcagcacgacgcgcggactgcgattgcagaagatgacctgggagggctcgcgcgagttcaccgagcgcagc

SEQ ID NO: 224553 - DNA, 201 bp, Homo sapiens
gtagtcttcgcgcgcgctcggtagaggatggaacgcgctcgcggaaatagccggccggaggctgtgcgcgtgcgcagaaggatcctccagcaccgtaggcygttgtaacggaggcgaggctaggccaactcgttactgtatttccactataaaattttttttcgcccctctaaggtttggtgttttttttttttttgagac

SEQ ID NO: 224554 - DNA, 201 bp, Homo sapiens
gtaggaccagaggctggaggtggaagtgccacctggtcctgcctgataaaaaatgctgaatcagccaggcacggtggcccacacacctgtaatcccaccaytttgggaggctgaggtgggcggatcacctgaggtcaggagtttgaaaccagcctggccaacatgacgaaacactgtctctactaaaagtacaaaaattgg

SEQ ID NO: 224555 - DNA, 201 bp, Homo sapiens
gccaacaacccaatattcgaggaactagaccctctcctagagcctccagaaaggaaggcagtcctgctgaaaccctgattggagcccaggccaggagcagkgactcatgcctgtaatcctaatacttcagaaggccaaggtgtgaagactgctggccaaggtgtgaagattgctagcccagtgaccagtgtttgatttatg

SEQ ID NO: 224556 - DNA, 201 bp, Homo sapiens
tatctttttaaaaagtaaaacgtcagtacctggcagtgtgatattggcaaaaataggctgtccgtcaacattgagagatggcacaaataattcagtttggbtaaccagaagcccatcgtgtgtccctgcatctctgaagagccaaaggtgacctatcgggacaagcaaaggttgttaaagagccacaccggtggctgggca

SEQ ID NO: 224557 - DNA, 201 bp, Homo sapiens
ccaaaggtggggaggagacaaagactgttcacagaagcagtgcaaaggcaatgagaactttaaggaaagtttgagagagagagaaagaaagatagaggtgrggaggaccttcacaaagagtcccaggcttttggctgtgaatgtctcaaatacattgacaagtagatgtataaaatgttactgaaaaggtaaaatgcctaa

SEQ ID NO: 224558 - DNA, 201 bp, Homo sapiens
tgctgatggccccctatggacacctcatggtgttcatgcctctgtagtaatttcaccttgaaatgggctgggcttgtgattgctttaactaactgaatgtsgatgaagcgacactggcaattctaggccgaagccttaaaaaggcctgctgacttctgcttttatacttttgaaagccctgagctaccctgctagagagac

SEQ ID NO: 224559 - DNA, 201 bp, Homo sapiens
cagtggctcacgtctgttaatcccagcactttgggagacccaggtgggaggattgcttgagcccagagttcaggaccagcctgggcaacacagtgagaccytatctctattttgtaaaataattaaaaatttaaaaaataaagctaatgtatttattacttcagtttttttgtggtgagaacatttaagatctactctttt

SEQ ID NO: 224560 - DNA, 201 bp, Homo sapiens
taaggccctactatgtaccacctatggtgataagtgttgaaaatattgtaaaaaccggtcatgtttcctgccttcactgcacttcaataaaagcgtcatayggtaatcaatcacacaaataaaatagcaactatggccgggtgcagtggctcatgcctgtaatcccagtactttgggaggctgaagtgggctgatcacaag

SEQ ID NO: 224561 - DNA, 201 bp, Homo sapiens
ctaagggggatatattttgccttgtttgtatgtcgaccaattaaaatatacaagtccaataataaagcaaatactgataatgtcacatgtaattagcatgytgccatatttacttcgtttccagtttttgcaatgagctgagatcgtgccactgcactccagcctgggcgacaaagcgagactctgtctcaagaaaaaaaa

SEQ ID NO: 224562 - DNA, 201 bp, Homo sapiens
gggtcgggcctaagcgccgggcccgtacctcggtagctgtggatgcggcggcccgtgccaggcggcagcgttgggtagggctgcggctcgccgtcgaagtwgagccatacgggcagcacgacgcgcggactgcgattgcagaagatgacctgggagggctcgcgcgagttcaccgagcgcagcacgggccgcggccgcccg

SEQ ID NO: 224563 - DNA, 201 bp, Homo sapiens
cccagctgccagcaaaaggcagccacaccaacgactaccaccagcagagtaactgcctagctgagcccagcctggactacagaattatgaacaaataaaayggtgggctgggcgcagtggctcacgcctgtaatcctagcactttaggaggctgaggcaggcagactgcctgagctcaagagttcaagatcagcctggtca

SEQ ID NO: 224564 - DNA, 201 bp, Homo sapiens
cggtagctgtggatgcggcggcccgtgccaggcggcagcgttgggtagggctgcggctcgccgtcgaagttgagccatacgggcagcacgacgcgcggacygcgattgcagaagatgacctgggagggctcgcgcgagttcaccgagcgcagcacgggccgcggccgcccggcctccatctcctcctcggcgcccagttcc

SEQ ID NO: 224565 - DNA, 201 bp, Homo sapiens
agccactgaacccggctatctgcttttcaaagagtagacacttagcttgtgccttataaaactaataatcttccttggattgtggctaaattgtgtgaatrctggtatttcaaaagactgtaagcatcatgtctgattcaatgctgtatgttttattggagtttaacatgcctacatagtaaatacttggtaaatgtgctg

SEQ ID NO: 224566 - DNA, 201 bp, Homo sapiens
cccgtgccaggcggcagcgttgggtagggctgcggctcgccgtcgaagttgagccatacgggcagcacgacgcgcggactgcgattgcagaagatgacctrggagggctcgcgcgagttcaccgagcgcagcacgggccgcggccgcccggcctccatctcctcctcggcgcccagttcctccgggccggactcttccggg

SEQ ID NO: 224567 - DNA, 201 bp, Homo sapiens
tcggtagctgtggatgcggcggcccgtgccaggcggcagcgttgggtagggctgcggctcgccgtcgaagttgagccatacgggcagcacgacgcgcggahtgcgattgcagaagatgacctgggagggctcgcgcgagttcaccgagcgcagcacgggccgcggccgcccggcctccatctcctcctcggcgcccagttc

SEQ ID NO: 224568 - DNA, 201 bp, Homo sapiens
gggcctaagcgccgggcccgtacctcggtagctgtggatgcggcggcccgtgccaggcggcagcgttgggtagggctgcggctcgccgtcgaagttgagcsatacgggcagcacgacgcgcggactgcgattgcagaagatgacctgggagggctcgcgcgagttcaccgagcgcagcacgggccgcggccgcccggcctc

SEQ ID NO: 224569 - DNA, 201 bp, Homo sapiens
gtacctcggtagctgtggatgcggcggcccgtgccaggcggcagcgttgggtagggctgcggctcgccgtcgaagttgagccatacgggcagcacgacgcscggactgcgattgcagaagatgacctgggagggctcgcgcgagttcaccgagcgcagcacgggccgcggccgcccggcctccatctcctcctcggcgccc

SEQ ID NO: 224570 - DNA, 201 bp, Homo sapiens
  misc_feature (1)...(201): n = A,T,C or G
gtccctgctgggtcgggcctaagcgccgggcccgtacctcggtagctgtggatgcggcggcccgtgccaggcggcagcgttgggtagggctgcggctcgcngtcgaagttgagccatacgggcagcacgacgcgcggactgcgattgcagaagatgacctgggagggctcgcgcgagttcaccgagcgcagcacgggccgc

SEQ ID NO: 224571 - DNA, 201 bp, Homo sapiens
gtaagtttcaacagaaatcttcaatctcccatccgttgatgtgcaatgcgctcctgtgtcagccgctccaggtctttctgcacatttgggtggtcttccasatcttcgtagagcgacctgacgatgtccagtctcctgtaattctcaggcttgactaggctccggacaacctggaggcatcgctctttcagagtatacact

SEQ ID NO: 224572 - DNA, 201 bp, Homo sapiens
tcacgcttgatagtcgtagcaagctcaaaggagccaaagataactttgtcctaaatgcaaatgttgatgccaatggataccaccacttagataaatgtaaygaacaattgcttttttgcactctcaaggtatcagtgagatccagggagaggctaatagagggccggtatggtacagaaaacacaaaacttatttatgaga

SEQ ID NO: 224573 - DNA, 201 bp, Homo sapiens
gtgatcttggctcactgccacctccgcctcccaggttcaagcaattctcctgcctcagcctcccgagtagctgggactaaacaggcgcatgccaccacatgcagctaacttttgtatttttagcagagacagggttccaccatattggtcaggctggtcttgaactcctgacctcaggtggatctacctgcctcaaacatt

SEQ ID NO: 224574 - DNA, 201 bp, Homo sapiens
ctcccgggtttaggcgattctcctgcctcagcctccagagtaactgggattacaggcgcccaccactgcgcccggctaattttgtatttttagtagagatrgggttttgccatgttggccaggctggtctcaaattcctgatctcaagtgatctgcccgtcttggcctcccaatgtgctgggattacaggcatgagccacc

SEQ ID NO: 224575 - DNA, 201 bp, Homo sapiens
cctcccgggtttaggcgattctcctgcctcagcctccagagtaactgggattacaggcgcccaccactgcgcccggctaattttgtatttttagtagagayggggttttgccatgttggccaggctggtctcaaattcctgatctcaagtgatctgcccgtcttggcctcccaatgtgctgggattacaggcatgagccac

SEQ ID NO: 224576 - DNA, 201 bp, Homo sapiens
agtttcgctcttgttgcccaggctggagtgcaatggtgcgatctcggctcaccacaacctccgcctcccgggtttaggcgattctcctgcctcagcctccmgagtaactgggattacaggcgcccaccactgcgcccggctaattttgtatttttagtagagatggggttttgccatgttggccaggctggtctcaaattc

SEQ ID NO: 224577 - DNA, 201 bp, Homo sapiens
gcaagaccacgaacccacttggaggaaccaaaaactctagatgcagtgctttaaaagctgtaatactcgcggtggtctgcagcttcactcctgagccagcragaccacgcagccaccagaaggaacaaactctgaacacatccgaacatcagaaggaacaaactctggacacgccacctttgagaactgtaacactcaccg

SEQ ID NO: 224578 - DNA, 201 bp, Homo sapiens
ggaccaatcagcaggatgtgggtggggccaggtaagagaataaaagcaggctgccagagctagcagtggcaacccggttgggtccatttgtatgtcgtgaraggtttgttcttttagtcgttgcggtaaatattgttattgcttactctttgggtccgcattgcctttgtgagctgtaacgctcaccgtgaaggtctgctg

SEQ ID NO: 224579 - DNA, 201 bp, Homo sapiens
cagaccgtgctatcgtccctgctgggtcgggcctaagcgccgggcccgtacctcggtagctgtggatgcggcggcccgtgccaggcggcagcgttgggtasggctgcggctcgccgtcgaagttgagccatacgggcagcacgacgcgcggactgcgattgcagaagatgacctgggagggctcgcgcgagttcaccgagc

SEQ ID NO: 224580 - DNA, 201 bp, Homo sapiens
cctggcccagaattttcaaaatgcatacatcacaaacaaaagagggcaggaagcaatcctccagccctaagattctgtttaaggaaggaggaggttgtctyagaataaatatagcacttgttcctcggggcataaatttacttacagatttgatgggaaattttaagaaatgtaaacttgtaattttttaaattttggtaa

SEQ ID NO: 224581 - DNA, 201 bp, Homo sapiens
aatggaccccggggcggtagaggggcttcagaccgtgctatcgtccctgctgggtcgggcctaagcgccgggcccgtacctcggtagctgtggatgcggcsgcccgtgccaggcggcagcgttgggtagggctgcggctcgccgtcgaagttgagccatacgggcagcacgacgcgcggactgcgattgcagaagatgacc

SEQ ID NO: 224582 - DNA, 201 bp, Homo sapiens
aaatggaccccggggcggtagaggggcttcagaccgtgctatcgtccctgctgggtcgggcctaagcgccgggcccgtacctcggtagctgtggatgcggsggcccgtgccaggcggcagcgttgggtagggctgcggctcgccgtcgaagttgagccatacgggcagcacgacgcgcggactgcgattgcagaagatgac

SEQ ID NO: 224583 - DNA, 201 bp, Homo sapiens
ttccccgtctgcaaaatggaccccggggcggtagaggggcttcagaccgtgctatcgtccctgctgggtcgggcctaagcgccgggcccgtacctcggtasctgtggatgcggcggcccgtgccaggcggcagcgttgggtagggctgcggctcgccgtcgaagttgagccatacgggcagcacgacgcgcggactgcgat

SEQ ID NO: 224584 - DNA, 201 bp, Homo sapiens
atgcggcggcccgtgccaggcggcagcgttgggtagggctgcggctcgccgtcgaagttgagccatacgggcagcacgacgcgcggactgcgattgcagawgatgacctgggagggctcgcgcgagttcaccgagcgcagcacgggccgcggccgcccggcctccatctcctcctcggcgcccagttcctccgggccggac

SEQ ID NO: 224585 - DNA, 201 bp, Homo sapiens
tccccgtctgcaaaatggaccccggggcggtagaggggcttcagaccgtgctatcgtccctgctgggtcgggcctaagcgccgggcccgtacctcggtaghtgtggatgcggcggcccgtgccaggcggcagcgttgggtagggctgcggctcgccgtcgaagttgagccatacgggcagcacgacgcgcggactgcgatt

SEQ ID NO: 224586 - DNA, 201 bp, Homo sapiens
cctcggtagctgtggatgcggcggcccgtgccaggcggcagcgttgggtagggctgcggctcgccgtcgaagttgagccatacgggcagcacgacgcgcgractgcgattgcagaagatgacctgggagggctcgcgcgagttcaccgagcgcagcacgggccgcggccgcccggcctccatctcctcctcggcgcccagt

SEQ ID NO: 224587 - DNA, 201 bp, Homo sapiens
tagggctgcggctcgccgtcgaagttgagccatacgggcagcacgacgcgcggactgcgattgcagaagatgacctgggagggctcgcgcgagttcaccgmgcgcagcacgggccgcggccgcccggcctccatctcctcctcggcgcccagttcctccgggccggactcttccgggccggactcctcggcgcccgactcc

SEQ ID NO: 224588 - DNA, 201 bp, Homo sapiens
gttccccgtctgcaaaatggaccccggggcggtagaggggcttcagaccgtgctatcgtccctgctgggtcgggcctaagcgccgggcccgtacctcggtdgctgtggatgcggcggcccgtgccaggcggcagcgttgggtagggctgcggctcgccgtcgaagttgagccatacgggcagcacgacgcgcggactgcga

SEQ ID NO: 224589 - DNA, 201 bp, Homo sapiens
aagcgccgggcccgtacctcggtagctgtggatgcggcggcccgtgccaggcggcagcgttgggtagggctgcggctcgccgtcgaagttgagccatacgvgcagcacgacgcgcggactgcgattgcagaagatgacctgggagggctcgcgcgagttcaccgagcgcagcacgggccgcggccgcccggcctccatctc

SEQ ID NO: 224590 - DNA, 201 bp, Homo sapiens
cagttccccgtctgcaaaatggaccccggggcggtagaggggcttcagaccgtgctatcgtccctgctgggtcgggcctaagcgccgggcccgtacctcgktagctgtggatgcggcggcccgtgccaggcggcagcgttgggtagggctgcggctcgccgtcgaagttgagccatacgggcagcacgacgcgcggactgc

SEQ ID NO: 224591 - DNA, 201 bp, Homo sapiens
agcgccgggcccgtacctcggtagctgtggatgcggcggcccgtgccaggcggcagcgttgggtagggctgcggctcgccgtcgaagttgagccatacggvcagcacgacgcgcggactgcgattgcagaagatgacctgggagggctcgcgcgagttcaccgagcgcagcacgggccgcggccgcccggcctccatctcc

SEQ ID NO: 224592 - DNA, 201 bp, Homo sapiens
tcagttccccgtctgcaaaatggaccccggggcggtagaggggcttcagaccgtgctatcgtccctgctgggtcgggcctaagcgccgggcccgtacctcrgtagctgtggatgcggcggcccgtgccaggcggcagcgttgggtagggctgcggctcgccgtcgaagttgagccatacgggcagcacgacgcgcggactg

SEQ ID NO: 224593 - DNA, 201 bp, Homo sapiens
gcctcagttccccgtctgcaaaatggaccccggggcggtagaggggcttcagaccgtgctatcgtccctgctgggtcgggcctaagcgccgggcccgtacvtcggtagctgtggatgcggcggcccgtgccaggcggcagcgttgggtagggctgcggctcgccgtcgaagttgagccatacgggcagcacgacgcgcgga

SEQ ID NO: 224594 - DNA, 201 bp, Homo sapiens
ttgaacccgggaggcggaggctgcagtgagtcgagatcgcgccactgcactccagcctgggcgacagagcgagactccgtctcagaaaaaaaaaaaaaaawaaaagaatgctctgacgcttacgagcagcgtcaccctggatgtgtcctgcctcaaggggcctcagttccccgtctgcaaaatggaccccggggcggtaga

SEQ ID NO: 224595 - DNA, 201 bp, Homo sapiens
cttgaacccgggaggcggaggctgcagtgagtcgagatcgcgccactgcactccagcctgggcgacagagcgagactccgtctcagaaaaaaaaaaaaaawaaaaagaatgctctgacgcttacgagcagcgtcaccctggatgtgtcctgcctcaaggggcctcagttccccgtctgcaaaatggaccccggggcggtag

SEQ ID NO: 224596 - DNA, 201 bp, Homo sapiens
actattcggccttataaagaatgctctgggccgggcgcggaggctcatgcccataagcccagcactttgggaggccgaggcgggcggatcacgaggtcagyagttcgagaccagcctgaccaacatggtgaaaccccgtctctactaaaaatataaaaatcagccgggcgcggtggcgcacgcctgtaatcccagctactc

SEQ ID NO: 224597 - DNA, 201 bp, Homo sapiens
gcagatgttgcaatgagccgcaatcgcgccactgcattctagcgtgggccactgcactccagcttgcagagcaagactcccgtctcaaaaaaaaaaaaaaatttcagtgcccccatattcctaggggtaaaatcaccttttaagcatcctctcccaagactccaggtctcaacgcacgcatgtctagaacctcttacctag

SEQ ID NO: 224598 - DNA, 201 bp, Homo sapiens
gcaggagatggagaccatcctggccaacatggtgaaaccctgtctctactaagaatacaaaaaattagccaggcttggtggtgggtgcttgtagtcccagytacgcggggggctgaggcaggagaatcgcttgaaccaggagtccgagattgcagtgagccaagattgtgcaacagcactccagtctggcgacagatccag

SEQ ID NO: 224599 - DNA, 201 bp, Homo sapiens
gcttaaaaactttcggtcggacgttgtggccgaaatcccagcacgcctgtaatcccagcactttgggaggccgaagcaggcagatcacgagcgcaggagayggagaccatcctggccaacatggtgaaaccctgtctctactaagaatacaaaaaattagccaggcttggtggtgggtgcttgtagtcccagctacgcggg

SEQ ID NO: 224600 - DNA, 201 bp, Homo sapiens
tctatgggtgcagcacaccaacatggcacatgtatacatatgtaacaaacctgcacgttgtgcacatgtaccctagaacttaaagtataataaaaaatttwaaaaaaataaaaaagagatgaggtctcagcctgggcaacatagcaagacctcatctctactaaaaataaaaataaaaaaagaaattagccagacatagtg

SEQ ID NO: 224601 - DNA, 201 bp, Homo sapiens
tttcaccgtattagccaggatggtctcaatctcctgatcttgtgatccgcccgcctcggcctcccaaagtgctgggattacaggagtgagccactgcgccyggcccagaattttcaaaatgcatacatcacaaacaaaagagggcaggaagcaatcctccagccctaagattctgtttaaggaaggaggaggttgtcttag

SEQ ID NO: 224602 - DNA, 201 bp, Homo sapiens
accacaggtgcccgccaccacgcccggctaattttttgttattttcagtagagacagggtttcaccgtattagccaggatggtctcaatctcctgatcttrtgatccgcccgcctcggcctcccaaagtgctgggattacaggagtgagccactgcgcctggcccagaattttcaaaatgcatacatcacaaacaaaagag

SEQ ID NO: 224603 - DNA, 201 bp, Homo sapiens
tcctcacaacagatccatttacagatgagaaaacaagtctgagagaagtgacatgctcaaggtataagacagtaagcaaagagcgcgtacttaaagctctmaatcccatgccctttctgctaccatggtggaaaagggaagcctaggtcaagtacgtgattacaaatcacagcaaaccctgcaaactaaagagaaaaagcc

SEQ ID NO: 224604 - DNA, 201 bp, Homo sapiens
aaaataaagacgggtctcattatgttgctgaggcttgtgctgacctcctaggctcaagctgtcctcccacctcagcctcctgagtaactgggattacaggygcacaccaccacacctagcagtatggtactattaagggcactaactcgtttagagcatattattttaataacaataaattaagatttttttttttttgag

SEQ ID NO: 224605 - DNA, 201 bp, Homo sapiens
ccagttctccgccctccggggcattccctccgcgatccagaccacccgggccggacgccgcgggatccgcgggtcggacgcggggcggagctgcgtgcgcrctcccgagtcgacctccgtagtcttcgcgcgcgctcggtagaggatggaacgcgctcgcggaaatagccggccggaggctgtgcgcgtgcgcagaaggat

SEQ ID NO: 224606 - DNA, 201 bp, Homo sapiens
cgtccctgctgggtcgggcctaagcgccgggcccgtacctcggtagctgtggatgcggcggcccgtgccaggcggcagcgttgggtagggctgcggctcgycgtcgaagttgagccatacgggcagcacgacgcgcggactgcgattgcagaagatgacctgggagggctcgcgcgagttcaccgagcgcagcacgggccg

SEQ ID NO: 224607 - DNA, 201 bp, Homo sapiens
aaaaataggctgtccgtcaacattgagagatggcacaaataattcagtttggttaaccagaagcccatcgtgtgtccctgcatctctgaagagccaaaggygacctatcgggacaagcaaaggttgttaaagagccacaccggtggctgggcacggtggcccacacctgtaatcccagcactttgggaggccgaggcaggc

SEQ ID NO: 224608 - DNA, 201 bp, Homo sapiens
aaaataggctgtccgtcaacattgagagatggcacaaataattcagtttggttaaccagaagcccatcgtgtgtccctgcatctctgaagagccaaaggtvacctatcgggacaagcaaaggttgttaaagagccacaccggtggctgggcacggtggcccacacctgtaatcccagcactttgggaggccgaggcaggcg

SEQ ID NO: 224609 - DNA, 201 bp, Homo sapiens
caaaaataggctgtccgtcaacattgagagatggcacaaataattcagtttggttaaccagaagcccatcgtgtgtccctgcatctctgaagagccaaagktgacctatcgggacaagcaaaggttgttaaagagccacaccggtggctgggcacggtggcccacacctgtaatcccagcactttgggaggccgaggcagg

SEQ ID NO: 224610 - DNA, 201 bp, Homo sapiens
gcaaaaataggctgtccgtcaacattgagagatggcacaaataattcagtttggttaaccagaagcccatcgtgtgtccctgcatctctgaagagccaaasgtgacctatcgggacaagcaaaggttgttaaagagccacaccggtggctgggcacggtggcccacacctgtaatcccagcactttgggaggccgaggcag

SEQ ID NO: 224611 - DNA, 201 bp, Homo sapiens
tattggcaaaaataggctgtccgtcaacattgagagatggcacaaataattcagtttggttaaccagaagcccatcgtgtgtccctgcatctctgaagaghcaaaggtgacctatcgggacaagcaaaggttgttaaagagccacaccggtggctgggcacggtggcccacacctgtaatcccagcactttgggaggccga

SEQ ID NO: 224612 - DNA, 201 bp, Homo sapiens
attggcaaaaataggctgtccgtcaacattgagagatggcacaaataattcagtttggttaaccagaagcccatcgtgtgtccctgcatctctgaagagcyaaaggtgacctatcgggacaagcaaaggttgttaaagagccacaccggtggctgggcacggtggcccacacctgtaatcccagcactttgggaggccgag

SEQ ID NO: 224613 - DNA, 201 bp, Homo sapiens
cgttgatgtgcaatgcgctcctgtgtcagccgctccaggtctttctgcacatttgggtggtcttccagatcttcgtagagcgacctgacgatgtccagtcwcctgtaattctcaggcttgactaggctccggacaacctggaggcatcgctctttcagagtatacactggaagggcaaaaaccaaatcctcagtggcagac

SEQ ID NO: 224614 - DNA, 201 bp, Homo sapiens
gatattggcaaaaataggctgtccgtcaacattgagagatggcacaaataattcagtttggttaaccagaagcccatcgtgtgtccctgcatctctgaagvgccaaaggtgacctatcgggacaagcaaaggttgttaaagagccacaccggtggctgggcacggtggcccacacctgtaatcccagcactttgggaggcc

SEQ ID NO: 224615 - DNA, 201 bp, Homo sapiens
actcatcagtaccatcaaaagctgagatgaaacagtgtaagtttcaacagaaatcttcaatctcccatccgttgatgtgcaatgcgctcctgtgtcagccrctccaggtctttctgcacatttgggtggtcttccagatcttcgtagagcgacctgacgatgtccagtctcctgtaattctcaggcttgactaggctccgg

SEQ ID NO: 224616 - DNA, 201 bp, Homo sapiens
agggctcgcgcgagttcaccgagcgcagcacgggccgcggccgcccggcctccatctcctcctcggcgcccagttcctccgggccggactcttccgggccsgactcctcggcgcccgactcctccccgccgtcttcttcagggccgtactcttcgacgcctgcctcctccgcgcctacctcggcctcgtcccagttctccg

SEQ ID NO: 224617 - DNA, 201 bp, Homo sapiens
gtgtgatattggcaaaaataggctgtccgtcaacattgagagatggcacaaataattcagtttggttaaccagaagcccatcgtgtgtccctgcatctctsaagagccaaaggtgacctatcgggacaagcaaaggttgttaaagagccacaccggtggctgggcacggtggcccacacctgtaatcccagcactttggga

SEQ ID NO: 224618 - DNA, 201 bp, Homo sapiens
gcagcacgggccgcggccgcccggcctccatctcctcctcggcgcccagttcctccgggccggactcttccgggccggactcctcggcgcccgactcctcsccgccgtcttcttcagggccgtactcttcgacgcctgcctcctccgcgcctacctcggcctcgtcccagttctccgccctccggggcattccctccgcga

SEQ ID NO: 224619 - DNA, 201 bp, Homo sapiens
tgtgatattggcaaaaataggctgtccgtcaacattgagagatggcacaaataattcagtttggttaaccagaagcccatcgtgtgtccctgcatctctgragagccaaaggtgacctatcgggacaagcaaaggttgttaaagagccacaccggtggctgggcacggtggcccacacctgtaatcccagcactttgggag

SEQ ID NO: 224620 - DNA, 201 bp, Homo sapiens
taaaaataagataaaccccaaagtaggacttctgttaatcaaattacaatggcttagagccatcataattcacaagattcatgcaaacatcccctcagttktactcccatgctagcgaggtgaaatataacagtttaatattacagaaatgcctacatccctaaaatgaaaccagttgtttagataaatgcaggctttgag

SEQ ID NO: 224621 - DNA, 201 bp, Homo sapiens
tggcagtgtgatattggcaaaaataggctgtccgtcaacattgagagatggcacaaataattcagtttggttaaccagaagcccatcgtgtgtccctgcayctctgaagagccaaaggtgacctatcgggacaagcaaaggttgttaaagagccacaccggtggctgggcacggtggcccacacctgtaatcccagcactt

SEQ ID NO: 224622 - DNA, 201 bp, Homo sapiens
ccgaggcaggcggatcatgaggtcaggagatcaagaccgtcctggctaacgtggtgaaacctcgtctctactaaaaatacaaaaaaattagccaggtgtggtggcgagcgcctgtagtcccagctactcgggaggctgaggcaggagaatggtgtgaacccaggaggtggagcttgccgtgagccgagatcgcgccactgc

SEQ ID NO: 224623 - DNA, 201 bp, Homo sapiens
gagaatcacttgaacccaggatgcagaggttgcagtgagctgaaatcgcaccactgcactccagcctggatgacactgtgagactctctaaaaataaaaataaaaaaaaaaaaaacacctctgattggcactgtgagcttgattgtgttaaattgaaaatacataggccaggtgctgtggctgatgcctgtaatcccagca

SEQ ID NO: 224624 - DNA, 201 bp, Homo sapiens
caggatctatacacacatagtagtttgaatcctatgaaacccatgtatttggggggtttttgagttttttttttctttttttgagacaggatctcactctktcacctgggctggagtgcagtggtatgatcatggctcactgcagcctcaaactcctgggctcaagggatcctcccacctaagcctcccaaatagctgtga

SEQ ID NO: 224625 - DNA, 201 bp, Homo sapiens
ctcggtagctgtggatgcggcggcccgtgccaggcggcagcgttgggtagggctgcggctcgccgtcgaagttgagccatacgggcagcacgacgcgcggmctgcgattgcagaagatgacctgggagggctcgcgcgagttcaccgagcgcagcacgggccgcggccgcccggcctccatctcctcctcggcgcccagtt

SEQ ID NO: 224626 - DNA, 201 bp, Homo sapiens
gagactccgtctcaaaaaaaaaaaaaaaaagaaaatctagtacaactgaattgggtatcccaattcctattttacactcactggaaacgtactcgagggtrttctataaggcaaatttaccaaatttaacttagcaatgctcatttttatatatctacttccttaaaacaggatctatacacacatagtagtttgaatcct

SEQ ID NO: 224627 - DNA, 201 bp, Homo sapiens
gtcgggcctaagcgccgggcccgtacctcggtagctgtggatgcggcggcccgtgccaggcggcagcgttgggtagggctgcggctcgccgtcgaagttgrgccatacgggcagcacgacgcgcggactgcgattgcagaagatgacctgggagggctcgcgcgagttcaccgagcgcagcacgggccgcggccgcccggc

SEQ ID NO: 224628 - DNA, 201 bp, Homo sapiens
aggcgggcggatcacgaggtcaggagatcgagaccatcccggctaaaacggtgaaaccccgtctctactaaaaatacaaaaaattagccgggcgtagtggygggcgcctgtagtcccagctacttgggaggctgaggcaggagaatggcgtgaacccgggaggcggagcttgcagtgagccgagatcccgccactgcactc

SEQ ID NO: 224629 - DNA, 201 bp, Homo sapiens
agtgtgatattggcaaaaataggctgtccgtcaacattgagagatggcacaaataattcagtttggttaaccagaagcccatcgtgtgtccctgcatctcygaagagccaaaggtgacctatcgggacaagcaaaggttgttaaagagccacaccggtggctgggcacggtggcccacacctgtaatcccagcactttggg

SEQ ID NO: 224630 - DNA, 201 bp, Homo sapiens
tcagaccgtgctatcgtccctgctgggtcgggcctaagcgccgggcccgtacctcggtagctgtggatgcggcggcccgtgccaggcggcagcgttgggtrgggctgcggctcgccgtcgaagttgagccatacgggcagcacgacgcgcggactgcgattgcagaagatgacctgggagggctcgcgcgagttcaccgag

SEQ ID NO: 224631 - DNA, 201 bp, Homo sapiens
ttgggaggccgaggcgggcggatcacgaggtcaggagatcgagaccatcccggctaaaacggtgaaaccccgtctctactaaaaatacaaaaaattagcckggcgtagtggcgggcgcctgtagtcccagctacttgggaggctgaggcaggagaatggcgtgaacccgggaggcggagcttgcagtgagccgagatcccg

SEQ ID NO: 224632 - DNA, 201 bp, Homo sapiens
cagcgttgggtagggctgcggctcgccgtcgaagttgagccatacgggcagcacgacgcgcggactgcgattgcagaagatgacctgggagggctcgcgcbagttcaccgagcgcagcacgggccgcggccgcccggcctccatctcctcctcggcgcccagttcctccgggccggactcttccgggccggactcctcggc

SEQ ID NO: 224633 - DNA, 201 bp, Homo sapiens
ccacaacaaccttatctttttaaaaagtaaaacgtcagtacctggcagtgtgatattggcaaaaataggctgtccgtcaacattgagagatggcacaaatwattcagtttggttaaccagaagcccatcgtgtgtccctgcatctctgaagagccaaaggtgacctatcgggacaagcaaaggttgttaaagagccacacc

SEQ ID NO: 224634 - DNA, 201 bp, Homo sapiens
cggtggctcacgcctgtaatcccagcactttgggaggccgaggcgggcggatcacgaggtcaggagatcgagaccatcccggctaaaacggtgaaaccccrtctctactaaaaatacaaaaaattagccgggcgtagtggcgggcgcctgtagtcccagctacttgggaggctgaggcaggagaatggcgtgaacccggga

SEQ ID NO: 224635 - DNA, 201 bp, Homo sapiens
aaaagtaaaacgtcagtacctggcagtgtgatattggcaaaaataggctgtccgtcaacattgagagatggcacaaataattcagtttggttaaccagaarcccatcgtgtgtccctgcatctctgaagagccaaaggtgacctatcgggacaagcaaaggttgttaaagagccacaccggtggctgggcacggtggccca

SEQ ID NO: 224636 - DNA, 201 bp, Homo sapiens
tctcccatccgttgatgtgcaatgcgctcctgtgtcagccgctccaggtctttctgcacatttgggtggtcttccagatcttcgtagagcgacctgacgaygtccagtctcctgtaattctcaggcttgactaggctccggacaacctggaggcatcgctctttcagagtatacactggaagggcaaaaaccaaatcctca

SEQ ID NO: 224637 - DNA, 201 bp, Homo sapiens
ttagaaaatctaggccgggcgcggtggctcacgcctgtaatcccagcactttgggaggccgaggcgggcggatcacgaggtcaggagatcgagaccatccyggctaaaacggtgaaaccccgtctctactaaaaatacaaaaaattagccgggcgtagtggcgggcgcctgtagtcccagctacttgggaggctgaggcag

SEQ ID NO: 224638 - DNA, 201 bp, Homo sapiens
tcaacagaaatcttcaatctcccatccgttgatgtgcaatgcgctcctgtgtcagccgctccaggtctttctgcacatttgggtggtcttccagatcttcstagagcgacctgacgatgtccagtctcctgtaattctcaggcttgactaggctccggacaacctggaggcatcgctctttcagagtatacactggaaggg

SEQ ID NO: 224639 - DNA, 201 bp, Homo sapiens
ttatgaacaaataaaatggtgggctgggcgcagtggctcacgcctgtaatcctagcactttaggaggctgaggcaggcagactgcctgagctcaagagttyaagatcagcctggtcaacatggtgaaacccccgtctccactaaaatgcaaaaaattagccaggcttggtggtgcacacctgtagtcccagctgctgaagc

SEQ ID NO: 224640 - DNA, 201 bp, Homo sapiens
ccatgctaatttttaaaaattttttgtatagatgggttctcactatgagcccaggctcatcttgaagttctgggctcaagcaatcctcttaccttggcttyccaaagtactgggattacaggcgggagccaccatgccagccgtcactctcatttttgagcacaggaattgtgcccaaaggctaggataaggaattaaaga

SEQ ID NO: 224641 - DNA, 201 bp, Homo sapiens
ccgtgctatcgtccctgctgggtcgggcctaagcgccgggcccgtacctcggtagctgtggatgcggcggcccgtgccaggcggcagcgttgggtagggckgcggctcgccgtcgaagttgagccatacgggcagcacgacgcgcggactgcgattgcagaagatgacctgggagggctcgcgcgagttcaccgagcgcag

SEQ ID NO: 224642 - DNA, 201 bp, Homo sapiens
cgggcctaagcgccgggcccgtacctcggtagctgtggatgcggcggcccgtgccaggcggcagcgttgggtagggctgcggctcgccgtcgaagttgagbcatacgggcagcacgacgcgcggactgcgattgcagaagatgacctgggagggctcgcgcgagttcaccgagcgcagcacgggccgcggccgcccggcct

SEQ ID NO: 224643 - DNA, 201 bp, Homo sapiens
tttttaaaaagtaaaacgtcagtacctggcagtgtgatattggcaaaaataggctgtccgtcaacattgagagatggcacaaataattcagtttggttaascagaagcccatcgtgtgtccctgcatctctgaagagccaaaggtgacctatcgggacaagcaaaggttgttaaagagccacaccggtggctgggcacggt

SEQ ID NO: 224644 - DNA, 201 bp, Homo sapiens
  misc_feature (1)...(201): n = A,T,C or G
gtagggctgcggctcgccgtcgaagttgagccatacgggcagcacgacgcgcggactgcgattgcagaagatgacctgggagggctcgcgcgagttcaccnagcgcagcacgggccgcggccgcccggcctccatctcctcctcggcgcccagttcctccgggccggactcttccgggccggactcctcggcgcccgactc

SEQ ID NO: 224645 - DNA, 201 bp, Homo sapiens
ggcttatcatctttcatggagctgtgggggtgaaccgatataatacatgcacagaatctggaactcagccttggtagcagttttcaaaagacaccgctttccttccttccttccttccttccttccttccttccttccttccttccttttagtgacaggcacagataagtactaatgtggggggtgggtgcagccctctcc

SEQ ID NO: 224646 - DNA, 201 bp, Homo sapiens
ctcatgctcgtgcccattggctttccctcctctagggttgggccagggcctcatccccatcagccatagtgtgggagctcagggcccacagcatgccctgmggccagccacagtgccttgccaccgaagccaccttttgtgccctcgtgttccatctgacagtatctggctttcttggtgggactaactagtgctggaatt

SEQ ID NO: 224647 - DNA, 201 bp, Homo sapiens
tggcaaaaccccatctctactaaaaatacaaaaaatagccaggtgtggtggcacatacctgtaatcccagctactaaggaggctgaggcaggagaatcacwtgaacccagggggtggaagttgcagtcagccgagatcacgccacttcactccagcctgggtgaaagagcaaaactccatctcaaaagtaaataaataaat

SEQ ID NO: 224648 - DNA, 201 bp, Homo sapiens
atatcttgtgataaaaagaaaaagaacttttattattcaacaggctctttccccttgaaaatgtcagttgagcctgctaaggggtctagttcctgtctcaraacgatttcttagattatggatccagtttaaatgaattgatcctgagccatgaaatagcagccaagattcagtaacagatctcacaccctctatcctcta

SEQ ID NO: 224649 - DNA, 201 bp, Homo sapiens
aacacccaactctgggtaattgtgcatggccaggctgcagggagaaatcagagaagccaggcaatactgacagtaattaaggatctgggggaaatcgacasagaggatgggccagatttcctccagttcataaattcctccctccggaaagcatctaactatggggtgccaccaggggaccatttagtaaattacctgatt

SEQ ID NO: 224650 - DNA, 201 bp, Homo sapiens
ggcaacatggggagacctcatctccctatttttaaaaattagctgggcatggtggtgcgtgcctgaagtcccagctactaaagaggctgaaataagaggaytgcttgagctggggaggtggagattgcagtgagccctgattgcaccactgcattccagcccaggtgacagagtgagaccctgtctcaaaaaaagaaaaaa

SEQ ID NO: 224651 - DNA, 201 bp, Homo sapiens
aacatacccattctggtgccctaaccattacaccttactacctttcaatctattgccgcggtttccacgggctctgatgcccagcaggtctgcagtgaagwcttggcttggccagatacaattatgtagggagaaagcccagcccagggcctggcatggacagggccctctaaataggtcacagatattattataaagggc

SEQ ID NO: 224652 - DNA, 201 bp, Homo sapiens
agtgcgcccagtctccggccccggcccctcggcgcgcccgacttcccggccgcccctgagcccagcagccgcgggtcccgggatcggctaagagtagctgyaacgcctcgccggacggagtcctttcctttcccgggacgctgggccatgagctccgcggccacctgaggcacaggggagtctgctcggccaggacagcct

SEQ ID NO: 224653 - DNA, 201 bp, Homo sapiens
cttatcatctttcatggagctgtgggggtgaaccgatataatacatgcacagaatctggaactcagccttggtagcagttttcaaaagacaccgctttccttccttccttccttccttccttccttccttccttccttccttccttttagtgacaggcacagataagtactaatgtggggggtgggtgcagccctctccac

SEQ ID NO: 224654 - DNA, 201 bp, Homo sapiens
ctgcacttgagctgtgcctggggcctgccagaatgggcaccacggcataagaccctgtgtgagggcccagccacctgttactcggggacttggcaaggccrcttcaccactcggtctcttgtttcttcgttttagaacctaagtaacatagcattcctgtttttgacatggattttataagaatacaaaagttaccacttt

SEQ ID NO: 224655 - DNA, 201 bp, Homo sapiens
tatcatctttcatggagctgtgggggtgaaccgatataatacatgcacagaatctggaactcagccttggtagcagttttcaaaagacaccgctttccttccttccttccttccttccttccttccttccttccttccttccttttagtgacaggcacagataagtactaatgtggggggtgggtgcagccctctccacca

SEQ ID NO: 224656 - DNA, 201 bp, Homo sapiens
atccgtgcccagactgcatacacagtcatggtgagtgacgtcgcaccacctcacaacactgcacttgagctgtgcctggggcctgccagaatgggcaccayggcataagaccctgtgtgagggcccagccacctgttactcggggacttggcaaggccacttcaccactcggtctcttgtttcttcgttttagaacctaag

SEQ ID NO: 224657 - DNA, 201 bp, Homo sapiens
atcatctttcatggagctgtgggggtgaaccgatataatacatgcacagaatctggaactcagccttggtagcagttttcaaaagacaccgctttccttccttccttccttccttccttccttccttccttccttccttccttttagtgacaggcacagataagtactaatgtggggggtgggtgcagccctctccaccac

SEQ ID NO: 224658 - DNA, 201 bp, Homo sapiens
caggatagcaaggcaggggacactgggggcgggaggggagggcctgcaaagggtgagtttggggagaagctctgtgggaagtgagtttctttgtagaatgkgagtaaagatccagcctctggcacacaaggcaagagattgggaggagaccccgatgtgagctatgacaggaaacagggctgaagggcctcacccaggccc

SEQ ID NO: 224659 - DNA, 201 bp, Homo sapiens
tgatatgacagactcaaactcatatttgctattctccgagcacatggaaaggtaactcactctgtacattcagatatcaaactatgcactgtgagggctaygagaagcgcaaacagtaaacgcttggcaggagggaacacttcctctctctgaggaagaggctggaagctggtcttccccctccaagaatacacgggtgca

SEQ ID NO: 224660 - DNA, 201 bp, Homo sapiens
ccgaggactacgccacgctgttcgcggcgcgcagcctgcagggcctgggctcagccttcgccgacacgtctggcatagccatgatcgccgataagtacccsgaggagccggagcgcagtcgtgcactgggcgtggcgctggccttcattagcttcggaagcctagtggccccgcccttcgggggcatcctctatgagttcg

SEQ ID NO: 224661 - DNA, 201 bp, Homo sapiens
cctattgtcactggccaagtgagggacaagaagaggaaacgaatggaaaagggagtgaaagggaagggagagaacgacccaggagaaagaagcagagtggrcatggaagactgattttagctcctagtctgccatcagatttgtatgtgaccttggaccagctgctccactctctgggactcagtttcctcattcataaat

SEQ ID NO: 224662 - DNA, 201 bp, Homo sapiens
taagaggggcagacaaggaacccatagaagaggggcgggaggcagacctggagacagagggatctcggtgagaggcaggtaggggacaaagacagggcagmaggagagatgagggacagggatgggggataggtgtgggaacaggcaggtggcatggattggaggacaggaagggacaaggatgagaaacaaacaagatga

SEQ ID NO: 224663 - DNA, 201 bp, Homo sapiens
tccccatataagcagggtcagtaaaacaacaaaatggaaacccagtcatgcccctgcgtgctaaagcctcccaagggctttcactgcaccaagaataaggygatagctcctctccactgccactggagccccacaggacctggcctgcccacctctctggccctgtcttcactgggcctcagccccactggcttctctctg

SEQ ID NO: 224664 - DNA, 201 bp, Homo sapiens
tccaaagaccccagctcctctgcctctccttgggctccacctcgtccccatccctcatgtagtcaaattaaaggagagatataactctggggaaataaccytgctgaagtatccatcatttccctaaaatgcaaacgcagggctatttttttttttttttttttttttttcagtttcacctgactgagcagagtcaaggcc

SEQ ID NO: 224665 - DNA, 201 bp, Homo sapiens
ctaaactgagactagaaccaccaaacaccttgggaaccttgggcctgagcatccctgccccaagcttacctgtgaaggctgagtgaaggcctggtgccacrggccacccaacaagtgacatgtttgacctgtttaccccacagttctttgtcttggatgttgtcattaatttccgccgtctcagtgagggggatctgttca

SEQ ID NO: 224666 - DNA, 201 bp, Homo sapiens; identical to SEQ ID NO: 41989

SEQ ID NO: 224667 - DNA, 201 bp, Homo sapiens
acaaccaaatcaaagagatgggtttggggaaaggagagatacaaagatgcttaggatgtgaatctggtgtgtggttggacatggagggtaaggaaaggggraaagaagcaaggaaacctaataactggtaagcatatttgccagtggtcgtggagaaataaagttccaatggcaaggtggtccagagcccccatcacttac

SEQ ID NO: 224668 - DNA, 201 bp, Homo sapiens
cgctccttcgcgccgctagtggtctcactatgcggcctctgttttggcatagccctagtcgacacagcactgctgcccacgctcgccttcctggtggacgygcgccatgtctcagtctatggcagcgtctacgccatcgccgacatctcctattcggtggcctacgcgctcgggcccatagtggcaggccacattgtgcac

SEQ ID NO: 224669 - DNA, 201 bp, Homo sapiens
gcaccgcggcgcctccgcccaaatcaataaactgtgtctgtcccaggaggccgagtctctttactggtggggggtgcgtggaggcgcgcagggccagagcwgaggggagggtgaactgggtctccaagtcccaatccagacctaagccaaactaacacgtaggcacctgtagctgtttttctacctggaaaaggggatagg

SEQ ID NO: 224670 - DNA, 201 bp, Homo sapiens
aggggctggttcaagacttccacaccgagagcccttcctgggcctccagccctggagcatctggagagcggacccctgcccggccacgccccgcccccggsccccgccccgccgacgtcgcattagcatgagcgacgtaagtggcccgggcaccactcgggggctgggactcgccgcgtcacagccccgagtggaagggaa

SEQ ID NO: 224671 - DNA, 201 bp, Homo sapiens
cgcgagtcctagaaccgcgggcggggggcaggcagggggcggggggcagagggccagctaccggcgcggaacgcccatcccaggggctggttcaagacttycacaccgagagcccttcctgggcctccagccctggagcatctggagagcggacccctgcccggccacgccccgcccccggcccccgccccgccgacgtcg

SEQ ID NO: 224672 - DNA, 201 bp, Homo sapiens
cgtccccgacagctgcgtggccagcgggctcagcccttcggccccgctaccctacggagagcgaagacgtgaagatcggggtgctgtttgcttccaaggcyatcctgcagctgctagtgaaccccttgagcgggcccttcatcgaccgcatgagctacgacgtgccgctgctgatcggcctgggcgtcatgttcgcctcta

SEQ ID NO: 224673 - DNA, 201 bp, Homo sapiens
acagctgtctggccgcagagcctcaggaggttgcctctgtgcccgcaggacgcagagcagcaggaagctgatccgagcagactccgtcagcgagctccccrccccccggaggctgcggtggaaatgctccccggaaattcaaggccacttagcctcctcggcagaaaaacttcaacggtaaggataaccgaagtctccttt

SEQ ID NO: 224674 - DNA, 201 bp, Homo sapiens
tctcccaaggggcctcgaggaaccggctgccgcgcccccttccccaagaggagaagagcgggcgctgaccccgcgagtcctagaaccgcgggcggggggcrggcagggggcggggggcagagggccagctaccggcgcggaacgcccatcccaggggctggttcaagacttccacaccgagagcccttcctgggcctccag

SEQ ID NO: 224675 - DNA, 201 bp, Homo sapiens
ccaaggctccctggaagtttccaaagaccccagctcctctgcctctccttgggctccacctcgtccccatccctcatgtagtcaaattaaaggagagatayaactctggggaaataaccttgctgaagtatccatcatttccctaaaatgcaaacgcagggctatttttttttttttttttttttttttcagtttcacctg

SEQ ID NO: 224676 - DNA, 201 bp, Homo sapiens
gttggaattgggggtgggaatgtttgctgagaggcagagttgctggttaagaacctttctaatatggaggaagagctggtgtttggactggagtaggacargggcagggtgaaggggaagtcgtaaactcctcctcttggtggaagaaactcttcgcgcatggtggactgcacacagggttactgtcactctctctgaaac

SEQ ID NO: 224677 - DNA, 201 bp, Homo sapiens
agccacaaaggatgaagagaggcttgtcaggcagacacagaagggaaagatggctcaagaagggcaccacgtgcaaagactgagagccttaagagaataaracccattcgaggaaaagcagagcacagcttgcaaaggacagtggggcaggggagatgttggatttccctgttacaaagtgtgttatggtgactgggtgga

SEQ ID NO: 224678 - DNA, 201 bp, Homo sapiens
ggatgggactgtttggagggatgtgacggccttccctgccctccccggcaggtgtctgagtactggctgaatgacatgtatctcaacaaccgcctggcccygcctgtcaactccagccctgccgtgatctttgctcggcagcacttccctggcaccgatgaccagctgaggtgaggccttggtgctcctagctcataacct

SEQ ID NO: 224679 - DNA, 201 bp, Homo sapiens
atgggactgtttggagggatgtgacggccttccctgccctccccggcaggtgtctgagtactggctgaatgacatgtatctcaacaaccgcctggccctgsctgtcaactccagccctgccgtgatctttgctcggcagcacttccctggcaccgatgaccagctgaggtgaggccttggtgctcctagctcataacctgg

SEQ ID NO: 224680 - DNA, 201 bp, Homo sapiens
cagaccagaatcccgccccgttgaggctttgagaaaggagtaggagccgagcattccggcagaggaagaaaaacggcccatcttttagagtccgacctctrgaaatgtgtgtatgatgtgatgtgtgtgttcattagagaacttgtcctaggaggagtgggggagccgtggttggtgtttgctgtatccctgtcagtcccg

SEQ ID NO: 224681 - DNA, 201 bp, Homo sapiens
caatactatgggctcttctcctcctaccggctccccggccatacccaggacacgctggtggctcagaacagcagcatcatgccggagcctgagcacgtcaycgtagcctgctgcaatcaggtaagcaaccccttgtcttggtgagggagggcacagagcatacagtggccatgcgttcacgtccattaccttctccgaggg

SEQ ID NO: 224682 - DNA, 201 bp, Homo sapiens
ttttccccaaggggagggggccgttcaggccctaacgggacccaggcaggagggcctggggcagcagcaagcagtggtggcagccacatcctggcaaccaygtctgcactgtagctgttgattctcccattcagtaagcaagcacgaatgcattcattcactggtttgctcattcattcatcaaacatgtgcagagctctg

SEQ ID NO: 224683 - DNA, 201 bp, Homo sapiens
ctggtttgctcattcattcatcaaacatgtgcagagctctggtgtgcacccggcccgtggtaaggctctgagaacacagaaagttaagtaccatgggaccygcactccatatttgagtggaataagtagactcccaggccaaaacgtgtgatacagtaagattaatgccaaaagcagaaacagccatgctgacctgaaccc

SEQ ID NO: 224684 - DNA, 201 bp, Homo sapiens
aggcacgccgagagaagatcagcataagcaaagatgcagaaggctaactggcaggctttgcacatgccgtgcatgaggcagaggtttgagaaaactctgarggtctccacgtgttgtggaaatggggcctccactactttaaaaagtggagaattgagctctgcatctgccatgatgatgcagttctgggttctgtgcccc

SEQ ID NO: 224685 - DNA, 201 bp, Homo sapiens
tctacctcaccgtgcgcctggcggcgcgctacccacacctgcagtggctgtacggcgcgcttgggctggctgtgatcggcgccagctcgtgcatcgtgccsgcctgccgctccttcgcgccgctagtggtctcactatgcggcctctgttttggcatagccctagtcgacacagcactgctgcccacgctcgccttcctgg

SEQ ID NO: 224686 - DNA, 201 bp, Homo sapiens
ctcacttccagggacctgagcagaccccacattccccaaggcccccagctccaccctccagaggctgaggagagccaggaaaggcccatggatggggaagmaggaggcttcttcctgggggtcctgaggggcccatacaagtgggtgaggcccgagtgggcacagcttgggggagagatttccaggtggctgtggtgatag

SEQ ID NO: 224687 - DNA, 201 bp, Homo sapiens
tgccagtgggcactcccatccaccgcctcatgctagacccctacattgccgtggtggccggcgcgctcaccacctgtaacattcccctcgccttcctcgarcccaccattgccacgtggatgaagcatacgatggcggcttccgagtgggagatgggcatggcctggctgccggccttcgtgcctcatgtgctgggcgtct

SEQ ID NO: 224688 - DNA, 201 bp, Homo sapiens
gaaggtgtgcgtgtgggctcggggttcccactcaggctatgcgctctccagtggggaggcacatagaccttgccagacactgctccagtgggcagtcagcycagaccccagactcctgatggaggaggagattgttcaatatgagggtcagccagtgctccagagtctcagtgcagacttggaaaatgttcctgttactcc

SEQ ID NO: 224689 - DNA, 201 bp, Homo sapiens
ggcgggcaagcgggcgggcggcaacagcatgtccctcggccagcgcgggcggcctcttagcgcggcgggggctgctctgggcgcgccccgggcgaagtgckcccagtctccggccccggcccctcggcgcgcccgacttcccggccgcccctgagcccagcagccgcgggtcccgggatcggctaagagtagctgcaacgc

SEQ ID NO: 224690 - DNA, 201 bp, Homo sapiens
acatacctggggcttagcatatatttgtggaatgaatgaattaatgctctggtgaagtgtcccgattttctctcggggctgtcaggatgggactgtttggrgggatgtgacggccttccctgccctccccggcaggtgtctgagtactggctgaatgacatgtatctcaacaaccgcctggccctgcctgtcaactccagc

SEQ ID NO: 224691 - DNA, 201 bp, Homo sapiens
ggtcagccagtgctccagagtctcagtgcagacttggaaaatgttcctgttactccgacagtgaattacaaaatcccgggcatgtcacctgtgtcacagtkaatccctgactcactaacacagccaggcccacctccccacccactctccagagcagggccgacaccccactcagctgagctcaccttgggtcatagtagt

SEQ ID NO: 224692 - DNA, 201 bp, Homo sapiens
gtgtgcaactaggagtctctaccatgtaatgaacctttccctgcaaatgccatgcacccatcttcccacacacagagcactctcacccctgccctgggtgyctcatcctgtcccagcatccagcccccaaggtcaggctctcctggtgatacgcagccctcaccattgggtcttgaagtgactccttggaattttaaacca

SEQ ID NO: 224693 - DNA, 201 bp, Homo sapiens
cttccctcccactgtagctggggtctccccagggaagaaggaaggtgtggacagatgaatgacttctgaaaacagttctcacaattgcatctgagggggtwttttcctcctggtgcaattaagccaggcccagaatcctggtatgacagttcccgctgctcgtttctccagtgcctttccccaagcactcgatttcctttt

SEQ ID NO: 224694 - DNA, 201 bp, Homo sapiens
ctatcttacagtttagcaggtgggtttctcctgacacctctctccttggcttgtcgatgccaccttctctgtgtgtcttcatgtggtcttgcctctgtgcrtatctgcatcctaatctcttcttataaggtgaccagtcatatgggattaggcttcacccaaatggcctagtgtaacttaattgtctctttaaaggtccca

SEQ ID NO: 224695 - DNA, 201 bp, Homo sapiens
tcctggagggagggacagccttctgtgggcctggaagactggagagggactgaggctgcatgaaggaggagcagactgaactgggttacaaatccaacctsagaacaagaaggatgtgccatcagggaactgcctgggtgatggcacaggggcacggagctccaaaggactggagtgtagagctgagaagagccaggaggg

SEQ ID NO: 224696 - DNA, 201 bp, Homo sapiens
cagtgtctggcagaggatctagccagacttgtgggcccttttggccaggtcactaactgggctgggctttctgtaggtgctcacccacccatcacacagascaccccccccaccgcaagagatggaagaacaagatcagctgggttgggggcccagacctggctcactggggttgggcagggcagtctgggatgctgtcca

SEQ ID NO: 224697 - DNA, 201 bp, Homo sapiens
cttgcaaaggcaaaaggagatagaactcagaaaataagaggcctttggttggtacagggtgaagtggaaagcttgggcctgaggcagcagaggtaggagcrtgcagaggctcccaactggtacctcctggtctcagatcacaaccttgagataagaggcgggcagttggatgttgaagatgaaatcgactgtgtgaaatag

SEQ ID NO: 224698 - DNA, 201 bp, Homo sapiens
cggattctcatgtggtcaactaaggcctggggcaggggcttttccaccccgaccctccattttatcaacctctctccttcaagacactgcccttgagcctycaccctgcccccaaccaggatgactccctcctgtgagccccaggctgcttagcctgaccctctgccacgacactgagggcatgaggcccacagggttcca

SEQ ID NO: 224699 - DNA, 201 bp, Homo sapiens
agggagggacagccttctgtgggcctggaagactggagagggactgaggctgcatgaaggaggagcagactgaactgggttacaaatccaacctcagaacragaaggatgtgccatcagggaactgcctgggtgatggcacaggggcacggagctccaaaggactggagtgtagagctgagaagagccaggaggggatgag

SEQ ID NO: 224700 - DNA, 201 bp, Homo sapiens
acaggagggaagagaggatgtcccaaggctaggctggcttcccagagtagaaggtctgctgtgggagacatctccttccccaggatttgcaaaaagtgagrgaaaggggatgcatggggactggagactcctttcaggcaagggcatctgtggacactccttgtgaacttggagaattcacctgggcagagcgaagaccag

SEQ ID NO: 224701 - DNA, 201 bp, Homo sapiens
tgaggctggcctgacaagagtgcaattccacatctgcactgagcaagctgtggaggccacgtgctcagggtgttaggagtcctccagggcagggctggtaytgccagaggatgagggagctcagggagggctgtcatagacagaggaggagaagggccttgtcctgggcacagcctgcgtgatgatgaggagatgggatgt

SEQ ID NO: 224702 - DNA, 201 bp, Homo sapiens
aggcacagcatgcgtatagaagggtggagttgggggttcttcctagactctagccacactttggggcccccaaagaatatgggtttcctcttgggaattcstctggaagtataagatagcgaggtcataacattttagatgtgcctatttgaggccagttgttcccccatttaattctctctgtgttcctctcaggtagga

SEQ ID NO: 224703 - DNA, 201 bp, Homo sapiens
cattccccttctggagaacagtgaggctcttgctaccattttgctgttgcaaacaaggccgagaggcacattcctcgtgtcttccggtacacacgggtacrtttctctaagcctcaggctaaaatatgcatttataagtgcaattgcttagtcataggtatgcacatttttagttttgatagacactgccctccaacagta

SEQ ID NO: 224704 - DNA, 201 bp, Homo sapiens
catctccttccccaggatttgcaaaaagtgagagaaaggggatgcatggggactggagactcctttcaggcaagggcatctgtggacactccttgtgaacytggagaattcacctgggcagagcgaagaccagtgcagttagcatctgtgtacacagcaggcattgagaagacctaggggatggtcttaaagatttactaa

SEQ ID NO: 224705 - DNA, 201 bp, Homo sapiens
cttcaaagctacaaaatgacaaaaccacagggctgacatacaaagcacatgtaggtatacatgtgaaggtgcacacacatgcacacatgtgtaggtgcacrtgcacgcatggtgtgtgttggttttccattttaatcttcctctgcatatgattgctggcttgctttttttcctccactcaccagtgtgtttaaggcccat

SEQ ID NO: 224706 - DNA, 201 bp, Homo sapiens
gtcataccacattgaattttctttttctttcaggcagttgttacttctgtgaattatcttgtttgcaggtttgctggctttgttttctagactatccccgygaccctgacattctgggcatctcgcatgcctctgagtccctagcacccacaccatacctggcacagagtaggtgccagagactgaatcacagacgggagg

SEQ ID NO: 224707 - DNA, 201 bp, Homo sapiens
ccttggaattttaaaccaaaatgttaaactttgggtggactttttaacttttggtgaactttaaaccaagaggcaggctgtgtacccccacacccagtacygagcagtggagagaacatcgtcagcacaatagactcctgtttggaagaaatgggaacacgcagcgggagcaggcctggcccccaacaggtcctgccgggt

SEQ ID NO: 224708 - DNA, 201 bp, Homo sapiens
atacagtggccatgcgttcacgtccattaccttctccgagggggctcagcctccttccctgagtcacacagggagctggggcaccatgtctccaaagtggrgcccctacttccagtcagtcccatgtctctccaccagttgccttctaagaatgagagccgtcagtttgagaatatcctcactggactctcacttcagcac

SEQ ID NO: 224709 - DNA, 201 bp, Homo sapiens
cctctccttgggctccacctcgtccccatccctcatgtagtcaaattaaaggagagatataactctggggaaataaccttgctgaagtatccatcatttcyctaaaatgcaaacgcagggctatttttttttttttttttttttttttcagtttcacctgactgagcagagtcaaggccgggaaatcatcccctgctttag

SEQ ID NO: 224710 - DNA, 201 bp, Homo sapiens
gaaatatgtcagagtgtacaggaaggtcattcccttgctcaccaagcaagacagtgtcacacaccctgcagacttggacatggccttcccaaacctccagsagcccagccagtgagggagagacatcctgagagggctgagatgtggggccacgacttgctgggtgacattgggctgtcactgcttctctccaagctctgt

SEQ ID NO: 224711 - DNA, 201 bp, Homo sapiens
ccgcctctcccaaggggcctcgaggaaccggctgccgcgcccccttccccaagaggagaagagcgggcgctgaccccgcgagtcctagaaccgcgggcggkgggcaggcagggggcggggggcagagggccagctaccggcgcggaacgcccatcccaggggctggttcaagacttccacaccgagagcccttcctgggcc

SEQ ID NO: 224712 - DNA, 201 bp, Homo sapiens
gcttcctgctcgctgtgcgccgaggtccaggctgaagcggagatcgcaagcctctggctcccgcctctcccaaggggcctcgaggaaccggctgccgcgcycccttccccaagaggagaagagcgggcgctgaccccgcgagtcctagaaccgcgggcggggggcaggcagggggcggggggcagagggccagctaccggc

SEQ ID NO: 224713 - DNA, 201 bp, Homo sapiens
tggccgcagagcctcaggaggttgcctctgtgcccgcaggacgcagagcagcaggaagctgatccgagcagactccgtcagcgagctccccgccccccggrggctgcggtggaaatgctccccggaaattcaaggccacttagcctcctcggcagaaaaacttcaacggtaaggataaccgaagtctcctttgaggggtcc

SEQ ID NO: 224714 - DNA, 201 bp, Homo sapiens
agcaggaagctgatccgagcagactccgtcagcgagctccccgccccccggaggctgcggtggaaatgctccccggaaattcaaggccacttagcctcctyggcagaaaaacttcaacggtaaggataaccgaagtctcctttgaggggtcccctagggaccaccccgcccttgcctactagctcccaaggctccctggaa

SEQ ID NO: 224715 - DNA, 201 bp, Homo sapiens
taggacacagaccaggctctagaagcccggggaaaccccagatgcatgcatactgttttgcatgcaataaaaacatcttttctttttcttcctcagaataktaaagaaccttgacttcattgtctataagtttgacaactatgggaaaacattcattaagaagcagaaatgcagccctgatgccttcatccaggtggccct

SEQ ID NO: 224716 - DNA, 201 bp, Homo sapiens
tttatgatttcccaagaataaattaccatgtgccattcatccttcatcccacgcaggctccatcgaagactggtgcccacctacgagagcgcgtccatccrccgattccaggagggacgcgtggacaacatcagatcggccactccagaggcactggcttttgtgagagccgtgactgaccacaaggctgctgtgccagta

SEQ ID NO: 224717 - DNA, 201 bp, Homo sapiens
acccttctggaaactactttcaaatccaaagctggtcctattccaggagctgatggaatgctctccttccttgcccatgttagagacactggatgagaagyaagacttctgtgagtctttatttacccctcagaattttactgggtcaggcaatctattcagactctccacatctgttactgagggccctgggcttggctc

SEQ ID NO: 224718 - DNA, 201 bp, Homo sapiens
ggattggggggcacctctgggctcaggtgctgtgtgaggctggcctgacaagagtgcaattccacatctgcactgagcaagctgtggaggccacgtgctcwgggtgttaggagtcctccagggcagggctggtactgccagaggatgagggagctcagggagggctgtcatagacagaggaggagaagggccttgtcctgg

SEQ ID NO: 224719 - DNA, 201 bp, Homo sapiens
tcggggtgggggcatggaatccgcggaacctgcgggccaggcccgggcggcggccaccaagctgtcggaggctgtgggcgcggcgctgcaggagccccggmggcagaggcgcctggtgcttgttatcgtgtgcgtggcgctgttactggacaacatgctgtacatggtcatcgtgcccatagtgcccgactacatcgccca

SEQ ID NO: 224720 - DNA, 201 bp, Homo sapiens
agacttggacatggccttcccaaacctccaggagcccagccagtgagggagagacatcctgagagggctgagatgtggggccacgacttgctgggtgacaytgggctgtcactgcttctctccaagctctgtgtcttttttcctcccccactcccaacatcaaggactttaccaagtggtgagaaagggagtgtgcccacc

SEQ ID NO: 224721 - DNA, 201 bp, Homo sapiens
  misc_feature (1)...(201): n = A,T,C or G
taattttgctgagctgagccctagaaatggaggggtcccagggtagagaacaacacaggggcagaacaatacagatactagggaccaacttggggacaggnatggggcgcacatactagaggcacaatgcctatgaaccctttcttccaggggctgcccaaactgcccgtgcccccgctgcagcagaccctggccacgtac

SEQ ID NO: 224722 - DNA, 201 bp, Homo sapiens
tgcaaggagggaactgacagaaggcggctacagctgcagaaggccatggtcatggtttacaagaaccactcaggatgggggcattttgctatttacgtatygtcatccagagctaggcatgtctgctgattttaaaaccaattacacattagcactaacagcctctctgatttaattggcccagaaatacctcccgagctc

SEQ ID NO: 224723 - DNA, 201 bp, Homo sapiens
tcgcggcgcgcagcctgcagggcctgggctcagccttcgccgacacgtctggcatagccatgatcgccgataagtacccggaggagccggagcgcagtcgygcactgggcgtggcgctggccttcattagcttcggaagcctagtggccccgcccttcgggggcatcctctatgagttcgccggcaagcgcgtgcccttct

SEQ ID NO: 224724 - DNA, 201 bp, Homo sapiens
ctcctgtgagccccaggctgcttagcctgaccctctgccacgacactgagggcatgaggcccacagggttccagggactgccagggtggcacagcccacgygcaggggagcagggctgcctgccgcacccctcagctccagctcagacatgggctcagacacggtgcaggagtgtgtgcactgacatcaacgaaggtggcc

SEQ ID NO: 224725 - DNA, 201 bp, Homo sapiens
cagcccctttgcatgaagcaatactatgggctcttctcctcctaccggctccccggccatacccaggacacgctggtggctcagaacagcagcatcatgcyggagcctgagcacgtcatcgtagcctgctgcaatcaggtaagcaaccccttgtcttggtgagggagggcacagagcatacagtggccatgcgttcacgtc

SEQ ID NO: 224726 - DNA, 201 bp, Homo sapiens
gcccgcctggcccttttgatgagtgcgaggacgactacaactactactacacccgcagctagcatccccactcctcctccagcccacccaaccgccttggktcaagggggctgctctgcaagcccactggccagctctggctcagggcccacctcctccagcgagtaccccagccactcctcaaccttgacttctgcccaa

SEQ ID NO: 224727 - DNA, 201 bp, Homo sapiens
aagctgcaggattgcgttgcttcggtgcctgggcttggggaggcttaaccatcagggcttcgggactccaagcgcatgttctcacttcacttggcccagcrtctgctaagtgaccaggtccgcgctttctgtgtctagtcggagggtccttgggtctgacccgactcgcctgaattgctggttggcaaccgcttctcccgg

SEQ ID NO: 224728 - DNA, 201 bp, Homo sapiens
gatgatgcagttctgggttctgtgccccattttgcctgatcaagttacaataaaacccattctctgtctcccctcaccacccaccatcccctcgtggctgyctcccttcccactcctctccttcagccactccattcccactgactgtgccaaaggccagctgtcagggcagcccctttgcatgaagcaatactatgggct

SEQ ID NO: 224729 - DNA, 201 bp, Homo sapiens
tgccgtgcatgaggcagaggtttgagaaaactctgagggtctccacgtgttgtggaaatggggcctccactactttaaaaagtggagaattgagctctgcmtctgccatgatgatgcagttctgggttctgtgccccattttgcctgatcaagttacaataaaacccattctctgtctcccctcaccacccaccatcccct

SEQ ID NO: 224730 - DNA, 201 bp, Homo sapiens
catggggcgcacatactagaggcacaatgcctatgaaccctttcttccaggggctgcccaaactgcccgtgcccccgctgcagcagaccctggccacgtayctgcagtgcatgcgacacttggtgtctgaggagcagttcaggaagagccaggccattgtgcagcagtttggggcccctggtggcctcggcgagaccctgc

SEQ ID NO: 224731 - DNA, 201 bp, Homo sapiens
aggaacttcctaaattcataattttgctgagctgagccctagaaatggaggggtcccagggtagagaacaacacaggggcagaacaatacagatactaggsaccaacttggggacaggcatggggcgcacatactagaggcacaatgcctatgaaccctttcttccaggggctgcccaaactgcccgtgcccccgctgcag

SEQ ID NO: 224732 - DNA, 201 bp, Homo sapiens
cacactgacagaagtgatccaacagcagaaagaaattgtcgatgaggcagtcagtgagttgaaccagtgagtatggtcgactttttctcagacattttgayactaaaaggagcagaaaaatgagggagttgctaaaagaggatgagggtcaagggaggtgtttttaggaggagagacaaatgtatggaaggaatttagtaa

SEQ ID NO: 224733 - DNA, 201 bp, Homo sapiens
gacagtgctcatgggcacagagtccaggcaagcactcactggcaggaggccttggccaagctgagctcctctcagcctggtggaggtctagaccaaggagmctgcgctcagatgaaacacttccccggattctcatgtggtcaactaaggcctggggcaggggcttttccaccccgaccctccattttatcaacctctctc

SEQ ID NO: 224734 - DNA, 201 bp, Homo sapiens
cctgccgtgcgccttcagcccgttgtcccatgtttccattacatttgggccacagtcatggtggatgagcttgggtgtagtgctcattttctgccttacaygataaacttgtcagcatttgactgatcagctacttatatgcagggagttcatttgcaaggccacctggctccccgctctgttgtcctgctcccattttac

SEQ ID NO: 224735 - DNA, 201 bp, Homo sapiens
atcaccttttgtctcaaaggtgccttagactctgttccttttcccccagtctaatcagtgttattccgtcttcaagttcactgattcttttctctcctccytaggttctgctgttgagtccatccactgcgctttctatattggttattctattattcagtcctaacatttctatttggttcttcttatatattttatttt

SEQ ID NO: 224736 - DNA, 201 bp, Homo sapiens
gaatgggggaggttataacgaggtggaggtggaagcacaggcacttcactgggtctctgttgacaccctgggggaggggactccttattactgcagggttggggggtggaagttcaagctccctacacggtctctattaatgctgtgtggggaaaaggacggagggctggttattgctcaatggagatagaattctcagct

SEQ ID NO: 224737 - DNA, 201 bp, Homo sapiens
ctgtaaaggccctccctccaaatagagtcacactgagagctgaagcttcaacgtatgacttttcaggggacacaattcagtccgtaatacccagagaatckgctgctatgatgttccttgggtcctgaggtccctggctggtctgccttcctctcgccatctttcagagtcttcttacttttgttttgaataaaatgtcca

SEQ ID NO: 224738 - DNA, 201 bp, Homo sapiens
accggtttgtcctctccactagccaggtacggccccgtgcagctatcgcccaagagtagtgtagtcagtaagctttctaaagagcagtgacaacaagcccmctagctggaatcaggcaaatcctgcctctgctttttctgaactatgtgatcttcagcaaaatgatctgaatgttcattagaagatggtttactgaccagg

SEQ ID NO: 224739 - DNA, 201 bp, Homo sapiens
ccgagtttatgatttcccaagaataaattaccatgtgccattcatccttcatcccacgcaggctccatcgaagactggtgcccacctacgagagcgcgtcyatccgccgattccaggagggacgcgtggacaacatcagatcggccactccagaggcactggcttttgtgagagccgtgactgaccacaaggctgctgtgc

SEQ ID NO: 224740 - DNA, 201 bp, Homo sapiens
ttgtcttaaatattatctctatatacatttagaaccacatcaggcaattttatgatttttgcttcaacattgaaacacagtttagaagacttaaaaggagmatgaaaatgaatttatttactcagatatttacctttcctattgttctttctttcttcttgatattccaatgtttctctttttaccatttcttttctttta

SEQ ID NO: 224741 - DNA, 201 bp, Homo sapiens
ataatgtgctctggtgtccctggagaagaggtgccctgagaagccaggggcctaacctggggccaaggggctgccttgcaatgctgactctcccatgatcrcccactccctctttcctgttgcagtttgtggtgggccgagacggcacctgcggtgtggtgtgcgaacactccccattcgatggcatcgtcctggtgcagt

SEQ ID NO: 224742 - DNA, 201 bp, Homo sapiens
cacgccccacaccagcctcagagctctgaggtgcctgggctgagcttcccttcagaccagaatcccgccccgttgaggctttgagaaaggagtaggagcckagcattccggcagaggaagaaaaacggcccatcttttagagtccgacctctggaaatgtgtgtatgatgtgatgtgtgtgttcattagagaacttgtcct

SEQ ID NO: 224743 - DNA, 201 bp, Homo sapiens
ttgggataactgaagattaacatccagttgtaagaagtaatacagagatctcatatgtacccatcttccaccaatggtagcattttccaaaactatagtayaatatcacaaccaggatactgacattgatacagtcaagatacggaacattccatcaccaccaggatccctcttgctgcccttttataaccacacccacct

SEQ ID NO: 224744 - DNA, 201 bp, Homo sapiens
ggatgcttttgtctgagaggagagcctgcctcttgccgcagtccttaagcatcctcaggtctgccatcaggattgtcccaagtctgtagcaccccacctckgctccccaccccatagtgccagcaggaatgggatggtaacagaaagggaagtcctgcagtgaatattgatcccagttattgtttcttattattattttga

SEQ ID NO: 224745 - DNA, 201 bp, Homo sapiens
tcactgcccacccacagtggggcaaggtggggggtcagggctggctcaagacctgggtcttgttgtgatcccagaagacagggctgccctgccctgtgtgrggctctgaggagggaagactggcctggagcgggacaggtgctagggctgtgcctgcctcccctgcagactccaccaaccgggactcgctggacatgattg

SEQ ID NO: 224746 - DNA, 201 bp, Homo sapiens
ggcctcagagggagcctgcacaccctattaggacctccctccccactgcctcgaagctgtggccttcctgaacccaggaggagccaacccgttatcctggyctggaaatttaattagacattcagccccgagtctgggagactacagcacttgtcaatttgtaggaaaagaatggccagcttggagagccccccagccctc

SEQ ID NO: 224747 - DNA, 201 bp, Homo sapiens
agatgtctgaaagtcatagttcagcacaaacaagcatgcctacacacagatgtggctcacaggagccccagtggagggtgctgttgggtgggggattaagrgcccttccactgatgtgggctgacatgagggtctaagcatcccgcttcatcttggcatgcatgaccaatagcccacacatctggaggagagctggtcaca

SEQ ID NO: 224748 - DNA, 201 bp, Homo sapiens
gaggttgcagtgagccaagatcacgtcattgtacttcagtctgggcaacaagagtgaaactccatctcaaaaaacaaaacaaaccaaaacaccaccaccamcaacaaaattatccaagtgtggtggcacatgcctgtaatcccagctactagggaggctgaggcaggagaatcgcttgaacccgggagtcggaagttgcgg

SEQ ID NO: 224749 - DNA, 201 bp, Homo sapiens
tgccagagaagtgaaccctagaggcaggatcagacaggcagagggccgtcattcatccatcagcagcaggggcagagaaggaggtgcttttaaggggcccmttcactctgcagcctatggggaggaaccctttactgtctcatggaaactcatcactgcacaaagaagcccctgaaggaaggtgcctcactgtctaccagt

SEQ ID NO: 224750 - DNA, 201 bp, Homo sapiens
gcaattccttctggtcttcatggtttctgataagaaaaaaaaatctgctgttgtcctagttgcttttctcctatagaatatatatatagtatatatatcacacacacacacacacacacacatatgggtgtgtgtgtctatgtatagatacatgtgtatatatgtatatcatttctctcttgctgttttcaagatttttcc

SEQ ID NO: 224751 - DNA, 201 bp, Homo sapiens
cggagctccaaaggactggagtgtagagctgagaagagccaggaggggatgaggaccatggttggggttggggggctgctctccatcccaacttcccccayctcacccaagccctattgctgcaacctgttcctccccagtcttcccaatcttgctaaggaaatggaaccagcagctcccccagctgatcaagacaaagat

SEQ ID NO: 224752 - DNA, 201 bp, Homo sapiens
ccagcatttggtggtgtcacttttttttattttaaccattttgataggtgtgaagacaatgcaatccaccacattaacagactaaagaaaaaaataacatrattatattaatcaatacagtaaaagcatttggcaaaattcaacaaccattcatgataaaatctcttagagaactaggaccagaaaggaacttgctcgacc

SEQ ID NO: 224753 - DNA, 201 bp, Homo sapiens
aatggtagcattttccaaaactatagtacaatatcacaaccaggatactgacattgatacagtcaagatacggaacattccatcaccaccaggatccctcwtgctgcccttttataaccacacccacctcacccccttcttaactcctgggcaaccacaaatctgttctctatttcaataattttattgcttcaggaatat

SEQ ID NO: 224754 - DNA, 201 bp, Homo sapiens
cctccctccccactgcctcgaagctgtggccttcctgaacccaggaggagccaacccgttatcctggtctggaaatttaattagacattcagccccgagtmtgggagactacagcacttgtcaatttgtaggaaaagaatggccagcttggagagccccccagccctctggctttcctgggtgctgccgtgaagagcctgt

SEQ ID NO: 224755 - DNA, 201 bp, Homo sapiens
cctggtggaggtctagaccaaggagcctgcgctcagatgaaacacttccccggattctcatgtggtcaactaaggcctggggcaggggcttttccaccccraccctccattttatcaacctctctccttcaagacactgcccttgagcctccaccctgcccccaaccaggatgactccctcctgtgagccccaggctgctt

SEQ ID NO: 224756 - DNA, 201 bp, Homo sapiens
gctgacgtctgacgggaggagcgagtgggccgaggccaggacggtcctcgtgaaaggtcagccgcagtgcccagcacatctccatgcccatctcatgctcrtgcccattggctttccctcctctagggttgggccagggcctcatccccatcagccatagtgtgggagctcagggcccacagcatgccctgcggccagcca

SEQ ID NO: 224757 - DNA, 201 bp, Homo sapiens
ttgcctactagctcccaaggctccctggaagtttccaaagaccccagctcctctgcctctccttgggctccacctcgtccccatccctcatgtagtcaaaytaaaggagagatataactctggggaaataaccttgctgaagtatccatcatttccctaaaatgcaaacgcagggctattttttttttttttttttttttt

SEQ ID NO: 224758 - DNA, 201 bp, Homo sapiens
tctcagtgagggggatctgttcactcagttgagaaagatagtcaaaatggcttccaacgaggacgagcgtttgcctccaattggcctgctgacgtctgacrggaggagcgagtgggccgaggccaggacggtcctcgtgaaaggtcagccgcagtgcccagcacatctccatgcccatctcatgctcgtgcccattggctt

SEQ ID NO: 224759 - DNA, 201 bp, Homo sapiens
aagtatccatcatttccctaaaatgcaaacgcagggctatttttttttttttttttttttttttcagtttcacctgactgagcagagtcaaggccgggaartcatcccctgctttagggggagtaataaacaactggtttgaataggtcatttgaattcaagctatttaaatttgcttgaatgtacagtgcaacttgacaa

SEQ ID NO: 224760 - DNA, 201 bp, Homo sapiens
ttcacctgactgagcagagtcaaggccgggaaatcatcccctgctttagggggagtaataaacaactggtttgaataggtcatttgaattcaagctatttmaatttgcttgaatgtacagtgcaacttgacaaaggggcctttttccccaaggggagggggccgttcaggccctaacgggacccaggcaggagggcctggg

SEQ ID NO: 224761 - DNA, 201 bp, Homo sapiens
tttcttattattattttgaaagatggtgtagcagggtttgagactggcctggatggtggggagaggagggcagcgagcagagacttcctcagacccaaccstctccaggattcagcagcagcaccccaaggctggaataatggggttggggaagtgcggtgactgggaaatgctgagctaggggcaggaggcatgggcggg

SEQ ID NO: 224762 - DNA, 201 bp, Homo sapiens; identical to SEQ ID NO: 41986

SEQ ID NO: 224763 - DNA, 201 bp, Homo sapiens
tcacctgactgagcagagtcaaggccgggaaatcatcccctgctttagggggagtaataaacaactggtttgaataggtcatttgaattcaagctatttamatttgcttgaatgtacagtgcaacttgacaaaggggcctttttccccaaggggagggggccgttcaggccctaacgggacccaggcaggagggcctgggg

SEQ ID NO: 224764 - DNA, 201 bp, Homo sapiens
cccagaatcctggtatgacagttcccgctgctcgtttctccagtgcctttccccaagcactcgatttccttttcattagtaccggggggtgggaggaaagrgaccaaattactggcttttcccaggagaaaattttccacaaggccaggggtcctgccctgtccagacccagggctggcttttccaaggaagaactccacc

SEQ ID NO: 224765 - DNA, 201 bp, Homo sapiens
gatgattccagtttcctctcccttccccaagagctgctcgacccccagttctcaccaaaggaccattttgaatccaaggcttgtggtgggctctcggcatkgggctggggggcaagaaccacatctgattagtgcaggaaccacatctgattagtgcacacgggggcggcatacaatgggcgatcacagagtttggcagtg

SEQ ID NO: 224766 - DNA, 201 bp, Homo sapiens
gatcctggggtaggacagaggctcaggacactctggctgacttcactgcccacccacagtggggcaaggtggggggtcagggctggctcaagacctgggtyttgttgtgatcccagaagacagggctgccctgccctgtgtggggctctgaggagggaagactggcctggagcgggacaggtgctagggctgtgcctgcct

SEQ ID NO: 224767 - DNA, 201 bp, Homo sapiens
ttcccccttcccccttcccctttcccccagccctcatttgaaaccctgagcagaattttctggcttctccccaagaagctgttcactccattgccctgaaytctgcagctgacaaacatctattgtcacctctggtccactggcatgcttctctacccaccccattgggctgtggcttccttcagagcaggctctgtttct

SEQ ID NO: 224768 - DNA, 201 bp, Homo sapiens
tgaaaataaagcttgctgaggcaatttttctttccgagtttatgatttcccaagaataaattaccatgtgccattcatccttcatcccacgcaggctccaycgaagactggtgcccacctacgagagcgcgtccatccgccgattccaggagggacgcgtggacaacatcagatcggccactccagaggcactggcttttg

SEQ ID NO: 224769 - DNA, 201 bp, Homo sapiens
ccagccttccctcccactgtagctggggtctccccagggaagaaggaaggtgtggacagatgaatgacttctgaaaacagttctcacaattgcatctgagrgggtattttcctcctggtgcaattaagccaggcccagaatcctggtatgacagttcccgctgctcgtttctccagtgcctttccccaagcactcgatttc

SEQ ID NO: 224770 - DNA, 201 bp, Homo sapiens
ccagcaggtctgcagtgaagtcttggcttggccagatacaattatgtagggagaaagcccagcccagggcctggcatggacagggccctctaaataggtcrcagatattattataaagggccacgcaaccaacagcagaacattcgtggccagcccaacatctaaccagtgcctcagcgtgtcctgtatgagagccactgc

SEQ ID NO: 224771 - DNA, 201 bp, Homo sapiens
gcctcagcgtgtcctgtatgagagccactgccacaaagacagaatgcaatccattagagagaggtcgtggtttaggaggggaaatgccccacagccatcartttactaaaatgccacctcatctgcgaaaggctggatgggcagtactggagttgataagctgtgtttgaggacagaagcccactcagtaatgggatgttg

SEQ ID NO: 224772 - DNA, 201 bp, Homo sapiens
ctctcctccaggtgcccacaaccacggagatgttctgctgctatggtcctgtggtcccaaatgggtatggtgcctgctacaacccccagccagagaccatycttttctgcatctctagctttcacagctgcaaagagacttcttctagcaagtttgcaaaagctgtggaagaaagcctcattgacatgagagacctctgca

SEQ ID NO: 224773 - DNA, 201 bp, Homo sapiens
tttggcaaaattcaacaaccattcatgataaaatctcttagagaactaggaccagaaaggaacttgctcgacctgatacggaacatctacaaaaagcttayagctaacatcttatttaaaggtgaaagactgaatgctttccccctaagatcagtaataagaggatacctactcttaccactctgtttaacacagtattgg

SEQ ID NO: 224774 - DNA, 201 bp, Homo sapiens
gtggtgtagttttttgagatcttgctcatagaatttagacacctggttacccctagctgtaagggaggctgggaagtatagctctagtttgttatccatgyaccaagctaaaaaccaggggttctacaagcaaggaaagaaaggacatgtggtgtgcaactaggagtctctaccatgtaatgaacctttccctgcaaatgc

SEQ ID NO: 224775 - DNA, 201 bp, Homo sapiens
gggtccacagatcccagccctaccttgcccaggccaagggaagcacactaaagtccattacccagcatggactgtgcttgccttgttcaggaggcccaggmcccaccctcagtgagtgctgatatgggggaggggaccagaccaggggtccaggggctgcaagtgctgactgtccaaagcacggtggtctgggaatggcat

SEQ ID NO: 224776 - DNA, 201 bp, Homo sapiens
aagcccactggccagctctggctcagggcccacctcctccagcgagtaccccagccactcctcaaccttgacttctgcccaaatcccctccctgtgacccrttccatatccctttctctcttgtccaatggggcttggagcaccgaggccagcgaagccatcgcgctccttgcggaggtgaagaggaccctgagtccccac

SEQ ID NO: 224777 - DNA, 201 bp, Homo sapiens
ggtggttcaggggcagctcgtaccccctgaaactccatggccgcaaacactgacagctaagatgattgcacagagcaaagaagagatgcctcccacagctstctggccgcagagcctcaggaggttgcctctgtgcccgcaggacgcagagcagcaggaagctgatccgagcagactccgtcagcgagctccccgcccccc

SEQ ID NO: 224778 - DNA, 201 bp, Homo sapiens
gcctgctctcagcctcctgactgagcaggcatgctgtgggctgcctcaggagctgcagtctgcccactccacactggctttggggctgtttttaaggatcrcttagtgaaggcagctactaagccagggctctcagagttcaccctgaggtatggccaacaggaatgaggtgtacagcattcaagctgcctatggccccgg

SEQ ID NO: 224779 - DNA, 201 bp, Homo sapiens
actctcctgcctcgagcctgcatcaaggcctgctctcagcctcctgactgagcaggcatgctgtgggctgcctcaggagctgcagtctgcccactccacamtggctttggggctgtttttaaggatcgcttagtgaaggcagctactaagccagggctctcagagttcaccctgaggtatggccaacaggaatgaggtgta

SEQ ID NO: 224780 - DNA, 201 bp, Homo sapiens
ctctggaatttccacactaccaaagctgtcagctccctccttgggcatgggtgtcagagcaggctcctcctattactcaatccccacctctcactattacrccgggctccttgaggaagattgattcgccactttaaaggagcctcgatgtgctcgatgaggatgccacaagacaaatggctcctgccgtgcgccttcagc

SEQ ID NO: 224781 - DNA, 201 bp, Homo sapiens
aaatgtccaagtttttagcgggaggaatggggaaaagtatatgttcctggaatcggaagaccctctatccagagctctttaaaggtgcctgatgtaactcragtcaaagcagttctgttttgcaagagtgagaaatacttttgtttgaattctcatagtctctgaggactgacagcataaagatcaccccctaggccagag

SEQ ID NO: 224782 - DNA, 201 bp, Homo sapiens
cactgcttccagtgttgcccctggtaatcctgtcttcatgaagagtgaactttgaaatatgcaaatcagactagattactttccacatgaaacttcccagygccttcacaccaggcttagaacaaaagacaggcttagaagtgccccctgtggactggccccacctgaggccctcccacacccccagctctctcctgcctc

SEQ ID NO: 224783 - DNA, 201 bp, Homo sapiens
gtgagagaagcttgggagactgggtaatttatgaagaacagataattattttttaaagttctggaggtcggacgtccaagatcaaggtgccagaaggttcrgtgtctggcaaagcctgctctgtgcttccaagatggtgccatgttgctgcattctcctgaggggacaagtgctgtgtcctcacatagtggaaggtggaaa

SEQ ID NO: 224784 - DNA, 201 bp, Homo sapiens
ggaccctgagtccccacctgcggctcccctgtgtagagcctgcatctgtctgtccttccttccattgctcccagtgccaaacttgggccgctgcaccgcgrcgcctccgcccaaatcaataaactgtgtctgtcccaggaggccgagtctctttactggtggggggtgcgtggaggcgcgcagggccagagcagaggggag

SEQ ID NO: 224785 - DNA, 201 bp, Homo sapiens
gttgatgcttcccacttcttggtccccaggtccacacctctgcatccctgcaccaggactcaccaagacgcccatcctggaaaaggtcccccgtaagatgrcagcaaaaactcccagcagtgaggagtctgtgagtgacttttggagccctctctcaaccctgctttccccacctacatgcccttgcttctagaacagtcc

SEQ ID NO: 224786 - DNA, 201 bp, Homo sapiens
tctaatgagtacgtggcagagctgggagccatcctggttgtctgcctcgaaagaccacactctttgcactgcatcgcggcacttcctgcggggtggggggyacaatgggagaagcatctgcgtctaatgctgctttacttttgaggccagaaaaatgggaaggctcccctctgactctggaagagagacgcaaaccgtaat

SEQ ID NO: 224787 - DNA, 201 bp, Homo sapiens
ataaaaagtctttgctgaaaattaatagggaaatcaaacttgcaagggaaatgtttctctagcttagagaaataattcattttctggcactgcaaagctawtgtttgcaatagcaaaatagagaataagcagtgacttgggcggctcatcaatacctgcattgcaagtcattctaatacagtctttgaaggatcatataat

SEQ ID NO: 224788 - DNA, 201 bp, Homo sapiens
ggaattccctctagaattctattaatattaaaatgaaatattctgccaagtcaagtcagggctgtgaaaataaagcttgctgaggcaatttttctttccgmgtttatgatttcccaagaataaattaccatgtgccattcatccttcatcccacgcaggctccatcgaagactggtgcccacctacgagagcgcgtccatc

SEQ ID NO: 224789 - DNA, 201 bp, Homo sapiens
tatattttctgaaagagattgtataaatgtggtatcaattcttccttaaatgtttggtagaatttttcagtgaaattatttgggcctgaagatttcttttyggggagttttaatgttgctaattcaatacccttaactcatttatgcctagtgttccattattagaacgctaagcttgtgggagttatttatgtcctactg

SEQ ID NO: 224790 - DNA, 201 bp, Homo sapiens
tttaccatttcttttcttttaaaaaaaactttcttagggaccagctgcagtggctcacgcctgtaatcccagcactttgggaggctgaggagggtggatcrtgaggtcaggagttcaagaccagcctggccaagtagagacaaaccctgtctctactaataatacaaaaattagcctggcgtggtggcaggcgcctgtaat

SEQ ID NO: 224791 - DNA, 201 bp, Homo sapiens
ggcaattccttctggtcttcatggtttctgataagaaaaaaaaatctgctgttgtcctagttgcttttctcctatagaatatatatatagtatatatatcacacacacacacacacacacacatatgggtgtgtgtgtctatgtatagatacatgtgtatatatgtatatcatttctctcttgctgttttcaagatttttc

SEQ ID NO: 224792 - DNA, 201 bp, Homo sapiens
tgacccacagcctaataataacagtctttgccctcttggcctggctcacttctactgtaccttcaaaattaatctgcctctccccagactaaggcaggtgrcccctaggggccctggctgcccagcctccctgcatacctccctgggcactcctatggcatctacactggcagcctgcagacccgagactgcctaggtcac

SEQ ID NO: 224793 - DNA, 201 bp, Homo sapiens
ggcaggtggcccctaggggccctggctgcccagcctccctgcatacctccctgggcactcctatggcatctacactggcagcctgcagacccgagactgcmtaggtcacaacgcctccagcaggcccagagtctccctgccctggccacaggccaggctcccaattagcccagatgcatcctggagcacagggccttaaag

SEQ ID NO: 224794 - DNA, 201 bp, Homo sapiens
ttcatatatgttcatttacatgacatcagcctagaagcaagaaatttactttgacctagagaaaaatacccatgcagacgggatgaagtcaaggtcaaacsattcattcccattctgccatcctccttttattcccccaacatgccaatcctgaacctagtcttgtttattttaaagtcactacacttttatatgatatgc

SEQ ID NO: 224795 - DNA, 201 bp, Homo sapiens
cctatggcatctacactggcagcctgcagacccgagactgcctaggtcacaacgcctccagcaggcccagagtctccctgccctggccacaggccaggctyccaattagcccagatgcatcctggagcacagggccttaaaggcctccattcacccacgcatgcattcctttccctccaccaacggagtgagggaattcac

SEQ ID NO: 224796 - DNA, 201 bp, Homo sapiens
aggggatgctcagactcactaacctttagctcagatgtctcaagctagaacccaacctgctctggactcattcagtgcatgtggaaatgcgcaagggcccrggagcagaggccgcatggtagagcggtcagtcctgagcagccactcatacacattgttggcagcaggcactgggtaagcatgagccgtggctgctggagt

SEQ ID NO: 224797 - DNA, 201 bp, Homo sapiens
taatggcttatcatctttcatggagctgtgggggtgaaccgatataatacatgcacagaatctggaactcagccttggtagcagttttcaaaagacaccgctttccttccttccttccttccttccttccttccttccttccttccttccttttagtgacaggcacagataagtactaatgtggggggtgggtgcagccct

SEQ ID NO: 224798 - DNA, 201 bp, Homo sapiens
ccagcaggcccagagtctccctgccctggccacaggccaggctcccaattagcccagatgcatcctggagcacagggccttaaaggcctccattcacccaygcatgcattcctttccctccaccaacggagtgagggaattcaccctactccacaccagagatgtggccggaatgcagagatgaagcactgagcacagtag

SEQ ID NO: 224799 - DNA, 201 bp, Homo sapiens
aatggcttatcatctttcatggagctgtgggggtgaaccgatataatacatgcacagaatctggaactcagccttggtagcagttttcaaaagacaccgctttccttccttccttccttccttccttccttccttccttccttccttccttttagtgacaggcacagataagtactaatgtggggggtgggtgcagccctc

SEQ ID NO: 224800 - DNA, 201 bp, Homo sapiens
gtcttacccttgagaagctagtgggaaagagagagtttgattggcaaagcacttatctattgggttccaggcaggaacaaaggcagcactctgccagcaamccctggtggatttggattgccccagggtggtcagctggccttgggtgacaacagactcatgagagcagaccctcactttaggaaccactctctcccatat

SEQ ID NO: 224801 - DNA, 201 bp, Homo sapiens
atggcttatcatctttcatggagctgtgggggtgaaccgatataatacatgcacagaatctggaactcagccttggtagcagttttcaaaagacaccgctttccttccttccttccttccttccttccttccttccttccttccttccttttagtgacaggcacagataagtactaatgtggggggtgggtgcagccctct

SEQ ID NO: 224802 - DNA, 201 bp, Homo sapiens
aggcacaggggagtctgctcggccaggacagcctccccgaagtcccgtgccctcgcctctgcactgcgggacgccagcgctcggccctggcggaggcgtcytcggaagagcatcggggtgggggcatggaatccgcggaacctgcgggccaggcccgggcggcggccaccaagctgtcggaggctgtgggcgcggcgctgc

SEQ ID NO: 224803 - DNA, 201 bp, Homo sapiens
caccatgttctccactggcctgagacaatgccatcctccctgggcaggcatcctccctcccgccccagccagccttcgggtggcagagcaacacacctgayttcaggtggttgcatgtgtttcccctctcccacacttgtctttttgccactcctcttcccccttcccccttcccctttcccccagccctcatttgaaacc

SEQ ID NO: 224804 - DNA, 201 bp, Homo sapiens
tggcttatcatctttcatggagctgtgggggtgaaccgatataatacatgcacagaatctggaactcagccttggtagcagttttcaaaagacaccgctttccttccttccttccttccttccttccttccttccttccttccttccttttagtgacaggcacagataagtactaatgtggggggtgggtgcagccctctc

SEQ ID NO: 224805 - DNA, 201 bp, Homo sapiens
ttaaaggcctccattcacccacgcatgcattcctttccctccaccaacggagtgagggaattcaccctactccacaccagagatgtggccggaatgcagaratgaagcactgagcacagtaggtatggtcttacccttgagaagctagtgggaaagagagagtttgattggcaaagcacttatctattgggttccaggcag

SEQ ID NO: 224806 - DNA, 201 bp, Homo sapiens
tataataagacagtgtataagatattgtatactatcttatattatcagataagcataagataatacttatcattcagtaagcagtttgtttactatcttayacaagataattaatacttatctttatattttaatttaatatttttaattaaactaatattttaaattttaatttaatgttttaattaatatttttaatat

SEQ ID NO: 224807 - DNA, 201 bp, Homo sapiens
ttgccaatgtgtaaatgtgaggtctactgtaaatcgtgctgtccatttacctgcctctctgcaggaatttctttttgagtgtgtagtccttatttcccaakaataaatacaaagacttttcagactatgaatacatatcacatggtctctaaggtacagttgtacattatacccgtggaagttttctttcttaaataatta

SEQ ID NO: 224808 - DNA, 201 bp, Homo sapiens
gtcaatagcagagcccaaatagatactgtggaatgagtttcccctctgtccaggagggaagccaagttgtgtgaccctatagcagtgacaggaggggggtyacagggagtgggtggaaaattgttcttgctcatgcatagaagcagatcagcctttgggtactagttcctctcagctgggtgccttgcccagatgagggtg

SEQ ID NO: 224809 - DNA, 201 bp, Homo sapiens
attcattcatgtttgagaagctctgctttaaatcactaaagcagttactgagtaattactaccatcatgactctgaagagctcctatagccttcaaatgcrcctaactctactctaaaggcaaatgtcctcactgggaaatctgatctgctgtttcagagaagtgcagggctacacagtgtcttacactcctatctattga

SEQ ID NO: 224810 - DNA, 201 bp, Homo sapiens
cttcaaatgcacctaactctactctaaaggcaaatgtcctcactgggaaatctgatctgctgtttcagagaagtgcagggctacacagtgtcttacactcytatctattgatgtttcttggttttgcctggtaatctgctgcttaaatggattatttgatgacatattgatattaaaacagtcctatttttagaaaaaata

SEQ ID NO: 224811 - DNA, 201 bp, Homo sapiens
acaattaggagaggtttgccaattgatgacaccaaaaagccccaaaccttacaatttacactagttttattctcttttcccctaaactttttctagaatgaaaaaatcagaaattagatagaatcacagttcaccacctttgcctctttactctctacctaagttagatgctaactaatggtacaatgaaactctgaaaga

SEQ ID NO: 224812 - DNA, 201 bp, Homo sapiens
ttttaattaatatttttaatatttaatacaagataatacttaccttgtataagatagtatacaaactggttactgaatgataggaagatggttaaacatayttattactatcattcactatcatgtagaaaactctatttcatagtcccatatagtagagaggaacctggttgccttttcaagaatttctatcaggtgaca

SEQ ID NO: 224813 - DNA, 201 bp, Homo sapiens
gccagaatgttaggaaggatggcctagatcagaagggtctcatggacaaaatgcctttagggatcaagaggataaaagaatttagccagcctggccaggaraaggtgaagggtgagtatagcttgcctaaacaggacagctacccctcagtattgtcctgtggtaatacaggcttagttagggtgactatattgtcttgtt

SEQ ID NO: 224814 - DNA, 201 bp, Homo sapiens; identical to SEQ ID NO: 42010

SEQ ID NO: 224815 - DNA, 201 bp, Homo sapiens; identical to SEQ ID NO: 42011

SEQ ID NO: 224816 - DNA, 201 bp, Homo sapiens
catggccatggcctgctttctcatacccctaccccggaccagtctcaccagctgtggtagaaccatctttcttgaaggcaggcttcagtttggccaggccytccatggtggtgctggggcggataccctcatcctgggtcacagtgatgctcctcttggtgcccttgtcatcatggaccgtggtggtcacaggcacaatct

SEQ ID NO: 224817 - DNA, 201 bp, Homo sapiens
aatttctgatgtccaaggcagaaaaaaagtgtgtcccggctctgagagagacagttcaccttctgtatttgttctctccagggccccaggcaattagctgrtgcctgccaacactgagggcggatcttccccacctggtccactcagatgcacacactaacctcctctgcaaacaccgtcacagacacacccaaagcaatg

SEQ ID NO: 224818 - DNA, 201 bp, Homo sapiens
acatttttatgtacatgcacaaggcttacaaagtcaatgtgataatgcactttcatggaatcaaatttctgatgtccaaggcagaaaaaaagtgtgtcccrgctctgagagagacagttcaccttctgtatttgttctctccagggccccaggcaattagctgatgcctgccaacactgagggcggatcttccccacctgg

SEQ ID NO: 224819 - DNA, 201 bp, Homo sapiens
ggagccaccttacctgctttttgcaaagctactgggatggcataggcaggtccaatgcccatgatgtcaggtgggaccccaaccactgcataagacctcakgaccccaaggatgggaaggcccaactcttctgccttggacctccgggccagcaggatggcagctgccccatcactcacctggctagagtttcctaggggc

SEQ ID NO: 224820 - DNA, 201 bp, Homo sapiens
gcctggtctattccaggttcccagagtacagcacccagcatggccatggcctgctttctcatacccctaccccggaccagtctcaccagctgtggtagaamcatctttcttgaaggcaggcttcagtttggccaggccctccatggtggtgctggggcggataccctcatcctgggtcacagtgatgctcctcttggtgcc

SEQ ID NO: 224821 - DNA, 201 bp, Homo sapiens
aggccactgcaccccccagggggttcaccttctcaggggggagtcgtagcttctccacacagtaggcagcctggaaggaggcagatcatcacctatagccytcttacccctcccctgcaccacctgcccgctcactccacctcggctgtccagggcaaaggcaacattgagaaacaagggctcacctggcttgcaaaggcc

SEQ ID NO: 224822 - DNA, 201 bp, Homo sapiens
accatggccttgtggcctgggtgacccaggctgcttttatcttgcacagctaaagagggtctgatgggtggctcaacaccccacccactcctataccatgwcatcagtgttcacattttccaaatgagttgaagtgccttgatctgtccactgccaccaccaccagtgctgagttttcccatgtggttttgcttttgtggt

SEQ ID NO: 224823 - DNA, 201 bp, Homo sapiens
tgaaggcaggcttcagtttggccaggccctccatggtggtgctggggcggataccctcatcctgggtcacagtgatgctcctcttggtgcccttgtcatcmtggaccgtggtggtcacaggcacaatctcagcttggaaacagcccttgctctgggctcttgctgccctgccagcaccatggacagccagcttcagactcc

SEQ ID NO: 224824 - DNA, 201 bp, Homo sapiens
gtttactattttcctagataggagcagttttagttgtttctatttatcctctaccatgacaacagcactcactccataggtcagggaagtgatgtgggaaktctgccagttgctgagtatatctattcaaattatgcactgcagagctgaggaaataatcgcaagatggtttcatggactcactgtacacgctgtgaaatg

SEQ ID NO: 224825 - DNA, 201 bp, Homo sapiens
agaggtgattaccaggacagatggaaggaaacagcttacaaaagtggcctttcactggctttctcccctctccccactttaggtgtctgtactcaaagatytcttggaccatttatatcctgagatgaacagcattggccatacagcattttaaagatctcatctgagaaacccattgatattggtgccaggaatgctaag

SEQ ID NO: 224826 - DNA, 201 bp, Homo sapiens
actttctcagtgttctataatgaacatgtattacttgaataagaaaagataaagaacactaggaattaaaatgaagtttattaccttaacttgatatatgwtatcattctgtaggactggctttgttggaagaaaagctcagatatagcaatgagaaataccaaaagtttaaggcagtggaagaaagcctgcgtaaagagc

SEQ ID NO: 224827 - DNA, 201 bp, Homo sapiens
catcctttaagttcttgatggaactggtctttgcaatccctccaggaaggcagtactgattttggtttactattttcctagataggagcagttttagttgyttctatttatcctctaccatgacaacagcactcactccataggtcagggaagtgatgtgggaattctgccagttgctgagtatatctattcaaattatgc

SEQ ID NO: 224828 - DNA, 201 bp, Homo sapiens
aactattttttaacagggtgacaaattgcaacattgtaaaggaaggcttaatagaaaaaaaaaatagtacatagtaatagaactgcttgctgagttccaaracttttagaacaaggtgaggggggaggacttttccttccaattccttcttcataacattggatggagtccttttggtgggtattttgacagcttcctttt

SEQ ID NO: 224829 - DNA, 201 bp, Homo sapiens
aatttactctgatttttctgaaagtgctatggaaaacaaattagaaataacgtcatgtgaaagaactttaggctattattcacactttctgcattcagatytcaattacagcttttgctagccaagtgatcttggatatgttatctaacttctctattcttcagtcatttcatcagaaaaatagtgataattaatagcttc

SEQ ID NO: 224830 - DNA, 201 bp, Homo sapiens
gtaaagttccccagtcacaacttagtggctgggagaagtatctagtgactggctgtcctaggaccccttggatagtgacagatctggaggacagttgtccrggacaggagagtaagactgagaaggctctgccaatgttcaggagacagttaacctcctggccctcaatgttcaagcatacccggggctctgtgagggtga

SEQ ID NO: 224831 - DNA, 201 bp, Homo sapiens
cagctcagtctctgtatctgtcttgaatgcattcacggccactactactggaattccaaacattctggcattttcagtttgtttcttcaagttactgaagmctttttcaaccagctccaggttctcctctatgtaagccttgggaagaggcattccagcagtgaccatagggccacccctgtgcatctttagagcgctgac

SEQ ID NO: 224832 - DNA, 201 bp, Homo sapiens
ccatctacgacaaacccacagccaacgtaatactgaatgagcaaaaactggaacggttccccttgggaactggaacaagacaagtatgcccactttcaccrctcctattcaatatagtactggatgtgctagccagcgcaatgaagaaagggaataaataaaaggcacccaaataaaaagagagaaaatcaaactctctct

SEQ ID NO: 224833 - DNA, 201 bp, Homo sapiens
gggtacactaaatcagatatttaatttttgagccttggctttcttacagctaagatgaggatgctagattgactttgaaggatggttggaaggatataatrtaataatgtgtagagtgctttaaaattattaataatagtgataatgataccatttattggagacatgtatatgtttatattgatattaatgtaggtaata

SEQ ID NO: 224834 - DNA, 201 bp, Homo sapiens
ggcatattaaatcagtatatctaaagtcaacataaaagaaatacttctatgatcagcaagaaaaatgcatctagtcacctatgaaagaaaccccatcagastaagaatgagcttcttagcagaaacttcgcaggtcagaagaaaatggaatgggatttacaaattgctgaaagaaaaaaatacaataaaaatgtttatatc

SEQ ID NO: 224835 - DNA, 201 bp, Homo sapiens
agatacgtcccatcagtacctaattcattgagagtttttagcatgaagggttgttgaattttgtcaaaggccttttctgcatctattgagataattatgtsgtttttgtctttggttttgtttatttttgttcacagtaatcaacctgcattatttccccttcccagtactcttcccagcctctggtaatcaacattctat

SEQ ID NO: 224836 - DNA, 201 bp, Homo sapiens
aagggaaataaattttatacaaaaggatatctacactcatgtgtttataccagcattattcacaatagaaaagatatagaatcaactaaactgtcaatcartggattatcggataaagaaaatgtggtgtatatatacaatggattgtattcagccattaaaaaagagaataaagtcatttttttttttccagcaacatca

SEQ ID NO: 224837 - DNA, 201 bp, Homo sapiens
cctgatatttaagcaaacggttgtctgacagccacaagtcttctttagcaatgagtatgccattcacatcacgagatgtccacacagtaagatctcttccytgtgtcattttaactgcttcagatactgagactgctactgctgccactacccataaataatgaggccaaccctttgccactacatcaatttccttactca

SEQ ID NO: 224838 - DNA, 201 bp, Homo sapiens
ccatgctgaatcttgagctttaataatcaagatttgtacaaggaatcttggcttatagaggtctcaaaaacaagctctccagaggtggttttgctgctgtkgtttttgttgctgatgatgatgatttttgttaccctcaccacataattaagatagactttccaaacaagtttcaatctattattaaataagttgatttgg

SEQ ID NO: 224839 - DNA, 201 bp, Homo sapiens
ttaaggattttacttttcccattgaccttggtgaatctgatggctatgttccttgtggatggtcatcttgtatagtacctagctggagttctctgtatttstttgatttgcctgtcacactctccaataagattaggaaaatttttatggactatattttcaaatatattttccaagttaattattctctctcctctctca

SEQ ID NO: 224840 - DNA, 201 bp, Homo sapiens
caacaagtgtcctgtagtttttttgttgttcttgtgttctttcatgtttttaatatcgtggagatactggatttgtacaatgatttagagaggtattcctmcactttgattttttggaatagcctcagtaggatgacaccagatcttttctgtacatctggcaaaacctgactgtgaatctgtctgttcctgttcttttgt

SEQ ID NO: 224841 - DNA, 201 bp, Homo sapiens
tatctgtctagtgatatcagtggggtgttaaagtcccactattgatatgttgctatcaatctattttcttaggtctagaagtatattttttataaatctgratgttccagtgtctgttgcatatataatttaaataaataaatcttcttttattggagcttttcttaatatataatgaccttatttatattttagtaccat

SEQ ID NO: 224842 - DNA, 201 bp, Homo sapiens
gaaaggaattacaacatacaattaaaaccttcaacagtagactaggccaggtagaataaagaatctcagaacttgaagataggtctttcaaattaatccastctgacaaaaaaagaaatagtttcaaaaaaagccttcaaaaagtttggaactatgtaaaatctccaaacctatgaatcgtaggtattcccaagagagaat

SEQ ID NO: 224843 - DNA, 201 bp, Homo sapiens
ttctgttttcctagtgttccaggcgccaccgggctttgagaaaaaactcctgcagctagctcagtgtctgcccaaactgctgcccagtgttttgcttgaarcccagggccctggtggtgtaggcacctgagggaatctcctggtctgtgggttttgaagactgtgggaaaagcgtgttatctggggccgtattgcaccatc

SEQ ID NO: 224844 - DNA, 201 bp, Homo sapiens
ggaaggggctcgcattggagaagctgctccaaactcgaatcagaaagacactaatttccttgtctgagaactggcaagtcttatgtttaaatcttcgatcyattttgagatgatttttgtgtatggtttaagataagggattaatttcattcttttgcaaatggatatccagatttcataaaataacttattgaagagatt

SEQ ID NO: 224845 - DNA, 201 bp, Homo sapiens
tgcctccatatctgggtgctttcaatgtgccaagggctctgtatgagttctttggctatatataacttttgtgtcgtggctttctcaaatgctgcttatcrtaatgatgcattggccatatgatctggcacactatcttctgtgagctgggagtgcagagctctcagaaagcttatcttgcacgttagcactatgctgtgt

SEQ ID NO: 224846 - DNA, 201 bp, Homo sapiens
aaacagctcgcacgtttgagcagaccaattattaggcaattttcttaactctgcttctacaagagtttccctcaattattgaatacccattgtgttttttyctcaatcacctgggaggaaccatctattgtcctgtcctgaagggagtccctcctaggtctgttcagacatttgtatggtaattaagatttaaatcccctg

SEQ ID NO: 224847 - DNA, 201 bp, Homo sapiens
tgcctttcttgaccacaaagaaaggggtctgggctgctggattctagtggtcctttaccagcaagcctgacattgcctttgcactcaggggcgagttctaragctgggctgggttcctgagtatttcataataacccatttgccccatcaagatgcattcctacaaacaaccgttcttatgcaaattcatttcagagaggg

SEQ ID NO: 224848 - DNA, 201 bp, Homo sapiens
ggtcttagatttaggtatctgatccatcttgagttgatttttgtgtaaggtgagagatgaggatccagtttcattatcctagatgtggttagccaattatmccagctttatttgttgaatagggtgtccttttcccactttaggtttttgtttgctttgtcaaagatctgttggctgtaaatatttggatttgtgggttct

SEQ ID NO: 224849 - DNA, 201 bp, Homo sapiens
aatggaaacaggccaaatgccccaattaaaagacacagactggcaaattggataaaaagtcaagacacctcagtgtgctgtattcagaagatctacctcawgtgcaaagacacacataggctcaaaataaagggatggagggatacttatcaagtgaatggaaagcaaaaaagaacgtgagttgcagtcctaatctctgat

SEQ ID NO: 224850 - DNA, 201 bp, Homo sapiens
gcaagggatcagggaattccctttcctagtcaaagaaaggggtgacagatggcacctggaaaatcgggtcactcccaccctaatactgtgcttttccaacragcttaacaaaggacacaccaggagattatatcccgcacttggatcagagggtcctacgcccacggagcctcactcattgctaggacagcagtctgagat

SEQ ID NO: 224851 - DNA, 201 bp, Homo sapiens
acatggaaattaaacaacatgttcctgcataatctttgagtcaatgaaaaaatgtagacataaattaaataatatttgaaacaaatgaaaatggaaacaamacatacctaaacctttgtaatacagcagaactggtatttacatggaagtttataatgttaaatgcctacatcaaagtaataaaaagactacaaattaaca

SEQ ID NO: 224852 - DNA, 201 bp, Homo sapiens
actgatgctagtcaatccatccacatccttttcaggtgcaatagcattgatcactccttcagtgtattgtctgagtctagagatagctgcactacgaaccygtgtacagtagagtcttcattcaaagatatgatgtacttgatcacctcagattctgtggttgttcttggtaacttaatgtcagtggctttcatcccaatc

SEQ ID NO: 224853 - DNA, 201 bp, Homo sapiens
ccagggatgaaacccacttgatcatggtggataagttttaattgatagaccactagcaagactaataaagaagaaaagagagaagaatcaaatagacgcawtaaaaaatgataaaggagatatcaccaccaatcccacaggaatacaaactaccatcagagaatactacaaacaccgctatgcaaataaactagaaaatct

SEQ ID NO: 224854 - DNA, 201 bp, Homo sapiens
aggatttttacgtatgagaacatgtcatctgcaaacacaattttgcattttcctttccaatttgcatgctatttatttatttatttatttatttatttatttatttgcctcattgctctggctaagacttccagtgacatgttgaatagaaatagccaaagtgaacacctttatcttattccttatgaggaaaagctctca

SEQ ID NO: 224855 - DNA, 201 bp, Homo sapiens
cgcctgagtgagggctattatttctgccagctgagcactagttcctggagtgaggggattactttcaagtattccattatcactgaccactgcataatacrctttttaaagtcctttttctacaaagaaacttccatcagtatacaatttgaggtcggaatcagtcaagggaacctctagaaggtcccctcgagtggtgta

SEQ ID NO: 224856 - DNA, 201 bp, Homo sapiens
ggatttttacgtatgagaacatgtcatctgcaaacacaattttgcattttcctttccaatttgcatgctatttatttatttatttatttatttatttatttatttgcctcattgctctggctaagacttccagtgacatgttgaatagaaatagccaaagtgaacacctttatcttattccttatgaggaaaagctctcag

SEQ ID NO: 224857 - DNA, 201 bp, Homo sapiens
gatttttacgtatgagaacatgtcatctgcaaacacaattttgcattttcctttccaatttgcatgctatttatttatttatttatttatttatttatttatttgcctcattgctctggctaagacttccagtgacatgttgaatagaaatagccaaagtgaacacctttatcttattccttatgaggaaaagctctcagc

SEQ ID NO: 224858 - DNA, 201 bp, Homo sapiens
tctactttttattatttctttccttcagataaggttggctttatagtgttcttctttgcctagtcccttgaggtgaaaagttaggtagttagtttgagatcttttttttttttaaattttatttaaaaaattgtattgtattttggtaagaacatttaacatgacatctaccctcttaactgatttttaagtttccaaaca

SEQ ID NO: 224859 - DNA, 201 bp, Homo sapiens
atttttacgtatgagaacatgtcatctgcaaacacaattttgcattttcctttccaatttgcatgctatttatttatttatttatttatttatttatttatttgcctcattgctctggctaagacttccagtgacatgttgaatagaaatagccaaagtgaacacctttatcttattccttatgaggaaaagctctcagct

SEQ ID NO: 224860 - DNA, 201 bp, Homo sapiens
gtcatcagcaagcagagataacatgactacttctttttaaatttggatccctttcctctggctagaactgccagtactatgttgaataggagtggtgagastggagatccttgtcttttttcagttcttgttttttttgtttgtttgttttttgtttttggcaaaactatttccttttattctgtggaacgtcactaacgt

SEQ ID NO: 224861 - DNA, 201 bp, Homo sapiens
tgatgattagtgttgttgatttttttttttcatatacctaggggccagttgcatgtctcctttgaagaaatgtctattcaggttgtttgccaatttttcarttaagttatttgtttctgataagttctatgaattccttgtatattttgaatattaatcctatatcaaatatatgttttacaaatgttttatcccattcag

SEQ ID NO: 224862 - DNA, 201 bp, Homo sapiens
aaccaaataccgcatgttttcactcataggtgggaattgtacaatgagaatacttggacacaggaaggggaacatcacacaccagggcctgttgtggggtkgggggagtggggaaggatagcattaggagatatacctaatgtgaatgatgagttaatgggtgcagcacaccaacatggcacatgtatacatatgtaacaa

SEQ ID NO: 224863 - DNA, 201 bp, Homo sapiens
aatttgtctttttaaaagcaagagttcatttgggaaagaagaataataaggggaacagacctaccaaattttaaaagtaatttttaaactactattcaatktaataataatacagcttattacgtggaagcaatggaagacaaagaaggcccttacataatggtaaagggatcaattcaacaagaagagctaactacccta

SEQ ID NO: 224864 - DNA, 201 bp, Homo sapiens
aaccattttccatacacagatgatgccaaaatctgcctcttcagctcacttttttcacttaagctagaggactgtctatttactactacaggaagactggscatttcagataactgagactcaatatatctaaaactgatattatttttctttcaagctccagaaacctgatccactactttgattcttacccaatcccag

SEQ ID NO: 224865 - DNA, 201 bp, Homo sapiens
gccatttttacagtattgattcttgctatccatgagcatgaaatgtttttccacttgtttgtgtcctctcttatttccttgagcagtggtttgtacttctycttgaagaggtccttcacatcccgtgtaagttgtattcgtagatattttattttctttttagcaattgtgaatgagcgctcactcatgatttggatatct

SEQ ID NO: 224866 - DNA, 201 bp, Homo sapiens
tagacgtgcaggtgcatgtgtcttttaggtagaacaatatttggctttcaatatatacccagtgatgggatgattgggttggatcacagttctattttttkgggggggggttactttcaacttttacttcagaaacaggggatacatgtgcaaggtttctaaaaaggtatattacatgatgctgaggtttgaggtatgatt

SEQ ID NO: 224867 - DNA, 201 bp, Homo sapiens
tcttgagttaagttttgaatatggtgaaatgtattttgcacatgactagccagttatctaaacaccatttattgataggtacttcattccccattgcttgytattgtcaactttgtggaagaccaggttgttatagatttgaagctttatttctgggttctctatcctgttccattggtctaggtgtctggttttataaca

SEQ ID NO: 224868 - DNA, 201 bp, Homo sapiens
taacaaaggcttaactaaggcattgctggtgatgttgcaagaaagaaattagaataaaatatggaaattaggaaacatcaatttcattaaatgagtatatrtggatgctgaaagagaagaattaagtatgacatctgtatttattgtttacgtgacttggtgtcatcaactgagtcaaataatataggatatgacatttta

SEQ ID NO: 224869 - DNA, 201 bp, Homo sapiens
ctctatctcagggagatgggagtttaatctgtaagctgctgactggggctgttgcctttctttcagagatgcccttccaagtgaggaggaatctagagacrcagtctggctacagtggttttgctgagctgtggtgggctccccccagtttgaacttcctgaaggctttgtttacactgaggggaaaaccacttactcaag

SEQ ID NO: 224870 - DNA, 201 bp, Homo sapiens
tctagtatttattcatcttgcataaccaaaactttatatcacatgaatagcaattccccatttctccctttctccatctcctgacaatcatcatttcactstctgcctctatgagtttgacaaatttagataactcatataagtggaatcacacagtatttgtccttctgttttatttagcataatgtcctcaagatgcat

SEQ ID NO: 224871 - DNA, 201 bp, Homo sapiens
tttgcagggacatggatgaatctgctctactttttattatttctttccttcagataaggttggctttatagtgttcttctttgcctagtcccttgaggtgraaagttaggtagttagtttgagatcttttttttttttaaattttatttaaaaaattgtattgtattttggtaagaacatttaacatgacatctaccctct

SEQ ID NO: 224872 - DNA, 201 bp, Homo sapiens
tccatattttattctacgttcagggggcacatatgcgggcttattacatgggtaaattgtgtgtccatgtggtttggtgtacaaatgatttcatcattcasgtagtgaacacagtccctgataggtagttttttgatccttgccctcctcccatcctccacctttaagtaggctctggtttctcttgttttcttctttctg

SEQ ID NO: 224873 - DNA, 201 bp, Homo sapiens
acaggaataaacatttttttgaattcgaattgtaactatgcctgttactaaatatgcacttttgttattttaaataacctccagagtctcagtttccccayctttgaaaatgagataatacttacctcttaggttagttctgaatacaaaaacatgtgttggttaaacatgtgccaaaattgtttgtttctaaaatttaaa

SEQ ID NO: 224874 - DNA, 201 bp, Homo sapiens
acaaaccactgctcaaggaagtaaaaccggagcaaaacaaatggaagaacattccgtgctcatggataggaagcatcaatatcgtgaaaatggccatactrcacaagatgatttatagatttaatgccatccctatcaagctcccaatgactttcttcacagaattggaaaaaaactacttagtttcctatggaaccaaaa

SEQ ID NO: 224875 - DNA, 201 bp, Homo sapiens
ttactagtagtttgttgaatatatttgcatccatgtttatcagggatattggtctatagttttcttgtagtaacagtatatggtttggtatcagggtaacrctggctttgtaaaatgagtttggaaatattatattcaatttttggatgaatttgaagatgattagtattatttaaaaaaaaagttagatagaattcttct

SEQ ID NO: 224876 - DNA, 201 bp, Homo sapiens
gtaatcccatctgtctatttttgttttattgactgtgcttttcatgtaccaccaaaaaaaattattgatcagactaatgttatgaactgttttccttgtgkttttttctgatagttttatagttttgagtattatacttaagtctataatctattttgaaatgatgtttgtatgcagttaaagataagggtctagtttcat

SEQ ID NO: 224877 - DNA, 201 bp, Homo sapiens
taggtcaagatcaaaactacccactcttggtagactgaggactatgaattttatcttcctagcacaatgaagtcaccaaaagtacagatcttcctctcacscattactttagactcagcaaatattcctttcccccagagaaaaataggttccatgttctggactcaacactagattccttttctgttatagacctctgtc

SEQ ID NO: 224878 - DNA, 201 bp, Homo sapiens
catgtttttgtcctttaatctccataccagaattagaagtgatttataaaccaatattatagtatcacaggatttaatatctgtctgcgtatttacctctrccagagatctttgttatttatggttttatgttgctaacaagtgtcttttgatttcaacttgaaggactccttttggcaattcttgatggcaggtgtaaag

SEQ ID NO: 224879 - DNA, 201 bp, Homo sapiens
ttagaggttgtaggttaaaacaaaacaagcccctgggatcccaccaagcatgcttttggtgggctaggaagataaattttgtgaccaggatctacttttcyaacaaaggagactttcattctatcaataaatttccatatgcatgatatgcttggaagattcaagccagcctaggggccctcttggaatataaagatacta

SEQ ID NO: 224880 - DNA, 201 bp, Homo sapiens
actgttataactggtctataaatgtcttgttttcttctaactcttagaacagtgataaaaattcattggcatgcatgtagtccgtgttacagcctagatgraacaagcacatatgctcatgtgtcatttctgactcagtggtatctctacaaactctcaaacttcttgtagaaattttttatgttggcctaccagggagat

SEQ ID NO: 224881 - DNA, 201 bp, Homo sapiens
cctgatgcatttataactgaccagaaaagctggcagatttgtaaagagattcctcctctgctcatgagatataggaatgcctacaaccaggtctatggtaytatgtagatcaataactgtcttatgaggagtagctagccaggggctttttcttctacttctgttatgactagtagagatatgtcattttgtgtcattgtt

SEQ ID NO: 224882 - DNA, 201 bp, Homo sapiens
aatactatcatcaaaactgattacacaagttcatctgttaatgttcatttttattgagattttatatatttacacttcaaaaatttcttttcacacatatrgaaacatatatgaattttaaaatatgcatcttcatgaaagtccaaataacactatttggactatagtttgagttcagaaattatatctgctgaaaatttg

SEQ ID NO: 224883 - DNA, 201 bp, Homo sapiens
ctctttatctgtgatttttgactgcttgattataatttgtcttggtatgagtctgcttgggtttatcttagagtttcattttttagcttttcccatttttrtgtaactttcctcaaaattgagaagtttttggccttctttcttcaaataattcctcttcccttttacttttttatgggtatttcatatgcatacatttgt

SEQ ID NO: 224884 - DNA, 201 bp, Homo sapiens
tttccttaatattgtgtcctttaggttgatcccttctgccattaatgacaggatttttccatttttatagcagaatagcataccactgtgtatgtataccrcattttctttgttaattcatctgctaaaggacacttaggttgattccttttattggcaattgtgaatgatgctttataaacacaggagtgcagatatgtt

SEQ ID NO: 224885 - DNA, 201 bp, Homo sapiens
tgatagaattcagcagtgaaaccatcaggttactgcttctatctcattactcataattagtttgctcagattttttatttttccatggctcaccatcttargttatatatgtaaatacttttttttagtttttcaaaattactggcatatagttattcataataacttctttctttctttctattaatttaaggtttggca

SEQ ID NO: 224886 - DNA, 201 bp, Homo sapiens
gctttgtcaaaaaatatgtgaccataagtgtgtagaattaattttgggttctcaattttgtcgcattgatctttgtttttatttttatacaagtaccatgycgttttggttattattgctttatacagtatttggaagtcaggtaaggtgatgcctccagctttgctccttttttatttgttttattttttattctgatat

SEQ ID NO: 224887 - DNA, 201 bp, Homo sapiens
ctctttcaggaatgccaattctttgtaggtctggtctctacataattctatatttcttggaggtattgtttattttaaaaagaattaaaatttctttctgrtagagttgatttgaagaactggccttaaaatcttattctattttgctcatcttagtctgtcttcctgttaataatttctgattgtattacagaattcttg

SEQ ID NO: 224888 - DNA, 201 bp, Homo sapiens
gtttggggataagaagacattctggcttttagagtttcagagttcttgcactggttgttttgtatgtgtgtgggctgatgttcatttaatctttgaagtcrctcttctttgtatggtgctttttgcttgtattttctttggtgtccttgaaggtttgactggtataagttgggtttagttgatggccttcatttctagatg

SEQ ID NO: 224889 - DNA, 201 bp, Homo sapiens
cctgactgtctatcctttcaggtgtggttcccaacaaaggtcagtttcccttggctgtgggagcccaggagttgtttctgtgcactggtcctatgtgccgytatgctgaagacctggcccccatgttgaaggtcatggcaggacctgggatcaaaaggtatgttcatttatttttatttccttggactcttatcctgacat

SEQ ID NO: 224890 - DNA, 201 bp, Homo sapiens
aaggagtccagtttctgttttctgcatatggctagccagttttcacagcactatttatttaatagggaatcctttccccattgcttgtgtcaggtttgtcraagatcagatggttgtagatgtgtggcgttatttctgagacctctgttctgttccatttatctatatgtctgttttggtaccatgctgttttggttactg

SEQ ID NO: 224891 - DNA, 201 bp, Homo sapiens
gctattcagtaaagcaatatttcatatcctttcttcactgtttatttttgtcaactttgtcaaagttcagttttttataggtatgtggctttatttcttgrttctctatttggttccattctatgtctccatttttttaccattaccatacagtctttgttactatagttttttagtatattttgaagtcagataatgtgg

SEQ ID NO: 224892 - DNA, 201 bp, Homo sapiens
ttgtaatgataggagttatgtttagtctgtagattgctcttggcagtatggtcgttttaactagtgatacttccagtccatgagcataagatctttttctrtttctggcatctatgatttattatatcagtgttttgtatttctccttatagtgatctttaacctccttggttaaacatatttctagtattttatttttgt

SEQ ID NO: 224893 - DNA, 201 bp, Homo sapiens
cttctgtgcaataaaataaattaccaatagaatcaacaaacagtaacagaatgggagaaaatatttgcaaactatacatccaacaaaggcctactatccaraacctacaaaaaacttaacaaatcaacgtgcaaaaaagaaaccacctgaacaaccacatgttgggtactatgtttatgacctggaagataggatcactag

SEQ ID NO: 224894 - DNA, 201 bp, Homo sapiens
gtataaggtgtaaggaagggatccagtttcagctttctccatatggctagccagttttcccagcagcatttattaaatagagaatcctttccccatttctkgtttttctcaggtttgtcaaagatcagatagttgtagatatgtggcattctttctgagggctctgttcttttccattgatatatatctctgttttggtac

SEQ ID NO: 224895 - DNA, 201 bp, Homo sapiens
aagaaaacctaggcaataccattcaggacataggcatgggaaaagacttcatgtctaaaacaccaaaagctatggcaacaaaagccaaaattgacaaatargagctaattaaactaaagagcttctgcacagcaaaagaaactatcatcagagtgaacaggcaacctacagaatgggagaaaatttttgccgtctatccat

SEQ ID NO: 224896 - DNA, 201 bp, Homo sapiens
agtaccatgctgttttggttactgtagccttgtagtgtagtttgaagtcaggtagcatgatgcctccagctttgttcttttggcttaggattgacttggcsatgtgggctcttttttggttccatatgaactttaaagtagtttttttccaattctgtgaagacagtcattggtagcttgatggggatggcatcgaatcta

SEQ ID NO: 224897 - DNA, 201 bp, Homo sapiens
tacacattaagtagaagctatcaaaaaaataaattaagaaaaccatatcatttgtaatggcatcagtaagaataaaatagataggaataaatttaaccaargaggtgaaacattatggcattcaacactttaaatgtgtgaattgtatgatatatgaattgtatctcaataaagctgtttaaataacaatgtactatattc

SEQ ID NO: 224898 - DNA, 201 bp, Homo sapiens
ttgaagtcaggtagcatgatgcctccagctttgttcttttggcttaggattgacttggcgatgtgggctcttttttggttccatatgaactttaaagtagtttttttccaattctgtgaagacagtcattggtagcttgatggggatggcatcgaatctataatttaccttgggcagtatggccattttcatgatattgat

SEQ ID NO: 224899 - DNA, 201 bp, Homo sapiens
ctgtttcagggtccaaatcagtatcataaaaacagggctgggtggggagtccattgtgctcatcgttcctactaaagggtacagaaaaccagccccgatgytggcatggatgttgcgaatgggcagaatgaatcctgtagggacaccttttcgctctgggttgtgagacaaggacaagtgtgttttggccatgcagatggg

SEQ ID NO: 224900 - DNA, 201 bp, Homo sapiens
caatgaaatcaaagagaaagctgaaaagcaatacaaagaaataaaaaatcaattaaggatataagtgagaaatttaccaaaaagatagatattaaaaaacaaaaaaaatctgaaaataaaaaattagaaaggaattacaacatacaattaaaaccttcaacagtagactaggccaggtagaataaagaatctcagaacttg

SEQ ID NO: 224901 - DNA, 201 bp, Homo sapiens
tacccttgcccccttctgccagtgagtgcacttcacggcatcaaaagccctctgttctctggaaaggcagccgatgaggtccagctcagtctctgtatctrtcttgaatgcattcacggccactactactggaattccaaacattctggcattttcagtttgtttcttcaagttactgaagcctttttcaaccagctccag

SEQ ID NO: 224902 - DNA, 201 bp, Homo sapiens
gggcatctctgaaagaaaggcaacagccccagtcagaggcttatagataaaattcccatctccctgggacagaacacctgggggaaggggaggctgtgggygcagcttcagcagacttaaatgttcctgccagacggctctgcagagagcagcgtatcctgacaaggaggattctcccagcacagaacgggagctccacta

SEQ ID NO: 224903 - DNA, 201 bp, Homo sapiens
atgaagcatctataaggagcttaaacaaaactacaagaaaaaaaaacagacctattaaaaagtgggcaaaagacataaacaggcacttttcttcttttctktaaatagctacctttatttgtaaagttcatttttaaaaattttgtatttcaatagttttggcggtacaggtggtttctggttacatgtatgtgttcttta

SEQ ID NO: 224904 - DNA, 201 bp, Homo sapiens
tattttacttcttaataaatttattagaagtgttttacagaaattttcagatcatttatttatttaatgagtcaaacacgcatgaacaggcactcttccarataatccaaataaagtatctagctagatgacatatttactcacatggagctaacattctagagaagaacatatagaataaacaaagattcaatttaataa

SEQ ID NO: 224905 - DNA, 201 bp, Homo sapiens
taaagcaaattgtaatatcatcttgaataatagactgttttatcattatataataacctcctttgtctcttgtgggccttattttttacttcaactatatyttgcctaagtatagccacctctgttactttttgatgctgcaatttgcatggaatatatttttctatctctttattgtattctgcacctctagaatttctt

SEQ ID NO: 224906 - DNA, 201 bp, Homo sapiens
agtataattaaaaaaagaaaataaaatcataccatttgtaatggcaccaataagaataaaatatatagaaacaaatttaaccaaggatgtgaaaaatctgraccccaaaatctataggagagtgattaaggaaactgaaaaaaagaaataattgaaaatatatcttgtggttcatggattagtaaaatcaatattgccaaa

SEQ ID NO: 224907 - DNA, 201 bp, Homo sapiens
atttactcttggagttttttgttccaccagggtgctacacctagaatcgaaagctcccacaacattattatttttaatgaataaattaaattatttttcayctgcaactattcctatgggagtattactcttttaaaattttctttatcttaacagatacatactagttgtacatatttatggggtacatgtaatatttcg

SEQ ID NO: 224908 - DNA, 201 bp, Homo sapiens
tgttatttgcttgtggtaaaaaatttatttttacaaattttaataatagtgactgaaatatcacacttaaaatctaataatatttaccatttggaattacwaatttgtttatattagtatttgcagagtaaacacatgaataatataaatatatgtagtgtaatataacttcaaacaatcattgatatgtttaaggatttt

SEQ ID NO: 224909 - DNA, 201 bp, Homo sapiens
ccacagctgatgttgtactaggttgggtgcatccaaaatcaattgcctctgagagaacagtgcagctccagggtttttccaaggcctgtagtccttgaggyctgatggccactcaaatttacttcaggcctcgggccatgttagtcagctagtggtggagccagccaggactggagttcctcccactggagctgagaattt

SEQ ID NO: 224910 - DNA, 201 bp, Homo sapiens
cactagggatcaaaggatatgtgtgtgtgtgtgtgtatatatatatgaatggtaaataagtgtataaaatatgtttagtatcattagtcatcagaaaagtkcaaattaaaattttaatatgataatatatcacactcacaaggcggctaaaaagtaaaaaatgacaaccacaagtgttggtgagaatgtagtgcaactaga

SEQ ID NO: 224911 - DNA, 201 bp, Homo sapiens
gcggctaaaaagtaaaaaatgacaaccacaagtgttggtgagaatgtagtgcaactagaaatttcatacactgctgttgggaatataaattgctaaaacasttttaaaactattttagtagctatgtacaaaattaaacatacatctaccataaaacccaatcttctagatgtttttctaaaatataataaagcttttgtt

SEQ ID NO: 224912 - DNA, 201 bp, Homo sapiens
taccaaaggtttaaaaaagaaataacaccaaattcaagtctctttcagaaaatggaagagaacactttctaactaattgtatgaaggtagtattactctgwtaacaaatctaaataaagatagtctaatgaggaaatctcagactaatagctctaattaatttggatttaaaacttctaacacaatattagtaaatacaat

SEQ ID NO: 224913 - DNA, 201 bp, Homo sapiens
agtctgtgtcccaaaacctcaaaagtaggaaagctgacaatgcagcctttaatctgtggccaaaggcccaagagcccccggcaaaccacttgtgtgagtcygagcgtccaaaagctgaagaacttggggtccgatgtttgaggacaggaagcatgcagcatggaggaaagatgaatgctggaagacacagcaactctgctc

SEQ ID NO: 224914 - DNA, 201 bp, Homo sapiens
gtcagtcctctgtgggagttgatcaaatggtgcctgggtctgtcagtgtacaccatcccttccattggtatgtaaatcatattctacctagaccagtttgwtgtcctgtaatatttcttaatatctaaatataaattttggactaaaggccccatgcaagtccaaaatccagtggggtactgaaatcttaacgctccaaaa

SEQ ID NO: 224915 - DNA, 201 bp, Homo sapiens
aagaccttaaaaacaaatgcacaataccaaaaatagacaaatgggacttaaactaaagtgcttctttacaacaaaagaaattatcaacaaaataaacagamaacgtgcagaatggaataaactatttacaaacaatacatccaataaaatattaataactaggttccacaaagaactcagacatctcaacaacaacaaata

SEQ ID NO: 224916 - DNA, 201 bp, Homo sapiens
acaaagaactcagacatctcaacaacaacaaataattctgccaaggccaggtgcagtggctcacgcctgtaatcccagcactttgggaggccgaggtgggyggatcacgaggtcaggagatcgagaccaccgtggccaacacggtgaaaccccatctctactaaaaatacaaaaaaaaaattagctgggcgtggtggcggg

SEQ ID NO: 224917 - DNA, 201 bp, Homo sapiens
tgaggcaggagaatggcgtgaacctgggaggtggagcttgcagtgagcccagatgacgccactacactccagcctgggccatagagtgagattccatctcaaaaaaaaaaaaaaaaaattctgctaaaatgtaggcaaatggcataaacagactttttcaaaagaagacatacaaatggccaacaaacacataaaaaactg

SEQ ID NO: 224918 - DNA, 201 bp, Homo sapiens
agcttgtttcaagagttctcacaaaactactttgctctatatattttggggtgttttgttttgtttttgtttttttgtttttttgtttttttgtttttttkttttttttggtgtttccatggggcaatgagggcctggcgctttctgctctgccatcttgctgatgtcactcttcagtagtatctcctcttctcatcatgt

SEQ ID NO: 224919 - DNA, 201 bp, Homo sapiens
gcttgtttcaagagttctcacaaaactactttgctctatatattttggggtgttttgttttgtttttgtttttttgtttttttgtttttttgttttttttttttttttggtgtttccatggggcaatgagggcctggcgctttctgctctgccatcttgctgatgtcactcttcagtagtatctcctcttctcatcatgtt

SEQ ID NO: 224920 - DNA, 201 bp, Homo sapiens
tcttgcagtttcttgtgcatttgcactataacatttatttctttttatactatctcttaaaaaatggttgtagttattatcatagtcatatcttcaagaayaaaattccacattcaatgaaagtaaattcaaaaataagaacaatcccctattcccctggttgctcagaaatcaacgtatagatgcagaaagcctgaaaaa

SEQ ID NO: 224921 - DNA, 201 bp, Homo sapiens
aaagagagattacaacaaaatcagaaatgaaaaaagagagattacaacaaaatcggaaaagcaaaagaagaaattataaatcacatcacagaaatacaaayattcttaaaaattattattaagaactctacttccacaaacaagaaaacctagaggaaataaattaatttctggaaacatgcaacctcccgtttgaatcag

SEQ ID NO: 224922 - DNA, 201 bp, Homo sapiens
tataatagttacaaaaaataaagtagaactccttgttaattaataagatgaaatatatataatgtatatattacatataaatatataacatatttatatattatatattatatatattatttatatttatatttatattgaaatataattatatattatatattaaatatgttataatcagatttatatttttaaattata

SEQ ID NO: 224923 - DNA, 201 bp, Homo sapiens
taattatatgtacttttactgatatatatctgtatacatatatacatacgtatatgtatacacatatatacatacgtacatgtatacacatatatacatasgtacatgtatacacatatatacatacgtatatgtatacacatatgtacatatatacatacgtatatgtatacacatatgtacatatatacatatgtatat

SEQ ID NO: 224924 - DNA, 201 bp, Homo sapiens
taatcctttgggtatatacccagtaatgggatggctgggtcaaatggtatttctagttctagatccctgaggaatcaccacactgacttccacaatggttsaactagtttacggtcccaccaacagtgtaaaagtgttcctatttctccacatcctctccagcacctgttgtttcctgactttttaatgatcgccattcta

SEQ ID NO: 224925 - DNA, 201 bp, Homo sapiens
tgatgttgcaagaaagaaattagaataaaatatggaaattaggaaacatcaatttcattaaatgagtatatgtggatgctgaaagagaagaattaagtatsacatctgtatttattgtttacgtgacttggtgtcatcaactgagtcaaataatataggatatgacattttaacttattggaaatggaatatatatatata

SEQ ID NO: 224926 - DNA, 201 bp, Homo sapiens
tagagtcactcaaaaattaaaatacttagttgtaaatataacaaaacatgcactggacctgtttactgaaaactacacaatgctgatgaaataaatcaagsgttatctaaataaataaagagatatgccacattcacgattggaagattgaacatagtaaagatgttaattcctccaaattaatatacaaatttaacacaa

SEQ ID NO: 224927 - DNA, 201 bp, Homo sapiens
tgcgtaaagagctggtggatatgctaggtgatgatggtgtgttcttatatccctcacatcccacagtggcacctaagcatcatgtccctctaacacggccyttcaactttgcttacacaggtacctaattgtattccttacattctgtaatcttaaagaaatagagatgtatgtttccaaggaaagcataattttcttttg

SEQ ID NO: 224928 - DNA, 201 bp, Homo sapiens
aaaccaaacgggggcagaagagatcccccagcacagcacagctgctttaccaaaacatggccagattgcttctttaattgggtctcaaatcccctttctcmtcacttggggggtaactcccaaccaaggcctgcagccccctctgccagtgttctctggccagtagagattttaaaattccatgggaaagagctcccagag

SEQ ID NO: 224929 - DNA, 201 bp, Homo sapiens
atagtgataatgataccatttattggagacatgtatatgtttatattgatattaatgtaggtaatatcaatatctctgctttacttcgtagtattagttayatgtgttttccttgttttatctattcctagaattgttctgagttttacatgtttcatctcattttatcttacagcagccctataaaaaggagaaattatt

SEQ ID NO: 224930 - DNA, 201 bp, Homo sapiens
aggggcaactgaaagcctctctgccactgcctttgcagtaggcctctccttgttactcttgaactataaaaagagcaaagaccttaagtgcctatccacamctttaacaactggtagttgacccaaggagagtaggcctgtctatccccatgggttccacataccccacattgctcatcactagacagggaatccctggct

SEQ ID NO: 224931 - DNA, 201 bp, Homo sapiens
gatattgtattgcttgctttgttagctgaaacaaactgcttccggctgtctttactaacagacataggaaaaaaaaaacattcttttagtcaatagctctmtaccagataccaggggatgtgttaatttgctctagcagtgaacccacatttggcacaacagctgtttggagttatcatctcatcaagctcacaataatcc

SEQ ID NO: 224932 - DNA, 201 bp, Homo sapiens
agcagttcctcttctttctgaactctgccagtggacacagcctcctgttatccagggaaacagaaaaactgcaggataggtgattccacaacccccaccascactcatagccaggcagctagaacttccagcccagcagtcccacttctgtctgaactctgatggcaggaacagcctctagaatataacccaacagcaggt

SEQ ID NO: 224933 - DNA, 201 bp, Homo sapiens
caaaaagccagtgtttgcccttacctataaacgtacacattagcctcccagaaatggttcttaaccagagtgagctgactgtggacatagaattcagaagytggatgacaaggaagctcagtgagaatgaggagaaagttgaaacataatccaaggaatccaataaaacaattcagtagctgaaagataaaatatccattt

SEQ ID NO: 224934 - DNA, 201 bp, Homo sapiens
actaggctccctggcttcagacccctttccaggagagtgaacagttgtgtctcactcaggttccaggtgtcactggggttccaggtgccactgggatatgrcaaaaatatgcctgcagctatctcagtgtcaaaacagccacccagttttgtgcttgaaactcagggccccggtggtgtaggtacacaagggaatcttctg

SEQ ID NO: 224935 - DNA, 201 bp, Homo sapiens
gatccctgaggaatcaccacactgacttccacaatggttgaactagtttacggtcccaccaacagtgtaaaagtgttcctatttctccacatcctctccarcacctgttgtttcctgactttttaatgatcgccattctaagtggtgtgagatggtatctcattgtggttttgatttgcatttctctgatggccagtgatg

SEQ ID NO: 224936 - DNA, 201 bp, Homo sapiens
gcaaccaccaggatgtcgcctttatttacctcctcatccagattggcagtcttggagtggcaggtggtcactgtggcattgttccacagaagcaagtcacrcatcagggccctgactattttactgcacccaaccaccacagcatgccttctggcaatctgcacccctgtctctttcatgagttccaagcatcctttaggc

SEQ ID NO: 224937 - DNA, 201 bp, Homo sapiens
acacaaaccccctgtagatactacacaagatgacaaaccggaaggtacatagtcatcagattcaccaagatcaactcaaaagaaaaactcttaaaagtagytaaagagaaaaatcaggttacctacaaagtaaaccccaccagactctctgtaagaactctctgtaagaaacctacaagtgagaagagattgggggcctat

SEQ ID NO: 224938 - DNA, 201 bp, Homo sapiens
tctgtaagaaacctacaagtgagaagagattgggggcctattttcaatattgttacagtgaagaattttcaaccaagaatatcatattccatgaaactaarcttcataagcaaacgagaaataaaattcttcccagacaagcaagtactaaaggaatttattattaccagaccacccttacccgagttctttaagagagtg

SEQ ID NO: 224939 - DNA, 201 bp, Homo sapiens
cagaaatagaatagttccttagagactatacagaacacctttgtgaacacaagttagaaaatatagatacaatggataaattcctagaaacacacaacctyccaagatagaatcagggataaaagtgaagacatgaacagataaataacaagttcagaaattgaatcactaataaaaaaacttaccaacaaaaaagagccc

SEQ ID NO: 224940 - DNA, 201 bp, Homo sapiens
ctctgctaagtctcctggaactgataaatgaattcactaaaattttaatatactaaaccaatgtacaaaaatcctaacatttttatacaccaatattgttytaggtgagaatcaaatgaagaacagaattccatttacaatagccacaaaaaaaaaaaaaaggaatacctaggaacccatctaaccaatgaggtaaagatc

SEQ ID NO: 224941 - DNA, 201 bp, Homo sapiens
ggagaatcgcttgaacccaggaggcagaggttgcagtgaatcgagatggcaccactgcactccaacctgggtgacagagcaagactccatccaaaaaaaamcaaaaaaatcctagaagaaaacctaggaagatggatgtcgagatggctgaataggaatagcagcttcagtctgcagttcccagtgagatcaacgcagaag

SEQ ID NO: 224942 - DNA, 201 bp, Homo sapiens
ttacgtgacttggtgtcatcaactgagtcaaataatataggatatgacattttaacttattggaaatggaatatatatatatatacttttctttactcctsctactaaatgcaactaaaaatctcaggcattgtatctaaaacaaacataaaaagactcctaaaggtgaagagaaggtggcagaccagctcggactctcag

SEQ ID NO: 224943 - DNA, 201 bp, Homo sapiens
gactgcaaaccaacaatgaccaaaaaagacaagaagggcattacataatggtaaaatgatcaatgtaaaaagaagagctaactatcctaaacatacatgcrcccaatacaggagcaccagattaataaaaaaaaaaaagttctcagagttctacaaaaagacttagactcccacacaataatagtgggagactttaacacc

SEQ ID NO: 224944 - DNA, 201 bp, Homo sapiens
ttctgaattatgttacgtggtaaaaatataaggtactgaacaatgaatataatatgattccttttgtgtgaagaagggagagagagctgaagagaggggaraagggaataagggagagagggagggaaagagagagagagtgagaagctttcacttttcatttgtacttttctgtagtgaatggattttctaacgatgtac

SEQ ID NO: 224945 - DNA, 201 bp, Homo sapiens
gatatctccaaactcctttccaaagggctgaactaatttacattcttaccaacagtatataagcattctcttttctctgcagcctcatcagtgtcagttayttttggattttttcaatgattgccattctgacttgtgtgagacagtatctcattgtggtctttatatgcatttctctgatgattagtgatgttgatcatt

SEQ ID NO: 224946 - DNA, 201 bp, Homo sapiens
agacaagaagggcattacataatggtaaaatgatcaatgtaaaaagaagagctaactatcctaaacatacatgcacccaatacaggagcaccagattaataaaaaaaaaaaagttctcagagttctacaaaaagacttagactcccacacaataatagtgggagactttaacacccaactgtcaatattagatggatcaat

SEQ ID NO: 224947 - DNA, 201 bp, Homo sapiens
aaataaaaataattttaaaaagaaagaaaacctagtaaatacttttcttgacatgggttttggcaaataatttatggccaagttcctaatagcaattgcaaaaaaaaaaaaaaaaaaaaaattgacaaatgagtcctaattaaagtaaagggcttctgtgcaataaaataaattaccaatagaatcaacaaacagtaacag

SEQ ID NO: 224948 - DNA, 201 bp, Homo sapiens
tctcatgccagttagagtggcgataattaaaaagtcaggaaacaacagatgctggagaggatgtggagaaataggaatgcttttacactgttggttagagwgtaaattagttcaaccattgtgaagacagtgtggtgattgctcaagggtatagaaccagaaataccatttgacccagcaatccttttactgggtatacac

SEQ ID NO: 224949 - DNA, 201 bp, Homo sapiens
tgcctctgggagcccctcccccagggaaatacaaagccactagcagagggaatgctctgccaagggtgggacgtctgtgtagatccaggcttggggccctrcttggtgaagagtgtggggtgggagcctacatggaagagagactgggctcctctctgtatggtggctgcagcgtgctggaggctccagtgtagcaactcg

SEQ ID NO: 224950 - DNA, 201 bp, Homo sapiens
ataggtacgctcttgcttagccatgtggctcgcctgtatttcctcatgattgccatcaaattttctgttactgttctgaaagtgtaggctcctctcccacwgaagtgctgtctgtagacctctgtttggcacttgcgagctgtacagcacaaccttgtggtgagctcatctttattttccttccccacttttgaggcagca

SEQ ID NO: 224951 - DNA, 201 bp, Homo sapiens
acacaagccttctccaggtaatgttaatatgatcagaagggtggttctacttttataattcagagcaattcagaaattttgttctagcaggattatcttgyttatcagggtgattattatatatttctcaatgttcttaaataaaactagctactgtttattgagcaccaactctgggattggtgcacaaaattgtgcaag

SEQ ID NO: 224952 - DNA, 201 bp, Homo sapiens
attgtttggaactttcttatactggtatattcctgacttcttaccttcaaagtagacatcttatacctccttagcttcatattttgcctcatgggggactrcactgtgtaattcactgaaagtgtctcaaaaaatgattaatgtacataggagtctttcaggaaatacttgttgaatgaattgtttagtgaataaatggct

SEQ ID NO: 224953 - DNA, 201 bp, Homo sapiens
ctgtgtaattcactgaaagtgtctcaaaaaatgattaatgtacataggagtctttcaggaaatacttgttgaatgaattgtttagtgaataaatggctgcwgactaaagtattgtattttgcaggtgaaatgtatagatgttgttcaggcttatatcaacagaatcaaggacgtgaacccaatgatcaatggaattgtcaa

SEQ ID NO: 224954 - DNA, 201 bp, Homo sapiens
ctgaagcctttttcaaccagctccaggttctcctctatgtaagccttgggaagaggcattccagcagtgaccatagggccacccctgtgcatctttagagygctgacagtggcaacaagcaccaccacgtgagggtggagaccggaatactgggatttgatgttaagaaacttttctattccaatgtctgctccaaatccc

SEQ ID NO: 224955 - DNA, 201 bp, Homo sapiens
tacatagtaggtgtatatatttatggggtacatgagatattttgatacaggcataaaatgcatagtaatcatatcagggtgaatgggattttcatcacctrtagcatttatcctcttcttgtgttacaaacaatccaattatactctttcggttatgtttaaatgtacaatatattactgttgactgactgtagtcacact

SEQ ID NO: 224956 - DNA, 201 bp, Homo sapiens
aggttaatgcaaaagactctacaaatgtactttcctcttttttcttgtcttctttcatacacacgcacacataaaaacacatacatacattatataaagcraaagctatagcactgtattgttggattatctctctctctctctctctctctctctatatatatatatatatatatatatacccacacacacatagtatac

SEQ ID NO: 224957 - DNA, 201 bp, Homo sapiens
ctttcctcttttttcttgtcttctttcatacacacgcacacataaaaacacatacatacattatataaagcgaaagctatagcactgtattgttggattayctctctctctctctctctctctctctatatatatatatatatatatatatacccacacacacatagtatacataactataataacacagaaaaggattag

SEQ ID NO: 224958 - DNA, 201 bp, Homo sapiens
tcatacacacgcacacataaaaacacatacatacattatataaagcgaaagctatagcactgtattgttggattatctctctctctctctctctctctctmtatatatatatatatatatatatatacccacacacacatagtatacataactataataacacagaaaaggattagagaatgcagctattttgctgcaaac

SEQ ID NO: 224959 - DNA, 201 bp, Homo sapiens
aatataggggagctttctttatttgaaaaatagctctaagaatactacagctcacatcacacataatggtaaaagtgtgagagcttttcccctaaaattargaaacaggcaaaaatttttattctcaccactcttaattacaatgctggaagttccagacaatgcagttagacaagaaaagtaaataaaattctgatcaga

SEQ ID NO: 224960 - DNA, 201 bp, Homo sapiens
agaagtatattttttataaatctggatgttccagtgtctgttgcatatataatttaaataaataaatcttcttttattggagcttttcttaatatataatkaccttatttatattttagtaccattgttgatctaaagtctgttttatctgatatgaaagtggttattcctgcttgcttttgtttttcatttgcatggtgt

SEQ ID NO: 224961 - DNA, 201 bp, Homo sapiens
ggtgagagagggcatccttgtcttctgctgggtttcaaagggaatgcttccagcttttacccattcagtatgatatcggctataagtttgtcataaatagytcttattattttgagatgtgttccatcaatacctagtttattgagagcttttagcatgaaagggtgttgaattttatcaaaggccctttctgcatctatc

SEQ ID NO: 224962 - DNA, 201 bp, Homo sapiens
attgttcaattcccacctatgagtgagaacatgcggtgtttggttttctctttgcaatagtttgctgagaataatggtttccagctttatccatgtccctrcaaaggacatgaactcatcttttttatggctgcatagtattccatggtgtatatgtgccatatgttcttaatccagtctatcaaaaggatctagaactag

SEQ ID NO: 224963 - DNA, 201 bp, Homo sapiens
taactcattttatggggccagcatcatcttgataccaaagccgggcaaagacacaaccaaaaaatagaattttagaccaatatcctcgatgaacattgatrcaaaaatccttaataaaacactggcaaaccgaatccagcagcacgtcgaaaaccttcaggtgctcttttaaggctggtttggtggtgacaaagtttctca

SEQ ID NO: 224964 - DNA, 201 bp, Homo sapiens
ttctcctcctttgttccccttccagttctgctatggaagaagcaacatctaagatgacggaaattatttcagagcccacagttacactggaaaatgaggtaaaaaaaaaatagaattctgctcactaccttacagaaaaacaagccagacaaaagggtggaatggttaagagacagtgttgacaatgagcacttggactat

SEQ ID NO: 224965 - DNA, 201 bp, Homo sapiens
gttactgtgtagtattctgggtagagtccttggctctgctcctatttcctgtgcactgggggcaacttttttttttttttttttttttttttttttttgaracggagtttcgctcttatttcccaggccagaatgcaatggcgcacaataaatctcagctcaccacaagctccacctcccgagttcaagcgattctcctgc

SEQ ID NO: 224966 - DNA, 201 bp, Homo sapiens
gtggggttgctaggtaaatacaaaacatgcatttaaatttgaactttggataatgaataatgtttacttcatgcatatttaaaagatatttgtgaaaaaawttattgttcatctgaagttcaaattcaactgggcatcttttttaagtttttgtattatttatttatttttttaaatgatgtgctaagtttggcaacacac

SEQ ID NO: 224967 - DNA, 201 bp, Homo sapiens
tgtgtagtattctgggtagagtccttggctctgctcctatttcctgtgcactgggggcaacttttttttttttttttttttttttttttttttgagacggrgtttcgctcttatttcccaggccagaatgcaatggcgcacaataaatctcagctcaccacaagctccacctcccgagttcaagcgattctcctgcctcag

SEQ ID NO: 224968 - DNA, 201 bp, Homo sapiens
gctctgttcattgtatcttttcttgtacagaagctttttagttcagtgtaatcccatctgtctatttttgttttattgactgtgcttttcatgtaccaccaaaaaaaattattgatcagactaatgttatgaactgttttccttgtggttttttctgatagttttatagttttgagtattatacttaagtctataatctat

SEQ ID NO: 224969 - DNA, 201 bp, Homo sapiens
agactgttgtcacattggtgcagactctttggaaaacaatttggcattttcttaaaatgttaaatgtaaatttgtcataagactcaactatttcattcatytttatatgtatatatatgctcaagaaatgaaaataaatattcatacaaagacataaacaaatgtgtaattatattgctgatttttgcagcataattagta

SEQ ID NO: 224970 - DNA, 201 bp, Homo sapiens
agaggggaacaacagacagtggaagggaggagggggagaggatcaggaaaaataactaatggacactagacttaacatgtgggtgatggaacaatttgtamaacaaacccccatgacatgagattacctgtataacaaacctgcacaggtacccctgaacgtaaaatgaaagttaaaaaaacttccttttaaaaattttat

SEQ ID NO: 224971 - DNA, 201 bp, Homo sapiens
taaacaaacagcctatggaaaggaaaataaattttgcaatctatgcatctgacaaagtctaatatgaagcatctataaggagcttaaacaaaactacaagaaaaaaaaacagacctattaaaaagtgggcaaaagacataaacaggcacttttcttcttttctttaaatagctacctttatttgtaaagttcatttttaaa

SEQ ID NO: 224972 - DNA, 201 bp, Homo sapiens
caggttggtggggggaggggtgtccactattactaaggcttgagtaggcggttttccaatcacagcataaacaaagctgccaggaagttcaaactgggtgragcccaccacagcttggcaaagccactgtagccagactgcctctagattcctccattctgggcagggcatctttgaaagaaacacagcagccccagtcag

SEQ ID NO: 224973 - DNA, 201 bp, Homo sapiens
cagataaagttcctaaatattattaagtcctaagtagatagtaaattataattatatattttcacctatttattattggtaaaataattgaaaaaatacgktttcaggaacaggtcttgatttctcacttattttgtttgttttcttcaggtgtcttcagtgccctgggtttgcctgtgacccaatgcccactgggactga

SEQ ID NO: 224974 - DNA, 201 bp, Homo sapiens; identical to SEQ ID NO: 42020

SEQ ID NO: 224975 - DNA, 201 bp, Homo sapiens
tctccggacctcgtgatccacccacctcggcctcccaaagtgctggaattacaggtgtgagccactgcgcccggccttaaaagcatttcttaactttttgkgtctctgatgtcctttaagaaaaatggatttgataatagaatctaccttttagagttattgtgatgaattaaatgaattcatatatgtaaaacttataga

SEQ ID NO: 224976 - DNA, 201 bp, Homo sapiens
cacaaaactgggaggctgtttgggcagtcactgtgctagctgcaagagttgttttcttgttgtttcccagtggcgcctggaactccaccaagacagaaccrttcactcccctggaaagagggaaagggggctgaagccagagagccaagtggtctcgctcagtggttcccactcccatggagacaagcaagctaagaacca

SEQ ID NO: 224977 - DNA, 201 bp, Homo sapiens
tcatctcgctgggactggttaggcagtgggtgcagaccatggagggcgagcagaagcagtgttgggcattgccttacccgggaagtgcaaggagtgggggyctccgttccctagccaagggaagccctgagagactgggctatccagcccatttactatgctttccccacaggtttgcaatccaaagaacaggagattccc

SEQ ID NO: 224978 - DNA, 201 bp, Homo sapiens
gtctactaaatgtggtccctgcctgagggagcccatggaccagaacacctaacaaaagaagtgagggcatggaaccagtgatcgaagggggctcctccaargcccaggagccatctaggtgagcgagtcacctctctcccccacaccacagaggactactgtcatcttggccagaacaccgaagagccctgaaagagagta

SEQ ID NO: 224979 - DNA, 201 bp, Homo sapiens
caccatggaatgctatgtagccatgaaaaagaacaagatcatttcctttgcagggacatagatggaactggaggccattatccttagcaaactaacgcagraacagaaaaccaaatgtgacatattttcactcataagtgggagctaaatgttgagaacatgtgagcacatagaggggaacaacaaacactggggaccttt

SEQ ID NO: 224980 - DNA, 201 bp, Homo sapiens
acttaaagaaaggtcttttgaaataattcttttggacaaaaataagagaacaaagaattaaaaaaaaccaaggcctccaagatctttgggacaacataaawcaactgaatatgaaagttattaatattcctaaatgtgaggatagatcaaagcttagaaaatgtaatttaatgaaataacagatgaaaacttcccaagtct

SEQ ID NO: 224981 - DNA, 201 bp, Homo sapiens
ttgatgtacaaattgttcacccaactattgagtatagtacctgatatgcatttttttaatcctcatcctccttccacccctcaccctcacgtaaactatgrtgtctattgtttccttttttgtgtacacgtgtattcaatatttagttcccatttatatgcagtgttaggttttctgtttctgtgttaatttgtttaagat

SEQ ID NO: 224982 - DNA, 201 bp, Homo sapiens
ggaatagtttcagtggcaatggtaccaggtcttctttatattttggtagaattcggatgtgaatccatctgcaggaaagtctggtccagggctctttctgrttggtaggtttttcattattgatttattactgatgttcattattgatcatatttctcatttgtttatgaagattagtttggccggatataaaattcttgg

SEQ ID NO: 224983 - DNA, 201 bp, Homo sapiens
ctgatttctatgtgtcttggaaatggtcatcttgcaggggttctttgtattttctcaatttgaatgtgaacttttctagtatgcttcagaaaattttcatrgacaatatgcttaaatatgttttccaagttgctttttgtctctgtgtctctttcaggaatgccaattctttgtaggtctggtctctacataattctatat

SEQ ID NO: 224984 - DNA, 201 bp, Homo sapiens
taactaggataaccagtttagagaacataaatgacctgatggagctgaaaaacatagcatgagaacttcgtgaagcatacgcaagtatcaatagctgaatyaatcaagcagaagaaaggacatcgaggttgaagatcatcataatgaaataaagcgtgaagacaagattagagaaaaaagaataaaaagaaacgaacaaag

SEQ ID NO: 224985 - DNA, 201 bp, Homo sapiens
atgacctgatggagctgaaaaacatagcatgagaacttcgtgaagcatacgcaagtatcaatagctgaatcaatcaagcagaagaaaggacatcgaggttraagatcatcataatgaaataaagcgtgaagacaagattagagaaaaaagaataaaaagaaacgaacaaagtttccaaagtatatgggaccatgtgaaaag

SEQ ID NO: 224986 - DNA, 201 bp, Homo sapiens
aataaaattctttacagagaaactaatggtgagagattttgtcaccacaaggcctgcctcacaggagctcctgaaggaaatactaaacatggaaaggaaargagcaacccataccagccactgtaaaaacatgccaaattgtaaagaccatcaacactatgaagaaattgcattaattaatggacacaataacgagctaac

SEQ ID NO: 224987 - DNA, 201 bp, Homo sapiens
tttgaaaagttcaacaaaattgatagaccactagcctagcaagactaataaagaagaaaagagggaataatcaaataaatgtaataaaaatgataaagggstatcaccaccgatcccacagaaatacaaactaccataagagaatactataagctcctctaaacaaataaactagagaatctagaagaaatggatcaattt

SEQ ID NO: 224988 - DNA, 201 bp, Homo sapiens
tgaaggcaccacgctacctgacttcaaattgtattacaaggctaaaaatcaactcaagatggaccaaagacttaaacataaaacctaggaccataaaaatyctagaagaaaacctaggcaataccattcaggacataggcatgggaaaagacttcatgtctaaaacaccaaaagctatggcaacaaaagccaaaattgaca

SEQ ID NO: 224989 - DNA, 201 bp, Homo sapiens
tgagatcaacgcagaaggggagtgacttctgcatttgcaattgaggtaacctaatcatctcgctgggactggttaggcagtgggtgcagaccatggagggygagcagaagcagtgttgggcattgccttacccgggaagtgcaaggagtgggggcctccgttccctagccaagggaagccctgagagactgggctatccag

SEQ ID NO: 224990 - DNA, 201 bp, Homo sapiens
atatggaaattaggaaacatcaatttcattaaatgagtatatgtggatgctgaaagagaagaattaagtatgacatctgtatttattgtttacgtgacttkgtgtcatcaactgagtcaaataatataggatatgacattttaacttattggaaatggaatatatatatatatacttttctttactcctgctactaaatgc

SEQ ID NO: 224991 - DNA, 201 bp, Homo sapiens
agaattaagtatgacatctgtatttattgtttacgtgacttggtgtcatcaactgagtcaaataatataggatatgacattttaacttattggaaatggaatatatatatatatacttttctttactcctgctactaaatgcaactaaaaatctcaggcattgtatctaaaacaaacataaaaagactcctaaaggtgaag

SEQ ID NO: 224992 - DNA, 201 bp, Homo sapiens
aacccagaaataaacctgccacctacaaccatctgatcttcaacaaaatgagcaaaagtaagcaatggaggaaaggactctctattcaataaatggtactrtaatagtttgcctgccgtatgcagaagaatgaaactggatctctacctgtcaccatatatgaaaactaagttaaagtagattaaatatttaaatgtaaga

SEQ ID NO: 224993 - DNA, 201 bp, Homo sapiens
gaattaagtatgacatctgtatttattgtttacgtgacttggtgtcatcaactgagtcaaataatataggatatgacattttaacttattggaaatggaatatatatatatatacttttctttactcctgctactaaatgcaactaaaaatctcaggcattgtatctaaaacaaacataaaaagactcctaaaggtgaaga

SEQ ID NO: 224994 - DNA, 201 bp, Homo sapiens
tgagaacccagaaataaacctgccacctacaaccatctgatcttcaacaaaatgagcaaaagtaagcaatggaggaaaggactctctattcaataaatggyactataatagtttgcctgccgtatgcagaagaatgaaactggatctctacctgtcaccatatatgaaaactaagttaaagtagattaaatatttaaatgt

SEQ ID NO: 224995 - DNA, 201 bp, Homo sapiens
attatatacagaaatcttaaaataaacaatcccattaaaaagtgggcaaaagacatgaacagacacttttcaaaagaagacgcatatgcggccaacaagcrtattaaaaaaagctcaatatcattgatcattagagaaatgcaaatcaaaaccacaatgagataccatgttgcatcagtcaaactggctataattataaag

SEQ ID NO: 224996 - DNA, 201 bp, Homo sapiens
tacctaattgtattccttacattctgtaatcttaaagaaatagagatgtatgtttccaaggaaagcataattttcttttgcagttggacaagttttaaacmtgcaggtataaaagtgctgtgtgattgaaaactccagaaaacagttgctaatgtcatatgttgaagatactttgccaatatctggtttctccacaataat

SEQ ID NO: 224997 - DNA, 201 bp, Homo sapiens
accaggaagaagttgactctctgaatagaccaataacaggctctgaaattgtggcaataatcaatagcttaccaaccaaaaagagtcctggaccagatggwttcacagccgaattctaccagaggtacagggaggaactggtaccattccttctgaaactattcctatcaatagaaaaagagagaatccttcctaactcat

SEQ ID NO: 224998 - DNA, 201 bp, Homo sapiens
catggtgataccccgtctcttctaaaaatacgaaaattatccaggtgtggtggtgtgcgcctgtaatcccagctactcagctactcaggtgggtgagaccrgagagttgcttgaacccaagaggtggcggttgcagtgacccataacataataccatagactgggttatttaagcaacagaaatttattttttcatagttt

SEQ ID NO: 224999 - DNA, 201 bp, Homo sapiens
aacagtaacagaatgggagaaaatatttgcaaactatacatccaacaaaggcctactatccagaacctacaaaaaacttaacaaatcaacgtgcaaaaaaraaaccacctgaacaaccacatgttgggtactatgtttatgacctggaagataggatcactagaacctcaagccacagcatcatacaatttactcaagtaa

SEQ ID NO: 225000 - DNA, 201 bp, Homo sapiens
aaaaaaaaaaaaattgacaaatgagtcctaattaaagtaaagggcttctgtgcaataaaataaattaccaatagaatcaacaaacagtaacagaatgggaraaaatatttgcaaactatacatccaacaaaggcctactatccagaacctacaaaaaacttaacaaatcaacgtgcaaaaaagaaaccacctgaacaacca

SEQ ID NO: 225001 - DNA, 201 bp, Homo sapiens
gaggtattgtttattttaaaaagaattaaaatttctttctgatagagttgatttgaagaactggccttaaaatcttattctattttgctcatcttagtctrtcttcctgttaataatttctgattgtattacagaattcttgtagtgagtatttcagctcttatgatcagttttgttctttcttaaaatggctattttgtc

SEQ ID NO: 225002 - DNA, 201 bp, Homo sapiens
tgagtagtggcagtgggttccatgcatgcatgcatgcttgtgtcagcaggatcggtgtgcaagtgtgtatccaagcagtggcatggcattgacatggtcgkgtctgcaagtgcacacagtctccactggcagagtgcagtggggtctgcacatgtgtgcacaccaccagcagcagcatggcagtgttcacatgtgcatgtg

SEQ ID NO: 225003 - DNA, 201 bp, Homo sapiens
ctatggaaaggaaaataaattttgcaatctatgcatctgacaaagtctaatatgaagcatctataaggagcttaaacaaaactacaagaaaaaaaaacagmcctattaaaaagtgggcaaaagacataaacaggcacttttcttcttttctttaaatagctacctttatttgtaaagttcatttttaaaaattttgtattt

SEQ ID NO: 225004 - DNA, 201 bp, Homo sapiens
accaaaaaagaaatttcaggccaatatccctgaggaatatgtgaaaattctcaataaaatactagcaagccaaatccagcagcacatcaaaaagcttatcraccatgatcaattcggcttcatccctgggatgcaaggctggtacaacatacctgaatcaattttaatgcaatccatcacataaactgaatcaatgacaaa

SEQ ID NO: 225005 - DNA, 201 bp, Homo sapiens
aataatactgggtatatatacagcattgcataataaaaatcatgctttgttattattcaataacaaagtaagtcttgtggcactgtgccttaaaagtgtgkcattaaaagtccacttaattcttcctttcttttcttgacatggtgagtatgcagtaaaaataattgtgggttggtgatatatgggacactcaaaacactt

SEQ ID NO: 225006 - DNA, 201 bp, Homo sapiens
tgtcattttacaaaatactatgtgaatttccaaactttggaagtaaaatttgtctagatattgaaatatgagtttggagccaaagaatgttttttaaatargattgttatcatagtgctattgtggcaggccaggtctccattagcaaccagaacagtcagtttccactaaccctttactatagttctgatgaatgtataa

SEQ ID NO: 225007 - DNA, 201 bp, Homo sapiens
atgttttttaaataagattgttatcatagtgctattgtggcaggccaggtctccattagcaaccagaacagtcagtttccactaaccctttactatagttytgatgaatgtataagttaaacattaaagaattggagaaactagtgctttagtacaagggctgggatgtgaaaacaaaaccattaagaccttgcctgggtt

SEQ ID NO: 225008 - DNA, 201 bp, Homo sapiens
aggccccagaccctagttaaagattagattgagtgaaacactcctgtttatagttgcacacgtgcatgcaggcatatagcttgaatgtattaatgtataarcaagtgctgaaaaaaatcttgtaactttgggttggtctggtgaactaccctgaccttctccttatggccagttacagaaataaactctcttctttcccag

SEQ ID NO: 225009 - DNA, 201 bp, Homo sapiens
tcctgtaatcccagctactcaggagtctgaggcaggagaaccacttgaacccaggaggcggaggttgcagtgagcagagactgtgccattgcactctagcmtgggcaacagagcgagactctgtctcaaaaaaaaaaaaaaaaaaaaaaagaaaaaaataagaaaaaatctatatttatacagaattccagaaaatcaaaa

SEQ ID NO: 225010 - DNA, 201 bp, Homo sapiens
ataggacacaaacaaatggaaaaaaaaaatccatgctcatggataggaagaatcattatcgtgaaaatagccatactgcccaaagtaatttatagattcamtgctattcctattaaactaccattgacatttttcagagaattaggaaaaaaaaacctattttaaaattcacgtggagacaaaaaagagcccgagtagcca

SEQ ID NO: 225011 - DNA, 201 bp, Homo sapiens
gggtttgtcataattagctcttattattttgatgtatgctcttttgatgactattcttctaaggtttttatcatgaaggaatgtttgattttattgaagtmtctttctgaatctattgagatgattatatctttttttgttttaaattctgtgtatgtggtaaatcacttttttttatttgcttatgttgaattaacattg

SEQ ID NO: 225012 - DNA, 201 bp, Homo sapiens
ggataaagaaaatgtggaattaggagtggccaagatggccatctagaagttgctaatgtgtgtgcctctcacggagaggaaccaaaggggcaggtaaatayagcaccttcaattaaaatattcaggtactcgcattgggactattcaaacaacttgatccatggagaacagagaaaagcaaggcaggacgatggcccactc

SEQ ID NO: 225013 - DNA, 201 bp, Homo sapiens
gtactcgcattgggactattcaaacaacttgatccatggagaacagagaaaagcaaggcaggacgatggcccactcgggagtgacacagagccaagggaamctctctcacccagggaagtggtgagtgaacatgtgaccacaggaaaccacacttcttctatggagctttgcaaactttgggtcaggtggtccccttgtga

SEQ ID NO: 225014 - DNA, 201 bp, Homo sapiens
gtggagaaaaaaatcttagagcatgaagactggctttctaaaataaggcaggcagacaagaatagataaaaaaagaattaaaaggagtatataaccccccmaaaaaaatgagattatgtaaagagaccaaatctatgactgattggtgtacctgaaagagataaggagaatgggaccaacttggaaaacatatttcaggat

SEQ ID NO: 225015 - DNA, 201 bp, Homo sapiens
gaattctaccaaatgtacaaagaagagctggtaccattcctattgaaattactttaaaaaattgaggagaatggacgcctccttaattcattctatgaggycagcatcatcctgatagcaaaacctggcagcaatgcaacaaaaaaagaaaacttcaggccaatatccttgatgaacactgatgcaaaaatcctcatcaaa

SEQ ID NO: 225016 - DNA, 201 bp, Homo sapiens
agtcaggggcttatagcagacataaaagttcctgcctgatggctctgaagagtacagtggacctcccagcacagtgttcgtgctttgctaagggtcagacrgcctccacaagtgagtccctgacccccgtgtgtactgactaggagacacctccaagtaggggccaacagacatctcttacaggagagctctggctggcat

SEQ ID NO: 225017 - DNA, 201 bp, Homo sapiens
gaatatacaagtatcaatagctgaatagatcaagcagaagaaaggatatcagtgattgaagaccaacttaatgaaataaagagagaagacaagatcagagaaaaaaaaaaagtataaaaagaaagaacaaacactccaagaaatctgggactatgtgaaaagaccaaacctgtgtttgattggtgtatctgaaagtgatgg

SEQ ID NO: 225018 - DNA, 201 bp, Homo sapiens
cgatggcaccttcatttaccgcccgcattcagttgttcctcttgcgggcgctaggctttctcataggcttagtaggccgagcagctttagtcttagggggyccaaagtttgcctcaaagacccctcggccggtgactgaaccattgcttctgctttcggggatgcagctggccaagctgatccgacagagaaaggtgagaa

SEQ ID NO: 225019 - DNA, 201 bp, Homo sapiens
ctattccaatcaatagaaaaagagggcatcctccctcatttcatgaggccagaatcattctgatatcaaaacctggcagagacacaacaaaaagagaaaamttcagaccaatattcctgataaatatcgatgtgacaatgctcaataaaatactagcaaactgaatccagcagcacatcaaaaagattatccactatgatc

SEQ ID NO: 225020 - DNA, 201 bp, Homo sapiens
aggcaaaggttgcaatgagccaagatggtgccactgcactccagtggcgctccagcctgggcgacagaatgagacaccatatcataacaaaacaaaacaacaacaacaacaacaacaacaacaaaacctggaatattactcagcttttaaaaagcaggaaatttaacatctattttaaagataaatcttaatggtcttatg

SEQ ID NO: 225021 - DNA, 201 bp, Homo sapiens
tgagacaccatatcataacaaaacaaaacaacaacaacaacaacaacaacaacaaaacctggaatattactcagcttttaaaaagcaggaaatttaacatytattttaaagataaatcttaatggtcttatgataagtgtaataagtccatcataaaaagtatgaatccacttatacgagttagctaaagtagttgcactt

SEQ ID NO: 225022 - DNA, 201 bp, Homo sapiens
ggcaaaggttgcaatgagccaagatggtgccactgcactccagtggcgctccagcctgggcgacagaatgagacaccatatcataacaaaacaaaacaacaacaacaacaacaacaacaacaaaacctggaatattactcagcttttaaaaagcaggaaatttaacatctattttaaagataaatcttaatggtcttatga

SEQ ID NO: 225023 - DNA, 201 bp, Homo sapiens
ctccagtggcgctccagcctgggcgacagaatgagacaccatatcataacaaaacaaaacaacaacaacaacaacaacaacaacaaaacctggaatattaytcagcttttaaaaagcaggaaatttaacatctattttaaagataaatcttaatggtcttatgataagtgtaataagtccatcataaaaagtatgaatcca

SEQ ID NO: 225024 - DNA, 201 bp, Homo sapiens
ggggaagaaccactgcaatggcagtggcagaggggctgtcagttgcctctgggagcccctcccccagggaaatacaaagccactagcagagggaatgctcwgccaagggtgggacgtctgtgtagatccaggcttggggccctgcttggtgaagagtgtggggtgggagcctacatggaagagagactgggctcctctctg

SEQ ID NO: 225025 - DNA, 201 bp, Homo sapiens
cagggaagtgatgtgggaattctgccagttgctgagtatatctattcaaattatgcactgcagagctgaggaaataatcgcaagatggtttcatggactcwctgtacacgctgtgaaatgaatgtcagctaaacctatgatctgatggtctgacagagattttgtctcttctgcctgtccactgagctcaggttcactcca

SEQ ID NO: 225026 - DNA, 201 bp, Homo sapiens
gcacatcagatggggctagtcccacctgagcactccttggtctgctggcctcctggggccccatcctggccatgcctgcttataagacagtctcaggtgcsctgcgagcccacaccatagcttctgcaccagtggaccatgcctgtcccatggaaagctccagcaaggtggcccctacaggtgtgcaccagcctgcacatt

SEQ ID NO: 225027 - DNA, 201 bp, Homo sapiens
tggcctcctggggccccatcctggccatgcctgcttataagacagtctcaggtgccctgcgagcccacaccatagcttctgcaccagtggaccatgcctgycccatggaaagctccagcaaggtggcccctacaggtgtgcaccagcctgcacattcccttgccatagtgcagcttctcatgagcccatggcaaatcccca

SEQ ID NO: 225028 - DNA, 201 bp, Homo sapiens
agttcttagatcattttaatggattccctggattccttggattgggtttcaactttctcctgaatctcgatgagttttctttccattcagataatgagttycatatctgtcaaaaaggctagtttgtttatttggaggtaaggggatgctaagtttttttttttttttttttttttttttttttttgctgttgttgttgtt

SEQ ID NO: 225029 - DNA, 201 bp, Homo sapiens
aaatgcaagtcaaaaccaatgtgagattatatcttactccagtcagaatgggcattattacaaatacagaaagtaacagatgttggcgaggatttggagamaaggaaatcttacacattgtgccaatataaacaagtgtagtctgtgaaaaacagtatggaggtttttcaaaggggtaataatagaactactatttcatct

SEQ ID NO: 225030 - DNA, 201 bp, Homo sapiens
cactgcaaaaacacgccaaattgtaaagaccatcgatgctaggaagaaactgaatcaattaacagttaaaataaccagctgacatcataacgagaggatcraattcacacataacaatattgaccttaaatgtaaatgggcttaaagccccaattaaaagacaaagactggcaaattggatagagtcgagacctgctagtg

SEQ ID NO: 225031 - DNA, 201 bp, Homo sapiens
gtagtctgtgaaaaacagtatggaggtttttcaaaggggtaataatagaactactatttcatctagcaatctctctactggatagctacccaaagggaaakcaattatattaaaagctacctgcacttgtatgtttatacagcattattcacaatagcagagatatggaatcaacctaagtgttcatcaacatatgattgg

SEQ ID NO: 225032 - DNA, 201 bp, Homo sapiens
atcaagtaggctttaatgctgggatgagagtttggttcaacatatgcaaatcaataaatatgattcatcacataaacagaactaaagacaaaaaacacgtwattatctcaatagatggagaacaggctttcagtacaattaaacattccttcatgttaaaagttctcaacaaacaagattttgaaggaacatacttcaaaa

SEQ ID NO: 225033 - DNA, 201 bp, Homo sapiens
gtgtaaattagttcaaccattgtgaagacagtgtggtgattgctcaagggtatagaaccagaaataccatttgacccagcaatccttttactgggtatacmcccaaaggattataaatcattctactataaagacacatgttcatgtatgtttattgaagcactgttcacaatagcaaagacttggaaccagcccaaatgc

SEQ ID NO: 225034 - DNA, 201 bp, Homo sapiens
aagaaagcctgcaatctgggcatggtggtgggtgcttataataccagctacttggaaggctgaggcaggagaatcacttgaacccgggaggcaaaggttgyaatgagccaagatggtgccactgcactccagtggcgctccagcctgggcgacagaatgagacaccatatcataacaaaacaaaacaacaacaacaacaac

SEQ ID NO: 225035 - DNA, 201 bp, Homo sapiens
acaagatcgtgatatatcaatgtcacttggaacaggtgtcttgaggttaaggttgttatactgaatcatccactttcctggcttaaatttctccaggaaaygcttggcactctctacagtgctctgcatgagcattgcaaccgtcatgagccctaagccaccaggaacgggcctcgtcgtatgccacatcacccacaactt

SEQ ID NO: 225036 - DNA, 201 bp, Homo sapiens
tctcagccctttgaatatatcattccagtcctttctgtactgtaaggtttctgctgggaaatatggtgatagtcttatggaaacttctttctgcacagtgwgtagctattctcctgctacctataagattctctctttatctgtgatttttgactgcttgattataatttgtcttggtatgagtctgcttgggtttatctt

SEQ ID NO: 225037 - DNA, 201 bp, Homo sapiens
gaaagcctgcaatctgggcatggtggtgggtgcttataataccagctacttggaaggctgaggcaggagaatcacttgaacccgggaggcaaaggttgcartgagccaagatggtgccactgcactccagtggcgctccagcctgggcgacagaatgagacaccatatcataacaaaacaaaacaacaacaacaacaacaa

SEQ ID NO: 225038 - DNA, 201 bp, Homo sapiens
cagatgcccagctttaaaatttctttcttttgtactctgttcctttatttctcaaactggctgatgcttagggaaaatagaaaagaacctatgtgactatyggggcaggttccccaataggagggtatgggctagctgggcttgtcttctgtggcaggtctgttccaggactttgcaggtcaggtgctatccacctgacag

SEQ ID NO: 225039 - DNA, 201 bp, Homo sapiens
gcttgtgcttatttggatcttctccttttttttttttttttttgctaatagatcccctagtgttttggtcttgtcaattcttccaatgattcaacttttgrttttgttgatcttttgtatggattttgctatctagattttgctcagctcttaattttagttatttctttttaaatagtaactttagagtctctcttgctt

SEQ ID NO: 225040 - DNA, 201 bp, Homo sapiens
tctgaaaaagattttatttctctttcacttatgaagttagtttggtagaatatgacattcatggttggaatttcttttgtatagggatgctgattataggyctccactctcttctggtttctaagatttctgctgaaagttctgctattagcctgatggggttccatttgtaggtgacatgctccttctctctagctgcca

SEQ ID NO: 225041 - DNA, 201 bp, Homo sapiens
gatgagatgatctagatatagtttatctagatttataaaaatgttctgaaggggagaagtggagtggatacaaagttttatttatcccttagtttctgacwtttttaaacatggaaatattgttactgcaaaacaactaaatttcttaaacacctaccatgtgccacttgataaggcaaacattttacttagatttttgta

SEQ ID NO: 225042 - DNA, 201 bp, Homo sapiens
tgtaatttcagccattacagtctgcttaagaaccattggtgagtttgtttggaggtaagaagacactctaacttctaatgttgccagagttcttgcactatttctttctttctttctttcttttttccatctgtgtgggctgatgttcctttagtttttggagttgctgccttttggatgaggcttttgcttttttctttc

SEQ ID NO: 225043 - DNA, 201 bp, Homo sapiens
agaaacatcagaaaattgtcaagtcacatataaaaggatctccatctgactgacagcagatttatcagctgaaaccttgcaggcctaaggagaatgggatrgtatatcaaagtgctggggaataaattgaggtaaaaatgccatacccaacaaaactattcttccaaaatgaaagagaaataaagtctttacctgacaaac

SEQ ID NO: 225044 - DNA, 201 bp, Homo sapiens
tcagaaaaaaacacagagtcactgctactggggatgttcagccagggggtgaggcaactgtgctgttggcctgaggtggggaccccgcttggggaagagtsggggttcgagggataacagggaggagagagtgggctcttctttgtatggtgactgtgtcttgctagaaatgtgagtaaagccctcaggatcttcatttct

SEQ ID NO: 225045 - DNA, 201 bp, Homo sapiens
cttattaagacacacccacttttgcctactttaagcacaagtttatagttactaagacatacatttgtttttatattagttagtatttgggaatgggtaayaagaaatttgatttacatagttgtatatgtgcatgtgtgcatcctcagatataagttcatgttttcattatgagtatatgtatttttatgtgttttttaa

SEQ ID NO: 225046 - DNA, 201 bp, Homo sapiens
tccagtctacagttcccagcgtaagcgacgcagaagatgggtgatttctgcatttccaacggaggtactgggttcatctcactggggagtgctggacagtkggtgcaggacagtgggtgcagtgcaccgtgcatgagcagcagcagggcgaggcatcacctcacccaggaagtgcaagggatcagggaattccctttccta

SEQ ID NO: 225047 - DNA, 201 bp, Homo sapiens
ccggttcatctcaatgggactggttgcacagtgggtgcagcccacggagggtgagctgaagtcaggtgggttgttgcctcacctgggaagtgcaaggggtyggggaattttctcccctacacaagagaacccatgagggtctaagcctgaggaactccagcacagatactgagcttgtccctcagtcttcacaacctgcaa

SEQ ID NO: 225048 - DNA, 201 bp, Homo sapiens
aaaggcctttgacaaaattcaacaacacttcatgctaaaaactctcaataaattaggtattgatgggatgtatctcaaaataataagagctatctatgacraacccacagccaatatcatactgaatggacaaaaactggaagcattccctttgaaaactggcacaagacagggatgccctctctcaccactcctattcaa

SEQ ID NO: 225049 - DNA, 201 bp, Homo sapiens
cacagccaatatcatactgaatggacaaaaactggaagcattccctttgaaaactggcacaagacagggatgccctctctcaccactcctattcaacataktgttggaagttctgtccagggacatcagacaagagaaggaaataaaggacattcaattaggaaaagaggaagtcaaattgtccctgtttgcagatgacat

SEQ ID NO: 225050 - DNA, 201 bp, Homo sapiens
ttcttttacaacctgggcaatcacgcatgcttgtggggcacagaataagcacccaggcctgcactggccagcattccaccacaaaccaggaccatctccastgcaacagtgcacacagtctctagcagggtactaccataaccccaacccttggctgccttgcctccaccactatggtgaatgcccacagggaggcaggta

SEQ ID NO: 225051 - DNA, 201 bp, Homo sapiens
ttcaatgccatccccattaagctacaaatgactttcttcacagaattggaaaaaactactttaaagttcatatagaaccaaaaaagagcccgcattgccawgtcaatcctaagccaaaagaacaaagctggaggcatcacgctacctgacttcaaactatactacaaggctacagtaatcaaaacagtatggtactggtac

SEQ ID NO: 225052 - DNA, 201 bp, Homo sapiens
gccactgaggccacatgtaagggtatccaatttcctttatgcctttatcaaccttcccttggaagttctctgcttgtgctgattgtatgtggctgaagttkgggcaatgctaatgaaggggatttcaagaccttaggaaagtgtacatacttaaggcactaccttttctccatccttggaaagaacaggactgggaagcct

SEQ ID NO: 225053 - DNA, 201 bp, Homo sapiens
tagatcttctcattgtcataagatggctgctatgccttatgtctcaagagacaaaattgtgaccagataccactggtaaaccaatttttggcaaggtgaawaacattactgtgattgcactaaacaaataagaaatcacacacttaaggttagagattgggcctattccctgtaaggcatatggcagtacaataaagagag

SEQ ID NO: 225054 - DNA, 201 bp, Homo sapiens
ttactccttggtctgtgagtctctgagggagctatattgtttactactgtacttatacatctggtcaacttctctttgtatttgtagtatatgcttcatgyatttgccagctttattaaaacagaaaagtatatgactgttacagcatcctcatgtatcataccattttaggtttcagttttaaaatttgctttctctaat

SEQ ID NO: 225055 - DNA, 201 bp, Homo sapiens
tcataaagatcctcacaatttgacaaattatgagacatttgaacaactagaccctgggaagttcagggactgatgtagctctggactctcaaacgtaggasatttgtgggccttcatttaagagccctgccattaatgtgttctaaccaaccccagtccttctttcttttagttgaacctctagggaaagagataatttta

SEQ ID NO: 225056 - DNA, 201 bp, Homo sapiens
agtaaatacttttcttgacatgggttttggcaaataatttatggccaagttcctaatagcaattgcaaaaaaaaaaaaaaaaaaaaaattgacaaatgagwcctaattaaagtaaagggcttctgtgcaataaaataaattaccaatagaatcaacaaacagtaacagaatgggagaaaatatttgcaaactatacatcca

SEQ ID NO: 225057 - DNA, 201 bp, Homo sapiens
cttgaggtgaaaagttaggtagttagtttgagatcttttttttttttaaattttatttaaaaaattgtattgtattttggtaagaacatttaacatgacayctaccctcttaactgatttttaagtttccaaacagtagtcttcatttgggcacaatactttacagcagatctctagtatttattcatcttgcataaccaa

SEQ ID NO: 225058 - DNA, 201 bp, Homo sapiens
cctcatgcaattattgggacatacttatattaaaaattactctctattcatttgaaattcaaatttaacttgatttcctgtattttatctggaaaccctamctttatgcccttttatgtctccactctccaactcttggttttgcagagttgatgtatactgttaagtttcagtgtattactgaaacaatatctatttttt

SEQ ID NO: 225059 - DNA, 201 bp, Homo sapiens
ttagttttattgtgataaaatatactcgccataaaacttactgtgttagccacttttaatttttttaattattttttattacaataggtttttggggaacmggtggtgtttggttacataaataagttttttagtggtgatttctgagattttggtgcacccatcacccgagcagtatacactgtacccagtatatagatt

SEQ ID NO: 225060 - DNA, 201 bp, Homo sapiens
gtggtgatttctgagattttggtgcacccatcacccgagcagtatacactgtacccagtatatagatttttatccctcaccctcctctcaccctttccctygagtcccgagagtccattatatcattcttatgcctttacatcctcatagcttagcttccacgtatgagtgaaaacctacaatgtttggtttttcattcct

SEQ ID NO: 225061 - DNA, 201 bp, Homo sapiens
ttctgagattttggtgcacccatcacccgagcagtatacactgtacccagtatatagatttttatccctcaccctcctctcaccctttccctcgagtcccragagtccattatatcattcttatgcctttacatcctcatagcttagcttccacgtatgagtgaaaacctacaatgtttggtttttcattcctgagttact

SEQ ID NO: 225062 - DNA, 201 bp, Homo sapiens
gtacccagtatatagatttttatccctcaccctcctctcaccctttccctcgagtcccgagagtccattatatcattcttatgcctttacatcctcatagyttagcttccacgtatgagtgaaaacctacaatgtttggtttttcattcctgagttacttcacttagaataatggtctctaattccatccaggttgctgca

SEQ ID NO: 225063 - DNA, 201 bp, Homo sapiens
caattcacacaataagaacaaaagctgaacaaactaaaagttaatgacaattcttaaatttatcaatatgctgaggtaacgggaaaaccactcttcccaaractgaatgaaaagacaggcagatacaaagaagtgaaacttgctagaacaaaagcctaggagcagaaaatttcaggggaaccagcacagctttagagaaac

SEQ ID NO: 225064 - DNA, 201 bp, Homo sapiens
gagacacaaccaagaaagagaattttaggccaataaccctgatgaacatcgatgcaaaaatcctaaataaaatactgccaaaccgaatcaagcaacacatmaaaaagcttatccaccatgatcaagtgggcttcatccctgggatgcaaggctggtttaacatacgcaaatcaataaacgtaatccagcatataaacagaa

SEQ ID NO: 225065 - DNA, 201 bp, Homo sapiens
accataaaaaccctagaagaaaacctaggcaataccattcaggacataggcatgggcaagaacttcatgtctaaaacaccaaaagcaatggcaacaaaagycaaaattgacaaatgggatctaattaaactcaagagcttctgcacagcaaaagaaactaccatcagagtgaacaggcaacctacagaatgggagaaaatt

SEQ ID NO: 225066 - DNA, 201 bp, Homo sapiens
ataccattcaggacataggcatgggcaagaacttcatgtctaaaacaccaaaagcaatggcaacaaaagccaaaattgacaaatgggatctaattaaactmaagagcttctgcacagcaaaagaaactaccatcagagtgaacaggcaacctacagaatgggagaaaatttttgcaatctactcatctgacaaagagctaa

SEQ ID NO: 225067 - DNA, 201 bp, Homo sapiens
aaattatcagactgagaattgaaaccatttgtgattaatatagtaagggctataatggaaaaactggtcaacatgcaagtacagatctgtaatgtaagaaracagatgggaacttcaagaatcaaaagcaaatgctagaaataaaaaaaaaaaatataacagaaatgaagaacatctttgatgggctcatcaatatattgt

SEQ ID NO: 225068 - DNA, 201 bp, Homo sapiens
tctctaaatagaacaataatgagttctaaaattgaggcagtaataaatagcctaccaatcgaaaaaaaaaaaaaaaagcccaggaccagatggatttacakctgaattctaccacaggtacaaagaggagctgataccatttctactgaaattattccaaaaaattgaaaaagagggatttttttctaactcattttatga

SEQ ID NO: 225069 - DNA, 201 bp, Homo sapiens
gggccttcagagggcttggagcctggaagcttttggtgctctgggcagctccagctgagagtagccataggcaccaatccccaagtcttcccattcctccraggaggtgcaggccgggatgacctctgacccaggagagagcagagccagcttcttcatgggactgaggtgcatctgctctgcaagctttcctgcctttca

SEQ ID NO: 225070 - DNA, 201 bp, Homo sapiens
tgcctttcagctactcccagcatccatgcctagctactctgcaggagcaggtgcacataacagcccctgcagcccaacctcagtgtattgatgcacgtgagtactttcctagctagcctggagcatattggatcccctagcacaggcagaactgagtcccagctaagagacagtcaggtgcacccagggctacagcgtgct

SEQ ID NO: 225071 - DNA, 201 bp, Homo sapiens
ctacttgagagtaaggagcagagatctgtggacagtaatgaagctggggaggagctcccaaccccagaacactgagaagggagagatgcatgggtttctgrgcaaggtgagatggggcatgcctccctccacagggtgggtccatagagtgtggcatatctctgctgcagcccctgcccaagagggctggtggtacagaat

SEQ ID NO: 225072 - DNA, 201 bp, Homo sapiens
gggaggctgaggtaggagaatcgcttgaacctaggaggtggaagttgcagtaatccgtgccattgcactccagcctgggcaacaagcacaaaactccatcaaaaaaaaaaaaatcctatacagaacactagccttctgaaaggatccacaaatatagccaactaactatactgaacttacaccacagttacagaaatacca

SEQ ID NO: 225073 - DNA, 201 bp, Homo sapiens
aacgctattcctaccaaactaccaaagacatttttcaaagaattggaaaaaacctattttaaaattcatatggaatctaaaaagagcctgaatagccaaarcaatcctaagcaaatagaagcagagatatcacactaccccacttaaaactatattataaagctacagtcaccaaaacagcatggtgctggtacataaaca

SEQ ID NO: 225074 - DNA, 201 bp, Homo sapiens
aagccaacattgacaaatgggatctaattaaactaaagagcttctgaacagcaaaagaaactatcatcatagtgaacaggcaacctatagaatgggagaayatttttgtgatctatccatctgacaaagggtaatatccagaatctacaagaaacttaaacaaatttacaagaaaaagacaaacatccccatcaaaaagtg

SEQ ID NO: 225075 - DNA, 201 bp, Homo sapiens
tgaggcaggagaatggcgtgaatctaggaggcggagtttgcagtgagcccagatggtgccactgcactccagcctgggtgacagagcgagactccatctcaaaaaaaaaaaagaaaaccggatgaatgcatgtcctttgcagggacatggatgaagctggaaaccatcgttcttagcaaactaacacaaatcggaaaacac

SEQ ID NO: 225076 - DNA, 201 bp, Homo sapiens
ttctttctcttgcccgattgccctggccagaaattctgatactattttacacaggagtggtgagagagggcatctttgtcttgtgccagttttcaaataartgcttccagcttttgcttttgcctcgtcagtatgatattggctgtgggtttgtcataaatagctcttattattttgagatatgtttaatcaatatatagt

SEQ ID NO: 225077 - DNA, 201 bp, Homo sapiens
ttggtctttgatgctggtgacctttggatggggtttctgtgtggatgttctttttgttgatgttgatgctatcccttttggtttgttagtctattttctarcagtcaggcccctctgctgcaggtctgctggcatttgctggaagtccactccagaccctgtttgcctggttattgccagtggaggctgcagaatagcaaa

SEQ ID NO: 225078 - DNA, 201 bp, Homo sapiens
aaataaacttcagaaactttaaaaattttagccagcagcagcccatgctatgggtgggtccaatggaaatttgtgagtgagtcaccagtgtgtaagagggrgagagaatttctctctgatacatattttcattggggaactgggaaatccaggccacgagggagctccttgatcctaccaagcacaggatctgacttggtg

SEQ ID NO: 225079 - DNA, 201 bp, Homo sapiens
aactatgctatcattccagttagtattccaagtcagaaaagacacaacagtccctcagactgtccccagagaagctagaactttacaagcaagttccattyatattctttcattccaatggaggaaccaataatttgatggattctttcagacactcagtgctgtgttagagagggagtgggacaagggcaagcagaaatg

SEQ ID NO: 225080 - DNA, 201 bp, Homo sapiens
gtctgctccaaatcccgcctccgtcactacaaacccttctgggccaacaagctagagtgtgatccggtctgcaatgatagaggaattgccgtgtgcgatgwtggcaaatgggcctgcatggacaaacactggagtgccctccaatctctgcatgagattgggcttgattgtgtccttcataagcactatcaatgcaccact

SEQ ID NO: 225081 - DNA, 201 bp, Homo sapiens
agatattcatggatcagcacttgccttctggcctgaggaagccttaaagagaatattaagtgttagtgggattgtcatacagtcagtggggttgggtgggrccagatgctctacagttgcctcccagcctggaaaaggctcaaggagagaaatgacattacataaggaagctggctagggacttcagctaagcaaactcat

SEQ ID NO: 225082 - DNA, 201 bp, Homo sapiens
ctcaccagtctccaggcccctagatggccaattggatgacatttacgagtcctgaaggggctggacctgggttgagccagcccagagttcagtgctgtctrtgtaatggggagagttgggttggtccctgggtcactggctgaactctcaggcaggtcaggcagaccagtcaggtggtgggaacctgagggtggataactg

SEQ ID NO: 225083 - DNA, 201 bp, Homo sapiens
tgtgaattatttatactcattaactctaaattctcacattgccatctcataaatgaattcactacaaagtggtttttaccaccaaaattattcttgccaargtccctgaatttttttttttttttgcatttttgctaaaaataatgactgcttctcaatacttaccattcattacctcattataactggtggcaatattga

SEQ ID NO: 225084 - DNA, 201 bp, Homo sapiens
ttgctgcctgatccttcctctggaagcttcatctcaggggcatccagctctgtaagatgtcagtcagcccctactgggagctgtctcccagttaggctacytgggggtcagggacccacttgaggaggcagtctgtccgttctcagatctcaaactgcatgctgggagaaccagtactctcttcaaagctgtcagacagga

SEQ ID NO: 225085 - DNA, 201 bp, Homo sapiens
atgtcagtcagcccctactgggagctgtctcccagttaggctacctgggggtcagggacccacttgaggaggcagtctgtccgttctcagatctcaaactscatgctgggagaaccagtactctcttcaaagctgtcagacaggacgtttaattctgcagaaatttctgctgccttttgttcagctctgccctgccccaga

SEQ ID NO: 225086 - DNA, 201 bp, Homo sapiens
tatttccccttcccagtactcttcccagcctctggtaatcaacattctattcattaccttcataagattaacattttagctccaacacatgagtgaaaacyattatcaagaagccacaaaggtgtttttggccgggtgaagtggcccacacctttaatcccagcactttgggaggccaaggcaggcggatcacaagatcag

SEQ ID NO: 225087 - DNA, 201 bp, Homo sapiens
ttgcccccgttcttatttgacctaagctgctgctgcacagtgctatcttataactggagccactgctatattgtgtcttgctcatgagggcaataaccacktcatgcctccatccctgaggttttgccatcattacaccatgctcatacctagtagtacaccattactcagccaaactattatgggtcactcccctttgga

SEQ ID NO: 225088 - DNA, 201 bp, Homo sapiens
gtactacctgttagtgatcttataaggattaaataatatgcatatggaaaatatatatatacttgccatttagttgtttgttgagcatactgaatatttgyatacaaaggtatacttacaacacttttttcacaagcacagctgaaataaactataacaactaccacttatactatttaccataaattgtgctaaatgttt

SEQ ID NO: 225089 - DNA, 201 bp, Homo sapiens
gtgtttttgaagcagaatatatttactcactcaacccaaatacagacagctttatggctcacatcttctttgacatattagtgttgctgcttcgtggaagkgagaggtctgcctttcagcccatgtggtgagtgtcatttgtggtggtgtaagctagttaggttagtctgacctcaggtgccaggaggactggataggtac

SEQ ID NO: 225090 - DNA, 201 bp, Homo sapiens
ccttgttgtagggctcatcatgtacacttcagatgcacgttgttgtctctccaggccacagtgtgtctgagagccagggagaatgcctctcttgcaactcyccatggaggtgtttttgaagcagaatatatttactcactcaacccaaatacagacagctttatggctcacatcttctttgacatattagtgttgctgctt

SEQ ID NO: 225091 - DNA, 201 bp, Homo sapiens
cagcaaatattgctgcctgctccttcctctggaagctttgtcccagaggggcaccaacctgatgccagctggagctgtcttgtatgaagtgtccttcgacycctgttgggaggtctctcccagtcggatgcacaaggtcagggacccagctgaggtggcattcggtcccttggcagagctggtgcactgtgctgggagaat

SEQ ID NO: 225092 - DNA, 201 bp, Homo sapiens
gcaaaggacatgatctcattcctttttatggttgcatagtattccatggtgtatatgtaccacattttctttatccagtctctccctcccttctccataawtttttggataatttgagtagaattataattagttctttcttaaatatttgatagaattcagcagtgaaaccatcaggttactgcttctatctcattactc

SEQ ID NO: 225093 - DNA, 201 bp, Homo sapiens
ttttctcccatttgttttttttatcatctgggacataattgattccacagttgatgactattgctaggtttgatccattcccctttaaccatttcaggccraccagttgcaaccaccaggatgtcgcctttatttacctcctcatccagattggcagtcttggagtggcaggtggtcactgtggcattgttccacagaagc

SEQ ID NO: 225094 - DNA, 201 bp, Homo sapiens
ggagctttctttatttgaaaaatagctctaagaatactacagctcacatcacacataatggtaaaagtgtgagagcttttcccctaaaattaggaaacagrcaaaaatttttattctcaccactcttaattacaatgctggaagttccagacaatgcagttagacaagaaaagtaaataaaattctgatcagaaaggaaga

SEQ ID NO: 225095 - DNA, 201 bp, Homo sapiens
gaaaaatgttaagggcagccagagaaaaaagtcaggttacccacaaagggaagccaatcagactaacagcagatgtctctgcagaaaccctacaagtcagragagagtgggtgccaatatttggtgttctcaaagaaaagaattttcaaaccagaatttcatatctagccaaactaagcttcataagtgaagaagaaataa

SEQ ID NO: 225096 - DNA, 201 bp, Homo sapiens
ctgacaaagggctaatatgcagaatctacaaagagctcaaacaaatttacaagaaagaaacaactccatcaacaagtgtcctgtagtttttttgttgttcktgtgttctttcatgtttttaatatcgtggagatactggatttgtacaatgatttagagaggtattcctccactttgattttttggaatagcctcagtagg

SEQ ID NO: 225097 - DNA, 201 bp, Homo sapiens
gtgccagtatttctgagggtgtgtgatgagactagttctagagtgtgggaagaaataggaaactggaatcaactactgttgcctggatgaaaggctattgytgaaacaatggtgtcaggaacagcaggcaaactggaagaaacaaaccccttcacctcttttctttcctcctagtctttctctggcacccatatttgaagg

SEQ ID NO: 225098 - DNA, 201 bp, Homo sapiens
atgtaagggtatccaatttcctttatgcctttatcaaccttcccttggaagttctctgcttgtgctgattgtatgtggctgaagtttgggcaatgctaatsaaggggatttcaagaccttaggaaagtgtacatacttaaggcactaccttttctccatccttggaaagaacaggactgggaagcctgattgccctgcccc

SEQ ID NO: 225099 - DNA, 201 bp, Homo sapiens
atgctcacaaaggcattgctggtgttgactacagctgaaggaactgcatagagactatgctattgcactcactggaatcaaagccagcatgctctacccartcaagccctaggaaacatcagcaggtaaaagtatctccacatgaaagacacttgataatattggaaaagataaccattccaccttatgcatgggtattaa

SEQ ID NO: 225100 - DNA, 201 bp, Homo sapiens
  misc_feature (1)...(201): n = A,T,C or G
tctgtgtagagagaggaagatgaaccccagtcattgtttgagcccaggtggtgggcacacattcagtgtggatggagccactattaaaagtgctagacgancaaccacaaagtgcacttgcaccagcccccagtgggaaaagccttggctgcatctgtggcaatagatggggtggcaggaggtgatctctctacatttgtt

SEQ ID NO: 225101 - DNA, 201 bp, Homo sapiens
aatgcacattcactaaaatagttataaaccaaaaggataagggttaatgagcatgtggagtaactgggaccctcatacatttctggtaagactgttgtcamattggtgcagactctttggaaaacaatttggcattttcttaaaatgttaaatgtaaatttgtcataagactcaactatttcattcatctttatatgtata

SEQ ID NO: 225102 - DNA, 201 bp, Homo sapiens
tcctcaagatgcatttatagtgctgcattttgcaaggtttccttgtttatgaaggctcaacaatttccattatatatgtatgtgtgtgtgtgtatatatakagagagagagtttctcaacctgttcatctgttgatggacatttaggttattcccacctcttggttattgtaagtagtgctgcattgatattcagaatgct

SEQ ID NO: 225103 - DNA, 201 bp, Homo sapiens
ccaaacagtagtcttcatttgggcacaatactttacagcagatctctagtatttattcatcttgcataaccaaaactttatatcacatgaatagcaattcyccatttctccctttctccatctcctgacaatcatcatttcactctctgcctctatgagtttgacaaatttagataactcatataagtggaatcacacagt

SEQ ID NO: 225104 - DNA, 201 bp, Homo sapiens
acgcaagttagcaaatgtctgtggcaccaatctccatgttctgattctgcatccctctgagggtctacactgggaactgcctggtggcagaattgttctgwggggaactattctctttcctctgttgtcatcctatcattgacctgactgagataccagagattgacaaactctcgggctgcagttatggtggcacttctc

SEQ ID NO: 225105 - DNA, 201 bp, Homo sapiens
gatggagctggaagccattattctcagtaaacgaatgcagggatagaaaagcaaacacagcatgttctcacttataagtgggatgggagctgaatgattakaacacatagacacatggtggggaacaacacacacttgggcctgttgggggatgttgggagaaaggagagcatcaagaagaatagctaatggctgctgggc

SEQ ID NO: 225106 - DNA, 201 bp, Homo sapiens
ctaacggtcaggaccttcagctgcaggtctgttggagtttgctggaggtcccctgcagaccctgtttgcctgggtatcagcagcagaggctgcaaaacagsgaatattggtgaacagcaaatgttgctgcctgatcgttcctccggaagttttgtctcagaggagtacctggccgtgtgaggtgtcagtctgcccctactt

SEQ ID NO: 225107 - DNA, 201 bp, Homo sapiens
ctcacagtcccctgatccagaccctcccttgctgttttccagactccgactctgtctctcccttccagaaggaagcctggtgatgagcacacactggaacwtggtgctcaagctccaaactgcagccactcactcactaacatccacatgttacttaaattctctgtgcctcagtttcctcataatacctcccacactgta

SEQ ID NO: 225108 - DNA, 201 bp, Homo sapiens
ccttcacattcactccacatcttgtcttccatcagcttcctgggatcttcctaaagttcaaggctgatcatgcctgcctcttgtctttcaatgtgcccacrtcatggcattcccagctttctaggccctggattttcactgcctcaccagcttcatttcttggtgaactgatgctactatctggtagttcccaggaatctc

SEQ ID NO: 225109 - DNA, 201 bp, Homo sapiens
aacactttggtgctgtggtcaggttaatattaggttggtgcaaaagtaaccgtggttttgctattgaaagtaattaatgcaaacttgggtcattgcaaackgaagccaaaccagtcatagatggctaagtcaaactaaagacagtttgcgtatttctgcagccaccaagccccttataggctgtgaacctctttgtaatgg

SEQ ID NO: 225110 - DNA, 201 bp, Homo sapiens
ggcagagagtaatcgtccacccttccattctcccattcccattcccattcccaaatcctgattatttggccttctgagtatttcttatatcttctcctccrctgtacacacaccaccttagacctagttgaggccccaccacttcttaaaagcttattacaaaaaattcttatttttgtatcttgccttcacattcactcc

SEQ ID NO: 225111 - DNA, 201 bp, Homo sapiens
ttgccatttaattgtaggattttaatggggaaggtcccctttgtagtcacctagttcagagattacaaacaaatgtgctatagcatcctggtgctccacamatgagctctatgtgtgcagagatattgattcctcagtttcaaggcagtaaggtagaacctggcctgtctagactgtctggccagtcactttggtcatgaa

SEQ ID NO: 225112 - DNA, 201 bp, Homo sapiens
agaagaccacaccttttaaatgctgcaatgttgtcatcccgcgtgatgctgtcatctgctccaccttcaataaaatcccgagttgacttagacagctgctytcgcgcatgggcctgaaagtctgtcaaacacaccaaggacatttctggaccttccaaggagaaaacaaaaccaaaccaaacccagtgagaacacttcaga

SEQ ID NO: 225113 - DNA, 201 bp, Homo sapiens
ggttttcttgtattcccactttattttgtcttcttgtattcccattttattttgtctccatttcaatgttttttcttttttccttttttattcctactgcycaagaagaagagacagaggagaaaagaataaaatagcaaattgaccaattgccagctattgttctagaaattttagctcattttagctccttgaacctct

SEQ ID NO: 225114 - DNA, 201 bp, Homo sapiens
aagagggccctagccttggggctgcgttaagcatccctttccctacagatggtgtgagccagaagggccagcacccctgttctgagggatgacttggttarattttagcaccttcttattcatctgtaaacccccttgcactctaactattctttattatggaaaatgaatgttttctcaatcttaggttacacaaacgta

SEQ ID NO: 225115 - DNA, 201 bp, Homo sapiens
tgttggttgtgttatagccttcagacaggcaactgggcctcttatgaactccttaatgaagcagaagagaattagagagggcagaggatgagggaatgtarttccagtggagaatcctgaacttcatggtggaaaaagcatagcatatgaaattagaagaatgctagttctaccccttctttgctgtgtggcattgagtct

SEQ ID NO: 225116 - DNA, 201 bp, Homo sapiens
atgttgtcatcccgcgtgatgctgtcatctgctccaccttcaataaaatcccgagttgacttagacagctgctctcgcgcatgggcctgaaagtctgtcaracacaccaaggacatttctggaccttccaaggagaaaacaaaaccaaaccaaacccagtgagaacacttcagatgcagaaaaggaaatgaaggggaagct

SEQ ID NO: 225117 - DNA, 201 bp, Homo sapiens
ctcaggtaccgcggacggaggcgaattctgtgccggacaacaaagagatcttctgttggtgagatgattctgcagcagggaggcgttgtctggggtggacycccctgattcctgatacaagtctaaaccagacagggtcctgtggaaccttggtgggttcagttggctgagagctgagtaacctatgttgatccaggagga

SEQ ID NO: 225118 - DNA, 201 bp, Homo sapiens
tatgtaacgaggagccaaatgttaattgccaagacaatggggaaaatgattccagggcatatcagacatcttctctgcagaccctcccatcataggactgkaggcctaagatgcagggcaccagggccttgctgctttgtgcagtctcaggactggttgccctgtgttccagccatggctaaaaggggccaaagtacagct

SEQ ID NO: 225119 - DNA, 201 bp, Homo sapiens
cagattgtagcttcagagggtgcaagcctcaaagcttggcagcttccacatggtgttgggcatgtggatgtgcagaagataagaactgagatttgggaagytctgcctagatttcagaggatgtatagaaacacttggatgtccaggcagaaatctgcttaaaggggcagagccctaatggagaacctctgctaggacagt

SEQ ID NO: 225120 - DNA, 201 bp, Homo sapiens
ccatttttcaagtactccatgatgtaccatgcactgtgtaaattgctttacatgcatgactgttttaatccttgtggaaatgttcaacacaaatattatcmtccccatttcacgggtgagaaacctgaagttcaagaggttaaaatactttgttcaatattacatatctagtaatgtgtcacgattccagtggcctggctc

SEQ ID NO: 225121 - DNA, 201 bp, Homo sapiens
cattcactccacatcttgtcttccatcagcttcctgggatcttcctaaagttcaaggctgatcatgcctgcctcttgtctttcaatgtgcccacgtcatgrcattcccagctttctaggccctggattttcactgcctcaccagcttcatttcttggtgaactgatgctactatctggtagttcccaggaatctcaatgtt

SEQ ID NO: 225122 - DNA, 201 bp, Homo sapiens
acagattgttagaggtagggagtggatgatttcaggtaggaaattacaaaagtccccgggttggaggaggggctttttgtggtgatggggttggggtgggrgaagagcaagcacagcctgggagcccatgggcaggacagcagtggggacccaggccaggacggtccgagctttggggattttggagggtgcatagtgtag

SEQ ID NO: 225123 - DNA, 201 bp, Homo sapiens
taattaatactgcaaagagttgccaataggagaccagaggagggcaagatggcttctggctagggtgaccagggaacactgccagaatgacagatatttcwgctggccctttcacataaattgaactatattttcttctactagccctagtccttgggtctgaaactgagcccacaggtcctgctgttacatgaactgggg

SEQ ID NO: 225124 - DNA, 201 bp, Homo sapiens
ttatttttgtatcttgccttcacattcactccacatcttgtcttccatcagcttcctgggatcttcctaaagttcaaggctgatcatgcctgcctcttgtytttcaatgtgcccacgtcatggcattcccagctttctaggccctggattttcactgcctcaccagcttcatttcttggtgaactgatgctactatctggt

SEQ ID NO: 225125 - DNA, 201 bp, Homo sapiens
atagcaattttcacaatctccataatcagcctctaggccatgtcctcggtcagctctcacaacacctggcctgctcacagtcccctgatccagaccctccsttgctgttttccagactccgactctgtctctcccttccagaaggaagcctggtgatgagcacacactggaacatggtgctcaagctccaaactgcagcca

SEQ ID NO: 225126 - DNA, 201 bp, Homo sapiens
ggtagctagagctgggattgtacaccttcccaagatcatggagaaagtcagttgctgggcacaggaaaaacaatcaggatttcagaatctgctgggtatcyggggttgaggacatgggtgcctatgtgtgaaatgctgtgggatccactgtcaacagcctgttgatgtgagagtccctggcatcttggagacagtgtgtat

SEQ ID NO: 225127 - DNA, 201 bp, Homo sapiens
gaaaatgagattaacgaacatgcccaaagcctttcagcagtaaagagcagaattgggatttgaacctagcctgtagccaacacacggagcagaggaggccraaatcctgagctgtaccgatgaccatagcagtggggtttgcctttcctttagaacctgtagttagagagcaaaatgatgaatttaccactgacttgtcat

SEQ ID NO: 225128 - DNA, 201 bp, Homo sapiens
caaattattcttcttttgactccccaccctcagccattcaaaaatgaaaaaccatcgttagctcatggaccatacaaaaataagtggcgggtcagcctctrcctgtggactgctgttggttgaccgatgctccatctcctactttttcagaccaactcttctcccctgactcaatctcttattatctttgagactccttgg

SEQ ID NO: 225129 - DNA, 201 bp, Homo sapiens
acaagaatggccataatcaaaaaataatagatgttcatgtggatgcagtgaacagggaacacttctacactgctggtgggaatgtgagctagtacaactaytatggaaaacagtgtggagattccttatagaactaaaagtagaactaccatttgatccagcaatcccactaccaggtatctacccaggggaaaagaagtc

SEQ ID NO: 225130 - DNA, 201 bp, Homo sapiens
gggaagctgcagtatgaaattgtttggattcaacattggtctccctgtattcttatcttaacagagttattgctaaagccagtgatccctaagccagaagkcagagagtaatcgtccacccttccattctcccattcccattcccattcccaaatcctgattatttggccttctgagtatttcttatatcttctcctccac

SEQ ID NO: 225131 - DNA, 201 bp, Homo sapiens
atctcaatgtgcttctggaatttgaataaggattttggagcacctcaaggccaatctgtgattaatgagaactgttgagttacttggcttggtgtcacagytgcccactggttgaaaaggctggctttagtatctctactatagccagggattcccactttatcatggctgtctctctctgaggcacttcttgccatttaa

SEQ ID NO: 225132 - DNA, 201 bp, Homo sapiens
cctcttttgtcaaaatccctttcaggatgatgggcaatcgagttatgctctgaaaccaggagagatcattccagcagagagaagtgctgataggagtcatytggaaataaggtattgcatttccctataggaaataaaaagggaacttagtcctgagctctcacaaggctacttgatgcattccaaagatgagacacattt

SEQ ID NO: 225133 - DNA, 201 bp, Homo sapiens
gtctatgtatgccatccaaaattagcattttctgagtgtgtcataaagtagaaaatgttacatgaacttttttagtttactctccagttcgtgcaaaaatmttttccgtggctttcctatttctcagcatccagctctggccagaacacttctggtgacaagttgggcagctccaagggtgagaacatttggtcttatgtt

SEQ ID NO: 225134 - DNA, 201 bp, Homo sapiens
gaactcagggttatcacagcttatatttgtatggaaaccccctacacagtctgtgggaaatctcagcgtgaaaattgcagggtaggctgtggagatacaaygggggagaaaagtcagcctctgatgactcactttaaggtacacttgcttggtgctataggatggtgtccttccagaacctctggcctagttctttaggaa

SEQ ID NO: 225135 - DNA, 201 bp, Homo sapiens
gttcgataaatgcctgtggaaagaaagaatggaggaaaggagaaaagagggaaggaaatttgcctcttgtaatgcctgtccatcgaatttggtatctttcytacctttttaggtgattgaagatctgttagtgttaagttcctcctcaactggtttcgaatgtcatgtcgcctgttgccacatacaggtgtatccaaagtt

SEQ ID NO: 225136 - DNA, 201 bp, Homo sapiens
gtggagtggtgtgtgtggcagcctgagaggcaggctgcttcaagagagatagctactaacacttatttgaacagtggcaggctacatgtcttcgctccaaktctcagtttcctcatttgagaaaatatacatttttgtgtatttcagcttaatccatgatagatttgaagccacctgaaattaaaagctgagctgaggtcc

SEQ ID NO: 225137 - DNA, 201 bp, Homo sapiens
ttattgacacacactctcagccagggtggcggaggcatatactgctccccacatgcttaacatttcgctgttgcttaaatacaggcatggctctgtgactmgttcttctggccaatggcctgggagtgggaatagcaggtgtgaattctaggccaaggattgaagagctggtatgtgaccctccagctttgtttcctcctc

SEQ ID NO: 225138 - DNA, 201 bp, Homo sapiens
atatccagcagctgaactccaagtgagcacaccagcttatgttggtacaatcagcttcactgggggtagctttattatattataaaagtctagtgagaccytcagtcccttcctcatatgggcaccactgactcccatttagagcctaatatggtttagctgtgtcctcacccaaatctcaacttgaattgtatctcccag

SEQ ID NO: 225139 - DNA, 201 bp, Homo sapiens
ccaaacccagtgagaacacttcagatgcagaaaaggaaatgaaggggaagctgcagtatgaaattgtttggattcaacattggtctccctgtattcttatsttaacagagttattgctaaagccagtgatccctaagccagaaggcagagagtaatcgtccacccttccattctcccattcccattcccattcccaaatcc

SEQ ID NO: 225140 - DNA, 201 bp, Homo sapiens
gatgctggcagtagatagaaagaacagtagagcttctcatgagagattctcaagtttgaaataatgaccttcttggagaccttttaaatctgatgattgcwctgagttaaagaacatcatctctacaaggtaacacactctaatatcagcctctaatgtttgcacctaagtgaactaatctcaaataggggatatagggcc

SEQ ID NO: 225141 - DNA, 201 bp, Homo sapiens
tatctgtaaaatagggaaaataataatacatgtctttaggattgttgggagactgaataagatactagctatggcagcattctttacattgcaaagtggtrtactgcatagataccagtgctaatgaagttgatggtgatgacgttcatatggctgctgctgactggcagatttcccatttcctactttattcatttcaat

SEQ ID NO: 225142 - DNA, 201 bp, Homo sapiens
tattggttttattcaggtggtcatagggtacccattgagcaatatgcctgcttattttggatgaagagaaatgtcgggtcattcttgagctgtcatgaccyagtctcttagaaagcaaatgtagtttcacagtagaatagaatgccaaaattcttcttaatggaggggattaaaaacatgctaagtcctcctgatcactgt

SEQ ID NO: 225143 - DNA, 201 bp, Homo sapiens
acgaatagataattctcaaaataaaatatacaaatagccaacaaacatatgaaaaagtgctcaacatcactaatgattagggaaatgcaaatcaaaattasaatgcaatacttccttactgctacaagaatggccataatcaaaaaataatagatgttcatgtggatgcagtgaacagggaacacttctacactgctggtg

SEQ ID NO: 225144 - DNA, 201 bp, Homo sapiens
tttggatgaagagaaatgtcgggtcattcttgagctgtcatgacctagtctcttagaaagcaaatgtagtttcacagtagaatagaatgccaaaattcttyttaatggaggggattaaaaacatgctaagtcctcctgatcactgtggtcctgtcctaatccagccatctatttttcctgaggtaattctggaagtcagga

SEQ ID NO: 225145 - DNA, 201 bp, Homo sapiens
agatgattctgcagcagggaggcgttgtctggggtggacccccctgattcctgatacaagtctaaaccagacagggtcctgtggaaccttggtgggttcarttggctgagagctgagtaacctatgttgatccaggaggagacttatctccagaaagccgcttccaacacctcattccccatttcccaaccttctctgaac

SEQ ID NO: 225146 - DNA, 201 bp, Homo sapiens
cacccaaatctcaacttgaattgtatctcccagaattcccaacaacccaaggttgcattaattacttttaatggcaaaaccactgttacttttgcaccaayctaatattaacctattgtgggagggacccatggggaggtaattgaatcatggggccagtctttcctgtgctattctcatgatagtcaataagtctcatga

SEQ ID NO: 225147 - DNA, 201 bp, Homo sapiens
cttagaattagcttctccttacatgagaattagcttctcagcacagacccaagatttctagagactcaactcatctacactagattttatcattccacctycacctctactccttctgaccctgcttagccatgccagtaaaaggagctccacttgaagttggaatacggaataaacttttgcttcatccagtcagtggag

SEQ ID NO: 225148 - DNA, 201 bp, Homo sapiens
aaccatttttcaagtactccatgatgtaccatgcactgtgtaaattgctttacatgcatgactgttttaatccttgtggaaatgttcaacacaaatattawcatccccatttcacgggtgagaaacctgaagttcaagaggttaaaatactttgttcaatattacatatctagtaatgtgtcacgattccagtggcctggc

SEQ ID NO: 225149 - DNA, 201 bp, Homo sapiens
agaaattttagctcattttagctccttgaacctctttaggctttttgtctgataaaacagtgaggtaaaattagcagaccagtgacaaagaggaggaaatmtgagggcaaggacattcaggagtacctgttgctaacaatctgaagttcaaactctcctgactgagggaaggaggaaggaagtagagaagctggcaggctt

SEQ ID NO: 225150 - DNA, 201 bp, Homo sapiens
ggtcaccatctacctttttcctatttttgctaatttgggtacctgagaaacaatgtatgttggctccatttattcccatcttcaatttgagccctataaaygcagagcttggtacttttgatacaacaccctgaaagaggaaagaggacagggcttgggggtaatgaataaatctctccagtagaaacagggcagtagaaa

SEQ ID NO: 225151 - DNA, 201 bp, Homo sapiens
ccaggtaattgaaatccgttttactacacagatgtgcctcttcctcctttctcgatttctccaaactattgagtgcctttctcagggaaatctttctcacrccttcttctcttttcctaatctctcccatctcatttcctttttcatttgcaaaccaaaaataattgtgctatgtagtcccttatgtcaagaagaacaaag

SEQ ID NO: 225152 - DNA, 201 bp, Homo sapiens
tcaagtgggtattttcagtcacctgggaatccaaccgctattttaatagcattcttttgtgggaaaatctgttctgagtttcaaacaaatgccctccaagyagagttttggaacccagccatattgtaaactgtgtgctgtccatagagcgttgaacatagtttagggcatactgggagacattgatccaaatgtttatat

SEQ ID NO: 225153 - DNA, 201 bp, Homo sapiens
ggaaaaacagagaaacctgaagtttctaagctccagccaactcccaggcagttggcagccatgtgaaaattaaccaaaggttttgggtggaaactgaatgkcttttaagtcattatctaaaggaagaagataggccgcagtaactagggcttcaaccaggaatgggttagttcctctaatggacaaaggggacacagaggc

SEQ ID NO: 225154 - DNA, 201 bp, Homo sapiens
ttgatcatgtggcctctctgttgctaatctctcctggaaacatctgccacatttagtgtgtgtatgtgtattcattctttctcataacttcttaaagtttyttcccctcattattaaaatgaatttaccagtaagaatgagtttttaagatttttataaactgtatactttatcagtttgggaagggagtaactgtaggaa

SEQ ID NO: 225155 - DNA, 201 bp, Homo sapiens
ccagcactttgagaagccgaggcgggcggatcacgacgtcaggagatcaaggccatcctggctaacacggtgaaaactcgtctctactaaaaatacaaaarattagccgggcgtggtagcgggcgcctgtcgtcccagctactcgggacgctgaggcagaagaatggcatgaacccaggaggcggagtttgcagtgagcca

SEQ ID NO: 225156 - DNA, 201 bp, Homo sapiens
tgccaggtggctgggcctgtgacagtgcagaggttttggtgcctgcccgcccaccattgctccagctgcagctgctgccccctgcagggcctgttcgttcstgctgcctagctccctgctggctggctatgatctccgtcctgttaccattccaggagagcagccacctccctgtgcatggcaggaccaggtactgattgt

SEQ ID NO: 225157 - DNA, 201 bp, Homo sapiens; identical to SEQ ID NO: 108550

SEQ ID NO: 225158 - DNA, 201 bp, Homo sapiens; identical to SEQ ID NO: 108551

SEQ ID NO: 225159 - DNA, 201 bp, Homo sapiens
tccatcacctcagggtcactagatgaggagaagagcacaggggttccagagtctctgaaggatagaggatccactaaacaaaaacaaggatgcaggtaccygccatagctataggcactaggttactcctgcaagtaattctggcttcccaatgtggatgggtcatgtgatgactaggagagtcacatgacacaggaagtg

SEQ ID NO: 225160 - DNA, 201 bp, Homo sapiens
cagcaacaggctactggctgggcccaggcaagggggccttggcaggaaaagttccttgctgtacctccactgcactcagaggccagtgaggggggtaccakacaggactccttcctccctggtgaagtgcccttgcagctccctagtgtccacgccatggatatttcctccacagaagtacaatgctgattatgatctgtc

SEQ ID NO: 225161 - DNA, 201 bp, Homo sapiens; identical to SEQ ID NO: 108362

SEQ ID NO: 225162 - DNA, 201 bp, Homo sapiens
caatgaggtgtgcagacctgtgaaggaaaggcaagacagggaatcatggttccccagagttgcccaaaagggcaggctacctggggaaagctggacaggamgggcttctatcagtctttggtgagactactaatgggtctgaggtctcctttgcaggaagggagactggggtggcttactgtgatgatgctgtggctgtac

SEQ ID NO: 225163 - DNA, 201 bp, Homo sapiens; identical to SEQ ID NO: 108453

SEQ ID NO: 225164 - DNA, 201 bp, Homo sapiens
acacacagacccacacacaggctcaggaaagcatgggggtcagaagcccaccttgaatcagacaggtgcactggctcagacctacctgtttcttcctgccyacccaatccaggtacatactttttggatagacaccaagaactacgtggaagtgacccggaagtggtatgcagaggctatgccctttcccctcaacttctt

SEQ ID NO: 225165 - DNA, 201 bp, Homo sapiens; identical to SEQ ID NO: 108564

SEQ ID NO: 225166 - DNA, 201 bp, Homo sapiens
aggcctggaaagagaggatccagataaaagccaaagttcctggcagagccgaggccactgccctgattgcttaggtgtgaacagagcttttccagtttccraagtattctaaattatttcctaacacaggggcattcagagaaagagattcttacccccattccacaggggagaaactgaggcttagggagatttaaggat

SEQ ID NO: 225167 - DNA, 201 bp, Homo sapiens; identical to SEQ ID NO: 108455

SEQ ID NO: 225168 - DNA, 201 bp, Homo sapiens
acactgcctgaagtagaagcaatcctgtgaggctgccagccatgatgcttaccctacccgaaggcttgggacattcctgaggacagaatgaggaatgactraaaagcaagtccctctccacccctcaactactctcccgggcagggcttagctgcctttgggtgcccatggcctggtctcccacattcattaggacaaggc

SEQ ID NO: 225169 - DNA, 201 bp, Homo sapiens
taaaaaaataaataatacaaccagctcttcatttagaggcaagcacaaaataggtgctcaatgtttgttgaatgagtgagttgttaccaaccataccccaytattcaaggtcctgcttgtcagtgtttcaggaagtgttcttggcaaaggagtggtgaacttcaggaagaatgatgctgactccgaacacaattatttatt

SEQ ID NO: 225170 - DNA, 201 bp, Homo sapiens
tgtccacgccatggatatttcctccacagaagtacaatgctgattatgatctgtcagctcggcaaggggcagacaccctggccttcatgtctctcctggargagaagttgctcccggtgctggtgagtgtgcccagacctcccagcatccatggccagccggggagggttcgggaacacacagacccacacacaggctcag

SEQ ID NO: 225171 - DNA, 201 bp, Homo sapiens
attggatcctcccacctcagcctccatagtagctgggactacaggtacatgccaccatgcccaactaatttttgaaatttatttttagagatggggtcttsctatgttgcccaggctggtctcgaattcctgaggtcaagcaatccacctgcctcagcctcccaaggtgctgggattataggcgtgagccatcactcacct

SEQ ID NO: 225172 - DNA, 201 bp, Homo sapiens; identical to SEQ ID NO: 108460

SEQ ID NO: 225173 - DNA, 201 bp, Homo sapiens
gattcttacccccattccacaggggagaaactgaggcttagggagatttaaggatcatgctgaagaggttatctggggacaaagcttactcaggatgtggwgggggatgctgaggaacagggactggagcctgggaaggtagggcaggctgagacctgggggtatgggtggaatgtgtatgtggtaatggtgtctgagcga

SEQ ID NO: 225174 - DNA, 201 bp, Homo sapiens; identical to SEQ ID NO: 108567

SEQ ID NO: 225175 - DNA, 201 bp, Homo sapiens; identical to SEQ ID NO: 108568

SEQ ID NO: 225176 - DNA, 201 bp, Homo sapiens; identical to SEQ ID NO: 108569

SEQ ID NO: 225177 - DNA, 201 bp, Homo sapiens; identical to SEQ ID NO: 108571

SEQ ID NO: 225178 - DNA, 201 bp, Homo sapiens; identical to SEQ ID NO: 108572

SEQ ID NO: 225179 - DNA, 201 bp, Homo sapiens; identical to SEQ ID NO: 108574

SEQ ID NO: 225180 - DNA, 201 bp, Homo sapiens; identical to SEQ ID NO: 108576

SEQ ID NO: 225181 - DNA, 201 bp, Homo sapiens; identical to SEQ ID NO: 108580

SEQ ID NO: 225182 - DNA, 201 bp, Homo sapiens
ccttacttcacaatgtatctggcccaggtctggtggtagatgtctctgggctgtcccttgagtggccccttcccattccccgctcccttggtcttgagccragtgggtgatgtccaggggctggcaaggagtgaaacgggacgctgggccaactgcagggctcggtgaatcaggggtatctagagacaaaggtagtgaaga

SEQ ID NO: 225183 - DNA, 201 bp, Homo sapiens; identical to SEQ ID NO: 108584

SEQ ID NO: 225184 - DNA, 201 bp, Homo sapiens; identical to SEQ ID NO: 108587

SEQ ID NO: 225185 - DNA, 201 bp, Homo sapiens; identical to SEQ ID NO: 108591

SEQ ID NO: 225186 - DNA, 201 bp, Homo sapiens
acctaggtcacgggcaatgaagtctcgctgatgttcaggggtgaagcccaggcactggaaggggtatccactcaacagcccagcagaaggctcattttcasctgtcactgcccagaactgtaacttgtgctcagcataggcatccaggaacctggcaagagaaaggtcatgaatgatccagccaagaaagtgggccagacc

SEQ ID NO: 225187 - DNA, 201 bp, Homo sapiens
caccgtttacctctaggaggacccagcctggcccggggggtgaagggtgtaatggttacctgtgccggtgcaattagcctgtatggtcctgtactcagctycatccaatgcccactgcttctgctcttgtagcggctgaaggcacctagggcaggaaaggtcggggggtcaagagtcacagtatgtggcattgcagacaca

SEQ ID NO: 225188 - DNA, 201 bp, Homo sapiens; identical to SEQ ID NO: 108604

SEQ ID NO: 225189 - DNA, 201 bp, Homo sapiens; identical to SEQ ID NO: 108605

SEQ ID NO: 225190 - DNA, 201 bp, Homo sapiens
gtcagaagtaggacactcttcctcatttctaacttcccaaaggttgaggacctggggaattaattgagaggcctggaaagagaggatccagataaaagccwaagttcctggcagagccgaggccactgccctgattgcttaggtgtgaacagagcttttccagtttccaaagtattctaaattatttcctaacacaggggc

SEQ ID NO: 225191 - DNA, 201 bp, Homo sapiens; identical to SEQ ID NO: 108417

SEQ ID NO: 225192 - DNA, 201 bp, Homo sapiens
aagtagaagcaatcctgtgaggctgccagccatgatgcttaccctacccgaaggcttgggacattcctgaggacagaatgaggaatgactgaaaagcaagyccctctccacccctcaactactctcccgggcagggcttagctgcctttgggtgcccatggcctggtctcccacattcattaggacaaggcccacagacac

SEQ ID NO: 225193 - DNA, 201 bp, Homo sapiens; identical to SEQ ID NO: 108617

SEQ ID NO: 225194 - DNA, 201 bp, Homo sapiens; identical to SEQ ID NO: 108619

SEQ ID NO: 225195 - DNA, 201 bp, Homo sapiens; identical to SEQ ID NO: 108621

SEQ ID NO: 225196 - DNA, 201 bp, Homo sapiens; identical to SEQ ID NO: 108624

SEQ ID NO: 225197 - DNA, 201 bp, Homo sapiens; identical to SEQ ID NO: 108628

SEQ ID NO: 225198 - DNA, 201 bp, Homo sapiens; identical to SEQ ID NO: 108631

SEQ ID NO: 225199 - DNA, 201 bp, Homo sapiens
tataggcactaggttactcctgcaagtaattctggcttcccaatgtggatgggtcatgtgatgactaggagagtcacatgacacaggaagtgaggcaattrcagccatatttctaaagggcaattggcttcctccgagttgttacagattatacaccctataaaattctggagggtatatgtgaatgacaactttaggaag

SEQ ID NO: 225200 - DNA, 201 bp, Homo sapiens
ccacaacctcaaaggggtcagtgaggtaaatgcagtgcctggcaacttgggaggcgcctgggaactatttgtctgttgtttgtatctttttttgtacagtyttagtgagacggcaaggttggaatccttgctacaccatttactggctgtttgaccttcagtaaatcaatcactctaagcctctatttcatctataaaagg

SEQ ID NO: 225201 - DNA, 201 bp, Homo sapiens
aaaacaaggatgcaggtacctgccatagctataggcactaggttactcctgcaagtaattctggcttcccaatgtggatgggtcatgtgatgactaggagmgtcacatgacacaggaagtgaggcaattgcagccatatttctaaagggcaattggcttcctccgagttgttacagattatacaccctataaaattctgga

SEQ ID NO: 225202 - DNA, 201 bp, Homo sapiens
aagggtgtaatggttacctgtgccggtgcaattagcctgtatggtcctgtactcagctccatccaatgcccactgcttctgctcttgtagcggctgaaggyacctagggcaggaaaggtcggggggtcaagagtcacagtatgtggcattgcagacacagaccaccgagctgtactgaagcttttagggatgcaggggcac

SEQ ID NO: 225203 - DNA, 201 bp, Homo sapiens
cagatcagcatggccaaaggggaggccagtcctgatcccacatccttgctgatcccttacttcacaatgtatctggcccaggtctggtggtagatgtctcygggctgtcccttgagtggccccttcccattccccgctcccttggtcttgagccaagtgggtgatgtccaggggctggcaaggagtgaaacgggacgctgg

SEQ ID NO: 225204 - DNA, 201 bp, Homo sapiens
aacctggcaagagaaaggtcatgaatgatccagccaagaaagtgggccagaccgagagaacaggaagcctgatggagtgggcaagactgacagatccaagkttgaaaggcccagaaggtagaaaggtgagctgaggacaggcagatctggaagtggaaccaggttgagggttgggacacagatcagcatggccaaagggga

SEQ ID NO: 225205 - DNA, 201 bp, Homo sapiens
atccaggaacctggcaagagaaaggtcatgaatgatccagccaagaaagtgggccagaccgagagaacaggaagcctgatggagtgggcaagactgacagrtccaagtttgaaaggcccagaaggtagaaaggtgagctgaggacaggcagatctggaagtggaaccaggttgagggttgggacacagatcagcatggcca

SEQ ID NO: 225206 - DNA, 201 bp, Homo sapiens
ccaccacacccggctaacttttctatttttttttttgtagagttagggtttcaccatgtttcccaggctcatcttgaactccttaggttcaagtgatccamccaccttgggttcccaaagtgctggaattatagccatgagctaccacccccagcctagagaggtttcaagtcccaactgtgggatccatggcaccctgga

SEQ ID NO: 225207 - DNA, 201 bp, Homo sapiens
gaggcagctgcaagtgcctcagtagttgcaaaaggggcaatgaggtgtgcagacctgtgaaggaaaggcaagacagggaatcatggttccccagagttgcscaaaagggcaggctacctggggaaagctggacaggaagggcttctatcagtctttggtgagactactaatgggtctgaggtctcctttgcaggaagggag

SEQ ID NO: 225208 - DNA, 201 bp, Homo sapiens
tccaggaacctggcaagagaaaggtcatgaatgatccagccaagaaagtgggccagaccgagagaacaggaagcctgatggagtgggcaagactgacagayccaagtttgaaaggcccagaaggtagaaaggtgagctgaggacaggcagatctggaagtggaaccaggttgagggttgggacacagatcagcatggccaa

SEQ ID NO: 225209 - DNA, 201 bp, Homo sapiens
gaacagagcttttccagtttccaaagtattctaaattatttcctaacacaggggcattcagagaaagagattcttacccccattccacaggggagaaactraggcttagggagatttaaggatcatgctgaagaggttatctggggacaaagcttactcaggatgtggagggggatgctgaggaacagggactggagcctg

SEQ ID NO: 225210 - DNA, 201 bp, Homo sapiens
gttatctggggacaaagcttactcaggatgtggagggggatgctgaggaacagggactggagcctgggaaggtagggcaggctgagacctgggggtatggrtggaatgtgtatgtggtaatggtgtctgagcgatggaatgaagtgaaagaaatagccaagagctgggcactgagggaacaagctggggggccctgggcgt

SEQ ID NO: 225211 - DNA, 201 bp, Homo sapiens
ggacgaggaagagctggagaaggaggtagctctgagaccgggggctattgtatgagatgagccccaaggatgctggccaggaatgggagtgcttaggtggrgaggtggcactgttcccacagctgcaagcctacctgtgtcgcccctacagctgtaccgagaggctcgggagtgtctgaccctgctctctcagcgcctggg

SEQ ID NO: 225212 - DNA, 201 bp, Homo sapiens
atgaagtgaaagaaatagccaagagctgggcactgagggaacaagctggggggccctgggcgtgggttccctggatccagggagtgtgaggatggctttcyctggttcctgaggcatggaccgagtcctagcctgcatctgagctccgttgtgctagctttgtggtgtctgggtcggggaagttactgttagaaagttgcc

SEQ ID NO: 225213 - DNA, 201 bp, Homo sapiens
ccggggagggttcgggaacacacagacccacacacaggctcaggaaagcatgggggtcagaagcccaccttgaatcagacaggtgcactggctcagacctrcctgtttcttcctgcctacccaatccaggtacatactttttggatagacaccaagaactacgtggaagtgacccggaagtggtatgcagaggctatgccc

SEQ ID NO: 225214 - DNA, 201 bp, Homo sapiens
ccaccttgaatcagacaggtgcactggctcagacctacctgtttcttcctgcctacccaatccaggtacatactttttggatagacaccaagaactacgtrgaagtgacccggaagtggtatgcagaggctatgccctttcccctcaacttcttcctgcctggccgcatgcagcggcagtacatggaacggctacagctgc

SEQ ID NO: 225215 - DNA, 201 bp, Homo sapiens
aggacgaggaagagctggagaaggaggtagctctgagaccgggggctattgtatgagatgagccccaaggatgctggccaggaatgggagtgcttaggtgsggaggtggcactgttcccacagctgcaagcctacctgtgtcgcccctacagctgtaccgagaggctcgggagtgtctgaccctgctctctcagcgcctgg

SEQ ID NO: 225216 - DNA, 201 bp, Homo sapiens
gaaggaggtagctctgagaccgggggctattgtatgagatgagccccaaggatgctggccaggaatgggagtgcttaggtggggaggtggcactgttcccrcagctgcaagcctacctgtgtcgcccctacagctgtaccgagaggctcgggagtgtctgaccctgctctctcagcgcctgggctctcaaaagttcttctt

SEQ ID NO: 225217 - DNA, 201 bp, Homo sapiens
tgagacagatactggccctggtgacagtggggctgtgcgtggggccagagccttctcagaggtacaaaagggtagggtgggagggcagccaggcacaggargggcctgaagagctgtggggcactgaatgtgccctttatgcagccctgggatagagccctattcagggccaggctggcgccacctggggatctctcccca

SEQ ID NO: 225218 - DNA, 201 bp, Homo sapiens; identical to SEQ ID NO: 42031

SEQ ID NO: 225219 - DNA, 201 bp, Homo sapiens; identical to SEQ ID NO: 108675

SEQ ID NO: 225220 - DNA, 201 bp, Homo sapiens
tgagctgaggacaggcagatctggaagtggaaccaggttgagggttgggacacagatcagcatggccaaaggggaggccagtcctgatcccacatccttgytgatcccttacttcacaatgtatctggcccaggtctggtggtagatgtctctgggctgtcccttgagtggccccttcccattccccgctcccttggtctt

SEQ ID NO: 225221 - DNA, 201 bp, Homo sapiens; identical to SEQ ID NO: 108678

SEQ ID NO: 225222 - DNA, 201 bp, Homo sapiens
ggccttcatgtctctcctggaggagaagttgctcccggtgctggtgagtgtgcccagacctcccagcatccatggccagccggggagggttcgggaacacwcagacccacacacaggctcaggaaagcatgggggtcagaagcccaccttgaatcagacaggtgcactggctcagacctacctgtttcttcctgcctaccc

SEQ ID NO: 225223 - DNA, 201 bp, Homo sapiens
atggagaggtcatctcagttccacacaagatcatcacccaccttcgaaaagaggtaggtgacttggatagagggggctgccagtgagagaagttcagtcarttctatacaatacacatttattgagcaccagatatatgccatgctagatgcaggtgacccagagcatcaaggagcaacagtcttgtggcagagacacaca

SEQ ID NO: 225224 - DNA, 201 bp, Homo sapiens; identical to SEQ ID NO: 108547

SEQ ID NO: 225225 - DNA, 201 bp, Homo sapiens; identical to SEQ ID NO: 108533

SEQ ID NO: 225226 - DNA, 201 bp, Homo sapiens; identical to SEQ ID NO: 42028

SEQ ID NO: 225227 - DNA, 201 bp, Homo sapiens
tgtttgtaaaacgtgtgcttggtgatgtctacaatgatgggttccagtcggtccagccgaccacatggtacaggaggttctagggtaaggacaaaggcaargagacaaaggcgcaacactgggggtccccagagagtgtaggtaagggtcacgtgtgggagaggcagctgtgggtaggtcagccctgtgaggggcacattc

SEQ ID NO: 225228 - DNA, 201 bp, Homo sapiens
caacagcccagcagaaggctcattttcagctgtcactgcccagaactgtaacttgtgctcagcataggcatccaggaacctggcaagagaaaggtcatgartgatccagccaagaaagtgggccagaccgagagaacaggaagcctgatggagtgggcaagactgacagatccaagtttgaaaggcccagaaggtagaaag

SEQ ID NO: 225229 - DNA, 201 bp, Homo sapiens; identical to SEQ ID NO: 108547

SEQ ID NO: 225230 - DNA, 201 bp, Homo sapiens
ctagattctcaagagttgagacaggaggatcacttgagcccaggagttcaagtccaacttgggcaacatgacaagacccttgtctctttaaaaaagcaacycaaaccatgtcttgaaaagctatttaatggtcagacacgatggctcacgcctgtaatcccagcactttgggaggccgaggcaggcggatcacttgaggtc

SEQ ID NO: 225231 - DNA, 201 bp, Homo sapiens
tcctgctggagatgggggagttctttcagattcaggtaagaaggcaggaggcagtagcagagaacaggcaccagcttcactcctcctctgcccaggaacckcatccttcctcttttgctgccctccccctccctgcccaggatgattaccttgacctctttggggaccccagtgtgaccggcaaaattggcactgacatcc

SEQ ID NO: 225232 - DNA, 201 bp, Homo sapiens
aaatgggagagagcaaggagaaaactcacagtagctgctgtatggaccctgataccctgtacctctttccttgccctccaggtcctggagtacaatgccaytggaggcaagtataaccggggtttgacggtggtagtagcattccgggagctggtggagccaaggaaacaggatgctgatagtctccagcgggcctggact

SEQ ID NO: 225233 - DNA, 201 bp, Homo sapiens
gaaatgggagagagcaaggagaaaactcacagtagctgctgtatggaccctgataccctgtacctctttccttgccctccaggtcctggagtacaatgccrttggaggcaagtataaccggggtttgacggtggtagtagcattccgggagctggtggagccaaggaaacaggatgctgatagtctccagcgggcctggac

SEQ ID NO: 225234 - DNA, 201 bp, Homo sapiens
tgcttctttcctccttggggcgtaactcagaccctgggcacccctctccactgcccaggggagacctgggttctagatttggctctgcctctactatcttyctacctcctagagcctcagtttggcttgtgtaaaataggatgacttaagggtcctttcagcccctaatcctggggtactttactctgtaccgcctcctta

SEQ ID NO: 225235 - DNA, 201 bp, Homo sapiens
tgggtccctgagttggtggaaagggatagagcagtggttctcaactagaggcagttttcctcccgaggggacatttggcaatgtcagcagacattttttgycattgtcattacaactctgtgtgtgtgcatgtggtacagacatctagttggcaggagccaaagatgttgccaaacatgtagtacacagaacagctccccc

SEQ ID NO: 225236 - DNA, 201 bp, Homo sapiens
gggtccctgagttggtggaaagggatagagcagtggttctcaactagaggcagttttcctcccgaggggacatttggcaatgtcagcagacattttttgcmattgtcattacaactctgtgtgtgtgcatgtggtacagacatctagttggcaggagccaaagatgttgccaaacatgtagtacacagaacagctccccca

SEQ ID NO: 225237 - DNA, 201 bp, Homo sapiens
tagccaggcatggggtatgtgcctatggtctcaggaactcaggaagctgaagtgggaggatcacttgagcctgggagttagaggctacagtgagctgtgaytgcaccactgcactggataatagtgagactctgtcccctaccaaaaaaaagcaaaactatatacagatataaagtagcagctctgttgctgatagaagga

SEQ ID NO: 225238 - DNA, 201 bp, Homo sapiens
ctgttgcctttctgattctgcccagttgtcagctggtatgggatgttgggcttgggataccagggtttcgcatatctggagaaagcctggctcatggaccrtctttgtcttgcttagagttcctatcagactgagattgggcagaccctggacctcctcacagccccccagggcaatgtggatcttgtcagattcactgaa

SEQ ID NO: 225239 - DNA, 201 bp, Homo sapiens; identical to SEQ ID NO: 42033

SEQ ID NO: 225240 - DNA, 201 bp, Homo sapiens
gctgccagccccctactgggcaccccgggagaggtggctgggttccctacggcggccctccctggtgcacgggtacccagtcctggcctggcacagtgccygctgctggtgccaagcgtggacagaggaacctcggtgagtgtggttggggtgaggggccttggggaggggagcagctgatcaggtttctgacttgttttt

SEQ ID NO: 225241 - DNA, 201 bp, Homo sapiens
gcagctcttgtcctcactggccgggcttcaccacctctgtcttctaggtctgcacctgtggttgccaggtaggtggatgtgagagaccctacccttctggktctctagaagccatcccatcgccgctagcatcatgctgtcccctcagagagctttactctgcaacctcaaccacatccacctccagcacgtctccctggg

SEQ ID NO: 225242 - DNA, 201 bp, Homo sapiens
aacactgctacccctggtgaaaaactgtgtgaccttgagcaagtcggtctcgctcagtctctttcctcagctggggataaaattcctacttcacaggactstaaagattaagcaaggcaagggatatgaaagtgcttagcacataataggggaacaatatatcctgtatctgagtatggataggagtgtggagatcatcca

SEQ ID NO: 225243 - DNA, 201 bp, Homo sapiens
caccgggcagcgcaggagcagcccctggagcgtggtggaggcgtcggtgaagccaggtgagccaggagggcgtgggacccggcagtgcgcagggcagggcygggcttggctgactgcaccccacgttctcaggctccagcacccgctcccttggaaccctgtatagccaggtcagccgtctagccccgctgagcagcagcc

SEQ ID NO: 225244 - DNA, 201 bp, Homo sapiens
tgtattgcagacagggcccgatgcccagagggtgcccatggtagccttggcctctataggacatgctcatctagctggtttcagggtacaggattgcagcrtgcctggaagggaaagaaagcgaggaagggtgttgggaagtggggttgtggtagtggcaagaaagggcttctctgtcctgtgtaattggaagaaagggtg

SEQ ID NO: 225245 - DNA, 201 bp, Homo sapiens; identical to SEQ ID NO: 42036

SEQ ID NO: 225246 - DNA, 201 bp, Homo sapiens; identical to SEQ ID NO: 42038

SEQ ID NO: 225247 - DNA, 201 bp, Homo sapiens
aaggccaagcccgttttcctgtctttcaacctcttccaggaaaattacgggcagaaggaggctgagaaagtggcccgggtgaaggcgctatatgaggagcwggatctgccagcagtgttcttgcaatatgaggaagacagttacagccacattatggctctcattgaacagtacgcagcacccctgcccccagccgtcttt

SEQ ID NO: 225248 - DNA, 201 bp, Homo sapiens
tccaaagcagccagagccttcaggcctgctgctgccgtcaagtcacctcggtgtccttccccgcagctcttgtcctcactggccgggcttcaccacctctrtcttctaggtctgcacctgtggttgccaggtaggtggatgtgagagaccctacccttctggttctctagaagccatcccatcgccgctagcatcatgctg

SEQ ID NO: 225249 - DNA, 201 bp, Homo sapiens
cttcctatagctgcagccatgtacatggtgagtgagcctcctcacccctctctgctctgctgatgggggcttttggacagcaaggcatagagcagaaaacrtgaacactgctacccctggtgaaaaactgtgtgaccttgagcaagtcggtctcgctcagtctctttcctcagctggggataaaattcctacttcacagga

SEQ ID NO: 225250 - DNA, 201 bp, Homo sapiens
ggcagtctctccacgcccctcgggcaagcctgggtaggggcgcggcctcctagcgtcttccctttcccactcctcccaggtcttctgatagccgtcagcgyctccgttgataaaatcatctcgcatttcggggccgcccggaacttggtgcagaaggtgaaggtggctggggggaggctgttgggatgaggagagtaatgg

SEQ ID NO: 225251 - DNA, 201 bp, Homo sapiens
cccgccgcggctcccccaccccgccaggtacccgcccccccgctgccaccgcaacctcgtccgccgaaggcccctcgctggaccaggagcccatcgcctccgcccaggctacgtaagacggacccgggctagccccgcgggccacgcctcaggcgggccgccccgcccactctcgcccggccccgttttcgctttttttcc

SEQ ID NO: 225252 - DNA, 201 bp, Homo sapiens
gtctcagtcacccagccatacttttttgttccctgcgtatccttcctgtaattgtccccaagcacattccacaagagggaggggcactctgggctaaggckggggtgggagttatctggggagctgccaccatgcctctgcctttggtgcttgcccctgcagggagtgcttagtgccccctccctatgccactcccaggat

SEQ ID NO: 225253 - DNA, 201 bp, Homo sapiens
gtgtgagccactgcacctggcctagaatcagttcttaaccctagcagcaccctagtttcacctgtaagtttttaaaaatttttaattttttttttttttttgatacagggtcttactctgttacccaggctggagtgcagtggcatgatcttggctcactgcaatctctgcctctggagcggaagccacccttccaccgcc

SEQ ID NO: 225254 - DNA, 201 bp, Homo sapiens
ctgtggcttatgggggacttttgacagatgtgagagaaagctttttttttttttttgagacagagccttgctctgtcacctgggctggagtgcgatggtgygatctcggcttgctgcaacctccacctcctgggttcaagtgattctcctgcctcagccttctgagtagctgggattacaggtgcgtgccaccacatccag

SEQ ID NO: 225255 - DNA, 201 bp, Homo sapiens
gagtaaggctttggttcagttgctctgtacctgtgtggcattcacctgtggcttatgggggacttttgacagatgtgagagaaagctttttttttttttttgagacagagccttgctctgtcacctgggctggagtgcgatggtgtgatctcggcttgctgcaacctccacctcctgggttcaagtgattctcctgcctca

SEQ ID NO: 225256 - DNA, 201 bp, Homo sapiens
cggaccccggtttactcctttgctgcgagcccttctctcccgtccagagttgctccgagcctatctgctcagtcctagcgattcctgtggggcttgggacgcgcggttcaagcaccccggaccatatggatgcagcacccatgggttctcgctccaatgcttctttcctccttggggcgtaactcagaccctgggcacccc

SEQ ID NO: 225257 - DNA, 201 bp, Homo sapiens
gactacaggagcgagcctctacttggctttttttttttagagactaggtttcaccatgttgctgaggctggtcttgaacttgtggcatcgagtgatctgcycatctcggcctcctaaagtgttgggattacaggcgtgagccaccacgcctggtctaaatttttttttagagacaaagcctcattctgttgcccaggcttg

SEQ ID NO: 225258 - DNA, 201 bp, Homo sapiens
ggtttcaccatgttgctgaggctggtcttgaacttgtggcatcgagtgatctgcccatctcggcctcctaaagtgttgggattacaggcgtgagccaccaygcctggtctaaatttttttttagagacaaagcctcattctgttgcccaggcttgagtgtagtggtgcaatcatggtgtactgtagcctcgacctcctggg

SEQ ID NO: 225259 - DNA, 201 bp, Homo sapiens
agtttcaccacgttgtccaggctggtgcagaactcctgggctcaagtgatctacccgccttcacttcccaaagtactggaattacaggcatgagccaccaygcccagctgtggtctggcaatattgaactgactccagaaccagttgggaggataggaatcccagatatcccagtcccaagggattagcaggaggtggggg

SEQ ID NO: 225260 - DNA, 201 bp, Homo sapiens
gagccacacctggggcctcagcaagaggagggccctgggccagcagcctgggcttctagggctcacctcacctctgccagtagcgcccagagggcatattmtgggggctgagtgggtggtgggggtagggagagaccccaaattcccccctctcctaattctcccacccccaacctaggccccatttgaggctcaaggaaa

SEQ ID NO: 225261 - DNA, 201 bp, Homo sapiens
attgtgtagaggggttgggggtgggatcatgggaaattggagtgctaccaggtccatggtttttgctttttttttttttttttttttttttttttttttttaaagaaaataacctgaaaacacttctgacttttccactgtctctttatatgtgctgataggcaaatgtgcatgcacaccaaacataagcatgtttgtgag

SEQ ID NO: 225262 - DNA, 201 bp, Homo sapiens
tattgtgtagaggggttgggggtgggatcatgggaaattggagtgctaccaggtccatggtttttgctttttttttttttttttttttttttttttttttttaaagaaaataacctgaaaacacttctgacttttccactgtctctttatatgtgctgataggcaaatgtgcatgcacaccaaacataagcatgtttgtga

SEQ ID NO: 225263 - DNA, 201 bp, Homo sapiens
ctattgtgtagaggggttgggggtgggatcatgggaaattggagtgctaccaggtccatggtttttgctttttttttttttttttttttttttttttttttttaaagaaaataacctgaaaacacttctgacttttccactgtctctttatatgtgctgataggcaaatgtgcatgcacaccaaacataagcatgtttgtg

SEQ ID NO: 225264 - DNA, 201 bp, Homo sapiens; identical to SEQ ID NO: 42055

SEQ ID NO: 225265 - DNA, 201 bp, Homo sapiens; identical to SEQ ID NO: 42056

SEQ ID NO: 225266 - DNA, 201 bp, Homo sapiens
tctattgtgtagaggggttgggggtgggatcatgggaaattggagtgctaccaggtccatggtttttgctttttttttttttttttttttttttttttttttttaaagaaaataacctgaaaacacttctgacttttccactgtctctttatatgtgctgataggcaaatgtgcatgcacaccaaacataagcatgtttgt

SEQ ID NO: 225267 - DNA, 201 bp, Homo sapiens
ggaagattgagatggggactaaggatacacatggtcccaagggagttactcctactgagagtcttcaataaagggagaataaagtgagagggggccacctsagttcactgcactggaggtttgggggctccaaggagagaggtgatggttttgtaccacataactcctgggggtgccattcacacagtgtaatataactga

SEQ ID NO: 225268 - DNA, 201 bp, Homo sapiens; identical to SEQ ID NO: 42057

SEQ ID NO: 225269 - DNA, 201 bp, Homo sapiens
gacctgacattgtaaagctaggtttggcttctgatttccacagggggtttgagaatgggacgagggtgctttagagggaccggtaggctttccctgaggasggtaatcagggcatgatggttggctcagtggttatttcctgggcaggggtgactgttctttcagctcccagcactggagcgctcggcccctgccgcactg

SEQ ID NO: 225270 - DNA, 201 bp, Homo sapiens
tccgtaaccgaaccctgagccgcctgcgcggatcggcgtccgcagcgggcggctgctgaggtgagggccgggccagaggagaggcatacccactggggcgyaggtctgggactccccctgtccgccctggcgcgacctcaggactctccgtgtcccctccgtgacccccgcggcccgggccgctctttgcatcttgtcttg

SEQ ID NO: 225271 - DNA, 201 bp, Homo sapiens
aaaataggacgtgtgctagagaaggagagggtgagaaaagtcagggaaccaacttggacagaatggtcagggacagcctctcagaggagataacctcaagrcagagtcctagaagagcctttagagaggagataagaacttctagtcagagctttggtctaaatgcagcaggaagtcactgcagtgttccaaccaggaaaa

SEQ ID NO: 225272 - DNA, 201 bp, Homo sapiens
ctgggtctccccttattgccattgccaggggagggtcgtctagtccttaagcataaacactggctgtcttcctactggtgtccccgccccctctgtatccsccaccccaacactttgccagacagttctttatgatgaacaaactttggctttagagctttaccacttacccatggctccctccttactgggcaggtggtg

SEQ ID NO: 225273 - DNA, 201 bp, Homo sapiens
aacctaatcattagtcacttcttttaagcactggtctgcaattgacctttaatggtacaactcccaaagctttgaaaggtgtcagccttgctttgttttaratttaaataaaattatctatatatgtatgccataaagtcaacctgatttccaaaagtctaaagctatttcttgatccaacaaaccagctctacatgctaa

SEQ ID NO: 225274 - DNA, 201 bp, Homo sapiens
agacctgttacaaggggttggaatgaagaaagtgccttgtagagtaggctgctgcctcctggtggccagccgctgccttgcagggatcctgccaagggacytcacttggcactgttggaagcagcctgaggtgaagctgggcaggctgatgtcatggcctgcagccccagtcaccagcggactctcctcccacaaaagagg

SEQ ID NO: 225275 - DNA, 201 bp, Homo sapiens; identical to SEQ ID NO: 42060

SEQ ID NO: 225276 - DNA, 201 bp, Homo sapiens
ttacatctatcgccttgtggctgattacactctagaaaagaagatctatgaccgtcagatttccaagcagggcatgtcaggtgggccatcttccagacttyggagaggcacatctatacaggctaccatccttttagtatcaagggtgggagaggagcaggatatgggaacacaggcaggcttcgagaaagccagcatttc

SEQ ID NO: 225277 - DNA, 201 bp, Homo sapiens
aaagctaggtttggcttctgatttccacagggggtttgagaatgggacgagggtgctttagagggaccggtaggctttccctgaggagggtaatcagggcwtgatggttggctcagtggttatttcctgggcaggggtgactgttctttcagctcccagcactggagcgctcggcccctgccgcactggatgccagcagtt

SEQ ID NO: 225278 - DNA, 201 bp, Homo sapiens; identical to SEQ ID NO: 42059

SEQ ID NO: 225279 - DNA, 201 bp, Homo sapiens
caacccctcaccttctgtgatgtttgacagctgaccctctccccatcatacaggaagggtagcagatccactttctcccagtctggattcctgcacacagygagcctgagccatgtgttcctccttgccaccccagcctgcattcagtgcctctgatccagggagatgaacccaggggttgctcctggacagggcagatga

SEQ ID NO: 225280 - DNA, 201 bp, Homo sapiens; identical to SEQ ID NO: 42058

SEQ ID NO: 225281 - DNA, 201 bp, Homo sapiens
ctccacttaaaaaaaaaaataacgacaacttgaaatattactctgagtttgaaaataatatagaatccctgtaaccctagtttcttttcttttcttaattwatttatttattttttttgagataaagtctctctctgttgcccaggctggagtgcagtggcgtgatcttggctcactgtacccccacctcccgtgttctag

SEQ ID NO: 225282 - DNA, 201 bp, Homo sapiens
ttcctgggttcaagcagttctcctcccctagctacccaagtagctgggattataggtgcacaccaccacgcgtggctaattttttgtatttttagtagagmctgtgtttcaccatgttggccaggctggtcttgaattcctgaccacaggtgatccacctgcctcggcctcccaaggtgctgagattacagacataagcca

SEQ ID NO: 225283 - DNA, 201 bp, Homo sapiens
ctggtccaattcttgttctgggcagaggtacccagagaaatagctgatctggggaggaagaggagcaggcaggtagggctgggaggcccaggcctatgtcctagggttcggcccaaatacagatactcattgagccaaggtggatggggtctcttgcccatcaggacatcccaaccttctgggcacttgacagccttagta

SEQ ID NO: 225284 - DNA, 201 bp, Homo sapiens
atggcacgagaactacatgacacatgcataagcttcagtagccaattcaatcaagcagaagaaagtgtatcagtgattgaagatcaaatgaatgaaatgcsgtgagaaaagtttagagaaaaaagagtaaaaagaaacgaacaaaggctccaagaaatatgggactatgtgaaaagaccaaatctacgtttgattggtgta

SEQ ID NO: 225285 - DNA, 201 bp, Homo sapiens
ggcattctgtgtgtgttgcaaggtgcattggggcctcagggaagattgagatggggactaaggatacacatggtcccaagggagttactcctactgagagycttcaataaagggagaataaagtgagagggggccacctcagttcactgcactggaggtttgggggctccaaggagagaggtgatggttttgtaccacata

SEQ ID NO: 225286 - DNA, 201 bp, Homo sapiens
ccctgcctttggttgagagtgctgggctgggaagaagaataaatacatatgacttgagctagacgggtcataggaatcatcccattaggatgtcacattcyggaactgaatgagaaaatagcatttgtaggagcttaggggagttgggttgagcccatagggtattagtcagtggtttaaaagaaggaaattagggtccct

SEQ ID NO: 225287 - DNA, 201 bp, Homo sapiens
aagctgcagtgagctgtgattgagccactgcaatccagcctaagcgacagagtgagaccctgtctcatttaaaaacaaacaaacaaatgaacaacaacaamaaaatacccaagagttttaattagcttttctctcaggagtgttatgaggcttagatgatgtgatgaatatgaaagtgctttaaaaagtagaaagtgcaag

SEQ ID NO: 225288 - DNA, 201 bp, Homo sapiens
gacgtcctcttccgccacacgccagccaaaacagtccttgccattgtgccggtaagagtttttgggaaggcaccacttaagtcactcctgaagagctctgwgttaatgcctttactgggcaccaaaaagcttgatgagctcagctctgagtttgttccataaaactctctttttggacttggctttctaataggttaatac

SEQ ID NO: 225289 - DNA, 201 bp, Homo sapiens
tttgacactaccgattcatgcattacatggggtgttacactgtactagtgaatccttttctgttttttccaagaggactgtcaccagcaaatagatcagtcaaggtacagggaatcttctatggccatccacacctgctatctattataacgccttctcacttacttaattcttactaattacaaagtgagtaaaaactgg

SEQ ID NO: 225290 - DNA, 201 bp, Homo sapiens
ttatcagcaggacagcaaaatccttgagtatgttgtacttagggcttaggacagagtaatattggggtagaagtcacagagggcaaaactgatttgaaaaycttttttaagactaaaggctctgtgattgttggcttgtcttttaaagggccggatgcttgggtgtgaatctgattggtgccaaccgagtggtggtgtttg

SEQ ID NO: 225291 - DNA, 201 bp, Homo sapiens; identical to SEQ ID NO: 42052

SEQ ID NO: 225292 - DNA, 201 bp, Homo sapiens
ctgctccaggcctcttgctaagccttctcctcactgccctttaggctcccagggccagaggagccagggactattttctgcaccagcccccagggctgccrcccctgttgtgtctttttttcagactcacagtggagcttccaggacccagaataaagccaatgatttacttgtttcacctggatttgggttgtgtatttg

SEQ ID NO: 225293 - DNA, 201 bp, Homo sapiens
gaacggaacgggggaaagggatatttattgcaagagtcaactgccagaggcagatcatgaggtcaggagttcgagaccagcctggccaacatggtgaaacmccatctctactaaaaatacaaaaaattagccaggcatggtggcgcatgcctctaatcccagctacttgggaggctgaggcaggagaatcgcttgaacccg

SEQ ID NO: 225294 - DNA, 201 bp, Homo sapiens
aggagggaaaaggaagaggacaaaggagggtggttggccaaagtggcagagctctgttgctgtttaacaaaagaggcaaaaaaaaaaaaaaaaaaaaaaaagtccaacacagcagcaatagcgggaaatcagggacccaaaacagggatggaggggcagtgcagcctcttttccttcctgccttgcttatgctgtctgctt

SEQ ID NO: 225295 - DNA, 201 bp, Homo sapiens
cagaccagctccaacagcagagtggtataaaagtgttattttatgtgccaatcttcagtcagatgaggaagaacataacagtcttaagggtttttttttttccccctccaggcccaaagacgaaagatgcagacttcagaaagcttgtagacagggacttttcaaaaatcttaaatcagtagaagcctggcttttgtacac

SEQ ID NO: 225296 - DNA, 201 bp, Homo sapiens
gttttccgtcttctttcctcaggacgcccctgaggcctgggacctgtgcctggcttcgaggagcatctgtggctgggtgatccagctgctggtgtgatcakgggcttccctcctctcagcagggcaggcgctcctgccccagagactgggcaactggctgtttctatgacgtatttatttttacttgtgtttcatgtcact

SEQ ID NO: 225297 - DNA, 201 bp, Homo sapiens
ccgccgccgcgcacgtgagcggcaccaggaagctggctgggcgcagccttccctgaggctcgctggcaccggccgcacgcgtccatcccgggcctctgagyggagggggaaccgaggctagagggagggcgcagtctgcccaaggtcagcggcagcggcagtttctgggcgccaagtgtgattggagtactccaggaagag

SEQ ID NO: 225298 - DNA, 201 bp, Homo sapiens
gcacgtgagcggcaccaggaagctggctgggcgcagccttccctgaggctcgctggcaccggccgcacgcgtccatcccgggcctctgagcggagggggarccgaggctagagggagggcgcagtctgcccaaggtcagcggcagcggcagtttctgggcgccaagtgtgattggagtactccaggaagaggggcgtgacc

SEQ ID NO: 225299 - DNA, 201 bp, Homo sapiens
ttccctgtcgttagtaagtgtttggaccctagcatttgccagtcctccctctggcagtcgtccctgaggcttggggaggctgggctggtggcgtggctcarctgtggggaggaagaggtaatgtggaggaaaggcaggctggctggtatctggtacatcttcggggagacttgtcagggcccggagtatgtctctggctga

SEQ ID NO: 225300 - DNA, 201 bp, Homo sapiens
atacctgagtcttataacaatgaacttcttgagcaggcagtgtccaacttctttgctcttcagggacctgagtgtgcacctttcccttttgcaggtctatktgacatagtaatctagtgtgttggggaggggtagccaagcaggctgcagtgtctgcaatgcagagggcttggggaggtttgggtactctctgctgccact

SEQ ID NO: 225301 - DNA, 201 bp, Homo sapiens
ggcaaggtctggctctatcgcccaggctggagtggtgcagtggcaagatctcggctcactgtaacctttccctcccaggcttaagctgtcctcccacctcrgcctcctgagtagctgtgacaagaggcgtgtaccaccatgcttggctagtttttgtattttttatagagatggtgtttcgccatattgcccaggctggcc

SEQ ID NO: 225302 - DNA, 201 bp, Homo sapiens
taatgatggttagttttcataaaccttcttctttctctccctccctttctattatttgagtcattcgtaagtcgaagatatatgtcatgtttttcatcatstcattttatctctaagtacttcaacatgcatctgctaagattaaagatattctgttcctagccacaatatcattattacactaaaaaaagctaacgattc

SEQ ID NO: 225303 - DNA, 201 bp, Homo sapiens
ggctcaaggaaagccccaggctgagtccaggcgccaagcagaccccagctgcacctggcttggctccaacaccatggagacagtggctggggaagctggcyaacccctcaccttctgtgatgtttgacagctgaccctctccccatcatacaggaagggtagcagatccactttctcccagtctggattcctgcacacagc

SEQ ID NO: 225304 - DNA, 201 bp, Homo sapiens
atgtggaggaaaggcaggctggctggtatctggtacatcttcggggagacttgtcagggcccggagtatgtctctggctgaatcactcctgtgcccctctrtgactcagtttccccaggtgtgaccagggctgccagctgacagtttgagctgctctgagatcctcaccaactgcgattaagaaataaagaggcttgtggc

SEQ ID NO: 225305 - DNA, 201 bp, Homo sapiens
tgcttgctggctgtgcagctgcctgggtatccagcctggcacagaaggatagataggactgggtagctcagggtgaacagtaaggcaaggcccagggcccctcagccagacctcatcccttgctgggcctagagcttatgtaggagatgtgacccgtccttggcccacacattgcctccttcttttgggcatttgcagcca

SEQ ID NO: 225306 - DNA, 201 bp, Homo sapiens
gcaacagctgcttgctggctgtgcagctgcctgggtatccagcctggcacagaaggatagataggactgggtagctcagggtgaacagtaaggcaaggcccagggcccctcagccagacctcatcccttgctgggcctagagcttatgtaggagatgtgacccgtccttggcccacacattgcctccttcttttgggcatt

SEQ ID NO: 225307 - DNA, 201 bp, Homo sapiens
ggcactggaacctgctccttagcctctctggctttaccccacctccctcccttcccccaggaatgaaagcacaaagccagcctttgctagggcggcgtgggagccaccactctcaaaataccagctcggatattgtagcttggcagccctgcaggaccctgggggctgaagcttgtctggatggtgctgtggggttgggct

SEQ ID NO: 225308 - DNA, 201 bp, Homo sapiens
caggggcagccctgactagacagtgagtggctggggattgggcacaatgccttcagagggtgggagacagtgtgtctgtgagtggctggtggcagcgaaarcattcttattgcatgtgtattctctgtcatccatgttggggaatctagccactggcccacagagttaaacagagctttggagtgtgagaggtgggggaaa

SEQ ID NO: 225309 - DNA, 201 bp, Homo sapiens
aggccaaaagcctacagcacccggtattccaggcagtctcccatccaagtactaactagacccgaccttgcttagcttctgagatcagacaagatcaggtrcattcagggtggtatgactgtagaccctttatttcatacttgggcaaattgagggccagagggaagctaccgatttgtgtagccaagccaatgccctagg

SEQ ID NO: 225310 - DNA, 201 bp, Homo sapiens
actgggatgatattcagaagagagaggacctcatactgtgactggacccaggaccctccctggaagagagctcagcccagctgtgtgtgtgtgtgtgtgtkagtgtgtgtgtgtgtgtttgtgtgctgtgctcatgtgcacctgggtgtaaaatgactgttatctggttgtgttactcagggtgggctggggactcaccag

SEQ ID NO: 225311 - DNA, 201 bp, Homo sapiens; identical to SEQ ID NO: 42100

SEQ ID NO: 225312 - DNA, 201 bp, Homo sapiens
aaagcctctgaaatactttccagataggaaaacagtttgctttgtttctgtttttgtcatttaaaagatatactttcaaatctgtatccaaatttgttacrtaagtcaataattgtaaatttcactgcaatcatatgtttcctaaaagagttgccttgaacttatggaactgaaccccattttgctaatcacttactcctt

SEQ ID NO: 225313 - DNA, 201 bp, Homo sapiens
actaactctcaggcacattagtcagaaaatactacctatggttactcccccaggttcctaaaagtaaagctttagaggccaccaaattggcaattgaagcyggcttccgccatattgattctgctcatttatacaataatgaggagcaggttggactggccatccgaagcaagattgcagatggcagtgtgaagagagaag

SEQ ID NO: 225314 - DNA, 201 bp, Homo sapiens
aactctcaggcacattagtcagaaaatactacctatggttactcccccaggttcctaaaagtaaagctttagaggccaccaaattggcaattgaagctggsttccgccatattgattctgctcatttatacaataatgaggagcaggttggactggccatccgaagcaagattgcagatggcagtgtgaagagagaagaca

SEQ ID NO: 225315 - DNA, 201 bp, Homo sapiens; identical to SEQ ID NO: 42104

SEQ ID NO: 225316 - DNA, 201 bp, Homo sapiens
tcaggcacattagtcagaaaatactacctatggttactcccccaggttcctaaaagtaaagctttagaggccaccaaattggcaattgaagctggcttccrccatattgattctgctcatttatacaataatgaggagcaggttggactggccatccgaagcaagattgcagatggcagtgtgaagagagaagacatattc

SEQ ID NO: 225317 - DNA, 201 bp, Homo sapiens
gaaaatactacctatggttactcccccaggttcctaaaagtaaagctttagaggccaccaaattggcaattgaagctggcttccgccatattgattctgcwcatttatacaataatgaggagcaggttggactggccatccgaagcaagattgcagatggcagtgtgaagagagaagacatattctacacttcaaaggtac

SEQ ID NO: 225318 - DNA, 201 bp, Homo sapiens; identical to SEQ ID NO: 42107

SEQ ID NO: 225319 - DNA, 201 bp, Homo sapiens
tatcttgatcttccacacctcacaattcctttttcccaggccgtggagaagtgtaaagatgcaggattggccaagtccatcggggtgtccaacttcaaccrcaggcagctggagatgatcctcaacaagccagggctcaagtacaagcctgtctgcaaccaggtgagcaccctcagcctcctctcctttctgttcttcatg

SEQ ID NO: 225320 - DNA, 201 bp, Homo sapiens
gttttgtcttctgtttatgtttatttcacagcttgtcagagtctataaaactcagcagaaagaacacggcttgcctgctccctctcttgaagattgattgyaatgggagtggtttctctgtttctttgtatagtcgaacagatatttacttcttccaagaagatacaattcagaggaatttttatggcaaaagttagtgga

SEQ ID NO: 225321 - DNA, 201 bp, Homo sapiens; identical to SEQ ID NO: 42108

SEQ ID NO: 225322 - DNA, 201 bp, Homo sapiens
gatcttccacacctcacaattcctttttcccaggccgtggagaagtgtaaagatgcaggattggccaagtccatcggggtgtccaacttcaaccgcaggcwgctggagatgatcctcaacaagccagggctcaagtacaagcctgtctgcaaccaggtgagcaccctcagcctcctctcctttctgttcttcatgcccctc

SEQ ID NO: 225323 - DNA, 201 bp, Homo sapiens
taaagaataacgcctacattatctcaaattgtgtccagcccaagttgacatattaaaaactctgtttgcttcctcagtttctaaaccacaaagatacttartcttgcccattgggctgaatagatgaaataattacactactaacatgagttgtaaaacttaccaaagataattcagataatgggtatgcttatgatttga

SEQ ID NO: 225324 - DNA, 201 bp, Homo sapiens; identical to SEQ ID NO: 42110

SEQ ID NO: 225325 - DNA, 201 bp, Homo sapiens
agcccaagttgacatattaaaaactctgtttgcttcctcagtttctaaaccacaaagatacttaatcttgcccattgggctgaatagatgaaataattacmctactaacatgagttgtaaaacttaccaaagataattcagataatgggtatgcttatgatttgataacaacttttaccttttgagtaatttcactctttc

SEQ ID NO: 225326 - DNA, 201 bp, Homo sapiens
gggaggtcaattcaatcaaggaggccaaggattgtcaattagactcagggaaaggtggacttacccctaagctatgaaagatgaccagagaatggatgggygaaggtgatttggagggaactgtgcatagatatgaagccgtgaagagatggaatgaacagtacataaggagagagtgagagcaagagaagagaaatacta

SEQ ID NO: 225327 - DNA, 201 bp, Homo sapiens; identical to SEQ ID NO: 42113

SEQ ID NO: 225328 - DNA, 201 bp, Homo sapiens
gcctgaactaactctcaggcacattagtcagaaaatactacctatggttactcccccaggttcctaaaagtaaagctttagaggccaccaaattggcaatwgaagctggcttccgccatattgattctgctcatttatacaataatgaggagcaggttggactggccatccgaagcaagattgcagatggcagtgtgaaga

SEQ ID NO: 225329 - DNA, 201 bp, Homo sapiens
caacttcctttctctaacctctgcagctttggtgcaattcccatcgaccagagttggtccgaccagccttggaaaggtcactgaaaaatcttcaattggaytatgttgacctctaccttattcattttccagtgtctgtaaaggtaggcagcttgtgtgatcaaattaatttcacttttgttctcagcataaatattgttt

SEQ ID NO: 225330 - DNA, 201 bp, Homo sapiens
ctctgctttcacacttcttgaccaagggcatagatacactaaaaattatctgcagacaatgaaggtcatccatggtagaaagagaaaataacctgtttatgggagatatctgttcacagtggatgaaatccacactgaggaaggttcagcagaacatggagctgacctatgactgcccccgctcctagttggctgctcttc

SEQ ID NO: 225331 - DNA, 201 bp, Homo sapiens; identical to SEQ ID NO: 42116

SEQ ID NO: 225332 - DNA, 201 bp, Homo sapiens; identical to SEQ ID NO: 42115

SEQ ID NO: 225333 - DNA, 201 bp, Homo sapiens
aacctctgcagctttggtgcaattcccatcgaccagagttggtccgaccagccttggaaaggtcactgaaaaatcttcaattggattatgttgacctctaycttattcattttccagtgtctgtaaaggtaggcagcttgtgtgatcaaattaatttcacttttgttctcagcataaatattgtttttatggatatttgaa

SEQ ID NO: 225334 - DNA, 201 bp, Homo sapiens; identical to SEQ ID NO: 42118

SEQ ID NO: 225335 - DNA, 201 bp, Homo sapiens; identical to SEQ ID NO: 42117

SEQ ID NO: 225336 - DNA, 201 bp, Homo sapiens
cctcttggtgtctctgctttcacacttcttgaccaagggcatagatacactaaaaattatctgcagacaatgaaggtcatccatggtagaaagagaaaatracctgtttatgggagatatctgttcacagtggatgaaatccacactgaggaaggttcagcagaacatggagctgacctatgactgcccccgctcctagtt

SEQ ID NO: 225337 - DNA, 201 bp, Homo sapiens
gggattcacatgggcttcggatgtctcagtgcctcttggtgtctctgctttcacacttcttgaccaagggcatagatacactaaaaattatctgcagacartgaaggtcatccatggtagaaagagaaaataacctgtttatgggagatatctgttcacagtggatgaaatccacactgaggaaggttcagcagaacatgg

SEQ ID NO: 225338 - DNA, 201 bp, Homo sapiens; identical to SEQ ID NO: 42119

SEQ ID NO: 225339 - DNA, 201 bp, Homo sapiens; identical to SEQ ID NO: 42120

SEQ ID NO: 225340 - DNA, 201 bp, Homo sapiens; identical to SEQ ID NO: 42122

SEQ ID NO: 225341 - DNA, 201 bp, Homo sapiens; identical to SEQ ID NO: 42121

SEQ ID NO: 225342 - DNA, 201 bp, Homo sapiens; identical to SEQ ID NO: 42123

SEQ ID NO: 225343 - DNA, 201 bp, Homo sapiens; identical to SEQ ID NO: 42124

SEQ ID NO: 225344 - DNA, 201 bp, Homo sapiens; identical to SEQ ID NO: 42125

SEQ ID NO: 225345 - DNA, 201 bp, Homo sapiens; identical to SEQ ID NO: 42126

SEQ ID NO: 225346 - DNA, 201 bp, Homo sapiens
actgcccctgcagggaggagagtcccctgtgccctgaggtttggacctggtgtggagaattaggagactaggtagaggaacgagaattgtggaagggaggmaggggtggccgagtactgggagaggactgataggggcatggctggggccgtggcacagaggtgtgggaggggacactgaagcttcaagagagccaggaat

SEQ ID NO: 225347 - DNA, 201 bp, Homo sapiens
ggaagagggcagaagtatgcaaccctgcagggccccacaggagtgccggcgagtgtctggcaggcttctggggacctggtcagagtaaatcggggtcaagmattagaatgccaaaaagaacagggtatttttctttctaaagacagaattgggtcctgtgttgatccctgccctgaggtcttgtttggcccctctgggcag

SEQ ID NO: 225348 - DNA, 201 bp, Homo sapiens
agaagtatgcaaccctgcagggccccacaggagtgccggcgagtgtctggcaggcttctggggacctggtcagagtaaatcggggtcaagcattagaatgycaaaaagaacagggtatttttctttctaaagacagaattgggtcctgtgttgatccctgccctgaggtcttgtttggcccctctgggcaggccctgaaac

SEQ ID NO: 225349 - DNA, 201 bp, Homo sapiens
tgccaggccacctacgagggcgagtggtgcaggggccggccccacggcaagtgagtggctggagctctgggtggcaaggtgggactccctgggggtctgcrgggcagagagcagcacacaaacctaattgtctcaggacatgttccaggagcggttactctctgtggacagtcaattctcagagtccctcttaagtcctct

SEQ ID NO: 225350 - DNA, 201 bp, Homo sapiens
gagtggtgcaggggccggccccacggcaagtgagtggctggagctctgggtggcaaggtgggactccctgggggtctgcagggcagagagcagcacacaarcctaattgtctcaggacatgttccaggagcggttactctctgtggacagtcaattctcagagtccctcttaagtcctcttggactgggcctggcccagag

SEQ ID NO: 225351 - DNA, 201 bp, Homo sapiens
gtagaaaagggctaaaggggctttctgcaaggaatgttcggagctcagacaagagggctgggtgggtgcagggagcccagtccaagggaagaggaagggarggcgtctgagaaagtaggtggctgaggttgctgaggggtgggtaggcctgaggctcgtgaacctccactgtgttccaggggaaccctgaaatggccggat

SEQ ID NO: 225352 - DNA, 201 bp, Homo sapiens
aagtaggtggctgaggttgctgaggggtgggtaggcctgaggctcgtgaacctccactgtgttccaggggaaccctgaaatggccggatgggcggaatcaygtggggaatttctgccagggcctggagcatgggtaaggctggctggggctactgctgggaggcgtgcagtgggctgaagggtgctttcctcccctgctgt

SEQ ID NO: 225353 - DNA, 201 bp, Homo sapiens
gagtggctggagctctgggtggcaaggtgggactccctgggggtctgcagggcagagagcagcacacaaacctaattgtctcaggacatgttccaggagcrgttactctctgtggacagtcaattctcagagtccctcttaagtcctcttggactgggcctggcccagagacagtctgtgccaaataaagtcttgatggtg

SEQ ID NO: 225354 - DNA, 201 bp, Homo sapiens
ctctgccccttgtcgaggcagagcctcctgtctcactttttcaatttcaggcacttgtggcccctcaaggacctcacgctgacgagcaatcaggtgagagsgaggccagagccccaagccaggggcccccagaggtcctgcaggctttgaggagccctttgcctcatgattgctgggcggaggctgcagaggagctgggga

SEQ ID NO: 225355 - DNA, 201 bp, Homo sapiens
ccagtggccagtgcctgttatgattattatcttcttatccgtttggatcctcccaacctcatggagactattcaccccgttttatggttgcacaaactgargcccacagtggagctgtgacttgccctgggtcactcagccctcagggtggggctgcactaaagctggcagtgaagggaagggtggcgggggactcaggcc

SEQ ID NO: 225356 - DNA, 201 bp, Homo sapiens
gctgctctttgatgatgccctcgtcctgctgcaggttggggtggggctgacccaaggtcttgaggccacagtagggttctggggtctggctggaaaaggakcagtaaaggggcatgctgctgggactgagaaagtgggctgggagggatggtcagggatagaaaggcgttgtgttggggaggggcggtccactggagctgt

SEQ ID NO: 225357 - DNA, 201 bp, Homo sapiens
accatgctgtcagcttcggcatccgcctgctgccccaggcctctgaggacaagttcgactgttacaagtgtcactggcgagaaggcagcatgtgtggctayggcatctgtgagtaagtgaccctggctggggggttcatgggctgggcccatcctctgggctgagctccatgaggcagagctcgttgttgatggccctccc

SEQ ID NO: 225358 - DNA, 201 bp, Homo sapiens
cttcgacgtgcagagctccagggagctgcgtaggtctcaggattacctgtcctgcgagaggtgaggccggctgtgtgagcatgcacaggttagggtgggcyggggagggcttcctggggggagggggctgggccgaggtgtgggtgagggatgctgtgtgtggtgcccaggacccaccctgaggacagtgtgggcagtatg

SEQ ID NO: 225359 - DNA, 201 bp, Homo sapiens
ggcctgtggatcccttgtcctcagaggacctcagtgttctcgtgtatgagatgggagaagtgttgggaggctggcgtgggcatgctgtgctccagaccccrgtgcttagtctctctctgttgcctatgcactggcccaggctctgagcaactcactgcaccccctgggaaagctgctccggacactgatgctgaccttcca

SEQ ID NO: 225360 - DNA, 201 bp, Homo sapiens
atcaggggctgtgtggatataatgcggtacaccacaaaactggagagaaatattatttgtaggctttgcttaggtcctgcttttttttttttttttgtctygaaaggatacaatacggtttacaaaccaaacatacaggaaaaaaaaaatagaaaataagagcatatgttaaccttaaaagaaagggatatgtagacatgt

SEQ ID NO: 225361 - DNA, 201 bp, Homo sapiens
ttgggatcaggggctgtgtggatataatgcggtacaccacaaaactggagagaaatattatttgtaggctttgcttaggtcctgcttttttttttttttttgtcttgaaaggatacaatacggtttacaaaccaaacatacaggaaaaaaaaaatagaaaataagagcatatgttaaccttaaaagaaagggatatgtaga

SEQ ID NO: 225362 - DNA, 201 bp, Homo sapiens
tccaggtagaaggaacagtatgagcaaaagttcacagtgaggagaggttggggcaagctcatgaaggtgtgattgtggagtggccctgatggcgtagtagtggtctgtgaggtcttaaatgttaggctcagcagtgtctcaacccccaggcagtaggagccatagagaggtttccagcaggggttgaccaggtcccagctt

SEQ ID NO: 225363 - DNA, 201 bp, Homo sapiens
ttccaggtagaaggaacagtatgagcaaaagttcacagtgaggagaggttggggcaagctcatgaaggtgtgattgtggagtggccctgatggcgtagtagtggtctgtgaggtcttaaatgttaggctcagcagtgtctcaacccccaggcagtaggagccatagagaggtttccagcaggggttgaccaggtcccagct

SEQ ID NO: 225364 - DNA, 201 bp, Homo sapiens
tccccaatggcttcaccctggagggctcgttcggcagtggggcagggagaggactgcacacacagggtgtgctggacacggctgccctcccaccagacccragcagtacctgcaagaggtgagtgcctggcccctctggctctgggcctatctggggatgtgtctgtgtttccatcccaaagactcaggtctcctcagagg

SEQ ID NO: 225365 - DNA, 201 bp, Homo sapiens
attccaggtagaaggaacagtatgagcaaaagttcacagtgaggagaggttggggcaagctcatgaaggtgtgattgtggagtggccctgatggcgtagtagtggtctgtgaggtcttaaatgttaggctcagcagtgtctcaacccccaggcagtaggagccatagagaggtttccagcaggggttgaccaggtcccagc

SEQ ID NO: 225366 - DNA, 201 bp, Homo sapiens
acactcctattccccctgtccttcctgccacctccacggagaagcctcccagatgcccttcccaggctgcctccctccctcctccattctctattcctctkgggggtcctgacctctctggcactgtgtctgttgagtggattcaggtgatgtcactgccccttatctgcactccctgccgccccgtgccagcagagtgcc

SEQ ID NO: 225367 - DNA, 201 bp, Homo sapiens
ttgggaacctgcagtccttcatgaagcaggagttggaccaggctgtggccacacaggctctctggcacaccctgagaggccggctgagggtgagttggggkcctgaggggcagttagggagggggttccacattgggcatggagatgttggggggcttgagctgcttgctgtattctctgggcctcagtttccctatatgg

SEQ ID NO: 225368 - DNA, 201 bp, Homo sapiens; identical to SEQ ID NO: 42141

SEQ ID NO: 225369 - DNA, 201 bp, Homo sapiens
gaggcctagtgatgggcataacctgcccaaggtctcagggcaagtgatagggtgagccggcctcaatcacaggtctgtgtgaccccacagacaggcaagcytttatagaccatgtggccccaccccatgccacagctgggaaaacagacccagagagcagaagggactcacaaggctacactctcaagcacctccgctagt

SEQ ID NO: 225370 - DNA, 201 bp, Homo sapiens
ctccagcccctgctcccagccggtgagtctaggctttctagtggggagggaagggcaccgaggaatgatcccagggacaggagacctaccttgttggactygctgagccacagctttctcaacctcaaataggagtggtgacacctggtatcagcatcttctgatgcaggtggtgcgatcttggctcactgcaacctctgc

SEQ ID NO: 225371 - DNA, 201 bp, Homo sapiens
gcttgagctgcttgctgtattctctgggcctcagtttccctatatggaagggggagtgatggctgaagcaggtggctgtaaggtccctctgtccagccatycttatctgtctgctgagcacgtcctgggccaggccctgacccggcctagggaagaggcaatcagcagaaccagtcctctcccctggggatatcaccgatc

SEQ ID NO: 225372 - DNA, 201 bp, Homo sapiens
agggtatttttctttctaaagacagaattgggtcctgtgttgatccctgccctgaggtcttgtttggcccctctgggcaggccctgaaactgcagaggagratctcaggttgggtggagggcccagagagtagcaagaagcagttgaagggtccccaaggtgacaaaatggagtaggaggtggagggtggagggggtggta

SEQ ID NO: 225373 - DNA, 201 bp, Homo sapiens
acaagcacctgcaggagctggcccaggaggaggtgaagcagcatgcccaggaactctgggctgcctacaggtgggctcggtggcaaacgggacagctactrccctgtgacactagtgtgccctttccaggcatcagttctgccttgcatttgggaggaatgccaagtgtctgattcaacaatgaaccagaggcttggtcag

SEQ ID NO: 225374 - DNA, 201 bp, Homo sapiens
acccacctcccctggccctggccaatccctgctctgcctgaccttggtttccccatcagcaactcaggttaagaatacttaccatagactcaatgaactarcaagaatggagcacttgctcatgatgatgcattagctgacattcacagagtcctaacttgacacctggctctgggctaagctcccaccctgatcttgtgg

SEQ ID NO: 225375 - DNA, 201 bp, Homo sapiens
tcacagagtcctaacttgacacctggctctgggctaagctcccaccctgatcttgtgggatcttcccaagagccctgcaggttgatgtcattattatcccyagtgtgtccctagtgaatgacaaatgagaggttcagagggatcagaggacctgctccatgtcaccttcactgagtggcagagctgacactcacaccctgg

SEQ ID NO: 225376 - DNA, 201 bp, Homo sapiens
tctgctgagcctggccgccgagcctgggactcccatgtttgcctcacccatacccttccaggtgcctggggaatgtggggctctggcctgatggctgttcytgttattatggtctgttggtttgtttatgctctacttcattctcgaaaggattgaaggaggccttcaaggaaagaggaagacaaggggaagaataagtac

SEQ ID NO: 225377 - DNA, 201 bp, Homo sapiens
tatggtctgttggtttgtttatgctctacttcattctcgaaaggattgaaggaggccttcaaggaaagaggaagacaaggggaagaataagtacacaaaayagatttggaaataagccgaacactaattgtaaccctttcggctctgagcttcccggcagcccatggggcaagggagcctggtcagctctgccgttcccag

SEQ ID NO: 225378 - DNA, 201 bp, Homo sapiens
cagctctgccgttcccagggccagtgacaagcagggaagcagggatgtttcagagaaagccccacatttcttgagctcccaagggcttcctgaagaagccrctggggtgaggagccagggcggagggtgtcatttggggaaatccagggatggggtcctcggggctggtgcttagcaggccaaaggctagagtcccaatta

SEQ ID NO: 225379 - DNA, 201 bp, Homo sapiens
gattcaggcctccccaccagccgggaccaggactgggctagggaagattccagtaagctctcctctcactggctgccctgtcccccttcagcatcacccarcccgggagctggtggtgaacgcagtcaccctctttgggaacctgcagtccttcatgaagcaggagttggaccaggctgtggccacacaggctctctggca

SEQ ID NO: 225380 - DNA, 201 bp, Homo sapiens
cctagattcaggcctccccaccagccgggaccaggactgggctagggaagattccagtaagctctcctctcactggctgccctgtcccccttcagcatcayccaacccgggagctggtggtgaacgcagtcaccctctttgggaacctgcagtccttcatgaagcaggagttggaccaggctgtggccacacaggctctct

SEQ ID NO: 225381 - DNA, 201 bp, Homo sapiens
tgagcaaaagggttagagggtggggaggtgagagcaaaggcccagctgcagccctcagctagagtccaagacccaaccaggcgctgggctgactctgaccscaggtgcactctcaccccactgtaggctgagcttggccctggactcggaacacacctgcagtcccaggctgggctgtgaccccatgaaacactgcaaata

SEQ ID NO: 225382 - DNA, 201 bp, Homo sapiens
caactgatcattgagcctggctctgagtttcctggcagccaaggtaaagaaggaaacttgctaagtggaatcacagtcattatcaaggagtattccagagraggatagacttcttttcctgtaggaacagagttcctccttggaaaacagttgctcttgttgcgtctgttgaggaagactcagtattgcacagaggaagga

SEQ ID NO: 225383 - DNA, 201 bp, Homo sapiens
tgaaccctgcaggccatgtccacagttctgagaggccacctgcttttgcctttgttgactggtggtagaactccagttctgtggcaaggggcagccacacmatttctctctcattgactcacaggggtctgctgcgagttgccttagagcgcaagggccaggccctggaggaggatgaagacacagagacaaggtgactgg

SEQ ID NO: 225384 - DNA, 201 bp, Homo sapiens
aacctccactgtgttccaggggaaccctgaaatggccggatgggcggaatcatgtggggaatttctgccagggcctggagcatgggtaaggctggctgggkctactgctgggaggcgtgcagtgggctgaagggtgctttcctcccctgctgtggtcaccagcccggccccatcctgaattcccaaacctcaagcaggaac

SEQ ID NO: 225385 - DNA, 201 bp, Homo sapiens
ggagtacagttgactacttggcccgctgtccctgcatgctgcttctccctgacagcaggagctgggagtggacagcaatccctaggggcaggccccagccygggtgtgagtgtgggctgcgtgtagcctacgagcatgacactggagtgcagggctccattagacatgcgcagccaggccccagcctgttggccagggcgg

SEQ ID NO: 225386 - DNA, 201 bp, Homo sapiens
ctggggccgtggcacagaggtgtgggaggggacactgaagcttcaagagagccaggaatgtataatcagtgcatttctgcctatctctgacccagggtccrctccaggtctactggagggggcctctgggaggtgtctggggtacattgggaggtggcagagtggcaggcagcttgcaggacagaggtgcctaagccttgt

SEQ ID NO: 225387 - DNA, 201 bp, Homo sapiens
ggcccgctgtccctgcatgctgcttctccctgacagcaggagctgggagtggacagcaatccctaggggcaggccccagcccgggtgtgagtgtgggctgygtgtagcctacgagcatgacactggagtgcagggctccattagacatgcgcagccaggccccagcctgttggccagggcgggatcaaccacaggaaggaa

SEQ ID NO: 225388 - DNA, 201 bp, Homo sapiens
ccccaccagccgggaccaggactgggctagggaagattccagtaagctctcctctcactggctgccctgtcccccttcagcatcacccaacccgggagctkgtggtgaacgcagtcaccctctttgggaacctgcagtccttcatgaagcaggagttggaccaggctgtggccacacaggctctctggcacaccctgagag

SEQ ID NO: 225389 - DNA, 201 bp, Homo sapiens
ccatcgcaggcagctgggcgtgggtgccttccccgtggaaagccgctggcagggagtctacagccccttccgggactttgtgtgtgctggctgccccagggacctgcaggaggccctgctgggcttcgacgtgcagagctccagggagctgcgtaggtctcaggattacctgtcctgcgagaggtgaggccggctgtgtga

SEQ ID NO: 225390 - DNA, 201 bp, Homo sapiens
gcagaggactgtgtgaccctgtggacttcacattctggatctgagtagtccaggatgaggaggcccagagccaggggggaattcgtgtatgtacttagttmcctgaggctgtcagggttgtccctgtttagtgaggagtgggtgtgtctcctgtttcctcctcgaggatactgcccactgctccagcctgcccttcccctg

SEQ ID NO: 225391 - DNA, 201 bp, Homo sapiens
ggcctgtgcatgttccctgggagatggagcccacgtcctctactcacagtgtgactgtactccttccccagccccagatccctcggatccctggggcagasagtgcctgcggctcttgcaacagctgcacaagagctcccagcaactctgggaggtgacggaggaaagcctgcactcactgcaggagaggctgcgttaccc

SEQ ID NO: 225392 - DNA, 201 bp, Homo sapiens
aggttttgggcctggggctggccctgggatctgaggggattagctggggcagggaggtggcggtgtgggtgcaggaatggaggaaggggtgaaggtggtgygtggccctctctacacgcagcgagtactggcggggccagcggaaggcgctgcggcagctgctttcaggtgtgagctcagagggctcggtgggcgcatcgc

SEQ ID NO: 225393 - DNA, 201 bp, Homo sapiens
acagagattccagcccacacattcttggccttctgcagatcacctttgtagatttcctcgcctatgatgtccttgacctccaccgtatatttgagcccaastgcttggacgccttcccaaatctgaaggacttcatctcccgctttgaggtgatgcccccatcctcctttctctttgatgccccttgttccgttacctcct

SEQ ID NO: 225394 - DNA, 201 bp, Homo sapiens
cacacattcttggccttctgcagatcacctttgtagatttcctcgcctatgatgtccttgacctccaccgtatatttgagcccaactgcttggacgccttyccaaatctgaaggacttcatctcccgctttgaggtgatgcccccatcctcctttctctttgatgccccttgttccgttacctcctttcagatgctttccc

SEQ ID NO: 225395 - DNA, 201 bp, Homo sapiens
agccaggtgcctccctgtgaaacaggagaatgttgtgtagtcagagagtgacaggacctcctgagggatttgggggaggatggggatttgacagaaagagkccagaactggagagagacagaaccagtctacgttgcagctctgtcccccttagtagctatttgagtgtgaggaagttactgaacttctgtttcccacatg

SEQ ID NO: 225396 - DNA, 201 bp, Homo sapiens
catgagaaatggtgataatagattcagccttgcagagtagtcgagtgggttttctaagcttatgttgtaatttctcttgggtacagagcacccagcaccgkgtagaatcttcataagtgttagctgttactgtggtacaacattacttaaaggaagttggaagagttaactccgcaaatctggggaccctaagaggctgtg

SEQ ID NO: 225397 - DNA, 201 bp, Homo sapiens; identical to SEQ ID NO: 42156

SEQ ID NO: 225398 - DNA, 201 bp, Homo sapiens
caggggtcttgccactggctccttgggagggtccccaggaaggagggctgggctttggggaggtttgttttcacttcatcttccccaccacagctcctgaytatgacagaagccagtggctgaatgaaaaattcaagctgggcctggactttcccaatgtaggtgcaggggaaggggcggttttgggggaaagtgcgacgt

SEQ ID NO: 225399 - DNA, 201 bp, Homo sapiens
tgataccactggctttcctgcttctctatcctgcagtcggcagatcatgggacttcttcactccaaaattgtgtgagccaattcccataacagatagatawatttataaataaacacacaaatttcctacagccttatcttagtggtgtcacttcaaattttgaagaaccctgacctagtacacatagcaaaaaacaacaa

SEQ ID NO: 225400 - DNA, 201 bp, Homo sapiens
tcacgcgcacagccgagtccctggggacccagcagaggtccgaagcggagcggggcggggcggggctacggaagctggcgaggccgagcccctcctagtgsttccggaccttgctccctgaacactcggaggtggcggtggatcttactccttccagccagtgaggatccagcaacctgctccgtgcctcccgcgcctgtt

SEQ ID NO: 225401 - DNA, 201 bp, Homo sapiens; identical to SEQ ID NO: 42144

SEQ ID NO: 225402 - DNA, 201 bp, Homo sapiens; identical to SEQ ID NO: 42145

SEQ ID NO: 225403 - DNA, 201 bp, Homo sapiens
aaggatgcctctttctgggcctagatcttcatttatttttatgtattcagtattattcagtgctttccatggttaggcagagctaggtctcagtgagtacrtcttagatgcccagaggtggtggaattcccatcacagagaaccaggatccttctgtcttccacactgactgactccatcacagcttagatctctaggacg

SEQ ID NO: 225404 - DNA, 201 bp, Homo sapiens; identical to SEQ ID NO: 42146

SEQ ID NO: 225405 - DNA, 201 bp, Homo sapiens; identical to SEQ ID NO: 42167

SEQ ID NO: 225406 - DNA, 201 bp, Homo sapiens
ccccctctcagggcttggagaagatctctgcctacatgaagtccagccgcttcctcccaaaacctctgtacacaagggtggctgtctggggcaacaagtartgccttgaaggccaggaggtgggagtgaggagcccatactcagcctgctgcccaggctgtgcagcgcagctggactctgcatcccagcacctgcctcctc

SEQ ID NO: 225407 - DNA, 201 bp, Homo sapiens
atcctgtgctacattgcccgcaagcacaacctgtgtgagtgtggttggctgcagtgtgtggggggaaggtggcatcctccttggctggattggggtgctaygctcagagtgagtctgtgttttgtgggtggcaggtggggagacagaagaggagaagattcgtgtggacattttggagaaccaggctatggacgtctccaa

SEQ ID NO: 225408 - DNA, 201 bp, Homo sapiens; identical to SEQ ID NO: 42148

SEQ ID NO: 225409 - DNA, 201 bp, Homo sapiens; identical to SEQ ID NO: 42149

SEQ ID NO: 225410 - DNA, 201 bp, Homo sapiens; identical to SEQ ID NO: 42150

SEQ ID NO: 225411 - DNA, 201 bp, Homo sapiens
gtcttagatgcccagaggtggtggaattcccatcacagagaaccaggatccttctgtcttccacactgactgactccatcacagcttagatctctaggacscaagctctactgtgagctgcttcaccagaaggttctcccactcagcagttcccaagctgtgttatcacaaatagttgttgattttgtgggttaggaattc

SEQ ID NO: 225412 - DNA, 201 bp, Homo sapiens; identical to SEQ ID NO: 42151

SEQ ID NO: 225413 - DNA, 201 bp, Homo sapiens
gacttcatctcccgctttgaggtgatgcccccatcctcctttctctttgatgccccttgttccgttacctcctttcagatgctttcccagtcctggatctrcataaagaataacttgcatttattgagtgctggcttcatgccaggaaccttgcccagcacattatacctatcgtgtggaatttgaaatttccaacattcc

SEQ ID NO: 225414 - DNA, 201 bp, Homo sapiens; identical to SEQ ID NO: 42152

SEQ ID NO: 225415 - DNA, 201 bp, Homo sapiens
caagaatcctcccacttcagcctcccaaatagctgagactataggtgtgccaccacacctggccacattaaaaaaatttttgtagagatgtgtctctttaygttgcccaggctggtctggaactcctgagctcaagcgatcctcttaccttggcatcccaaattgctgggattgcaggtgtgagccaccatgcctggccct

SEQ ID NO: 225416 - DNA, 201 bp, Homo sapiens
ccttgagttctggccttattttcccccctctcagggcttggagaagatctctgcctacatgaagtccagccgcttcctcccaaaacctctgtacacaaggrtggctgtctggggcaacaagtaatgccttgaaggccaggaggtgggagtgaggagcccatactcagcctgctgcccaggctgtgcagcgcagctggactc

SEQ ID NO: 225417 - DNA, 201 bp, Homo sapiens
aaggacttcatctcccgctttgaggtgatgcccccatcctcctttctctttgatgccccttgttccgttacctcctttcagatgctttcccagtcctggakctgcataaagaataacttgcatttattgagtgctggcttcatgccaggaaccttgcccagcacattatacctatcgtgtggaatttgaaatttccaacat

SEQ ID NO: 225418 - DNA, 201 bp, Homo sapiens
tgtctctttatgttgcccaggctggtctggaactcctgagctcaagcgatcctcttaccttggcatcccaaattgctgggattgcaggtgtgagccaccaygcctggccctgtttccaacttcttgatctcttttctgactgccttagagcaggaagccacataaagtgctctatagaaaggatgcctctttctgggccta

SEQ ID NO: 225419 - DNA, 201 bp, Homo sapiens
gctttattttaaatagccaataactgaaaacaatccaaattccatgaatagaagaatgaacaaataaactgtggtttatcaacataattccatcattcatrtaatggtatatttactctgctataatgaaaataaacatgctaacactatgtgcaaaaacatggatgggtctcacagaagtgttgagtaaaaggatccaga

SEQ ID NO: 225420 - DNA, 201 bp, Homo sapiens
cacaaaactgggaggccgcatctgtgcagggagcttgtgtctgagggtgttgacagctgttttctgcctcaggagaaactgaaaccagaatacctgcaggmactccctgaaatgctgaagctctactcacagtttctggggaagcagccatggtttcttggggacaaggtaatgggggcgtgtgatggggacaccacagat

SEQ ID NO: 225421 - DNA, 201 bp, Homo sapiens
aagggcctacctggcccctcgcctgtggagctcagccctgagctgtccccgtgttgcatgacagcattgactggtttacaggccctgctcctgcagcatgscccctgccttaggcctacctgatcaaaataaagcctcagccacatttgctatagtcttgtcttatttgctcctggctgcccagactgtgtctgtcactgc

SEQ ID NO: 225422 - DNA, 201 bp, Homo sapiens
gccaggcgtggtggcagcgcctgtaatcccagctactcaggaggctgaggcaggagaattgcttgaacccaggaggcagaggttgcagtgagctgagatcrcgccactgcacactccagcctgggcgacagagcaagactccgtctcaaaaagaaaaaaaaaaagcatgcattaaggcctgtgcactgtatgtgtattaca

SEQ ID NO: 225423 - DNA, 201 bp, Homo sapiens
aggccgcatctgtgcagggagcttgtgtctgagggtgttgacagctgttttctgcctcaggagaaactgaaaccagaatacctgcaggcactccctgaaawgctgaagctctactcacagtttctggggaagcagccatggtttcttggggacaaggtaatgggggcgtgtgatggggacaccacagatttgtcatacttc

SEQ ID NO: 225424 - DNA, 201 bp, Homo sapiens
agggcctacctggcccctcgcctgtggagctcagccctgagctgtccccgtgttgcatgacagcattgactggtttacaggccctgctcctgcagcatggyccctgccttaggcctacctgatcaaaataaagcctcagccacatttgctatagtcttgtcttatttgctcctggctgcccagactgtgtctgtcactgcc

SEQ ID NO: 225425 - DNA, 201 bp, Homo sapiens
tttataggtttatagaataccttcaagttttctaccttcaccttttttgtttatagtgtgtgcatgtttctgccaatgaatcacagtctatgaatctaccygtccttgaatctcctgtataaaactctctgtttacccattctctacctgtggcttagtcaactcctggagaaaggttaaagaatgatcttgtggcagtca

SEQ ID NO: 225426 - DNA, 201 bp, Homo sapiens
cgcatctgtgcagggagcttgtgtctgagggtgttgacagctgttttctgcctcaggagaaactgaaaccagaatacctgcaggcactccctgaaatgctraagctctactcacagtttctggggaagcagccatggtttcttggggacaaggtaatgggggcgtgtgatggggacaccacagatttgtcatacttcctat

SEQ ID NO: 225427 - DNA, 201 bp, Homo sapiens
ccggctctagggacggttccctccttagggctatctctcacaggagggcctgtgcatgcctgtgtgtgtgtgtgtgtgtgtgtgtgtgtgtgtgtgtgtgygtgcgccggggtggggggggggtgcagtgcagtgtagactaggggctcacctggtgcagagaaagtcaccaagtcagggaccctccatctctgacacgac

SEQ ID NO: 225428 - DNA, 201 bp, Homo sapiens
aatccacagcaaccagcaccatgcccatgacactggggtactggaacatccgcggggtgagcgagggtccgctgggcggtgggacgggggtgcgtgggggyggggaagtgtggagcagctgcaggacgggctctagggacggttcctcttcagggctgtccctgacagcggggtctgtgcttgccgctgtctgtgcgtgtg

SEQ ID NO: 225429 - DNA, 201 bp, Homo sapiens
cggttccctccttagggctatctctcacaggagggcctgtgcatgcctgtgtgtgtgtgtgtgtgtgtgtgtgtgtgtgtgtgtgtgcgtgcgccggggtggggggggggtgcagtgcagtgtagactaggggctcacctggtgcagagaaagtcaccaagtcagggaccctccatctctgacacgacctgcgggccatct

SEQ ID NO: 225430 - DNA, 201 bp, Homo sapiens
actactcaatgtccattgtattattctgccactgcactaggaggaactttcaacttctttctctgagctcctttagttctttgtatccttgattttgctcrtgtctgggtccagagcctgccaggtactcaggtgctcctgggctgacccagaggagggtggttgggaggtcagtggggacagattcagggatagtgttgc

SEQ ID NO: 225431 - DNA, 201 bp, Homo sapiens
agcaatgcaaatgagaagaagcagaggctattctgggctttctagaacaagggtggcagccatcatcacatgtggctggtgaagactcaaaaggaagtagkggaatagaaaaccctttatagtgttggaaggggagaggagagggaagggaggaggaggattcaggtgtgacctgacttgaggctgttggcacaggaagct

SEQ ID NO: 225432 - DNA, 201 bp, Homo sapiens
ttttagaattcttgctttgtctttgactttgacaattgaactataatgtgcatcagggcttgaatctattcgggaacctttgagtttcctggatctgtatrtacacatctctatccagacttgtgaaattttcagctattagataattaaattaggttttttttttaatacatcttttccttctggaactgccataatatg

SEQ ID NO: 225433 - DNA, 201 bp, Homo sapiens
agagtttcagtagctcagcatatgtttcattttactactctgtatggttttactaaccactagaaatagaaaggattaagaaagaagtaatttgttttatrtcgtgctttctcctttcctgtggagagtgatcatcagcctgaagggttaattgaagggactgaatgagagcttagggcagacaggatttaattgctcaat

SEQ ID NO: 225434 - DNA, 201 bp, Homo sapiens
ctttatatcctgtcctcacagtagctccactgtgcttggccaggtagacgccttgggactgtttctgtgctgtcccagtggcatgtgaggaacacagcaarggatacaacaggtggaaacaaaaggtccaggaagaaggaatagaaataatgaggaaagaatacagttggaaggactggcctcaaataggggagaaacagt

SEQ ID NO: 225435 - DNA, 201 bp, Homo sapiens
atttctaaaggatatatttgctggatatagtatccttgactgacagtttttttccttcagtactttgaatgtagctttctgttctttcctggtctataagkttctgctgaaagtcttctgttagtctaatggggattcccttaaatgtactgtgacacatttctcttgttgtttttagaattcttgctttgtctttgactt

SEQ ID NO: 225436 - DNA, 201 bp, Homo sapiens
ttttttggttaattacaggagaaaaagaagttgattatttaaaagttcataatgggtaagtatacttttatttgtaagaaagaagaattaatagagcaatrataatggagaaatcagaagggaggcaaaaatggagagaagagagtttttctgagccctagaagaagctggtaagaggtgttttattatactttgcatggg

SEQ ID NO: 225437 - DNA, 201 bp, Homo sapiens
tctaattaaacttttaaaatgcagttgcttttctttgctcttgcaacaacatggaagattaagtgatttttgttgcccagtggaattatctatcctcaaamactcaacacaaattaattgctgttggtgaaatacattttaaaatattataaccctattcattttaggaaaattaatactccttgtgagcaaatattttaa

SEQ ID NO: 225438 - DNA, 201 bp, Homo sapiens
acttgcttttacttctaattaaacttttaaaatgcagttgcttttctttgctcttgcaacaacatggaagattaagtgatttttgttgcccagtggaattrtctatcctcaaaaactcaacacaaattaattgctgttggtgaaatacattttaaaatattataaccctattcattttaggaaaattaatactccttgtga

SEQ ID NO: 225439 - DNA, 201 bp, Homo sapiens
agttctgagaaacttcagaaatctgtctacttaccttctttgattagtaccgcttctgggtgtgtgtagggttggattagggtgagttggtggggctgacktatcagaatctttgttttcttttcttaggctttcaaaatttatagcaaagcttataccactttattggttttataggtgttgggtaaggtattagctttt

SEQ ID NO: 225440 - DNA, 201 bp, Homo sapiens
gagagggatgcatttttctaatttggtctgcccagagggggcatcttctcataaaaagaacatctataatatgtactgtagtcctgataaggtctcaaaakgacatgtaggagcttctataacaaagttgtttttctcgaatttgtctgggtttgcctcatcactccccttccgtcagtccataccttttcatatttaggg

SEQ ID NO: 225441 - DNA, 201 bp, Homo sapiens
tgagtctttttatttctaggctagtatctcttgattcttcctgtaacgcttcttactcttccttctctcctgctctctttctctaatgtttttttaaccakttgtaacattttgcaacttcaagcagaagcattctctgtaccgtcaattgtagaaagagaatgataatagttcctacctttattttaatagttaataatt

SEQ ID NO: 225442 - DNA, 201 bp, Homo sapiens
atttcttatagaaagcatatagttggatcatgtttttgttttcttttgttttaaatcaattaagtcagtctatgtctttaagtggggaatttattctgttracattcaaggttattattgataagtcatgacttgcttctgtcgttttgttaactattttctggttattttgcatatcctttgttctttcttctcttatta

SEQ ID NO: 225443 - DNA, 201 bp, Homo sapiens
ttgattcctttatcattatatgatgatcctctttgtctctttttacagttttttcacttaaagtctgttttatctgatacaagtaaagctactcctgctcsctttttatttttatttgcatggagtatctttttctattcctttgctcttaatctgtatgtatccttagtagtgaagtgaatttcttatagaaagcatata

SEQ ID NO: 225444 - DNA, 201 bp, Homo sapiens
cttcaatatcctgatttcctttctttcagatatatacccagcagcaggattgctgggtcacattgtagatatttttagtttttttgaagaacctccatacygttttccataatggctgtactaatttatattcccactatcagtacactagcattcctcttttactgtatcctctccagcatctgttattgtttgtctttt

SEQ ID NO: 225445 - DNA, 201 bp, Homo sapiens
tggtctcaaactcctgggctcaaataatcctccctcagcctcccaaattgctgggattccagatatgagccacttagcccagccaatatttgtctgtgttkggcttatttcacataaaaataatgacctccagttccatgttgctgcaaataggattttattattttttaaaatatattttaggcttaattgtataaaata

SEQ ID NO: 225446 - DNA, 201 bp, Homo sapiens
cctcaaccagcattgttgcagtctttgggctttcaaaggttctgtcacttggcacattgctgtggaagtcaacaaactctggggacccttccagcctctgmtggcagggctgctgtgaactgctgctgtgtgcaggttgtccttgaatggagaaacataggtgaggggcccggaaggggagctcaattccagtctgtgctc

SEQ ID NO: 225447 - DNA, 201 bp, Homo sapiens
ctcttacccaattaattaccaacctaaatatctctcagatttgtcacattttaccatatcttctgttccaattgcagtttaaattatcatcattgctacartagcctcttaattgatacccttgcagccattattgtctccttccaatccattttccacactgtagcttgacagagatttttaaaatgataattgaatctt

SEQ ID NO: 225448 - DNA, 201 bp, Homo sapiens
gtactccaggtagagaagttaacaaatataaaagacttgttgccataataagctcatgatgtatcagaaagaggaaaaaaggccaaagtgactggggtagkgaggttgataattggtgaggaggtagaagtggacaagagtcaattttgaagagtttcatagaccttggctgggagactggaatttctcataagagtaact

SEQ ID NO: 225449 - DNA, 201 bp, Homo sapiens
cccaccctctcctcattcaggtagtaagtttgcatggtagtcatgccttttatttttatcctgctcactattaagatgggtgttttatgtttttgttattkttgtttttcttaactggtgtgagttgatcttcatcttccttgatttcaagttccttgacactagtttgtcttccctattctgagctatggtttgagggct

SEQ ID NO: 225450 - DNA, 201 bp, Homo sapiens
ttactaatttttttttagttgatcagaagcaagtaattccacatgcatattggcacaatttacttttatttacctacagttgaattttaaattgtagtggygaattagcatatttaatttttttaatagatggtatttgaatatggctgagccctcttacaatatcagtagtcaatttgtagattatataccgtgggccag

SEQ ID NO: 225451 - DNA, 201 bp, Homo sapiens
ttaaatgtcaagcaagagcccaccttgcaaaatattttgggaaaagtactccaggtagagaagttaacaaatataaaagacttgttgccataataagctcrtgatgtatcagaaagaggaaaaaaggccaaagtgactggggtagtgaggttgataattggtgaggaggtagaagtggacaagagtcaattttgaagagtt

SEQ ID NO: 225452 - DNA, 201 bp, Homo sapiens
tgaaaaatcagaccttggtgatgaccttgagctgtaggttataaataactcccacatgcttagcgttcctataatggaacactaggcattaatgtcctgcyatatatttctgtgatacttggctcgatgttagctttaccataaacatctacctaggaatgttttgttaaaaggcaaatctaatcctctttttcattggac

SEQ ID NO: 225453 - DNA, 201 bp, Homo sapiens
ttcagctttgactttttctatttctgtttctaatgaatttattaagtttttattggtatgtaatatattcagagtacttccttaactctggaatttccttytcaaaaccttgtttgtgttttatcttctcaattttgagctgttattgaagattctttttagtttccttaatattataaaacacttatgaggaaactgttg

SEQ ID NO: 225454 - DNA, 201 bp, Homo sapiens
cactaaaaaagagaaatatacaaatcttcagccttagttgggattttaccatacctcttcaggtagttaatagaatatgaagacaaaatgtcagtaaacgkctgggcctggtagctcacacctgtaatcccaacactttgggaggccgaggcaggcagatcgcttcagtgtaggagtttaagaccagcctggaaaacatgg

SEQ ID NO: 225455 - DNA, 201 bp, Homo sapiens
gaggaggcatctggaggaggtgatatttgagctgagagttaaatgtcaagcaagagcccaccttgcaaaatattttgggaaaagtactccaggtagagaarttaacaaatataaaagacttgttgccataataagctcatgatgtatcagaaagaggaaaaaaggccaaagtgactggggtagtgaggttgataattggtg

SEQ ID NO: 225456 - DNA, 201 bp, Homo sapiens
ctgtaggttataaataactcccacatgcttagcgttcctataatggaacactaggcattaatgtcctgccatatatttctgtgatacttggctcgatgttrgctttaccataaacatctacctaggaatgttttgttaaaaggcaaatctaatcctctttttcattggaccaactggactttgtgttgcaaactggacctt

SEQ ID NO: 225457 - DNA, 201 bp, Homo sapiens
aaacatagatgggggaattttctcttgataataggattcctgctaataaatgttttaaaagtgtaatattcttatttttttattttaatgaattaacggayccaggccctgaatatttatgggaaaagagaaaagaacataaaccactagccatgaggtaatcttaccaaaaacaaaacaaatgaacttgaatctgcatgc

SEQ ID NO: 225458 - DNA, 201 bp, Homo sapiens
atatgaatgtgtcagaggttattggtgtaaaggacaattagaggaggcatctggaggaggtgatatttgagctgagagttaaatgtcaagcaagagcccaycttgcaaaatattttgggaaaagtactccaggtagagaagttaacaaatataaaagacttgttgccataataagctcatgatgtatcagaaagaggaaaa

SEQ ID NO: 225459 - DNA, 201 bp, Homo sapiens
agaatatctacctattacctttatacctgaataacaacttggctgataggacattcttgggtcaccttttctttttctctgaagtttagacattgctccayggttttccgagattggctgttgctgtagaaagtgtgaggccaggctgattttcttttccctattgtaattgacttgctttcttcttagatgtttgaacag

SEQ ID NO: 225460 - DNA, 201 bp, Homo sapiens
agatgttagtgaaccaatttgttgttttgaaaaatggtatacaaatgtaaaaaatcaagcatttgttccacatctcttgtatgactaagtaaacatagatrggggaattttctcttgataataggattcctgctaataaatgttttaaaagtgtaatattcttatttttttattttaatgaattaacggatccaggccctg

SEQ ID NO: 225461 - DNA, 201 bp, Homo sapiens
tagtgcaaggggctattagctagctctctgaggtcttttttatacaggcactaatcccagtcatgagaatggagccctcatgacttccactgcctaatacwgtcaccttggaagttaggatttcaacatatgaatttggagaagacataagtattcagtccattgcacaggctcataacatcctcattctgttttgcaaat

SEQ ID NO: 225462 - DNA, 201 bp, Homo sapiens
tggatacattctactcattcttacgtatcattcacttctagtgtactttgcaatgagggtggatattcacaatgatgccttacccagagaggcactttatratgttgctcattgaaagaaatacatttatactcactgtgtcagaaaagtggtgttatatttcatgtattcctttttagagtggtgattgtatatttttac

SEQ ID NO: 225463 - DNA, 201 bp, Homo sapiens
ggacatttttagaaaattaaaactaagataattaattatcagcatatctatatcaaaactattaaaaggagctcctcagtcagaggaaatagtcccagttsaaatcatgtaaatgaaggagggcatgaagaacaccaaaaagtataaatatataagtaagtgtctatgaatatggattgtttaaaacaatcaaagtaatgt

SEQ ID NO: 225464 - DNA, 201 bp, Homo sapiens
tcaaaactctcataggcaagaaccaggtgccccattagctgtgttcccacagcacctcctgtccgtacctctagcagaaaataaagcaaaatagtatatgrtgttagttgtttccattactggattgagaagaactcctggatgcaaggaccttgtgtttaattgctgtagttttagcctgcagcacacagaccaaggaga

SEQ ID NO: 225465 - DNA, 201 bp, Homo sapiens
ccttccctcaaggagcttatggtctactgaatgaaccaagcaatgtagacttataaagtgtatgtatgctacatgtaaagcactatgggagatattttttwaatggacaagacaagaatggtaagaattaatgagtaagtgcccacagagaactcagaacgttgccaagcacatatcagtgggggaataactgtcagcggc

SEQ ID NO: 225466 - DNA, 201 bp, Homo sapiens
ctccatatttggttctatgttcacattgctcttggaaatccttcattttattctgtcctgtgattatgtagtaattattcataattattaaatatccatcstgtccactagattgatggctccatcacgtagggattcttttgttcatcacagtattgcacagcccttggcacatggtaggtaccctatcacacaaatggg

SEQ ID NO: 225467 - DNA, 201 bp, Homo sapiens
tcagatactatagtgtttttatatactatttacagatacatataggacattcacatgttcaaagtttgagaattccttataactttatctttcctcctctsccatcccctgtgatggtcagtttctaaaccctacttcaggtatccttctcaaaactctcataggcaagaaccaggtgccccattagctgtgttcccacag

SEQ ID NO: 225468 - DNA, 201 bp, Homo sapiens
ttagaatcttgcatgccaggcacccttgggcgtacataagggttgtgggtgtgatgggcggggctgggactgttgtaccctgtggagcaaagaaaagcagkgttaggagaaatctaacagtgcagttgaggctaggagtggtaaaggattgtgtttctttgctagcctaggcagaatttcttattaccccacatcaaattg

SEQ ID NO: 225469 - DNA, 201 bp, Homo sapiens
cagcctgggtaacatggtgaaaccccatctctactaaaacacaaaaaattacctgggcatggcagtgggcatctgtagtcccagctacttgggaggctgasgcatgagaatcacttgaatccgggaggcagaggttgcagtgagctaagattgcgtcactgcactccagcctgggtgacagaacgagactccatctcaaaa

SEQ ID NO: 225470 - DNA, 201 bp, Homo sapiens
tgttgtcattgtttattgtttgtttattgcttattataaaaatactagaatggggacactgtttcctgtccagccctggagcatagcatgtgacacaaatcataacaattaacacatatttttatattggagtttaaaaataagaaatgtcacaaggaaagcatatatagatgctcttttatcatcgccaccccattctaa

SEQ ID NO: 225471 - DNA, 201 bp, Homo sapiens
caattaactgagcttaggacacatgctcatcctttttccattacagcagaaaatataccagaagtctccaggacctcaaattctggagtggaatgaaaagrcacccaattcactatcctaatggtggcttataataggagaaaagtccctaaaagtgaatcaagatgctatcacaggctgggctcggtgactcacgcctgt

SEQ ID NO: 225472 - DNA, 201 bp, Homo sapiens
taatcactacccgtactgacaaagacagggccttgggatctgtaagggaaatgctatctttgagtggaacacaattttgtccattttcttcccccatgacscccagacagctgtaatttttaaaatatcaaatagaatctatcatttccgagatttgaaccttcggtggctgtccttgtcattaatataaaatactaagtc

SEQ ID NO: 225473 - DNA, 201 bp, Homo sapiens
aaagcaaccgattaaataccgattagctggttagagacagatcagattatagcaccaattaaaatcagtgtagaacaatgtattcaatcagtctaatcttycttctgtaaacaaagtcttgttgtaataaactttattttatgcatgtgctttgggtatgcagtatattgttgagatagcaggaactccggattgatagaa

SEQ ID NO: 225474 - DNA, 201 bp, Homo sapiens
ctgttattactttgtgaaaactggtcctgaattgttttattatttgatagtgtttttccaggaaaataaggtttcctttgctaacatttttcactgagatagatgcagaaaaactctgaaccattctagtgagcatgtatttctagctagttcaccaatttgaatttcaggttgtgatgatatggccataaaaatctgccc

SEQ ID NO: 225475 - DNA, 201 bp, Homo sapiens
ttaaaccctaatatcattaattaatagaaacaatgtcagtaattgaagcactgtataaatatttaaatcaatcacaagattgtttggcaaatgaaggtggrtacatctggaaacttatcacataacttacccttggcaataaaaaggcattttttaactcttcccactatgcaagtgcacagcaatggtttaatacaaaca

SEQ ID NO: 225476 - DNA, 201 bp, Homo sapiens
ttgttctgtttctatttctgtattctgtagaattaaaccctaatatcattaattaatagaaacaatgtcagtaattgaagcactgtataaatatttaaatsaatcacaagattgtttggcaaatgaaggtgggtacatctggaaacttatcacataacttacccttggcaataaaaaggcattttttaactcttcccacta

SEQ ID NO: 225477 - DNA, 201 bp, Homo sapiens
aaggtgttttgatattattaatattttttcgaagtttgctgtagttgtctgagtcctttcaggcaggcagtatgtgggtacttaataatttttcatgttgrttctgtgactgtccctaatagttctctcaagaagctgaaataaggtcaagttgttcaaatacttacatagggctttggaacctatcgcacccatgttcaa

SEQ ID NO: 225478 - DNA, 201 bp, Homo sapiens
aattaaagtaaattttaaaatttgaaataacagtagatacacagaaacaaacaaagaaatgtagagggagggcctgtgtaccctttttccagttttccccratgttaatatcttgcctaactagaggacaatataaaaaccaagaaattggcattagtacaatgcatatccatagagcttatttagattgaccagttatgc

SEQ ID NO: 225479 - DNA, 201 bp, Homo sapiens
gaaaaggaagtagggagagaaagatgaaggaatataaagggagttgaaaatggagcatataggaaggagggaagggctggagggaggagaaaagaaagatrtaagcagaaaagataatccaggctccatgcaaaaggtactcttcattcaggagctagggttttcatgttaacttgctaaaccctgagcttcactcacttt

SEQ ID NO: 225480 - DNA, 201 bp, Homo sapiens
tgagaaaccttgagttacagtttgcccatctgcaaatgggctacctcctggtatggctatgaggaatgaagtgagatctgcagagtacctggcttttcttyggtggtcaataaatggcactctcacttgactaatactgagtacaattccagttatcttgggagagactaggaaatctgcagagagagggaaatgcgtaag

SEQ ID NO: 225481 - DNA, 201 bp, Homo sapiens
ttttctgactagattgtaagctttgtaattgctaaaaccataactattttattcaccaatatatcccctaacatgtagcacagtgcgtagcatgtggtagwtattaaataaatatttaaacaaatggatgagtgaatggtctgttaatatgaagtgactgaggttatgtttcttctgatctgcattttttgtgtgtttgct

SEQ ID NO: 225482 - DNA, 201 bp, Homo sapiens
tcatatagagacttttctatgataagcttttaaaaaataagacagcaagatgaaagaggcaacaattaatattaaaatgttatgcacattaatgtaaatgrtaaaacattttatatctcaaactgcaaagaatatattctgtggttaatttttctttcactatttcccctccttctttccaatcgaaagtatcaacagctt

SEQ ID NO: 225483 - DNA, 201 bp, Homo sapiens
ggcagagggttgtacacatagtaggtattactcaaatatttgcttaataaattaatggatgatattacttaaagtactgttatgatcaatgtaagttaccrcataggtgaattggaccatcactttgctctgacgaatggctgtaactaaaatgaatagccaatttaaatttctgatttattaaggcctttttactgctgt

SEQ ID NO: 225484 - DNA, 201 bp, Homo sapiens
acaaaatgtctttttctcctactggattacaagtttcttaaaggttaagattgtttcttttatgtctgaatatatcttgcagcatctggcagagggttgtrcacatagtaggtattactcaaatatttgcttaataaattaatggatgatattacttaaagtactgttatgatcaatgtaagttaccgcataggtgaattg

SEQ ID NO: 225485 - DNA, 201 bp, Homo sapiens
tctacaaaatgtctttttctcctactggattacaagtttcttaaaggttaagattgtttcttttatgtctgaatatatcttgcagcatctggcagagggtygtacacatagtaggtattactcaaatatttgcttaataaattaatggatgatattacttaaagtactgttatgatcaatgtaagttaccgcataggtgaa

SEQ ID NO: 225486 - DNA, 201 bp, Homo sapiens
aatatttacagtatcaagatctgatatcataatccttcatagatcccattgttttgaaagacgttcaagagtgtgtgttatagcttttagttattttgatrtgatgctaacaatcacttctttgctagctcctttggaacgaagaaacatcttcaggtcctgctcattgggaacattctgttaaaaactccaggctgtcgt

SEQ ID NO: 225487 - DNA, 201 bp, Homo sapiens
ggggtgctgctgggagggagagcataaggaagagtaactaatggatgctgggcttaatacctaggtgatgggatgatctgtgtagcaaatcaccatggcastaccatctctacagcagcacagcctgtatcaaataatggtatgttggagtaattcaaactggaaaataggtagctaggaggactgcacctgagcatatca

SEQ ID NO: 225488 - DNA, 201 bp, Homo sapiens
ttttcacctccttcaaagtggtcaagtctgtcttatacagcatcattctgacctcttttgcctccttcttccacttttaaggacccttagcattatattargtccactcagatgattcaaggtcatctcaaggcccttaacttaatcaaatttcaacttaatcacatttgcaaaatctttttgcataacatattcgcagct

SEQ ID NO: 225489 - DNA, 201 bp, Homo sapiens
tgggattttcattttctttgtatttattaggcaaaaatattcctttatttacattttattcacatttagttttttatgcgcacatttaaaggactttattrtaaacaacgacagtgattctagaacggtagatagcttttttaaatgtaattactcttgtaagaggaaaaaatacatgatactaaaggattgtattttgtg

SEQ ID NO: 225490 - DNA, 201 bp, Homo sapiens
tggatagatatgtccagtgtaatatcagtggaaaagactttaagttagggattctcttattgattcatatacttggttgtccagcacctgtgaatattttyagacatctaaggatttttcagagtctcaagatatgattacactctgtttctctttattttaaaaggccaaatcacataatgcttttaggagaagctgtgg

SEQ ID NO: 225491 - DNA, 201 bp, Homo sapiens
gtttagtgctgaaaaagttgtggtgacagtgttatgttattagacttctggtagcactataggttggtgagttccttttgctgagtagtttgatagtagaragcctgattaggagagataatcatgggagacaggagttctcggagacttttcctaaggtagtcatgtaacagaagcagaacagaatattcactagagtgc

SEQ ID NO: 225492 - DNA, 201 bp, Homo sapiens
ttaagcatctttgtctatgaactcaaaggcaaaactcttctagacttttgtgagttgttgccagtccttggttatgttactaccctataattcagggtttyctgaaaggagttaagcaattttaaggccatcataaattttattattatttcctgagatgtattacttgggttctcagggtgatcattaaatttgtattct

SEQ ID NO: 225493 - DNA, 201 bp, Homo sapiens
cctgccttgttcccctcctccaaaaacaaaaacagacaaaaaacccaagttggttggcatgctaccctacaagttttttcatcattcagagaccttgaagmtcaaatctaagaacgcaagagttatagtcatgttgcaggagtgtccggtgcacaggaaagtaaataataaataatctttattttttgaacggggaacaat

SEQ ID NO: 225494 - DNA, 201 bp, Homo sapiens
aaaaaaatattttggataacagttctttatcatacatgtttcttgcaaatattttctcctagcctttggcttgtctttctcagttgacagtgtcttatatyaaggagacgttttcaattttaatgaagtctagcttatcaatgatttctttcatggattgcacctttggtattatatataaaaagtcactttcatgctcaa

SEQ ID NO: 225495 - DNA, 201 bp, Homo sapiens
ttccagttggtcacagatgatcttttcggccaatttgggactgatgaggaaaagaccacttgggtgcttgttacctgtagaaagtacttttaggggcaccrtgagacatggaggcttgcccgggttttcaatcttgactccatcaccaatcattgagtcatctcaagcaagttatttaagctccctgactcccagctttct

SEQ ID NO: 225496 - DNA, 201 bp, Homo sapiens
gaaggacaaggtcttggaataatgtattgtttcaaaccttgatgcacaaattctctacttcatgagcgattctagcgtaaagcaggcatgctttctctagwaatgcctccctccaaccaaaaaaccccaaagtgaaaaagaagaaaaactgagaacaccagaggccttaaattcttatgaagtatgagttttaatgcatgc

SEQ ID NO: 225497 - DNA, 201 bp, Homo sapiens
tgtgataaatattaagtaatctctgtattgagttgatcataaatgatatcttgtttcagcaccacctttttgtcccaaagagtaatcagaattaaaaaaaraaaaaaagaagaaagaaacattaaggaaaggcaccagccaagagttaattagcatttggctcaagacacattttaatacatataataatgcattatcagg

SEQ ID NO: 225498 - DNA, 201 bp, Homo sapiens
gaacaagacaggcaaaaatctcacagtgcttctaaagatgggcttcgtgggagaaaaggctgattatgtttgcacccactgcaagttaaggtgtacgactrtcaacagcagcatcttgaagtcatgaatgtgtgtaccgtctgaattatctgaatgttggatccctgcctggttgggtgcaggagcctgggagaagagatg

SEQ ID NO: 225499 - DNA, 201 bp, Homo sapiens
tattactataacattgtacttagcatgttctgccataattatctgttcatgtattgtagaatttttcaaaagcaaacactatgttttactcgttgtatagyacagtgcctgatgcataggagatcctgaagtggggggtatggagggagacattgaccttgagagaagccttctgttccctccaactggcttcttcaggca

SEQ ID NO: 225500 - DNA, 201 bp, Homo sapiens
catatcctggctccagatccatgattgtcagtagtgtgttacagtgtttttaccagtaacagttagcattgccttgattataagcaaacaaaagtagattytatttagcttaagcaaaaaaaaaaaaaaaaaaaaaaaaaaaattattggcaggctttgagtagttcactatatagactaaaggatataggagaatgagac

SEQ ID NO: 225501 - DNA, 201 bp, Homo sapiens
attaagaattagaatgtatatctgctatggatgattgcacatgatatattgtaaagttagcaaagcaagttacaggaaatatgcaaagcatgatggccttyagtaaaaaagcctttatatttgtgattttaggtgtatatttacgcacaatgaaaggtattcaattaaaacacatcagacttaacattttgagtggtctgg

SEQ ID NO: 225502 - DNA, 201 bp, Homo sapiens
ctgattctttcacaactgctcaacaccatcttgcaatttgaaagcagctctagacagtaggtaaatgtggctgtgtaccaatggcattttatttattggtwtggaaatctgagttttataaaactttcatgtgtcatgaaacataattcttttgaattttttcagtgcttttaaaatgtaaaaatcattcttaatttgtgg

SEQ ID NO: 225503 - DNA, 201 bp, Homo sapiens
gccagagggtcaggcctaccacagacacatttaacattattaacattgctaagtaatttcagtaatattatttattccaagtttttattctgcctttatcyagtttttcttcttggtagactccattcccacccttcttgaatattttacttttggaatcattgtcaaagcagtcctctctcttcattcctattctcattc

SEQ ID NO: 225504 - DNA, 201 bp, Homo sapiens
atcaaaaccatagtgagataccacatcacctcataggatggctataattgaaaagaagacatagaggaacttgaacatacattgctggtgagaatgtaacrtggtatagccactttggaaaacagtctatcatttccccaaaaggttgaaaaacgaattgccatatgattcagcaattccacctgtagatatatacccaag

SEQ ID NO: 225505 - DNA, 201 bp, Homo sapiens
attctggggcaactaggtctccacatgcaaaagaatgaatttggatccttacctgaccccatatacaaagattatctcaaaatgaatcttggcctcaaatrtaaaagctaaaactataaaactcttagaaggaaacataagcataacaaatggccttggattaggcaaaatattttagatatgatgtcttaacaacatatg

SEQ ID NO: 225506 - DNA, 201 bp, Homo sapiens
aaaaaatgcagcaactttggtcacaacaaaatttcttttcccccgtccatctctatcagcaaaaccactacgtttagtttcataaaaaagagatgaataarggaatatgctaaaaattctggcagtagttatgttttcacacacttctggatccatggttttcaaactttcatgtacataagaattttctggggatcttgg

SEQ ID NO: 225507 - DNA, 201 bp, Homo sapiens
gtctaaggacaaatgtgcaggcatttgcacagtatcttccttggccatcaggtggaacagaatatcaagcctgatccctgttggttgtttagtccagattkaccaagcagcagataaacccagatgctgtgtggctgtgcatgttacttaacctttctaaacattagttttgtcatctgtaaaatgacaatggtaatagta

SEQ ID NO: 225508 - DNA, 201 bp, Homo sapiens
acatgcctgtagtcccagctactcgggaagctgaggcagaagaattgcttgaacctgggaggcagaggtttcagtgagcctagatcccgccactgcactcsagcctgtcactgcactccagcctgggtggcagagcgagactccatctcaaaaattaaaaaaggggaccttactactcaccttgcagaaagaaaaaggatt

SEQ ID NO: 225509 - DNA, 201 bp, Homo sapiens
ctttgggaggctgaggtgggcggatcacgtggtcaggagtatgtgactagcctggccaatatggtgacaccccgtctctactaaaaatacgaaaattagcmgggtgtggtggcacatgcctgtagtcccagctactcgggaagctgaggcagaagaattgcttgaacctgggaggcagaggtttcagtgagcctagatccc

SEQ ID NO: 225510 - DNA, 201 bp, Homo sapiens
atgaacaaaccagagaaaactttacctagactgactaagcaggaaagaaagaagactcaaattattaaaatcaggaataaaaagtgggacctggccaggcrcagtggctcacgcctataattccagccctttgggaggctgaggtgggcggatcacgtggtcaggagtatgtgactagcctggccaatatggtgacacccc

SEQ ID NO: 225511 - DNA, 201 bp, Homo sapiens
ctataaaatgagtaaaccacacaaagcagaagaaaataataaaggttggaacagaaattaatgaaatagagaatagaaaaatagaatcaatgtaaccagarttggttcaaaagatgaacaaaccagagaaaactttacctagactgactaagcaggaaagaaagaagactcaaattattaaaatcaggaataaaaagtggg

SEQ ID NO: 225512 - DNA, 201 bp, Homo sapiens
ggatgttgaattttcttttctttttctgcatctattgagatgatcatatggtgtttgtctttcattttgttaatgtgaagtatcacatttattgattagcrtatgttgaaccgtccttgcatcgctgggataaatcccacttgatcatggtgaatgttctttttaatgtgatgctggattcaacttgctagtattttgttg

SEQ ID NO: 225513 - DNA, 201 bp, Homo sapiens
atgctaatttaatgacctatgacctcaaatgctccctctgtatctatgaatgctctttgactacctattttagtaatgagaaagctgggtaagcatctggkttaccctatcctatgtcagattattactgagctaaatctctatgttcctcaaaagagagacacaaaattagcagaaaagcatttatctggttaaaagtta

SEQ ID NO: 225514 - DNA, 201 bp, Homo sapiens
agatagctcttattattttgagatacgtctcatcaatacctcatttattgagagtttttagcatgaagcgttgttgaattttgtcaaaggccttttctgcrtctattgagataatcatgtggtttttgtcgttggttctgtttatatgctggattacgtttattgatttgcgtatgttgaaccagccttgcatcccaggga

SEQ ID NO: 225515 - DNA, 201 bp, Homo sapiens
tttcttttgtatttattattcctaaaatatattcctaaaaacaaagtctagattgtggcattgggatgaagggggaccttgcagtattgttgtaatgataytgggcccagttcctgtttgacccaactcctttttttcctggggggaaaaaaaataaaggaggctaaataaaagctaagtcaactttcgttattagctggg

SEQ ID NO: 225516 - DNA, 201 bp, Homo sapiens
gcttcccccagtagatccatgtgagctatttgaggcaggagctatttttcataaacagtttttaaggatcctatgacccttctcaattgtttagctgtgaraattagaattatgtttatttgtaaattgcctgcatgctagtagtctcttgcttatgaagtactgataagccatcctcagaagcttttaaaagaacctctg

SEQ ID NO: 225517 - DNA, 201 bp, Homo sapiens
taatgtgtgtacagttaacaatattatctagtgcacttaaaattttcttaagagtatgtatcttaagtgttatcacagtaaaaaaaaaaaaagacaattcktctagcaaatgttttgatgtgttttaatcttataagtaaaaaacaaacacaaaaatgtgttttcaaaaaccataatcaaatataaacaagtataggtgat

SEQ ID NO: 225518 - DNA, 201 bp, Homo sapiens
agcaagttacataactgccattagttgcaaaaggaagaataccactttgtcaggagagacaaatttttcctaactgtaagaaaaactttttatatcaatcrttatatatatgatggtaaaaaaataacatagttgataacatttgcaaatatagtcaaatgaagtttgctgtgagattatagatctaattgtttcctagat

SEQ ID NO: 225519 - DNA, 201 bp, Homo sapiens
gtaaaaaacaaaacaaaacaaaagtcctaacagaactgaacaacaagtttaagcagagaaaaatagggatcggaagaagtcattctagacgacctaaacaagttagttctgctctgagcttcttagatggccaaggccatctaagagaagcaagttacataactgccattagttgcaaaaggaagaataccactttgtcag

SEQ ID NO: 225520 - DNA, 201 bp, Homo sapiens
cagtctgctcagtaaccagcacatagacaaaggaagctccatgtctggcaggaaacatgtactgaaaggacagtgccagggaggtgccagaagcatgaaascatccagaatcgtgaaatatgactcaatcagaatggtccaggaaggcttctcgggaactttgagaagtgaatgatagaagagaggcagaatggatattgg

SEQ ID NO: 225521 - DNA, 201 bp, Homo sapiens
aggcatatatgtaaaaaacaaaacaaaacaaaagtcctaacagaactgaacaacaagtttaagcagagaaaaatagggatcggaagaagtcattctagacracctaaacaagttagttctgctctgagcttcttagatggccaaggccatctaagagaagcaagttacataactgccattagttgcaaaaggaagaatacc

SEQ ID NO: 225522 - DNA, 201 bp, Homo sapiens
ttcatagtgcttcatccacttctgggatttgttgtattgattctttcagcctcctgggcagaagcagagtggcacaggcatgggtgaggtcaagggttgascatgggagtccgaaaggcctgttgtggactccttccctgccacttgacagctgtgcagacctggacacatcacatagcttttctgagccttggcatctgt

SEQ ID NO: 225523 - DNA, 201 bp, Homo sapiens
gtcattctaggtcaggccttgctcacagtgcagggaatgcagcccaccaatgccttcatgatcctacatgcctttttctaagggaaattggcttaaccaasattagcattggttcagtgtaaggaggactttctttaaggtagtttataatacaattttatttgtattatattctagtttataatacaaatgattatattt

SEQ ID NO: 225524 - DNA, 201 bp, Homo sapiens
gcccaccttggcctcccaaagtgctgggattacaggcgtaaggcaccgtgtctggctctactatttttatcttatacactttaaaagcgtattttaaccarctaatgagaaaaggcatatatgtaaaaaacaaaacaaaacaaaagtcctaacagaactgaacaacaagtttaagcagagaaaaatagggatcggaagaag

SEQ ID NO: 225525 - DNA, 201 bp, Homo sapiens
aaaatagtggcaagacctagaagaatggctgcagggagggagagaagaagaatctgttaaatctcttgattgactggatgagggatatcataggtgctcamaaatgttttctgagtgatatgactcacagacctttaccctagaaagagcaggtcggtccaatcatttttatatcattttttggccaagaatcctgaagcg

SEQ ID NO: 225526 - DNA, 201 bp, Homo sapiens
cagaacctcctgaggctgtgtcacaggtgcacctcctcagccttggcaaaataagctttctaaattcactgggaaaaaatacattgggatataatattgawtggaaagagtggcatataaatggagaatggaatggaagcacatgtaccttgaaattaagagagattgtagcttcaaatagaatgttacactcctgttcct

SEQ ID NO: 225527 - DNA, 201 bp, Homo sapiens
aaagtctagattgtggcattgggatgaagggggaccttgcagtattgttgtaatgatattgggcccagttcctgtttgacccaactcctttttttcctggkgggaaaaaaaataaaggaggctaaataaaagctaagtcaactttcgttattagctgggtctttggaccttctgcacccatgtagcaccccagagagctgg

SEQ ID NO: 225528 - DNA, 201 bp, Homo sapiens
ttcaggggcctggatctagagcagttgatccatttctcttcaactgtaattgagtgtcatatatcatctgagcagtggaaggggagaacagtccagaacasccatagcacctgaggaaacagctagagaatgagagtgtttgtgtttacccccgctgattctggtctagaataattggctcaggcctactcaggctgggat

SEQ ID NO: 225529 - DNA, 201 bp, Homo sapiens
tcaggggcctggatctagagcagttgatccatttctcttcaactgtaattgagtgtcatatatcatctgagcagtggaaggggagaacagtccagaacacycatagcacctgaggaaacagctagagaatgagagtgtttgtgtttacccccgctgattctggtctagaataattggctcaggcctactcaggctgggatg

SEQ ID NO: 225530 - DNA, 201 bp, Homo sapiens
tagcctatttgtccttagaaacatacaatttgacagactgaggcatgcatggtccgttcagcattcaccatcttggtcctaaaagagtcctcaagagacaygtcatggatggatctcacttttccttttgtctctggattggaaagctttcgttcttttaccagcccttatagctctgtctttcacaccctgacctaagct

SEQ ID NO: 225531 - DNA, 201 bp, Homo sapiens
ttcttccgcatatttcatcagtctcttatattcttaaatcatgtaaatacactaaaagtatgatgggtttgggaattgatattttcctggtaaacatacarctgaggtgatggaactagattgtacagtgttctagaaggtagtctaggcaattttggtgttctgggtaccacggacatcattatgttctcaaaggaattg

SEQ ID NO: 225532 - DNA, 201 bp, Homo sapiens
tagctacccaaggctttgcacagagcacagtagaagccctttattcaaatcagttaggacttctagtttgtcagttgattgaaactcttggctagagcaamaaatgttgctttaccaagaaataaaaatgctatttaaatgtttttaggacattataatgtgcatctgtttggtaattcttggttctagacctccttaaat

SEQ ID NO: 225533 - DNA, 201 bp, Homo sapiens
gagtgagaaaaaatatttgcaaatcatatatctgataatagattaatattcataatatatagataattcctaaaactcagcaacaacaacaaaaatcactrattcaaaaatgcgcaaaggactagaatagacacttctccagagaagatgtacaagtgtccaataaacagttgaaaagatgctcagcatcactaatcacta

SEQ ID NO: 225534 - DNA, 201 bp, Homo sapiens
ttgctttcttccgatccacccactagttatctacctgctccatgaaaccaaacaagtttaattccttttccacggcccacgttgttaatgtttctttctcstgtgtttgcggaaaccatcacgcacccccaccccatatctccacttctcatgactactcaccctgtgtcccagaattgtgcatctttgaaacccctgatc

SEQ ID NO: 225535 - DNA, 201 bp, Homo sapiens
ccctgtcaatgaccttcatgagtataatagtgatttccatcagaagttttccatgggatctgttggtaaaaattcacctgatgggctttgtattagtttcmtagggccaccataacaaaatattacaaactaggtgtcttaaaaaattagaaatttattgtttcatagttctggagactagaagtctgaagttgtggtgtt

SEQ ID NO: 225536 - DNA, 201 bp, Homo sapiens
actcagcattgggaatacagaaatgaatcacccacatttcatggagtacatgctcaatagactgcaacatagagaaattagagaccctttgcaagttatakaaacccaactcaacctgccttaagagccttaagagaatgagaacgagtttattagctcatgtaactgaaaagtctaatagtattgttgattcaggcgcgg

SEQ ID NO: 225537 - DNA, 201 bp, Homo sapiens
caaatgaatgaaaagacataggaagaaatggaatgaatacattgaaatataaataaatggtagaggtctttcagggttcttttctaaactggtgccttctsaaactgacttctcaagtatgtcctaatccgtacacttctttgtcctaagcggagtgaatatttgatctcttggtatctgtcaggtggaacctttctctgg

SEQ ID NO: 225538 - DNA, 201 bp, Homo sapiens
gcaatagcagactgaacaatatagaaaaacaatatatgtcatgacaaagttgtatttattatagatatgagtggtaaggtaatgttcaaaaatcaaatgaygtaataacagaaaaggagaaaagccatatgataaaattcaacatctaatcctgataagaacttttaacaaactaggactataagtaaacatccttaataa

SEQ ID NO: 225539 - DNA, 201 bp, Homo sapiens
ccaagataggattgtcctaatgatgactggttttagtgtctccataaccactggtccctgaatataaagcgctatgcatagctaaacaaattcttattgcyttcagcctgtgtgcaatttagcagcaagatatttcatatctcacagcattcactagtcctactcaattaggaactgcttgcaaatcagaacagctgatga

SEQ ID NO: 225540 - DNA, 201 bp, Homo sapiens
atgatttgatctcattataatggttgaaatcccatttccacgacaaccagaagctgaccaaggcctttatatcttcttggtcggagtcctgctctaccctkgattcccctcacttttgtggtcaaaagtatttaattaattgcgtggttctgccagttttttctctttatgttttctctctacacaaggccagactcacct

SEQ ID NO: 225541 - DNA, 201 bp, Homo sapiens
cttacgtatcattcacttctagtgtactttgcaatgagggtggatattcacaatgatgccttacccagagaggcactttatgatgttgctcattgaaagaratacatttatactcactgtgtcagaaaagtggtgttatatttcatgtattcctttttagagtggtgattgtatatttttacaagtgacttatgctcatca

SEQ ID NO: 225542 - DNA, 201 bp, Homo sapiens
aacttagcacaggctgtacttggccaggtgtctcaaagctgataccaagagggcaaagattgagagtgttttttactcagttatttctgtgtttttttttkttttttttttttaatgacctgggaagaagtgagtaaatttgacatgtggctattttccaaaaaaggttaaagaatcctaacagggactcaggtaagacat

SEQ ID NO: 225543 - DNA, 201 bp, Homo sapiens
cataaacaacagaaatatatttcttgcagttatagagactgggaagtctaagatcaaggtaccggcagatttggtgtctggcaaaggcttgctttctcatkagtagatggtactttcttgctattttctcacctagtgcaaggggctattagctagctctctgaggtcttttttatacaggcactaatcccagtcatgaga

SEQ ID NO: 225544 - DNA, 201 bp, Homo sapiens
taagtagcagacccaactttgaataacttatggaaaaaagaggtttgggagagtgttgtgtaggatatggaattaaagaacaagtcccagagaagagctgrtcattggtgcctttagcaggatggatctgtggatattgggaaggccatggccatgagattactgagctctaagtgccttctgggcatatgatgtgaatgg

SEQ ID NO: 225545 - DNA, 201 bp, Homo sapiens
tggaattaaagaacaagtcccagagaagagctggtcattggtgcctttagcaggatggatctgtggatattgggaaggccatggccatgagattactgagytctaagtgccttctgggcatatgatgtgaatggcagccctaccagtacagtgaggaagtggctgcttccttaaagttgtgtttctcaaaagggagtgatt

SEQ ID NO: 225546 - DNA, 201 bp, Homo sapiens
cttctgcgattctccacaaatcacaaacagcaaacaaagctaacgcatggagtcaacgtggtattctttattagcagtaaatgaatgtcagaaaaaaaacscaggagactgctggattcaggagcccattcctggatcaatcactgtgctgagtattggggtatttgatggcccagccttgcttctgaccctctctctggc

SEQ ID NO: 225547 - DNA, 201 bp, Homo sapiens
tccaatcttgcaatggttactaagcaacaattaaaatgaaatctcaatagatttttaaaactatatttactttagaaggagaagtgtgtggcttttgcacrctttatgtctcttggcaataagtaacactggggactgagagagagggagtctaaaggagctggactttacttgggtgacggttgaggtggaggttggagt

SEQ ID NO: 225548 - DNA, 201 bp, Homo sapiens
tatacttatttatttttgagacagggtctcactccattgcccaggtgaaagtcagtggtgcaatcatggctcactgcagcctcaacttcttaggctcaagyaatcctctcacctcagcctcctgagtagatgggactacaggtgctcaccattatggccggctaatttaaaaaaaaatttttatagagacaagatctcact

SEQ ID NO: 225549 - DNA, 201 bp, Homo sapiens
ataaatgagtattgatttattaatcaaaaatgtataaatccatatttattttccagtaagggatagttatttaaataaagatatatcttaatcataagagycgtatctaacacttctattttatatatatttaatatataactacatatggaagaagtatcattttgctagcatactaatgcacattgattaagacccagc

SEQ ID NO: 225550 - DNA, 201 bp, Homo sapiens
atcatgtgcacttaataaatcaataaatgtttataaataaaaaatatttataaatcagattataaatgagtattgatttattaatcaaaaatgtataaatmcatatttattttccagtaagggatagttatttaaataaagatatatcttaatcataagagtcgtatctaacacttctattttatatatatttaatatata

SEQ ID NO: 225551 - DNA, 201 bp, Homo sapiens
ttggatggataaaattatttaatctgtgtaaaattaatagatgtataaaagcaatgcctggtgtgtggaaagtgctaaaaagcattgagtgttactattamtgtactaaaaaggtagattgctaagaaggtgtgtgctttttaacgtattgtggtagactcttcaacttcctttctacccccttataatttaatttaaacc

SEQ ID NO: 225552 - DNA, 201 bp, Homo sapiens
cttgtttatttctgctgcttctgttggttctgggtttttttttcccccaaatgcaggtccctcctgagttacctacctcgaaacactctccatgtgcagcrtaccttctgttcctggcaagcgtcctatcccctaagcacactcctttgtttttcttccaggaggaatcatgcccttgaaagtgtcttctttcttgatgac

SEQ ID NO: 225553 - DNA, 201 bp, Homo sapiens
taaatgagtcaataaagtaatccagaaataaacaagcacttgagaatttgtaaccgacccttacttctggcatttggcctatattctacctcttctgtaakaaaggacttaaataggcaggtgactatagaaaatgtacaggtttattgcaagagtaaaattaaaagatctacattggaagttattataaaatgacacaac

SEQ ID NO: 225554 - DNA, 201 bp, Homo sapiens
ttttttaaagttctgggtcttgcctcaaacaggggtgctctgtaccctggaagaacttgctagttttgttgtaagcctgagaccaattctcataggaaagrttctatcaggtcttgtggttgaaatgtttaccttagtcaaaaattccaattataatccaggtctctcaatatccagggaagccataggggaatgatgtac

SEQ ID NO: 225555 - DNA, 201 bp, Homo sapiens
gaattaaagaacaagtcccagagaagagctggtcattggtgcctttagcaggatggatctgtggatattgggaaggccatggccatgagattactgagctytaagtgccttctgggcatatgatgtgaatggcagccctaccagtacagtgaggaagtggctgcttccttaaagttgtgtttctcaaaagggagtgatttt

SEQ ID NO: 225556 - DNA, 201 bp, Homo sapiens
ttaattctgcaagcctccgttgtccataagcacaggaaatgaggtggggatggtgctgtgtaaaataatttgggaagcagtatgtctgcacaaaacagaakaccagaggtctctgataaatttcagttttggtgtcatctagatagttcaaagcacattttttttcactaaaatatctgaaatcaaatacagtagaaacag

SEQ ID NO: 225557 - DNA, 201 bp, Homo sapiens
atagctgagctgaaaaagggtgatcccaaaggctagtgcagtgtcggcaaggccaaggttggagaacttcaaggtggttcaggagagcctgcagcctgtgmgtgctgaagaagggcatgaggtttgggctcgaatgaccttggagaggaattctctaagaatggcctagggaagaagccaacactgtatttgactgaggag

SEQ ID NO: 225558 - DNA, 201 bp, Homo sapiens
aaagtacctagctacaagtgaatgagaatgacattattgtagagacaatctttcaaagatatcagatgttagcagagggtaatacttagttgttactgctrcttggacacccagtgtattattttgcagcaccatgatttagaaactcttgcttcagtaactacactttttaccttttgccgtcaatgtttatttgatgtg

SEQ ID NO: 225559 - DNA, 201 bp, Homo sapiens
gcatgttaaccatttctaactgtgtcattcagtggtactgagtacattcacaatgttgtgcagtcatcacactatccaactccagaagtttctgtcatctsaaatagaaactctgtacacggtcagcacggtggctcacgcctgtaatcccaacagtgtgggaggctgaggcgggcagatcatgaggtcaagagatccaga

SEQ ID NO: 225560 - DNA, 201 bp, Homo sapiens
aaacttgtttttgcgttgtgactctctgtggcatttcacacaagtcggttgtttctaactgggttatctgtcctggaaaattggagtttggtatgccaacwggacagagccatagggaagaatggagatttggactggtacgtaggtataattaggcaaggaaataacttggccaaggtaaaattctgctttaaatgtact

SEQ ID NO: 225561 - DNA, 201 bp, Homo sapiens
actggagataataatagtaccttactttcagggtgaatctgagaattaagtgagatagtacatgggtactgcttagcacactgcttgacatgttctgagcrcttaacacatattggatgtatgtttataataaggacaaatatttgtccctggaagtttgaaatagcagccaaagatgagtatgcattcagttcttgtagt

SEQ ID NO: 225562 - DNA, 201 bp, Homo sapiens
aaagctgggactacaggcgcataccactacacctggctaattttgctttttttctgtagaggtgaggtctcactgtgatgcccaggctggtttcaaattcytgagctcaactgatctgccttagcctcccaaagtgctgggattacaggcatgagccactacgccctgccacaaattttaattttttacaaatgttattat

SEQ ID NO: 225563 - DNA, 201 bp, Homo sapiens
atcggcctaacaatcatagagaagcagtagaagatatctctctggagggatgaagtctgtcggtctcttgtttcattcattcatccaacaggcaattcttycaagtgtttattgccaggcctccgtctgtgtactgactaggagtttttggagtttctgcaactatgaacatcaaaatcagaaataaattcatagttaact

SEQ ID NO: 225564 - DNA, 201 bp, Homo sapiens
agagatatgcccaagagtggtccttcaccttggagctggcaagctcagatcattagcttgatggttggtattggcagagatccattaacaggaaccttgcrtaatcagagggctcatggacgctgttaatagacaatgtacttgaaaatgaagggtaaaatctgctccatgtgttagattaattacatcggcctaacaatc

SEQ ID NO: 225565 - DNA, 201 bp, Homo sapiens
ccacttgccaacctgattacctccatccatcttattaacctgctgtcaagaaagccactctcttccagtggtttcaacaaaagtccttggaccaactcgcmcaggaaagatgaagtcagggaatggattattcagtttagttatatgcctgtacccagaaggcgccttctccaatcatgtgaactgtgagtaggtgaaaaa

SEQ ID NO: 225566 - DNA, 201 bp, Homo sapiens
ttctgtgattcctttgttctctggaagatttcctttgtatggtgataaggacagttgcccagccacttgccaacctgattacctccatccatcttattaayctgctgtcaagaaagccactctcttccagtggtttcaacaaaagtccttggaccaactcgcacaggaaagatgaagtcagggaatggattattcagttta

SEQ ID NO: 225567 - DNA, 201 bp, Homo sapiens
aacattggtctcctttgagggaagtgccatccccatcccaactcccacagcagcaggggctggggaggggtgctgctcccacactccctccctgcccctgycccagtggccccagaagccaaatacttctctataattccagattattctagtttaaataatgtagcttatcaaacaccaaaaatccatactagaagattt

SEQ ID NO: 225568 - DNA, 201 bp, Homo sapiens
catccacttccttctgtgattcctttgttctctggaagatttcctttgtatggtgataaggacagttgcccagccacttgccaacctgattacctccatcyatcttattaacctgctgtcaagaaagccactctcttccagtggtttcaacaaaagtccttggaccaactcgcacaggaaagatgaagtcagggaatggat

SEQ ID NO: 225569 - DNA, 201 bp, Homo sapiens
tcatctcttgtcctaagtgctggggtcacactggtgagcaaaacatggtccatttggtaaggtggatgtacttagaatgatttcttcacatttatactcaygtgggatggattatcagttgcaagtgataagaatgcatgtcaaagtaacttcagccaacaggaggagttattggctcaaatagtggggataccaagcttc

SEQ ID NO: 225570 - DNA, 201 bp, Homo sapiens
aagaagttgattatttaaaagttcataatgggtaagtatacttttatttgtaagaaagaagaattaatagagcaataataatggagaaatcagaagggagscaaaaatggagagaagagagtttttctgagccctagaagaagctggtaagaggtgttttattatactttgcatgggatttggatgttaactatagactgt

SEQ ID NO: 225571 - DNA, 201 bp, Homo sapiens
tctaagcacctttcccttgagaactagttttaatgaaggggattcttttgcagtgactcagagggttgaaactggagcttctcttctctctctatccctgstgctgccaggattcccagacagcagctgtttcccaaggagatccacctgtcttggaaatggaaggaagccccaccagcccccaccatgacttggcctcag

SEQ ID NO: 225572 - DNA, 201 bp, Homo sapiens
atgtctcatattcctaactattgcctccctagattaataaagtctttgaggatattttgggcacatttctttttattaaattgctttgaaggttatttatwtcttacagattttgtttaggcttgtggcaatctacagttgtattttgcatagaaggaaactaacaccccaagaagtaaaatgtccacagcatggttcttc

SEQ ID NO: 225573 - DNA, 201 bp, Homo sapiens
tgagctcagtttcattcctctgttacttgtatttgaagagccatgcgccttttgttgtattaagaaacttatgtgcttgtttgaataatacctgtctcccytactaatctggatattctgtaaaaactggggctgtttggatttttgttcatgattatgttctcagcattggttcactacctgatacgtgaaaggcattta

SEQ ID NO: 225574 - DNA, 201 bp, Homo sapiens
ttagagatacttgagattcactggtgaatagaaggccaagtgaggttgccttcttcccaggtgtgcctgatggatggaatctggaccctaagataccagtctgggaatggtgggtccctgctgcataatccatcatgatctttcaacctgagaggctagctttggatgggacagtctgtttaaggttgtagctgattttag

SEQ ID NO: 225575 - DNA, 201 bp, Homo sapiens
tgtcttttaattggagcatttagcccatttacatttaaggttaatattgttatgtgtgaatttgatcctgtcattatgatgttagctggttattttgctcrttagttgatgcagtttcttcctagcctcgatgggctttacaatttggtatatttctgcagtggctggtaccagttgttcctttccatgtttagtgcttcc

SEQ ID NO: 225576 - DNA, 201 bp, Homo sapiens
ggccaacatggcaaaaccctgtctctactaaaactacaaaaatttgccaggtatggtggcaggcgcctgtaatcccagctacttggaaggctgaggtaggrgaatcacttgaacacaggaggcagaggttgccgtgagccaagattgcgccactgcactgtagcctgggcaacagagccagactccatctcaaaaaaaaga

SEQ ID NO: 225577 - DNA, 201 bp, Homo sapiens
gttcctgtgttagtttgcttaggataatggcctccagctgcatccacgttgctgcaaaggacataatttcattcttttttttacagctgcatagtattctrtggtatatatgtaccacattttctttatccagttcactgttgatgggcatcttggttgattccgtgtctttgctattgtgaatagtactgcaatgaacat

SEQ ID NO: 225578 - DNA, 201 bp, Homo sapiens
gaatccatgtgcccctcctcatctccctcctcaagcagtcctcagtgtctcttgttcccatctttgtgtctatatgtattcaatgtttagctcccacttayaagtgagagggtgttgtatttggtttcctgttcctgtgttagtttgcttaggataatggcctccagctgcatccacgttgctgcaaaggacataatttca

SEQ ID NO: 225579 - DNA, 201 bp, Homo sapiens
ctctgctcactgtgacctctgcctctcaggttcaagtgattctcctgcctcagcctccctagtagctgggattacaggtgtgcaccaccatgcctagctartttttgtatttttagtttcaccatattggccaggctggtctcgaagtcctgacctcatgatccacttgccttggcctcccaacgtgctgggattacagct

SEQ ID NO: 225580 - DNA, 201 bp, Homo sapiens
ataaatgaattcaacaaagcaataagacacaaagtcaacaaacaaaaatacattgcatttttatccactaacaacaatctgaaaagaaaattgagaattamaaagaataaaatacttaggaattagcttaaccaaagaagtgaaaaacttgtacagtgaaaactgtaaaacatttctgaaagaaggtatcaatcaatgaaa

SEQ ID NO: 225581 - DNA, 201 bp, Homo sapiens
tctctcttaagtgtgttagtccttcccacctaatgacaaaagcagtttcctaagcaactgagcaccagaatgtgttaaaaaaaaaaatctagatttgtacstttcaaaaaatccacataaagaactgtgatttgctttaaggaaggggcaaatggaaacatggttttaattgagatatggatataatcctgttccagttgg

SEQ ID NO: 225582 - DNA, 201 bp, Homo sapiens
ttaggcaaaaatattcctttatttacattttattcacatttagttttttatgcgcacatttaaaggactttattgtaaacaacgacagtgattctagaacrgtagatagcttttttaaatgtaattactcttgtaagaggaaaaaatacatgatactaaaggattgtattttgtgaccacctataatgcaacaaatcatct

SEQ ID NO: 225583 - DNA, 201 bp, Homo sapiens
atagcttttagttattttgatatgatgctaacaatcacttctttgctagctcctttggaacgaagaaacatcttcaggtcctgctcattgggaacattctkttaaaaactccaggctgtcgtttctttgccatgtcagtatccacttccatagtaagttattcagtggttcctcattctccaaagctcattgtctgcatcg

SEQ ID NO: 225584 - DNA, 201 bp, Homo sapiens
aaagatagagaagatgcatttgggcagacagcaaactcatgggtcttgaggtgtgagaactacgtgcagcagaagagtatgtctgaggaattaaaagcagmcccagatagctagaagcaaaatacaagaagtcctctgggttttttagcaaaaggagctctagtctaacaataccctatgaaccctggagccaattgaacg

SEQ ID NO: 225585 - DNA, 201 bp, Homo sapiens
gacacagacccaaatgagatgctatctttgtcctcaagggcctcatctagtatgtgtggcaaacacatagaaagtaaattactttttattgttacaatcasaggaattaaagcatgaacccagcaaggtcaaaccacttagaacaatggaattgatttgaaaatgaggtactagtcatggaaatggaaggctttctgaaag

SEQ ID NO: 225586 - DNA, 201 bp, Homo sapiens
caaaataaagttgcattcagaaaaacaaaaacagaatatttattgccagcagaccaacttacactgtaaaaaatgctttgttctttgggatgacaagaaawaatagatgaaaactcagatccttatgtaaaaataaagaaatcataaatagtaagataaatataaaaatcaattttttcctcctaatgttttaagaatatg

SEQ ID NO: 225587 - DNA, 201 bp, Homo sapiens
ggcatgtggaggtagtgtacatggaggtttctttgcaggtcattgtctgaaggattgactatgtataagcagggcaagacaccatgaggcctagcagagarggttcactgtgggaccaagagccgaacaaagacactagtggttgcccagagatgggagacgttggaattcttagtctgagagggcagatttccctgagaa

SEQ ID NO: 225588 - DNA, 201 bp, Homo sapiens
gctcttaaaatttccctaagcacatgtcttgtctttgctctgtgcatgcttgttgtatattagccagcttaagagcttttggaggagaaatgttcaaagayaatattgctgtccattgtagtggggcaagttggttttcttgtggtcacatttctttcttgacttcatttggcagattattgtgttcaaagacatgcattt

SEQ ID NO: 225589 - DNA, 201 bp, Homo sapiens
taaacttcactcgaaccatccagggaagagtattctgggaaatgtagttcttgccatcagctttgcaatgcagagagcttagatggagccttatcttatgkaatcatattttatttgaataagacttctacaaaatgtctttttctcctactggattacaagtttcttaaaggttaagattgtttcttttatgtctgaata

SEQ ID NO: 225590 - DNA, 201 bp, Homo sapiens
attatatgattggtaaacaaccattatgcactttgtttccatccctccaggaaagctagattatccccagatagtagattgctgtgtggaaatgccaatakttgctccctgttaatccaaggtaacaattcaagaacggtcatttgatataagaaatttttactgtaatcccagcactttgggaggccaaggcaggcagat

SEQ ID NO: 225591 - DNA, 201 bp, Homo sapiens
agaacaagtttaaaggtttaggacaagtatgaaatcaaactactggatagttcctcctacgagggcatcttttgttagccatcttatcctgttattgggtyacagtagttcagtgacagaggtagtgatactcaggtagatttttggacctggtctagtatagagccgagcgttagaaagtccttgtcctacactacataa

SEQ ID NO: 225592 - DNA, 201 bp, Homo sapiens
attggcccctctttcaaactgcttttgctgtttcccatgaagaaaacctttttcattttgataaaaagcaatttctgttttcctgccaagccagcaaaaastcttttgagaaatgcttctgctttcctggtatcagggtgtaaaatctgcatgacatggagaccggtggtggcatcatttcagcagctggcaagggagttg

SEQ ID NO: 225593 - DNA, 201 bp, Homo sapiens
ttcaaagacaatattgctgtccattgtagtggggcaagttggttttcttgtggtcacatttctttcttgacttcatttggcagattattgtgttcaaagayatgcatttagcagtgactgttaagttggacctttctttttcctacttctgtgggaaaggtttccatatgaatgtgcacctacccttgggttattagagta

SEQ ID NO: 225594 - DNA, 201 bp, Homo sapiens
agtaggaggcaggcaccactaggttgctcaggtagatgctgggccaactgaggtgctggcctctccagagaggggattgggtcatggaacaccggcagacytaaaagggagacatggctgtccttttgtaaatggatcctcagaaacaaacgggggcgagactttactaccttcctggaaaaaacatgtctgttaattcac

SEQ ID NO: 225595 - DNA, 201 bp, Homo sapiens
atgtaaagaagacagaccggaatgatagtacaggaggcacagggatgtgagcaaaatcatgaagatcaacacagatggggatctgctccctaggatttcckcctctccctgtggagtctggaaacctcagtgtgacctggccttgtttccagcctgcagggcgatgttgtaccatataccaggttgtatgacctccctggg

SEQ ID NO: 225596 - DNA, 201 bp, Homo sapiens
ataaggagtgcagaagagtttctcttacaaaacttactgcaaacaatagaatcgggacagggtggtgcaaatagcaaaacaaaaggagcattttattcttsccccctccccaatatattaaatggttactctcaggcagaaaaccttttagttccaaataaatctcaagtaatagaaccagaagcaaaccaagctttctaa

SEQ ID NO: 225597 - DNA, 201 bp, Homo sapiens
agggatcccttccggctacagtttaatatccttttgtttcaaggttaacagggttagctgtctatctgtggcaagtgatactggttttccatttatggtamagatagaatgtttccatttaagtcaaagtaatttaaggaggaactgagcagatgtaaagaagacagaccggaatgatagtacaggaggcacagggatgtg

SEQ ID NO: 225598 - DNA, 201 bp, Homo sapiens
ttataacaaagcgtgggcaggccccaggctcagagcctcaggcagggatcccttccggctacagtttaatatccttttgtttcaaggttaacagggttagmtgtctatctgtggcaagtgatactggttttccatttatggtacagatagaatgtttccatttaagtcaaagtaatttaaggaggaactgagcagatgtaa

SEQ ID NO: 225599 - DNA, 201 bp, Homo sapiens
cattcagagtaggaacagcagaaaatctaccagaagtctccaggacatttatatactttttttttttttttccaaattgtgcgtgaccagcatatgcattmatatatttaatatttatttgaatcaactgacttttaaaacataaatttgtttttaagggaaactctgccaccgttttaagtaggaaatcatgttacctat

SEQ ID NO: 225600 - DNA, 201 bp, Homo sapiens
gggaagctttctcacctttctagtatttgctaatcttccttataacaaagcgtgggcaggccccaggctcagagcctcaggcagggatcccttccggctasagtttaatatccttttgtttcaaggttaacagggttagctgtctatctgtggcaagtgatactggttttccatttatggtacagatagaatgtttccatt

SEQ ID NO: 225601 - DNA, 201 bp, Homo sapiens
ttacttgtatttgaatgcctggtgtatcctaatacaaccagctgtttcttatcagcatcatcattattgcttctattgttaataagatttcatttcaacaraggattctagacctcaaagcagggttaaaaaaactgccctaccttggtgtttctggcaagcttgggaagttattccctttcatttctttcaacccttctc

SEQ ID NO: 225602 - DNA, 201 bp, Homo sapiens
agttctgggattacaggcgtgagccatcgcgcccggccttagtaactggaatcttgaggggcagtctgggtggtcattaaaaacagggactctggggttayaggaccagggttttggctgttactagcagagagatttggggcccattacttgacctttctgtgtctcacaagtttgttaatgaggagtaaatgagttaat

SEQ ID NO: 225603 - DNA, 201 bp, Homo sapiens
ctgccatgattgtgaggcctccccagccacgtggaactatgagtctattaaacctctttttctttataaattacccagtcttgggtgtgtctttagcagcytgaaaaccaacaaaaacagatgggtcacaaagttggccctgaactttctatcaccaacctaaataaggaaagagcatcaattcttgaggtaaaaataggc

SEQ ID NO: 225604 - DNA, 201 bp, Homo sapiens
aaacaaatgaataattttcaagtaatcaaatcaagccatatagtggacgcatttgttctttttctgccttttgttcataaccatgcttagcataacacttyagctccttaatcccttttcaaccacaactctattgtcagttgctagtaactggaattctttttttttttttttttttctgatggagtctcgctctgtcac

SEQ ID NO: 225605 - DNA, 201 bp, Homo sapiens
aaatatgttctgagtctggtactcaacatctctactactcctgccaaatcttgtctgaactgggtgcagtgagctctcaggtttccttgtttatcactccygcaactccagtctaccactatccatcctccagtctaccactatgtagctgacatagatttttaaaaatacagaaacaagaacaggttgttcctttgcatt

SEQ ID NO: 225606 - DNA, 201 bp, Homo sapiens
ataaagaaaacagtataccaaggtatatcatcagccaagtaatatgagaagagggttaaaagtgattaccttaaaggaagcaaagagctaaagagtaaaamaaatgaataattttcaagtaatcaaatcaagccatatagtggacgcatttgttctttttctgccttttgttcataaccatgcttagcataacacttcagc

SEQ ID NO: 225607 - DNA, 201 bp, Homo sapiens
gtctaagaaaaatagaaaagcctttttacccttaaaaagatttgaatctgttgaaggtactggcacagtaaccatatttgttcaaataaagaaaacagtayaccaaggtatatcatcagccaagtaatatgagaagagggttaaaagtgattaccttaaaggaagcaaagagctaaagagtaaaacaaatgaataattttc

SEQ ID NO: 225608 - DNA, 201 bp, Homo sapiens
actgcatattatttaatttatcaaaagtttttagtgacagtctaaactcaatatgaggcttaaggggcttaataatggtaatttaatttggaatcttttgrcattttaaaaaccctctggccagttaacagaacgcaataaaacataattataaaaatatgtagcatggcttcatatttctacatttccagggtatgtttt

SEQ ID NO: 225609 - DNA, 201 bp, Homo sapiens
ttgacatagaaattccttgaaatgtctagtaacgtattctgtagatatatttgaccaagtagctaaagaggttcaatatagtattatatatagtattataygtctatacattgaaattactctgcagccattaacaagcatctctatgaattgacatgaaaagatgtcaaacatgtgacagaacagtatgtattatagaaa

SEQ ID NO: 225610 - DNA, 201 bp, Homo sapiens
aacactatcattgaaaaaaatgtatgtaagccattttatgtcttaggttatgctgacagatgtgtaaagaaacttttaaacatttcaaactctaatactcmtactgcatattatttaatttatcaaaagtttttagtgacagtctaaactcaatatgaggcttaaggggcttaataatggtaatttaatttggaatctttt

SEQ ID NO: 225611 - DNA, 201 bp, Homo sapiens
aggcaaaatgtaatctttgatttatatgcttttatacatgttttgcaataacgtgtaccttgtaattatcattttatatttgagagtttggaatggaaacrtagggagttacaatattcctcccgagggacaatgtcatgtggaagttaagaacacaagctctagagccatgatttgcctggacttgaatcctgcctgcat

SEQ ID NO: 225612 - DNA, 201 bp, Homo sapiens
gcctacagaggcaggcaggcctccttgatctgtgatgggctccacccagttggagcttccaggctgctttgtttacctaagtgagcctgggcaatggcggkcgccccttccccagcctcgctgccgccttgcagtttgatctcagattgctgtgctagcaatcagtgagactccgtgggtgtaggaccctccgagccaggt

SEQ ID NO: 225613 - DNA, 201 bp, Homo sapiens
tctccactacagtaaatgccctgctggcagggcagaggacactgactgaattttattctgaagtgtccattgtagtttgactctgtattgtaaatcctctyttgccttggtttatgatgtttgaaatgtcttgtactgtagaaatttagctttatatctacatcattgttttattcactaaaacctgttagattaaaaatg

SEQ ID NO: 225614 - DNA, 201 bp, Homo sapiens
cagccagggaaataggtggcaatggtacctttcctctttgaaatatgtgacaatggtacctttccactttggggcattagacattatcccagccactagcytttaaagtttttatgtttggttacttaattttttgaacattaatatcttttttttttactcatctctgttatgggttgaattgtatcccttgcaaagaaa

SEQ ID NO: 225615 - DNA, 201 bp, Homo sapiens
tctcttctgtgttatatgacaggaagtgccctcgcttgatagtatttgcatcatgttcccctttgaatgcggaaattaagtagatccctgccatcacgtcrgtcatgattacacacatttggaaacatttcaagaacaattgtgtagtccaaaatgtaagtgcattcaataaaagcataacataacatgattatcctataa

SEQ ID NO: 225616 - DNA, 201 bp, Homo sapiens
gggcatcctctgtcatccagtcctggggacacagcagtgaacaaaacaacttcaaaccccttccctggtggagcacattttgttgtgggggataaagaagstgatgaagaagatggaatatgaaacatagactgtgttatagaggggtaagctctagggagaaaataaatcagggaagaagcctaggaaatgttgtggttg

SEQ ID NO: 225617 - DNA, 201 bp, Homo sapiens
aattaatttttaatttgatgataccaaataaaatggttttgtctttcctgtttgtcttttttctacatcaggagcatttacttaccatatagatgcaagtmtttttcaaagttctgtagaaatataaacacacatataaattgttcactagtagccacaaagtgtgtgtctagtcttctgagaagtttcttaaactgtctg

SEQ ID NO: 225618 - DNA, 201 bp, Homo sapiens
aatgtattggtgagatcatgaaagccaacatccaatatgttggattaccacaatcggctataagttattatttgaacatatggggcaattaatttttaatktgatgataccaaataaaatggttttgtctttcctgtttgtcttttttctacatcaggagcatttacttaccatatagatgcaagtctttttcaaagttct

SEQ ID NO: 225619 - DNA, 201 bp, Homo sapiens
ttcacttctgtaaagaacacagcagggaaccaccttgtacatacatcttttaggcatttgtccaattatttccttaggataaatttctagaaacgggtttsgtgttttagagcttttgatatatatggttccagaacaatctggatgcctgaaatcatggcagataaacaggtgctgagtttcgtggccatgctgaaagtg

SEQ ID NO: 225620 - DNA, 201 bp, Homo sapiens
acacgtgtaaatcagattttgcaatcccgttctgtagacaaccaaactgagattgatgcatttccagtctttcacttctgtaaagaacacagcagggaacmaccttgtacatacatcttttaggcatttgtccaattatttccttaggataaatttctagaaacgggtttggtgttttagagcttttgatatatatggttc

SEQ ID NO: 225621 - DNA, 201 bp, Homo sapiens
tcagaaaagacaaacataactttctcatgttttaagactgggagaatcaatttctatgtttattaaaataaatcatacacattagctctatgggacaattkggttggtttcaatatgtaggaatacagatattttaaaagtatgtaatctaggaaagtaagtatatatatgacatgcaatattatgtttttttcttaatta

SEQ ID NO: 225622 - DNA, 201 bp, Homo sapiens
aaaaatgatggcattgcatgctgtctctatttcacctcctgcttgctctgaaacccactgcagttaagttttgggtttttgttgttgttgttgttgttttgagacagagtcttgctctgtcacccaggctggagtgcagtggcacgatctcggctcacggcaacctccgcctcccgggttcaagcgattctcctacatcag

SEQ ID NO: 225623 - DNA, 201 bp, Homo sapiens
taaaaatgatggcattgcatgctgtctctatttcacctcctgcttgctctgaaacccactgcagttaagttttgggtttttgttgttgttgttgttgttttgagacagagtcttgctctgtcacccaggctggagtgcagtggcacgatctcggctcacggcaacctccgcctcccgggttcaagcgattctcctacatca

SEQ ID NO: 225624 - DNA, 201 bp, Homo sapiens
ctaaaaatgatggcattgcatgctgtctctatttcacctcctgcttgctctgaaacccactgcagttaagttttgggtttttgttgttgttgttgttgttttgagacagagtcttgctctgtcacccaggctggagtgcagtggcacgatctcggctcacggcaacctccgcctcccgggttcaagcgattctcctacatc

SEQ ID NO: 225625 - DNA, 201 bp, Homo sapiens
tctaaaaatgatggcattgcatgctgtctctatttcacctcctgcttgctctgaaacccactgcagttaagttttgggtttttgttgttgttgttgttgttttgagacagagtcttgctctgtcacccaggctggagtgcagtggcacgatctcggctcacggcaacctccgcctcccgggttcaagcgattctcctacat

SEQ ID NO: 225626 - DNA, 201 bp, Homo sapiens
gagcctctaaaaatgatggcattgcatgctgtctctatttcacctcctgcttgctctgaaacccactgcagttaagttttgggtttttgttgttgttgttgttgttttgagacagagtcttgctctgtcacccaggctggagtgcagtggcacgatctcggctcacggcaacctccgcctcccgggttcaagcgattctcc

SEQ ID NO: 225627 - DNA, 201 bp, Homo sapiens
actcgtgtttccagggatcatccaccaaataaactacttgcactctcatccttgcttcagggtttttgtctggggcaattgagactaaaaaaaaaaaaaaagcgtgtatcatatttgtatcactctacatgaagaaaaggattgttattgcttggtagtgagattaactggtgatctaaattttctcctatgtgtttttct

SEQ ID NO: 225628 - DNA, 201 bp, Homo sapiens
ggatgcatattcttcactggttctcagagttctctagcaggttttataagctccagtcacatgaaataataactcacttgatcacacatcctatattggcmtcctttcctttcttgtttccttcccttactcgtgtttccagggatcatccaccaaataaactacttgcactctcatccttgcttcagggtttttgtctgg

SEQ ID NO: 225629 - DNA, 201 bp, Homo sapiens
ggagcagttctcaaccagtgaggacaaaagttggtgtatgaatacgctagttccctcacaccttggctgggataactctgggatgcatattcttcactggktctcagagttctctagcaggttttataagctccagtcacatgaaataataactcacttgatcacacatcctatattggcctcctttcctttcttgtttcc

SEQ ID NO: 225630 - DNA, 201 bp, Homo sapiens
tgtgcagcattagcttaagcactttacctatgtatttcacataatcggtataaaagtcttatgcgttgggatactggttttatgcccacttgataaatgarggaatatgaaagaagttaaggaattgactcagtcaaaagaataggtaggatctgaaccttggccacccatctccagtgactgaacaccaaactgcttaat

SEQ ID NO: 225631 - DNA, 201 bp, Homo sapiens
taaaatgaggggtttatgtagcagagaagaaatgtaaccatgtgtaggaaaacaggaattagggaggggtaagggagagaagttgatcaacaggaagcagktggtctgttaggcaatcatgatgggtgagggatctgacatctcattgtccaaatacagtaatctggtgagtttcagctccttgatcctatctgggaggcc

SEQ ID NO: 225632 - DNA, 201 bp, Homo sapiens
ccttgtgccaactggggactcagtaactgttggtcaggcagatggatgctagaagtgactccaagtccaaatctttgtacacactcaggattggctcagcrtataactatacaattattttcagagaaacaatataatagaaaatattacatggttactgaaacaccaggggttcagtctaggtccttccatttgtttcat

SEQ ID NO: 225633 - DNA, 201 bp, Homo sapiens
tgcatgtttcatctgagaaaaaaatgtaattggtaatttaatgtatttttaaaaatttttcttagtggtaacttggagcataccattttttttaagttctktaccagcactgtctaatagaaagtaggtcaccaaagtaattcttacatttaagtaaagagaaacaggcataattaatttaatatagtttatccaacccaa

SEQ ID NO: 225634 - DNA, 201 bp, Homo sapiens
cttgcgatttttcttacctttcgataaaaaagtatgcattccctaatgtagagcagcataatttatcacattaaggaaagaattgttgtctcaattgtgawcttagcccaagaataaatgttgccaagcttacctccgtcttgtagaaaagcaaaaccataattcatcagtaatgaattttggtctgtgttgtagtttgtg

SEQ ID NO: 225635 - DNA, 201 bp, Homo sapiens
atggtgtgttaccttcaaggcatggatcccaacagagtttagaacgcagtaaaaagattttctacaagtaattatgatttgtgatagaaacacagttttckcattcaatcctgcctttgtctccacgtgggcctggttctccaggcttctgtagagtttgtgtatctatgggttttaaatgcagtgcttatttgaacagat

SEQ ID NO: 225636 - DNA, 201 bp, Homo sapiens
agcatttcctaccttcagtctattaaaaaaaaaatcaagagggagagcaggaaaaagcaaccaatggtgtgttaccttcaaggcatggatcccaacagagyttagaacgcagtaaaaagattttctacaagtaattatgatttgtgatagaaacacagttttcgcattcaatcctgcctttgtctccacgtgggcctggtt

SEQ ID NO: 225637 - DNA, 201 bp, Homo sapiens
aagaaaaaagaaattcactgtaacatctgttaagttggaagtcaatctaagtgtagaatttgggaaagactgttgctaattataaagcagagagactacayagaggcatcttctcagagataagcatatagcatttcctaccttcagtctattaaaaaaaaaatcaagagggagagcaggaaaaagcaaccaatggtgtgt

SEQ ID NO: 225638 - DNA, 201 bp, Homo sapiens
tttcctcatctttaatacaccacctttcttcatcatacctacatagacttggtacaggtaaaaatctaatcaaacaacggagtgaatagatatgagctatrcttaaatagctggacctcttccttttgattgcctgctgcctccctatagttctatcttagagactgctagggagtgttttaatcaggcttttgattagat

SEQ ID NO: 225639 - DNA, 201 bp, Homo sapiens
ccttgtgagctcaaagccaaaaggaaaaggcatatacccaggctctcagagttcagtgacactttatatagcatcacattccattatcttgctttttttttacttgaaaagatcttaatttttgaaaatttgaaatttaaagctgtctggctgctaaaagctcctttaaactctcattgtggcttggagcaatacatcatc

SEQ ID NO: 225640 - DNA, 201 bp, Homo sapiens
aagtgtaatcgtctctcactgttcctgtttaggtctattacagaaacagtaggaagatttctcattttgttctgtttattgcagtaggatttaaaaaaaaagggaggagttctctcaacacctgttttcttaattgattgtgattactttgcccccaaaagtgagtggcttttaaacgaagtgggtacattctcataagcc

SEQ ID NO: 225641 - DNA, 201 bp, Homo sapiens
tgcctcgaaacatgtaacctccattagaggcttcactcgaatgtttattcatggagcagtaaatgtttattattatacattttattgaaacataaattaaagaactgtaattatgtgtatagcaaacagtaaagcaatgtgcatttgtcacaaaatgagtaagacaaggaaaaatgctatcattgtttcatttgcatccaa

SEQ ID NO: 225642 - DNA, 201 bp, Homo sapiens
ctgcctcgaaacatgtaacctccattagaggcttcactcgaatgtttattcatggagcagtaaatgtttattattatacattttattgaaacataaattaaagaactgtaattatgtgtatagcaaacagtaaagcaatgtgcatttgtcacaaaatgagtaagacaaggaaaaatgctatcattgtttcatttgcatcca

SEQ ID NO: 225643 - DNA, 201 bp, Homo sapiens
gctgcctcgaaacatgtaacctccattagaggcttcactcgaatgtttattcatggagcagtaaatgtttattattatacattttattgaaacataaattaaagaactgtaattatgtgtatagcaaacagtaaagcaatgtgcatttgtcacaaaatgagtaagacaaggaaaaatgctatcattgtttcatttgcatcc

SEQ ID NO: 225644 - DNA, 201 bp, Homo sapiens
agctgcctcgaaacatgtaacctccattagaggcttcactcgaatgtttattcatggagcagtaaatgtttattattatacattttattgaaacataaattaaagaactgtaattatgtgtatagcaaacagtaaagcaatgtgcatttgtcacaaaatgagtaagacaaggaaaaatgctatcattgtttcatttgcatc

SEQ ID NO: 225645 - DNA, 201 bp, Homo sapiens
gagctgcctcgaaacatgtaacctccattagaggcttcactcgaatgtttattcatggagcagtaaatgtttattattatacattttattgaaacataaattaaagaactgtaattatgtgtatagcaaacagtaaagcaatgtgcatttgtcacaaaatgagtaagacaaggaaaaatgctatcattgtttcatttgcat

SEQ ID NO: 225646 - DNA, 201 bp, Homo sapiens
tctaagcatttctgcagattaccctatttgagtattttgtgagtcatctgtttcttgcccatatcataatagatatagacagctttaaaaaaaaaaaaaaactgtggttgtgattgtgcttttgtaattcacatatagtataaagttgtatttacttctttccactttgtgtttaagtttgtataatgaaatggtataatg

SEQ ID NO: 225647 - DNA, 201 bp, Homo sapiens
aagatacttataaatctagctttattaactttcctgacaaaccctaaaagtcaacacgttatcttctaacaagtttggaggcgtctctaaaatacagcctktagctatttatgtagtttctcctcactgttcctcctccagtgtttgccttttatggcctcaagagagagcataatctgaaataatttctaggatgcaaac

SEQ ID NO: 225648 - DNA, 201 bp, Homo sapiens
tggcttatttttcaattagaaaaaaaaatcttgaaagatacttataaatctagctttattaactttcctgacaaaccctaaaagtcaacacgttatcttckaacaagtttggaggcgtctctaaaatacagcctgtagctatttatgtagtttctcctcactgttcctcctccagtgtttgccttttatggcctcaagaga

SEQ ID NO: 225649 - DNA, 201 bp, Homo sapiens
gatagtggaggtataaatgattcattatatcattctatgtctttgaaattttttatgataaaaagaaaaaatcttaaaatgtagacttttatgatatcttrgctaataaaattctttgaagtgggtgatggactgatttgataccagtttccaaagagtgttagaatacagttttcgtgtggcttatttttcaattagaaa

SEQ ID NO: 225650 - DNA, 201 bp, Homo sapiens
acacaaatgatttaaaatttgtgaagtatggggaaaagggattaggatgttcctaatcttaaataaagcatatgattttcataaagtttactttaaagcartttatagtgtttatacaaagggaaatttgctaatgacattgccttaagtaacatctgggatttgttttgaaatagttttgtgagtgatagtggaggtata

SEQ ID NO: 225651 - DNA, 201 bp, Homo sapiens
accagtatgacacaaatgatttaaaatttgtgaagtatggggaaaagggattaggatgttcctaatcttaaataaagcatatgattttcataaagtttackttaaagcaatttatagtgtttatacaaagggaaatttgctaatgacattgccttaagtaacatctgggatttgttttgaaatagttttgtgagtgatagt

SEQ ID NO: 225652 - DNA, 201 bp, Homo sapiens
agggacctgtagtaagatccaggggaatacttgtcatggacacgtactggatgtccctaataggaggacaacatatatcatctctgttgtacacacttagwaatttgttcattaccagtatgacacaaatgatttaaaatttgtgaagtatggggaaaagggattaggatgttcctaatcttaaataaagcatatgatttt

SEQ ID NO: 225653 - DNA, 201 bp, Homo sapiens
aatttctaggtttccaatgctgtaaagagcactagcctctctaataataaaaatattaattgatggacattgcgtgaggactctctaaggagtcactgtgkatttgggcgcagacatgggcaaatgttggcagggaacacactctgcttccctagccaggactttctctattacgttaaaccagttgcccttgggattgat

SEQ ID NO: 225654 - DNA, 201 bp, Homo sapiens
ggaaaaaagaaaacaaactctcagcaaagcgtgggggattcctgctaacaggtcctcatctcatagatcgattccaggccacacagatgagctgaagagcrcaggctcctcccctgggtaaggtgcaaattccctgtggctccacccacttccctcagtgcacatatctggctccagtctgctttgggcatgtccagttga

SEQ ID NO: 225655 - DNA, 201 bp, Homo sapiens
acaccaccaggaaaagttaggcatggagacagtttgaaggatgaggggaatggaatttatttggcgaaaaggaaaaaagaaaacaaactctcagcaaagcrtgggggattcctgctaacaggtcctcatctcatagatcgattccaggccacacagatgagctgaagagcacaggctcctcccctgggtaaggtgcaaatt

SEQ ID NO: 225656 - DNA, 201 bp, Homo sapiens
tttttctctctagttaaacaacccagccatggctgttggacaaagaaaaaagaaatatgtcatcatgttttagttatttttaaaagcacctgctttttagmacacaatttgcaaagattatctgaaatagattaaccttttaaagtgataatgacataaaattatgtaagtaattttcctaagaaataacacactgaaaat

SEQ ID NO: 225657 - DNA, 201 bp, Homo sapiens
agcccctgttaaggagaataatgttcctttgaaagattttgtagtaacggtcaaagcaaggagcaaattacttatagcaaatcataaaatggtgggagaargagagcttcactttggaactcttagctccttgctccaattcccacagtaaacaacagcacagttttaaaatgttgcacgtgggcccagagatatttattc

SEQ ID NO: 225658 - DNA, 201 bp, Homo sapiens
ttaaatttagcccctgttaaggagaataatgttcctttgaaagattttgtagtaacggtcaaagcaaggagcaaattacttatagcaaatcataaaatggkgggagaaggagagcttcactttggaactcttagctccttgctccaattcccacagtaaacaacagcacagttttaaaatgttgcacgtgggcccagagat

SEQ ID NO: 225659 - DNA, 201 bp, Homo sapiens
aaaatcttaaatttagcccctgttaaggagaataatgttcctttgaaagattttgtagtaacggtcaaagcaaggagcaaattacttatagcaaatcatawaatggtgggagaaggagagcttcactttggaactcttagctccttgctccaattcccacagtaaacaacagcacagttttaaaatgttgcacgtgggccc

SEQ ID NO: 225660 - DNA, 201 bp, Homo sapiens
tgggagcctgaggtgggaggatcacttgagcctgggaggtagaggctgcagagagctatgattgcaccactgcactccagcctgggcaacagagcaagacygtgtctctaaaaaataaaaaaagaactaagggctgtaatccagacagctaagtatgggagaggggatgaatcatgtggagtcttggaaagctctgattct

SEQ ID NO: 225661 - DNA, 201 bp, Homo sapiens
gttcagcattctggttgaaactagctgaactatcagaatctctcaggcagaacaacctagagactcctatagagaactaggaagccaggcacagtgggtcrtgcttgtaatcccagcactttgggaggccgaggtgggaggattgcttgagcccaggagtttgagagcagcctggacaacatagtgagactctgtctgtac

SEQ ID NO: 225662 - DNA, 201 bp, Homo sapiens
ccagggcctcataggacaatattggtgccttttacagacaggagtaaggtagcccctgtaattagacaaggagagttgagttgttcttacttccatttgcmgttaatgattctaattaaagtgaaggttaccaagggcctctcttgtcatactccatgcaggaaaggctgggagaagggaggcatttcaagtaaagcaggt

SEQ ID NO: 225663 - DNA, 201 bp, Homo sapiens
ttatggagctgaaggctagtatcctaagcaaattaacataggaacagaaaaccaaatactgcatattcccacttataagtgggagctaatcatttagtacwcttggatacagagaaagaaacaatagacaccaggacatatttgagtgtagaaggtgggtgaagggagcggatcaaagaattacccattgggtactatgcc

SEQ ID NO: 225664 - DNA, 201 bp, Homo sapiens
tgcagcaacatttatggagctgaaggctagtatcctaagcaaattaacataggaacagaaaaccaaatactgcatattcccacttataagtgggagctaawcatttagtacacttggatacagagaaagaaacaatagacaccaggacatatttgagtgtagaaggtgggtgaagggagcggatcaaagaattacccattg

SEQ ID NO: 225665 - DNA, 201 bp, Homo sapiens
aagaagacatacatgaggccaacaagcagatgaaaaaatgctcaacatcactaatcattagagaaatgcaaatcaaaaacacaataagataccatctcatmccattcagaatggctattactaacaagtcaaaaaatagcaggtagtggtgaggttgtggaggaaggggactgcttatacactgcttgtgggaatgtaaac

SEQ ID NO: 225666 - DNA, 201 bp, Homo sapiens
aagctgccccagatggaccttggctggcttgttgggtctgtttcagcagcggaattctctgaagacaaagggaaggtctgatcatatttgaagcagtttttctagtaagtgtaaggaatgaacatttcacttttaagtaagtggcttttgatttaagatcaactggataattcatggtggtcatgtttttggggagagggg

SEQ ID NO: 225667 - DNA, 201 bp, Homo sapiens
gttccatcatctactctgttcgttgttttttttttttcccttaaaaacatcaccctgtcagaatgtgtactctgttgcagcaaaaatcaattatacatatygatcagaacttgtcagcagatcctttgaaggtttacaacacaccgttttgttctgccatactagtcgggaagctgtggccaactcctgtagagtgagggt

SEQ ID NO: 225668 - DNA, 201 bp, Homo sapiens
atgggagtgtgtactgtaataatctgttaattttatttctgcagaacctagtcattacttacagcatttctggtgagtggctcctacaccaataccaattstcttctattgttttatcaaactaatgatctccactgccttaattttagctgttccagccagatagacaagagaatgaatcaggaaattctaactgcttga

SEQ ID NO: 225669 - DNA, 201 bp, Homo sapiens
acttccaagctccctcaggttgttgacagacttcgtttctttgtggctgtaggattcatgacagtttgcttcttcaaagccaacaagggagagagactctygagtgagtttgctagcaagatggagttttacataacataatcatagcagtaacattctatcatctttgcatttcttttggttggaagcaaatcactgaca

SEQ ID NO: 225670 - DNA, 201 bp, Homo sapiens
tgcctagtgatacagttaattaacattaaggggtaggccccttgtattagtttgctgtcgctatataacaaattactccaaatttagtggtgctaagatawcacacctttattatctcatagttcatgtgagtcagaagttcagacatgggttaatggcttttttttgcttcagtgtcctaccaggctgcaatatagcttt

SEQ ID NO: 225671 - DNA, 201 bp, Homo sapiens
aagagctaattacgatacagggcaagaagtgaaatgatggagattgcacaggatgttagcaagctataaggaggaacaaacttatcaaagaaggcttcttyagggtaagagctagctaattaaatctttagagggcacaggggttagccaggtctaggactgagaaggaagggcatggtttctgcatgggtctataagtga

SEQ ID NO: 225672 - DNA, 201 bp, Homo sapiens
ttcttcagactgggttggcttggggctttttcgagaatcatcttatatcagaacctaaggagatactaaactgagtctgtttttagcagggtataggaatrtatgccttcaaatcctatgccttggattttcatttttacaaatctgatgggccacatatatgggttggaaaagtttaaaataaggataggaataataaag

SEQ ID NO: 225673 - DNA, 201 bp, Homo sapiens
aaagaagacatacatgaggccaacaagcagatgaaaaaatgctcaacatcactaatcattagagaaatgcaaatcaaaaacacaataagataccatctcayaccattcagaatggctattactaacaagtcaaaaaatagcaggtagtggtgaggttgtggaggaaggggactgcttatacactgcttgtgggaatgtaaa

SEQ ID NO: 225674 - DNA, 201 bp, Homo sapiens
cacctcccaaattcaagcaattctcctgactcagcctcccaagtagctgggactataggcacatgccactatgcccggctaatttttttttttttttttttgtatttttagtggagacggggtttcactatgttggccaggatggtctcgatgtcctgaccttatgatctacccacgttggcctcccaaagtgctgggatt

SEQ ID NO: 225675 - DNA, 201 bp, Homo sapiens
gctggtgagggtaacagaaaccaaatctctctgatggaaatatagaagacaactactactctggaaaatagtgatttatttattttttatttatttatttwtttttatttttattttttttagacagaatctcgctctgttgcccaggctggagtgcagtggcatgatctcagctcactgcaacctccacctcccaaattc

SEQ ID NO: 225676 - DNA, 201 bp, Homo sapiens
attcctttctaggcatttactcaggctgttcctccacctggagggcccttagcctcatcttcttttgagtttcgaattgcagattttcccaggagaggagkctccatctccttcagcactttgcacagcactccttaggtgagagttgagaggtgtgtgtgttttcccctaagttatttgtctccaaagagcagggaccgt

SEQ ID NO: 225677 - DNA, 201 bp, Homo sapiens
atatatatcacaaatgaaatttaggacctgatggcagatgttgggagagggggagaggaggtgctgtgaatgactcttagatttctggcttaagtcatggktgagtatcaataccatttaagcaggtgaggaaaaactaagtttgggaatggggcaatggagagttcagtttttgacatattgggttgagactcttctatg

SEQ ID NO: 225678 - DNA, 201 bp, Homo sapiens
agaaaaacgtatacggttaacatatatatcacaaatgaaatttaggacctgatggcagatgttgggagagggggagaggaggtgctgtgaatgactcttakatttctggcttaagtcatggttgagtatcaataccatttaagcaggtgaggaaaaactaagtttgggaatggggcaatggagagttcagtttttgacata

SEQ ID NO: 225679 - DNA, 201 bp, Homo sapiens
gcggttgctgggcagagaactgactgtggagatacaggagtggagttaggaggtgattgccgtcattcagatgagagacagtgctggtggtagaaataaaraaaaacgtatacggttaacatatatatcacaaatgaaatttaggacctgatggcagatgttgggagagggggagaggaggtgctgtgaatgactcttaga

SEQ ID NO: 225680 - DNA, 201 bp, Homo sapiens
ggctcattgcgagctccacctcctgggttcacgccattctcctgcctcagcctcccaagtagctggggactacaggtgcctgccaccatgcccagcaaatktttttttatgtgtgtgtatttttggtagagatggggtttcaccgtgttagccaggatggtctgtatctcctgacctcgtgatctgcccgctttggcctcc

SEQ ID NO: 225681 - DNA, 201 bp, Homo sapiens
ttcttttcttttattattattattattattattttttgagatggagtctcgctctgtcacccaggctggagtgcagtggtgtgatctcggctcattgcgarctccacctcctgggttcacgccattctcctgcctcagcctcccaagtagctggggactacaggtgcctgccaccatgcccagcaaatttttttttatgtg

SEQ ID NO: 225682 - DNA, 201 bp, Homo sapiens
ttttctaagatatcttttctccattcttttttcttttatgtttcttagtctttcttcttccttctccttttcttcattttcttcactcttttcttcctttkttcatctaatcttttcttctccatcctcccctaaagcagaattatggtagctttatatactatatgttgtattttgtagcattctttggatctactgggc

SEQ ID NO: 225683 - DNA, 201 bp, Homo sapiens
ctctgaagctcataggaattgatttcatttgaaacagtggggggaatgtcaagcctaactaaggtcattgtccaaagcaatagacattgtggtgataagcmattaaaaggaggctggtagctctataaaatctacaagctaacccatcgattacctagatgatcagagagaatcaaagaaaggtaaaggtaagagagccct

SEQ ID NO: 225684 - DNA, 201 bp, Homo sapiens
aaatgctcaacctcactaatcatcagagaaatacaaatccaaaccacggtgagagaccatttcacaccattcagaatagttattaataaaaagccaaaaaracacagatgctggtgaaaccgtggagaaagggggatgcttatacactgttggtgggaatgtaaattagtttagcctctgtggaaagcagttgggaggttt

SEQ ID NO: 225685 - DNA, 201 bp, Homo sapiens
ctgggtggcccctggctctgtgctctctcagcctcagtgtgacatttttaggcacacatgttaaaacagtcttcagatgttcaataggaaaccaacacaaygtcagaaagaatagcaccctaacaatttcacagaatggtttgcttatgtctgtctgctgaattcctaagcctccagatgcagagggaagtattcagttag

SEQ ID NO: 225686 - DNA, 201 bp, Homo sapiens
tccagcagacattcatgttgctgctatagtccttcattattctctttgcaaagctgtgtactaccagaattctggatggaaaaagctgaatgcacattcartctactcttagagtctcaaattcaaagggatggcttgcagtgagtcagctgtggaagaccaaataatagcctcccaaatggtgcctatgtaccaatcttt

SEQ ID NO: 225687 - DNA, 201 bp, Homo sapiens
taagtatcttgttttccctgaatcttggagatggaaacacatgcaaaatatgtgataagaaagcaatgagggcaatgctgagttataaaaaatatctctgrctttgaggagttaggtataaatgcactaactgtacaaacaacctgtgaatctaaaattctgccatgcttctgtagttcttgaggaccacaagaccaaggt

SEQ ID NO: 225688 - DNA, 201 bp, Homo sapiens
catgaaggacacttactctttggcctttgccagcttgtcagagttcttctcatgggctcaaaaaaaacttgtctgttcttacatactttgctaagacctgmaggaaattaggtgcctccagcagacattcatgttgctgctatagtccttcattattctctttgcaaagctgtgtactaccagaattctggatggaaaaag

SEQ ID NO: 225689 - DNA, 201 bp, Homo sapiens
tatttgccatctgtcagacacattaagtcttctctgtcgaacagtgttgtcagctgaccttattatgctgggaaggactggagaagagctactgtttcatytcccagatttcctcagtctcccattaagaaagtgctgaatttaattctcatttctgttgctttttatgtggcaggatggtgacgctcagtttcacagttt

SEQ ID NO: 225690 - DNA, 201 bp, Homo sapiens
tcagaccaagaataataaagcaaattagtcctaccatgatttatcattagtaaaaatgggaaactggagagagaaaagttatatttcaaaaactgtagtayacctgttgttagattctagtcttgcctgtttttattattttctgtggtttggaatgaattctaatttttctgggctacaagtctgcaaaacaatgttttc

SEQ ID NO: 225691 - DNA, 201 bp, Homo sapiens
tcacacttgggatgacttacacagctttgtgatccaggagctccactagtttgaagctcttctctgctatcatcccatccatcttatatagacaaaccccrtaaaattccaaagtccggttagaaactgtagaatgagggctaattataacaacctatagctaaagccagagacattataccttcaggaactgggcaaaac

SEQ ID NO: 225692 - DNA, 201 bp, Homo sapiens
caccagtactctccaagatagacaatccaaaataggctggtcaacacacaccttcatgtatggaactgtgtctacacccaacccagagaataccaggcatytctgtgtcatcccctctacgttcaaaatgctcttacctgcattatggttccagtttacatcagagtgtgtgtgagtgtgtgtctataaaacttggacaac

SEQ ID NO: 225693 - DNA, 201 bp, Homo sapiens
aaggcttttgtgtgcatttcaggttaatttggcatatttgcctcatttcacattaaatgttttatgtgtgtttaacttctctatttgaccatttagcattmgagagactccataagaactgttaattatcaagggcatctctctgcgttaatgtgcgggcaccgtggtatgttctttactctgaggctgaggaaatgtggg

SEQ ID NO: 225694 - DNA, 201 bp, Homo sapiens
attccagagctgaaaggcttttgtgtgcatttcaggttaatttggcatatttgcctcatttcacattaaatgttttatgtgtgtttaacttctctatttgmccatttagcattcgagagactccataagaactgttaattatcaagggcatctctctgcgttaatgtgcgggcaccgtggtatgttctttactctgaggct

SEQ ID NO: 225695 - DNA, 201 bp, Homo sapiens
gagagaggtaagactagccagtgcttagtggtcaaagaatacctgttcagaaagaagtgaagtcaactgatttttaataccagatcaataattttttttttctttttgctgaccctggcagcaaaaaggagtggcagtagtgtaaactgataccttgaatcctgtgggatatttttgttctctatcataaaatataatttt

SEQ ID NO: 225696 - DNA, 201 bp, Homo sapiens
atcttgaccctatcagttgatattgaagactgaggctgaatttccttttcgtgacctggaataaacaactgcacttgttttcctaaattattttccatccrcatgcggtgtctaccatttaccttctttccctggggcattgggctagtttcatctattggtgatctgggataaggctgaattggactccttgaaagaggc

SEQ ID NO: 225697 - DNA, 201 bp, Homo sapiens
taaatgtaatatttgagaataataatcaaattattactgtcaatgagaatacacattgggctggactgtctgctaggtgccaagcatatcattcataccaytgaattgaaactaaatttgcagagagtaaatatctatgtcaaaacctcataaccagctcatggcaaagcttgtttatatcaaagtctgtttgactacaaa

SEQ ID NO: 225698 - DNA, 201 bp, Homo sapiens
aggaagggacttttctctttagtccctggctctgtgtcccttcctactcccttcctccccacctctccttgacacacacacacacactctctctctctctstgtgtgtgtgtgtgtgtgtgtgtgtgtgtgtgtgtgtgtgtctccttacatcagtagaaatggcaactgccttgcctggtgacaacatgccagtggagga

SEQ ID NO: 225699 - DNA, 201 bp, Homo sapiens
agtgaaatgagcaataggttttccatgttatgcagcaactctgattgattggtaatggtatctaaaagattctgttaatgccctgcaggagaacatgtcakagttaattagcgacatctgcctacagtgcaggaggaagatgccacaacatgagtgctaggcctgggcccttcctggtatagaagaccccaggcagtgagc

SEQ ID NO: 225700 - DNA, 201 bp, Homo sapiens
aattcctagcaaaacaaatcttgcccagtctttctgattcctagttttatttcatgaactcaaatgttccctgagggccgggattcaacacaaatttgttytacatttcccacaattccctgctttgccccagacaacacgtatcataggatcttatctgttgatgtggttgtaagcaactctttgttaatgacaaacatt

SEQ ID NO: 225701 - DNA, 201 bp, Homo sapiens
ttcactgtgggtctttaagtcaacattccaaactctccccagccaaagtttctagaagagatttcaccagatacttttttctctgaggctctgagtgtctrtctgtccttcgtgtcctgaattgaatgttttcaggaggggctgctttttcccataaaatgatctcttagaggtttaaacccctcctctgttcttgtggct

SEQ ID NO: 225702 - DNA, 201 bp, Homo sapiens
tgtggcctggctatgagtgccaggttagtttctaacagtgaggcccagctatatgtgttgagcagtttccagatgtcaagggtttgcttttttcttctttygttccttatcagaatacttccatctgtcttgccaaagattcaaagatgagctggtaggaaccaatttggaccacatagtggtaaggagaactttgctcat

SEQ ID NO: 225703 - DNA, 201 bp, Homo sapiens
tttgctttatatttatctaaaagcaatgtttgtaactttttaaaaattatactttgacattctttggatcttcatagatgctgtaggggacaaaagatttytcatctgtcactagactcatgactgagacactatgacaaaagacagattaaccggagaaaaacatacaactttatttaacataagttttatgtgacacag

SEQ ID NO: 225704 - DNA, 201 bp, Homo sapiens
gtgacaacctatttgtataaagtgacagggtttgaactaaatataccacatgaaatctaagttataggtgatggaatcttgtttgtagctctagtcgttakcctgctcacactcctcccctgccagcctgctcactcagcccctgtattctgctaatgtgactgttttcaagagatccctttaatgtagacaatataaatg

SEQ ID NO: 225705 - DNA, 201 bp, Homo sapiens
aacagaataaagaatatatgtaacagcaatatattcattcaagccttcagtgatcatttgttttacctactgcataccaggtacagtggtgcatgctgagrttttgccagtctcacatgtatacagtataatgtattgtctaagttgtaggtgcttacagagtatgatagaaaaagcccattattttgcccatggcaagga

SEQ ID NO: 225706 - DNA, 201 bp, Homo sapiens
catccctttctgcaagtacggcatataccggaaattgagcacagaaatcttaaagcagattaaagagggcaaaaattcattgtgaaatattcccaaagtamagttagttattacacttgatcttagctggaaggccaaaaagtgatcacagttagttattgataatatacttcactttaggtgaattggtttgtgctagct

SEQ ID NO: 225707 - DNA, 201 bp, Homo sapiens
gtaatgtgtagaagccacggagatgtctcagaatcccagttccaagacagtagggactggggctgatgtgctggtctaggcctgctccctttttttatctmttggtacctaataaacatgatgctgtttgatgacctaattacattgtgttaacacatttgtagttagccacaagcacttaacctagctcagaacttcatc

SEQ ID NO: 225708 - DNA, 201 bp, Homo sapiens
ggggttgcagtgagctgagatagtggcattgtgctccagcctgggcaacagaatgaaaaaaaaaatcaaaaaaagaatcctggctaatgcacgatgcatasgacttcatcttttccttgctagaatctctaatttacaaatagaaaactttggatttagtaattatgccagtaatgtgtagaagccacggagatgtctcag

SEQ ID NO: 225709 - DNA, 201 bp, Homo sapiens
gttgtcatctttattctgagagaatgaagccaacactggagagggaaaggactatacattagtccgccttatctaaagggaatacattctaagaccccagyggatgcctaaaactgcagatggtaccaaattctgtttgtactgttttttcctatatgtacatagttacgatgaagtttaatttataaattagacacagta

SEQ ID NO: 225710 - DNA, 201 bp, Homo sapiens
gttgggagcttcctgaggccaccttccacagccaggttgtcatctttattctgagagaatgaagccaacactggagagggaaaggactatacattagtccrccttatctaaagggaatacattctaagaccccagcggatgcctaaaactgcagatggtaccaaattctgtttgtactgttttttcctatatgtacatagt

SEQ ID NO: 225711 - DNA, 201 bp, Homo sapiens
ttcagggtgggcagccataaagtgtgaaccgctattgatagtgcttttttctttttgccgttataatatgcttaaaatggagtattccttgacatgtgcaraccgcaaaggaagtgatacttggttcagagttttttttcttcctctcattccttcccccatcctttctctgctctcctcttcctcttttttttctctctc

SEQ ID NO: 225712 - DNA, 201 bp, Homo sapiens
gaaattctttttcttctttccttgtttttggaaagaatgagtctgtctgagttttcccaagaaagttagctgctacagtttcagggtgggcagccataaastgtgaaccgctattgatagtgcttttttctttttgccgttataatatgcttaaaatggagtattccttgacatgtgcagaccgcaaaggaagtgatactt

SEQ ID NO: 225713 - DNA, 201 bp, Homo sapiens
taaaatatttttctatagtaaatcctatacatatatacatatatgtatataaatcctatacatacgtacatatatttttaatatataatataaaatatatraatatataaaaatatgaaatatttttctatagtaaatcctatacatatatacacatatatacgtatatgttttaatatataatacaaaatatatttatat

SEQ ID NO: 225714 - DNA, 201 bp, Homo sapiens
ttgaggaaaccacatgaagaggcaaaactgcagctgtctccttgcagataatgggtgtggagtgttttctatggaagccaccacaggacactgacaagagscaccaaatcctcagagcactctttaccccgacatgagcccaacaaagacctcttataaaagccaacatcagttgcttctgctttcacaaatattatcatg

SEQ ID NO: 225715 - DNA, 201 bp, Homo sapiens
tgctcaattttggaggctgcctgagaatttctcattctctgttgcttccagatttccaggaagagtcagagcctcacactttttacttgaaaagctgataygcattccctataaacctcccaaatgtgtgaaataattacccaggaaacaaaagagagggacttttacagtcataaattcattcaaggatctacatgaggc

SEQ ID NO: 225716 - DNA, 201 bp, Homo sapiens
ctccaaaatgtatggcagcagatgtttcagtggaaatcttacaagccaggagagagtgatattacatatttaaagtactcaaggaaaaaaaatcttctaayctacaatagtatatccagtgaaaatatccttcaaacatgtatatttaggagaaataaagactttcccagacaaacaaaacaccagaactatcctgcaaga

SEQ ID NO: 225717 - DNA, 201 bp, Homo sapiens
tatttaccttgtggtcctctttcagacttctctggcaatttggattgattctctatttcttcttctacctagaaactttgtagaagttgaaagaaaatgtrttactttccctttaaagaatcatcaatgcctttggctgtgtacatggcatgatttttatccctttcccaaactggttcctcccatctcagggttctctat

SEQ ID NO: 225718 - DNA, 201 bp, Homo sapiens
atataaatgcatttcaaattcctccagcaacgactaacattttaccagctgtcttattccattgttgaataaccccagctataatagtttgctttttcatytcctttctttctttttattattgtgaaccaacactttgcttctctgaaatatttaccttgtggtcctctttcagacttctctggcaatttggattgattc

SEQ ID NO: 225719 - DNA, 201 bp, Homo sapiens
tgagccttataaaaaggtgggggtagaggggggtgttagataaattgcaattttaattgcaaacctaattgattatactcagcatgctcattaggtcaagraagactatgagtcagctcccaaggtcattacattactagagtaagcatgtaatttgtgataagttgatttgtgaacatcacattcttctctttaaacaga

SEQ ID NO: 225720 - DNA, 201 bp, Homo sapiens
agataaagcagatttcatagtgatctgtgtagaagtggctaacagatttctacgggcagtcagcgaaagcatgaaaacccagctgagaaatgataaattamtgctaactgtcctaattatcccttgataccctgtgttgaaacctgactaaattttgctgaaacttacaaatagggaagaaatttaaggtttaataaatta

SEQ ID NO: 225721 - DNA, 201 bp, Homo sapiens
attaaaacctctgcctcccgggttcaaataatcctcccacctcaccctcctgagtaactaggactacaggcccgagccaccatgcctagctattatttgtrtttttaatagagatgaggtttcatcatgttggccaggctggtctcaaactcctgacatcaagtgatcctcctgccttggcctcttaaagtgctctggaac

SEQ ID NO: 225722 - DNA, 201 bp, Homo sapiens
tgatctcggcttattaaaacctctgcctcccgggttcaaataatcctcccacctcaccctcctgagtaactaggactacaggcccgagccaccatgcctakctattatttgtatttttaatagagatgaggtttcatcatgttggccaggctggtctcaaactcctgacatcaagtgatcctcctgccttggcctcttaaa

SEQ ID NO: 225723 - DNA, 201 bp, Homo sapiens
tgtgtcactgaaccttactctactacaagttaggttgcctatctagccctgtcaaaaaaatgactgaacacatccactgagtcacacacaaaaggatagtagagatcttttcattgtttcttttatgtttattaaattttaaagataaagctctaaaagtgttatgctaccagctggcgagaattgtaggagatgcagatg

SEQ ID NO: 225724 - DNA, 201 bp, Homo sapiens
tgtgtgtgtgtgtgtgtgtgtgtgtgaagtagaatcgtagattttttttaattctgtagtctctgggatattatcagtttttattttattttatgtccctrtttagccaggggaatcccttcattctggttcatgtgttcttttgacctgtccccacaattttggtttttctttgtttttttttagccatttgtaactttg

SEQ ID NO: 225725 - DNA, 201 bp, Homo sapiens
caagtgttttgtagaccctaaaataccacctaaatgtaaggcgttattattcagtcagagtcttacctttgttgatgtagtaaggccggttactcactgtkgtcattttgctataggatactagtgctcaataactaatcattgaaggagcactactctgcctcaccattttgctatgggtgtttcaagcctaggaaatca

SEQ ID NO: 225726 - DNA, 201 bp, Homo sapiens
tcagtgttttataggattcagtaaactgtcttttacacctgaggctcagagcctgtaatttctacttaatcactgtgaagtcaaacctcctgtgaaaggcragtgttttgtagaccctaaaataccacctaaatgtaaggcgttattattcagtcagagtcttacctttgttgatgtagtaaggccggttactcactgttg

SEQ ID NO: 225727 - DNA, 201 bp, Homo sapiens
tgtgtagttctgtaacagtgaccaagcagtggacattcctatccattcaaggctgaacatgtgatggagcaaggcatgtctgcacagggcctagcaggaargggttgaacccttataacttggaaactaactgaatgggagaaatgagatggaataaggcactgacgttggtgcaatttctgattatattttgttgccatt

SEQ ID NO: 225728 - DNA, 201 bp, Homo sapiens
agtggatatttggctgtttaatttattttgctatttgtaatgccgacacgtggcacatatagtagggacattcagtgttttataggattcagtaaactgtsttttacacctgaggctcagagcctgtaatttctacttaatcactgtgaagtcaaacctcctgtgaaaggcaagtgttttgtagaccctaaaataccacct

SEQ ID NO: 225729 - DNA, 201 bp, Homo sapiens
gcatatgcctatattgataaaggaaaccagagtttcacaaaacaatgtttactcattctgtgcagtctaatagtttttattctattaagatctgatttctkgctgggtgtggtggctcacacctgtaatcccagcactttgggaggctaagaccggcagctctcttgagctcaggagtttgagatcagcttgggcaacatg

SEQ ID NO: 225730 - DNA, 201 bp, Homo sapiens
tgtggtcaaactattttttactgtaacctacagtaagatacatatttatttcaaaatcatgcctgtctcccctgacacacatatatgaaatatatgcatakgcctatattgataaaggaaaccagagtttcacaaaacaatgtttactcattctgtgcagtctaatagtttttattctattaagatctgatttctggctgg

SEQ ID NO: 225731 - DNA, 201 bp, Homo sapiens
cagaagtaaatgtgtcttcatagcctatgtataatatggaatttacccattaacaaggcctaagaggctccaaattaaattatattgcatctgtgatattrttttaaaacaattggcatataaaaagtggcattagaattacaaaagctatctgctgttcttctaattaatttgctttccctgagttgtttttctaggagc

SEQ ID NO: 225732 - DNA, 201 bp, Homo sapiens
gaagtcgcctttggttttcatctactgtgagaaatctccttgtcagctatacaacctaaattataactattgaccttcgcttcctttaaaaaatattattrctaaaaaaactctatactctagattatagggagaagtggtaaccagttccacaagttttcacacatgatatgtactggataaaacatttattcaattcaa

SEQ ID NO: 225733 - DNA, 201 bp, Homo sapiens
cactgcaacctccacctcccggattcaagggattcttctgtctctgcctcctgagtagctgggattacagatgcccgccaccatgcccagctgttttttttgtatttttagtagagatggggtttcaccacgttggccaggctggtcttgaactgctgacctcaggtgattcgcgcgctttggcctcccaaagtgctggga

SEQ ID NO: 225734 - DNA, 201 bp, Homo sapiens
agcagttgcatgagtgagtccaggtgagaccctcagcaaaaaccatccacagacttatggtagtaaaacctatcaatgttggtttgttgttgttgttgttkttttgagacagagttttgctcttgtagcccaggctggagtgcaatggcgtgaccttggctcactgcaacctccacctcccggattcaagggattcttctg

SEQ ID NO: 225735 - DNA, 201 bp, Homo sapiens
tctggagaattctataaattcaagaaagaaaagtctccaaatggtgagctacatgacactgtcccacccaccgtatctcaaaattacatcactcttcacctactacccaagccagaaccttggaatcctctttgatccttctcttcctttttgcccccattagttaagtcttgttgctcctacctcaaacatacatctcaa

SEQ ID NO: 225736 - DNA, 201 bp, Homo sapiens
agcctttgtttctaaggtagaaagtggatgtcattttcagcaatgcaaaaatgacctccacaccctcacataaagcatttgggtttggcaccttgatttcwtcaatgaggtgttcgcagcagcagccacaggaacagctggagtattgagggaacctcacaagacagatgactacatggggagactgtattagtaaaaatt

SEQ ID NO: 225737 - DNA, 201 bp, Homo sapiens
taaattgttcactgctgaatcagattaaaatgacttcggtgttatggcattaaaaaatcttttgtttgtcttttatggaggcttcatgcttgtgaattatrgcacattgctcagacagagtgaacttcttttcttactctttagtactgggtatattagattctaagccaaagtgagcaaaagtctgagcctgtttctaat

SEQ ID NO: 225738 - DNA, 201 bp, Homo sapiens
gctgccacagtgacattaaaatgtcttttgcttcctgttttggaaacatttggaaatcacttgctgctgaaagttttcactctctctttttttttttttttctggtagaattttctgcatttttattgttgtaaatgatttagcttattctttaattttgaatggatcacacaatcatctttatgtgtccagctgcctttg

SEQ ID NO: 225739 - DNA, 201 bp, Homo sapiens
ctttgttgagttctgaaagcctgggatcttcagacccaagcctgaatgaatcaggcctatatttaaacaaagcaatacaaacacacatttggaaaaaaaaraaaaaaaaacagaacaaaataacttctgaaaaatgctgggttcccttacatgattattgtggctgtaaacaatagtgcaagtgcccatgaaggtttctgg

SEQ ID NO: 225740 - DNA, 201 bp, Homo sapiens
gagaattgcttgaacctgggaggcggaggttgcagtgagccaagatttcgccactgcactcgggcgacagagcaagactccgtctcaaaaaaaaaaaaaaagaaagacttggttttaagtaagctgagtgggttaaatggccatctagattgtttatcaactctggtgagacttcctagtgcctatttggcagtatggaaa

SEQ ID NO: 225741 - DNA, 201 bp, Homo sapiens
agatcgagaccatcctgaccaacatggtgaaaccccgtctctactaaaaatagaaaaattagctgggcatggtggtacatgcctgtaatcccagctactcrggaggctgaagcaggagaattgcttgagcctgggaggcggaggttgcagtgagccgagatcacatcattgtactccagcctggagacagagcaagactct

SEQ ID NO: 225742 - DNA, 201 bp, Homo sapiens
tgctgagtatatacacaaaggaaaataaatcattctaccataaagacacatacatagacatattcattgcagtagttttcataatagcaaaggcatataaycaacctaaaagcccatccaaggtagactggacaaagaaaatgtactaaatatgcaccatggagtactatgcagccacaaaaaagaatgagatcatgtcct

SEQ ID NO: 225743 - DNA, 201 bp, Homo sapiens
gtttgatattgtactataggtatgttatattttataaactatgtcagcatagtactttgagaaactagatgaagagtacactaccagggatctctctgtaytattttgtaccttcctttgaatccataatctcaaagcaagtgtttctaaaactttaccaataaaaatgttaaatcatagctagtatttagacagtaccta

SEQ ID NO: 225744 - DNA, 201 bp, Homo sapiens
atgtgccaagcaatggtttaggaaagacaagatattgctctcattgagcttttattttatttgggagagggggaaataaatatgggagccaataaatgaayatggtaagtcaggcattgaggatattcctaagactgtaaaacatatgaatgtgtcagaggttattggtgtaaaggacaattagaggaggcatctggagga

SEQ ID NO: 225745 - DNA, 201 bp, Homo sapiens
aatcagtgggaggtttattgcattagtcatagattttggggggagaaaatagatattttatctatctatctatctgtctatctatctataacatgcacagwatatgtgtacacatatactgggcagttgtcataagtgctcaggttcaaaaggttgaaagagacactattgtgtaaggctcaagagcatggggttgatttt

SEQ ID NO: 225746 - DNA, 201 bp, Homo sapiens
agccataactgtctaatcagtgggaggtttattgcattagtcatagattttggggggagaaaatagatattttatctatctatctatctgtctatctatctataacatgcacagaatatgtgtacacatatactgggcagttgtcataagtgctcaggttcaaaaggttgaaagagacactattgtgtaaggctcaagagc

SEQ ID NO: 225747 - DNA, 201 bp, Homo sapiens
taatcaaatttgtcaaataaaccccagataattgagtcttatggattcgatattacataaggatatgatttaaaaataacttggtattaaggcaaagatgygttttatttatttaagtttattcatttgtgcaacagatatttattgagcatttaatatgtgccaagcaatggtttaggaaagacaagatattgctctcat

SEQ ID NO: 225748 - DNA, 201 bp, Homo sapiens
aagccataactgtctaatcagtgggaggtttattgcattagtcatagattttggggggagaaaatagatattttatctatctatctatctgtctatctatctataacatgcacagaatatgtgtacacatatactgggcagttgtcataagtgctcaggttcaaaaggttgaaagagacactattgtgtaaggctcaagag

SEQ ID NO: 225749 - DNA, 201 bp, Homo sapiens
ttgccaagatttttcaatgcttgtaatttggatggcaagcatcctggggagggatcatatttgcttgtgtgctctgcttggcaattggcctatttttagcmattcatggtattaacccccaaataagataatcaaatttgtcaaataaaccccagataattgagtcttatggattcgatattacataaggatatgatttaa

SEQ ID NO: 225750 - DNA, 201 bp, Homo sapiens
aaagccataactgtctaatcagtgggaggtttattgcattagtcatagattttggggggagaaaatagatattttatctatctatctatctgtctatctatctataacatgcacagaatatgtgtacacatatactgggcagttgtcataagtgctcaggttcaaaaggttgaaagagacactattgtgtaaggctcaaga

SEQ ID NO: 225751 - DNA, 201 bp, Homo sapiens
ttggaatttgtttcttcaggaatctctagaatgtgtttttttctacctctagatcagctttaaaaccctacctttctgtcttgatgccaactgcccctctmttttttccatatactaggtttctagcaaccacagattctggattatttctcttaccagaagtcaatgtgatatttgctaaataccattgtccctatgagt

SEQ ID NO: 225752 - DNA, 201 bp, Homo sapiens
aaaagccataactgtctaatcagtgggaggtttattgcattagtcatagattttggggggagaaaatagatattttatctatctatctatctgtctatctatctataacatgcacagaatatgtgtacacatatactgggcagttgtcataagtgctcaggttcaaaaggttgaaagagacactattgtgtaaggctcaag

SEQ ID NO: 225753 - DNA, 201 bp, Homo sapiens
aaccaggaagatctatttaaaaaagaacaatacagacagagggtaggactccatcataccgtttttcatgacaatgagtacttggaatttgtttcttcagraatctctagaatgtgtttttttctacctctagatcagctttaaaaccctacctttctgtcttgatgccaactgcccctctattttttccatatactaggt

SEQ ID NO: 225754 - DNA, 201 bp, Homo sapiens
aaaaagccataactgtctaatcagtgggaggtttattgcattagtcatagattttggggggagaaaatagatattttatctatctatctatctgtctatcbatctataacatgcacagaatatgtgtacacatatactgggcagttgtcataagtgctcaggttcaaaaggttgaaagagacactattgtgtaaggctcaa

SEQ ID NO: 225755 - DNA, 201 bp, Homo sapiens
atagcttgaacccaggaggcagaaggtgcagtgatctgagatcacgccactgcactccagcctggacagcagagtgagactctgtctcaaaagaagaaaamaaagaaagagagaacttaaaatgaaaccattacggtgggtcccaatctggtctggctgatgttcttatacgtggaggagattaggacacacaaaggcata

SEQ ID NO: 225756 - DNA, 201 bp, Homo sapiens
gaagcgtggtggcacatgtccgtagtcccagctactcgggaggctgaggcaggagaatagcttgaacccaggaggcagaaggtgcagtgatctgagatcaygccactgcactccagcctggacagcagagtgagactctgtctcaaaagaagaaaacaaagaaagagagaacttaaaatgaaaccattacggtgggtccca

SEQ ID NO: 225757 - DNA, 201 bp, Homo sapiens
tggtttccccaaaaattcacaccgaagccctaacccacagtacctcagaatgtgaccgcatttgtagctaaggcctttgaaaagagaacttaaggccggtygtagagactcacgcctgtaatcccagcactctgggaggccgaggcaggtggatcacgaggtcaggagatcgagcccatcctggctaacatagtgaaaccc

SEQ ID NO: 225758 - DNA, 201 bp, Homo sapiens
caaacatggcgacagggagccagtccctagaagtggcaaaccaattccagagaaggtgtttggcatataactcaaaagacagtgcctccaacatatagaaragaagacatggtctctgcctttggcctctagggagaatgataacagaagatgcctgaagtaacagcaagatcataacatctaacccatccctgattctaa

SEQ ID NO: 225759 - DNA, 201 bp, Homo sapiens
ctactttctccctcccccagcccctggtaatctgtgttctacttttctgtctctgtaagcttgcctattctaggtacctcacagaagtggaattgttaccraaacactaggggttcggtctaggtcctgctgtttgccgtgcagaaaaccagtcactgagatgatgagtattgccaagaagaagggagttcagtctcaaat

SEQ ID NO: 225760 - DNA, 201 bp, Homo sapiens
agtacactaccagggatctctctgtactattttgtaccttcctttgaatccataatctcaaagcaagtgtttctaaaactttaccaataaaaatgttaaaycatagctagtatttagacagtacctagtactgagtcctaggactttattaaagatttattttatgtaatgtattattaattgtcagggaaaaactatgat

SEQ ID NO: 225761 - DNA, 201 bp, Homo sapiens
caggagttaaagtcagattacaaccttccctccagggttcacagttcttggagtgttagaaagctcataacctgggaagcagaagccccagatttcaggcyggacttaattaccaacttgttgtttctttggaaatatcatttaatcttttagggattacacttttccctatcctcaaatcaaggagattggatcagagtt

SEQ ID NO: 225762 - DNA, 201 bp, Homo sapiens
tgcatattggccagaatcctacagaggtagtattatatccttcttagtgcattatatcaggagacactgatgctcctttctcccattcttggtattaactytgatcacttggttggtgtggtgtctaccaggtttctccattggaaaattgctatttttccttttgtaatcaataagtatcttataggaatatacttgtag

SEQ ID NO: 225763 - DNA, 201 bp, Homo sapiens
aggcggagattgcagtgagccgagatcgagtcgagccactgcactccagcctggtgacagagcgagactctgtctcaaaaaaaaaaaaaaaaaaaaaaaamaaaccaactctgtactcattatacaataactccctattccccggactactttctccctcccccagcccctggtaatctgtgttctacttttctgtctctg

SEQ ID NO: 225764 - DNA, 201 bp, Homo sapiens
atattttaactgttaatgtgcaacccaaatgtccctggaccctgaagggcatatccacatgtcctcaggagttaaagtcagattacaaccttccctccagkgttcacagttcttggagtgttagaaagctcataacctgggaagcagaagccccagatttcaggccggacttaattaccaacttgttgtttctttggaaat

SEQ ID NO: 225765 - DNA, 201 bp, Homo sapiens
actgagtacattcacaatgttgtgcagtcatcacactatccaactccagaagtttctgtcatctcaaatagaaactctgtacacggtcagcacggtggctyacgcctgtaatcccaacagtgtgggaggctgaggcgggcagatcatgaggtcaagagatccagaccatcctgcccaacatggtgaaaccccatctctact

SEQ ID NO: 225766 - DNA, 201 bp, Homo sapiens
tactacactgtagcatatactacattgtagcatgaaagcttctaagctacagtcctcactattgcctccactggtaaattgttttttgtaggaatgaactrgaagaatgtttgttcatcagtgagcagttggtctggcatatagaagtgctctatagattgtagctattaaaaattgatctttatataaatgaatgtcaaa

SEQ ID NO: 225767 - DNA, 201 bp, Homo sapiens
aagcaaaaggaaaacaaaacaaaacaaaaaacaacaactcatggagcacggttaatgcttataagttcaaattaccctctatggatgacacatgatgtgaycaccccatgaagacctgttgaagtcaaaccattgtcgatttgaagaatagctagtaaagttttataaggaaaaggtaaacttattgcaaagctacaagga

SEQ ID NO: 225768 - DNA, 201 bp, Homo sapiens
ttattttaaaaaactgagctggagctagcataagggtatgtgcacagacatagacatatttttaaacatctatatcttaaaggatcaatatgagtttcccsttttgacaaaaaggattgcatatctcattctgtttacctttttgtcctgtctaccaagaagcccagacgtaaattgaatcatattaacccaatttgcctc

SEQ ID NO: 225769 - DNA, 201 bp, Homo sapiens
gtatctttctttaggggaaaggatatatattcattcatagtctgtttttctgctgtgtatgtgtgcttattcattcattcattcattcattcattcattcaatacatatttgtgaagagattgttgtatggctggcatagtgctaggtcttcagatagacttccatatctatttagcaaatgtatctataagtgccatttt

SEQ ID NO: 225770 - DNA, 201 bp, Homo sapiens
tatttggatgttcataaactctgactgaaaagattattttaaaaaactgagctggagctagcataagggtatgtgcacagacatagacatatttttaaacrtctatatcttaaaggatcaatatgagtttccccttttgacaaaaaggattgcatatctcattctgtttacctttttgtcctgtctaccaagaagcccaga

SEQ ID NO: 225771 - DNA, 201 bp, Homo sapiens
gccagaatcctacagaggtagtattatatccttcttagtgcattatatcaggagacactgatgctcctttctcccattcttggtattaactttgatcactyggttggtgtggtgtctaccaggtttctccattggaaaattgctatttttccttttgtaatcaataagtatcttataggaatatacttgtagaaaatgtag

SEQ ID NO: 225772 - DNA, 201 bp, Homo sapiens
agtatctttctttaggggaaaggatatatattcattcatagtctgtttttctgctgtgtatgtgtgcttattcattcattcattcattcattcattcattcaatacatatttgtgaagagattgttgtatggctggcatagtgctaggtcttcagatagacttccatatctatttagcaaatgtatctataagtgccattt

SEQ ID NO: 225773 - DNA, 201 bp, Homo sapiens
tttatttggatgttcataaactctgactgaaaagattattttaaaaaactgagctggagctagcataagggtatgtgcacagacatagacatatttttaaacatctatatcttaaaggatcaatatgagtttccccttttgacaaaaaggattgcatatctcattctgtttacctttttgtcctgtctaccaagaagccca

SEQ ID NO: 225774 - DNA, 201 bp, Homo sapiens
tcaaccagattcaaatgtcattcggattttgccacacttgcttcatttatccacttgagtttttgctgaaatattttaaggcaattgctagaagtattttyttagctctacacacatcagcatgtatctttaaagactacgaaaattccctaattggcaatattattatcatatttctttttctttctttcttttctttct

SEQ ID NO: 225775 - DNA, 201 bp, Homo sapiens
gccagccttgttaaggactacctggaagtagaacactgtgacatctgtgcactcaatgggccatagcaagtcagaaaaccaacccatattcaataggagartacattattaaaaatagttttactgatgtattaagcatgtgttgacacagttttatttggatgttcataaactctgactgaaaagattattttaaaaaac

SEQ ID NO: 225776 - DNA, 201 bp, Homo sapiens
acatcactgtatagtgacaggcagtgtctttggcatcaattaaatcctaataccactaagcagaaattaaaaagctttaatgagatcttcaacctattgaygaatgcccatgacagtagctcatgccattgatgtgtggagtcaaatatctttacccactggggatgtcatcatttaaatggccctattgattttgagttt

SEQ ID NO: 225777 - DNA, 201 bp, Homo sapiens
acctgagaaagggtgtgtggtgggagagggctggttgagttggtgggtgtcagtgagaaagagagcaagggtagctgtcagtgttaaagctgagagtattrgaaacaatggcagtgccttccaggggaggctatgggcttgcttactttatatttagccaaaaaagatgatttacatctactattgctattatttcaaaaa

SEQ ID NO: 225778 - DNA, 201 bp, Homo sapiens
cacatgatccagcagtttcactcttaggtgtacgttcaataattgaaaacataagtccacacaaaacttgcacctgaatattcacagcactattcacaaaygtccaaaaatgtagtaacaaatgtccatcaactgatgaatggagaaaaacatgtggtgtatacatacaatggggtattattcagcctttaaaaggaataa

SEQ ID NO: 225779 - DNA, 201 bp, Homo sapiens
ggaaaatgtgaaatgactgctaaaggaaatggtttctcttttgggggtaaaaatgttctgaattaggtagttatgataattgtacaattttgcacacataytgaaaaccatcaaactgtacactagaagggtgaattttatggtatatgaattgtatgtcacttttcaaaagtcttaacagaaaaataatctgggaatggg

SEQ ID NO: 225780 - DNA, 201 bp, Homo sapiens
atagctgaggttttggattttctttgacttgttaacaattgaaaatttttttagtgacataagttgatgacttaatatacttcactaaaaaattctctttktataaaaatgttacaggtattcttgtttgcttaaattctgggacacttcaagttgtcttctctttctctttgttcactttgttatcttcttctaggatcc

SEQ ID NO: 225781 - DNA, 201 bp, Homo sapiens
atgtacaaacagcctagctggggatcttgttaaaatacaggtttatgcattacatctaggctggggcctgggaatctacatttcttacaactctcaagtgmtgctgttgttgctacttagaggaccacattttgagtagccaggcaagggaaatatgcgctctttttcttccaaaaacatcatttgctacagaaaagagag

SEQ ID NO: 225782 - DNA, 201 bp, Homo sapiens
gttgattagaatttcacatcttcatgagcttggtttcttaggtgcatttgctgaaggcctgagtttcttaaacttcggccagtgggttttgaaggccctcrtgctctcaaaaagtttgtatttattgttctctatttgatgaaataatatgaaaatgacagatataggcttatattttaaatcagctgcttgttgtctgat

SEQ ID NO: 225783 - DNA, 201 bp, Homo sapiens
gcatgatacttgttttatatgatcccaaggaataaagtcatgaaaaacagatggacttggtataaagagcaactatgttatttgtagagttgactgtcttwggaggaatgtgtgatgaacttcccatcactggacatattcaagcatatgctaggcagccatttggcaggaattctgtaggaaaaggcccaaggattggga

SEQ ID NO: 225784 - DNA, 201 bp, Homo sapiens
acactcgggattgaagaaaagtaaatatggactacgtgtaagatagtattctatcaacgttaaagtccctgattttgatcattgtatgtgtgagagactaytgtaattcctagaagcttttaatgttcacacctacaccgaaatggtttagcaaaaaccacttttcatttgtttgtttgagggaaggggagcagaggagga

SEQ ID NO: 225785 - DNA, 201 bp, Homo sapiens
agagctttatgatctcaaacacagcataattacagagagttactgggtcctaggtacttaatgtgcatgatcttattcaaccctcaccatgcctctgtgargcaggcactattatgccatccattttacagatgaaagaagtaagtgcaggttaagcctctcggtgacatggttaaggtgacagttagatcatggccaggt

SEQ ID NO: 225786 - DNA, 201 bp, Homo sapiens
tgaatctaatcctcatataacagtcagaccagcatagattctctgaaaagccacaggcctgtcctcttcaagaatgttaatgacatgatgggcaaaggaargctgagaaagtattccagcttcaaggaggctaaagagacatgacagctaaaagccagtgcgatcctagactggaggaaagtggccatacaggacactcgg

SEQ ID NO: 225787 - DNA, 201 bp, Homo sapiens
atgtgagaaaaagccataactgtctaatcagtgggaggtttattgcattagtcatagattttggggggagaaaatagatattttatctatctatctatctrtctatctatctataacatgcacagaatatgtgtacacatatactgggcagttgtcataagtgctcaggttcaaaaggttgaaagagacactattgtgtaa

SEQ ID NO: 225788 - DNA, 201 bp, Homo sapiens
ggttaacacatcaagaatgggaccaagtttcatcaggtgccaactgatgtaatgcaatgagaaggatatgctatcacttaggtagtatgcctttcaaaaasatgtactatgaatctaatcctcatataacagtcagaccagcatagattctctgaaaagccacaggcctgtcctcttcaagaatgttaatgacatgatggg

SEQ ID NO: 225789 - DNA, 201 bp, Homo sapiens
tgtttcaatcacataaccgcattaccattgctggattgagggaagctttgaaggatttcatttccattgactatttttttttttttctaaaccaaccattygttcagcttttatttgttggtgtgaaatatgctattattttgaaaaaacacttttaacatcccaatgaagtaggtacagatattaactccaatttaggaa

SEQ ID NO: 225790 - DNA, 201 bp, Homo sapiens
cacaatagggttaatgttgccatgagaatctaatgcagctgacctgacaggaggcggagatcaggcagttaggttcccctgcccgctgctcacctcctagygtgcagccagttcctaacaggccacagactggtaccagtctgcagcctggaggttggggatggggacccctgcttagagcaatgactaattgcagtttca

SEQ ID NO: 225791 - DNA, 201 bp, Homo sapiens
atgagtatgcgcagttcacaatagggttaatgttgccatgagaatctaatgcagctgacctgacaggaggcggagatcaggcagttaggttcccctgcccsctgctcacctcctagtgtgcagccagttcctaacaggccacagactggtaccagtctgcagcctggaggttggggatggggacccctgcttagagcaatg

SEQ ID NO: 225792 - DNA, 201 bp, Homo sapiens
attctgaaattactttgtatccattgtaggattaagtaaatgtattattttgtggggagtcaggcttatcactgtggaaggagggcagtacaactgtggaytggggaaaggcaaggaagagcctgagctattggatggagattagaagtatcaataggaagacatgactcaatatatatttataattcttacttgtcctct

SEQ ID NO: 225793 - DNA, 201 bp, Homo sapiens
tgcccaggtggtttcccagatgggcatggccttcaatcaaacaacagaagtactggaaagaaatcttgaactttatacatttgttcttggttgtgttattkgtgggacaattctgaaattactttgtatccattgtaggattaagtaaatgtattattttgtggggagtcaggcttatcactgtggaaggagggcagtaca

SEQ ID NO: 225794 - DNA, 201 bp, Homo sapiens
gaaggataaactagaagatatgaaattggtcatctacagggtgggaatagcattagaagagttagggaaggaagacagtgatgtagtacttctctgaatasctttttatatagttttgagtttgaaaccatgttcatggtttgtatattccgaaataacattaaataacaagatgggggaaattgagtacagagtaaatga

SEQ ID NO: 225795 - DNA, 201 bp, Homo sapiens
ttgctctagagaaagattcctatggttatgatgagtgagtaatgtgttctttagtaatttaggtttagtttacagctctctagtgaagctggcctgctgasgaaacctggggttagggaaaatgaaagggatgcagctaggaaatgaagggcctgcagaaataaaggtcatgcagttttgaagttgcccagcggtcagtag

SEQ ID NO: 225796 - DNA, 201 bp, Homo sapiens
gtgtactatttaatcctgcaattccacatttaggtatttatcttaaagaagcatttgaacaaattcatgaaggtgtgtgtctgagtaaattttctcagagytgtttacgatattttttttaaatcctaagagcacaatatttggttcaatattttatgtctttatacagtataataccatgtagccttttaaaatgccttt

SEQ ID NO: 225797 - DNA, 201 bp, Homo sapiens
ttttttttttctaaaccaaccattcgttcagcttttatttgttggtgtgaaatatgctattattttgaaaaaacacttttaacatcccaatgaagtaggtrcagatattaactccaatttaggaagaggacagtaggctaggagatttgaagaagaaagagtagacaggagttttttgtttgaaaccctggatttgtgaat

SEQ ID NO: 225798 - DNA, 201 bp, Homo sapiens
tgtgttactttccctttaaagaatcatcaatgcctttggctgtgtacatggcatgatttttatccctttcccaaactggttcctcccatctcagggttctmtatttggtgactgttctcttttaaacgtgttgcctagaatcacatgagggcatccagatggtataggaacaagtatttattgcggtacttagaatatagt

SEQ ID NO: 225799 - DNA, 201 bp, Homo sapiens
tgtgtaaagcggaggggctgaatgggttcaatgagaaaagtgtgtcgctggggaagataagaggatatagaattgagctcttgcagtttgccaacatttakaaattggatagaagaggacttggcaatggagaccgaggaacatccagaaagaaagaatagcaggaaagaaggctatcccaggagccggtgccggggtgtt

SEQ ID NO: 225800 - DNA, 201 bp, Homo sapiens
aaaaatgttcttctctgagtgaaatggtttcttaggacatttcaatagacagcttagagcctaggaacaggtttacagagttttgggcagacatcagtaaygttttgttctaaatttgcttatctggtgcttttgcagaactttacactgttgtttagtcttgctaaatcaggagataaaaaggattacagagaaagataa

SEQ ID NO: 225801 - DNA, 201 bp, Homo sapiens
gcggatttatctgtagtagttacatgttcttgggaaagcacagatggttctggaaaaaaaatgcatgttattgtttttcaattaaaagcataatttagaartgtaggccattagactagaacctgaagtaaaaatttctaaggccaatgtgtttatacagaaactgacaagggagaattatttatggatttttaattggta

SEQ ID NO: 225802 - DNA, 201 bp, Homo sapiens
ttagggtgttcaaagtagcggatttatctgtagtagttacatgttcttgggaaagcacagatggttctggaaaaaaaatgcatgttattgtttttcaattraaagcataatttagaagtgtaggccattagactagaacctgaagtaaaaatttctaaggccaatgtgtttatacagaaactgacaagggagaattattta

SEQ ID NO: 225803 - DNA, 201 bp, Homo sapiens
gaacaaggtgagaaatgaacttcaaaactaagcctgagtttgacttacattttaatttttttttaaataaaagagctctcacaacctggggatttccctcmaacagctggtgagtaccctgtactatccccaccatcccatcctagactgtgtcaatgtccatggaaaaaggacttctatcattttctgggaatgagttca

SEQ ID NO: 225804 - DNA, 201 bp, Homo sapiens
gcttcacacaccaaatatcgaattttaaagcaagtgtttctgatcacgtactgtttttcaggaatggcattattttcctaagcttttggaaccctaaactrgataattagggtgttcaaagtagcggatttatctgtagtagttacatgttcttgggaaagcacagatggttctggaaaaaaaatgcatgttattgttttt

SEQ ID NO: 225805 - DNA, 201 bp, Homo sapiens
tgcatgacatggagaccggtggtggcatcatttcagcagctggcaagggagttggctggaagaacaacagagcaaagcacacaccctcccgggtaatgcayttgaatcaatcaaaagcgtatacttggaatctaactgctgatggtttgggtacatctaaacttgtaacacaataaggagtgcagaagagtttctcttaca

SEQ ID NO: 225806 - DNA, 201 bp, Homo sapiens
gggttttggtatcctggtggttaagccacttttgcacatattattgagtgactgttgaaagacttcttgtgaggtgaagagtctctggcacactgttggakgtgacaagagctccatgaaccccggcctttggctccagttttaggagcaggtttcctttatttgctgagcagcctttaccgttatgaatcttgccttttt

SEQ ID NO: 225807 - DNA, 201 bp, Homo sapiens
tataccaggtgaatgatgatctggctcatcacaagaaatagctagtatgatgaaaacttttacagagtttcaggaaaagcagtcctaaataaataaataartatatataggatttcctatagaaaaaatatataaatatatatttttatgtctatattatttatataattatatattttatatctatataaaatatataga

SEQ ID NO: 225808 - DNA, 201 bp, Homo sapiens
gatttgcttttaggagcctctcatcatgttccacttttcctcagcccctaccatcctgtttctttattatcacattccatccccataagcccagctgaaayttttaaaatcctgggattatggtcagtttttggcatctcacaaagatgtatccctgagccaaggcagcctgataatcaccggctgggttttggtatcctg

SEQ ID NO: 225809 - DNA, 201 bp, Homo sapiens
ttctgtgtttgatttgcttttaggagcctctcatcatgttccacttttcctcagcccctaccatcctgtttctttattatcacattccatccccataagcmcagctgaaatttttaaaatcctgggattatggtcagtttttggcatctcacaaagatgtatccctgagccaaggcagcctgataatcaccggctgggttt

SEQ ID NO: 225810 - DNA, 201 bp, Homo sapiens
taggtttccctgagctttgagcagattcttagctaggcaaagtagctgctggggcccaatgagtgggggatgctcaactgaggactcctgtgcccagtgcrgtatgcagtgttcagagagatttcccttttctgtgtttgatttgcttttaggagcctctcatcatgttccacttttcctcagcccctaccatcctgtttc

SEQ ID NO: 225811 - DNA, 201 bp, Homo sapiens
aggaagtagtaagtggtaaagttggggtgtctgatgtcaaaaccattttttgtgtcttgtttccaagactctcttgtaacctccttgatgaaagatttctytctatgctgtagagtcaagagattttagtttcaggaatgagggatataatcaaaattggcctaggctagaaggaattttataggttcatgtaactgacag

SEQ ID NO: 225812 - DNA, 201 bp, Homo sapiens
acagtgtttttaccagtaacagttagcattgccttgattataagcaaacaaaagtagattctatttagcttaagcaaaaaaaaaaaaaaaaaaaaaaaaamaattattggcaggctttgagtagttcactatatagactaaaggatataggagaatgagacttgagaattgacagaaagcagagtagattggggtttatgc

SEQ ID NO: 225813 - DNA, 201 bp, Homo sapiens
acccagggcactccaggtgatcctgagccctgtgacttggatgtggccaccaagttggtcattgcaaagcagcatggtccacaccttgtgagggaatggasgcaatagggagcaataaaagcatgtaggggggatccctataccagcctggaatgccacctggaagaggtgacttctaagttgcaaactgaaggaccagca

SEQ ID NO: 225814 - DNA, 201 bp, Homo sapiens
tatatttttctatgattacctttttgtctttcagagtatgttttggagctttgtccttaggatagcaattacaagtttactcattctttttattgacttamtagcatttcatgtatggaagtaccataatttatataaccacttctgtattttagtaatagagaaacagtcttacaataaacatccttgtacatatgtttt

SEQ ID NO: 225815 - DNA, 201 bp, Homo sapiens
agtatattgtcaagtttttcaacttttgacaatctcataggcaagaaatagtatctcaatgtactttttttggatcaacttttttgttaagaagagttttyggtttgcagaaaagctgtgaagatagtaaagggttcctgtgtacaccacacccaggttctcctattgataacctcttatgttagagtaatatggttataa

SEQ ID NO: 225816 - DNA, 201 bp, Homo sapiens
tttttaaaacaagaatagcatttctattcaatcattgccttgtttcttctttgcctgttttacttaaaaatcaggtagaggaaaaaattatgtttcattgrgcatttttacttggcagctttttatttgagactttaattgtgaaatttagatgtgtatgaaatcaagtatttcctctaccaaaatgaacagtttttactt

SEQ ID NO: 225817 - DNA, 201 bp, Homo sapiens
aacaaaatgatagcttatgatagatactctgaaagtcaaaaacagcattggttctcattttttcctgccagcaagttacgagccatgactttatttctatytttaaaatctccggtttcttccctttgtaagtgggtaaaaccaaatttggattatcccaagataaaaagaaagggtgaatattggctcacataattgcag

SEQ ID NO: 225818 - DNA, 201 bp, Homo sapiens
aaaggggtgattaaaatgtgaccttatatagctttttaaaaaagagcaataaatttttagagaaatggtaagacaaaggaaaggactttgagtttctgcarattgtgagaaggtaaatatatgggggaactaatggaagggctagttagtaaagcttgttacatagattcctctggtgtctcttctggctagtgaatatct

SEQ ID NO: 225819 - DNA, 201 bp, Homo sapiens
ttgcctgttttacttaaaaatcaggtagaggaaaaaattatgtttcattgagcatttttacttggcagctttttatttgagactttaattgtgaaatttaratgtgtatgaaatcaagtatttcctctaccaaaatgaacagtttttacttgtgattttggacatttagtagtttgtggcccttgtactagggagcactat

SEQ ID NO: 225820 - DNA, 201 bp, Homo sapiens
ttgtttaaagtcactaacttttgggggtggtttattaagttgtaaagatcacagaaacacacccaaagtgggataagcagtacattaaattttgtggtccrcagcagtgcttttcagactttaatatgcctacaaatcatctggagatcttattataattctggaatacagaaggtctagggtgagacctaagactcagca

SEQ ID NO: 225821 - DNA, 201 bp, Homo sapiens
gtcattgatgaaaatgaagatgtaacataacagctgatagaatgcaactaaaacagggctttgagggaaacatatagcttaagtacctgtatttttaaaaratctcaaatcagtaacctatgtttcaccttaataaactataaaatgagtaaaccacacaaagcagaagaaaataataaaggttggaacagaaattaatga

SEQ ID NO: 225822 - DNA, 201 bp, Homo sapiens
ctgttttacttaaaaatcaggtagaggaaaaaattatgtttcattgagcatttttacttggcagctttttatttgagactttaattgtgaaatttagatgygtatgaaatcaagtatttcctctaccaaaatgaacagtttttacttgtgattttggacatttagtagtttgtggcccttgtactagggagcactatgggc

SEQ ID NO: 225823 - DNA, 201 bp, Homo sapiens
tactcagctttaagggacaagaacctatcagagaaagatagagttggaaaatcattttactttccttgagttgactttaattctgctttaatactagacayggctttcatcatgctaaactaggctttcctgcagtaataagcaacctctaagtctcagaggcttaaagagaagtttcttggagttttatttccagaatgg

SEQ ID NO: 225824 - DNA, 201 bp, Homo sapiens
ataccttttgggagcagctatcaagtgtcaggctagccagacactgttttaggctctgagaatactagagtgaataaaatagtttgtatccctgctcttaygattctaggattgtcatctttaaatgggcactgtgtttcaaagactgcaagtagcctacattaacttgggacttcttaatagaggcagtctacctagata

SEQ ID NO: 225825 - DNA, 201 bp, Homo sapiens
agacaaatagccctcccatacgctttgatccccagggcagccagtgtaacaaaggaacaggagcaaggtcctgacactgtcattcaaaaaataccttttgrgagcagctatcaagtgtcaggctagccagacactgttttaggctctgagaatactagagtgaataaaatagtttgtatccctgctcttatgattctagga

SEQ ID NO: 225826 - DNA, 201 bp, Homo sapiens
agctccccaccaagaatagcattaagcatctaatgacaacttgacagagacttttatctgttgtcccctgtgaaataaaatcttcaaagttatctgcctcytctttgaaacttagcacaggctgtacttggccaggtgtctcaaagctgataccaagagggcaaagattgagagtgttttttactcagttatttctgtgtt

SEQ ID NO: 225827 - DNA, 201 bp, Homo sapiens
caagcacaggcattgttgccatctccctccgcatttctgcatggatcccctagatgtaaatcagaataatagttagtgaaacaatgctcaggtgctggaargacaggctcttgtttttaggctctctggaaaattttccctttatttgattttggtggtttcagtcatatggtctaatacagtttcatacaaatgtaatct

SEQ ID NO: 225828 - DNA, 201 bp, Homo sapiens
tgaactggaaattgttgggacaccaccgtgggtctgaaacctttccctggcagctggacttggtgtccgcagaggcgctctgtggcttgtggttaaatcgygcagatggaaaccaggcagtgcttgggtacgggctcatgctttctcctcgcttgcccaaattaagctgcctaactgtgttcctggggaggctgaaggttt

SEQ ID NO: 225829 - DNA, 201 bp, Homo sapiens
agaaatcatatgctatgagcctgtgcgttccccagatttccactgaactggaaattgttgggacaccaccgtgggtctgaaacctttccctggcagctggrcttggtgtccgcagaggcgctctgtggcttgtggttaaatcgcgcagatggaaaccaggcagtgcttgggtacgggctcatgctttctcctcgcttgccc

SEQ ID NO: 225830 - DNA, 201 bp, Homo sapiens
tgtgcctcagaaatattacagaagttattaaagaatcaattgtgggaagccaactgccctactcgggcagcttcttgctttgctcctggctaatttatgtrgcggtgaattttctttcttcgtctcctagttcagtttgttagcttttgaaaagattttttttttgttgttttagagtggtgtgagagtagattggcaacc

SEQ ID NO: 225831 - DNA, 201 bp, Homo sapiens
aaccctgtccaagctggaaaaatggcaattgataattgcaaaattctattgtaaatgaatgtcaaatcagaattctggtatccatttctttggtgatgccmagcaaatgaaaccctgccacttgtcctgcattcaaactgaaattggaatttgatcttgggaattactttcttgtctagtatttgactgatcaaatgtaac

SEQ ID NO: 225832 - DNA, 201 bp, Homo sapiens
ccctgtccaagctggaaaaatggcaattgataattgcaaaattctattgtaaatgaatgtcaaatcagaattctggtatccatttctttggtgatgccaascaaatgaaaccctgccacttgtcctgcattcaaactgaaattggaatttgatcttgggaattactttcttgtctagtatttgactgatcaaatgtaactc

SEQ ID NO: 225833 - DNA, 201 bp, Homo sapiens
aataggtgatagatacagagctgtcatccttttctctcttttaatataagatattttgtaagatgataaggcaaggtgagtgagtaaggcaatcccctttyccaatagttttgttatatacagacttaaaatgtgacatattaaaggggtcaggaaactcttgaatcttgagtcaaccatctctactacttaatatgctca

SEQ ID NO: 225834 - DNA, 201 bp, Homo sapiens
ttcttaacattagcaccaaatcatctagaaggagtctttcctagccattctaaatataaagggctgtcttctcaaatgacaagctagggttaatgtatccraagccactttgatttattcctcttaaagcaagagtgtttgtctctcttcaagcaactgcctgttgtcatcaggctaaggcttggtaacactcttggtttc

SEQ ID NO: 225835 - DNA, 201 bp, Homo sapiens
aaatgcttgttatagtacagaaatcaagaggccaatacagacacggttgcagtgcccggtagaaatatgatgcaagccacttgtgtaattttagtttttcyggtagtcaccataaaaagtaaaagaaattaataatatgttgttaaaactcgatatatctaaaatagtatgatttcaacatataagctgtgtagaaaatta

SEQ ID NO: 225836 - DNA, 201 bp, Homo sapiens
tatttctgactctaacaattgtattatagataataaggaacaaagaaattaatgactgcctgctgtccttttagtttgtgtccctaagatctgctgcagtrttccaaaattatcctgctcttagggtgctaattggaaacatttttcaattgaaatcttttataggctgggcgcagtggggcatgcagtagctctagctac

SEQ ID NO: 225837 - DNA, 201 bp, Homo sapiens
gtttttccggtagtcaccataaaaagtaaaagaaattaataatatgttgttaaaactcgatatatctaaaatagtatgatttcaacatataagctgtgtaraaaattatgaataggattctttcaccttctgtttcccttgtactaagtgtttgaaatctgggttgtattttacacttctggtacatctcagtttgggcta

SEQ ID NO: 225838 - DNA, 201 bp, Homo sapiens
gaaaacggcttatgaaggaggggagtggtcaactggccaaatgccactaagtggttcagtaaagggaggccagaaattggccacgggctttggcaagatgyggtttacgagggagatgctatgagtggcctttggcctttatgcattcataataaaaagaaaaatgtggtgattctggctttttaaagaacctggagtaat

SEQ ID NO: 225839 - DNA, 201 bp, Homo sapiens
cctcctcttgatcattgtgtccatccataggaatttatccagctcccttttgtggaaagtgaactgttttttaactgtaggacatgcccaagtctggtaaycttgaggatcttgttgtctagaggatgaaggtaaaattcattcattctggccaggcgtgatggctcatgcctgtaatcccagcactttgggaggccaagg

SEQ ID NO: 225840 - DNA, 201 bp, Homo sapiens
aagatagctgaaagtgtattgaaaaggaaacctgtttttatgtcagctcttacacttgatttctttgcttgacctcaagttctaactgaattgggcttcakaaaacataaagttattttgaatcttggccaaaaatattgttaattcaagtgtatatctataaacttaacacaggtgacgtaagtttttctagcagctctt

SEQ ID NO: 225841 - DNA, 201 bp, Homo sapiens
gaagaggtttaggaaagttagtttacttttggatcctgagatccaaatcaagaaagaaaaaaaaggaaagaaaaattgacatccaaagaaaatatttgaaratcaaagagcaaaaatcactcattttatatataaacacacatatgcatatgtgcatacatacttacatattgcatatattatagcaatagatatcataaa

SEQ ID NO: 225842 - DNA, 201 bp, Homo sapiens
ttatgtgacctttgacagagatttctcttctaaagagagtgaaaaacagtttgttaaccataaactagtcttcatgtcatcaggtagatggacctgtaggwattgctgcctgttccctgcctaggcgccagcactcaagtggattttagccgaatcccttaaaggtaagacaaatgccatccaactattttgaagaaagat

SEQ ID NO: 225843 - DNA, 201 bp, Homo sapiens
tgatgcatgattggttcattttgtcattcaccagaagtctggcatgctgaggtgctcagtaaatattttttgaaagaaccagtagataaaggagcagctcyttattgggcaccagcaatatatcaggcactgtcagaagccgtggcttcaatgatggtgatgtagagacagacatggtccacacctccatcatcatatctt

SEQ ID NO: 225844 - DNA, 201 bp, Homo sapiens
ttaaggatgtgggaaattctttttcttctttccttgtttttggaaagaatgagtctgtctgagttttcccaagaaagttagctgctacagtttcagggtgrgcagccataaagtgtgaaccgctattgatagtgcttttttctttttgccgttataatatgcttaaaatggagtattccttgacatgtgcagaccgcaaag

SEQ ID NO: 225845 - DNA, 201 bp, Homo sapiens
tagatgttcaagattcaatgtaaaattgctttacttacttacactttattttttggaatagggataactggtccttagaccacgtagtttgttactttctrtacaagtgtaatggtttattgaaagcaacacctgataatactctaaggttttacaaataaccccctatgtctggagttttggcaaatactctgccttacc

SEQ ID NO: 225846 - DNA, 201 bp, Homo sapiens
attgaaataatctaagcataatgcttgtcccattggctttacaatagacagccaataggaataatgatggtgacaatagtaattatgtggcaataatggtrgtagtgatggtagcagttcattttttcaacaaattattatgtatctaatgtaagcactggacataggcagtagtagtgatggtcatagtagttatttttt

SEQ ID NO: 225847 - DNA, 201 bp, Homo sapiens
ttaaaagtccaaaatagaggcactaagtacaaccttatccttatctctcagcctattcatttctcccaatttacttgacaagactaatcataataataacmtaattcaattttttaccacatactgtatatatgttttaggatacttctctgcacttcagtgttcacatctatgaaatgggaatgataattgaaataatct

SEQ ID NO: 225848 - DNA, 201 bp, Homo sapiens
aggattgatcctagattcacatgttgtcagtgtgatgccttaaatatcaagtttccaattaagctttaaggcaaaggttttgcagctatgaatggtggttktctagacccattatttcattaagagctgtgaaatggtgattttctaaatctgtcattcctcctgcttttattaactgtgattcctctatgaggaaaaacg

SEQ ID NO: 225849 - DNA, 201 bp, Homo sapiens
gtctcgcttcctttagtgaacataatgacttggagaatagtggttgcatgtgttaatgttcctttttattgcagaatagtattccattgtatggttattcracattttgtgtatccattcacttggttcacataggggttgtttacaagtttggattattatgaatgaagctgcttatgtatagatatttgtgtggacatg

SEQ ID NO: 225850 - DNA, 201 bp, Homo sapiens
cttcaatagaataatacagcaacttatctttttgatctgtctttggggaatttcaactgtcttttaggaaaaaaaaagcttattggggtatagtgtgtatrtaataaactgtgcccatgtaaaattcattcattgagctttaaaagagggatacacccatgagtccaccaaaatcaaggtgcagaacatttctgccacccc

SEQ ID NO: 225851 - DNA, 201 bp, Homo sapiens
cccatgcctttccacaacgatatgttttcctagtgttcattgctaaaggtatatttcttaggagggccatgtagggatatggaagaaatatgtgaagtagyagaggaagctgttaggaaaaatctgtattgtattaaacgaagagctctcttgctgtatgtaggaccacttcttgagcatggccaattctgagctatttta

SEQ ID NO: 225852 - DNA, 201 bp, Homo sapiens
aggcaggcgcaaacgcctttaggaagggccagatttgggagctgtcagtgggagttctgactcgctccttttttagcttttcatctcacattagctctctwagctctggagagttttgcagaacaagaaaagcaacaggagtgttttgcctttgctcctgcgatgcttcatcaagtaacaggtgtccagattttcactgtc

SEQ ID NO: 225853 - DNA, 201 bp, Homo sapiens
ctcggctttagtcctggctagctcacttgatgactagtctgggctttctcttgtgaaaaatgaggatgctgaatggggtgatctctaaggtcctcttaggyctcttactccaacattgcaaattccttactatggaatagaccacaagaaactaagacaaagaaatgattgagtgagaggcatgtgttctgtagtatgttt

SEQ ID NO: 225854 - DNA, 201 bp, Homo sapiens
agaagagggttaaaagtgattaccttaaaggaagcaaagagctaaagagtaaaacaaatgaataattttcaagtaatcaaatcaagccatatagtggacgmatttgttctttttctgccttttgttcataaccatgcttagcataacacttcagctccttaatcccttttcaaccacaactctattgtcagttgctagtaa

SEQ ID NO: 225855 - DNA, 201 bp, Homo sapiens
atcaaaatcatgacttcagtctacttgtctcctgattgtggggaatattgaagggaaatcccataattttgtcaactcaaatactttctccaatctgtttytgacagttgaggtggaagattttgatgcaacttcaaattgcatgaaaatcatctcctatttgctttttcaccttccctcgctccttcctgccttcctttt

SEQ ID NO: 225856 - DNA, 201 bp, Homo sapiens
tatgtgagttctgaatgctttcagctgcctgtaacagaaaattaaagtgatagtgctgaaatcacagggatatttattactatgagaaaacaggaggtagwggatcccagggttagtttggcaactcagtaatatcataaaggacccagtgtctttcatactcaggctctttcctcttttggctattgcctcatggtcaca

SEQ ID NO: 225857 - DNA, 201 bp, Homo sapiens
agtgttgggggagtaaacaccaagagaagaaactattgtaatttctgccaacaagaacatcatgcttttaaagtgcatgttgtttttttttcccctttggmacagttagcaggagtagcaaaaacagtaacaacgtgacctcagtgataatgtgtctctagtccatgaagctgagccaggtgttgtattaaatacctttga

SEQ ID NO: 225858 - DNA, 201 bp, Homo sapiens
atgtcttctagttttatcatgtttttgcgaatggcaggattttctttccttctttttaaagagtaaatcgtattccattattgatatatacatcgcatgtstgtatttatctgtcagtggatacttaggttgatgccatgtcttggtggttttgaataatgctacgatgaacatgtgagtggagatatctcttttggatgg

SEQ ID NO: 225859 - DNA, 201 bp, Homo sapiens
ggggaattaaagagatttccaagagactttctaagctctgacttaaaaactatcttcaatttaagatgccactcagctatctttggtctgggattgtggckttcttaacagtaaatgttaactactaatgttttcaagagcattataattttaggtttgctcttttaaaagagtatttctcctccctcctcctggagatga

SEQ ID NO: 225860 - DNA, 201 bp, Homo sapiens
tgtagaacactgataaaggtaggtactttagattggatagtcagcgaaggcctctctgaagagataagattagagctggcagaggtcttaaatgggacttyctaaatgccccctcaagcaaatagcatgcttaagaattctgaatgggggcctgtgaggggatggggaagaatgaaagtgttgagataaaaacaagaatcc

SEQ ID NO: 225861 - DNA, 201 bp, Homo sapiens
agagaagaaactattgtaatttctgccaacaagaacatcatgcttttaaagtgcatgttgtttttttttcccctttggaacagttagcaggagtagcaaamacagtaacaacgtgacctcagtgataatgtgtctctagtccatgaagctgagccaggtgttgtattaaatacctttgagacagaaactcatttctaaaat

SEQ ID NO: 225862 - DNA, 201 bp, Homo sapiens
ttgggcttgccacttctaaattgtatttatacctcccctgattggtccatcaatctagcctgtgtctcttgcctccacacatcacaggatgagatatgggyactcaatacccttttcttcactgcttttcttttccttccactttccattctcggtcagctatataccattatttttgcattgtcaaatttaattgacatt

SEQ ID NO: 225863 - DNA, 201 bp, Homo sapiens
atattaaatataatccctgtggtaactacaaagaaaatagatatacacaaggggaaatgagaaaggaatttaaatgtttcactacaaaaaataaactaacmacacaagaagacagtgatgcaggaaatgagggacagaaaaaaactgtaaggtgtgtagaaaatcaatagcaaaatgggacagaaggaagtccctccttat

SEQ ID NO: 225864 - DNA, 201 bp, Homo sapiens
gaaagcttttatcaagggtattctgagggtaatccactctcccaatctagttaagcataatctagaaacctgaccatgtgttccttgaagacactgagtgagtgtacccaatttggcagcttttgtgagagcaaggaccatccttcatttttaattcccttcaggttcatgcctacagtgaaaagtcagtacatcttgctg

SEQ ID NO: 225865 - DNA, 201 bp, Homo sapiens
ttggcaaaattatttttaaaggatcaacttttaaaaagtcgatattttaatcgttaagttgacctttttcaaaatggagtggaacagtatctgtgggatgstctttagggacactgtagatccctcaggatgaataaaaaggcaaaagttgttggggataatactggcacctaccccactacctagctgggtgatctttgg

SEQ ID NO: 225866 - DNA, 201 bp, Homo sapiens
ctgaagggaagatccatgaccctcataaatgtatctgtggcccggttatatgctaatgagcctcatttaggctcaaacttacttaccaggagtggaaatayagctcagcgggagtgcgaggctatggttccctcactgttttgccttctgtatcaatgttgagctgcaataaatggggaaatttctccatctgctgcaagc

SEQ ID NO: 225867 - DNA, 201 bp, Homo sapiens
ttagtttttgttttatttatttcctattatttcccaaaaacttcttctaaggattggcacaatgttgccatctgtaaggcatatgacaataacagacggtygcctaataaccaggaaggcattaacattcacaggctctaaattatttggattcctctggtatgatctgtgttgttgaggccacttaatgctttatttctg

SEQ ID NO: 225868 - DNA, 201 bp, Homo sapiens
agtagttagttaggtccaaaagatacagatcactggggaaccatggagatgaaaaatacttttactcctagaaacaacctctgtggagtttttagtgctcrctgtcattaggtcagtgttatttagcctaaaaataatgctaatgactgacagtagtagcagcagcagggaatattaaataccacttaactatgtgtcagg

SEQ ID NO: 225869 - DNA, 201 bp, Homo sapiens
aatccttctacaaagtagttagttaggtccaaaagatacagatcactggggaaccatggagatgaaaaatacttttactcctagaaacaacctctgtggartttttagtgctcgctgtcattaggtcagtgttatttagcctaaaaataatgctaatgactgacagtagtagcagcagcagggaatattaaataccactta

SEQ ID NO: 225870 - DNA, 201 bp, Homo sapiens
tcttttaccataggaccttagcttttaccatgagaagcctcgattaataccttactcactccttaggacagctctgaggattagggattagtgagggtcaytttagagctgaaggaggtacatttcctccccagatttgagtgtctcattataataagttgttttggatctgaattctgatcataacttttaatccttcta

SEQ ID NO: 225871 - DNA, 201 bp, Homo sapiens
ctcttgctaactctgatacatgtttgttagtagctgcctagaagccaggtcaggattcatcagggaacagtgctgtaattagttggtgaagctgaccatgsgtacaagttgccttgctggggaactggtactcgcatcatgtgtttaacgaagctgttcccattgcccagaattaccctttcttcaaaatctcattaccat

SEQ ID NO: 225872 - DNA, 201 bp, Homo sapiens
gagctcaataacagttcacctggcaaggttggcgccacagcttcaagtggtggctctcacgtctagttgaatattagtatcactggtgttggtagtcattyctaagggctgctgtgccaaattatcacaaacttggtggcttaaaaatcaccggaatctatcatctcacagttctggaggccaaaaatctgaaatcaagat

SEQ ID NO: 225873 - DNA, 201 bp, Homo sapiens
ctagttgaatattagtatcactggtgttggtagtcatttctaagggctgctgtgccaaattatcacaaacttggtggcttaaaaatcaccggaatctatcmtctcacagttctggaggccaaaaatctgaaatcaagatatggacagggccagactccatgggaagtcttcaggggagcatacttccttgcctcttcgagc

SEQ ID NO: 225874 - DNA, 201 bp, Homo sapiens
gggctgctgtgccaaattatcacaaacttggtggcttaaaaatcaccggaatctatcatctcacagttctggaggccaaaaatctgaaatcaagatatggrcagggccagactccatgggaagtcttcaggggagcatacttccttgcctcttcgagcttctagtggctcctgatattcctaggctgtggcactctggctc

SEQ ID NO: 225875 - DNA, 201 bp, Homo sapiens
cggagacgagggaggggggcaccgtggaaagcgggagacggagatgaaagggagagggagagggagctagattttgtagtttatttgcatagaggtgtttwtagtattctgtgatggtagtttgtatttctgtgggatcagtggtgatatcccctttatcattttttattgcgtctatttgattcttctctctcttcttct

SEQ ID NO: 225876 - DNA, 201 bp, Homo sapiens
gaaatagagccactcatgtagggacacttgaattttgagaaagatgacactgtggagcaatgaagaaagggcgatcttttcattaaatagtgctgaatcakttgggtatcagggcagggaaaaatgaacctcacatcataaacagaaataaattccagttggattgctgatctgagtgtgagagctaaatcaataaagcat

SEQ ID NO: 225877 - DNA, 201 bp, Homo sapiens
ccaaaactagagtgcaggtatttcaagcagtcattttacgtgttaaataaaagaggcgatgtgcaaatgtgaaaacaggcaccatctaagcttgacttttrccttagaagcattacagtgttcatagtgcttcatccacttctgggatttgttgtattgattctttcagcctcctgggcagaagcagagtggcacaggcat

SEQ ID NO: 225878 - DNA, 201 bp, Homo sapiens
tgaggactcctagatttttgtgacaatacaaaggcagagaagatacgcagcttttcggaccctctagtgtctccctctccccatgctggattaggtacccsctttctgtgactcccacagttgcccatattttcctcatcacagcactttacaggccttttgcaggtgcctgcttattttccgggtcacccaccggggctg

SEQ ID NO: 225879 - DNA, 201 bp, Homo sapiens
tattgaggaatcatttgggatggggccttatgttctgcttttctaacaagccgccaggtgatgttggtctgcagtccacacccgggacatcaagatgaagmctgcctccctgggaagaaaggaagaaagtgcaggaagatggcacaggagatgccaggcagtgtagggtgctccaggaaggcttcgtgaaaagagggaatt

SEQ ID NO: 225880 - DNA, 201 bp, Homo sapiens
ggcgaggcagctttaaagtattgaggaatcatttgggatggggccttatgttctgcttttctaacaagccgccaggtgatgttggtctgcagtccacaccygggacatcaagatgaagcctgcctccctgggaagaaaggaagaaagtgcaggaagatggcacaggagatgccaggcagtgtagggtgctccaggaaggct

SEQ ID NO: 225881 - DNA, 201 bp, Homo sapiens
caatacctctcagttcagacaagccgttttacaggggcctggtagtcacatggggctgatggctaaggtcctgggcgaggcagctttaaagtattgaggawtcatttgggatggggccttatgttctgcttttctaacaagccgccaggtgatgttggtctgcagtccacacccgggacatcaagatgaagcctgcctccc

SEQ ID NO: 225882 - DNA, 201 bp, Homo sapiens
ttattaatgagatattttacagtctttttcacagtgtctcctaaatctggtatgtactttacacctgcaatacctctcagttcagacaagccgttttacargggcctggtagtcacatggggctgatggctaaggtcctgggcgaggcagctttaaagtattgaggaatcatttgggatggggccttatgttctgcttttc

SEQ ID NO: 225883 - DNA, 201 bp, Homo sapiens
gtcttgccactttttgtctttggaccctgccctcaggtccctaatcagagtgtgatggtgagcacttgtagctgtcacctccactgaagagaacagcagcrgtctgtctcagtaccctggaaatacgtgcaagccacagcccatttcagaggaaattctagttgtagaaccccggagcagaaaagctatgggactctggcc

SEQ ID NO: 225884 - DNA, 201 bp, Homo sapiens
tgaagaatgtgacgagagcacagtgagcatgggagacactggaacaaaatgaggtcagagaggagtttagattttattccatgcgtggtgggagggcatgsaatgaacatggaacaggagttataggttaagaatcggagttctgaagtcaagaaacctgagcttgtcaataaattctgctacttactgggccaggtcacc

SEQ ID NO: 225885 - DNA, 201 bp, Homo sapiens
ccaggctagaaacataaatgtgggagtcataggagatagtatttaaagccatggccttgaatgagaccacctggttgggaagagcagtagaataaagtaaragagctgagaatcaagcgtgggccaccctgacatttcgaaggtggatatgggagaagggaaatcctttctaagcagacaaaggcaactacaagtgcacgg

SEQ ID NO: 225886 - DNA, 201 bp, Homo sapiens
ttggaactgcacttatttcagtctggttgttgtattcaccttggggctctgtattcctgaaaccatggactgctgatatcttagcagccataagaatcttyctacttgtttgaaataggggtttctggatccagagcctagagatcatcctaggtatgttttctaagatgtactttttaaaataaaattaaaatactttat

SEQ ID NO: 225887 - DNA, 201 bp, Homo sapiens
tgttttctaagatgtactttttaaaataaaattaaaatactttattttttagaacagctttagattttcagaaaaattgtgcagatagttgagagacttaycataacattttccttccgtgtcgccactattcccccatccccgccccaccaccaagtgtctcctactattaataccttgcattagtgtggcacatttatt

SEQ ID NO: 225888 - DNA, 201 bp, Homo sapiens
attatattttgttgccatttaacttgtttttactgtatgccacaccctgtggtaactcgtttcatctgcacagtgacccttgaaatgcccacagtatagaygagaaaactgaactccttagaattgacgtatcttgcccaaggtcatacaatgagtgaatggggcaacctggacatggacttcagtcttcctgagctcaga

SEQ ID NO: 225889 - DNA, 201 bp, Homo sapiens
actctatgaaaaataaacaatacatcaataacatcctaagaattactggaagaaacagcatgttgtctgttattctctgggggtggagtgtaaaagtggtrggcaaggaggggttctagtttgctgctgtggcgattagtaacagcatttgtagtatgaattttgattaacttttgaatccatgaagcagaccactgagtc

SEQ ID NO: 225890 - DNA, 201 bp, Homo sapiens
gaaataggccctttgggatgtgccttggaagcaggtagaatttgttcatggattgggtgcaaaggctcagaagctaagaagaattgctggtttttggctcragtaaccagctggatgatagtgctatttactttacagactgaagtagggtaggagagttacaagtcaggggttttttttttatctttgggtgataaatat

SEQ ID NO: 225891 - DNA, 201 bp, Homo sapiens
agaggtaaaagtgcaagcaaaattatcacagtggtttatatcagagatgatatagtggaggtggagagaaataggccctttgggatgtgccttggaagcargtagaatttgttcatggattgggtgcaaaggctcagaagctaagaagaattgctggtttttggctcgagtaaccagctggatgatagtgctatttacttt

SEQ ID NO: 225892 - DNA, 201 bp, Homo sapiens
agggcctagcatgacattagagttagaaggtattaggcaagggaatgacatgatctgatttaacttttaaaagggtcactccctggctggattaaagagargtaaaagtgcaagcaaaattatcacagtggtttatatcagagatgatatagtggaggtggagagaaataggccctttgggatgtgccttggaagcaggta

SEQ ID NO: 225893 - DNA, 201 bp, Homo sapiens
agtagatacttattgatccctgataaagttccaggcactgggggatagaggggtgaacaaaccagatcagacccagaccgccaaagagattactctagtargagagacagaaaaaaccaattaaacacacagacatctcagagagtgagaaggaaatgaaacttggtatgataaagaaagtatttatgcatatgaatttgg

SEQ ID NO: 225894 - DNA, 201 bp, Homo sapiens
gagcttctaaataaatggtgctcttcattcagtagatacttattgatccctgataaagttccaggcactgggggatagaggggtgaacaaaccagatcagrcccagaccgccaaagagattactctagtaggagagacagaaaaaaccaattaaacacacagacatctcagagagtgagaaggaaatgaaacttggtatga

SEQ ID NO: 225895 - DNA, 201 bp, Homo sapiens
catggtggagagaaagagctctggtccttcatgtccttataagggcacaaatccatcctggggctccaccttcatgacctcatctaaccctaatcacctcygcgaaggccctactaacaaatatcttaactggattgtggtgttaatgaattttggggaagtggtgggggcacacacattcagtccataccaccctggaac

SEQ ID NO: 225896 - DNA, 201 bp, Homo sapiens
atagtttccaacaagaggctgtgcaaattgcaaaggagggaaaagaatatctccgctttcctacattgaggttacagatgagccacagagcaaccatttgyatttgcaggcaatttccatcattctgcatgcatgctcaccctggcaacagttgaaagcattattccacattaccgtagtattttatcacgcatcgcacgt

SEQ ID NO: 225897 - DNA, 201 bp, Homo sapiens
tgttaaatcttcccccccaaaaaaaagaaagaaagaaaaccttgggaaacactaccttgatccaagccgtcattttataaataaaaagcaatgaccaaagmaatgattttcctgagtttattgaatggtgaatctcatattctattcctgtgccataaataaaacataattatcttgtacttgaaggaagatgctatggaa

SEQ ID NO: 225898 - DNA, 201 bp, Homo sapiens
ggcagggagagaaaagatactaattcaattgtcaaggtaacaggtgagagactgggatagggaagaagaaaggtagaagagacagaatgagagctgttccygatagaaatttttaaaaatgaggaggttgaagaggaaagtacagcaacattggaggtagatgacaagtggattcacttattttcatgttataggtaaaga

SEQ ID NO: 225899 - DNA, 201 bp, Homo sapiens
accaacttggaatgcttaataagcaagcatggaagtaacttgcagaagaaaaaagacttcagccttttaatgtcaaaaatatcaaatagggaataatttcmagtggtgatgtcagggacagctgcgttgtctgtacagcgttggagagaagatcctgcttcggcatagcctatgattttgaaggctactctatagctgcca

SEQ ID NO: 225900 - DNA, 201 bp, Homo sapiens
catcctaagaattactggaagaaacagcatgttgtctgttattctctgggggtggagtgtaaaagtggtgggcaaggaggggttctagtttgctgctgtgrcgattagtaacagcatttgtagtatgaattttgattaacttttgaatccatgaagcagaccactgagtctgtgagtagatgtcatttgaattagatcttt

SEQ ID NO: 225901 - DNA, 201 bp, Homo sapiens
taagcatttaacatctgtaatttcctttaattgtcatcaaatctttgtgaggcagtatagtcctgttttacacatgaaaacactagggctcatagacgttrtctgttcagggcctgtcagtccaccccaccaccccagaaatgtggcaaatctaggatttaaacccaggtctaggtgattcctaagcttctcattagtaca

SEQ ID NO: 225902 - DNA, 201 bp, Homo sapiens
ttgggtgaacaacatatatagaaataatgatagatggacaaatatgtttgagatgttcattcctacctaatgaagcatccaacacaaaattggatataaamgcttgaaattatcatgattgttgtcaccacaatgacagttaatatacattgagctcttactatgtactagattcttgttaagcatttaacatctgtaatt

SEQ ID NO: 225903 - DNA, 201 bp, Homo sapiens
ggggtaaggtggaacctgtgaggtgctattggagcttcagagaggagcacatcacccatacttcatcagattttcaaggaggttcatgacccccccccccmaaaaataaggacctccaaactaaaggaacaggaatttgatatgatggttgggtgaacaacatatatagaaataatgatagatggacaaatatgtttgaga

SEQ ID NO: 225904 - DNA, 201 bp, Homo sapiens
aataaggggaggcatcccctggcagccactttttccaatccgatggagctctgtgctgcacagcggggcacctcttaccttaatcctgaattttttacttyttatttattaattgtattttttgttttttgagaccgggttttgctctgttgcccaggctggagtacagtggtgcaatcatagctcaccgcagcctcaaac

SEQ ID NO: 225905 - DNA, 201 bp, Homo sapiens
cagatttcttccatccctgttaggggagtttcagggccttccccatcacaggccttgagaaaccaaacgtccgtgccctaaggtatttttttctctgttgygcttggctttatagtcttgcccagtaggacctgcataagctttctcaggcaccacatcttgcttagaactcagggaggtcaaacaaagtctttcattttt

SEQ ID NO: 225906 - DNA, 201 bp, Homo sapiens
ttggtaatttcagcaaaggtaagtacttgccacaggaatagtgaatcccaagttaatgcccaataatatcaccaactaaatgaaataaatggaagaaagartctcttctcttccctatccccctccaaaataaagtttatgggatgatttcaggatgttcatttctaggactatctagctatcatatttctttacccaatt

SEQ ID NO: 225907 - DNA, 201 bp, Homo sapiens
gctgcatattcctctacctgcaaagcaattaaattattgtctgacatgtttataactccagaaccagtaatcagcttttagtctgaatagaggacatggcrttataacccagtgctttgctgagaggttcatatttagcatttgcatttgataatttaatttaaataataccgagcaagcacagttacacttcttggcaat

SEQ ID NO: 225908 - DNA, 201 bp, Homo sapiens
agacgtggcaccaaaggtacagcgtcattgcccataacatatgtttatacatcaaacatgtttgttgctttagggaatacatccattaatctatttttttytctttcactttcaagtgctgttgagatgtcaaaggaacaatagcactgctattccaagtgccctcaaattggaagtgactgtatttattggcattgctca

SEQ ID NO: 225909 - DNA, 201 bp, Homo sapiens
aaccattgaattaaaggctcagaaataatgtggcccaaagagtcttaaagaacataaaagtattggaggagagttcattaaaccaataactgagccagagycttcattcatgttatatgaggaaccctccactatttagctgtttgtggacccagcaattgctgtgattatcccatcattgccagtgtccaatataatgtt

SEQ ID NO: 225910 - DNA, 201 bp, Homo sapiens
catatctttgcttcatctaccccattatggaaaatggcagttgattagggttttctttagatcattatcaattgttttctatcttgcagatagtgctgttrggacacatctatcataccccagagatcctatatagctcgttatttctgagtgatttattaccttactgtggaaatgtagttagtgaacgttggggaagca

SEQ ID NO: 225911 - DNA, 201 bp, Homo sapiens
cttagtgtcttctaaattgcaattttgtctccccaacccttttagactgacaaaatggctccttcgtttttggtcttttagcattgatttttgcttagttwattggtctcttcatatatttgcagtttaggaatttgcaaatatctcaaggggaaattacgttaggagtattgggatcacttttctttggttcaccgttct

SEQ ID NO: 225912 - DNA, 201 bp, Homo sapiens
tgctttctacttggtttattccctcacgatgcaaattcgcaaatgcccttaggacacaaagttgctttaactatagagctcacctcagtgggctttctttscctgcatcatctaggatgcttgaatcttgcatgccttggttgtgctctgatgcttttgaacagctttttttttttttttaatttatgcatctatcacaat

SEQ ID NO: 225913 - DNA, 201 bp, Homo sapiens
ttatgttgtattaaagagtcgtgttgagttccagaatgagaacaagaatgctgcatattcctctacctgcaaagcaattaaattattgtctgacatgtttrtaactccagaaccagtaatcagcttttagtctgaatagaggacatggcgttataacccagtgctttgctgagaggttcatatttagcatttgcatttgat

SEQ ID NO: 225914 - DNA, 201 bp, Homo sapiens
tttttaccataaagcaggtgtgaggcgaagactttgtgtgtgtttatgatcattatgttgtattaaagagtcgtgttgagttccagaatgagaacaagaaygctgcatattcctctacctgcaaagcaattaaattattgtctgacatgtttataactccagaaccagtaatcagcttttagtctgaatagaggacatggc

SEQ ID NO: 225915 - DNA, 201 bp, Homo sapiens
actctctctgagcctctacagcccaaggctcaaaccgtgcctttgatgtggctgggatgctccatgctgtttttcatgtggtaagacagctcctccagtaytcctcctcacacaaatgacgatggctttcagggaccaccagtacagcctttcacacctcagaagaccctcctcaggccccaggagccctctcacaatccc

SEQ ID NO: 225916 - DNA, 201 bp, Homo sapiens
gccgggtcacattcggaatggtaaacaagtcccccaaaaaacttatttttgaggtagagactgtgtagaatcacattttacctcctggactattatttacrtgtatcttactgtaaatgactcaggattaaggagaaaaaaacaccatcttcctttgaagagaaagaagggaagctggtgtttctagcagtctctgcgaaa

SEQ ID NO: 225917 - DNA, 201 bp, Homo sapiens
ctcatgtaaccgaataccacttgttcccccaaaaacctatggaaataaaaaaattaaaaataaatatatcactaaatgcagatcatttatatatttttttwaaaaaaaaactctaagaaccaggagcagaaggaaacagttgtaatcttggcactagatgctttggtggctggcacatggtggggcatcagcaggactggt

SEQ ID NO: 225918 - DNA, 201 bp, Homo sapiens
ctatcaattcaaaggctggcctagttcctctggatactcaaaaatattattataacagacatgtattgagttcttaatatatgtcaggtattatgctggayacctagcatgtgctgttgctttcaatatacacatcagttctcaaggctgccaagccagtgcatgtaagatacgcaatgcaaggtctctgcctcaccatct

SEQ ID NO: 225919 - DNA, 201 bp, Homo sapiens
tcagtgaattcagatggcctgtccttcaaagcttggcctagggtagattgggcaaatgattcctgagaccaatagtatctcagtccattgacttttttccmttctccacccaagacacctgtggaaactattagtcttctatagaatgggcttcagtaatgtgtaagataaactgaggccttcattcaaagcctgatctta

SEQ ID NO: 225920 - DNA, 201 bp, Homo sapiens
tgccacacatccagcagcatgtatgagacacacgctgagactcccgtgtatgagactcgtgcgcactcgcgcacattgtgtctcctacaatgccaggttakgggctgagaaacactcttgagtattgaataaaggcactgaagggtcatttccccaagaagccttacacatacttaccaaatacccaccatatgcctcaca

SEQ ID NO: 225921 - DNA, 201 bp, Homo sapiens
aacaatcaaccacttaaggtacaatccaggaaaactggactccatgtgaacttagaatttctgagctaaacagcatgaactccctacagtgcacatcatgsgggggcaagtggatcactgggtaaggagtaatgggttaatttactcaggtgcagggataacatgttaactacccagctgcttaggggaagtaggaccagt

SEQ ID NO: 225922 - DNA, 201 bp, Homo sapiens
cagggcttgaggaggtaaatgttacttgacagaatttaatgtgtgatttttccctcccttcaggatattttggaaatgttaaaaagttgacttttttttttaagtaggatagtttggaatgaaggatttcggtccaaatagctgtcatattttatagacttttatagttggaatccagttcgagccttggaaggaggaagg

SEQ ID NO: 225923 - DNA, 201 bp, Homo sapiens
agcatcaagtaggtagaggccagggatgctgctcaacatgctgtaatacagaagacagcagctgcaataaagaattgtctggctcaaaatgtcaatagtgmtaaggtcagaaacccttggctagaggacagatgggagagtaggtgaccagtgaaacaattagaatggggctgtgctgcagaagggcttgaatgctggaat

SEQ ID NO: 225924 - DNA, 201 bp, Homo sapiens
gggatggcttcataagaaatggtgtaagtgcccgtaagagggacatgctttttctcatcttctagagctgggaggttaaacaggagcccagagatacataygctttccatcttctcagtgggttagtgggaaaagtgaaatggatattagcaagcgcttggttagtaagagacctcttgtggggcagtttttgaggatcag

SEQ ID NO: 225925 - DNA, 201 bp, Homo sapiens
cagtgtaacttacccccatgtgattactattacttaatatgtcatatatgcttgtgctcagatatcattgcaaaagagtgaggagacctgatataagtcartattcatttaaaccagattagaaacctaatccaaactagctaaagtaaaagaaatgtcttggctcacataatcataacatgtagcattaagtcttcaggc

SEQ ID NO: 225926 - DNA, 201 bp, Homo sapiens
ttttacattcttgaccatgtattacttcccatttcaggttataaccagtaggaatttgctagttcactccggtaattatctgttctcctagctgcaaacastgctaagtagcctttaaatgcagctgagatgattgttaaaagaacatttaaaatccttccattaaaaacaagtaaccaaatttggtaaagttctttctga

SEQ ID NO: 225927 - DNA, 201 bp, Homo sapiens
gggacatttttataaaagatctaatgaaaatgtttacagttggccctccatatccatgggttcaatcaatggaggattggagatatttggggggtgggggkaattgtgtttgtactgaacaagtgcaggcttttctttccttgtcattattccctaaacaataaagtataactatttacgtagcatttatattgtattagg

SEQ ID NO: 225928 - DNA, 201 bp, Homo sapiens
tacattcttgaccatgtattacttcccatttcaggttataaccagtaggaatttgctagttcactccggtaattatctgttctcctagctgcaaacactgmtaagtagcctttaaatgcagctgagatgattgttaaaagaacatttaaaatccttccattaaaaacaagtaaccaaatttggtaaagttctttctgacca

SEQ ID NO: 225929 - DNA, 201 bp, Homo sapiens
atttatatcattttctaccatcaaaggggctatggactctgccaagaatgtagcaagccaacttgaccttcagaggtaaaaatgaaacccgaagacatggmgaaaattaaaccaactctttagcaaaatctagagatgaagtgagggcaccattggttcctgggtgttttaatagaatgtggaaatgtgaagcagcttcca

SEQ ID NO: 225930 - DNA, 201 bp, Homo sapiens
tctagggcactatcaggaatgtcaccaatagctagttattcgagagtaatttcatgtgtgaggaatgcgttggaagactattttaagtccacatatttcargtaggttttatttatttgaatctgggaacatagggattgaaaaattctcaaggtaagcttttggttgtgaagtcatttataaccaaatcagcagtgatca

SEQ ID NO: 225931 - DNA, 201 bp, Homo sapiens
agtgctatgatatggatgaatctggaggacattgtgctaagtgcaataagccagtcactaaaagacaaatactgtatgattccacttacatgagttatctrgatttgtcaaccctcatggacagaaagtagaatggtagttgccagaagctggggggagggagaatggggagttgttatttaatgggtatagaatttcagt

SEQ ID NO: 225932 - DNA, 201 bp, Homo sapiens
gatctcatgagaacacactcattatcatgaggacagcaccaagccattagagttctgcttccatgacccagtcacctcccactaggactcatctccaacaytggggattgcatttcaacatcagatttgaaggggacaacatacaaactgtattacagatgatatgaacttacatgtagaaaaccctaaagattccaccaa

SEQ ID NO: 225933 - DNA, 201 bp, Homo sapiens
aggttccacacacttttaaacaaacagatctcatgagaacacactcattatcatgaggacagcaccaagccattagagttctgcttccatgacccagtcayctcccactaggactcatctccaacattggggattgcatttcaacatcagatttgaaggggacaacatacaaactgtattacagatgatatgaacttacat

SEQ ID NO: 225934 - DNA, 201 bp, Homo sapiens
atgcagaaaggttatgtcagttgcccaaggtcccactttgtcttgtgctctgggtctaaatccaggctgggaggaacatggaggagtgaagagggatgtcrccttgtaatgaagagatggcagtgaggactctgatggtgggcagactaggggaagacctttctgtttgttttcagcttgccccttagcatctcactatcc

SEQ ID NO: 225935 - DNA, 201 bp, Homo sapiens
cctggtgattgtgccggatgactgtgaagagcctctgctctgcctccatggtgcctagcacaggggttgtgggcaaacgatacctgtgggccctggcctakttttgtaagtaaagttttactggaacatggccatactcatttgtttacctatggccggcaaagcctaaaatatttagtatctggacctttatagaaaacg

SEQ ID NO: 225936 - DNA, 201 bp, Homo sapiens
ggaatgtctattcagattctgtgcccatataagttggattttttgtgtttttattattgagttggaagaggaattttccatgtttaactcgtaatcctcaygatacctctcccgagattggcatacttacctttgtcttgcaggtgaagcaattcaagttcagattattcactcatttacccaaggtcccacaggtaggaa

SEQ ID NO: 225937 - DNA, 201 bp, Homo sapiens
tactttctccaatctgtttctgacagttgaggtggaagattttgatgcaacttcaaattgcatgaaaatcatctcctatttgctttttcaccttccctcgstccttcctgccttcctttttttttttttaattagtttcctcttttgaattttatggcacaagtttgtgcttaattccttatttagagcttactggtaaat

SEQ ID NO: 225938 - DNA, 201 bp, Homo sapiens
ggcagttgtcatccagctggtgagtaatcctggggcaatgaccgtggggatgtggcagtgcttctttctaaagctgacaacttcaatagccatgaggttaygataaggaggtgagttactgaaaagaagtgatgcagggaacagggaaggagcaacaggaatgaggatcacagcaacagcagaggagaaggacaaaggaaa

SEQ ID NO: 225939 - DNA, 201 bp, Homo sapiens
ggaaatcccataattttgtcaactcaaatactttctccaatctgtttctgacagttgaggtggaagattttgatgcaacttcaaattgcatgaaaatcatytcctatttgctttttcaccttccctcgctccttcctgccttcctttttttttttttaattagtttcctcttttgaattttatggcacaagtttgtgctta

SEQ ID NO: 225940 - DNA, 201 bp, Homo sapiens
agaaaaatcctacatcaaaatcatgacttcagtctacttgtctcctgattgtggggaatattgaagggaaatcccataattttgtcaactcaaatactttytccaatctgtttctgacagttgaggtggaagattttgatgcaacttcaaattgcatgaaaatcatctcctatttgctttttcaccttccctcgctccttc

SEQ ID NO: 225941 - DNA, 201 bp, Homo sapiens
atgttctcactcataggtgggaattgaacaatgagaacacatagacacaggatggagaacatcacacaccggggccacacaccggggcctgttgtggggtkgggggaggagggacggatagcattaggaaatatacctaatgtaaatgatgagttaatgggtgcagcacactaacatggcacatgtatacatatgtaacaa

SEQ ID NO: 225942 - DNA, 201 bp, Homo sapiens
aatgtaatgagtagtattgtttagaatttatatatatatatatatatatatatatatatatatatatatatggccagttgtttttctttgcagttttattkctctttgtaaaatggacataatagtacccacttcgtagattgttatgaattaaatgggatgatctatataaaatatcagcactgccctcatggagtctag

SEQ ID NO: 225943 - DNA, 201 bp, Homo sapiens
gaaaaatccaggctagaaactttgggtcatctccagtttattcttgaagttcgtcctctgtatgctgtcattctctagttctatcaattcttttttcctgycaagcccctgtcataattattgctattcttggctgggctgaagttctgggattgtactccccagggttttctggggcttcaccaaggtttccaaattgat

SEQ ID NO: 225944 - DNA, 201 bp, Homo sapiens
caggccatccggctagggagcttgagctctaatagctaatgtccttaggtggcaaaaaggtcagacctgcctgatagctaccttttctgtaaaatgaagtstaatggataaggacaaggatataaaaggaattgcttttatcaatgacatagcaaattaacattcatttttattgttttcaagatcattccatttcaagtg

SEQ ID NO: 225945 - DNA, 201 bp, Homo sapiens
tgtgttttccaactgcctggttttcaccgatatgcaggaaaaggttttagaaaggggtttaagaatcttctcttagttgaaaattggctatcatttgaaaraatgctgcaataatttgtctgcagtaacagctcactgaacgtagcataaaaatgaaaacgagggctgaatttattcggtgtcttcattcttgtacctgaa

SEQ ID NO: 225946 - DNA, 201 bp, Homo sapiens
cagcctggccactatggtgaaatcctgtctctaataaaaatacaaaaactagctgggtgtggtggcaggtgcctgtagtcccagctacacgggaggctgargcaggagaattgtttgaaccccaggagcttgcagtgagccaagatcatgccactgcactccagcctgagtgacagagtgagactccatctcgaaaaaaaa

SEQ ID NO: 225947 - DNA, 201 bp, Homo sapiens
ccatttcatttgatttgccctttcacatcagagaaatgaaactgaacacctttgagggattttatctattggaatatgcatgctaaacattactgaggagmcagaagagtgaggtggagggactaactagagtaaaagcagggcctaccttccaaatttactttttactggaaaaaatgtcacatcatcactatctgacaa

SEQ ID NO: 225948 - DNA, 201 bp, Homo sapiens
cttgagatgatgtatatcccatttaccctacgtgattattatgtattgtattcctgcatcaaaatatcccttgtaccccataaatgtacctacaacatatsttatatgtacccacaacaattttttaaaaaaatgaatgcaggggaacctagaaatacctagttcttttccttgagtcaagccttttgagcaagagacaag

SEQ ID NO: 225949 - DNA, 201 bp, Homo sapiens
caaaagaaagtaattgccaattcagaattttatacctaccgaacacatccttcaaaaaggacatttttagaaaattaaaactaagataattaattatcagsatatctatatcaaaactattaaaaggagctcctcagtcagaggaaatagtcccagttgaaatcatgtaaatgaaggagggcatgaagaacaccaaaaagt

SEQ ID NO: 225950 - DNA, 201 bp, Homo sapiens
accaacattaatcaatttcaaattttcaatatttcacggtatcagtttttcaacatgcttgtattactgttttctcccattttaatattagagataatgasaaaacaaaaatattgtggggcaaacacctatgaagaaaaacaggatatatagaatagattcagtagcaggaaagcatgttaaattttctctttttcagtc

SEQ ID NO: 225951 - DNA, 201 bp, Homo sapiens
atgttaaattttctctttttcagtcttgtagtacctgtctattctagaacatctttcctccagtgcagcatttcctaaaatatggccttcaggatagtaasaggaagtatttgaaatgacggtttcctagttagatatgtgagggaaacacatttccctttgccaagctctaccagccatgggatttctcaaactctctgt

SEQ ID NO: 225952 - DNA, 201 bp, Homo sapiens
aattttctctttttcagtcttgtagtacctgtctattctagaacatctttcctccagtgcagcatttcctaaaatatggccttcaggatagtaagaggaaktatttgaaatgacggtttcctagttagatatgtgagggaaacacatttccctttgccaagctctaccagccatgggatttctcaaactctctgttagtgt

SEQ ID NO: 225953 - DNA, 201 bp, Homo sapiens
agggcactatcaggaatgtcaccaatagctagttattcgagagtaatttcatgtgtgaggaatgcgttggaagactattttaagtccacatatttcaagtrggttttatttatttgaatctgggaacatagggattgaaaaattctcaaggtaagcttttggttgtgaagtcatttataaccaaatcagcagtgatcagtg

SEQ ID NO: 225954 - DNA, 201 bp, Homo sapiens
aatgtcaccaatagctagttattcgagagtaatttcatgtgtgaggaatgcgttggaagactattttaagtccacatatttcaagtaggttttatttattkgaatctgggaacatagggattgaaaaattctcaaggtaagcttttggttgtgaagtcatttataaccaaatcagcagtgatcagtgaaagctggagatta

SEQ ID NO: 225955 - DNA, 201 bp, Homo sapiens
aagatggagctctggatgtcaaatatgaatttctcttctgaactgtcttatgactcacacacacacgtgcctggaagtccaaagtgtagttggtttttaawtgcttctgtcaggtaaccatggccttgggaaaaattatattatgttttcataactgcagtgaaatgcaaccacagagaggggaaatatgccaagtacaat

SEQ ID NO: 225956 - DNA, 201 bp, Homo sapiens
taactgaaggagtcatggaaaagtagcatatgaagtccaaggcagatgcctagatgacctggggcttgggatgggggatccccggccacccacctgggatytagtgagctgtttgagaaaagaacccaacaggaaacctctgcagaatccataaaagcttatcaaaagagaaagtgtcagccctaactatctgccaggccc

SEQ ID NO: 225957 - DNA, 201 bp, Homo sapiens
gctcagggaaccaccaaacacgggtacaagctataacacaagaagctggagcacaccagcatggccaagcaaggcctggtacgggcatcactggccagggkttcccagcttgcaaagtgactgagaagaaaaatcctacatcaaaatcatgacttcagtctacttgtctcctgattgtggggaatattgaagggaaatccc

SEQ ID NO: 225958 - DNA, 201 bp, Homo sapiens
ataatagttacatgttgaaataatattttggtaatgttgagttaaaaattatatcactaaaattaatttcacctgtttctttgtacttgttttggtgttgstaccaaacacttttaataacatatgtatcatgcattagatttcttctggatggttttgctctagaatgctttcaaactgcttcagcttactggcaagcag

SEQ ID NO: 225959 - DNA, 201 bp, Homo sapiens
tagagtcctggaaacatagcctgatgtttagaatcccggcttgagtgttcaaatgtggttatatttttgtcactgcggggtgacgtctaccattaatgttsaatttggtagcagctagccacctgtgaccagtctgaattgagatgcgttgtaaatgtaaaatccagtttggatttcaaagccttctaccaaaaaaaaagt

SEQ ID NO: 225960 - DNA, 201 bp, Homo sapiens
aatcacacagtaccttccagaaaacaggccatacagttttacaaagcactgttatttgcatttctgaggggttttttttgtaaattgacttaatttccaaygcattatgattatataatatcattcaagtatagaaacttacctatgatacatctttttgaggtgctaaatgtctttaagctgtgaacgttgacgtttttg

SEQ ID NO: 225961 - DNA, 201 bp, Homo sapiens
gaaggggtcttttgaaaaggaaagatccattagacaggatagtgaacttcattagggagccaataattgaacatgtctgatgcctgaatctcttatctttwtaatgaaaagtccagtcccagaatcacacagtaccttccagaaaacaggccatacagttttacaaagcactgttatttgcatttctgaggggtttttttt

SEQ ID NO: 225962 - DNA, 201 bp, Homo sapiens
agagacacgcaatgccagaatacacaaggaggaaggggtcttttgaaaaggaaagatccattagacaggatagtgaacttcattagggagccaataattgmacatgtctgatgcctgaatctcttatctttttaatgaaaagtccagtcccagaatcacacagtaccttccagaaaacaggccatacagttttacaaagca

SEQ ID NO: 225963 - DNA, 201 bp, Homo sapiens
ggtgagtgaaggagactactgctaagcaatagatgcacttccctttagccaagagatggtcaggaaggaaatggcacaccagtgattactttgaaatattrgcctgctacacatgggtaagaaattagtgacagtaactgtgctacaaagttgaaaccgctaagtaacatgggatggtggtctctgataaagggccatgga

SEQ ID NO: 225964 - DNA, 201 bp, Homo sapiens
actatctgacaattacttcttcttggataatattttaaaaggagatgttatgtcatttatggaattttaaaccctcaggaataatttagtctaatcctttsagtttacatatgagaaagctaaagccaagctaatttaaataatttctcccgagattaccagctaattagatgcagacctagaattagacctcaggctccc

SEQ ID NO: 225965 - DNA, 201 bp, Homo sapiens
ttgtggaaatttgttatagtagcaaatagaaaactcatatattacccaacctcaggattcagcctgggggttggggaaaaggcaagggtagagcacacccygccccagtgcacacatgcacacacatgcatgcacgtgcccactcatgtacacatgcactctttcttgctttatctctcttgactctgtccattatccagc

SEQ ID NO: 225966 - DNA, 201 bp, Homo sapiens
ggcagaggttgccgtgagccaagattgcgccactgcactgtagcctgggcaacagagccagactccatctcaaaaaaaagaaaaaagtataaggacatgaygagcttcatatatttatttatttaaaatatttttatttaattgtaacttttatattttaatttgtataattctataataatttaaaataatgtctgtgtt

SEQ ID NO: 225967 - DNA, 201 bp, Homo sapiens
agagtctcaaattcaaagggatggcttgcagtgagtcagctgtggaagaccaaataatagcctcccaaatggtgcctatgtaccaatctttcagaacctgyaaatatgttagatggtaaaagagaattaaagtagaagattcaattagaggctagtcagccaactttaagataaggagatgaccttggattatccaagtgg

SEQ ID NO: 225968 - DNA, 201 bp, Homo sapiens
atctcaaaaaaaagaaaaaagtataaggacatgacgagcttcatatatttatttatttaaaatatttttatttaattgtaacttttatattttaatttgtwtaattctataataatttaaaataatgtctgtgtttaacagctggtatgcaaagttactgaaatttaccaattgcaggtaagcctcagggaggcagctcca

SEQ ID NO: 225969 - DNA, 201 bp, Homo sapiens
agtatacaggtcatcttttgtggagaaacctggacatatacacccattttgttatttctgtctgtgttcctgttactgtgcagactttcagaacagatagwgtttgtaaattgcctgtatgcttcacatgaatttgcctttagtttgtgcacacacataagtaattcacacataaagttcacatgctctggggagccaaat

SEQ ID NO: 225970 - DNA, 201 bp, Homo sapiens
taaagcagagtttggaaataagactgtgtgaactatcgagtagctgtatcagtttgtggaattaatttactgaggcggttagctgccagttttccgcacasacacacacacaaaaagcccaaattagttccattattttttaacatgtgctaagtgcccatagcatgttggtgccttcacatgatatcagaatgcactatg

SEQ ID NO: 225971 - DNA, 201 bp, Homo sapiens
ggaaacaatttaaatgccaaataatagaggaatatatttaatactatatattcatctatgtagccatcaaatgagtttttatgaataatattaatgatatmacactgtacacaaataatcagaccaagaataataaagcaaattagtcctaccatgatttatcattagtaaaaatgggaaactggagagagaaaagttata

SEQ ID NO: 225972 - DNA, 201 bp, Homo sapiens
taaagaaccactaataccaatgctactcaaactgtttcataaaactgatgaggaaggaatacttgcagattcattctaggaggctagtatcaccctgatasaaaaaccagacaaaggcacattaaaaaaaaaaaaaaaaaactgcaggcaagtaaccctgatgaatatagatgcaaaaatcctcaacaaaatactaacaaa

SEQ ID NO: 225973 - DNA, 201 bp, Homo sapiens
ggttttctgtgccagcatcatgcctccttccaaaattgtgctaagcaacatggttagcaatgactctgtctttttgtttttgtttttgagatggagtttcrctctcgttgtccaggctggagtgcaatggtgagatctcggctcactgcaacctctacctcctgggttcaagtgagtctcctgccccagcctcctgagtag

SEQ ID NO: 225974 - DNA, 201 bp, Homo sapiens
aacctaccaagattgaaccactaagaaatgcaaaacctgaacagacgaagtaatgagatcaatgccataatgaagtcgctcagcaaagaaaagcgctagayttgatggcttaactgctgaattttagcaaatgcgtaaagaaccactaataccaatgctactcaaactgtttcataaaactgatgaggaaggaatacttgc

SEQ ID NO: 225975 - DNA, 201 bp, Homo sapiens
catgatctcatttgttccttgtagcagccctgagagttaaaaaatggcatacccagtttatagatggagaaaatgaatttaagagggattcaaaaaactcrcctgtgaccacacagattgcaaatcagttgcagagttggaattccaacccaagtttgtttgattctagaaccagtgcttttcagactatgtcatgcttta

SEQ ID NO: 225976 - DNA, 201 bp, Homo sapiens
ctttagtgtcatctaaacagaagtcatgacgggcccagaagggtcaggcatgatccataggagttataacacccatccgctgccagccctgtctgccctgsagaactgccagaggaggtaggacatggcagctaatgtcactacttcacaattttcttctatttccctctttgtctctactacacccaataaagtagctcc

SEQ ID NO: 225977 - DNA, 201 bp, Homo sapiens
tgtggtgtttttcccctcttctttcttcagctacgtcagttactccttagggacagaaaagatgttgtgtttattttttttatccttcttatgctttatacagagtaaatgcacaatgattccctgttgtttgactgatagttgctgttggagatggaatgttttctaaagaatgttgctgaatttatcttgtcttagaaa

SEQ ID NO: 225978 - DNA, 201 bp, Homo sapiens
tttgtttttttacaagtagggcttaataattattaatcaatacccattacttattattaaagttaccagatttaccatcatgcttactaatttctctgttyactattgcttcttgtttctcactgcttccttctgggataaattcccgcttattcaagcatatcttattttagtatttcttttggcaaaagtaaactactg

SEQ ID NO: 225979 - DNA, 201 bp, Homo sapiens
tattacccccttctttattccatatgattgtgataaaccactcagtttcactttattggcaaatgctaaaaattgttttgttttgtttttttacaagtagrgcttaataattattaatcaatacccattacttattattaaagttaccagatttaccatcatgcttactaatttctctgtttactattgcttcttgtttct

SEQ ID NO: 225980 - DNA, 201 bp, Homo sapiens
gttgttttctgtattttttgccatcctggcaatacatttgtagaatgtaaacattgtacaaatctctgtgagtacatgtgtaagggcctctttgcttatayagacagagaaagaaatgctggttatccttaacaagttaatcagtagttttagtgcatatctttaatgccttaagtagtatttctctcctccttgtaaaca

SEQ ID NO: 225981 - DNA, 201 bp, Homo sapiens
cagggacaagctgagaaggggaaagattccatacaaaagcaacatggttgtggagtttgttttctcacctgggactgtatgtgtaacctgaagttgttttwgaactgcccattacctgtgaacagcaaactcgtgggcctgctgtagtttttatccaagggcaaaggaagattattaccacctaatcaaatttagaggggc

SEQ ID NO: 225982 - DNA, 201 bp, Homo sapiens
tggaaagagaccaggcaatgggcagagagagagagatgggggatgtttactcccatggaagtctttctcatcatgtttttcagggtctgtgtcccttcaargctgtagcagtgatgatagtcgtcccactccccaccccctacccctaacccacccacctttacctcaccaggctctgataacatgttctctttctttgct

SEQ ID NO: 225983 - DNA, 201 bp, Homo sapiens
cctgtctattctagaacatctttcctccagtgcagcatttcctaaaatatggccttcaggatagtaagaggaagtatttgaaatgacggtttcctagttasatatgtgagggaaacacatttccctttgccaagctctaccagccatgggatttctcaaactctctgttagtgtatgttgtaaatttcacagtggcattgc

SEQ ID NO: 225984 - DNA, 201 bp, Homo sapiens
ttctacttggtttattccctcacgatgcaaattcgcaaatgcccttaggacacaaagttgctttaactatagagctcacctcagtgggctttctttccctrcatcatctaggatgcttgaatcttgcatgccttggttgtgctctgatgcttttgaacagctttttttttttttttaatttatgcatctatcacaattact

SEQ ID NO: 225985 - DNA, 201 bp, Homo sapiens
aagttatttctggaggcaaggaaatatattctgccaattcgttcctttctggtttggaggaaactacttaatgcagatactactacccttgatcatagaargagtataaataattgagtatactgcaaccctaaggtgatcattcttgactttgtggctggagaaagttttgacatatctaaaacctatttagaagaccat

SEQ ID NO: 225986 - DNA, 201 bp, Homo sapiens
taatgcagatactactacccttgatcatagaaggagtataaataattgagtatactgcaaccctaaggtgatcattcttgactttgtggctggagaaagtyttgacatatctaaaacctatttagaagaccatctgcgtacagcatctacatgagcctaagaatgcaagtaacttggttttattaaacacttttgcatctg

SEQ ID NO: 225987 - DNA, 201 bp, Homo sapiens
aattcttatttcttgtcagtttcagagtcatgatggtcacctttgaagatgcactgtcatttcaaagcactggctaactacaaccaagactgacaaccatraataattccacagagactctgaaacactctagcatttcgcaccaactctcatatataccccaagttgttctctcttgcttagtgcactctcttctcggca

SEQ ID NO: 225988 - DNA, 201 bp, Homo sapiens
acctgcattatggttccagtttacatcagagtgtgtgtgagtgtgtgtctataaaacttggacaactgatctaattaatttgaaaaatctaaacctgggamacaatttaaatgccaaataatagaggaatatatttaatactatatattcatctatgtagccatcaaatgagtttttatgaataatattaatgatataaca

SEQ ID NO: 225989 - DNA, 201 bp, Homo sapiens
tttctgtgtcatcccctctacgttcaaaatgctcttacctgcattatggttccagtttacatcagagtgtgtgtgagtgtgtgtctataaaacttggacawctgatctaattaatttgaaaaatctaaacctgggaaacaatttaaatgccaaataatagaggaatatatttaatactatatattcatctatgtagccatc

SEQ ID NO: 225990 - DNA, 201 bp, Homo sapiens
cagagaataccaggcatttctgtgtcatcccctctacgttcaaaatgctcttacctgcattatggttccagtttacatcagagtgtgtgtgagtgtgtgtmtataaaacttggacaactgatctaattaatttgaaaaatctaaacctgggaaacaatttaaatgccaaataatagaggaatatatttaatactatatatt

SEQ ID NO: 225991 - DNA, 201 bp, Homo sapiens
cagctgcaagtctccccacttcttgggcactgcctgcctcctgtcaaaacctccccctgagaaagaacttttacctcagttattacaatagtagttcaaaktgttgtccttcctgagatgccaaggtattttttcaaaccaacaaagcctgctgagaaaagaatgggattttaaagctggaatatgaggcttagtctagag

SEQ ID NO: 225992 - DNA, 201 bp, Homo sapiens
ctgcctcccggcacccaaaaaataccacttcataatagagtaggttgtcaagaaatgactgttgagctgaacctggcacttccccagccccctgcattcaragcctggttctccgaatcctcaggtccgtggctttcctttatcagctgcaagtctccccacttcttgggcactgcctgcctcctgtcaaaacctccccct

SEQ ID NO: 225993 - DNA, 201 bp, Homo sapiens
agatacaatgaagtgctcatttgggcattaaggtacatttatctccatcatgtgtagaaacggaggcataggcagacttgaaaacttttctgaggacacasagagagtaagaaacagacctgagattcatacttaggctgtctggctccagagtctgggttcttttctctctgctgcctttatgaactaccagaggcatct

SEQ ID NO: 225994 - DNA, 201 bp, Homo sapiens
ataatgacattagcatactgatgagttagtagatacaatgaagtgctcatttgggcattaaggtacatttatctccatcatgtgtagaaacggaggcatakgcagacttgaaaacttttctgaggacacagagagagtaagaaacagacctgagattcatacttaggctgtctggctccagagtctgggttcttttctctc

SEQ ID NO: 225995 - DNA, 201 bp, Homo sapiens
gagagggtaatgcatgcatgagggtatgacatgaacaccagttcatgagaacaaagaaactgcaagtcgtgttaacctgcccagggccacaggatataggrctgcgggttgtatactagatcagccagagtgggctagatatgctgcaggaatgaagagcgccaatatttaaacaatacaagtatatttctaacatgctat

SEQ ID NO: 225996 - DNA, 201 bp, Homo sapiens
tagcctaaggaaaatattatccttcaattttatggaaaacccatgtatagggagaaaagcgattttcttagacactgggacttccagtactaaatcccaartggttttcatatccctgttcaaccttagagacatttacacacacacccacacacgacacacaacacacacactggatttccaataaatttataagtccta

SEQ ID NO: 225997 - DNA, 201 bp, Homo sapiens
atttgaatgatgccagattttctttctaatcaaggaaatcaagaaatagctggtatacctgtgtagctctaaattctctccaccttgagtcaacatagtgrtttattgcaaactgtttaatgtttaacttgctatttaaatctcagtatcttatgtttcccatatttaaaatgggggaaaaatacccaatcatactgggct

SEQ ID NO: 225998 - DNA, 201 bp, Homo sapiens
atatgtatcatgcattagatttcttctggatggttttgctctagaatgctttcaaactgcttcagcttactggcaagcagctgtttgtggagactgttatsaccttccccagatttagaataggaatttgaatgatgccagattttctttctaatcaaggaaatcaagaaatagctggtatacctgtgtagctctaaattc

SEQ ID NO: 225999 - DNA, 201 bp, Homo sapiens
acacaaagcaaaggccatagaaaatatatttgactatttttttttccttctgaataccatgtttcatgttcttctagttcataatttcttcctcagctgtwttgtttactatttaactttttggcataaaaatatattgatgagagaaagaaattaaggtctaatttatgaaaatagacttcttgtacttcaggaaattca

SEQ ID NO: 226000 - DNA, 201 bp, Homo sapiens
tgtttatcgtattgctgatagatgtttgggttgttttctgtattttttgccatcctggcaatacatttgtagaatgtaaacattgtacaaatctctgtgartacatgtgtaagggcctctttgcttatatagacagagaaagaaatgctggttatccttaacaagttaatcagtagttttagtgcatatctttaatgcctt

SEQ ID NO: 226001 - DNA, 201 bp, Homo sapiens
atattcaaaaacaacacagtatttatttttgcctttttgaatgttatacaaatagaataatatgtatagctttctgtgacttgcttcttttgttttacatyatattttgagaggtatctatgttgatgtgggtaactttcactgattttccaaagttatataatactccattctaagaatatgtaaaaaaagtgtttatcg

SEQ ID NO: 226002 - DNA, 201 bp, Homo sapiens
acatagcaagattttaaaacattcgttttgataaaattttaacagatgtacttaccctgattcctgacacagctggacttagttaaaatattttctttttyatattctattcagcgtgttttcctttgcttctttctcccttccatttcaatgttgtatagagaatcgattgcgtttactctatgttgtttcctctattga

SEQ ID NO: 226003 - DNA, 201 bp, Homo sapiens
gaacacatggacacaggaaggagaacatcacacactggggattgttgtggggcggggggtgggtgggatggcattaggagatatacctaatgctagatgaygagttaatgggtgcagcacaccaacatggcacatgtatacatatgtaacaaacttgcacgttgtgcacatgtaccctaaaacttaaagtataataataat

SEQ ID NO: 226004 - DNA, 201 bp, Homo sapiens
acaaggacaaaacaccaaacagcgcatgttctcactcataggtgggaattgaacaatgagaacacatggacacaggaaggagaacatcacacactggggaytgttgtggggcggggggtgggtgggatggcattaggagatatacctaatgctagatgatgagttaatgggtgcagcacaccaacatggcacatgtataca

SEQ ID NO: 226005 - DNA, 201 bp, Homo sapiens
cagccataaaaaatgatgagttcatgtcctttgtagggacatggatgaagctggaaaccatcattctctgcaaactatcacaaggacaaaacaccaaacascgcatgttctcactcataggtgggaattgaacaatgagaacacatggacacaggaaggagaacatcacacactggggattgttgtggggcggggggtggg

SEQ ID NO: 226006 - DNA, 201 bp, Homo sapiens
tatacaccatggaatactatgcagccataaaaaatgatgagttcatgtcctttgtagggacatggatgaagctggaaaccatcattctctgcaaactatcrcaaggacaaaacaccaaacagcgcatgttctcactcataggtgggaattgaacaatgagaacacatggacacaggaaggagaacatcacacactggggat

SEQ ID NO: 226007 - DNA, 201 bp, Homo sapiens
tttaagagttccccaagtgattctaatgtgcttcaaagtatgggaaccactgatgtaatgtactattatcccacatttagttaagttaggattgatcctarattcacatgttgtcagtgtgatgccttaaatatcaagtttccaattaagctttaaggcaaaggttttgcagctatgaatggtggttgtctagacccatta

SEQ ID NO: 226008 - DNA, 201 bp, Homo sapiens
tttgatggatttctttgagactctgaattagacagtgcctccggagatgaaagaaggctatttttcataaagttatctcccctccccctgccaacttcccmtcttctctaagtgttaatttttttcctcttgttctaggggatgggcccctggattaggttgatgacagattaatgaatggataggtccagcaagcacagg

SEQ ID NO: 226009 - DNA, 201 bp, Homo sapiens
attagacagtgcctccggagatgaaagaaggctatttttcataaagttatctcccctccccctgccaacttcccctcttctctaagtgttaatttttttcmtcttgttctaggggatgggcccctggattaggttgatgacagattaatgaatggataggtccagcaagcacaggcattgttgccatctccctccgcattt

SEQ ID NO: 226010 - DNA, 201 bp, Homo sapiens
agcataggatgtgtttccagtaatttaatgctgtggggggtgggggaaagaaaacaaaatcatgttgtacattgaaagggaaaaacgtagatggtctctasagtggaaaactgttgtcactttatcttgcagtgaagactcattcattcgacaatagttgggtgcctactatgagccagattatatgtgaggccctggaaa

SEQ ID NO: 226011 - DNA, 201 bp, Homo sapiens
aactgttgtcactttatcttgcagtgaagactcattcattcgacaatagttgggtgcctactatgagccagattatatgtgaggccctggaaatgcaatgktactcaaagatacacatagtccttgccacgtggaactaccagttcagctggggagatagacaatatcaaacagccataccaaaaactgtgaaagtgcttt

SEQ ID NO: 226012 - DNA, 201 bp, Homo sapiens
gacatttccttctgtcactcccagctctcaggcaaccgttgattttattttctgtcactagcggtgattttgcattttctaggatttttaatgaattaacycataatatgaactcccttgtgtctcgcttcctttagtgaacataatgacttggagaatagtggttgcatgtgttaatgttcctttttattgcagaatagt

SEQ ID NO: 226013 - DNA, 201 bp, Homo sapiens
ttcgcaccaactctcatatataccccaagttgttctctcttgcttagtgcactctcttctcggcagatttcaggtatagttaccgaaggtggatatcaacktcctctgaaaaataacccagcaggaaccatcgtggagtaattgggcttcatgagagcatcactgtcaagtctaaaaatacatggggagataatcacattt

SEQ ID NO: 226014 - DNA, 201 bp, Homo sapiens
taacatatgtatcatgcattagatttcttctggatggttttgctctagaatgctttcaaactgcttcagcttactggcaagcagctgtttgtggagactgwtatgaccttccccagatttagaataggaatttgaatgatgccagattttctttctaatcaaggaaatcaagaaatagctggtatacctgtgtagctctaa

SEQ ID NO: 226015 - DNA, 201 bp, Homo sapiens
tgtcttcctacctgcttctcacagttctgctctcagtctcacagtggctgctgcaatgaaacctaagtttaactacagtgcttgaataatgggctgtttcrgtgtttaaaaaaatcttaggtttacattcaaggttcttgacatagctattaataaacagtcacttaaaattgtccaaaaagttttgataagtttggagtt

SEQ ID NO: 226016 - DNA, 201 bp, Homo sapiens
ctctatcaaaccactccatgtggtcctctctcattatttcacgaatcaggctttcttgtgcagagtcctatctgccctccacagtgaattctcgctccaamcagatacattccatcagaaagctctaaggtgcttgccggtgaaggaggaaaatgcctcctccgaggtgtccttgttgctggagtccatctgtcttcctac

SEQ ID NO: 226017 - DNA, 201 bp, Homo sapiens
cctggtccagttggtacttgccagatctccccatcattctttgagcatttctttatattctggtacaaaaaagatgctccaggatcatcttatactgtccstgtccagccttggaatcagccacttctccaagcagctctggttcctgtccgtgtagaatgattttagaaatcaagatctgggtgcttagcatgcttattg

SEQ ID NO: 226018 - DNA, 201 bp, Homo sapiens
ttcctgtccgtgtagaatgattttagaaatcaagatctgggtgcttagcatgcttattgttcctgtgatgtcaatgctttgagacccagtcaacacagagmtaggaaatatgtacatataagtccacacaaacacacacttattattatttccatatctgggtatgtgtatatgtttacacataagccacatgaattcata

SEQ ID NO: 226019 - DNA, 201 bp, Homo sapiens
gtccacacaaacacacacttattattatttccatatctgggtatgtgtatatgtttacacataagccacatgaattcatatcagtatcttcaattcaaatmtaagtcttttcccccttccacatttataaataccttctctgacagaaacttggttcccattatccttaatatatatactcatttgttcaatattagcctt

SEQ ID NO: 226020 - DNA, 201 bp, Homo sapiens
gtgagaacgtgtggtgtttgcttttctgttcctgtgttagtttgctgagaatggtgagcctgagtaatactatgcagagtccggttacctgcatttcgacyttattccgagggcatttgggaaattgtttaatggccttaaatggggaaatgaaattgttggatttgttttcataaaagtatggatgtatagctatgtatt

SEQ ID NO: 226021 - DNA, 201 bp, Homo sapiens
ataacacagcatcgtggaatgaatcaggtataatccaataggtaaaaggtctgagtggggaatgaaatatctagaaagtagcattttgaaggctttgggartgaaagaaaagcgtcatcacaaagctgtcatggaatttgatgaactaactataaattttgcactagttatctttgagattaactaccagggacactcttt

SEQ ID NO: 226022 - DNA, 201 bp, Homo sapiens
tctagaaagtagcattttgaaggctttgggaatgaaagaaaagcgtcatcacaaagctgtcatggaatttgatgaactaactataaattttgcactagttrtctttgagattaactaccagggacactctttctcccctaccctccttgtatctcttgctgtgcttgtctaagggttttccttatattgaatttcaggttg

SEQ ID NO: 226023 - DNA, 201 bp, Homo sapiens
gtttctcactgcttccttctgggataaattcccgcttattcaagcatatcttattttagtatttcttttggcaaaagtaaactactgtgagcactaaacarttttttttttgaaaaatgttctgatttatctattgttctctatcattcttgaatgttaggtttagcatgggcatataatttttctttttttttttttgag

SEQ ID NO: 226024 - DNA, 201 bp, Homo sapiens
gtgcctccggagatgaaagaaggctatttttcataaagttatctcccctccccctgccaacttcccctcttctctaagtgttaatttttttcctcttgttmtaggggatgggcccctggattaggttgatgacagattaatgaatggataggtccagcaagcacaggcattgttgccatctccctccgcatttctgcatgg

SEQ ID NO: 226025 - DNA, 201 bp, Homo sapiens
gggaaatctgtcacagcattatcacatgttcccatctgctgaaagcagaaaaatgattgtgagattgtgatgaccagagggaagtgatgaccaagtgagcytatgttctgaaccaggtttctgtaaatcacattaagcaagtttctccctgttactcctatgtccatttgcaaggatgaacacttataagtcatgtttaca

SEQ ID NO: 226026 - DNA, 201 bp, Homo sapiens
cctttttattgcagaatagtattccattgtatggttattcgacattttgtgtatccattcacttggttcacataggggttgtttacaagtttggattattrtgaatgaagctgcttatgtatagatatttgtgtggacatgtattcatttctcttgattaaattgttagagtggtacttaccccaatttacctagtactct

SEQ ID NO: 226027 - DNA, 201 bp, Homo sapiens
tgcaattttgtctccccaacccttttagactgacaaaatggctccttcgtttttggtcttttagcattgatttttgcttagtttattggtctcttcatatrtttgcagtttaggaatttgcaaatatctcaaggggaaattacgttaggagtattgggatcacttttctttggttcaccgttctcacaaatcttagtccct

SEQ ID NO: 226028 - DNA, 201 bp, Homo sapiens
ctgagacatcaaagaaatgtcctcacctcctccatttcctagtgcctcctagggatactggttgagaatcagcactttgtctctttctaattattatagcyccaagagaacttaaggataaacataattcatgagctacatttcatatcctcccgtggcatggttgcatgtatgttataaaaagaaataggacttccttgc

SEQ ID NO: 226029 - DNA, 201 bp, Homo sapiens
tgctccacagtggaatcacctaaaacatctcaaattaaaattactgatactcttaccccagacattgtgatttgattgatctggtacacgacctgaacatyaagatttttaagagttccccaagtgattctaatgtgcttcaaagtatgggaaccactgatgtaatgtactattatcccacatttagttaagttaggattg

SEQ ID NO: 226030 - DNA, 201 bp, Homo sapiens
tagagtttaaacacggtttctttatctggtgcccgcatggggagatgaaggtaaagaggccaatttatccagcaaatgtgcccaagcaagtcgggaataaytacctcccttgacatctgacaaaactttgctgcatccccacaaaaattctataggcagtccttccaagtcattttcagagaccccaccatggcaggtgag

SEQ ID NO: 226031 - DNA, 201 bp, Homo sapiens
gcacaaatgtgaaggtcaaagataatgggtccccatctgacactgggctgatttgccaagcacccaggatgcatttttatttctttttcatggtaaaagcmagagagaacactgtagagtttaaacacggtttctttatctggtgcccgcatggggagatgaaggtaaagaggccaatttatccagcaaatgtgcccaagc

SEQ ID NO: 226032 - DNA, 201 bp, Homo sapiens
atggcggtgcatgcctgtagttacagctacttaggaggctgaagtaggagaataacttgagcccaggagtttgaggcttcagtgagctataactgcacgayggcactggcaacaggagtgacacctagtctcttaaaatacacacatacacacactatacacacacacacacatatatatatacacacatatatctacacg

SEQ ID NO: 226033 - DNA, 201 bp, Homo sapiens
caacaggagtgacacctagtctcttaaaatacacacatacacacactatacacacacacacacatatatatatacacacatatatctacacgtatatacayatacgtatgtgcgtatatatatatacacatatgtccatatatacacacacatatatatgtgtgtgtgtccatatatatatacacacacacacatatatac

SEQ ID NO: 226034 - DNA, 201 bp, Homo sapiens
ttacctactctctaaataaggttacaaatactagacaaaggaggtacacctgtgaattacaacataaagagcttctgaattgaagagttacttcgttgacrtttgtcatctatttgtcaagataaatttaaaaaaaaatttgtgacaaaaactggaagaataacctattgctgttttggaagtaatttgttctatttgtag

SEQ ID NO: 226035 - DNA, 201 bp, Homo sapiens
gtaatctcagctacttgggaggctgaggcaggagaatcgcttgaacccaggaggcggaggttgcattgagccaagatcacaccactgtactccagcttggygatagagcgaggctccatctcaaaaaaaaaaaaaaaaaaaaaagatattttcatattcaagtaataatatattttggaaatctaattttctcagttttgt

SEQ ID NO: 226036 - DNA, 201 bp, Homo sapiens
ctgcatttcccatcattgttggattttattgacttctcttagaaagccagcctgatatataaaattctattatcttgggacctttgcctgtgatgctgttrtgcttttagggaagacagtggttggttccatgaaaatggacctgtctggaatacactggaatttcataatctatccagaaaaagataaagcccagatgat

SEQ ID NO: 226037 - DNA, 201 bp, Homo sapiens
aagggaaaagtattactggattatttttgtcaatgtgcaaaatctcttgaaaggacaattttctcttgttgactagcagaaacacagcagtgttaattaakttgccttgttaaatctgaaagaatgtacatagttaacgttggaaacccttctaattgcctttgtggaaaggcatcaaagggatctacaagcatcttgttt

SEQ ID NO: 226038 - DNA, 201 bp, Homo sapiens
atctcagtattaaacactgagatttaagattggtgacacccatggcagaagatgtgtgcacagtttggttgagtgacgatgtgatgctgcacatcttgagytgacttgtgtcacttgatttaagaaaggaaggagaaaactttttttgtaaatgagagctgaagtggaacagacttctggatttgactttctcatgaatgg

SEQ ID NO: 226039 - DNA, 201 bp, Homo sapiens
accttccaacaactaaccccttccaaaatacattctgggaaatgtacctagctgtgcatccaaatatacacttgctgtctgctttctgtgatattaacatsaaatggctaggagacagcaatcttggggatgtgagagaatatgcaattagcacttggggacttttgttcaattcccatcttatctagggtcatgacagag

SEQ ID NO: 226040 - DNA, 201 bp, Homo sapiens
acatttccaaaaggctggggataccttctgaagttctctgctgcttatggtcattgttatggtgatttaacttctgatttctctgacacgggcctttttgmccctctttttgtttgggatttgtctgccgtttattgaagactcatttgactttttgtatactgtaccctgtttatccctcactataactctataaggaag

SEQ ID NO: 226041 - DNA, 201 bp, Homo sapiens
ctataaatacctgagactggataatttataaagaaaagaggtttaattggctcatggttctgcaggctttacaggaagcacggtgctggctcggcttctasggaggcctcaggaagcttacaattatggcagaaggggaaggggaagtaggcacataatgtgacgaagacaggagcaagaggcagagagagtggggaagcg

SEQ ID NO: 226042 - DNA, 201 bp, Homo sapiens
actgatcagcccagaagtttgtgtttcttaagctttagtgaattaaataagtttattaatttattttaaaaattcattatttatttattgaaaaaaaaaamgattggatctatcaaaatgctttccttttttctcagtaaataaatgggccaagacctcaagagtagatctgccaaaggatggccacaatggccaatgggt

SEQ ID NO: 226043 - DNA, 201 bp, Homo sapiens
tccacagtggaatcacctaaaacatctcaaattaaaattactgatactcttaccccagacattgtgatttgattgatctggtacacgacctgaacattaasatttttaagagttccccaagtgattctaatgtgcttcaaagtatgggaaccactgatgtaatgtactattatcccacatttagttaagttaggattgatc

SEQ ID NO: 226044 - DNA, 201 bp, Homo sapiens
ctcaaattaaaattactgatactcttaccccagacattgtgatttgattgatctggtacacgacctgaacattaagatttttaagagttccccaagtgatyctaatgtgcttcaaagtatgggaaccactgatgtaatgtactattatcccacatttagttaagttaggattgatcctagattcacatgttgtcagtgtga

SEQ ID NO: 226045 - DNA, 201 bp, Homo sapiens
taccaaaatcaaaatgactgcttcaaagtggtgctatcaaagtggccataatgaaatgtctcctacccaagtgtcctatgcattttgctgagtcttttttwttctctaagcacctttcccttgagaactagttttaatgaaggggattcttttgcagtgactcagagggttgaaactggagcttctcttctctctctatcc

SEQ ID NO: 226046 - DNA, 201 bp, Homo sapiens
aggtaatttttccttaaaacttcataggcacacacacacgtcacttggagctggggagtgattcagcggggacacaaactgggtagagcaatggtaaggaytgatgtggggttgccgacctggataggagcaccacgaatttagagaagaaaaggagcttgttttctgcacctctttttatttttattttttgatacccaa

SEQ ID NO: 226047 - DNA, 201 bp, Homo sapiens
cctccagctcccctcagccctttagttaatcttggaacagtgctcatgcaaattaagtgctttaattactctttgatttgaattgaattttatcgaagaarccagctatctgtggatatggagttttcagcgttggttcatatcttaacagcaacaccttgagagcagagtagtaccactttcaagtgcatatacctattt

SEQ ID NO: 226048 - DNA, 201 bp, Homo sapiens
tataaagcaattaatacagtgtctggcatacagtgcttagttatgtgctcaatacattgtagccattacttgaaataaaagaatgataaggtgattagatktgttttgaaaagttaagcagttttccgtgttgctacagagattcacaaagatcaagcaaaattataggtaatttttccttaaaacttcataggcacacac

SEQ ID NO: 226049 - DNA, 201 bp, Homo sapiens
aggagatacacagcgcagaggctttacagtgacaccattaaaattcagtgggctcaagttctagctaccacttattttctagctgtataaccttggaaaartgatgtaaccactccacatctccaggtttactcacctgtaaaacagggatagcggcagtatacaagtcagagttgtgggaataaatgagatccatataaa

SEQ ID NO: 226050 - DNA, 201 bp, Homo sapiens
atattaaagagtatatttacaatgggactgtttacaaagttgtgggctgggtgcagggaaaccacagatgatgttatagtgactgcatgagttactgggaygagtaacggcagagctgtgaccaccccttgacctagggacaaggggaggtagcagttgtgggaacctcaaaggacagaagtgtggagaagagcctgcctt

SEQ ID NO: 226051 - DNA, 201 bp, Homo sapiens
tctaagttgtaggtgcttacagagtatgatagaaaaagcccattattttgcccatggcaaggagggggtcaaaggaggtttgaataaaataactgccttcrtaagttataaaggaggagttagaattttccagcagaaaaagtggtgaagagcatttcacttgaaagcagcatggagtacacagacacagaggtgtagaaa

SEQ ID NO: 226052 - DNA, 201 bp, Homo sapiens
aaaagaaagttgttttaatgagtcattaggctatttaggtaagtatgactcagttactattttaatgtaaatatgtgtggtgttaagatctattttaaaamgtgaattgtgatagaatttaaaactcagtgagtatataatgaactactgaaaaacaactttcctttttcaaaggtttaagcatgtattttttcagtaaat

SEQ ID NO: 226053 - DNA, 201 bp, Homo sapiens
cattttgctgagtctttttttttctctaagcacctttcccttgagaactagttttaatgaaggggattcttttgcagtgactcagagggttgaaactggascttctcttctctctctatccctggtgctgccaggattcccagacagcagctgtttcccaaggagatccacctgtcttggaaatggaaggaagccccacca

SEQ ID NO: 226054 - DNA, 201 bp, Homo sapiens
ctactaaatgaaaaattctagaaataaacaattcataagttttcattgtacaacgttctgagcagtgtgacaaaattgcacgccgtcccactctgtcctgsccaggatgcggatcctccctttgtccagtgtagccatgttgtctacactacccgcctgttagtcactgagtagccatctctgttaccaggttgactgtca

SEQ ID NO: 226055 - DNA, 201 bp, Homo sapiens
atagagtggatcagaagagcactagacatacagcaaatttgtttggatgagacatacagtttgctgcatgtctggatccactagtggatccagtgtttgtrtgtctcatccaaacaaataccactctgagttatccatgttacattggttgagtgatttaagttccttgttttatgtggaaaatggggatgatgagctagc

SEQ ID NO: 226056 - DNA, 201 bp, Homo sapiens
ttcactatttaactgctaatgatttgattaaattttatataggcaggaaagatacagaccttcatatctatagacttatgcattgatatatttttatgtgygtatatctgtctatctgttatagactgaatgtttgtgtccttcaaaattcatatgttgaaatataatctccattgtgatggtgtttgaaggtgggacctt

SEQ ID NO: 226057 - DNA, 201 bp, Homo sapiens
tttctcgaggactcattttctgaaaacaaaaataaatcatgcaaagcaatacccattactgacaaatatgtacttgccatattattatagtcaggcatatrttttattttgaacaccagttgtttggtcattcaatgaaggcaaaatgatttctaaatactaagtatgcttcaaagaggcattagcatctatgaatgttac

SEQ ID NO: 226058 - DNA, 201 bp, Homo sapiens
aggtactttgaggagtgttagctatttggtcccagggccttggctcctgattgagaaatagaccctgggataattgaagccattcatttgggtttgaatgkccaggcagcattattacctgacttaattgaaaggaactaatgataaaacattaaaaacactgatcctctgagaattaaaatcaaagggccagcccattat

SEQ ID NO: 226059 - DNA, 201 bp, Homo sapiens
gagggtttagtttgagattttcccacttcctcgtttttgagtaagagttttcttagactttccaacatctttagaaaggagcaaaattagcaaaaactccygtttaataaaaacagtgcattctctagaaaattcactaaaatgtaataatctttgaattcttttcagaaaataatctagaggtactttgaggagtgttag

SEQ ID NO: 226060 - DNA, 201 bp, Homo sapiens
aacttcctagagtggtagaaatattcgataacttgattagagctttgtatgtgtgtatacatttgttaaaattcatccactgtaaaacctctataggtcayaccatgtaacttttgctttgttgtttttaaaaattggatattttttaaaaacaagcagttaatgaattaaaatagctaattatgactttgcataataaat

SEQ ID NO: 226061 - DNA, 201 bp, Homo sapiens
cctcagtttctttttttttttttttttaaaaagatatgttttatgattttacagttccatttcctggtatttacccctacaaaaggaaagtatgtatccayagaagttttgctacacaaatgttcatagtcactttacttgtaaagattctaaactggaaataatccgatagtccatcaaaagcatagataaaatgttgga

SEQ ID NO: 226062 - DNA, 201 bp, Homo sapiens
tcacacaatgctgagagatattggagtcctgtcgcagccagtgtagaaggtcttgcttaacagcctagaagctcagttggggctatagaaggagacatacyttaggagaatcacaatctaaaatgaagaataaaaccaaataggcccactctaacagagtataaaagcaagcgtgaaaggatcaagagaatctgccaataa

SEQ ID NO: 226063 - DNA, 201 bp, Homo sapiens
aaggtcacacaatgctgagagatattggagtcctgtcgcagccagtgtagaaggtcttgcttaacagcctagaagctcagttggggctatagaaggagacmtaccttaggagaatcacaatctaaaatgaagaataaaaccaaataggcccactctaacagagtataaaagcaagcgtgaaaggatcaagagaatctgcca

SEQ ID NO: 226064 - DNA, 201 bp, Homo sapiens
gaggtacagatttttgcgggaacaagagaaggaattctgttgtggggtttttgaattcaaggtggatatctagatgaatatttaaactcttgaggaggcgygaccttgaaatgttgacacgggcatctttagtgaattgacactagtgaaagccctgggaggagataattttattgggcgagaggttctggagtatgaata

SEQ ID NO: 226065 - DNA, 201 bp, Homo sapiens
aaaggcctacttgatgagtcatccaatggcagaaggataaaagacatgcacacatgagtgagggaaaaaggcctaactcattcgttttatcaggaatccaytctggtgataactaacccacttctctgataacataattaattcattcatgaggccagagccctcgtgacctaattgccccttgaaggacccacctctgtt

SEQ ID NO: 226066 - DNA, 201 bp, Homo sapiens
ccctactaccaccaagatgagtctgctttctccactgagctagggagacggcttatacactcaacctgatcatgtccatttcctgctttaaaaacctttcwtggcttcccattgtttttaacagaaagttctgatgtcctaagatggcctctgagctcctatgatggtggctctgcttattctctgcctagtctcacacta

SEQ ID NO: 226067 - DNA, 201 bp, Homo sapiens
ttgccagtagtgactggacattttggggacaattgctggtctccctactaccaccaagatgagtctgctttctccactgagctagggagacggcttatacwctcaacctgatcatgtccatttcctgctttaaaaacctttcatggcttcccattgtttttaacagaaagttctgatgtcctaagatggcctctgagctcc

SEQ ID NO: 226068 - DNA, 201 bp, Homo sapiens
aaaccaggaaaggacagcttctttgtgtcaactttttcatacatcctgagctaaattgtgagtttgttttgcattgaaatttttcttttgcagagaagtgwcatcattttcacaaccacaacagattttagagcaaaatagaagactcttttgctgaaggcagctgtgttttgagaatgtgtgtgtgtatgtatgtttgtg

SEQ ID NO: 226069 - DNA, 201 bp, Homo sapiens
tgaggcgggcggatcacgaggtcaggagatcgaggtcatcctgtgaatggtgaaaccccgtctctactaaaaatacaaaaaattagccgggcatagtggcrggcgtctgtagtcccagctactcgggaggctgaggcgggaaaatggcgtgaacccaggaggtggagctcgcagtgagccgtgatcgcgccactgcactcc

SEQ ID NO: 226070 - DNA, 201 bp, Homo sapiens
tcactcttcataatcagcctgtttgtgtggaaactatgggcgtttttaagaatagtctcgggaggctgaggcgggcggatcacgaggtcaggagatcgagrtcatcctgtgaatggtgaaaccccgtctctactaaaaatacaaaaaattagccgggcatagtggcaggcgtctgtagtcccagctactcgggaggctgag

SEQ ID NO: 226071 - DNA, 201 bp, Homo sapiens
gagtgcctcctgaaaaaccaggaacatacctgaagaaaatttaggcaaacgttacaattgttggcttttctgtcactcttcataatcagcctgtttgtgtrgaaactatgggcgtttttaagaatagtctcgggaggctgaggcgggcggatcacgaggtcaggagatcgaggtcatcctgtgaatggtgaaaccccgtct

SEQ ID NO: 226072 - DNA, 201 bp, Homo sapiens
ggatgtgtaccacctacttgattgtagtgcttgcaacgggctatattctcctccttgttagtgctttattttttttgaatccacgtttgatcttttttcamcttactttatgataatgaaatgaacctcctaggcttggcctttgggcccaggtacatgtaggagtaatcactgtgaactctgcatccctggcatggccag

SEQ ID NO: 226073 - DNA, 201 bp, Homo sapiens
ccaaagacaaaagtcagagtctacaaaaccagttttagacagggcacatgagcaattcttcaaggactggggatgtgtaccacctacttgattgtagtgcktgcaacgggctatattctcctccttgttagtgctttattttttttgaatccacgtttgatcttttttcaccttactttatgataatgaaatgaacctcct

SEQ ID NO: 226074 - DNA, 201 bp, Homo sapiens
aaacccaattaacctttagcggttctcctcatagtagtaatgtgctctcattttcactggtctgggataaaattgattcttcatcattgtgcaaccaaagrcaaaagtcagagtctacaaaaccagttttagacagggcacatgagcaattcttcaaggactggggatgtgtaccacctacttgattgtagtgcttgcaac

SEQ ID NO: 226075 - DNA, 201 bp, Homo sapiens
atgaaatctatttcatatggcctcagggtgccttgcattaatgcagaaattgatattatgataaaatcttgaacaattagggctaagtatctaaaacccarttaacctttagcggttctcctcatagtagtaatgtgctctcattttcactggtctgggataaaattgattcttcatcattgtgcaaccaaagacaaaagt

SEQ ID NO: 226076 - DNA, 201 bp, Homo sapiens
agccccaccaatctcttccatcctgtgttgtacctgctatttctgaggctcgattctttctggaataaccaggcaggtcggccctcctttgccgcaatccytttttaggctgtggtttcctttgctgtgtggttcagaagccaacagacttttattcaaatcatttatcttctaatggcttcttcccattctctttgtggt

SEQ ID NO: 226077 - DNA, 201 bp, Homo sapiens
gctatagctgtgtcttgaatggaattagagctgaagtgataaacagtggactgactaccagaccctcggctttagtcctggctagctcacttgatgactartctgggctttctcttgtgaaaaatgaggatgctgaatggggtgatctctaaggtcctcttaggcctcttactccaacattgcaaattccttactatggaa

SEQ ID NO: 226078 - DNA, 201 bp, Homo sapiens
tgggggaggtttggttaatttgacctatttcatctaggaagttggattctgattgtgggaattatctgggaagaatgcttctctttttggatggaaggatrtatttaaatttagaatgaaatctatttcatatggcctcagggtgccttgcattaatgcagaaattgatattatgataaaatcttgaacaattagggctaa

SEQ ID NO: 226079 - DNA, 201 bp, Homo sapiens
ctccctcaatttcatttattttgtaaattaagagtttcctataccaggtgttctgaaaactaggtatctccttttttcaaaaatggatctctaaaacttamcagatggtttattgtgacaataaataggagtatctattaagatgttgtctgattatacaaaactgtgccctaatggcttaacaatacttaaggtaatttt

SEQ ID NO: 226080 - DNA, 201 bp, Homo sapiens
ttcttttgcaacgcacatcagtctccctcaatttcatttattttgtaaattaagagtttcctataccaggtgttctgaaaactaggtatctccttttttcmaaaatggatctctaaaacttaacagatggtttattgtgacaataaataggagtatctattaagatgttgtctgattatacaaaactgtgccctaatggct

SEQ ID NO: 226081 - DNA, 201 bp, Homo sapiens
ttaggattgctgtgaggcttaagtgagataataaatgtaaagtttctagaatagtgaatggatcacataacctcctgtctaaattttagctattattattratgctgttgtttttgaataccttaaaggttatatgttaaacaaaattgtaaattgaaacacagaagccctagagatactactggtcaaagaatatttagg

SEQ ID NO: 226082 - DNA, 201 bp, Homo sapiens
catggcaagaggcagtgagagtgacaagggacaagcttctttaaacagccagcctcttgtgtgaactaacagtgagaacccactcattaccatggggaggkctccaagctattcattacagatctacccccatgacctaaaacctcctaccaggccccacctccaactttggggatcacattttaatatgaaatttgaaag

SEQ ID NO: 226083 - DNA, 201 bp, Homo sapiens
tactgtgagtctcagtatcctcgctgtaaaatgaaaataacgacactgactgtgttagaccaattatgttgctataaaggaatatctgaaactaggtaatwtataatgaaaagaggtttgtttggttcatggttctgcagggtgtacaagcatggcaccaacatctgttcagcttctgcagaggccagaggaaacttagta

SEQ ID NO: 226084 - DNA, 201 bp, Homo sapiens
aaaggattatttgctctcagaagcacagtatagactgagttttctggcccccagaacataaagataagttctacaattaattttggtgcatttgtttcccytctttgagaagatgtacccagttggcggaattttgtgtgaaaacagaagccattatgggacaggtgctggtgctttgtgcagtgagagccttgttgttag

SEQ ID NO: 226085 - DNA, 201 bp, Homo sapiens
gcctttgtttctaaggtagaaagtggatgtcattttcagcaatgcaaaaatgacctccacaccctcacataaagcatttgggtttggcaccttgatttctycaatgaggtgttcgcagcagcagccacaggaacagctggagtattgagggaacctcacaagacagatgactacatggggagactgtattagtaaaaattg

SEQ ID NO: 226086 - DNA, 201 bp, Homo sapiens
aggattatttgctctcagaagcacagtatagactgagttttctggcccccagaacataaagataagttctacaattaattttggtgcatttgtttcccctytttgagaagatgtacccagttggcggaattttgtgtgaaaacagaagccattatgggacaggtgctggtgctttgtgcagtgagagccttgttgttaggc

SEQ ID NO: 226087 - DNA, 201 bp, Homo sapiens
tgtttctaaggtagaaagtggatgtcattttcagcaatgcaaaaatgacctccacaccctcacataaagcatttgggtttggcaccttgatttcttcaatraggtgttcgcagcagcagccacaggaacagctggagtattgagggaacctcacaagacagatgactacatggggagactgtattagtaaaaattgtgtgt

SEQ ID NO: 226088 - DNA, 201 bp, Homo sapiens
ggaccacctctctcaactaagaattatctgacccaaaacctcaatagagactgaggttgagaaaccctgtcagaaagatggaaatgtcagaaagtgcctgstgatggcagagagagagggctgtggtagggcaagtgcttctattgggacactattatttgcttgttttgtttcgttttgttttttgtgagatcaagtctc

SEQ ID NO: 226089 - DNA, 201 bp, Homo sapiens
actttttcctgggggaaaaaaaaatgccagaaagataaatactttgtaaatcactgcatgcctcctgcctgcaagcttggagtctgtttgtgagacatttrtctccttgtgtactcaccccccaaaattatcatttaattaataaaactaatagcctgaggtatgctgatcaataagaaatagaatggacgaaactgaatc

SEQ ID NO: 226090 - DNA, 201 bp, Homo sapiens
agccatttttggatgatccgtagataacctctttccctccatcactgtttttcataacgtttctttgtgaaaccaaggtgatactcaaaagcctttgcaakgaggctagctctatccagcagccttcccattttgtaatcccatctcactaagaatcagccgtttggtgtgtaacctccctacctgggtgccccaggagaa

SEQ ID NO: 226091 - DNA, 201 bp, Homo sapiens
accagggcctttcccaggctccctatttctgcagagattaaaaacattcaaaggctgctgaactgcatccgcatgttagtgttgctaagacaagccttgtrggccagacatcccatggacagagcataaacagaagaaaagcagttctagggcaaggtttgcaaaggacagcagtagtactgttgataggatcacaagcaa

SEQ ID NO: 226092 - DNA, 201 bp, Homo sapiens
aagttgcagaagtagatcagacacaaataaaaaacaaaattagtgaataaatgctgttagcaattgattggaaaaaattgtatcaaccacttagtgatcakgatttttagctagaaaacacattcattgtattctgatttcaccttgaaatgtaagtaagtctttactggatagctttaaatatatgtgcacttggccttt

SEQ ID NO: 226093 - DNA, 201 bp, Homo sapiens
tattatttagtaccatgcaatcgttgccatgtggggataagagttcatggttgccagaggcctcattttttccatgaggtaatggaaatccagatatttakatgtaagatcttgaatttttaaagttgacaatttatttaaataaaaaaaacgtaggaagaaataaaatatgatggagagcagccaccagttttgacttct

SEQ ID NO: 226094 - DNA, 201 bp, Homo sapiens
tccatgtggctgtcttagtgaacacaggccttgaagctgatgatggcattttgtagacaggctacagtgacctacagttcatagaacagtagctggattayctacaagataacaacattctcacttgtgggtaaaatgtgtcattgtttctgggaactgaactttgaaaaataaataaaaatccctaccttgattcccaaa

SEQ ID NO: 226095 - DNA, 201 bp, Homo sapiens
atgtaatttataaatatgaataaaataatcactactcttgattgtaaatcctggatagccagtagattctcacacactgctttggttgatttttgccaaaytcttatatccatagccagtctatgtttgcaactgatgaataatcatctttctgtcatacatattgtatgatagtttataatactggaagaatgggttctc

SEQ ID NO: 226096 - DNA, 201 bp, Homo sapiens
atggcggttgctgggcagagaactgactgtggagatacaggagtggagttaggaggtgattgccgtcattcagatgagagacagtgctggtggtagaaatmaagaaaaacgtatacggttaacatatatatcacaaatgaaatttaggacctgatggcagatgttgggagagggggagaggaggtgctgtgaatgactctt

SEQ ID NO: 226097 - DNA, 201 bp, Homo sapiens
gatctcactgaatctttacaactacgctgtacgatagctactgttgtttttcctatattacagttgtgaagactgagactcagtaatgggaacctagccayacagttgtaagtggatcagctcagctttcaaaagtgaagctggcttctccagggtctgaatgattcacagaaaactagcaaacagtactgctgattttgt

SEQ ID NO: 226098 - DNA, 201 bp, Homo sapiens
gagtatctttctttaggggaaaggatatatattcattcatagtctgtttttctgctgtgtatgtgtgcttattcattcattcattcattcattcattcattcaatacatatttgtgaagagattgttgtatggctggcatagtgctaggtcttcagatagacttccatatctatttagcaaatgtatctataagtgccatt

SEQ ID NO: 226099 - DNA, 201 bp, Homo sapiens
agagtatctttctttaggggaaaggatatatattcattcatagtctgtttttctgctgtgtatgtgtgcttattcattcattcattcattcattcattcattcaatacatatttgtgaagagattgttgtatggctggcatagtgctaggtcttcagatagacttccatatctatttagcaaatgtatctataagtgccat

SEQ ID NO: 226100 - DNA, 201 bp, Homo sapiens
ttttgactgcccatttgttttagagtatctttctttaggggaaaggatatatattcattcatagtctgtttttctgctgtgtatgtgtgcttattcattcattcattcattcattcattcattcaatacatatttgtgaagagattgttgtatggctggcatagtgctaggtcttcagatagacttccatatctatttagc

SEQ ID NO: 226101 - DNA, 201 bp, Homo sapiens
gttttgactgcccatttgttttagagtatctttctttaggggaaaggatatatattcattcatagtctgtttttctgctgtgtatgtgtgcttattcattcattcattcattcattcattcattcaatacatatttgtgaagagattgttgtatggctggcatagtgctaggtcttcagatagacttccatatctatttag

SEQ ID NO: 226102 - DNA, 201 bp, Homo sapiens
agttttgactgcccatttgttttagagtatctttctttaggggaaaggatatatattcattcatagtctgtttttctgctgtgtatgtgtgcttattcattcattcattcattcattcattcattcaatacatatttgtgaagagattgttgtatggctggcatagtgctaggtcttcagatagacttccatatctattta

SEQ ID NO: 226103 - DNA, 201 bp, Homo sapiens
tagttttgactgcccatttgttttagagtatctttctttaggggaaaggatatatattcattcatagtctgtttttctgctgtgtatgtgtgcttattcattcattcattcattcattcattcattcaatacatatttgtgaagagattgttgtatggctggcatagtgctaggtcttcagatagacttccatatctattt

SEQ ID NO: 226104 - DNA, 201 bp, Homo sapiens
catcagatctcattagacttattcactatcatgagaacagcatgggaaagaactgcccccatgggtcaattacctctcaccgggtccatctcataacataygggaattatgggagctacaattcaagatgagatttgggtggggacattttattatcactggaaagtcagcttcggggagccccaggcttaagtctgggca

SEQ ID NO: 226105 - DNA, 201 bp, Homo sapiens
aaccatcagatctcattagacttattcactatcatgagaacagcatgggaaagaactgcccccatgggtcaattacctctcaccgggtccatctcataacrtacgggaattatgggagctacaattcaagatgagatttgggtggggacattttattatcactggaaagtcagcttcggggagccccaggcttaagtctgg

SEQ ID NO: 226106 - DNA, 201 bp, Homo sapiens
ggacatgaagttagagaagtggcatgggagaggtaataccatagaagtagaggaacaagagaaaatttccatccaacaaaggttggagaaaacttccaacytttgttccagtgaacaaaggtttaacatttgtatgggtgcatcagttaactgtttcataaaactcatgtgtaccaaactgtccccagtacttggtggatt

SEQ ID NO: 226107 - DNA, 201 bp, Homo sapiens
caggacatgaagttagagaagtggcatgggagaggtaataccatagaagtagaggaacaagagaaaatttccatccaacaaaggttggagaaaacttccamcctttgttccagtgaacaaaggtttaacatttgtatgggtgcatcagttaactgtttcataaaactcatgtgtaccaaactgtccccagtacttggtgga

SEQ ID NO: 226108 - DNA, 201 bp, Homo sapiens
acactgaaagttaaaagctgtcatttaaagtgattgtttggttccagtgatactgagaacagaacagagttgatggaggaaaaaaaaaagacaaactcagrcactgcttttggaaagcatagctcaattatcaggttgtcatttagattcttcaggacattaattggaataaaaccataaaaacctaaagcatattctcat

SEQ ID NO: 226109 - DNA, 201 bp, Homo sapiens
agcccctatctggaacattttgctcctatggtagagggcaggaggttagaaggccaacccagaccacacacatacgtttaaagcttcctttgggagggccrtgtgttatatccacttgtgatccattggccaaagcacatcacatgaccatcttgaaatcagtaaagcaaagtagtatactcctcccacgatgtaggagaa

SEQ ID NO: 226110 - DNA, 201 bp, Homo sapiens
tgttccgttcatttttctacagcctccaactgatcagcccagaagtttgtgtttcttaagctttagtgaattaaataagtttattaatttattttaaaaaytcattatttatttattgaaaaaaaaaacgattggatctatcaaaatgctttccttttttctcagtaaataaatgggccaagacctcaagagtagatctgc

SEQ ID NO: 226111 - DNA, 201 bp, Homo sapiens
attcaagcttattaacattagaagaatgatgataatatagaagttgtcagaatttggaaagaggttttgtccgttggatgaaagaatgccattgcaatacyaatggatgccaatgggatagcagaaatctaagagtttgtcaacatcttggccaagataatcagcaggggatttgggcagctttctgggatttaccacatg

SEQ ID NO: 226112 - DNA, 201 bp, Homo sapiens
gataagaacttttgatgctttgctcttcaaaggagtttaaaacataataagggagagaatacaggacatgaagttagagaagtggcatgggagaggtaatmccatagaagtagaggaacaagagaaaatttccatccaacaaaggttggagaaaacttccaacctttgttccagtgaacaaaggtttaacatttgtatggg

SEQ ID NO: 226113 - DNA, 201 bp, Homo sapiens
agctgaggaaagtgttgggggagtaaacaccaagagaagaaactattgtaatttctgccaacaagaacatcatgcttttaaagtgcatgttgttttttttycccctttggaacagttagcaggagtagcaaaaacagtaacaacgtgacctcagtgataatgtgtctctagtccatgaagctgagccaggtgttgtattaa

SEQ ID NO: 226114 - DNA, 201 bp, Homo sapiens
taagttggctatttaaagagaaatacgcttttctgagtttctggcatatccaacttaatattacagtactggacctcattctgaatacttagaatatttaygacacttgatgtttggactttataaaaggtcacttgaaaatgaagtcactttcattttaaagtagaagaaagtggatgtggaaaagggaagagcttttaa

SEQ ID NO: 226115 - DNA, 201 bp, Homo sapiens
agctcttagtttggccatattaccccacagtatggcttgtataaaacactttcactttcttgcacgaggaacataatgggaatccaggaagacaatatgartaattttataagttggctatttaaagagaaatacgcttttctgagtttctggcatatccaacttaatattacagtactggacctcattctgaatacttag

SEQ ID NO: 226116 - DNA, 201 bp, Homo sapiens
cctctgatctcatttgtttaaaaaaagcagcagcagcagaagcagaagtagagaataagagaagaatccttctgaaagctcttagtttggccatattaccccacagtatggcttgtataaaacactttcactttcttgcacgaggaacataatgggaatccaggaagacaatatgaataattttataagttggctatttaa

SEQ ID NO: 226117 - DNA, 201 bp, Homo sapiens
gcctctgatctcatttgtttaaaaaaagcagcagcagcagaagcagaagtagagaataagagaagaatccttctgaaagctcttagtttggccatattaccccacagtatggcttgtataaaacactttcactttcttgcacgaggaacataatgggaatccaggaagacaatatgaataattttataagttggctattta

SEQ ID NO: 226118 - DNA, 201 bp, Homo sapiens
tgcctctgatctcatttgtttaaaaaaagcagcagcagcagaagcagaagtagagaataagagaagaatccttctgaaagctcttagtttggccatattaccccacagtatggcttgtataaaacactttcactttcttgcacgaggaacataatgggaatccaggaagacaatatgaataattttataagttggctattt

SEQ ID NO: 226119 - DNA, 201 bp, Homo sapiens
atgcctctgatctcatttgtttaaaaaaagcagcagcagcagaagcagaagtagagaataagagaagaatccttctgaaagctcttagtttggccatattaccccacagtatggcttgtataaaacactttcactttcttgcacgaggaacataatgggaatccaggaagacaatatgaataattttataagttggctatt

SEQ ID NO: 226120 - DNA, 201 bp, Homo sapiens
tatgcctctgatctcatttgtttaaaaaaagcagcagcagcagaagcagaagtagagaataagagaagaatccttctgaaagctcttagtttggccatattaccccacagtatggcttgtataaaacactttcactttcttgcacgaggaacataatgggaatccaggaagacaatatgaataattttataagttggctat

SEQ ID NO: 226121 - DNA, 201 bp, Homo sapiens
aaaatatatttctgtctactaagttttatctatcttatttaatcagttatttcttataaatagattattagcacataaatacagtccaactctcctttgcycagaatagaagcttaactttttgccttaaattgttttcagttattgttttccttggatgggtaaaatgaatgttccttttacctttcagtcgtgtttcac

SEQ ID NO: 226122 - DNA, 201 bp, Homo sapiens
aatgatgataatatagaagttgtcagaatttggaaagaggttttgtccgttggatgaaagaatgccattgcaataccaatggatgccaatgggatagcagraatctaagagtttgtcaacatcttggccaagataatcagcaggggatttgggcagctttctgggatttaccacatgaaaaatagcaatcaaaaacagagc

SEQ ID NO: 226123 - DNA, 201 bp, Homo sapiens
agaagttgtcagaatttggaaagaggttttgtccgttggatgaaagaatgccattgcaataccaatggatgccaatgggatagcagaaatctaagagtttrtcaacatcttggccaagataatcagcaggggatttgggcagctttctgggatttaccacatgaaaaatagcaatcaaaaacagagcccaaataatatgta

SEQ ID NO: 226124 - DNA, 201 bp, Homo sapiens
agaatgccattgcaataccaatggatgccaatgggatagcagaaatctaagagtttgtcaacatcttggccaagataatcagcaggggatttgggcagctytctgggatttaccacatgaaaaatagcaatcaaaaacagagcccaaataatatgtattcccaattcatagtctgattatcataaaatatgctggaagaaa

SEQ ID NO: 226125 - DNA, 201 bp, Homo sapiens
gactgtcttaggaggaatgtgtgatgaacttcccatcactggacatattcaagcatatgctaggcagccatttggcaggaattctgtaggaaaaggcccarggattgggaggatagttgggtttggtcagtggttctgaaacacctggacagctatggaagccttgattgctgggcccttgtcccagagtttctggttcag

SEQ ID NO: 226126 - DNA, 201 bp, Homo sapiens
gcagaaatctaagagtttgtcaacatcttggccaagataatcagcaggggatttgggcagctttctgggatttaccacatgaaaaatagcaatcaaaaacrgagcccaaataatatgtattcccaattcatagtctgattatcataaaatatgctggaagaaaccttggaggatgatctcctccagatgggaagcaaaggt

SEQ ID NO: 226127 - DNA, 201 bp, Homo sapiens
gaaaattttctttctaataactaacatatcttttctatgaggcttttatatttagtaataacagctaccacttatttaattctgacttaatggccctttayacagatgctgaaagaagcctaggggtatggaagtaagctgtccacactcacccacctagtaagtagtgaagtcccaatataaatgagaccatcctaattg

SEQ ID NO: 226128 - DNA, 201 bp, Homo sapiens
agaagcctaggggtatggaagtaagctgtccacactcacccacctagtaagtagtgaagtcccaatataaatgagaccatcctaattgcaaaaatcatttycttaactacttagccatagcagaggcctggaaccagtcttgtttaggtagatgacctggtttagccttttatctattaaaataaaggaaggaaaaaaagt

SEQ ID NO: 226129 - DNA, 201 bp, Homo sapiens
ccacactcacccacctagtaagtagtgaagtcccaatataaatgagaccatcctaattgcaaaaatcatttccttaactacttagccatagcagaggcctrgaaccagtcttgtttaggtagatgacctggtttagccttttatctattaaaataaaggaaggaaaaaaagtagtgggtttcagatagatttctgcccatt

SEQ ID NO: 226130 - DNA, 201 bp, Homo sapiens
tgggattacaggcgcgtgccaccatgcccagctaatttttgtatttttagtagagacggggtttcaccatgttggccaggatggtctcgatctcctgacckcatgatctgcccgcctcggccgcccaaagtgctgggattacaggcgtgaggcacgctgcccggccaaaaaatctttttaagtgtgactgacattggtggc

SEQ ID NO: 226131 - DNA, 201 bp, Homo sapiens
catgcccagctaatttttgtatttttagtagagacggggtttcaccatgttggccaggatggtctcgatctcctgacctcatgatctgcccgcctcggcckcccaaagtgctgggattacaggcgtgaggcacgctgcccggccaaaaaatctttttaagtgtgactgacattggtggctatcaatatggttggatgctta

SEQ ID NO: 226132 - DNA, 201 bp, Homo sapiens
tttataatcaaacttggctggtttctgtttattaaaaagatagttttaaaggattgtctgggtttcaggagtgtgtgtgtgcatcagtacacccgtgtgtyatgggttgggttcttgggctgcagtactgagatggactctggagtacaagatgtttattaggcatcaacacctgtgaaaggaaggggcagaaacaggagt

SEQ ID NO: 226133 - DNA, 201 bp, Homo sapiens
gacttgttcatcctacatgttactttgtatcctcccccccccctctatatatgtgtgtgtgtgtgtgtgtgtgtgtgtgtgtgtgtgtgtgtgtgaagtaraatcgtagattttttttaattctgtagtctctgggatattatcagtttttattttattttatgtccctatttagccaggggaatcccttcattctggttc

SEQ ID NO: 226134 - DNA, 201 bp, Homo sapiens
tctctagacttgttcatcctacatgttactttgtatcctcccccccccctctatatatgtgtgtgtgtgtgtgtgtgtgtgtgtgtgtgtgtgtgtgtgtraagtagaatcgtagattttttttaattctgtagtctctgggatattatcagtttttattttattttatgtccctatttagccaggggaatcccttcattc

SEQ ID NO: 226135 - DNA, 201 bp, Homo sapiens
ttcttagtgcattatatcaggagacactgatgctcctttctcccattcttggtattaactttgatcacttggttggtgtggtgtctaccaggtttctccaytggaaaattgctatttttccttttgtaatcaataagtatcttataggaatatacttgtagaaaatgtagtatgttttttcttatacttttacccattctt

SEQ ID NO: 226136 - DNA, 201 bp, Homo sapiens
tcagattttgcatattggccagaatcctacagaggtagtattatatccttcttagtgcattatatcaggagacactgatgctcctttctcccattcttggkattaactttgatcacttggttggtgtggtgtctaccaggtttctccattggaaaattgctatttttccttttgtaatcaataagtatcttataggaatat

SEQ ID NO: 226137 - DNA, 201 bp, Homo sapiens
ttgaaaagcacagcctattgcttttcagaatgtttcttaatttgagtttgtctgatgtggcatttcttcatggttagaatcagattttgcatattggccasaatcctacagaggtagtattatatccttcttagtgcattatatcaggagacactgatgctcctttctcccattcttggtattaactttgatcacttggtt

SEQ ID NO: 226138 - DNA, 201 bp, Homo sapiens
actttgtctttcatgaccttgacatttttgaaaagcacagcctattgcttttcagaatgtttcttaatttgagtttgtctgatgtggcatttcttcatggktagaatcagattttgcatattggccagaatcctacagaggtagtattatatccttcttagtgcattatatcaggagacactgatgctcctttctcccatt

SEQ ID NO: 226139 - DNA, 201 bp, Homo sapiens
ttttagtgaaatatttgaaagcaagttacatgatgcctctttgctcctttagtgtatttaaacaagacattttcttagaaaaacatagtgtaattactgamccaggaaattaaccttgatataaagctatttctggtctgcagaccttatggaaatgctgccattgtcttttatttgggtccaggatccattccaggatca

SEQ ID NO: 226140 - DNA, 201 bp, Homo sapiens
catatatgttatatgtgtataaatgtatatataatttttagtgaaatatttgaaagcaagttacatgatgcctctttgctcctttagtgtatttaaacaasacattttcttagaaaaacatagtgtaattactgaaccaggaaattaaccttgatataaagctatttctggtctgcagaccttatggaaatgctgccattg

SEQ ID NO: 226141 - DNA, 201 bp, Homo sapiens
aggatcactctgttttccttggtgggagaggagggagtgtgatacagagaagtaagtggatcaggctgcatggggttgtggtgacaaggctttgaagacayccatttatactgttggtcaagtaaacagtaaaatagcacccttggatttagggagtggtctgatcttaaattttaatatgcagaaccaccccccaaaacg

SEQ ID NO: 226142 - DNA, 201 bp, Homo sapiens
atatgctggtatctcaatcaggatatgaatgattagccaatagttccttgaacagaaccttattactaatgaggagcagtagattgagttgagttttaagsaacttcaggatcactctgttttccttggtgggagaggagggagtgtgatacagagaagtaagtggatcaggctgcatggggttgtggtgacaaggctttg

SEQ ID NO: 226143 - DNA, 201 bp, Homo sapiens
agtgctgggattacaggcgtgaggcacgctgcccggccaaaaaatctttttaagtgtgactgacattggtggctatcaatatggttggatgcttatatttwgagaatatacttcacaattctttttttctggtcatttgagctatgtggtcatttatctgtgtagtaaaattaacgtcactttgtgatataatctggtgat

SEQ ID NO: 226144 - DNA, 201 bp, Homo sapiens
acttcacaattctttttttctggtcatttgagctatgtggtcatttatctgtgtagtaaaattaacgtcactttgtgatataatctggtgatacgtaaaakaaggcttatttgctctttcttaaaatcaatactgcatgtatttattataaataaaatgagcaagaatttaatactgttaatttttttcatgcacaaaagt

SEQ ID NO: 226145 - DNA, 201 bp, Homo sapiens
aggggagggcttccagcccatgctgccaggatgggcttctcagcaggaatacagttttcaggctcatttaactcctgtggacacatgtaaggagctgggcrggcaattcgaattcattttcgaggtgacagcgccaaactttggctgtgttagctcacagaaacattaatgggataatgtgctccatcatggagaatgaga

SEQ ID NO: 226146 - DNA, 201 bp, Homo sapiens
attctttttttctggtcatttgagctatgtggtcatttatctgtgtagtaaaattaacgtcactttgtgatataatctggtgatacgtaaaataaggcttwtttgctctttcttaaaatcaatactgcatgtatttattataaataaaatgagcaagaatttaatactgttaatttttttcatgcacaaaagtatgaagta

SEQ ID NO: 226147 - DNA, 201 bp, Homo sapiens
ttttaaaatgttttgttttcttccatcttctccaaaacagttttagataaaactagaacacaacactactctacatatagtatgatatccctttcttttgrtcctaataccgtaagttttttcttattgtttaaagttaatgtttcttattcattaacttcattttcagtggtttcataatatttcatcaatatgattaac

SEQ ID NO: 226148 - DNA, 201 bp, Homo sapiens
ttcttttgatcctaataccgtaagttttttcttattgtttaaagttaatgtttcttattcattaacttcattttcagtggtttcataatatttcatcaatwtgattaactataattatttcacctggttttgaatatttagtttgtttcataactttcactattagaagtcatgccacaaccaatataaaatgtatgtgcc

SEQ ID NO: 226149 - DNA, 201 bp, Homo sapiens
gtaggcatacccagataattcaagataaccttcctatgttaaagtcggttgactagtaaccttgatacatctgctaagtctcttcatggcagcacctaatytagtgtttaattggataaccagggacaggaatctttttttttttttttttgagagggagtttcactctgtcgcccaagctggagtgcaatggtgcagtct

SEQ ID NO: 226150 - DNA, 201 bp, Homo sapiens
atattacatgcatacacactcagtaattgtaggagtgaagtattcaaagaaaactgagacatagcatctttgctatcataggccttcttggataaggtacmtacacataaattatgtaaatgttatgataataaatgtttgagatctcaatgagtggacatacaataaaatttcacatgtacccaaaagcaaagtggaaaa

SEQ ID NO: 226151 - DNA, 201 bp, Homo sapiens
acaacctcatgtgactagggtaggcatacccagataattcaagataaccttcctatgttaaagtcggttgactagtaaccttgatacatctgctaagtctyttcatggcagcacctaatctagtgtttaattggataaccagggacaggaatctttttttttttttttttgagagggagtttcactctgtcgcccaagctg

SEQ ID NO: 226152 - DNA, 201 bp, Homo sapiens
taattgtaggagtgaagtattcaaagaaaactgagacatagcatctttgctatcataggccttcttggataaggtacatacacataaattatgtaaatgtyatgataataaatgtttgagatctcaatgagtggacatacaataaaatttcacatgtacccaaaagcaaagtggaaaaacattttgctactactcattgaa

SEQ ID NO: 226153 - DNA, 201 bp, Homo sapiens
atctttgctatcataggccttcttggataaggtacatacacataaattatgtaaatgttatgataataaatgtttgagatctcaatgagtggacatacaayaaaatttcacatgtacccaaaagcaaagtggaaaaacattttgctactactcattgaatagtaataattttcctaatatatgctaattttataagtgaga

SEQ ID NO: 226154 - DNA, 201 bp, Homo sapiens
cctctcctgggatgcttttctttggaatccaacagccatgctgtgagagaagccaaatcacgtggagtggctagccgtgagttataagagttctagttgayggaagaaaataattgaaatgtatctagcataaagaaaagacaaatatttaaggtgatggatatcccaatgctaagtaatatgaatgtattacattatcac

SEQ ID NO: 226155 - DNA, 201 bp, Homo sapiens
ctttgctatcataggccttcttggataaggtacatacacataaattatgtaaatgttatgataataaatgtttgagatctcaatgagtggacatacaataraatttcacatgtacccaaaagcaaagtggaaaaacattttgctactactcattgaatagtaataattttcctaatatatgctaattttataagtgagaat

SEQ ID NO: 226156 - DNA, 201 bp, Homo sapiens
tgagcattactatattttaaagttattttactgatgaagaaattgaggctcagataggtaagcagtttgaccaaagtcacacaactaaggaagagaacctrgaactgatcacatgtttttctgattctgacacctatgttcttaaccaatacagcataaatgtagtttcgttgttttgttgcttctgagaagcattccaat

SEQ ID NO: 226157 - DNA, 201 bp, Homo sapiens
aagagcctacatttattattgtcattcagtaagcagcatatagttttggatttcctggttggagtccatccatagttaataattgggtaggatatgctggyatctcaatcaggatatgaatgattagccaatagttccttgaacagaaccttattactaatgaggagcagtagattgagttgagttttaagcaacttcagg

SEQ ID NO: 226158 - DNA, 201 bp, Homo sapiens
tacacatacacaatggaatactacatggccataaaaaaagaatgaaatcatgtctgttgcagcaccatgaatgcagctgcaggtcattatcctaagcaaastaacacaggaacagaaaaccaaatactacatgttctctcttataagtgagagttaaacagacaaacatggtacacatggacatgaaaatggcagccataa

SEQ ID NO: 226159 - DNA, 201 bp, Homo sapiens
tatgtttattgtagcactatttacaatagcaaagacatgaaatcaacttaggtgcccatcaatggtggattagataaaggaaatacggtacacatacacartggaatactacatggccataaaaaaagaatgaaatcatgtctgttgcagcaccatgaatgcagctgcaggtcattatcctaagcaaattaacacaggaac

SEQ ID NO: 226160 - DNA, 201 bp, Homo sapiens
ttagttaacctttctgactctcagtttttcaacaccaaaatgaggaggataatatttatgatatagcatgttatgaggttcacctaaaagaaggcaaaatrcctaacacatagtaaacacccaacaattttggcttttctagttatacagaccagccctctgataattcccattgaattcaccactgagaagggggtaggg

SEQ ID NO: 226161 - DNA, 201 bp, Homo sapiens
taattccattactggatatatattcaaaagaaaagaaactgttccaccaaactgatacatctacctgtatgtttattgtagcactatttacaatagcaaasacatgaaatcaacttaggtgcccatcaatggtggattagataaaggaaatacggtacacatacacaatggaatactacatggccataaaaaaagaatgaa

SEQ ID NO: 226162 - DNA, 201 bp, Homo sapiens
  misc_feature (1)...(201): n = A,T,C or G
atattattttagaagattactgaaattgctcaaaaatccccaaagagctattaaaggtctgtgatttttttaaatctttttggcattctttccctataaanataggtatattaaaatataattgatgggaagattatagagtatgaagcttgagaaatctgtatttccacatagataacaattgcattggcagaatctgtc

SEQ ID NO: 226163 - DNA, 201 bp, Homo sapiens
caaatccaaaccacggtgagagaccatttcacaccattcagaatagttattaataaaaagccaaaaagacacagatgctggtgaaaccgtggagaaagggkgatgcttatacactgttggtgggaatgtaaattagtttagcctctgtggaaagcagttgggaggtttttcagtgaacttaaaacagagctactgttcaac

SEQ ID NO: 226164 - DNA, 201 bp, Homo sapiens
tgagctccctactatttcaaaacttagacatttccactaaatgttggcacaaacttaaatatcatcttgaatgctatttacagttttcaaagtgacaacartagcatcattcaaaagaaggaaagactatgtgaagagagatcctaatatctttggaaattttttatggatggaaattttaagagaataattaatcagata

SEQ ID NO: 226165 - DNA, 201 bp, Homo sapiens
tgtaagaccttaaactataaaaatcctagaagaaaagttaggaaatgtgtttctggacaccagctgtgggatataatatatgacagagtcttcaaaagctrtgtcacatacacactatttcacaagtagggcctaatcaaagagcttgagcacagcaaaagaaactaccaacagagaaacagacaacctacaggatgggag

SEQ ID NO: 226166 - DNA, 201 bp, Homo sapiens
tgtagctctaaattctctccaccttgagtcaacatagtgatttattgcaaactgtttaatgtttaacttgctatttaaatctcagtatcttatgtttcccwtatttaaaatgggggaaaaatacccaatcatactgggcttctagtgtaaggttagtggtcataaacaactatagttcgcagtctttgctcctagggagag

SEQ ID NO: 226167 - DNA, 201 bp, Homo sapiens
tttctgagacttatgaatccttatacaacattatgtatgtacgtatagaggatcatattttgttaaaaaaagtgatattgctataaaaagtgtgattttttccccacttaatatgtggtggtcatctttcttgtcaatacataaacgtgccagttatcacagaagagaataccaaagggtgaatttgatgctgagacaata

SEQ ID NO: 226168 - DNA, 201 bp, Homo sapiens
accaaagtcacacaactaaggaagagaacctagaactgatcacatgtttttctgattctgacacctatgttcttaaccaatacagcataaatgtagtttcrttgttttgttgcttctgagaagcattccaattttcttaatattcagtattcagctacagtaccatcaagtattactaatgtgtcacagtcaccatctaaa

SEQ ID NO: 226169 - DNA, 201 bp, Homo sapiens
ctatgttcttaaccaatacagcataaatgtagtttcgttgttttgttgcttctgagaagcattccaattttcttaatattcagtattcagctacagtaccrtcaagtattactaatgtgtcacagtcaccatctaaataggagtaactaagttctggatgtgttttttctaacctttcaccaagtgaatttctaaggcttg

SEQ ID NO: 226170 - DNA, 201 bp, Homo sapiens
agacccccttgattgcttctttctctgaaatcttgttgcatgtctactcatcggtctctcagtcatgggtcattgtatcatttgtttacatcatttatgcrtatgctgcttatcaaagaaccgcctggatggcaaagatgccacattttagcttttctttgagtacttcactcctacaagtactgagtgcgtaatatgcat

SEQ ID NO: 226171 - DNA, 201 bp, Homo sapiens
tctgaattcaaaagttgagcgtaggagccaggaagtggaactcaaaacaaaaagccagccactcccaaataattgtgacttccatctgtgagtcaactgtragaggcattagcttagaccgtcaagatttggagaaataatatgcatcggttagtcataattggaagagctggcgtaaatgtgggttagtttggatctttt

SEQ ID NO: 226172 - DNA, 201 bp, Homo sapiens
aaggtcaaaagaatataccatgaataacttctttatggccatactcttgaaaatataccttctaattaacagggataccctatgtatatatatctatgatwtacacattgtaagctagtgtcatgactagagattgagaaacataatgaccaggttaagtctggcttctgagaatgaaaattcattcattcactcaattaa

SEQ ID NO: 226173 - DNA, 201 bp, Homo sapiens
aaataattgtgacttccatctgtgagtcaactgtgagaggcattagcttagaccgtcaagatttggagaaataatatgcatcggttagtcataattggaaragctggcgtaaatgtgggttagtttggatcttttaaaagaaaaaatatctatagaactgagtattacaggggatagtattgcaactctgggagtctgtga

SEQ ID NO: 226174 - DNA, 201 bp, Homo sapiens
tgtgagaggcattagcttagaccgtcaagatttggagaaataatatgcatcggttagtcataattggaagagctggcgtaaatgtgggttagtttggatcytttaaaagaaaaaatatctatagaactgagtattacaggggatagtattgcaactctgggagtctgtgactcaaattactgtttaaattttgtgtttatg

SEQ ID NO: 226175 - DNA, 201 bp, Homo sapiens
ttacaacctcatgtgactagggtaggcatacccagataattcaagataaccttcctatgttaaagtcggttgactagtaaccttgatacatctgctaagtytcttcatggcagcacctaatctagtgtttaattggataaccagggacaggaatctttttttttttttttttgagagggagtttcactctgtcgcccaagc

SEQ ID NO: 226176 - DNA, 201 bp, Homo sapiens
gtgccaagccctgtgttagccaccggatataatgttttcttccaaaaagaagccaatcaaggcttgtatagtacttaccaggggccaggcactgtgttagytctttatgatttcagccagctgacctaatgaatagagcaccaatacaattttttttttttttttttttttttttagatggatgctcactctgtcacccag

SEQ ID NO: 226177 - DNA, 201 bp, Homo sapiens
cttatgtttttacaacctcatgtgactagggtaggcatacccagataattcaagataaccttcctatgttaaagtcggttgactagtaaccttgatacatytgctaagtctcttcatggcagcacctaatctagtgtttaattggataaccagggacaggaatctttttttttttttttttgagagggagtttcactctgt

SEQ ID NO: 226178 - DNA, 201 bp, Homo sapiens
aaccaattaacaatacccttagaaaatcttggggctttttcttgagtttaaccacttttattttttttttaagttgagcttaaatttggtgtaaaagtgtrtacagattaaatatctttgaagtaggtttttatttcacaggtcctagaatcaggtaaaatggtagttgctggtttcatttgaaggagtaattaaggtgtg

SEQ ID NO: 226179 - DNA, 201 bp, Homo sapiens
ggcatactttaatacctattttcttaaaccctttcttttctgtgatatttaatgcataatggtttattagtcttctattactgtcataacaaactatgatraatttagtgacttaaaacaacacacatttattatctggcagtcagaagcccaatacatgtctcactgggctaaaatcgaggtatcagcagcgctgtgttt

SEQ ID NO: 226180 - DNA, 201 bp, Homo sapiens
tttacctagcagtggaatcaccatgttgtaaggtacacatttctccaacattggagagcagttctatagtcctaattaagtgcttgtgtcagttgatactmcatagcattgggtgaaaacatctgtttcccatgatgtttgcattggcacactttttaagtgtttgccactctggtgggtaaaagatggtaccacattatt

SEQ ID NO: 226181 - DNA, 201 bp, Homo sapiens
cattcaactccaaccaaggaaagcagctacttgagctgcacccactgaagttataggggcagagctgcctgaggcattaggagcccaccccttgcagtacytaggatgtagggcatggaggcaaagaagattattttgtagctttaagatatcatgtctgcccggctaagtttcagacttgcacagggcctgttttctctt

SEQ ID NO: 226182 - DNA, 201 bp, Homo sapiens
atatttgggtatgttttcacctggccacctggtactctacatggagaccctaattctttaaggactcgagttcttctattcctttttttttttttttttttaataataacagagatagggtctcactgtgttggccaggttggccttgaactcctagcctgaaggaatcctcctgccccagtctcccaaggtgctaggatt

SEQ ID NO: 226183 - DNA, 201 bp, Homo sapiens
gatatttgggtatgttttcacctggccacctggtactctacatggagaccctaattctttaaggactcgagttcttctattcctttttttttttttttttttaataataacagagatagggtctcactgtgttggccaggttggccttgaactcctagcctgaaggaatcctcctgccccagtctcccaaggtgctaggat

SEQ ID NO: 226184 - DNA, 201 bp, Homo sapiens
tgatatttgggtatgttttcacctggccacctggtactctacatggagaccctaattctttaaggactcgagttcttctattcctttttttttttttttttttaataataacagagatagggtctcactgtgttggccaggttggccttgaactcctagcctgaaggaatcctcctgccccagtctcccaaggtgctagga

SEQ ID NO: 226185 - DNA, 201 bp, Homo sapiens
ttgatatttgggtatgttttcacctggccacctggtactctacatggagaccctaattctttaaggactcgagttcttctattcctttttttttttttttttttaataataacagagatagggtctcactgtgttggccaggttggccttgaactcctagcctgaaggaatcctcctgccccagtctcccaaggtgctagg

SEQ ID NO: 226186 - DNA, 201 bp, Homo sapiens
tgggtgcagcacaccaacatggcacatgtatacatatgtaacaaacctgcacattgtgcacatgtaccctaaaacttaaagtataataataataaaatttwaaaaaaaagaaaaaattaattggtagaattaagaaaagattaaaaaaagaaaatcagaaagaggaattataattactattaagtggaaatggatcattgt

SEQ ID NO: 226187 - DNA, 201 bp, Homo sapiens
gggagggatagcattaggagatatacctaatgctaaatgatgagttaatgggtgcagcacaccaacatggcacatgtatacatatgtaacaaacctgcacrttgtgcacatgtaccctaaaacttaaagtataataataataaaattttaaaaaaaagaaaaaattaattggtagaattaagaaaagattaaaaaaagaaa

SEQ ID NO: 226188 - DNA, 201 bp, Homo sapiens
tagccatacatggcttatatataactacttttttgtccaaaggtcaagtggttcttggtgtcacacatgcagtaacaagagaacaaaattaaatgaaacaaggagatgttggtctctgttttaattttgtctgattgacatagatgatggtgtgtctccagcatgactctactgtttagctttagggattagaaaagaagt

SEQ ID NO: 226189 - DNA, 201 bp, Homo sapiens
tatcactattcactgcattgcaattctaaaagataaaaacctctccccctctttctctttctattctataagcccactgattgttgtaaaaaaaaaaaaaaagtttaattcactctctcttcaagacttttacattgtgtgttcaagtcagctttttgctattctgaatataaagtcacttatagttgtttggaatgattt

SEQ ID NO: 226190 - DNA, 201 bp, Homo sapiens
taattttcctgcccattttctttttcttcttttaatgtaattttgaaagtttttagagtaaaagtaaaatacttcatgatgggctttcaactaaaaaaaaatccacactttttataaatttggagtcggaaatttgggtgtgaaagctgctacatctcacatttctgtcttgctaacatatttaattatacatggcagagc

SEQ ID NO: 226191 - DNA, 201 bp, Homo sapiens
acttgaagcatttgcttatgaaagaaaccatacactaaaaatagctaacaggcatatgaaaaggtgctcaacatccttcatcatcaaagaaatgcaaatcmgaactacaacgagatatcatctcactccagttaaaatggcttatatccaaaagacagacagtaacaaatgctggcggggatgtagagaaaagggaaccct

SEQ ID NO: 226192 - DNA, 201 bp, Homo sapiens
aaaacatgtcatgtaccccataaatatatacaactatgtacctacaaaaataaaaattaaaactatacactaaaagtcgcatattatgtgatacaatttaygtgaaatatccagaattggcaaagtcatagaggtagcagattagtggtaccaggggttaggagtgggtagtggggaatgtagaatggctgtaatggccac

SEQ ID NO: 226193 - DNA, 201 bp, Homo sapiens
tatacactaaaagtcgcatattatgtgatacaatttatgtgaaatatccagaattggcaaagtcatagaggtagcagattagtggtaccaggggttaggaktgggtagtggggaatgtagaatggctgtaatggccacagagttttcttttgggatgatgaaaacattctggaaacagatatggtgaaagttgcatgacat

SEQ ID NO: 226194 - DNA, 201 bp, Homo sapiens
aaatagaaggtcaaaagaatataccatgaataacttctttatggccatactcttgaaaatataccttctaattaacagggataccctatgtatatatatcyatgatatacacattgtaagctagtgtcatgactagagattgagaaacataatgaccaggttaagtctggcttctgagaatgaaaattcattcattcactc

SEQ ID NO: 226195 - DNA, 201 bp, Homo sapiens
ccagatctagtttatttgcttctcagcatatcatacttttattttgcaattaccttttgtcttcagaggtagaggaaaggtagcacaaaggtcaaagcatsgaccagactgccttagttaggggcccaaattggctacctgtgcaagttacttaacatctttatacctgtatcctcacctgcaaagtagcatgatgctact

SEQ ID NO: 226196 - DNA, 201 bp, Homo sapiens
gttcagtagctatagtgtctctgtggtacctataacagatgtgcacagaacccataacacattttgttaactaaggtgagagtttattttgaagcagtaaygatgtctaatgtaacatctttttaactaccttctactagatgttatgaaaatattagatgatcacccttgtcttggctttataaacacaaacagtgtaag

SEQ ID NO: 226197 - DNA, 201 bp, Homo sapiens
ctggagagctgcctgaatatagggcttggacttaaatatttatgtatactaggcaacataggactgctgaggttctgtttagtcacactggtaattaaaakattgaaatatttctattgtacatagctattgctctgagaatatcccctaccctgctgtcataggccctccctcatggcccccagacctttctaagcaacc

SEQ ID NO: 226198 - DNA, 201 bp, Homo sapiens
gccctccctcatggcccccagacctttctaagcaaccacagaaccaatgtctagatcctcaagaccccgctccagtgacactgtcagcttctaggtaaccyaccttttacttaacatgacttctgaatagtcctacagtgactgttggttgagtaaatacagggttacttggaatcagatacaagagaaaagtatcttgaa

SEQ ID NO: 226199 - DNA, 201 bp, Homo sapiens
atctgcatttggatcacagaatgttggcttcacagatggtcttgtaaatagctgaataaagaacctttaatacttggcatttataacaggtacttagaagwttcatcgaaattctatttgctttggctggagaaatacattctcttggtaatgaacttgaactctgtcacctggttatatctttgagataacagaatagga

SEQ ID NO: 226200 - DNA, 201 bp, Homo sapiens
catttgtgcccacgtgctgggtacagagacagcaatgggagtgtagagcagcactttaacttgcctagtgaagtctcttactcagtcccttactagccagsttcttgcgatcaagtcaccaaacctttctgcagattgtgatgactattcgattcaatcaaacccaaagagatcagccaagagtctggcacacagaaattc

SEQ ID NO: 226201 - DNA, 201 bp, Homo sapiens
agctatctgtaacaggatagtttactgcgaagttttatctatgcacatgtgctctggatgtgtaagttgatccaaccatcacaaaagagtcctttgtgtacaaaaaaaaaaaaaaaaaaaaagaattaaagcttttaaaggttaaaatttatttaatcaaatgagccttttcctaggaaaatagtgcccagattggttgtc

SEQ ID NO: 226202 - DNA, 201 bp, Homo sapiens
tgaccttcctataaaagtccacccatcatgttccctctgtggagctcgtgaatgacttccagttagaagctgcccaatgcatgaattgttgttcgatcaaataaactctttaaaattttatcctgcctcagtttgtgttttaacagtaggttattctgataagattagaatatgaattgtatatctgtattttaatttttt

SEQ ID NO: 226203 - DNA, 201 bp, Homo sapiens
aacataaaccctaagggttgtgattcttctcattatttggcccaagaaatatctctatttactctctctttaggaataagccagacatggaatttttttttccgttccctaagactcacttatagagtaaaagtgggaaatatttcacttttgggattgtgttttatggagtttaataccctctgagatgcgtgagatgac

SEQ ID NO: 226204 - DNA, 201 bp, Homo sapiens
ttgctggacctgttgggatttggaggcctttggaacataaaccctaagggttgtgattcttctcattatttggcccaagaaatatctctatttactctctstttaggaataagccagacatggaatttttttttccgttccctaagactcacttatagagtaaaagtgggaaatatttcacttttgggattgtgttttatg

SEQ ID NO: 226205 - DNA, 201 bp, Homo sapiens
ggactttatccttagatacaggactgtatccttatatacgggtatatgtgaatttataagtgaatttctctaacactgatctaaattctgaacacagtctwtgtaaaagactagaaaaatcaatatgcggtgacattctttagtagagaaacaacatatactttttttttcttctcggtctatcagattacttttttttct

SEQ ID NO: 226206 - DNA, 201 bp, Homo sapiens
tgcattagtagagtcagttgtaatggtgacaagttcttgattttactatggctccaagacagcttcaggaggagtggctccttacaagttccatgaggtcratgggatattgttctgggagtccttactgaaggctctacctagagttgtactttcagccctccaagttatttctccagcaccaactttgctgtattaaat

SEQ ID NO: 226207 - DNA, 201 bp, Homo sapiens
tggccacacacacgtcgaacagctctctctttctcatccccttttaaataaactgctaagctggcctaactgggaagaacataagcattttattggtaaggtttctgtagtacatggattatagcctattcatttatgcattaaacaatttattgaatgcttggtatgtgtttcatgctgctgtaagtgttggggatacag

SEQ ID NO: 226208 - DNA, 201 bp, Homo sapiens
tgtttcttaattgtggtaagatacatataacattatatatatatatatatatatatatttttttttttttttttttttttttgagacggggtcttgttctrttgcccaggctggagtgctgtggcgcgatgtcggctcactgcaagctccgcctcccgggttcacgccattctcctgcctcagccaccccagtagctggga

SEQ ID NO: 226209 - DNA, 201 bp, Homo sapiens
aaggttgtgcttgttttataatgtattttttatttttatttttgtttcttaattgtggtaagatacatataacattatatatatatatatatatatatatwtttttttttttttttttttttttgagacggggtcttgttctattgcccaggctggagtgctgtggcgcgatgtcggctcactgcaagctccgcctcccgg

SEQ ID NO: 226210 - DNA, 201 bp, Homo sapiens
tcgtctttaatacttttttcaatacatattctccctattctttcacttcattttattgataatggctttggggagctgaaagttttaattttctggggcgwtatgtttcattttttcctttgtcattttgttttaagatctttatacttaaaatctattttaatccagataaaagtttcttctgtgtataatatggctcaa

SEQ ID NO: 226211 - DNA, 201 bp, Homo sapiens
ggaggagacatcagagcctgcccttctctgacctatagatctttagctatcagtgaaagaactgatggtatgcaatgctttctttgcctaacctgtcaggyccctttggaggtatcctaaatttgctgatggatcctaaactgactgattaatgtttgatgttaggagctttggggaattgttcaagggattatggttgtt

SEQ ID NO: 226212 - DNA, 201 bp, Homo sapiens
gattaatgtttgatgttaggagctttggggaattgttcaagggattatggttgtttgtagtgcacaggaaatacagactttttatgatcagttcagctctytttgtgatcctctattttatgactagataatgcttttgtgaaaaaagaatgaagtacatctgacatatggcttgatctttctcttcctctaattaaaaaa

SEQ ID NO: 226213 - DNA, 201 bp, Homo sapiens
tactattaattgctagtttcacatgtttcctgcataggggtaatattgaaaagacagatcttggggattgtggcacaactataatgtgtcttctgagtcaygaaatgtactatattcaatatgacgttatggtgctgttttacattctagattatgtttaatataattttcatataaaatgctttctgcaatattgtaatt

SEQ ID NO: 226214 - DNA, 201 bp, Homo sapiens
ggagctttaagatttaatgactgcctcactgggtttcggatttgcatgggacctgtgtccccttagttttggccaatttctctcatttgtaatgggaacayttacccaatgcctgtatatccccattgtatcttgtaagtaactaacttgtttttgagtttacaggttcctaagtggaagggacttgccttgtcttagatg

SEQ ID NO: 226215 - DNA, 201 bp, Homo sapiens
ccaaccatgtggaactgtgagtcaattaagcctcttctcttcataaagtacccagtctctggtaatatctttattgcattgtgaaaatggactaatacaayatcaaccagtatagccacgtattatcattatcaagtattatgtactttacgtcagtagcccccaacctttttggcaccagggactggtttcatggaagac

SEQ ID NO: 226216 - DNA, 201 bp, Homo sapiens
tactaacaggccacagatgggcactgatctgcagccagggggttggggacccctgctgtacctaatatgcaatacttttatatgactggcagcacaggttyatttataccagcatcactgcaaacacataagtaatgtcttgtgctatgtcattaagacagctaggatgtcactaagcaataggaattttccagatacatt

SEQ ID NO: 226217 - DNA, 201 bp, Homo sapiens
tatccagtgcctggcatattatgagcaatcagtatgtcaatgctgtagtttttattgttgctctaattgttgttattatttttgttagtacttttgttgcwattattattttctgctgtgaagaccaatttcctattacccagcaaagaatctccacgcttctctatggtatgcactttctccttccaggggtgagcaagc

SEQ ID NO: 226218 - DNA, 201 bp, Homo sapiens
tcctgcaacaatggacatgtctgatacatgtgctgaccagtacagtggccagtggcctcatatggctgttgaggacttgaaatggggctaatgggactgasaaaataaattttatttaattttaccttatttaaatttaaatagccacatataattagtggctaccacattcaacagcataggctaaaatgccaaatacct

SEQ ID NO: 226219 - DNA, 201 bp, Homo sapiens
cacctacccccaactaattaggtggatgttctaccccgggtatgggaggctgagaatattgaggccccagtcccccttgcctcagcttactcataggcagrttctatgctgagagaggcaagctgagagaggcaagctaagaaagccagaggctgccacccccaacaagtcccctactcagaaagtataggtgttactctg

SEQ ID NO: 226220 - DNA, 201 bp, Homo sapiens
taaaaagtaaaagaaattaataatatgttgttaaaactcgatatatctaaaatagtatgatttcaacatataagctgtgtagaaaattatgaataggattmtttcaccttctgtttcccttgtactaagtgtttgaaatctgggttgtattttacacttctggtacatctcagtttgggctagccacaattcaggtgctca

SEQ ID NO: 226221 - DNA, 201 bp, Homo sapiens
taaatggtttcctgttggtgtaaattgtaacaagctgcctctatctttttctagacttcactgtgggtctttaagtcaacattccaaactctccccagccmaagtttctagaagagatttcaccagatacttttttctctgaggctctgagtgtctatctgtccttcgtgtcctgaattgaatgttttcaggaggggctgc

SEQ ID NO: 226222 - DNA, 201 bp, Homo sapiens
tccagaagttctcctaatgtcaggaatgtctttgtatctgtctactgcttctttttctttgtcataacaccttagcatagtacactggtctatacttaacrctaacagatttaatatgtctagggaatgagtgttcatgacatcattggatgttttctaatacacttccaatttattaaagaatatttgaaaaatggagag

SEQ ID NO: 226223 - DNA, 201 bp, Homo sapiens
gttctgtatggtgggggaaaaacacaggtaagtaatttaactgaggctgtaggtttacttttgtaattgttattttaggcacagcatgtggctgtactcaytgtttgtaaattcatgcctcttggtgtttagaaactaaaagtgtatataataaaattagatcagtattctggtgcaagttctgctgccagctaacttgtg

SEQ ID NO: 226224 - DNA, 201 bp, Homo sapiens
tctttctccagaagttctcctaatgtcaggaatgtctttgtatctgtctactgcttctttttctttgtcataacaccttagcatagtacactggtctatasttaacactaacagatttaatatgtctagggaatgagtgttcatgacatcattggatgttttctaatacacttccaatttattaaagaatatttgaaaaat

SEQ ID NO: 226225 - DNA, 201 bp, Homo sapiens
catgtgtctctttctccagaagttctcctaatgtcaggaatgtctttgtatctgtctactgcttctttttctttgtcataacaccttagcatagtacactrgtctatacttaacactaacagatttaatatgtctagggaatgagtgttcatgacatcattggatgttttctaatacacttccaatttattaaagaatatt

SEQ ID NO: 226226 - DNA, 201 bp, Homo sapiens
tctgcatagtattccatggtgtatatgcaccacgttttctttatccagtctatcattgatgggcatttgagttggttctgagtctttgctattgtaaatgrcgctgcactaaacataagtgtgcatgtgtctttatagtagaatgatttatattcctttgggcatatacctggtaatgggattgctgggtcaagtggtatt

SEQ ID NO: 226227 - DNA, 201 bp, Homo sapiens
ttacagcctttgtaccaacatgtgtctctttctccagaagttctcctaatgtcaggaatgtctttgtatctgtctactgcttctttttctttgtcataacmccttagcatagtacactggtctatacttaacactaacagatttaatatgtctagggaatgagtgttcatgacatcattggatgttttctaatacacttcc

SEQ ID NO: 226228 - DNA, 201 bp, Homo sapiens
ggagaggcaagaaaagaggggctctgaagatgggctttatgatttttattgaaggctgaggatcgagttcaaatggtgatgcccgctatcgagaatacttwgtgccactgttccatgagatggggctccagctttttcatataaaagttacacaccgccttttccaggaagcctttctggctttcaactacaatataattc

SEQ ID NO: 226229 - DNA, 201 bp, Homo sapiens
cccggaccctgaagttcttaatatttactaacttctagtttattgcccaagcaagtaattataggaggtatgtactttctaatattagcattcgtttcttmtttttgttaattcactgtgtgaccttgggcgagtcactttacctctggggagaccaaagattctaaagtaattgaagaaagcactgtaggaagctcctga

SEQ ID NO: 226230 - DNA, 201 bp, Homo sapiens
gggtaaaatcattataggttctgaattgatgatgatgagctctctgccctccttccaagataaaaatgtttactatggtctctacctgattcctgagacawatgcaagtttgtgttctatacatgtttatatctacatgcctataccgattgtttacatatgtatataaaaggttaagttaatcttttggcatgaaattca

SEQ ID NO: 226231 - DNA, 201 bp, Homo sapiens
ccctgtggcctgtacctgttgcctagtttgagttcttaaagcgccttcatactaacagtaataggaacttcctgtgttccagtctctccatgtggtacttytgacacattagctctatttttctgtctcataccagggaaatatttttatttatattttacactcagggacactgaggctcaggtacgttaaataactttg

SEQ ID NO: 226232 - DNA, 201 bp, Homo sapiens
acacattagctctatttttctgtctcataccagggaaatatttttatttatattttacactcagggacactgaggctcaggtacgttaaataactttgcamatggtgcatatctcctcaatgagagatgtagacttggaagatttctgtgactgcacagccatcagtttttctactatctcacttctattaactctttggg

SEQ ID NO: 226233 - DNA, 201 bp, Homo sapiens
tttttctgtctcataccagggaaatatttttatttatattttacactcagggacactgaggctcaggtacgttaaataactttgcaaatggtgcatatctyctcaatgagagatgtagacttggaagatttctgtgactgcacagccatcagtttttctactatctcacttctattaactctttggggtcacagttactat

SEQ ID NO: 226234 - DNA, 201 bp, Homo sapiens
acatgaggtcaggggtggaattttccacttgtggcgtcagctcagcactcaagaagtgtcagatttgggagcatttcagatattgggtatttggtgtaggrgtgcttaacctgtatttacatgaaagaaacgtgaggtttgagcaagttggctgattggcccaggcccatgaagttgacaggtatcaaagtgatgacaaaa

SEQ ID NO: 226235 - DNA, 201 bp, Homo sapiens
cacttgtggcgtcagctcagcactcaagaagtgtcagatttgggagcatttcagatattgggtatttggtgtaggggtgcttaacctgtatttacatgaargaaacgtgaggtttgagcaagttggctgattggcccaggcccatgaagttgacaggtatcaaagtgatgacaaaactgataccctgcaccttgtgaattt

SEQ ID NO: 226236 - DNA, 201 bp, Homo sapiens
agaagtgtcagatttgggagcatttcagatattgggtatttggtgtaggggtgcttaacctgtatttacatgaaagaaacgtgaggtttgagcaagttggytgattggcccaggcccatgaagttgacaggtatcaaagtgatgacaaaactgataccctgcaccttgtgaatttctgcaaactacctgggtccctgggtt

SEQ ID NO: 226237 - DNA, 201 bp, Homo sapiens
aaagagatgaacaaagagtctctggcccagtgcctggcacatagtaaaacacttcgacagttgctacagcaactagtagtaattctaataagagtttttcrttttcccccaagctatctgtttatatcaaaggagtattttgtatatttctgacatgagctaagttctaaagtaagtaatggcagataactcaacctggtt

SEQ ID NO: 226238 - DNA, 201 bp, Homo sapiens
cctggcacatagtaaaacacttcgacagttgctacagcaactagtagtaattctaataagagtttttcgttttcccccaagctatctgtttatatcaaagragtattttgtatatttctgacatgagctaagttctaaagtaagtaatggcagataactcaacctggttcattgtattaataacagtcagttgtatttgtg

SEQ ID NO: 226239 - DNA, 201 bp, Homo sapiens
gcttgtaaacttaaatacgtttatttctcattaccctttttgctattattgtggccaatggtggattcttctactagggttgtacatcagtgctggtttgkcaggctggatttattttaaagaaacgcttcagggatgcctacttttccaccaaaaatcaatcaaaatgttgtgaagggagcataaattgtagtcatcttt

SEQ ID NO: 226240 - DNA, 201 bp, Homo sapiens
tagatcaatttgatgaaagcactaggtaggggccagcaaatactggtttgcttctgttttccagagaacctcgaggagacaaggtagaaaaccaatcccaratgaacaggagtactactgagacctgtactgaataagacaagagaaactcagtgagctaaactagggtataagccacttgcaggagcagagcagggtcag

SEQ ID NO: 226241 - DNA, 201 bp, Homo sapiens
tgcctgtaatcccagcactttgggaggccaaggcaggcagattgcttgaggtcaggagttcgagaccagcctggccaacatggtgaaaccctgtctctacwaaaaataaaaaattagctgggcatggtggcaggtacctgtagtcccagctacttgagaggctgaggcaggagaatcacttgaacctgggagggagagatt

SEQ ID NO: 226242 - DNA, 201 bp, Homo sapiens
atgatataaacctaaaggcaaaatttgggaactgctatgtgaagactgataacagtgtaaagttgttcgctgctatgtgagcaaatggtggaaaaaaaaaatcacttagctgagatataattaaagtaagaattaataacctgagacatttaagtaactgatagtccccaggaccatctttaggatcctgcagaagagaga

SEQ ID NO: 226243 - DNA, 201 bp, Homo sapiens
ctcattgcacatgatataaacctaaaggcaaaatttgggaactgctatgtgaagactgataacagtgtaaagttgttcgctgctatgtgagcaaatggtgraaaaaaaaaatcacttagctgagatataattaaagtaagaattaataacctgagacatttaagtaactgatagtccccaggaccatctttaggatcctgc

SEQ ID NO: 226244 - DNA, 201 bp, Homo sapiens
ggcactggcgttctctcatgattagagaaatgaagttgacaaaggaggatttcttaggtagctgctgaagcactgacagcagtgattgggtttctctactyatcatttgaaaatcaattcaaaagactctgtgttggtattaaaacacattaattctttactctttcaacgatattttagaattctctataatatgtttaa

SEQ ID NO: 226245 - DNA, 201 bp, Homo sapiens
aacccgggaggcggaggttgcagtgagccaagattgcgccactgcactccagtctgggcaatggagcaagactctgtttcaaaaaaaaaaaaaaaaacaamcaaaaaaggaaagaagaaaagggaaaattaagtatagagtaaccaggaaggaaaggtgtgaaatcaatgaattatctaaattggaaatagaattacgttg

SEQ ID NO: 226246 - DNA, 201 bp, Homo sapiens
ttgaacccgggaggcggaggttgcagtgagccaagattgcgccactgcactccagtctgggcaatggagcaagactctgtttcaaaaaaaaaaaaaaaaamaaacaaaaaaggaaagaagaaaagggaaaattaagtatagagtaaccaggaaggaaaggtgtgaaatcaatgaattatctaaattggaaatagaattacg

SEQ ID NO: 226247 - DNA, 201 bp, Homo sapiens
tttgaacccgggaggcggaggttgcagtgagccaagattgcgccactgcactccagtctgggcaatggagcaagactctgtttcaaaaaaaaaaaaaaaaacaaacaaaaaaggaaagaagaaaagggaaaattaagtatagagtaaccaggaaggaaaggtgtgaaatcaatgaattatctaaattggaaatagaattac

SEQ ID NO: 226248 - DNA, 201 bp, Homo sapiens
taatagtgaacatttcagaattagaaaggtttcaagacatagtcttgttttaccctccagttttagagatgagaaaaccaaagccagatattacatggcaygtatcacacagctggttagagacactcccagacatggggacctttccctttgcacctttaatgattgctctctaaggttccttttcacttttttccggta

SEQ ID NO: 226249 - DNA, 201 bp, Homo sapiens
ttggaaaggaaataatttttcaacaatgtgggtgtttctttatttttgtatatgatttcattatttataggtcacatgcccagtgttttcatttttgaagytgtataaaaatacagatcagttgatatgagcatgtgatgcagaatctgtaacctgagagtcatgccgtctgagttccagtcttacatccatatcccatca

SEQ ID NO: 226250 - DNA, 201 bp, Homo sapiens
ctctgctcagaagccagacgttgtctctctcttaatcatttacccttaagtagctatggtagttctattaagtctgcagccttagttttttggtttttttktttgtttgtttgtttgtttttagtttactcctacctttctaattatttttttcttattgttcacataattctgcatcacaaaaaaaattttattttttaa

SEQ ID NO: 226251 - DNA, 201 bp, Homo sapiens
gtatatacatgtatacgtgtctatatacatgtatacacatgtatgtgtatgtatgtacacacctatacacacatacacacatatatatgtgtgtatatacwcacacacacacacacacacaaacacacacacacacacacacccctattcagtaagactgtattttgaacaaatatgccagggcttactgatgccctttca

SEQ ID NO: 226252 - DNA, 201 bp, Homo sapiens
ttaggatgaaaaatgcatcagaatttatgaagatgtctttttttctagttctgagtatgaggttctttaaatgtttccaaaataatgtgtctttcccccayacatctccaggtacaattctctgtgaggttaggttttctttttttcttttttttttggaaatggagtctcgctctgtcacccaggccagagtgcaatggc

SEQ ID NO: 226253 - DNA, 201 bp, Homo sapiens
aaacttttttttaaagcaaaggatcaactctgggacatgcatttcattggttttaaaagttctcagtctctggaaaatgaatataataagaaacatttctrtaatatagcactaaaggagataaatgtcaggttgtcagaaaacttaaatgaataatggtatttgaggcatttgtttttcttgcaaattgagatacgataa

SEQ ID NO: 226254 - DNA, 201 bp, Homo sapiens
tttctataatatagcactaaaggagataaatgtcaggttgtcagaaaacttaaatgaataatggtatttgaggcatttgtttttcttgcaaattgagataygataattactgctatttaaattctccacccccacccccaacttggttttgcttagatgtctttgggattgggggctttgggacacacaagtcatttttct

SEQ ID NO: 226255 - DNA, 201 bp, Homo sapiens
tgaataatggtatttgaggcatttgtttttcttgcaaattgagatacgataattactgctatttaaattctccacccccacccccaacttggttttgcttrgatgtctttgggattgggggctttgggacacacaagtcatttttctctcctgtcagaagttctttaaggattaaaaacaatttttattttctctatgaga

SEQ ID NO: 226256 - DNA, 201 bp, Homo sapiens
gacctggggtacacatgacctaagaagatatcagctggtgaagggagtgcttgagctgctccccactaactctaggcaacacagctcacagctccaggcarctccttcttccctttgtttcagaagaggagaggagagagtaaagaggatattgttttgcaacttggatactagttcagccatagtagcatagggcaccag

SEQ ID NO: 226257 - DNA, 201 bp, Homo sapiens
atgtgcccggagcagtggtggtcagagagattcctctgcttgaggaaaggagagggaagggcagaaaggactttgtcttatggtttgggtgccagcttagstgcggtagaatagagcaccaagtagatttctaaatttcccaactccaggccgtgactcccagaaaacatctctggacctgaccagagccagagagaactt

SEQ ID NO: 226258 - DNA, 201 bp, Homo sapiens
cccactgtcagcattggaaatatcatccagacagaaagtcagcaaacatcttacttaatctgcagtacagaccaaatggacctaatagacatttacagaayattttatccaatggctgcagagtacacattcttcagctcatggatcattctcgaggaaagaccatatttcaggccacaaaacaaatcttaaaacattttt

SEQ ID NO: 226259 - DNA, 201 bp, Homo sapiens
gctcatggatcattctcgaggaaagaccatatttcaggccacaaaacaaatcttaaaacatttttttaaaaattatgtcaaatatcttctctgaccaccayggaataaaattagaaatcaataacagctgaaattttggaaattatacaaacacatggaaattaaacaatatgcttctgaatgaccagtgggtcaatgaaa

SEQ ID NO: 226260 - DNA, 201 bp, Homo sapiens
aaattatgtcaaatatcttctctgaccaccatggaataaaattagaaatcaataacagctgaaattttggaaattatacaaacacatggaaattaaacaayatgcttctgaatgaccagtgggtcaatgaaaaaattaagaaaattttaaaaatatattgaaacaaatgaaaatggaaacgcaatgtatcaaaacctatga

SEQ ID NO: 226261 - DNA, 201 bp, Homo sapiens
tttaatctgcctatttgcaagatggccaccctatttcctggaaccatgatcaaattcacggtaggaagaaagggagagaggtggcagcagcagtgttgctrctggaaaatcatatgcttcccccgagtattccccagcagattttcactggcttcaagatggtctgagagaatgagtagttggccatgggatgggaacagg

SEQ ID NO: 226262 - DNA, 201 bp, Homo sapiens
aaaaaaataggggtgtattttctttggtaacaagaagacctcctggaggtaggcagtgtcttagtgattgttttaatctgcctatttgcaagatggccacyctatttcctggaaccatgatcaaattcacggtaggaagaaagggagagaggtggcagcagcagtgttgctactggaaaatcatatgcttcccccgagtat

SEQ ID NO: 226263 - DNA, 201 bp, Homo sapiens
ttcattctggttcatgtgttcttttgacctgtccccacaattttggtttttctttgtttttttttagccatttgtaactttgtggcaccacaggatattcyaatctcatcttgttcctgtcctgtcccattaatggagccaaccacttctccaaggaggtctggttccttttttatttttattttttggagaatggtattt

SEQ ID NO: 226264 - DNA, 201 bp, Homo sapiens
agtaaattctgagaatccaaacatcaaataagagttataaacaacatagttttattattactaggtaattattttacttttatgtttcattaatattattkatttaaatcaaattagccatacctataacttcaggcaggaaggaaaggtataagaggaaaatgaaaactttcctttccttctcttctctgacatgctggc

SEQ ID NO: 226265 - DNA, 201 bp, Homo sapiens
tactacaaaggacattcttgcacaaattctggcatactatttggaagtatatctgtagggcaaattcttagcaatgcatttgctgggttaaagggtttgtsaatttgccattttgctaagagattgccaaatgctggatatgcaagaaatgttctctctcaacaaccagacagaaggaaaatctcttcattcctttctttt

SEQ ID NO: 226266 - DNA, 201 bp, Homo sapiens
tgtatatacatgtatacgtgtctatatacatgtatacacatgtatgtgtatgtatgtacacacctatacacacatacacacatatatatgtgtgtatatayacacacacacacacacacacaaacacacacacacacacacacccctattcagtaagactgtattttgaacaaatatgccagggcttactgatgccctttc

SEQ ID NO: 226267 - DNA, 201 bp, Homo sapiens
taataacctaaggaaacagaaattcatgatgttagaaagaatttcatttcttccccagctgccttattttgagtcaggtctctgtactctgacatgagacrtatcttcattttttccccttctagcagtaagtcagtctttctcatttcttgctcttttccatgttgttttgccaatttctctttcttttgctttctctcc

SEQ ID NO: 226268 - DNA, 201 bp, Homo sapiens
tgtgtatatatgtgtatatatatacctttctactggtttattgtcacatatgtatatatataaacatatatgtatgtatacatatatgtgtatatatgtgkatgtgtgtatatacatgtatacgtgtctatatacatgtatacacatgtatgtgtatgtatgtacacacctatacacacatacacacatatatatgtgtgt

SEQ ID NO: 226269 - DNA, 201 bp, Homo sapiens
ccattatgttctttatttttgtttatggtttaagaagttatagaggctccccagggttaataacgtcactttcctgttgctgtgagtctggcaatatgaaraaattggatgactaccatttttcccccatgtatctgggtatgttgtttatcaaagcaaaaggaaaacaaaacaaaacaaaaaacaacaactcatggagca

SEQ ID NO: 226270 - DNA, 201 bp, Homo sapiens
catatgtatatatgtgtatatatacacatatgtatatatgtgtatatatgtgtatatatatacctttctactggtttattgtcacatatgtatatatatamacatatatgtatgtatacatatatgtgtatatatgtgtatgtgtgtatatacatgtatacgtgtctatatacatgtatacacatgtatgtgtatgtatgt

SEQ ID NO: 226271 - DNA, 201 bp, Homo sapiens
ggccttgtgtcccttttcccatggttcttctcttaaggtgggccacccacatgtgtgtggcctgctaacatgtgggaggtgagcatgtgagtgtgtttaaraagttgtatgtatgcccacctgaggctttcttcccttttccagtggaatgccccagaaaaccatattctgccattttgtctcttaatgcgcatgcttgtg

SEQ ID NO: 226272 - DNA, 201 bp, Homo sapiens
ggaggctgaggcgggcagatcatgaggtcaagagatccagaccatcctgcccaacatggtgaaaccccatctctactaaaaatacaaaaattagctgggcrtgtaatcccagctactcaggaggctgaggcaggagaattgcttgaacccaggaggcggagattgcagtgagccgagatcgagtcgagccactgcactcca

SEQ ID NO: 226273 - DNA, 201 bp, Homo sapiens
gtgaactcctgacctcatgatccacccaccttggcctcccaaagtgctaagattacaggtgagagccattgcgtggccatagttaaccattttttttttttaataatgaaaggtacttaaggtaaagagagcattttctcctttttaagtagatgattgatagtggaaggaacctcgggacgtaattccatacaacacgta

SEQ ID NO: 226274 - DNA, 201 bp, Homo sapiens
aaaatacaaaattagctgggcgtggtggtgcatacctgtagtcccagctatttgggaggctgaggcaggagaattgcttgaacctgggaggtggaggttgyggtgagctgagatcacgccattgcactacagcctggacaacaatagcgaaactctgtctcaaaaaaaaaaaaaaaaaaaatagagtctgtgtctttccct

SEQ ID NO: 226275 - DNA, 201 bp, Homo sapiens
tatttgtatacttttagtgatgggactttctcgctttgatttttcaatatctcatttggctcagttatttgtaaagtcttcagtgttttttttttttttttaatgggcatcatgctgtctcaatatcattactgcacaactacaatcttaggaggaaactgtaagtaatcagttttctttcagaacaattgtaattcccac

SEQ ID NO: 226276 - DNA, 201 bp, Homo sapiens
tcctagtgacttgagtggctgatctaggaggatcatttgaggccaggagtttgagaccagcctgggcaacatagtgaaatcccatctcttaaaaaaaaaaagaaaaaaaaaaagaaacgcaaaaatgttagccgggcatagtggtgtgcacctatagtcccagctacttgggtggctgaggcaggaggatcactctgtgaa

SEQ ID NO: 226277 - DNA, 201 bp, Homo sapiens
aatttagacaaaaaaccttgtgtattcacaatgcaatttccaataacaccgaggtctgtgtattattttcagtagaaagtaattcaaaggacaaaaaaaaattgtaggtggacaatctaacagtgagaacatatgaataagatttcaaatgggttgagagttagttgaaggggaatactgagggatttaggtcaaagtctt

SEQ ID NO: 226278 - DNA, 201 bp, Homo sapiens
tgtccctaacagaggaatggataaagaaaatatgatacatatacacaatggagtactattcagctataaaaaagaatgatatcttgtcatttgcaacaacstggatggaactggaggtcattgtgttaagtgaaataagccaggcacagaaagacaaacatcacatgttctcacttctttgtgagaactaaaaatttaaaa

SEQ ID NO: 226279 - DNA, 201 bp, Homo sapiens
tacacgtccccttcctttccccagtaaatgatgggtttcctagacgttttatttctctgttctgagaaggagaaatggaaggaggagaaaggatggcgggrgagaggagtaatgtgtatatttagtcactatcaatgacattttagggccaatagggccaactgaaacagagttctgcccacagttagtgtttcattggtt

SEQ ID NO: 226280 - DNA, 201 bp, Homo sapiens
gtttcattggttagccttatgtgattaaatccttctaaatgcaattaaatccttatcaaccaaaagaagaaaaattatgttctctttagggaaataagtayagatatatcattttccttagatttgtgaactatttcttcagaaaaccaaagctgattcccaagagacaagaaaaacaggatttttttttccttctcaaca

SEQ ID NO: 226281 - DNA, 201 bp, Homo sapiens
cttatcaaccaaaagaagaaaaattatgttctctttagggaaataagtatagatatatcattttccttagatttgtgaactatttcttcagaaaaccaaasctgattcccaagagacaagaaaaacaggatttttttttccttctcaacatttacatgaaataacacctaagtactttaaagtgtgaacacatgtcccatg

SEQ ID NO: 226282 - DNA, 201 bp, Homo sapiens
ttgcctccaggtggtgaatgttgggtagaaattagctggagcagctgctccctcagtgtggcacagcacagaggtggtcagtgcacatcaggctgtgacartatgaccaggaatacatggagtgatacagagcagggttggttttgtgtcggcctgcctattgggaggactgtgccatgactgtgtagatacagccagaaa

SEQ ID NO: 226283 - DNA, 201 bp, Homo sapiens
aaaccaaacttggccacttagcaaccttgccaactctgtgcctcagtggctcctctgtaaaaggggagtgatcactgtacctcattcttaaaggtgtggtrgagagtaaatgagttgatattagaacggcagctgatgtctagaatgggcttactgcatggtagctctctttaatatttgatgtaatgatcatccttccat

SEQ ID NO: 226284 - DNA, 201 bp, Homo sapiens
gacccacatgtaaaaaattaaagctgtctgtattctgtgtttattgaatgtatttattttaccaaggtggatctgaataaacagtttctaggtttataatmttattgggattttttaaaactaaaaaattcgtttagttgaattatgcaatataaatccttagcaatatccccaaaaagtttttccaaagaagtaatattg

SEQ ID NO: 226285 - DNA, 201 bp, Homo sapiens
cgaaaggtaagtgaggaaagttcaagacaagtttgatagacatatttgttgaagacatttcttaatttcagattttttgatatgtgaatatgccagttacraacttctgaaaagagggttgtggagaggaggactataagaagtagtgttttctgaactattttgacctttggctattttacaggacttttgggttgctga

SEQ ID NO: 226286 - DNA, 201 bp, Homo sapiens
tgctgattgcaacatgagagaaggacatcttgtctggtgggcatatacatgtacatagcctttttaagagaagcttttgggtttgatatggcagtagattsccctgctcacctccccaaccccaatatatttgaacatttctgaaattgggatgcggtttacaatcattccatgtgttttcttgttttttaacttgcagga

SEQ ID NO: 226287 - DNA, 201 bp, Homo sapiens
gactttgcaagaagtacagtattaagtgaaaagcattgaaggagaggaaaaaggctattttgtggaaaatgtctttataatcagctttattgtttagaagrtctagaatctggttaaaaagcaaaatgagccatgctttttggcagcttattgtggtttcaaaccactgctaagcgcgttgtacctatgtatctgtggtag

SEQ ID NO: 226288 - DNA, 201 bp, Homo sapiens
tctttaggcctcaaattcacgattcagtcccctcatccgcaaaccactttcggacattttggctttcacgaaatgaatgaatcaagaatcgtcttagagtstcaaagatagtccttttgagtgcactattcaaatttaatctattccttgctgggttcgctgtcaggataatttgaccatttggagtctcatgtggatctt

SEQ ID NO: 226289 - DNA, 201 bp, Homo sapiens
ccattgagtttggcaaagtgaaggtcactgatgaccttgttaagagctgtttttgtacatgatctcactgaatctttacaactacgctgtacgatagctaytgttgtttttcctatattacagttgtgaagactgagactcagtaatgggaacctagccacacagttgtaagtggatcagctcagctttcaaaagtgaagc

SEQ ID NO: 226290 - DNA, 201 bp, Homo sapiens
aagacaaaaccctagaatagaattttgcaagacaactccatagaagaattacccttttgttttcaatacagtccatcaacattgatcctgaaaaaaaaaaagcatgttgaagagtatatccaacactattctatttctgctggtggactgtgttcctcatacaaaattctctcttggagttctagttgatggtgcctattt

SEQ ID NO: 226291 - DNA, 201 bp, Homo sapiens
gaggcagaggttgcagtgagctgagattgcgccactgcactccagcctgggcaacaagagcaaaacttggtcaccaaaaaaaaaaaaaaaaaaaaaaaaggcttaaaggtttgccttttatccagcctaaccagtggtggcaggatggctgcagaagctccagcagaagacattatttctgctgtagacattacaactctt

SEQ ID NO: 226292 - DNA, 201 bp, Homo sapiens
agaggcagaggttgcagtgagctgagattgcgccactgcactccagcctgggcaacaagagcaaaacttggtcaccaaaaaaaaaaaaaaaaaaaaaaaargcttaaaggtttgccttttatccagcctaaccagtggtggcaggatggctgcagaagctccagcagaagacattatttctgctgtagacattacaactct

SEQ ID NO: 226293 - DNA, 201 bp, Homo sapiens
tgactggcactttggtcaaagctaacagaaaccaaacaggtgggctcagctgagtgtagcacctctttctcccccacctcctcttttttttttttttttttctggtgaattgtgagtgaaagttacctttctttcactcggtttatcttaaggaactatgccatcgtagaaagaactttgaagaggccatgagaaaacaca

SEQ ID NO: 226294 - DNA, 201 bp, Homo sapiens
gagcagaatgataaaatgccagacctaaaatttgccctaaaatcagcctgtgtccttggtgtttttatttcataaacgtggccttaggctacttttggacstaattctatctggattggtgtccctaagactgggaagaacaaagaaaagcagtgcctgggtattgtgccccatggcaattgactgagagctgtgttttct

SEQ ID NO: 226295 - DNA, 201 bp, Homo sapiens
gaggcatcacaggttattaattgaaatctaataacagcttggaatattataagtttgcattaattggaaacagaattgtggatttgttggcaatatacctsttgtcatcttagataaatgattccttgatgggatataaagaggccatttttgccctgattggagtttctagcttctatatgttgattgtaatttaaactg

SEQ ID NO: 226296 - DNA, 201 bp, Homo sapiens
tagcaccacgaagagcatatttgcattaatgaggcatcacaggttattaattgaaatctaataacagcttggaatattataagtttgcattaattggaaayagaattgtggatttgttggcaatatacctcttgtcatcttagataaatgattccttgatgggatataaagaggccatttttgccctgattggagtttcta

SEQ ID NO: 226297 - DNA, 201 bp, Homo sapiens
tttcttaatgaaaattatcaggatcatattgtctgttgttcctacttcaggagaaatttgaatttgtattttaattaacctctctctctctctctctctctgtcacactcacacacatgctctcattctcactctcattcagctctgttttacaagtaacaatgtgttattggtttggaattgatttgggtgtcatatgtt

SEQ ID NO: 226298 - DNA, 201 bp, Homo sapiens
atttcttaatgaaaattatcaggatcatattgtctgttgttcctacttcaggagaaatttgaatttgtattttaattaacctctctctctctctctctctctgtcacactcacacacatgctctcattctcactctcattcagctctgttttacaagtaacaatgtgttattggtttggaattgatttgggtgtcatatgt

SEQ ID NO: 226299 - DNA, 201 bp, Homo sapiens
gcagatcaagagcactgagcacacctgtaggccaaataattaacctgacagctttataggattgctctccttctctctcacctcttttattttttttttttgaccaattactttcaataatgatggcaagtcagcatctccccctgactgcgttagagattggaatgtcaaaagggcctctgtaatgtcttctgtgtctta

SEQ ID NO: 226300 - DNA, 201 bp, Homo sapiens
gtggaaaatgtctttataatcagctttattgtttagaagatctagaatctggttaaaaagcaaaatgagccatgctttttggcagcttattgtggtttcawaccactgctaagcgcgttgtacctatgtatctgtggtagctattactgccccattttgaaagtgagggcattgaaactcaaagaggtgctgtaatttatc

SEQ ID NO: 226301 - DNA, 201 bp, Homo sapiens
ttctctgaaagcagcctagtcctaaaactcacttctccccactgaccaatgtttattcaaataattttcctccatttgggcatgcagctactaccacaaakcaagcagggaagtcattctcaggatccttaattgcagaagctactcatttgttttagttattttcccatgtaggttgcataaccttgaggaaagggcatc

SEQ ID NO: 226302 - DNA, 201 bp, Homo sapiens
ttgaggaaagggcatctagtatattatattgttcccataatagttaaatgactctttttaggaatcctgataatatccataataattattattcatactaragcaaataaacaagcaacccactatgtgcctatctctgtgctcaacaaaacattatcacattttgatcctcacactaaactggttttgttctgtaattgg

SEQ ID NO: 226303 - DNA, 201 bp, Homo sapiens
aataaacaagcaacccactatgtgcctatctctgtgctcaacaaaacattatcacattttgatcctcacactaaactggttttgttctgtaattggttcakttggttggttttgaagacgtgcatgtaggcaagttgctttcatcttgttttatgatgaaggctcatcagtcaccttgtaaatggccgtaagattgctgag

SEQ ID NO: 226304 - DNA, 201 bp, Homo sapiens
cgtgcatgtaggcaagttgctttcatcttgttttatgatgaaggctcatcagtcaccttgtaaatggccgtaagattgctgagctgaagctcaatgatggrgggaaaagacctcaaagtctaataatggatgagggcccttgttatctaagacattgactagaaattgagttcagtctttggtcaagaagagtcttgtctg

SEQ ID NO: 226305 - DNA, 201 bp, Homo sapiens
ccctacctcacccaccccatcttaatttgtattttgaatttgagtattgttttttaaaaataaggaaatttaaaatatatatattctcaaggtactcataytataatatagtcactaaagacattgagttcaaagttgggttcatatcagagctctgctgtttgatagtaaacttgggtttattatggtaatattaaactt

SEQ ID NO: 226306 - DNA, 201 bp, Homo sapiens
tatataattagatatatattgtcacatatatatgcatgtgtttaaatcagatatatctcctgagtggagtctgtatttcccatacactatattttctatgmacctccatccatatatcatacttcaagctgtgttctgctagacaatttaaagccctacaaatttagaaagtaatgttttaataaaaatgcatgctattat

SEQ ID NO: 226307 - DNA, 201 bp, Homo sapiens
ggtactcatactataatatagtcactaaagacattgagttcaaagttgggttcatatcagagctctgctgtttgatagtaaacttgggtttattatggtawtattaaacttgggtaatacccaagtttgttatggtaaaacttgcgtaagtgacttaaaaatctctgtgcctcagtttccttatctttacaaccctggata

SEQ ID NO: 226308 - DNA, 201 bp, Homo sapiens
tatctccctctctcccctgaaacttttgtctgttcggaatgagctactccaggaagatttattgcttttcctcagtgttcttattagcatgctttatatarcttattgtgacacttatgataatacaaaaagtaataaaaatacaattattatcattcggtagctgctgatattcactgggcatatactatgtgccagatt

SEQ ID NO: 226309 - DNA, 201 bp, Homo sapiens
gctatataaccaggaaaggacggaattagctttctctgagctggttttagaatgttcttgcctgaaactgtaataatgaaatgatcctgtgatcctggatraatcctgggttcttccacagtcttccttttatagctctgtgtagaacaaacactgaaaaaaagtgcaaatacgtttgatcgtgagtgtgagaatattgtt

SEQ ID NO: 226310 - DNA, 201 bp, Homo sapiens
aatacaaaaagtaataaaaatacaattattatcattcggtagctgctgatattcactgggcatatactatgtgccagatttgcatcgtcatctcatttgawcctcacaacttgtgagggagagatcttcatggcccccattttccaggtggtgaagagattaacttagagctgaaatacttacatagagtcagggctagga

SEQ ID NO: 226311 - DNA, 201 bp, Homo sapiens
aaatcatgttgtttgatgtatttaatattttcttgactgtgtcctgctgtacataatcagtttcttttactcggcattgtttttgagatacagctacatgrataaatgaagccctcattctttcatttttacctcctgtattgtattctagtccctgagtggaagacaaattaatttcctattcctttttaaaggttgttt

SEQ ID NO: 226312 - DNA, 201 bp, Homo sapiens
tgattaaagagtatctttatgtctagaaagacaagcattcctttcttttaatcacattttggctgttctttaccttgactctttcaaatgatttttttccrtcttgtcaaattctgtgggaaaaggccgtgaaattttttaaaggaatggcattgaatacatggattcatttatggaaatttgacatactgatgctgttgg

SEQ ID NO: 226313 - DNA, 201 bp, Homo sapiens
gcatgatctcagctcactgcaacctccacctcccaaattcaagcaattctcctgactcagcctcccaagtagctgggactataggcacatgccactatgcbcggctaatttttttttttttttttttgtatttttagtggagacggggtttcactatgttggccaggatggtctcgatgtcctgaccttatgatctaccca

SEQ ID NO: 226314 - DNA, 201 bp, Homo sapiens
gtttcaatttgcaatatttatgggttgtcaaaacaaaagtagagatttttttctttatgtccatgtctaaaaatgtcattttggaaatggcaataaaatasagcattaaactgaaattaatatcatgatgttgaaggtgtgacctaattaaaatgcaaatgtaagcacacttctttaaaattgacattgcagcttatatat

SEQ ID NO: 226315 - DNA, 201 bp, Homo sapiens
gaccaacatggagaaaccccgtctctactaaaaatacaaaaattagccaggcatgatggtgggcgcctgtaatctcaattacttgggagactgaggcaggmgaatcgcttgaacctgggaggtggcggttgcagtgagccgagatcacaccattgcactccagcctgggcaacagagtgagactccatctcaaaaaaaaaa

SEQ ID NO: 226316 - DNA, 201 bp, Homo sapiens
aacacgtatcataggatcttatctgttgatgtggttgtaagcaactctttgttaatgacaaacattatactaatataatgtttttattagaatgctgaacrcttctttctagagtaattagcagtacatttgagttgacagttgtgtgttgctttctaacgtctcttttattatctctaggcgtttttttttagttgcaat

SEQ ID NO: 226317 - DNA, 201 bp, Homo sapiens
ggttggggatccctggatagaatacccccctcctaccaaagacctccatgtcgtaatccccagaaactgtggctgtgttaccttatatgcagtggggaatyaaggttgcagatggaattgaggttgctcaatagctgatgttaaaataggaagattatcctagactgtccaggtgggctcagtgtaatctcaaggattctt

SEQ ID NO: 226318 - DNA, 201 bp, Homo sapiens
aagtggacatgctttccaagtcatctgtcacttgcgaatagcaaaatagcagatatagttaacatttcattgtaatttctaagtggtaggctaaggcaatraacaaatgttactgggctttttacaaattccatttgagatgtgatcataggaacagtataatgaatttattaagattatgaatgtggattcagtctaaca

SEQ ID NO: 226319 - DNA, 201 bp, Homo sapiens
tctgtcacttgcgaatagcaaaatagcagatatagttaacatttcattgtaatttctaagtggtaggctaaggcaataaacaaatgttactgggctttttrcaaattccatttgagatgtgatcataggaacagtataatgaatttattaagattatgaatgtggattcagtctaacagagatgtgaatcctaattcatct

SEQ ID NO: 226320 - DNA, 201 bp, Homo sapiens
gcatcacctagggtgtttgttaaaatggagattccggactctgccatgatttctcactctaaggattctgaattcaaaagttgagcgtaggagccaggaartggaactcaaaacaaaaagccagccactcccaaataattgtgacttccatctgtgagtcaactgtgagaggcattagcttagaccgtcaagatttggaga

SEQ ID NO: 226321 - DNA, 201 bp, Homo sapiens
ttgtctagagatccagagaagaacctcaggtaatctctgtcctgggaagtctacagtataggagaatacaaatgagaaaatcattgactgcaaaacagagrgaaaggtgtgatggttttctcttatgttttttccatgccatttgcaattttgactatctatagacatttgatattatatccttactggtacatttttgta

SEQ ID NO: 226322 - DNA, 201 bp, Homo sapiens
ggcttctggagttagcaaaatccctgagatagacagctgctccacttggaacatcctcaggaacaaacccggatttgctggtttcttagaaaatcattagygcccaggattgctccgccatgtcctttttctttgtctattctgaattctcacatcttccatttcatcttgtttttctcatatcctgtcccaggcccagta

SEQ ID NO: 226323 - DNA, 201 bp, Homo sapiens
ttctgaattctcacatcttccatttcatcttgtttttctcatatcctgtcccaggcccagtattatttcctgtcctctgtcccagtgatatttcatatgcsttgcaaaccatatttattttcccaaactaaataatattcctctccccatagattttttcttatcttactaattcattagattgttattttagtgcttaaa

SEQ ID NO: 226324 - DNA, 201 bp, Homo sapiens
aatggaaacaatcttattgttacattacatttggttattccaagttgagagctgttggtgattatacaaacatagaacaatagatgctgggcatgatcacstgaggttgggagtttgagaccagcctggccaacatggtggaaccccgtctgtactaaaaatgcaaaaaaaaattagccgggcatagtggcgtgctcctgt

SEQ ID NO: 226325 - DNA, 201 bp, Homo sapiens
gccttgaactaaattcgcattcttcagaaaccaagttgagccagtgaatgcaggagtggagacattgtgtggcctccattctgagagtgctggtgggaacrcagcattgctcaagttaagacgtgataaatccctgtcacaaggttgacttgggtcttcctcactgggacacagggccagaaaaatgaaaccttcaggtga

SEQ ID NO: 226326 - DNA, 201 bp, Homo sapiens
accagaaaatatttagagaagacaatatagtgggaaatcaacaaaaacagcttgaaaccgtgccttgaactaaattcgcattcttcagaaaccaagttgarccagtgaatgcaggagtggagacattgtgtggcctccattctgagagtgctggtgggaacacagcattgctcaagttaagacgtgataaatccctgtcac

SEQ ID NO: 226327 - DNA, 201 bp, Homo sapiens
agaatattactttaacttcattatgtttactttccttgtatttggtatgagtgagggaaaataatccaaacatttgaattccttgtctttattttttagtygaaaaagcaacggagataaatgtacttgaaatgcatatatttaataaaaatattaaattgataatttaaaggaactcaggcctaaaatgattactatcat

SEQ ID NO: 226328 - DNA, 201 bp, Homo sapiens
taatgttactattattgccattattggtcattacttggctgggattttatccagtttgggagctaaattcttctttccgttgacaaagaacaattaattgmcttcagataatttaggcttctcatgtccccaatatgtgatttgtcaagctaagaatattactttaacttcattatgtttactttccttgtatttggtatg

SEQ ID NO: 226329 - DNA, 201 bp, Homo sapiens
tcaaatgaaaaggtaactttcaggtaatacaggaagtgaggcctctggaagtgaaaagttattaggctgaagttttgtaggtattaggaaaactaccttcyttggttgtcatcaattactagttaatagtcttgagaaattaagagtctactgctagttagcttcttcaagaatttttaaagaaagccttggtagtataga

SEQ ID NO: 226330 - DNA, 201 bp, Homo sapiens
catcctctaggttccctccccacacaccctccacccccaacaggccctgttgtgtgttgttcccctccctgtgtccttgtgttctcattgttcaactcccscttatgagtgagaacatgcggtatttggtgttctgttcctgtgttagtttgctgaggatgatggcttccagcttcatccatgtccctgcaaatgacatga

SEQ ID NO: 226331 - DNA, 201 bp, Homo sapiens
ttccttggttgtcatcaattactagttaatagtcttgagaaattaagagtctactgctagttagcttcttcaagaatttttaaagaaagccttggtagtayagagggaacccccccaccaattttttttttctgtcgtgtatgtttttccttcctaacagcatctttatttctttttgaggtaattaggctagtggaactg

SEQ ID NO: 226332 - DNA, 201 bp, Homo sapiens
tcctcatctctgctattcatagcgtttttatcagaatgtcattctattagaagtccatagtgatggtattttttcacagcaatgaggctttgagctggctytatcgtgatttccctgttctgagaagctgagtgggttgtcagcatcgtgtgatcagcctgtcacttaagaatttatgtcacgatatcagggtgggttgag

SEQ ID NO: 226333 - DNA, 201 bp, Homo sapiens
tagcaaatatttaaaaactgcaacatctatgccttctttctacctctctctggattgcttcccagaattagcaactttctattctgatatttctggtgttyacctctctctttctaaataatgtacttatattattttttcctaatttatcaattttagcaatagctctctgatcctttccactcttaccacttctggtcc

SEQ ID NO: 226334 - DNA, 201 bp, Homo sapiens
gagatattatatcttttttttttaaaagcaagttttggtaaattgaaaagctttatagtagcctcagtgtataaagaaataccatattgtacttatatgcrttacaaattaccttttacattttatttttatttttatcaaagcagtgtatctacattgtttaaataaaacagcattaaatagcaaatatttaaaaactgc

SEQ ID NO: 226335 - DNA, 201 bp, Homo sapiens
agttggagatattatatcttttttttttaaaagcaagttttggtaaattgaaaagctttatagtagcctcagtgtataaagaaataccatattgtacttayatgcattacaaattaccttttacattttatttttatttttatcaaagcagtgtatctacattgtttaaataaaacagcattaaatagcaaatatttaaaa

SEQ ID NO: 226336 - DNA, 201 bp, Homo sapiens
tggtcttcccttaaccctgccttcaccccaggtgaagatgtcatctccttcctgctgtgaccttgattgtacaaaggaactttgttctttatatatttttmcaccatcctcagcccaattcagcaaatatctttttaggatttagagtgtgccaggtaaaaagtaagtctttattgtacacttttaagaaatggacatttt

SEQ ID NO: 226337 - DNA, 201 bp, Homo sapiens
tctcttttaatgaagaaaatcaaaataagcaagaattagggggaaacagaagataaaaattaatacaattttaaagtcccaaagcatttgtaaatgttttyatttttaaattatcacctgtcattctttagacaaaagaatgatacacgtaattcaaacaacctgtataaataaatcccgtaacctcttagcttggagcaa

SEQ ID NO: 226338 - DNA, 201 bp, Homo sapiens
acgattccctcaatataaattataatggccccaaagtgaaaagcccccaaacatttaactttatctctcttttaatgaagaaaatcaaaataagcaagaaktagggggaaacagaagataaaaattaatacaattttaaagtcccaaagcatttgtaaatgtttttatttttaaattatcacctgtcattctttagacaaa

SEQ ID NO: 226339 - DNA, 201 bp, Homo sapiens
ttgaaattcagaattaaaaggagtcatgaagtcaggaaaagtgctaggctaccaggtggctacagtttatattgaggcacacacatttagatttctcccaytttcctgtgtcatgctgacttcacctagagaaagaaaagcatccagtgtaaatgtccccattcccccatcttttcctgagatggacccaataaatgagtg

SEQ ID NO: 226340 - DNA, 201 bp, Homo sapiens
ccctcatatgttttggtgggattgtaggatggtgcaaccacttggggaaaaagtttgacagttcttcaaaatgttaaatatagagttaccatataacccarcaattctataccttcctaggtatgtacccaagagaattaaaaacatatccacacaaaaacttgtacatgaatgttcatagtagcattattcataattgcc

SEQ ID NO: 226341 - DNA, 201 bp, Homo sapiens
acgcgccgggccaacgtttctttctggggtgattagaatgttctaaaattggattgtagtgattgttacacaactctgtggatatactaaaaaactttgartcacatacacttgattggtgaattggatggtatgtgagttatatctcaataaaactatttttaaaacaatagcaaaaaatgaaaagataaatatattaga

SEQ ID NO: 226342 - DNA, 201 bp, Homo sapiens
catgtattattgtaatttaaaaagcagttggtatcttttccctcaaacttgtatcttcacaatttgtaaggctattattaattttgtcatattgtggtaarggaagggtaacattccatgcaggtaagaaacaaatctgaaatttactaaagataaaaaaaaattccctggtaaagaaacacaattttaaaatacactgta

SEQ ID NO: 226343 - DNA, 201 bp, Homo sapiens
tgacctccgtttttcactgaatcagggaaacacaaagcagagaacattggttcttgatttctttctttctctccttcctcaacccaacccactcaggctakaaaaaagaagtggaagctacatcgtaagagatagtttctgtgtcctgtttctgagacacattctcattgcttgggtggagtggctgggaaggatgtttag

SEQ ID NO: 226344 - DNA, 201 bp, Homo sapiens
ggtataaatctacctaactagcagttggatgggatctgatgagggttggccccagagccaagccacattagccgagttagaaggatgtgctgatttcaacytcaagccacggggcccagcagagaactgctgggaagcaatagcatggcctgttgtgccaccgtcatttttgtcagcgccaccatcatcaccattaagcct

SEQ ID NO: 226345 - DNA, 201 bp, Homo sapiens
ttagaaggatgtgctgatttcaacttcaagccacggggcccagcagagaactgctgggaagcaatagcatggcctgttgtgccaccgtcatttttgtcagmgccaccatcatcaccattaagcctttattaagtgccagtgtgtggagctcccttaggtgtcattgcagtctgacaggcagctgtgtgttttaaatacgag

SEQ ID NO: 226346 - DNA, 201 bp, Homo sapiens
gatttagccatatgaagaagggacggaaacaagggcattacaaatagtgagaagagtgtgtaccaaaaaaaaaaaaaaaaaaaaaaagagtgaaacctatkatacgttttagaaaaggcaaactattcagtgtgatggggaagaaggaaggagcagggatatgatataaaactggagttcttggggactgtgccacaaaga

SEQ ID NO: 226347 - DNA, 201 bp, Homo sapiens
aatatagcattataaactgaggtcaatgctgtggaggaaaagtccaatgtgctttgtgagcatgtccagaaggacctaatttattcttggggtttgagacrtcttcctttagaaagtggcatttgatctgagatgtaaaggatgaatatgaatgaattaggagacaggaactctttcctcttcatcactatgcactatagt

SEQ ID NO: 226348 - DNA, 201 bp, Homo sapiens
gttttgtacataaattcacaaaggtctttgctaactgcttgggcatgctctttcgcacagatttttcatcattttcaccctgggagcatccagtctccctrtgagcatttttttttctcccacaattttatgttgtattttttcttcctgtttctggtcttcctctttggatttctggcctttctccttgctttgccctcc

SEQ ID NO: 226349 - DNA, 201 bp, Homo sapiens
cttttaagataatacaacagaatccttaactaaataaaattattggaaggccttaataaaattattggaagctttctttaaagttggctcattatattttytgtactgtaaactagttggtaaatgtaatttcattataattttgtttaatgactgggttgatattatgattcatcactcatttacttaattagtaacact

SEQ ID NO: 226350 - DNA, 201 bp, Homo sapiens
caaattatggtgctttgaaagatactttaactttctgtgtttgtatcctcatctttatctttaaattgatacctctctcatactatgtaccatagtaactrcctctagtgtgagagaatgaatttaaaatccacttagtgtgattttaatattaatgttattattaccacttattttagaatttgtaggaacgaagagtga

SEQ ID NO: 226351 - DNA, 201 bp, Homo sapiens
ttagaacacctagaatctgtattgggactccttttatgtcactcatggattccacctcatgatattttttcttcacttttatctcttctcccagatcctgwgctccttgaggacaccatctgtgtttgattaaccttgaattcccccagtatctggcatgaatgcagaaatgtggttatacatgggaatcacccagaaact

SEQ ID NO: 226352 - DNA, 201 bp, Homo sapiens
atggtgctttgaaagatactttaactttctgtgtttgtatcctcatctttatctttaaattgatacctctctcatactatgtaccatagtaactacctctmgtgtgagagaatgaatttaaaatccacttagtgtgattttaatattaatgttattattaccacttattttagaatttgtaggaacgaagagtgattttta

SEQ ID NO: 226353 - DNA, 201 bp, Homo sapiens
aattgacctcatagagctgaaaaatacactatagtaatttcataatgcaatcacaagtattaatagtagaatagaccaagcagaggaaacaatttcagagyttgaagactggctttctgaaacaagacagtcagataatagagaaaaaagaatgagaaagaatgaacaaaacctctgagaaatatgggattatgtgaagag

SEQ ID NO: 226354 - DNA, 201 bp, Homo sapiens
tacactatagtaatttcataatgcaatcacaagtattaatagtagaatagaccaagcagaggaaacaatttcagagtttgaagactggctttctgaaacamgacagtcagataatagagaaaaaagaatgagaaagaatgaacaaaacctctgagaaatatgggattatgtgaagagaccaaatctgtgattctttggtat

SEQ ID NO: 226355 - DNA, 201 bp, Homo sapiens
gagaggggacaggtgtcatgagcacagtaaatgtggtggcagcgaaaaagcagaatggcactgagggcatcctgggtggggataggttagaatgagagatrgggaaagatgaatttttttttttaaaacagatgctttaaggttggggcaatggatgggtgaggaagaattttaggctgtgctgctgtgcaatgcactggc

SEQ ID NO: 226356 - DNA, 201 bp, Homo sapiens
taaatgtggtggcagcgaaaaagcagaatggcactgagggcatcctgggtggggataggttagaatgagagatagggaaagatgaatttttttttttaaarcagatgctttaaggttggggcaatggatgggtgaggaagaattttaggctgtgctgctgtgcaatgcactggcaaatgcctacagagtcattcttcgtgg

SEQ ID NO: 226357 - DNA, 201 bp, Homo sapiens
tgggtgaggaagaattttaggctgtgctgctgtgcaatgcactggcaaatgcctacagagtcattcttcgtggatatgttattgggcagatgcaagtctcraggcaaccctgctttatttgggttacctgtgcataaaatcctgtttgcacaggttctgagaggaatgaaggagattgaaaaggcccttgcggagtctgta

SEQ ID NO: 226358 - DNA, 201 bp, Homo sapiens
gtattcaatttttttttactgaagtatacatgctacaacatggatgagcattaaaaacatgctaagtacaataagccattacaaaaaaggtcacctattakaagattccatttatatgaaatgcctgaatgggcaaatccatagagattgaaagcagatgagtagctgccaggcactggaggaagaaggaatcggggaatg

SEQ ID NO: 226359 - DNA, 201 bp, Homo sapiens
attatgtggagaagaaactagacaaagtgaaacctcctttgcaaaaattatgacggtgaaagagatctgacctaaccgcatctaacttgcctctaacctcyaagctgtcctcgttcattcctgtgcgtaggccagactaactttgggaggatcttagtttatagtgtaactttggaacaaagatgataacaaccctttccc

SEQ ID NO: 226360 - DNA, 201 bp, Homo sapiens
tcagtaataataaaactctggtctcctgttcagccggctctgcatgaattaaattctttctctgttgcaattcctctctctggataaaccatctgggcagyaggcaaaatgaacctgttgggtggttacaaaaggacaaggggatttgggcttctggggtagggggataaactgtgaaaaaatgactaggaaaatgtatgg

SEQ ID NO: 226361 - DNA, 201 bp, Homo sapiens
gtttagtaaggtttgtttatgcaggtaagaagtctctctggtagggaaaggggaaaacctttatttatagaaaatatgtcacctttacaaaggaaaatctrtgccctgcttttagctagatggaggagggcagaggtgtttttttttttgttgttgttttttctgaatctgctgttcttaattgccttcaactcaaataac

SEQ ID NO: 226362 - DNA, 201 bp, Homo sapiens
aaaggggaaaacctttatttatagaaaatatgtcacctttacaaaggaaaatctatgccctgcttttagctagatggaggagggcagaggtgttttttttkttgttgttgttttttctgaatctgctgttcttaattgccttcaactcaaataacccttatgccaaagtggcatattttggggtagcatattctgatcccc

SEQ ID NO: 226363 - DNA, 201 bp, Homo sapiens
ctggtccatgggctacacttgaaataaaaagatttcagatttttgtggcttctactaagttgccattctgttttaatgtaatgagtagtattgtttagaabttatatatatatatatatatatatatatatatatatatatatatggccagttgtttttctttgcagttttatttctctttgtaaaatggacataatagta

SEQ ID NO: 226364 - DNA, 201 bp, Homo sapiens
tggcttctactaagttgccattctgttttaatgtaatgagtagtattgtttagaatttatatatatatatatatatatatatatatatatatatatatatrgccagttgtttttctttgcagttttatttctctttgtaaaatggacataatagtacccacttcgtagattgttatgaattaaatgggatgatctatataa

SEQ ID NO: 226365 - DNA, 201 bp, Homo sapiens
atatatatatatatatatatatatatatggccagttgtttttctttgcagttttatttctctttgtaaaatggacataatagtacccacttcgtagattgytatgaattaaatgggatgatctatataaaatatcagcactgccctcatggagtctagtgaaggggacagataacacataggcaaacacctgtaataataa

SEQ ID NO: 226366 - DNA, 201 bp, Homo sapiens
ggcaaagcactggcaagcccagtggtaggcagatcaagagcactgagcacacctgtaggccaaataattaacctgacagctttataggattgctctccttstctctcacctcttttattttttttttttgaccaattactttcaataatgatggcaagtcagcatctccccctgactgcgttagagattggaatgtcaaaa

SEQ ID NO: 226367 - DNA, 201 bp, Homo sapiens
ttataacatataatataatatactatatattataacaaaaatatattattatagtatatgttataatacatatagtaaatatagtatattgttacatactrtatttatatcttgacttagcactttcctggctctttataccacagttttctcatctaaaaatggggatagtaagagaacttacctcattggttagttgtg

SEQ ID NO: 226368 - DNA, 201 bp, Homo sapiens
agaccctacatagacaggggccccactgggaatcaatttattttctgtcggtgttataaccagatggcattgaatgaactttatagcaatgcaagaatggrctaatgcaagaacgacgttgaggacctgtagtgcagagctgcaaagtgttcaggttgttccctgcccttgatggcctgatgactagtgtctccttgcctc

SEQ ID NO: 226369 - DNA, 201 bp, Homo sapiens
gcagtgcctgggtattgtgccccatggcaattgactgagagctgtgttttctagcattaattaatgaagaattttgtagaaaccaatattcatgataaacytcaaaatagaattttagtgtaatgactggcactttggtcaaagctaacagaaaccaaacaggtgggctcagctgagtgtagcacctctttctcccccacc

SEQ ID NO: 226370 - DNA, 201 bp, Homo sapiens
ttgactgcccagagaaaactcatgcaagcatggggagaatgttcagaccctacatagacaggggccccactgggaatcaatttattttctgtcggtgttayaaccagatggcattgaatgaactttatagcaatgcaagaatgggctaatgcaagaacgacgttgaggacctgtagtgcagagctgcaaagtgttcaggtt

SEQ ID NO: 226371 - DNA, 201 bp, Homo sapiens
aggcaggagaattgcttgaacccgggaggcagagtgagccgagatcatatcgttgcattccagcctgggcgataagaatgagattccatgtcaataaaatraaataaaataaaataaaatagtaacataagcatggttaccattttgggtctagtcagagccacagcttgaaaacaaattaccatgtaggtagtcatttca

SEQ ID NO: 226372 - DNA, 201 bp, Homo sapiens
gggagaaaacttgactgcccagagaaaactcatgcaagcatggggagaatgttcagaccctacatagacaggggccccactgggaatcaatttattttctrtcggtgttataaccagatggcattgaatgaactttatagcaatgcaagaatgggctaatgcaagaacgacgttgaggacctgtagtgcagagctgcaaag

SEQ ID NO: 226373 - DNA, 201 bp, Homo sapiens
actataccatcaaacttctaaatagaccaaaacactttgaatattttacattgaaatctatgcgaactatatacacatttaagaaagagtaataaaaacargtaagataattatttatattccagttgagggtctcggatggctgcagcatgtcccagcagctcagggtgcaaggtgggaactcaccctggacaggacatc

SEQ ID NO: 226374 - DNA, 201 bp, Homo sapiens
aacttacctagtacagaaatcaaagaaatgaagtctctaccaaatctaccaatgcaagtgataaaggctgtatctacttggtggaaatgaattacaacatktaattttgtgcgtatgtgtgtgtgtacatctgtgtgtgtttgattgaattacttagcattttaccagatgctccagagccttattgtttttgtcatcatt

SEQ ID NO: 226375 - DNA, 201 bp, Homo sapiens
gggacataaagcaaagcaacatataaccaatttcaccatagactaattgatataaataagagttaagttcctatggcatatttctggtcacaactataccrtcaaacttctaaatagaccaaaacactttgaatattttacattgaaatctatgcgaactatatacacatttaagaaagagtaataaaaacaggtaagata

SEQ ID NO: 226376 - DNA, 201 bp, Homo sapiens
tgccatattttggggtagtgtgtcaagaaccccatcacaacaaatattgtttcagccttctgtgtgccagacacctaactgggtgcaatggtatgtaaaamcggatatggtccctaccatcagcgagcattattctagtgaggaaaagagacattagtcagaaaatccagacagataaatgtcaatggtgttaagtgcaag

SEQ ID NO: 226377 - DNA, 201 bp, Homo sapiens
cacctaactgggtgcaatggtatgtaaaaccggatatggtccctaccatcagcgagcattattctagtgaggaaaagagacattagtcagaaaatccagayagataaatgtcaatggtgttaagtgcaagaactataacagggagatctaaacttcttggcagagaggaggggtagttaggcaatgcttgtttatggaggc

SEQ ID NO: 226378 - DNA, 201 bp, Homo sapiens
gccacagtgtaactttaaaaaaggcatttcactgttccccatggtagtcagtctacacaaataatgagaggacatgactaccattatttttcttccttctrttgttttaaaatatacttatctcttccactgtatgttcctgtgttttattgcatgggaaaaggtaataagtgtcatcaataacagccatcttaacatgct

SEQ ID NO: 226379 - DNA, 201 bp, Homo sapiens
atgtgtatccaggccgcccctacagttgagtcttctgtgcactgaatgaagatgcatatctgaggtgtgggtgggggttgaaatgcagcttgtgcaccctrttgtgggacttcgtctctgcagggaggggaacttttataatttgccttttatttacagattgtatcaaacgcacacctaacatattctacctattttcag

SEQ ID NO: 226380 - DNA, 201 bp, Homo sapiens
tcacataggacatgcctaattccttcagcaatgagttgtgacaacacatgtgaaatgttgtccaacagagaagcttgttagggcatcagcacccaaggctkttattgggggctggtcacgtagatactctctggctagcacataccaacattttagactcccagaaggaaagcaggcatttagcatttcattatttgaaca

SEQ ID NO: 226381 - DNA, 201 bp, Homo sapiens
ggcaaccttcccaaatccatgttcccagatgccagccaagagtcaactttgcaagcaggtctatttctcttatgtctcttttatcatcataaagtgaagtytgtagatattacctacctacctgcaaacttttttaaattctaaaaatagcaacctcaggccttctatggtaactcttttctgcacagcataatcactgac

SEQ ID NO: 226382 - DNA, 201 bp, Homo sapiens
ctcttactggcttggaagaatattcaatgaggcagaaccttcctgaagagagcggaaatgatggcagggatattgcctgggagtattgcctttggcagtgscttggcaggggaagagggcctgtcgggtcctccctttgagggggtgagatgatgtgaactagcttttatttaaaagggaatagataagctattgaattgg

SEQ ID NO: 226383 - DNA, 201 bp, Homo sapiens
aatattcaatgaggcagaaccttcctgaagagagcggaaatgatggcagggatattgcctgggagtattgcctttggcagtgccttggcaggggaagaggkcctgtcgggtcctccctttgagggggtgagatgatgtgaactagcttttatttaaaagggaatagataagctattgaattggagcgcatctgagggcttt

SEQ ID NO: 226384 - DNA, 201 bp, Homo sapiens
ggtattgtattgaagataaaggtacgatttagccatgatttctatacttctgggactcacccaccaaaaggcagcttttctgacagattgttgccacattyaactttgccttggtgcattcaaaaattcttttgaaatcctagaggaagtaacaattaaactgatccttgagcagaattagacttgagtgaggaagggaag

SEQ ID NO: 226385 - DNA, 201 bp, Homo sapiens
tttgagtggctattcctgactattgtctagatatctatactctggaacaagaacttttgggttctgacttgctcgcattttggatagccaggacacacacaaacacacacacacacacacacacacacacacacacacatttttagatttacacaaagatgtacacaaagatgatagaatctgcttgtattagtttattca

SEQ ID NO: 226386 - DNA, 201 bp, Homo sapiens
gagtggctattcctgactattgtctagatatctatactctggaacaagaacttttgggttctgacttgctcgcattttggatagccaggacacacacaaacacacacacacacacacacacacacacacacacacatttttagatttacacaaagatgtacacaaagatgatagaatctgcttgtattagtttattcaaca

SEQ ID NO: 226387 - DNA, 201 bp, Homo sapiens
tgcaataaacatacgtgtgcatgtgtctttatagcagcatgatttatagtcctttgggtatatacgcagtaatggcatggctgggtcaaatggtatttctrgttctagatccctgaggaatcgccacactgacttccacaatggttgaactagtttacagtcccaccaacagtgtaaaagtgttcctatttctccacaacc

SEQ ID NO: 226388 - DNA, 201 bp, Homo sapiens
ggtttttatggttttaggtctaatgtttaagtctttaatgcatcttgaattaatttgtataagatgtaaggaagggatccagtttcagctttctacatatsgctagctagttttcccagcaccatttattaaatagggaatcctttccccattgcttgtttttgtcaggtttgtcaaagatcacatagttgcagatatgcg

SEQ ID NO: 226389 - DNA, 201 bp, Homo sapiens
tatgaactttaaagtagtttattccaattctgtgaagaaagtcattggtagcttgatggggatggcattgaatctataaattaccttgggcagtatggccrttttcatgatattgattcttcctacccatgagcatagaatgttcttccatttgtttgtatcgtcttttatttcattgagcagtggtttgtagttctcctt

SEQ ID NO: 226390 - DNA, 201 bp, Homo sapiens
acacacatatatatgtgtgtatatacacacacacacacacacacacaaacacacacacacacacacacccctattcagtaagactgtattttgaacaaatrtgccagggcttactgatgccctttcaagtaatttttggaaaggaaataatttttcaacaatgtgggtgtttctttatttttgtatatgatttcattattt

SEQ ID NO: 226391 - DNA, 201 bp, Homo sapiens
gtatcgtcttttatttcattgagcagtggtttgtagttctccttgaagaggtccttcatgtcccttgtaagttggattcctaggagcaattgtgaatgggwgttcactcatgatgaggctttctgtttgtctgttattggtgtataagaatgcttgtgatttttgtacattgattttgtatcctgagactttgctgaagtt

SEQ ID NO: 226392 - DNA, 201 bp, Homo sapiens
cacaaacacacacacacacacacacccctattcagtaagactgtattttgaacaaatatgccagggcttactgatgccctttcaagtaatttttggaaagraaataatttttcaacaatgtgggtgtttctttatttttgtatatgatttcattatttataggtcacatgcccagtgttttcatttttgaagttgtataaa

SEQ ID NO: 226393 - DNA, 201 bp, Homo sapiens
gagttcactcatgatgaggctttctgtttgtctgttattggtgtataagaatgcttgtgatttttgtacattgattttgtatcctgagactttgctgaagytgcttatcagcttaaggagattttgggctgaggtgatggggttttctagatatacaatcatgtcatctgcaaacagggacaatttgtccacttcctcttt

SEQ ID NO: 226394 - DNA, 201 bp, Homo sapiens
gggaatgcttccagtttttgcccattcagtatgatattggctgtgggtttgtcatagatagctcttattattttgagatatgtcccatcaatacctaattyattgagagtttttagcatgaagagttgttgaattttgtcaaaggccttttctgcatctattgaggtaatcatgtggtttttgtctttggctctgtttata

SEQ ID NO: 226395 - DNA, 201 bp, Homo sapiens
ctgtattttgaacaaatatgccagggcttactgatgccctttcaagtaatttttggaaaggaaataatttttcaacaatgtgggtgtttctttatttttgwatatgatttcattatttataggtcacatgcccagtgttttcatttttgaagttgtataaaaatacagatcagttgatatgagcatgtgatgcagaatctg

SEQ ID NO: 226396 - DNA, 201 bp, Homo sapiens
tattattttgagatatgtcccatcaatacctaattcattgagagtttttagcatgaagagttgttgaattttgtcaaaggccttttctgcatctattgagrtaatcatgtggtttttgtctttggctctgtttatatgctggattacatttactgatttgcatacattggaccagccttgcatcccagggatgaagcccac

SEQ ID NO: 226397 - DNA, 201 bp, Homo sapiens
caaaggccttttctgcatctattgaggtaatcatgtggtttttgtctttggctctgtttatatgctggattacatttactgatttgcatacattggaccakccttgcatcccagggatgaagcccacttgatcatggtggataagctttgtgatgtgctgctggattcggtttgccagtattttattgaggatatttgcat

SEQ ID NO: 226398 - DNA, 201 bp, Homo sapiens
aatgaggataaccgtggcaccttccttatggagttgttgtgagcatggatagtgctagttatagccagccgttagcctgaggcctgccatgcagaaaagcrcaataaatgttaactgataatagtgaacatttcagaattagaaaggtttcaagacatagtcttgttttaccctccagttttagagatgagaaaaccaaag

SEQ ID NO: 226399 - DNA, 201 bp, Homo sapiens
ccttttcacttttttccggtagaattgattccatgggaaagaggaacttctaacaaaggtagaagaggaatggcatatcaccaaaatgcttagactgtgamtttggacatcgagtgtgtggtgtgtgtatgtaggtgagcgagagaaagagagagataatcctaaagagaaatgtaaaactctagaaaagggcacaaaaac

SEQ ID NO: 226400 - DNA, 201 bp, Homo sapiens
aaacttaattcctcaatgcaacagtgttgagaagtgggttgtttaagaggtgattagggcatgggggatctacccccgtgaataaattaatgtcattattwtgttaatgggttcactattgcaagagtgggtttgttatccaagtgagtttagtcacttcttgctcctttgcgtgctgtttctcatcatgtggtgccttat

SEQ ID NO: 226401 - DNA, 201 bp, Homo sapiens
tttgatttttctggctcattccagggaaggctgcagagctgcaatatcagatggccgaaagcaatgcagaaatcccatgtccccaaggacacgcgctgccrttcagaagtagcaggagagggggtggaataaatcatttcctctgatcttgttagtgttgagaatattttagggggtagcaaatgcattgcaggtctaata

SEQ ID NO: 226402 - DNA, 201 bp, Homo sapiens
gcagttgtggaaagaatagagcagttgaaatttcttcaagttgggagcagaggcacagaatgtattcatcttgaggagttaaactttgatgtgaggagatrtacatagttgcaaactgtgttttttcccttgtcccctaagaaataaaattaaaaggtgatatgtatgtgtttacatatttcattttttacaaaataatat

SEQ ID NO: 226403 - DNA, 201 bp, Homo sapiens
tgaactctattacccaaatattttgtgggcttctatgcttccattcctgtgtttaccctgagccatagctcctgtcacttcatttctcactagtatatacytcatacattcttccaagtccaattcaatgacactgcacttgggggctttcgttgatttatcttaggcagaattaattctaccttaagtttgtacttcctt

SEQ ID NO: 226404 - DNA, 201 bp, Homo sapiens
gtgtctggtatcctttacacagaacgtttaacttgatgcttttcacaaaggttcacacactcaatgctcttggatgccagctgggaggattctgttatggrgtaaagggggttaagtaagaaattatttacttctataaggaattacagccttttcattttctaaaacactcagtcctcttaacccatctttattttcccc

SEQ ID NO: 226405 - DNA, 201 bp, Homo sapiens
cacacacaccctgcttatacactcaaaaatatgtactgatcattttctgtgtagaataatatgccaacgtagaaatatatatggaaatacttattataaayatattggaaataggctgcatagactgttttatatcttgctgttccacttaactttatgtcatgtacatttttatacattttcctataaactaatttttag

SEQ ID NO: 226406 - DNA, 201 bp, Homo sapiens
acaaaaactgtattatatgcaaaattatcgagagattttgtgtgtgagtacatgcatgcatttatttctaagtcctgtagagtaacaatgaaatcttactrtctctgaaataaagttgagatgcattttaaagtagggcaggcagcctatactcagaaccagtgagtgcctggtacttgaaagaaacaaagtccttgttaa

SEQ ID NO: 226407 - DNA, 201 bp, Homo sapiens
aggaattaaaatacagagaacaatacctagtttactgactctggttagtaactacatatgctaatagactcaggaaaacagggttatcacctaccataacrgtccttaatcatggctacacgttagaatcatctgcgagatgttgggggaaaagcacaatgcccaagacatgccccagagcaattgcttcagaatcactgg

SEQ ID NO: 226408 - DNA, 201 bp, Homo sapiens
gatctatcaaaatgctttccttttttctcagtaaataaatgggccaagacctcaagagtagatctgccaaaggatggccacaatggccaatgggtataccraatttttcaataataaagattcaagttaaaataaattttaattttaattttgccacctgtaaaattaacaaaggtttgaaaatatgttttactgaaaaag

SEQ ID NO: 226409 - DNA, 201 bp, Homo sapiens
tttgagggtatagtcgcttcaaaggcctgtggtgacaataatggtgtgagagggacagagagagaagtcaagagagtggagaaacagacagactgagacayagggttggagaagaaggggtagagcagaggcagaaaggtgaggggggagagaattgggaattcaggatgatgattattgtttccaaatgcttttgacttg

SEQ ID NO: 226410 - DNA, 201 bp, Homo sapiens
gtttctctattctctggtcccccttgctgcctttttctcattactttttgagtaggaaaggggcccactgaagaggtaaagctgcagtcaaccagtttgtkaaaagctttcattgactttccaacaatgtaaaataaggctacattgtggaagagtcttctggttctcttattttctatattggtggttctcaaagtgtgt

SEQ ID NO: 226411 - DNA, 201 bp, Homo sapiens
accagtcaatgtcaatgaagtattcagttaccttcactggctgagaccagtacgtttcagcctcttatgctgagagtaaggcctatcttccctggacacaytaccacctgcaggtacctgagaaagatcaaggtatgttagcaaggatgaaggactgatggctgctggaaaagcacctcacactgctgctatacttctgtc

SEQ ID NO: 226412 - DNA, 201 bp, Homo sapiens
gatgaaggactgatggctgctggaaaagcacctcacactgctgctatacttctgtccatgttaatgcttatgtgtggaggtcagagggaactaagtcatcstcaaagtgtttttaaacatgacattgaaatcataatttggaaatagaaacattttgcattaaaattggattttttttcttctgttaaaaaaattcataga

SEQ ID NO: 226413 - DNA, 201 bp, Homo sapiens
cacaacagggtgactagagtgaaaaacaatttatctgtgcattttaggataataactaaaagagtttaattatttgtaacacaaaggataaatgcttgagrtgatggagaccgtaccctgatgtgattattacacattgcatgcctatatcaaaatatctcatgcaacccataaatatatacactatgtatccacaaaaat

SEQ ID NO: 226414 - DNA, 201 bp, Homo sapiens
ggctatcctctgaaaaatcagcaagataaatcagtgtgttactggcctgtactgctctacttccatgtttatttcttttaggagaactgaagcccaaagtwtttggattcatttaaatttaatttatgtcttgcaggaggtcaaatgaaggatacagagtttgtctgctctagaacaaaatatggacgaattaggcatgag

SEQ ID NO: 226415 - DNA, 201 bp, Homo sapiens
gactgactaccagaccctcggctttagtcctggctagctcacttgatgactagtctgggctttctcttgtgaaaaatgaggatgctgaatggggtgatctstaaggtcctcttaggcctcttactccaacattgcaaattccttactatggaatagaccacaagaaactaagacaaagaaatgattgagtgagaggcatgt

SEQ ID NO: 226416 - DNA, 201 bp, Homo sapiens
accagaccctcggctttagtcctggctagctcacttgatgactagtctgggctttctcttgtgaaaaatgaggatgctgaatggggtgatctctaaggtcmtcttaggcctcttactccaacattgcaaattccttactatggaatagaccacaagaaactaagacaaagaaatgattgagtgagaggcatgtgttctgta

SEQ ID NO: 226417 - DNA, 201 bp, Homo sapiens
cctccttgtacctctggtagaattcggctgtgaatccatctggtcctggactctttttggttggtaagctattgattattgccacaatttcagagcctgtyattggtctattcagagatccaacttcttcctgctttagtcttgggagggtgtatgtgtcgaggaatttatccatttcttctagattttctagtttatttg

SEQ ID NO: 226418 - DNA, 201 bp, Homo sapiens
atccatctggtcctggactctttttggttggtaagctattgattattgccacaatttcagagcctgtcattggtctattcagagatccaacttcttcctgstttagtcttgggagggtgtatgtgtcgaggaatttatccatttcttctagattttctagtttatttgtgcagaggtgtttgtagtattctctgatggtag

SEQ ID NO: 226419 - DNA, 201 bp, Homo sapiens
tcctggattcattaattttttgaagggttttttgtgtctctatttccttcagttctgctctgattttagttatttcttgccttttgctagcttttgaatgygtttgctcttgcttttctagttcttgtaattgtgatgttagggtgtcaattttggatctttcctgctttcttttgtgggcatttagtgctataaatttcc

SEQ ID NO: 226420 - DNA, 201 bp, Homo sapiens
actgctttgaatgggtcccagagattctggtatgttgtgtctttgttctcgttggtttcaaagaacatctttatttctgccttcatttcgttatgtacccmgtagtcattcaggagcaggttgttcagtttccatgtaattgagcggttttgagtgagattcttaatcctgagttctagtttgattgcactgtggtctgag

SEQ ID NO: 226421 - DNA, 201 bp, Homo sapiens
gttcagtttccatgtaattgagcggttttgagtgagattcttaatcctgagttctagtttgattgcactgtggtctgagagacaatttgttataatttctrttcttttacatttgctcaggagagctttacttccaactatgtggtcaattttggaataggtgtggtgtggtgctgaaaaaaatgtatgttctgttgtttt

SEQ ID NO: 226422 - DNA, 201 bp, Homo sapiens
ctccatccctttattttgagcctatgtttgtctctgcatgtgagatgggtttcctgaatacagcacactgatgggtcttgactctttatccaatttgccartctgtgtcttttaattggaacatttagtccatttacatttaaagttaatattgttatgtgtgaatttgatcctgtcattatgatgttagctggttatttt

SEQ ID NO: 226423 - DNA, 201 bp, Homo sapiens
gactctttatccaatttgccagtctgtgtcttttaattggaacatttagtccatttacatttaaagttaatattgttatgtgtgaatttgatcctgtcatwatgatgttagctggttattttgctcgttagttgatgcagtttcttcctagccttgatggtctttacaatttggcatgattttgcagtggctggtactggt

SEQ ID NO: 226424 - DNA, 201 bp, Homo sapiens
tcctagccttgatggtctttacaatttggcatgattttgcagtggctggtactggttgttcctttccatgtttagtgcttccttcaggagctcttttaggscaggcctggtggtgagaaaatctctcagcatttgcttgtctgtaaaggattttatttctccttcacttatgaagcttagtttggctggatatgaaatgct

SEQ ID NO: 226425 - DNA, 201 bp, Homo sapiens
cccatatttcttggaggctttgtttgtttctttttattattttttctctaaacttctcttcttgcttcatttcattcatttcatcttccatcattgatacyctttcttccagttgatcgcatcggctcctgaggcttctgcattcttcacgtagttctcgtgccttggctttcagctccatcagctcctttaagcacttct

SEQ ID NO: 226426 - DNA, 201 bp, Homo sapiens
tagccctattggttaatggccttttcattgtcatgtattttaagcctggcaatatttttctcccttctcccaggttgtctcttcacattgtatttattctstcttgataatgtctctcacattcccctttctatttccacatccatatcctaaattcagattgtccctctctcttgaaatatgttgaataggttcttaatt

SEQ ID NO: 226427 - DNA, 201 bp, Homo sapiens
aacttctcttcttgcttcatttcattcatttcatcttccatcattgataccctttcttccagttgatcgcatcggctcctgaggcttctgcattcttcacrtagttctcgtgccttggctttcagctccatcagctcctttaagcacttctctgtattggttattctagttatacaatcgtctaaatttttttcaaagttt

SEQ ID NO: 226428 - DNA, 201 bp, Homo sapiens
gtctccttttcagtacaatggacatctcaagatacctactttatagaaatgtagtgaagattaaagagatgaacaaagagtctctggcccagtgcctggcrcatagtaaaacacttcgacagttgctacagcaactagtagtaattctaataagagtttttcgttttcccccaagctatctgtttatatcaaaggagtatt

SEQ ID NO: 226429 - DNA, 201 bp, Homo sapiens
actagagtgaaaaacaatttatctgtgcattttaggataataactaaaagagtttaattatttgtaacacaaaggataaatgcttgagatgatggagaccstaccctgatgtgattattacacattgcatgcctatatcaaaatatctcatgcaacccataaatatatacactatgtatccacaaaaattaaaaataaaac

SEQ ID NO: 226430 - DNA, 201 bp, Homo sapiens
ttgtaacacaaaggataaatgcttgagatgatggagaccgtaccctgatgtgattattacacattgcatgcctatatcaaaatatctcatgcaacccatamatatatacactatgtatccacaaaaattaaaaataaaacttaaaaaaaatacccccacttaagcctacattctctctgtccctcattagaacacctagaa

SEQ ID NO: 226431 - DNA, 201 bp, Homo sapiens
ctttgaatccactgcataatctgtaagaagtgtttttcctgttgggattgttctctggccttgacaaggtgagccatgaagacttcatttcttatgaagtytggggataccacaccagtgctgtttattcacacaggctgtgacatcagggactagctgggctgtgagagcctgttcagacaggtctcttcaagcctctgg

SEQ ID NO: 226432 - DNA, 201 bp, Homo sapiens
ctgaatggggtgatctctaaggtcctcttaggcctcttactccaacattgcaaattccttactatggaatagaccacaagaaactaagacaaagaaatgaytgagtgagaggcatgtgttctgtagtatgttttgttgacaattctgtgctttaagcagagaacatgggttttttgaattaatacttttacatccacttga

SEQ ID NO: 226433 - DNA, 201 bp, Homo sapiens
gaataaatacttgggaataaattaaaagcaacaaaaaatataaactctgaatttatgtatatttgaaataagttgaagaatatctaaatacaaggcaagamtttttatgtttggggattggaagagttattgttaaaagtgccaaaaattgttgagtgccataaagattcaatgcaactcctatcaaaatctcagcagata

SEQ ID NO: 226434 - DNA, 201 bp, Homo sapiens
cagaatgggataaaatacttacatatcatatatctgataagagacttgtatctagaatatataaatatttgtataaacccaatttaaaaaatggataaaargtctgaatagatatttatccaaagaagatatacagatgaccaataagcccataaaaagatactcagcatcactagtcatcaagaaaatacaaatcaaaac

SEQ ID NO: 226435 - DNA, 201 bp, Homo sapiens
actggcagagatctctagtcccttttgcctcaccagttttctacccactgaaaaaccagaagggttcagatatgatggcgcctggggtgaggtgttggtgrtcagcgattaattcctgaaaactgccctgagatgcaattttcccctcagaagaggttttccagcagggccctccgggcttagaggttgatccctatttgc

SEQ ID NO: 226436 - DNA, 201 bp, Homo sapiens
catggagtcagtccagcatcctcaatctatgctcaccattgctttgtgacttttcatatagttttaggcatctctatggattcctaaagtgtgtatatttktattgtctttagggaatttttttaaactaatatattgttaagatttctccctatgagctgtgtgtcactatcaaacatttgttttgcttgagccatggta

SEQ ID NO: 226437 - DNA, 201 bp, Homo sapiens
  misc_feature (1)...(201): n = A,T,C or G
tccctgagggtgtacaaaccttctagaaatttcaagtaaagtgtatgcatttatgtgtgtgcacacatttttctagggaaaggagtcatacatagctttgntcagattctaaaaagtgctgacatgcctaaaaatgataagcactcccgttttagagcaacttagaggtaatttgtgaaatttttttatgatgagaagtct

SEQ ID NO: 226438 - DNA, 201 bp, Homo sapiens
tgtgggctgtttaactgtgcttaaacagctggaacaagacagaaaatgatgccactctcctaggtctttaatttgatggggagacagacaggaaaaaaagwtaaagcaaaaatgtgtcattacaatttgtgataactgctagcagtaatattaatggtggctaacatttattgagaacctactatggatgaggcactattt

SEQ ID NO: 226439 - DNA, 201 bp, Homo sapiens
tcgggaatggattgtgtgtttgagtggtgcgaccactgatgtataaaatgcacgggagaaccaattcactgaggtaggcacctagaggaaaattacttacractagattttcagaccttctgcatctgccggagcctgtggcctggtcactacaggcgggtaaggaatgttaagcagatttctgtgcagagaggtcactcc

SEQ ID NO: 226440 - DNA, 201 bp, Homo sapiens
gaaaaaggtgttaggaatgagcaatgggcaaactgagcagagtttcctgctacaggaagctctgtagatgtgtaattcagtgcaaaataaaaactcaatakactgacttgagaagcatcttgcctctaactgattaggtctcactttcttgctgtgtaaaacaaagggcttgcctaggggtagtctatattttcagaagtt

SEQ ID NO: 226441 - DNA, 201 bp, Homo sapiens
ctaagaaaagagctaaggatctttgagccaggtaacaagtttttttaaaagtgtgaggagaattttaattggtttataatatgagtgggagatgatttgcwttcatttataaaatcaaaaaggaaggtgcctgagctgttaaactcgggaatggattgtgtgtttgagtggtgcgaccactgatgtataaaatgcacggga

SEQ ID NO: 226442 - DNA, 201 bp, Homo sapiens
tcctgaggcttctgcattcttcacgtagttctcgtgccttggctttcagctccatcagctcctttaagcacttctctgtattggttattctagttatacawtcgtctaaatttttttcaaagtttttaacttctttgtctttggtttgaatttcctcctttagctcggagtagtttgatcgtctgaagccttcttctctca

SEQ ID NO: 226443 - DNA, 201 bp, Homo sapiens
cctgccctcaggtccctaatcagagtgtgatggtgagcacttgtagctgtcacctccactgaagagaacagcagcggtctgtctcagtaccctggaaataygtgcaagccacagcccatttcagaggaaattctagttgtagaaccccggagcagaaaagctatgggactctggcctgagtgctgttagaaaccagccagg

SEQ ID NO: 226444 - DNA, 201 bp, Homo sapiens
ctcctttagctcggagtagtttgatcgtctgaagccttcttctctcaacttgtcaaagtcattttccatccagctttattccgttgctggtgaggaactgygttcctttggaggaggagaagcgctctgctttttagagtttccagtttttctgctctgttttttcccatctttgtggttttatctacttttggtctttca

SEQ ID NO: 226445 - DNA, 201 bp, Homo sapiens
gatcgtctgaagccttcttctctcaacttgtcaaagtcattttccatccagctttattccgttgctggtgaggaactgcgttcctttggaggaggagaagygctctgctttttagagtttccagtttttctgctctgttttttcccatctttgtggttttatctacttttggtctttcatgatggttatgtacagattttt

SEQ ID NO: 226446 - DNA, 201 bp, Homo sapiens
tggaggaggagaagcgctctgctttttagagtttccagtttttctgctctgttttttcccatctttgtggttttatctacttttggtctttcatgatggtkatgtacagatttttggtgtggatgtcctttctgtttgttagttttccttctacgagacaggaccctcagctgcaggactgttggagtttgctagaggtcc

SEQ ID NO: 226447 - DNA, 201 bp, Homo sapiens
cttcctgaggcctccccatgatgccagcatcatgcttcctgtacagcctgcagaactatgggccaactaaacctcttttctttataaattaccctgtctcrggtatttctttatagtagtgccagaacagactaatacaaaaggtaactgtaaaagtaagtacaatcaaaaataaaatagtattattaaatgccaactaga

SEQ ID NO: 226448 - DNA, 201 bp, Homo sapiens
accactgctctcttcaaagctgtcagacagggacattgaagtctgcagaggttactgctgtctttttgtttgtctgtgccctgcccccagaggtggagccyacagaggcaggcaggcctccttgagatgtggtgggctctacccagttcatgcttcctggcagctttgtttacctaagcaagcctgggcaatggcgggcgc

SEQ ID NO: 226449 - DNA, 201 bp, Homo sapiens
catgattggaagcttcctgaggcctccccatgatgccagcatcatgcttcctgtacagcctgcagaactatgggccaactaaacctcttttctttataaaytaccctgtctcgggtatttctttatagtagtgccagaacagactaatacaaaaggtaactgtaaaagtaagtacaatcaaaaataaaatagtattattaa

SEQ ID NO: 226450 - DNA, 201 bp, Homo sapiens
agtgggtgcagcgcactgtgtgtgagccgaagcagggcgaggcattgccttatccgggaagcgcaaggggtcagtgaattccctttcctagtaaaagagargggtgacagatggcacctggaaaatcaggtcactcccaccgtaatactgcacttttccagcaggattaacaaacggcacaccaggagattatataccgca

SEQ ID NO: 226451 - DNA, 201 bp, Homo sapiens
cagctgcttaggggaagtaggaccagtagttgagagtccccatttgctctgctgactatggctgcaatacacacacacttaccatcagcttttggccacawattgaatcccaggctaggagtgaaaggggagcaataccctttaaaccctctctatatcaccctgctttttggcattttgttttgttttattgttttcatt

SEQ ID NO: 226452 - DNA, 201 bp, Homo sapiens
cttgaaaaaaaattagatgaatggctaactagaataaccaatgcacagaagtccttaaaggacttgatggagctgaaaaccaaggcacgagaaccacgtgwcgaacgcacaagcctcagtagccgatgcgatcaactggaagaaagggtatcaatgatggaagacgaatgaaatgaagcgagaagagaagtttagaaaaaa

SEQ ID NO: 226453 - DNA, 201 bp, Homo sapiens
gtacataacgaaatgaaggcagaaataaagatgttctttgaaaccaacgagaacaaagacacaacataccagaatctcttggacccattcaaagcagtgtrtagagggaaatttatagcactaaatgcccacaaaagaaagcaggaaagatctaaaagtgccaccctaacatcacaattaaaagaactagagaagcaagag

SEQ ID NO: 226454 - DNA, 201 bp, Homo sapiens
ttacaaaacttttcctgggtacagctgtatcacttttcattgttaataaagtatctgaatgtgagtgaattattaatattgttcagattatataaaaagckgtaggtggtacttttagcctttatgatcactattattggtttaaagtcaggtcattgtggcacttgcaattcagcttcaagaactatttgctgataatat

SEQ ID NO: 226455 - DNA, 201 bp, Homo sapiens
tgaaaagatcaacaaaattgatagacctctagcaagactaatgaagaagaaaagagagaagaatcaaatagacacaataaaaatgataaaggggatatcamcaccgatcccacagaaatacaaactaccatcagagaatactaggaacacctctatgcaaataaactagaaaatctagaagaatttgataaattcccagac

SEQ ID NO: 226456 - DNA, 201 bp, Homo sapiens
agatcaacaaaattgatagacctctagcaagactaatgaagaagaaaagagagaagaatcaaatagacacaataaaaatgataaaggggatatcaacaccratcccacagaaatacaaactaccatcagagaatactaggaacacctctatgcaaataaactagaaaatctagaagaatttgataaattcccagacacata

SEQ ID NO: 226457 - DNA, 201 bp, Homo sapiens
gactttcatgttttggaaaaaggacatagaagaaaatgttctttaaattgtattcatatatgaaaattatatttaaaaaacacagattcatagaatgctcrttaaagaaatcagtggattacaaaacttttcctgggtacagctgtatcacttttcattgttaataaagtatctgaatgtgagtgaattattaatattgtt

SEQ ID NO: 226458 - DNA, 201 bp, Homo sapiens
gtgcacacgcatgtgtgcctgtgcatgtacatgtgaaatacatctttcataccatcaaataaattacatagacactagagatttagaaagtatatacttgyaataaatagggaggagaagattttgcatattttttggtattatcctatttttactatttatttattatgaacagaaaaatgacattttttttgattcgtg

SEQ ID NO: 226459 - DNA, 201 bp, Homo sapiens
ggtctgagagaatgagtagttggccatgggatgggaacaggcaggagaaaaaggtgttaggaatgagcaatgggcaaactgagcagagtttcctgctacasgaagctctgtagatgtgtaattcagtgcaaaataaaaactcaatagactgacttgagaagcatcttgcctctaactgattaggtctcactttcttgctgt

SEQ ID NO: 226460 - DNA, 201 bp, Homo sapiens
catatgattcagcaattccacctgtagatatatacccaagagaaatgaaaacatatgtccactcaaaagcttgtacgtgaatgttcatagcaacattaaayttgctaaaaactagaaacaaggccaggcgtggtcgttcatgcctgtaatcccaacattttgggaggctgaggcgagtggatcacttgagctcagaagttc

SEQ ID NO: 226461 - DNA, 201 bp, Homo sapiens
agccactgtgcccagcctccattcagtgttcctaataacagcttgtggctgtgccatttatttagtggagttattaagtaccccaagctttgctcttacartgtcccttatagagtaaaattgcaggtcttgcttgccagtcttctgagagctacagtggcccctaagtgttctgggaactttggaactagtgcactattt

SEQ ID NO: 226462 - DNA, 201 bp, Homo sapiens
tttatttagtggagttattaagtaccccaagctttgctcttacagtgtcccttatagagtaaaattgcaggtcttgcttgccagtcttctgagagctacartggcccctaagtgttctgggaactttggaactagtgcactatttttttttcatttttgtgttgacagtagtggatgtgaatttgctttggttcagtccaa

SEQ ID NO: 226463 - DNA, 201 bp, Homo sapiens
tttatattctggtacaaaaaagatgctccaggatcatcttatactgtccctgtccagccttggaatcagccacttctccaagcagctctggttcctgtccrtgtagaatgattttagaaatcaagatctgggtgcttagcatgcttattgttcctgtgatgtcaatgctttgagacccagtcaacacagagctaggaaata

SEQ ID NO: 226464 - DNA, 201 bp, Homo sapiens
ccaggatcatcttatactgtccctgtccagccttggaatcagccacttctccaagcagctctggttcctgtccgtgtagaatgattttagaaatcaagatstgggtgcttagcatgcttattgttcctgtgatgtcaatgctttgagacccagtcaacacagagctaggaaatatgtacatataagtccacacaaacacac

SEQ ID NO: 226465 - DNA, 201 bp, Homo sapiens
ggtatgtgtatatgtttacacataagccacatgaattcatatcagtatcttcaattcaaatctaagtcttttcccccttccacatttataaataccttctstgacagaaacttggttcccattatccttaatatatatactcatttgttcaatattagccttcactgcccaccacctgcgtacatctcatcctctgctctg

SEQ ID NO: 226466 - DNA, 201 bp, Homo sapiens
ctaagtaaaggtcacccagatcccaaatatataaatataattgatcaaggtagcgcagctctggttgaagtgtagaggcaggggctggaggtctgacaacmtagcccgcttcagtttcctacttccgccttcaaaggcacctttgccaaatctagggctcctcaaaaaacacacaggaagactggaaaaaaatctgaatgt

SEQ ID NO: 226467 - DNA, 201 bp, Homo sapiens
tagacctctagcaagactaatgaagaagaaaagagagaagaatcaaatagacacaataaaaatgataaaggggatatcaacaccgatcccacagaaatacmaactaccatcagagaatactaggaacacctctatgcaaataaactagaaaatctagaagaatttgataaattcccagacacatacaccctcccaagacta

SEQ ID NO: 226468 - DNA, 201 bp, Homo sapiens
tcaacaccgatcccacagaaatacaaactaccatcagagaatactaggaacacctctatgcaaataaactagaaaatctagaagaatttgataaattcccrgacacatacaccctcccaagactaaaccagaaagaagttgaatctctgaatagaccaataacaggctctgaaattgaggcaataagtaatagcttaccaa

SEQ ID NO: 226469 - DNA, 201 bp, Homo sapiens
cttgtcctatgaaaatatgaaagagattattggcaacatttttgataacctggtggaataaaactccaagccctgcctaaggtaaattatcataaatcttmtatgtcaggaacgtggtagagagttgcaggtaggcagtgaagtggccagaatgtttaaaaaaaaaaatattctgacctggaatctgtggcagagtggaga

SEQ ID NO: 226470 - DNA, 201 bp, Homo sapiens
aatagaaaaagaggaaatcctccctaactcattttatgaggccagcatcatcctgataccaaagctgggcagagacacaacaaaaaaagagaattttagaycaatatccctgatgaacatcaatgcagaaaccctcaataaaatactggcaaaccgaatccagcagcacatcaaaaagcttatccaccatgatcaagtggg

SEQ ID NO: 226471 - DNA, 201 bp, Homo sapiens
ggtaaattatcataaatcttctatgtcaggaacgtggtagagagttgcaggtaggcagtgaagtggccagaatgtttaaaaaaaaaaatattctgacctgkaatctgtggcagagtggagagagttgcggtgacatatctgatctcattagtgcttaaggttcctcacgcagagatggagaaatgacagtgtatcgctcat

SEQ ID NO: 226472 - DNA, 201 bp, Homo sapiens
cctaactcattttatgaggccagcatcatcctgataccaaagctgggcagagacacaacaaaaaaagagaattttagaccaatatccctgatgaacatcartgcagaaaccctcaataaaatactggcaaaccgaatccagcagcacatcaaaaagcttatccaccatgatcaagtgggtttcatccctgggatgcaaggc

SEQ ID NO: 226473 - DNA, 201 bp, Homo sapiens
taaatcttctatgtcaggaacgtggtagagagttgcaggtaggcagtgaagtggccagaatgtttaaaaaaaaaaatattctgacctggaatctgtggcasagtggagagagttgcggtgacatatctgatctcattagtgcttaaggttcctcacgcagagatggagaaatgacagtgtatcgctcattcctgccctctg

SEQ ID NO: 226474 - DNA, 201 bp, Homo sapiens
ttttatgaggccagcatcatcctgataccaaagctgggcagagacacaacaaaaaaagagaattttagaccaatatccctgatgaacatcaatgcagaaaycctcaataaaatactggcaaaccgaatccagcagcacatcaaaaagcttatccaccatgatcaagtgggtttcatccctgggatgcaaggctggttgaac

SEQ ID NO: 226475 - DNA, 201 bp, Homo sapiens
acattagcgtgactttttgcaacttatgtgactttgggtgagttgttgaaattccacttgactcagtttctttattcactaattgagcataatctccaccrttcagggtggttgtggggattaaaggagagttaaaaaaaaaaaaaatactcagccggggagctaagtacttgataaatagaagctgtaacttattattgc

SEQ ID NO: 226476 - DNA, 201 bp, Homo sapiens
taataaagtgagtttcagctgtcaatattccttatttttagcaagaaagcagccttagggacattactataaatgatggataaatgcatagatggatggcyggatggttggatataaaatggccattaaagaatcaataagaatatcaacatttcctgtgctgggattcagtcactcagtgaattcagatggcctgtcctt

SEQ ID NO: 226477 - DNA, 201 bp, Homo sapiens
aaaccctcaataaaatactggcaaaccgaatccagcagcacatcaaaaagcttatccaccatgatcaagtgggtttcatccctgggatgcaaggctggttsaacatatgcaaatcaattaacgtaatccagcatataaacagaaccaaagacaaaaaccacatgattatctcaatagatgcagaaaaggcctttgacaaaa

SEQ ID NO: 226478 - DNA, 201 bp, Homo sapiens
agacaaaaacaaccccatcaaaaagtgggaaaaggataagaacagacacttctcaaaagaagacatttacgcagccaaaagacacatgaaaaaatgctcaycatcactggccatcagagacatgcaaatcaaaaccacaatgagataccatctcacaccagttagaatggcaatcattaaaatgtcaggaaacaacaggtg

SEQ ID NO: 226479 - DNA, 201 bp, Homo sapiens
agcaataattagtatatttatacaagggaatactactcaacattgtaaaggaatgaacagcccatacctgaaataacctggatatgcttcaaaagtattawgtgaagtgaaagaatccagacacaaaagaatctatagtgtatgattcaatttttagaaagggcaaaactacagagatggaaagcaaatcagttgctgcct

SEQ ID NO: 226480 - DNA, 201 bp, Homo sapiens
ttttttggttcctatttccgtggtgtgtacttatccacacttttcttttcaaaacttatgtttaaatttgtttcttataaacaacacatagcaagattttaaaacattcgttttgataaaattttaacagatgtacttaccctgattcctgacacagctggacttagttaaaatattttcttttttatattctattcagcg

SEQ ID NO: 226481 - DNA, 201 bp, Homo sapiens
ctttgttgcccaggctggtcttgaactcctggcctgaagtgatcctcccactttggcatcccaaagttgggattacaggcatgagccaccaggcccaggascagttgtgtttatattctgtctcagatgttgatgggcagaacaataaagaactctttataacatttattgcatgctaactctgtggcaagcactgggatg

SEQ ID NO: 226482 - DNA, 201 bp, Homo sapiens
aaactactgtgagcactaaacaattttttttttgaaaaatgttctgatttatctattgttctctatcattcttgaatgttaggtttagcatgggcatatamtttttctttttttttttttgagaaaaagtttctctcttgttgcccaggctggagtgcaatggtgcaatttcagctcactgcaacctctgcctcctgggtt

SEQ ID NO: 226483 - DNA, 201 bp, Homo sapiens
ccaaagttgggattacaggcatgagccaccaggcccaggaccagttgtgtttatattctgtctcagatgttgatgggcagaacaataaagaactctttatracatttattgcatgctaactctgtggcaagcactgggatgaaagctttccatgtattatctaatttaatcctcacaaacccttattgaaaagcttttgtc

SEQ ID NO: 226484 - DNA, 201 bp, Homo sapiens
ttctctatcattcttgaatgttaggtttagcatgggcatataatttttctttttttttttttgagaaaaagtttctctcttgttgcccaggctggagtgcmatggtgcaatttcagctcactgcaacctctgcctcctgggttcaagctattctcctgcctcagcctcctgagtagctgggattacaggtgcccaccacca

SEQ ID NO: 226485 - DNA, 201 bp, Homo sapiens
agaaatgatatgtagaagagagaatacttcttagggggtcctaaaattcctaaaggaaaacaaaaatgaatcatggccgtttaaactcttatagaaacttmacaataattggccttttttgggcttgcagaatatgtgaaattggatctgaattgcaggtgaattgcaaagtgcagctgttacccatcaatcctggcttaa

SEQ ID NO: 226486 - DNA, 201 bp, Homo sapiens
atcatcagaacacttttcacccccttactggaatttattcttggtttgtcattaacattagatgtaagacctccgaggttagagactatgattctattatrtactattgaatttacaacatatactacattatatggtgcataaatgcacttactggatttttaataatggcactatagtcattcctatgtgccattgtgc

SEQ ID NO: 226487 - DNA, 201 bp, Homo sapiens
atttctgtatagctcagtactgatggaattggcataatggtggtaattataggtaatatttattgaaggattagtatatctccagcaccattctcagtacsatacatattttctctgttaatccttgtgaaaaccctttaagatagttaatattatcattttaatttcactgatggataaccttatgcaaagtctcactga

SEQ ID NO: 226488 - DNA, 201 bp, Homo sapiens
caagcaagttatttaagctccctgactcccagctttcttgcctctaagatggggataacaattcctatgtttgtgtagctaagagagctcaaatccttaaraaaaatgcagagggttaattctccctacacagtggacacctcattggcatactagctgtgtggatgaaaggttgattctctctagaatttaactgtcaga

SEQ ID NO: 226489 - DNA, 201 bp, Homo sapiens
tcagctaggcagcgctggggatatcacagggcaggcatggcacctgacacgtgtcttcagggggatgcagtcagtcaagtagaataggtaagatgtatacycgtatcactacagttcaagatagaaagtgttccaataaataaataaagcccctaatttcagaggacagattctttggaatatcttttctctattctcact

SEQ ID NO: 226490 - DNA, 201 bp, Homo sapiens
gtccctgtctttataaattgggagggatatctcagactcttgactttaattcagataattaatgtactgagcttttaattgagtgagtgggagggaaggasatgtgttttgccagcttttaaatgtagcggaaacataaacgccaggtttcaggattaaaatgaatgatcagtcaaccaacattcatcccgtgcctggtat

SEQ ID NO: 226491 - DNA, 201 bp, Homo sapiens
tggccccgtgctcgcctgtaaggtcctcattctttagtcttctttctgtccctacaacttgggaaaaaaatttacctcgtccctgtctttataaattgggrgggatatctcagactcttgactttaattcagataattaatgtactgagcttttaattgagtgagtgggagggaaggagatgtgttttgccagcttttaaa

SEQ ID NO: 226492 - DNA, 201 bp, Homo sapiens
attatgttggcgcagaagtaattgcagtttttgccattgaaagtaatggcgaaaatcgctattacttttgcaccaacctaatacattcattgctaccgagmatctacatgccccggatgttcagggttttttgtgcctctttaattctgatattttttattttatcccttctttgagatgtcctttactgaagcaaatagg

SEQ ID NO: 226493 - DNA, 201 bp, Homo sapiens
cttgctttgtttgcgcattttgtccagttcttcaagatgccaagaacataggcaccctctaccagtaacagcagtaccttcttcttcaagggaaaacctakccttatgggataaagagacagacagctattgaccttgaaatggggcagtgtagataatgcatagtccattaaatatcttcaaacttgaccgacgcctggc

SEQ ID NO: 226494 - DNA, 201 bp, Homo sapiens
tcagctcactgcaacctctgcctcctgggttcaagctattctcctgcctcagcctcctgagtagctgggattacaggtgcccaccaccacgcccagctaatttttttttttttttttttttgagacggagtctcgctctgttgcccaggctggagtgcagtggtgcgatctctgctcactgcaagccccgcctcccaggtt

SEQ ID NO: 226495 - DNA, 201 bp, Homo sapiens
tggtgcgatctctgctcactgcaagccccgcctcccaggttcacaccattctcctgcctcagcctcccaagtagctgggactacaggcgcctggtaccacrcccatctaattttttgtatttttagtagagatggggtttcaccatattagccaggatggtctcgatctcctgacctcgtgatctgcctgcctcggcctcc

SEQ ID NO: 226496 - DNA, 201 bp, Homo sapiens
tacctaaaaactttgaaggtggagcttctaggtcaaaaaggatgtagtctaatggcaataaactggggacacttagcacagagttttgttcagattcttcyctgtgaccccttgtcttcagagataagaacattcctttcttcagggcacctctccaatgagggtcttctaacctgccgcaaggacaaacagggagcgaac

SEQ ID NO: 226497 - DNA, 201 bp, Homo sapiens
gcgatctctgctcactgcaagccccgcctcccaggttcacaccattctcctgcctcagcctcccaagtagctgggactacaggcgcctggtaccacacccrtctaattttttgtatttttagtagagatggggtttcaccatattagccaggatggtctcgatctcctgacctcgtgatctgcctgcctcggcctcccaaa

SEQ ID NO: 226498 - DNA, 201 bp, Homo sapiens
gaaatactttctttctatttgtctgaatataccaatttgaatttgtcattttgatggctagtattcttataggaaacatatggagagatataagaaatcayataggaatctcattttcttggcaggagatcctgtgatattccttatagccagtattatctgaatccctctaaaatcttcatctttttactttttcttttg

SEQ ID NO: 226499 - DNA, 201 bp, Homo sapiens
accattctcctgcctcagcctcccaagtagctgggactacaggcgcctggtaccacacccatctaattttttgtatttttagtagagatggggtttcaccrtattagccaggatggtctcgatctcctgacctcgtgatctgcctgcctcggcctcccaaagtgctgggattacaggagtgagccaccgcgcccggcctgt

SEQ ID NO: 226500 - DNA, 201 bp, Homo sapiens
acaaacccttattgaaaagcttttgtcattatccccattttaaagatgaggaaactaaggtttatagggattagagggattatatcacctcacacagctgrtaagtagtgaagctgggctgtcaaatgctgtctgataccttagcttgtgctctaaactcagttgtacaaaatcatggaacatgatagggaggacactgat

SEQ ID NO: 226501 - DNA, 201 bp, Homo sapiens
aatggctttaggaaaaacctgaaagaattacaattctgaaccagttaagtagaatgattttggcagcacattatagaaatcatgattcaaaaagttccaayagtaaggagtttaagggtaggatagttccacctttgagataatgaatggttacatcagttgcataaatgtcatactcaagaatataacatcttcccttct

SEQ ID NO: 226502 - DNA, 201 bp, Homo sapiens
cttgggaatgtcttgaagtttgtgtttcctacatacctaaatgtgtttctaactcctacattctctcttattgtttcacatatgctcttgctttgtggtayatcttttttagagacagatatcatttacaaatatataatacattaggcagaagggtgataaccttttaatttagcttcaggttttaaaattttatgtatt

SEQ ID NO: 226503 - DNA, 201 bp, Homo sapiens
tctgtctttgattacctcctatttccatatggacttctccttctcttctctcttggttcctttggatgtggcacttggccacgttgctaaggggcgggggrgggggggtgggggaaatgattggttaaaccattgaattaaaggctcagaaataatgtggcccaaagagtcttaaagaacataaaagtattggaggagagt

SEQ ID NO: 226504 - DNA, 201 bp, Homo sapiens
ttatctttttgagatattgttatactttttccagaggactcatgtctttcattctagaaactctacatccatatatttttatattggctttctctctctctttttttttttttaacgaaaaagtaaactttaatgtcaaaaatgcaaacttggggaagaacagaaaagatcacacacaaggctgtcacttcacacttggaa

SEQ ID NO: 226505 - DNA, 201 bp, Homo sapiens
aactctacatccatatatttttatattggctttctctctctctttttttttttttaacgaaaaagtaaactttaatgtcaaaaatgcaaacttggggaagaacagaaaagatcacacacaaggctgtcacttcacacttggaaggttgcacagcgtccgggcagaggcgctcctcacttcccagatggttgggcagccggg

SEQ ID NO: 226506 - DNA, 201 bp, Homo sapiens
gcttctcacttcccagacggctttttctctttcttttgggcttggctatatatgtgtgtgtatgtgcgtgtgtgtgtgtgtgtgtgtgtgtatctatgtgygtgtatatatatgtaggtatatatatacacatgtgtatgtatatttgtacatgtgtgtgtatatatatgcacatatgtatatacatacacacacatatat

SEQ ID NO: 226507 - DNA, 201 bp, Homo sapiens
tgtgtgtgtatgtgcgtgtgtgtgtgtgtgtgtgtgtgtatctatgtgcgtgtatatatatgtaggtatatatatacacatgtgtatgtatatttgtacaygtgtgtgtatatatatgcacatatgtatatacatacacacacatatatatacacacatacacacacatatatgtattttaagtcattattgtattttgtt

SEQ ID NO: 226508 - DNA, 201 bp, Homo sapiens
ggaataggcatccctaagtgaaactttttcagagaaatggaaatagagcatgcaagaaagatgacaaaaagaaataagaaaataaaatgcttagtcagactgagtatgtcacactcatgtttaatttgattttcatctcgctataagccgttcccattctgttgaggagtacacactccaaaagatttgactgtagatttg

SEQ ID NO: 226509 - DNA, 201 bp, Homo sapiens
gatcacatgattgtaacatagttagtgaataaatatgcaccctcagggaaaatgatcagggggtcataggggaccaagaataataaggcagctatgtagcrctaatgaagagcaagctgaattcagaaataaatcaagaaaatgaaaaacattttctttacttcatattaaacctgtatagacatttctagttcttgtcct

SEQ ID NO: 226510 - DNA, 201 bp, Homo sapiens
cccagtgaaacgggagctcccttgaccacttcgctggcaggaactgaagctgctagttttactcagcccactgctggccactccccacgggagggagcgtkcaaggaaacgggtgtgggaaccggagtgaaggaacactggaactgctggctgcttctctccagcagaagcaggccctgtgcatgccccatggcagcgtcc

SEQ ID NO: 226511 - DNA, 201 bp, Homo sapiens
gaataggcatccctaagtgaaactttttcagagaaatggaaatagagcatgcaagaaagatgacaaaaagaaataagaaaataaaatgcttagtcagactgagtatgtcacactcatgtttaatttgattttcatctcgctataagccgttcccattctgttgaggagtacacactccaaaagatttgactgtagatttgg

SEQ ID NO: 226512 - DNA, 201 bp, Homo sapiens
ttataaacaacttcagcaaagtctcaggatgcaaaatccatgtgcaaaaatcacaaacattcctatataccaacaatagtcaagccgagagccaaatcagkaacatagtcacattcataattgccacagaagaataaaatacctaggaatccagcaaactagggaggtgaaagatctccacaaggggaactacaaaattct

SEQ ID NO: 226513 - DNA, 201 bp, Homo sapiens
agcctaaaagcttcttaagcttataaacaacttcagcaaagtctcaggatgcaaaatccatgtgcaaaaatcacaaacattcctatataccaacaatagtyaagccgagagccaaatcagtaacatagtcacattcataattgccacagaagaataaaatacctaggaatccagcaaactagggaggtgaaagatctccac

SEQ ID NO: 226514 - DNA, 201 bp, Homo sapiens
taaaatataataaaaaaaagaaaagatgctcagcgttatctgtcattagggaaatagaaatcaaaaccacaatatgacaccacttcacacccactaaaccmgacaacaataacaagcatcagcaaggattcgggaaccttcatacattcctggtgtaaaatttaatacttgtagaattgttcaattacttggataaaaaaa

SEQ ID NO: 226515 - DNA, 201 bp, Homo sapiens
gagaattccttataactttatctttcctcctctcccatcccctgtgatggtcagtttctaaaccctacttcaggtatccttctcaaaactctcataggcargaaccaggtgccccattagctgtgttcccacagcacctcctgtccgtacctctagcagaaaataaagcaaaatagtatatgatgttagttgtttccatta

SEQ ID NO: 226516 - DNA, 201 bp, Homo sapiens
gagaaaagaacccaacaggaaacctctgcagaatccataaaagcttatcaaaagagaaagtgtcagccctaactatctgccaggcccagagacagccaagstagattataacagaactagcacaaggaggagcccttctgtctcttagtttcttcaaccttgagaaaggcagaatgctggctaataaggtggaggggccac

SEQ ID NO: 226517 - DNA, 201 bp, Homo sapiens
tatttctaaacagacatgctctctacaaaactcctaggtacatacctatgtattcaacacatattaataaatgtatctatttagattaatagaaccatttytttcagtaaaataatttgctttaggaaccaacattaatcaatttcaaattttcaatatttcacggtatcagtttttcaacatgcttgtattactgttttc

SEQ ID NO: 226518 - DNA, 201 bp, Homo sapiens
tcgccttgggtatgtgtgacttctactggccatgaaaaagtgaaaatcaaagcccaggagaaatgatgggagaggggaaaatgtggttaatagaatgacasaacgttagggcaggaagggtccttacacattgtgtcctttgctaccatcaatttgcagactagaaaggtgagccccagaagggccaatgtcacactttga

SEQ ID NO: 226519 - DNA, 201 bp, Homo sapiens
ttagtaaaaacagatttgtgtgtgtaaaaatacacagaaacatactataacagttcaatccgtgtaaatcatttgagaagctgtcctaaatagcagaatgrgtttatctgaggggaaattttgaaaccaaagtaattatcagatggccatttttttcaaaaaaaaaaaaaaatcaaaactagtccagtattgagaaaacac

SEQ ID NO: 226520 - DNA, 201 bp, Homo sapiens
tctatcctccgaaattatgaaattgacattaattatgggtcacaaatcagggtaggatgccaacctctgtgtgcaggcacagacataccttttatttgccyttctgctggcagagtggttttctttccagctttccttaaaagagggaaggatattgttatgtgggatccaggggcaaagacttgaggtactcaaggttag

SEQ ID NO: 226521 - DNA, 201 bp, Homo sapiens
ttgacattaattatgggtcacaaatcagggtaggatgccaacctctgtgtgcaggcacagacataccttttatttgcccttctgctggcagagtggttttytttccagctttccttaaaagagggaaggatattgttatgtgggatccaggggcaaagacttgaggtactcaaggttaggctgtctaccctgattctttgt

SEQ ID NO: 226522 - DNA, 201 bp, Homo sapiens
aataggcatccctaagtgaaactttttcagagaaatggaaatagagcatgcaagaaagatgacaaaaagaaataagaaaataaaatgcttagtcagactgagtatgtcacactcatgtttaatttgattttcatctcgctataagccgttcccattctgttgaggagtacacactccaaaagatttgactgtagatttggc

SEQ ID NO: 226523 - DNA, 201 bp, Homo sapiens
gattctttgtaagtaagtttattatgctgtaagagtttgattcagtaaatatagttacattttaagattggcgaaggccacagagaaatcttattttgttstggatctcttttacaatgtgtatctgttcctgcctcactagtatatcatatggtttacataacataattaaactcttatttgaggactgaggatgggtac

SEQ ID NO: 226524 - DNA, 201 bp, Homo sapiens
ataggcatccctaagtgaaactttttcagagaaatggaaatagagcatgcaagaaagatgacaaaaagaaataagaaaataaaatgcttagtcagactgagtatgtcacactcatgtttaatttgattttcatctcgctataagccgttcccattctgttgaggagtacacactccaaaagatttgactgtagatttggcc

SEQ ID NO: 226525 - DNA, 201 bp, Homo sapiens
tgctgtaagagtttgattcagtaaatatagttacattttaagattggcgaaggccacagagaaatcttattttgttctggatctcttttacaatgtgtatstgttcctgcctcactagtatatcatatggtttacataacataattaaactcttatttgaggactgaggatgggtacaactatgtcatccttctgaatatc

SEQ ID NO: 226526 - DNA, 201 bp, Homo sapiens
atttctggggctgaatttttcatgtttatttggagggcaaagaagaattttacagggatattggagaaaaccccttttagataataaaaatatgagttataaaaaaatcctcttttcttaggatttgctttggggcaactaaactctggtgcatgaaaactggttggcttggaattttgccataattgttgaacatcagtg

SEQ ID NO: 226527 - DNA, 201 bp, Homo sapiens
gggtgtgacatggcccttaggctcaagtctgtctgcaaagccctgtaaaccagctttctctgcctccctaacacgcccccgggcaaactcctctgctttcrctgagtggactcttctcttcagttgctatttggtaaattgcccttcatgtttccctttatgttcggctcctaggaagctcaggccacagggaaaagtcaa

SEQ ID NO: 226528 - DNA, 201 bp, Homo sapiens
catgtaggtgtggagaattaaatgaagtattctgtgtcaaggacttagaagtcctggcccatgataagtgctcagtagatgtgagctgccactgctcttattaatatcatcatcatcatcatcatcatcatcatcatcatcggcggcggcagcagcagcaacagcatctttatgaatttattcattatacatttttataag

SEQ ID NO: 226529 - DNA, 201 bp, Homo sapiens
accatatactgagtggcttaaaacaaccgaaatttattgtctcatagttctggaggctacaagtctgaaatcaaagtgtcaccagggccatgctccctctraaatctgcaggggaatctttctttgccttttcctaacttctagtgatttgctggcaatccttggcttgcagctacataactccaatctctgcctttattc

SEQ ID NO: 226530 - DNA, 201 bp, Homo sapiens
caccagaaaaaaaaaagtgttgcttggaagctgaaggcttcatactaatttgttgctttcctcttcaatctgcatgagaacagagcaaggttgctgtctcsggagatttaagcagggaaccaatctagtttgtcttctaaactggaacacatgtgaaagtgaaaggggagtactattaataatttccctaggacagtgggt

SEQ ID NO: 226531 - DNA, 201 bp, Homo sapiens
tgtaggtgtggagaattaaatgaagtattctgtgtcaaggacttagaagtcctggcccatgataagtgctcagtagatgtgagctgccactgctcttattaatatcatcatcatcatcatcatcatcatcatcatcatcggcggcggcagcagcagcaacagcatctttatgaatttattcattatacatttttataagtc

SEQ ID NO: 226532 - DNA, 201 bp, Homo sapiens
gtaggtgtggagaattaaatgaagtattctgtgtcaaggacttagaagtcctggcccatgataagtgctcagtagatgtgagctgccactgctcttattaatatcatcatcatcatcatcatcatcatcatcatcatcggcggcggcagcagcagcaacagcatctttatgaatttattcattatacatttttataagtct

SEQ ID NO: 226533 - DNA, 201 bp, Homo sapiens
ccccagtgaaacgggagctcccttgaccacttcgctggcaggaactgaagctgctagttttactcagcccactgctggccactccccacgggagggagcgkgcaaggaaacgggtgtgggaaccggagtgaaggaacactggaactgctggctgcttctctccagcagaagcaggccctgtgcatgccccatggcagcgtc

SEQ ID NO: 226534 - DNA, 201 bp, Homo sapiens
ggtgtggagaattaaatgaagtattctgtgtcaaggacttagaagtcctggcccatgataagtgctcagtagatgtgagctgccactgctcttattaatatcatcatcatcatcatcatcatcatcatcatcatcggcggcggcagcagcagcaacagcatctttatgaatttattcattatacatttttataagtctatt

SEQ ID NO: 226535 - DNA, 201 bp, Homo sapiens
cgacaggccccagtgaaacgggagctcccttgaccacttcgctggcaggaactgaagctgctagttttactcagcccactgctggccactccccacgggarggagcgtgcaaggaaacgggtgtgggaaccggagtgaaggaacactggaactgctggctgcttctctccagcagaagcaggccctgtgcatgccccatgg

SEQ ID NO: 226536 - DNA, 201 bp, Homo sapiens
gtgtggagaattaaatgaagtattctgtgtcaaggacttagaagtcctggcccatgataagtgctcagtagatgtgagctgccactgctcttattaatatcatcatcatcatcatcatcatcatcatcatcatcggcggcggcagcagcagcaacagcatctttatgaatttattcattatacatttttataagtctattc

SEQ ID NO: 226537 - DNA, 201 bp, Homo sapiens
tggagaattaaatgaagtattctgtgtcaaggacttagaagtcctggcccatgataagtgctcagtagatgtgagctgccactgctcttattaatatcatcatcatcatcatcatcatcatcatcatcatcggcggcggcagcagcagcaacagcatctttatgaatttattcattatacatttttataagtctattcttt

SEQ ID NO: 226538 - DNA, 201 bp, Homo sapiens
tgtcatcaattactagttaatagtcttgagaaattaagagtctactgctagttagcttcttcaagaatttttaaagaaagccttggtagtatagagggaacccccccaccaattttttttttctgtcgtgtatgtttttccttcctaacagcatctttatttctttttgaggtaattaggctagtggaactgtaaccaggg

SEQ ID NO: 226539 - DNA, 201 bp, Homo sapiens
aaccacttacacccttttgagccacagtctccaatgtacagattaatgacaatgcctgcaaaaatcacatatgtaccttcattctgcccttttaacagtayctgtgtggcaatgctcagtattcatggtgaacgttcctaatgaaattgtacctagagccatctggatcactgctgaaataatcatctgaatttcttgtcc

SEQ ID NO: 226540 - DNA, 201 bp, Homo sapiens
gtctcagctgtcagaatgtacaattcagtacagagacgttactctggcggagatgcttcttgcaaagccaggtcattttatttattcatctaacatataayatttatgctctgagattgttctaggcatttgataaatattaatttagcactcatgagcaaacctatcaggtgggtactgttggtatctccattttataga

SEQ ID NO: 226541 - DNA, 201 bp, Homo sapiens
accctacttcaggtatccttctcaaaactctcataggcaagaaccaggtgccccattagctgtgttcccacagcacctcctgtccgtacctctagcagaawataaagcaaaatagtatatgatgttagttgtttccattactggattgagaagaactcctggatgcaaggaccttgtgtttaattgctgtagttttagcct

SEQ ID NO: 226542 - DNA, 201 bp, Homo sapiens
gccttttttctcaggtattcagtgaaattattttgagtttctccatcatggtaatttagttttcagctttgactttttctatttctgtttctaatgaattwattaagtttttattggtatgtaatatattcagagtacttccttaactctggaatttccttttcaaaaccttgtttgtgttttatcttctcaattttgagc

SEQ ID NO: 226543 - DNA, 201 bp, Homo sapiens
gtactgtagtcctgataaggtctcaaaatgacatgtaggagcttctataacaaagttgtttttctcgaatttgtctgggtttgcctcatcactccccttcygtcagtccataccttttcatatttagggtagttctgagaaacttcagaaatctgtctacttaccttctttgattagtaccgcttctgggtgtgtgtaggg

SEQ ID NO: 226544 - DNA, 201 bp, Homo sapiens
catgtgaaagtgaaaggggagtactattaataatttccctaggacagtgggtgtaaattgggcgccaccctagaccagtggttctcagttgggttcttttygactcttctcccccggggcacatttggcattgtctggaggcatgtgtgcttgtcccaacttgagtggggctgtgtgccactagcatcaagtaggtagagg

SEQ ID NO: 226545 - DNA, 201 bp, Homo sapiens
gaaggaattgtgtcaaaaatatctctaacccagctatgtgatttgacccttgactcagttcaggctgtgaaggagatgaaggtgagcagggctgcttctakattttgagtctaggtaactgaaagactagtgttgtcaaaacaagatctcttttcatgggaaaattgatatgtcaactttgtaccttctgagcctgatgtg

SEQ ID NO: 226546 - DNA, 201 bp, Homo sapiens
cagggctgcttctagattttgagtctaggtaactgaaagactagtgttgtcaaaacaagatctcttttcatgggaaaattgatatgtcaactttgtacctwctgagcctgatgtgctggctgtacaagttggagcccccaacaaggagctagggatgtgggtctggagcccagggaagacaggttagtgggacccttgccc

SEQ ID NO: 226547 - DNA, 201 bp, Homo sapiens
ctagttaatagtcttgagaaattaagagtctactgctagttagcttcttcaagaatttttaaagaaagccttggtagtatagagggaacccccccaccaattttttttttctgtcgtgtatgtttttccttcctaacagcatctttatttctttttgaggtaattaggctagtggaactgtaaccaggggccctactcagg

SEQ ID NO: 226548 - DNA, 201 bp, Homo sapiens
atcctcattccatagaggccctgctccatactgggaagaaagaacgttacacagagaggccaataagaatctgaatagtcaggccttgctgatccccaccmccacccccaccaccgccaatctattttctatttccagtagaacacaccccttttgttctaccacatttctacacagctgtgcattcttcactgaacctaa

SEQ ID NO: 226549 - DNA, 201 bp, Homo sapiens
ccagactctgtctcaaaaaaaaaaaaaaaagagtctgtatttccaatagacatgtttatattaagaatttggaatttatggacaacttttccagatctccrtgtactctgtgacatgagagaaagacagcaagtatggatcttcacctagcctggggcagaattttacatcagtgcgtgaagtttggagggataaatgatt

SEQ ID NO: 226550 - DNA, 201 bp, Homo sapiens
gtcttgtgccagttttcaaagggaatgcttccagtttttgcccattcagtatgatattgactgtgggtttgtcatagatagctcttattattttgagataygtcccatcaatacctcattttttgagagtttttagcatgaagggttgttgaattttgtcaaaggccttttctgcatctattgagataatcatgtggtttt

SEQ ID NO: 226551 - DNA, 201 bp, Homo sapiens
taaaattctctttttttgttgtgtctctgcccagctttggtatcaggatgatgctggcctcataaaatgagttagggaggattccctctttttctattgawtggaatagtttcagaaggactggtactagctcctccttgtacctctggtagaattcagctgtgaatccctctggtcctggactttttttggttggtaagc

SEQ ID NO: 226552 - DNA, 201 bp, Homo sapiens
aaattgagataaaactgttttctccacagtaggaagtcaattaaaatcacagcctgtaagacagaatttatatatatctatcagttatctacaacttacgmagtggtgcaaaatagctcaaagacattgtacaaggctagagtcagacagctggaaagagtgtgtttatagatgatgtgtaggttttcgttgaaatgtaat

SEQ ID NO: 226553 - DNA, 201 bp, Homo sapiens
gccctaagtattgacttagaatttaactttgaaaagtacaaaataacccactaattggggatgaccacacacaagtaaatggcaaagacatagagatcaakatgtgtgctacaaaacatgggaaaaactagggacattttataacacatagcttctggctttcaaccttgtagcctgaagactgaaaagaaaaagaaatac

SEQ ID NO: 226554 - DNA, 201 bp, Homo sapiens
tgaaagggttttgaaaggatgttgctatccatcctcagaggagtagagattcaaatgattatgttttcttagctcccatgaagtcgaagtttgtatctcarttgatttctcaatttactgaagctcctattataattatccctattataacatgggtgtaattgatcactttcgctcaagtgatccctgtcattgtctcag

SEQ ID NO: 226555 - DNA, 201 bp, Homo sapiens
caggaacagaaaaccaaatgttcttacttgtaagtgggagctaaatgttgggtactcatagacataaagatggcaacaattgatactggggactactggargagtgagtgagggagggaagcaagggttgaaaagctaactgttgagtactattctcagtacctggatgacaggatcatttgtactccaaacctcagcatc

SEQ ID NO: 226556 - DNA, 201 bp, Homo sapiens
acagagagagaaaaactactttgatttcagtgtatgcagaaattgcacaatctgaacaatgtcatatttaatgatatgtcaataaatgaaattttatgctmttgtgattaattactaaatgtaatagttattaaaatgtctactcttagagacattttatgagttagcttttctcagttcttaagaattcctgaaactgca

SEQ ID NO: 226557 - DNA, 201 bp, Homo sapiens
acaagaaagaatagtaggtgttgactaggcatggagagggctagagtttgtttatttctgttctatttgattcagtttaattaaaaaaattaatctacctmcttcagtttaattcaatcaattattatttagcatctgtttttttagggctgtagcaaagtcctgtgaaagttacaaaggtcagcaccacattgaatctct

SEQ ID NO: 226558 - DNA, 201 bp, Homo sapiens
tttacttcatttatttttctgctccctgatctcatattgtattttcatacagggttgccactgtaggggaatcattttaaacccatggatgtaactattatttttttatattttcatacatttataagtcttctataaatcttgatcgaattttttttgttatcttcggggaatagccatgaaggtctcaatactgggaaa

SEQ ID NO: 226559 - DNA, 201 bp, Homo sapiens
tattgtattttcatacagggttgccactgtaggggaatcattttaaacccatggatgtaactattatttttttatattttcatacatttataagtcttctrtaaatcttgatcgaattttttttgttatcttcggggaatagccatgaaggtctcaatactgggaaatttggggatatcatgcagcctgacaattcatcac

SEQ ID NO: 226560 - DNA, 201 bp, Homo sapiens
ccaccgtgcccagctcatttttgtattttttggtagagatgaggttttgccatgttgcctaggctgtcttacctaaatccttatcacacaattaaacttaycctcactcttctcttttggtttgctttaatccctgtatcctttatgaatacagccttattttatataaaaataagaagaaaaaatgttatggtatttttt

SEQ ID NO: 226561 - DNA, 201 bp, Homo sapiens
tctcttgtaactcagaggttgtgttaatcaaggttatccagagaaaaagaatcaataaaaagagatttattatgaggaattaactcatttgattatggagrtggagaagtcccatgatctgccgtctgcaagctggagattcagaaaagctggcggtatagtctcagcctgagtctgaagggctgaaaaccaggagacctg

SEQ ID NO: 226562 - DNA, 201 bp, Homo sapiens
catttcaactttggtgaatctgacgattatgtgtcttgggtttgctcttctcgaggaatatatttgtggcgttctctgtatttcctgaatttgaatgttgrcctgccttgctaggttgaggaagttctcctggataatatcctgaagagtgtttttcaacttggttccattctcctgtcactttcaggtacaccaatcagt

SEQ ID NO: 226563 - DNA, 201 bp, Homo sapiens
tcttgtttcatctcttccatacagtccctcaggtacgtgctgttggaaagtttaggaaacgaattcctagcatccagatttcatctgtgtctgtttatatwtgtgggttggaggctgtatatatttgtgggttggaggcctagggtagtttgcaagccaccaatcggattgaagtcttgataattttgcctccatgagatt

SEQ ID NO: 226564 - DNA, 201 bp, Homo sapiens
ctccttcctcctaaacatgtctcttgtttcatctcttccatacagtccctcaggtacgtgctgttggaaagtttaggaaacgaattcctagcatccagatwtcatctgtgtctgtttatatttgtgggttggaggctgtatatatttgtgggttggaggcctagggtagtttgcaagccaccaatcggattgaagtcttga

SEQ ID NO: 226565 - DNA, 201 bp, Homo sapiens
cagtgagctataactgcacgacggcactggcaacaggagtgacacctagtctcttaaaatacacacatacacacactatacacacacacacacatatatayatacacacatatatctacacgtatatacacatacgtatgtgcgtatatatatatacacatatgtccatatatacacacacatatatatgtgtgtgtgtcc

SEQ ID NO: 226566 - DNA, 201 bp, Homo sapiens
tagctccttcctcctaaacatgtctcttgtttcatctcttccatacagtccctcaggtacgtgctgttggaaagtttaggaaacgaattcctagcatccasatttcatctgtgtctgtttatatttgtgggttggaggctgtatatatttgtgggttggaggcctagggtagtttgcaagccaccaatcggattgaagtct

SEQ ID NO: 226567 - DNA, 201 bp, Homo sapiens
gtggtcagtgcatagtatttatgttttgatcacagagagctgaagttaacaagatttgatttgaaatgtcaagttgtggcttcctctgttttgtgagtttyttccgagagaaggctgcagtctacatacaggaagggtgattgtccctgtaatcatgcacacatatacttacggagcaagtggtgaggtttatattagaag

SEQ ID NO: 226568 - DNA, 201 bp, Homo sapiens
gcttcccatgggctagagttacaatggttgtgttcactgtatgtgtgtactatatttcttaggacatgctttgacttgcggcctggccagatttgagttayaacagagctccgtgcgattccagctggcagtttgccagtgtactgtttccacagactttcacacatcctccttcagtgacttctatacagaaaactggaa

SEQ ID NO: 226569 - DNA, 201 bp, Homo sapiens
aaacaactagctccttcctcctaaacatgtctcttgtttcatctcttccatacagtccctcaggtacgtgctgttggaaagtttaggaaacgaattcctakcatccagatttcatctgtgtctgtttatatttgtgggttggaggctgtatatatttgtgggttggaggcctagggtagtttgcaagccaccaatcggatt

SEQ ID NO: 226570 - DNA, 201 bp, Homo sapiens
cctctgttttgtgagtttcttccgagagaaggctgcagtctacatacaggaagggtgattgtccctgtaatcatgcacacatatacttacggagcaagtgrtgaggtttatattagaaggaccatgcatgtcatataaatggaataggcatccctaagtgaaactttttcagagaaatggaaatagagcatgcaagaaaga

SEQ ID NO: 226571 - DNA, 201 bp, Homo sapiens
agatacaagatcaatatacaaaaataaatcttatttctatatactagcaatgaacagtctggaaaagagattaagaaaataatcttatttataatagcagccaaaaaataaaatatctaagaataaacttaacagaagtataagatgtgaaaactagaaagtagttgaaagatattaaagaataaataaatggaaagatat

SEQ ID NO: 226572 - DNA, 201 bp, Homo sapiens
gaccagaactgaatatatagttttaaaaatgttcatggcctattcacactttggattggactgcctatgaggtccccagtttcaggattctcctgatccayggaggatgattcctgctagtgaggtctttatcgacatcttatttaaggtacacctcccctttctttatcttagcctcttttttcctttttttattttatt

SEQ ID NO: 226573 - DNA, 201 bp, Homo sapiens
gctctgtcacccaatctggagtgtagtggcacaatctcagcacactgcaacctctgcctcctgggttcaagcaattctcctgtctcagtctcccgagtagytgggactacaggcgcctgccaccatgcccggctaatttttgtatttttagtagagatggggtttcaccttattggtgaggctggtcttgaactcctgacc

SEQ ID NO: 226574 - DNA, 201 bp, Homo sapiens
caagtaaacagataaatatatagaattacaggttttcttcctatggctgtgaaggaaattgaacaggatgcagtgacagaatatagcaagaatcatatatrttagactgaatggacttacaagtcttcttggaggtgaaaatgtttaagcagagatgtaaaaatgaaaaaagtagccccgaaaaaggagtagggaaaggag

SEQ ID NO: 226575 - DNA, 201 bp, Homo sapiens
tctatacttaagagtgaaaccaaaattggaaaaaagatataatcagaacccaccaccatcctatttcagcacagcatgcaattctcagataaaaaaaaaawtttttttaagagaaagcattttaagataatatctccatgagccatttctgtaaaaagcaagtgaagctttgactccccctgagaaattgctttgcaattg

SEQ ID NO: 226576 - DNA, 201 bp, Homo sapiens
ctatacttaagagtgaaaccaaaattggaaaaaagatataatcagaacccaccaccatcctatttcagcacagcatgcaattctcagataaaaaaaaaatwttttttaagagaaagcattttaagataatatctccatgagccatttctgtaaaaagcaagtgaagctttgactccccctgagaaattgctttgcaattgt

SEQ ID NO: 226577 - DNA, 201 bp, Homo sapiens
gcagacctattgctgtctttattaaaaagatgccaccaagcaggtggtcctgttctgagtgatacccccgagagtcggcttgaaagaaatcaccggaaacytcacatctccctaaaacagcttaggctgtcttgagaaatgtgaaaggtgatcagatgactgtgccaagtgttctgggtgtgttgaacatatgtatcctca

SEQ ID NO: 226578 - DNA, 201 bp, Homo sapiens
taaagagccacacctgcatcatcatctccattttctttgttttcaaaccttatgaaagagacaactgttgatgaaattttattttaaaaccattagtcccycttttttacacagatgaatcattaaataaccaattagttataaaagtgatttatcaggaaatatagggctttttccttaaaattcatttccccacactca

SEQ ID NO: 226579 - DNA, 201 bp, Homo sapiens
gagagtcggcttgaaagaaatcaccggaaacttcacatctccctaaaacagcttaggctgtcttgagaaatgtgaaaggtgatcagatgactgtgccaagygttctgggtgtgttgaacatatgtatcctcaaattgtaaaacttgaaactttggcaattatgttaataaaggtaagcaaactagttgacatcaacacatg

SEQ ID NO: 226580 - DNA, 201 bp, Homo sapiens
aagagccacacctgcatcatcatctccattttctttgttttcaaaccttatgaaagagacaactgttgatgaaattttattttaaaaccattagtccctcytttttacacagatgaatcattaaataaccaattagttataaaagtgatttatcaggaaatatagggctttttccttaaaattcatttccccacactcagg

SEQ ID NO: 226581 - DNA, 201 bp, Homo sapiens
tttttaaggggtcagggggaaggctttgcaattttcatttatgcattcagtgaatatcaaacacctattctctgccaggcacagagctaagcaaggtaaaraaaatgatgatctgggcagatacactccctgacctcccagagcctggaaaaaggaataaacaagcagtcacagtgcaggcggatggaggtacagtggggt

SEQ ID NO: 226582 - DNA, 201 bp, Homo sapiens
ggaggctcacatcctactagcttatggtagaaagattgtgggtttcccccaccccacccccgctgcttcagtaatgcctataaaaactttgcacagaccaygctggcccaagttaagctacaggatcattgctgagccaataaccatggccagaaggatagggttccctgagaggccagatctggattatgaacccatccc

SEQ ID NO: 226583 - DNA, 201 bp, Homo sapiens
ggaaatatttgagttgtgttttgaagaatgggtaggatttagccatatgaagaagggacggaaacaagggcattacaaatagtgagaagagtgtgtaccaaaaaaaaaaaaaaaaaaaaaaagagtgaaacctatgatacgttttagaaaaggcaaactattcagtgtgatggggaagaaggaaggagcagggatatgata

SEQ ID NO: 226584 - DNA, 201 bp, Homo sapiens
gaaatatttgagttgtgttttgaagaatgggtaggatttagccatatgaagaagggacggaaacaagggcattacaaatagtgagaagagtgtgtaccaaaaaaaaaaaaaaaaaaaaaaagagtgaaacctatgatacgttttagaaaaggcaaactattcagtgtgatggggaagaaggaaggagcagggatatgatat

SEQ ID NO: 226585 - DNA, 201 bp, Homo sapiens
gctctctctctaatgacctattgaaggccctgctatggtttgaatgtatgtgtcacccatcccccagacaaattcgtatgttggaacataagacccagtgwgagcctgggcaacatggcgaaactgtttctacaaaaaaaaaaatgcaaaaattagctggtggcgcactcctgtagttccagctacttaggaggctgagac

SEQ ID NO: 226586 - DNA, 201 bp, Homo sapiens
ttaatttgattttcatctcgctataagccgttcccattctgttgaggagtacacactccaaaagatttgactgtagatttggccaaggtttgtgtgcttcmattctgggtagatgtgtgcaccattttcagtttctgactgtctttttttggcctcttgtgcgggaggtatgaggcacaagttttatcaatggtttatttg

SEQ ID NO: 226587 - DNA, 201 bp, Homo sapiens
ctccaaaagatttgactgtagatttggccaaggtttgtgtgcttcaattctgggtagatgtgtgcaccattttcagtttctgactgtctttttttggcctyttgtgcgggaggtatgaggcacaagttttatcaatggtttatttggctagcaccatataccatggcatatggaaattctatttagagacatggggagaaa

SEQ ID NO: 226588 - DNA, 201 bp, Homo sapiens
atatccaggaagaactaatatcccccgactgggtgaatcttatctctactaaactgagactcaaggaatgtgttttagagcaagatgaaagtgtaaattasaatcagttctacaggtatgtgtgactactctttttctcttaattgggaccttcttactagtttgttttaaaaagactgcaaagtcgtgtctgattttcat

SEQ ID NO: 226589 - DNA, 201 bp, Homo sapiens
ctgtagatttggccaaggtttgtgtgcttcaattctgggtagatgtgtgcaccattttcagtttctgactgtctttttttggcctcttgtgcgggaggtaygaggcacaagttttatcaatggtttatttggctagcaccatataccatggcatatggaaattctatttagagacatggggagaaaatgtttgttgttgta

SEQ ID NO: 226590 - DNA, 201 bp, Homo sapiens
ttaattaaaatatccaggaagaactaatatcccccgactgggtgaatcttatctctactaaactgagactcaaggaatgtgttttagagcaagatgaaagkgtaaattagaatcagttctacaggtatgtgtgactactctttttctcttaattgggaccttcttactagtttgttttaaaaagactgcaaagtcgtgtct

SEQ ID NO: 226591 - DNA, 201 bp, Homo sapiens
atgcttgctgacttttgctttcttctcagcagctaagacattccaatggagctaagtttactaagattaatgctagatggaaaaagaatgcacttgtaccwcttctggccaatagttaaataaaactagctggccaaataaagcatttaaaataaaatgcagagtggcatttcaattgggttgaatgaaatttattgtgaa

SEQ ID NO: 226592 - DNA, 201 bp, Homo sapiens
gcctctttgttttcctactcaagcctcagcaatgatggatgcccctcccccagcctcactgctgctttgcagttcgatctcagactgctgtgctaacagasagcaaggctccgtgggcgtgggaccctccgagctaggcgtgggaccctccgagctaggcgcgggatataatctcctggtgtgccatttgctaagacagtt

SEQ ID NO: 226593 - DNA, 201 bp, Homo sapiens
atctcagatgatttccccctttctctgtggttccacttttggtgcctatatgcaaatctcagctgtgtcttataaaccagcattcttgaaagtgtgcttcrtgggatactagtccaatgagattctccatgagaagaaaattcttttgttttaaaatgtatggataatactgtatgttctaatgccctacttggagagttc

SEQ ID NO: 226594 - DNA, 201 bp, Homo sapiens
gcgtatgcaaattcctgtttactgtaaaattttctcaaattctcctcagaagcctaaagacttctgtataatctactcctgtaaaagaaaattaattgatmttaattaatctttttcccctggatggcaattttttttcttgatctcagtgttggtaatacgtcattcattgttctttttttttttttttttttttttttt

SEQ ID NO: 226595 - DNA, 201 bp, Homo sapiens
aaatctatcagttacatggtccaattgtaggggtgatatttactaattttgcattctattgaacagcgatatataatggaatgtatgttgtgaatcttcartaagtgtttcttttctcttataacccaatgaattgacctctataataacatgcagttgctaaatgaaaaaagaattgtatttaagcagaaaaaagtttta

SEQ ID NO: 226596 - DNA, 201 bp, Homo sapiens
tagctcagcttttgacatgccttcctcgccaagcttaatcatttctaatttttgatctacagggagagacatgggactcttcctttcacttgaacacttakaagctgttgtctgcttattagttggactaatttcaatttgttgtgtctcagggaatagggaagcctgaggagagggaaaaatggctagtcagtgcagcag

SEQ ID NO: 226597 - DNA, 201 bp, Homo sapiens
atcttagactcttaggaaagcaaacggggcaggttaaccttggtattttgtttgtttgtttgtttgagatggagtctcactctgtcgccaggctggagtgyagtggcacaatcttggctcactgcaacctccgtctcctgggttcaagtgatcctcctgcctcagcctcctgagtagctgggagtacaggtgtgcaccacc

SEQ ID NO: 226598 - DNA, 201 bp, Homo sapiens
ggaggaaggcttggacattcttagcaaagatgaaaggaaatcgtccttgcgtttagggagcatatagtttagtggaaagacagacatgcaaacagattacsacagtataaaatgacagtcactcaaataagatatgtgtgaatccagacaacatttatatttttggcacttatattatcctttacttgtttgtttgggtta

SEQ ID NO: 226599 - DNA, 201 bp, Homo sapiens
ggggagtagtggtaaccagagtatatgtattagagggctagggctgccgtaatcaagtaccacaacctgggtgggtggcttaaacaatggaaatttgtcgytttacagttctggcaactacaagcccgaggtgaaggtgtcagcagagctgttcctcctgagggctctaagggagaatctgttcagtgtgtccacttcact

SEQ ID NO: 226600 - DNA, 201 bp, Homo sapiens
cttttgtgctagggcagtgacagagaagagtcgttgtaacagcccaaaatgtttactgtctggttctttacagaaaaagtttgctgatccctgatctaaakaattagaaattaaactgcatttgtatttaaaatgtatacaatttgaatatattttcctcaagcatataaattaattatacattgaaaaaattaaaattaa

SEQ ID NO: 226601 - DNA, 201 bp, Homo sapiens
aaatatttgagttgtgttttgaagaatgggtaggatttagccatatgaagaagggacggaaacaagggcattacaaatagtgagaagagtgtgtaccaaaaaaaaaaaaaaaaaaaaaaagagtgaaacctatgatacgttttagaaaaggcaaactattcagtgtgatggggaagaaggaaggagcagggatatgatata

SEQ ID NO: 226602 - DNA, 201 bp, Homo sapiens
aatgaagaaatagacagggaagataaataaactaaattctctagtaaaaccagaaattcctcatatctgattttactgtgtgtatgtgtgtgtgtgtgtatgtgtgtgtgtgtgtgttcgaacacaaggatgcaagtgtgggttattgacatacacttaaaatgaaataggttgttacctcatagatcttaaaagctttaa

SEQ ID NO: 226603 - DNA, 201 bp, Homo sapiens
atgaagaaatagacagggaagataaataaactaaattctctagtaaaaccagaaattcctcatatctgattttactgtgtgtatgtgtgtgtgtgtgtatgtgtgtgtgtgtgtgttcgaacacaaggatgcaagtgtgggttattgacatacacttaaaatgaaataggttgttacctcatagatcttaaaagctttaaa

SEQ ID NO: 226604 - DNA, 201 bp, Homo sapiens
aagttttccctggacattcttaggtagcagacgtttctttttcttggacctcctatagcatttattcagaccttttttatgacttgcattacttcttgtastatattttagtacttttattgttatcatctctcttactagactctggtctttttgaggacaggaatgttttcagatttactttgccaactctgtggcacc

SEQ ID NO: 226605 - DNA, 201 bp, Homo sapiens
atccagtgtaaatgtccccattcccccatcttttcctgagatggacccaataaatgagtgggagtggtctgagacctgctgggcatacatttctggaaccracatctgggagttatgagtaggcagagaggagattttcattttctgtgataacttcccacagtaagtaggtgggagggtgaggtgattgatgagctaaat

SEQ ID NO: 226606 - DNA, 201 bp, Homo sapiens
actcactgcagtctccgcctcctggtttcaagtgattctcctgtctcagcctcctgagtatctgggattacaggccacaccctgtaatacaaaaaaaaatwttttttgtatctttagtagagatggggtttcaccatattggtcaggctggtctcgaactcctgacctcaggtgatctacccacctcggcctcccaaagtg

SEQ ID NO: 226607 - DNA, 201 bp, Homo sapiens
tgccagaaacttttccctcttggctttaattctggatagagggtaacttgtagatgatctaagtttaaattctagaccccagtgttaggattgtctttcghtacagctccaaaaagatcctccagtgaacatgggtccttcttgctctgctcacatctcagactgcgggtagtgtccactgaggccaactactctgggaat

SEQ ID NO: 226608 - DNA, 201 bp, Homo sapiens
gttccatggccaacgctaggttctttttactcacagctgactaaataataattaggaggaagctgatgaaaataagcaccaatgattgtttttttttcccstctgtgccagattctatgccaagcacttatgtgaagtagatagtattactaatcctattttatgcatgaagaaagaggttgaggttacataacttggtgg

SEQ ID NO: 226609 - DNA, 201 bp, Homo sapiens
ctctgcttcaccagaatgtgagccacagggcaaagactttgctctgtgttgttcagtgctatttccccagtgcccaaacagtggctctaggaagtaagtgytgagtgaatgttgaatgaataataataatagtaagttgcagcctagagttaggataaatgattacttaaggtagcagcacttttttttgaaagcagaaag

SEQ ID NO: 226610 - DNA, 201 bp, Homo sapiens
tgttgttcagtgctatttccccagtgcccaaacagtggctctaggaagtaagtgttgagtgaatgttgaatgaataataataatagtaagttgcagcctasagttaggataaatgattacttaaggtagcagcacttttttttgaaagcagaaagctcctgttgtaacaaaaatcactgtagctgtatgggttagtgaaca

SEQ ID NO: 226611 - DNA, 201 bp, Homo sapiens
gggagactttaacaccccactgtcaatattagacagatcaatgagatggaaggttaacaaggatatccaggacctgaactcagctctgcaacaagcagacytaatagacatctacagaactctccactccaaatcaacagaatatacattcttctcagcaccacattgcatgtattctaaaattgaccacaaagttggaag

SEQ ID NO: 226612 - DNA, 201 bp, Homo sapiens
aaaaaaaaaaaaaaaaaagaaggtgggaaaaggaaggaagatcaccatttatgtctttttgctgatagatgatgtgggaaactcccatacacctttcacarcagtcacacatatgttgaatgggcaaaccattctttgacatctactcactcccttttactctctctgcattacttacttgtctccaaggctgtgtctaag

SEQ ID NO: 226613 - DNA, 201 bp, Homo sapiens
tcctctgctctgcttcctcacacactagaaacaccactgcccccatccatgcagcacccctctccccacgttgccctgcatgttcagttacagagcaggcygccatcactacccacctccacaagacacccctcgctcctgcctcctcagatgctatcatttctctccaagaaagaaagggaaaaggctgggcacgatggc

SEQ ID NO: 226614 - DNA, 201 bp, Homo sapiens
tctgtttggaggggctggtagatttcccagaccataagatgttcaattacctgtaggggataaattgccagtccaagttgggtgtaataactggactaaartttgggggtgctggccaatgggtgtccttacttgatatttgggtatgttttcacctggccacctggtactctacatggagaccctaattctttaaggact

SEQ ID NO: 226615 - DNA, 201 bp, Homo sapiens
ccattgtaatgtaaaccctgtctctactaaaaatacaaaaaagtagctaggcgtagtcgtgggcacctgtaatcacaggtacttgggaggctgaggtaggmgaattgcttgaatccaggaggtggaggttgtggtgtgtccagatagtgccactgcactccagcctaggtgaccatgtgagactccatctcaaaaaaaaaa

SEQ ID NO: 226616 - DNA, 201 bp, Homo sapiens
catggtcaaggggtaaagctcccccttcctactattccatttaagctcctcatcttctgtttggaggggctggtagatttcccagaccataagatgttcarttacctgtaggggataaattgccagtccaagttgggtgtaataactggactaaagtttgggggtgctggccaatgggtgtccttacttgatatttgggta

SEQ ID NO: 226617 - DNA, 201 bp, Homo sapiens
ccatttgtggaaaagactatctgggctttctcttctgtttcactgatgtatttggtggcttttgccaataccacactgtttcaattactatagctttgttstaactcttgaagtcggatagtgtcagtgctcctactttgttcttctcatttaatattgtcttgcatattctgaatcttttgcttttccatgtacacttta

SEQ ID NO: 226618 - DNA, 201 bp, Homo sapiens
tataagaagttctctttcagagtataaggttgagaaccatgagaagaactctcacattttagtaattgctttatggaataacttacctcctaaaaacataygtttttcagcttcaactcgttcctttcctttctgtgccattttgagaatctcctcattatatataatcacaatcttatgttctgagtttctccttttaac

SEQ ID NO: 226619 - DNA, 201 bp, Homo sapiens
aatcttatgttctgagtttctccttttaactatttcctcaagtgccatcacttaataatattttcttttctgtttatcaactagttggggaagtggtatgsttgttagtactgatgagtttcttaggaaaatacagaaataatttaatcttaaagattttctatctgtcagagaatctgtcataaaacatgcctgaagcaa

SEQ ID NO: 226620 - DNA, 201 bp, Homo sapiens
ctcctttaacagtatctctcatttccgggtctcagacaatttaacatgtataataaatatgtatattgaataatcctatgtaccagaacacaaagatactrtattccttttcctgcttccggttaagtcccagtttcctgtatccactttacaatgtcagccagcttatccttcgtgctgccttccctttccctctcattc

SEQ ID NO: 226621 - DNA, 201 bp, Homo sapiens
ggttaagtcccagtttcctgtatccactttacaatgtcagccagcttatccttcgtgctgccttccctttccctctcattccaaagtcacttgaaacccayggtttatgcaaaatttgcaaagttgggcaggattgcccctagagttgtagaactgtgagacattgctgcatcttgttgtgggatgaggcaggcatcttta

SEQ ID NO: 226622 - DNA, 201 bp, Homo sapiens
gatttatgctgtctccctgcctctgggcttttccaatgtagcctataactttatctgaaccacagccctgaccatatcattcttctcttcccttgttaatmaaccaataaggaatgtctgttttttgaggataaagtccaaattccttagaatagtttttaaggaccttcattgtactggctcagtctcccttctttccgg

SEQ ID NO: 226623 - DNA, 201 bp, Homo sapiens
ccttccacatttataaataccttctctgacagaaacttggttcccattatccttaatatatatactcatttgttcaatattagccttcactgcccaccacstgcgtacatctcatcctctgctctgcttcctcacacactagaaacaccactgcccccatccatgcagcacccctctccccacgttgccctgcatgttcag

SEQ ID NO: 226624 - DNA, 201 bp, Homo sapiens
ctcaaggcccttaacttaatcaaatttcaacttaatcacatttgcaaaatctttttgcataacatattcgcagcttcttcaaattaaaacgttgacatctytaggtgtggccatgattctgcctgccacagtagaacttgttttcaaagtaatcaggttttgccctcagcaaattaacgcaggaacggaaaaccaagcacc

SEQ ID NO: 226625 - DNA, 201 bp, Homo sapiens
gtgccataatagtcaggtagcccaaacctttcggaatgctgtgtgccgtagatggcttttactttggcttgggatttttaaaactgaggttgcattgaatstataggtcaagttgagaagaactgatatcttgacaatattgagatttcctgtctgcgtatgtggatagctttcctttttcttagatcttttgtatttctt

SEQ ID NO: 226626 - DNA, 201 bp, Homo sapiens
agaagacaattgactttgtatattaacttttgtcccacaagcttgctatgattgcttattagttctagaagtgtattacttgtataattaaaaaaattttwaaaaagaatcaaagagtatggaggagaaactttcagcacacctgtgcacatcataatcattaaaatgtgatgaaatatgttgacaccaggtgttgctttt

SEQ ID NO: 226627 - DNA, 201 bp, Homo sapiens
gccttgtgacacagggagaccactggcccaaagatcagactgtaatatctaaaggccttgatgaattatgtgatacaaaactcaagtgctctaggagatasgtcctttaccttaatgggtaatgcctttgccaggtcataggctattttttctctagcattcatcactgccaaacatactgtaattaacattcatttatta

SEQ ID NO: 226628 - DNA, 201 bp, Homo sapiens
gttcaaagataggccatgaatgaagacatctaaacacagccatcttgttccatagttagttccaagataaagtcaaacagaaacaactagaagccttggakgcactgtttgtttggtaaattttgattcatggtctcattaatgcctcatcagcctcttgaccgttagtctgttcaggtagctctgtgtggggatcttcat

SEQ ID NO: 226629 - DNA, 201 bp, Homo sapiens
cctagcctcgagcaaccctcccacccaataatgattttaattaaggacagttaagtatagagaagtaccaaggaaattcatgttatttaataccagttaasacagtattaacagcaaatttgtgatacagtgaattatgcatttctttattacatattaaataatgagaagtggtagcagctataatgaccatcataattg

SEQ ID NO: 226630 - DNA, 201 bp, Homo sapiens
aaactcaggcttagagaacttaaataacttgctcagtgtttcacagctatttacagtggagtctggtgattccatctttgttgaggcccatctttgttctrtgccaatgagtctctaacaagcatcagtttcacctgaagcgattgttgatacctagatggctggtccctcttccagagtttctgatttcatcagtaggtc

SEQ ID NO: 226631 - DNA, 201 bp, Homo sapiens
ggttttcaaactttcatgtacataagaattttctggggatcttggtacaatgtagattcagcaggtggggcctgagggtctgcatttataacaagtgccakgtgatgcccagattgctgggttgggccaccacactttgagtaaaaagacttgtggaaatttgttgccatttcattttaatgtagtgagtggtgatgttta

SEQ ID NO: 226632 - DNA, 201 bp, Homo sapiens
ttcattaattaaccagggtgatactagctgctttagcattatagactccaaaatgtaataatggcttaaactaaatggaagttttttttcatttacgtaasagtctggtatcagtgcttctgcaaaagagttttcttcctgggatatttcatatgtctcccatcttgtgtttctgcctttccctaggtccgtagtgctatc

SEQ ID NO: 226633 - DNA, 201 bp, Homo sapiens
gagttatctttaaatatttcttcagctgctgagtgcaatttatttcttctattgccatactccttcaagtcttaactcctaagagcatttttacaacatgmtcattttcatattggtgtgttcccattctcatgtttacacattgtggacagactctttcgagtgacagttaattttccttttcagtactctcctaaccag

SEQ ID NO: 226634 - DNA, 201 bp, Homo sapiens
ctcaaactcacgaattttcaaaggtatttgaagctgaaatgggcctttgagttgttacttgatattttcatgcatgtcctgagattacggcctggagcttygctttgagaataatagtcagaaacagctatttgattgtgtctttagactcctaagtaagttaacaggggagttaatgtcggtatgaaacagtttagctaa

SEQ ID NO: 226635 - DNA, 201 bp, Homo sapiens
cgatactcctattgggataggaattgaatactgctcttagtggggctttatttttatgaaatagaaacaaaagctgtaaataccacaaatgcagaatgttstagacttccagagccgctaaaacaattcttcctaaagagctggtgaaatcctttttagggaatatcaatatacagattgcattccaagtttttgtctgga

SEQ ID NO: 226636 - DNA, 201 bp, Homo sapiens
acttccagagccgctaaaacaattcttcctaaagagctggtgaaatcctttttagggaatatcaatatacagattgcattccaagtttttgtctggatcamagatgaatagacagggagagatgaatgtcctgggggaacactatcatggtgctttttaaatcatcctgttgcacttaggcattgcagcctgtgattatat

SEQ ID NO: 226637 - DNA, 201 bp, Homo sapiens
gaatagttaacagggtccacccctagttgctaggccactttgggttactatagatcgtgagatgattccagttctcagggctttagaagattttactgacygtattatgggggaaggcacttgagggaaaagtctagttcacgagaggagtgagctctcatccaaggtaacattacttttccacacactaacacatttcca

SEQ ID NO: 226638 - DNA, 201 bp, Homo sapiens
tagggaatatcaatatacagattgcattccaagtttttgtctggatcacagatgaatagacagggagagatgaatgtcctgggggaacactatcatggtgstttttaaatcatcctgttgcacttaggcattgcagcctgtgattatatatatttcagataagttttctgtagtccagagggattgctagccaaggtaatg

SEQ ID NO: 226639 - DNA, 201 bp, Homo sapiens
aaatccctcttctcatttctgagtgtatggacaatgagaaatcttaaaaggggagcaatttctgtcttgagatttcatttatgacttaattatgtgttctktggtaaattactttcactgtaatgctgattaagaatgaatgtggttattatgttttgatcttgcattgcttcagtaacttcttagaaatcatccttttta

SEQ ID NO: 226640 - DNA, 201 bp, Homo sapiens
gcaaaactaaaagcatcatttctcagattctcttttagccagcttcaaaaaaagtcttctccaattagatgtgtatatgtgatgtgtggaaggtgaaagcsatgtggaggccatatttcagccctcctttggctgtttctgctggtaaacgtagctgtggcaatgtccaggttccctgcagtcgtgtttttctgcccactc

SEQ ID NO: 226641 - DNA, 201 bp, Homo sapiens
acacatgcatgagttagtgatgctttaatttatatatagatgcttcagtgaaaagggaagatataatgtaagtgtagaatgatgtcatatggaaaaaaacscaagcaaaggatgtagtagggcctttggaagaacctagacctcaaaaaatcagaggcacctggacagaatgatctgctcttggtaatcttctctctgctt

SEQ ID NO: 226642 - DNA, 201 bp, Homo sapiens
tttgtagaatatggtggttataagaaaaccaccatacacacacacacacacacacacacacacacacacacacacacacacacacacacacacacacacayaaaatcccagagaacaatgaaggttccaaagctgtccttttagacaaagtatccatatctaaagttgttgaatctgcttttcaaaatgcgatctttgtat

SEQ ID NO: 226643 - DNA, 201 bp, Homo sapiens
atcatcctgttgcacttaggcattgcagcctgtgattatatatatttcagataagttttctgtagtccagagggattgctagccaaggtaatgagcactgstaggaatcttgacagcaaactgtaaatggtctcaatgccacagactttcaagaaactgggaccttcttgaagtgaatggctatttctgtcctatttaagt

SEQ ID NO: 226644 - DNA, 201 bp, Homo sapiens
ttgacagcaaactgtaaatggtctcaatgccacagactttcaagaaactgggaccttcttgaagtgaatggctatttctgtcctatttaagtaattcattstcatctgtctccgattagtggtgagccttgtgtcatatgtgatagttataataaggcacttaccaaaacttccttttaagggtggaaggcattttgggtt

SEQ ID NO: 226645 - DNA, 201 bp, Homo sapiens
taaggagtaagcagtttgcaaagtggattgagatctggtgagagcgggttcccctcatctgcttccatatgatttgaaatgccaactgcttgcttaatttmgaacaatatactttctctaaatgtatttttaagattcatgtttattcctttaatagctgatttaaatgaaccagcaactgatacaaatccacaggaaaaa

SEQ ID NO: 226646 - DNA, 201 bp, Homo sapiens
ccgattagtggtgagccttgtgtcatatgtgatagttataataaggcacttaccaaaacttccttttaagggtggaaggcattttgggtttgattgtcatsgagcaaggtagaagaaagaagccctcacttcataaaaggccacactggtagacaaagcaatatgaaggggtgtaatatgtgaacagagttcacaatcttc

SEQ ID NO: 226647 - DNA, 201 bp, Homo sapiens
tgagaccctatctcaagcaaacaaatgaaaaactaataattgagttcattaaggtggcaggatatgagatagacatttaaattatcaattgtatttctttrtactagcaatgaatctgtggacacaaattttaaaaatatagtacaatttgccttagctcaaaaatatgaaatacttatgtgaatccaataaaacatttat

SEQ ID NO: 226648 - DNA, 201 bp, Homo sapiens
gttttctttttgtggggggaaaacctaatctcaagtcctagaacatggaaggttaatgaccaacttgctttaaagagagaaatatgacaagcaaaattgcsaaatctgctgaagaactaatcaagcatattgttcccttgattctagaaaattgcaatgtgcttttaaaaaggttgaaaagatgtccatggtgtacccttg

SEQ ID NO: 226649 - DNA, 201 bp, Homo sapiens
gaatgttccatgacagcgtacacgttctaaatgggcttaaccaataatttcttacccctgcctgagatgtttctatttaaaaaagattttgggatccatargaaaaaaaatgtccccaagggattctctaaaattgtttattctcatagctggtgttttgcaaaatgctttcctctcccaagtctgtcaagtaatttttat

SEQ ID NO: 226650 - DNA, 201 bp, Homo sapiens
ctgagcttttctatatacagggcaaactaggtctgttgatgaatttctttaagcttcagtttcctcacctgtgacatgggaatgggaatccttatattccragtgaaaagtgagggtgacatgaggtcacacaagagtagtatttatcacagagccttggagagactcggtgcctgatgctcgcgatgcaggggtagagta

SEQ ID NO: 226651 - DNA, 201 bp, Homo sapiens
ctcttccaaaaccttcctcaaaaatacatttcctgttcctaacacccctggttaatgcttctcttctacttacctcatgctttgacaaccctattttttttcaagcccaaattatggaaaaacagtccttacagtagaaacaagccaatgttagccactttttaattgattctcatgatttgcttaaacataatattggag

SEQ ID NO: 226652 - DNA, 201 bp, Homo sapiens
atgagttaacaaataatcattaaaaaaattattgaacaataatttgaagtcttctcacatcatctcttgtcctaagtgctggggtcacactggtgagcaaracatggtccatttggtaaggtggatgtacttagaatgatttcttcacatttatactcatgtgggatggattatcagttgcaagtgataagaatgcatgtc

SEQ ID NO: 226653 - DNA, 201 bp, Homo sapiens
ctagtagacagaagacctctttcctgcaacagcctggacagtcctgcttggaggagcctctgcccatctcacaccaaccttgtctcagtatccagccaccctggctgccttttagttcctcacatatactaagttttttccactacagggtctctgttcctgctgttctttccgttttcccaacattttttctgcccctat

SEQ ID NO: 226654 - DNA, 201 bp, Homo sapiens
acttgaacccaggaggcggaggttgcagtgaaccaagatcgcgccactgcactccagcctagcgacagagtgagactcgatctcaaaaaaaaaaaaaacayatatatatatatatatatatatatatatatatattagaaacatggagatagtttagcaccaccattgatcctgaaaatattttagcacccacagtgactg

SEQ ID NO: 226655 - DNA, 201 bp, Homo sapiens
tcacttgaacccaggaggcggaggttgcagtgaaccaagatcgcgccactgcactccagcctagcgacagagtgagactcgatctcaaaaaaaaaaaaaacatatatatatatatatatatatatatatatatatattagaaacatggagatagtttagcaccaccattgatcctgaaaatattttagcacccacagtgac

SEQ ID NO: 226656 - DNA, 201 bp, Homo sapiens
atcctggccaacatggtgaaactgtctctactaaaaatacaaaaattagctgggcgtggtggcagatgcctgcaatcccagctactcgggaggctgaagcmggagaatcacttgaacccaggaggcggaggttgcagtgaaccaagatcgcgccactgcactccagcctagcgacagagtgagactcgatctcaaaaaaaa

SEQ ID NO: 226657 - DNA, 201 bp, Homo sapiens
aggcatgcaccaccacacctagctaatttttgtatttttagtagagatggattttcaccatgtcggctaggatgttctcaaactcctgacctcaagtgatstgcacgcctcggcctcccaaagtgctgggattgcaggtgtgagccaccgtgcctggccagctcctctgaccactttttcaagatattttacctgtttgaa

SEQ ID NO: 226658 - DNA, 201 bp, Homo sapiens
actttctggtaaagacaaaaccatggagatggtaaacaaatcattgttactgaaggttctggggtgaggtttaataggtgaaacatgcgatttttttttttccccacaccatgaaactattcaatttgacgctgtaaatggtggatacctgacattctgcatttactaaaaccagggtacatttctgcttcacgaataaac

SEQ ID NO: 226659 - DNA, 201 bp, Homo sapiens
agctcccatttgaatttaaatatcttatgcctcctaatttgagggagtgtagaacataggaagaaaatgaaaagatggtggtatttgttaaaaaaaaaaaacaaatacaataaaaacatccatctacaaagtttgcgggcatggcactttccatcctttttacagctcttctgctctaatttctctttcccaaccttagct

SEQ ID NO: 226660 - DNA, 201 bp, Homo sapiens
gtgcaggttagttacatatgtatacatgtgccatgctggtgtgctgcacccattaactcgtcatttagcattaggtatatctcctaatgctatccctcccygctcccccaccccacaacagtccccagtgatgttgtatttttagtagagacacggtttcaccatgttggccaggctggtctcaaactcctgacctcaggt

SEQ ID NO: 226661 - DNA, 201 bp, Homo sapiens
gcacttgagttaaaaaaaaaaaaaatctgctcaggcataaaataattaaactgttcatgacagcgtataattgcatcattatattcccaactctgttactrtaatttggctcataaaagagcaaagtgtcaaaatctttctaatggtatttaattttgttttagcatttcctaaaggaagtgttcattttgtactttgaac

SEQ ID NO: 226662 - DNA, 201 bp, Homo sapiens
taaaggaagtgttcattttgtactttgaacttgtaaacttttgacacatccttacattctttgctgttgcaaatcattcgtgtacactacagaaatgactmattttccatttttcataatttggagtcaggtctttatatgaactttagatatttcattgttgaagacacttacatttgcatactttcaatgtaccttgtt

SEQ ID NO: 226663 - DNA, 201 bp, Homo sapiens
ggaagtgttcattttgtactttgaacttgtaaacttttgacacatccttacattctttgctgttgcaaatcattcgtgtacactacagaaatgactaattktccatttttcataatttggagtcaggtctttatatgaactttagatatttcattgttgaagacacttacatttgcatactttcaatgtaccttgtttttt

SEQ ID NO: 226664 - DNA, 201 bp, Homo sapiens
cacagtaaagcctctctggtcctaacctttcacatctgtcaaatggggccactttaaaccacttcatagggttttcctgatactgaaatgagataaagcayatgaatcgcttggtgcagtgctcaggaagtaggttactaattattagtccaaattagtgtgattttattattgagtgtggctgctattgctgcatttttt

SEQ ID NO: 226665 - DNA, 201 bp, Homo sapiens
aagtcttgagacatcaattggagttaggcccactgaattgtggctcggatttgagattaagggagtctcaaatttggaagtgggtggcctcagggtcccaygtgggcctaaggattgtatctttaagtcatcttcatagttaggactttgttcctttgctaaagctgtgattttctttttttcccatattgctagaaacct

SEQ ID NO: 226666 - DNA, 201 bp, Homo sapiens
gctcagtttggaatgcttctcatagttggagagtcaggtttacttgcttaatgttttttctaaaaaagttgaactagttttagttgtactaagttatcttygtgcaaaatgagattttccgtagatacttatattctttcttgggattgtggcactagtataatcaactgatatttaatatcctttatgaaattttgttta

SEQ ID NO: 226667 - DNA, 201 bp, Homo sapiens
tggtttcatttttttctagtatcagttttctggaattcttgtaacagttaaatatgtcaaagacaagatgtaccagtccattaaggagatgagtttattcrggttattgaagtggggggatgttcagaaatgaagaaggtctgaaagaagagggagaaaaggtgaagatttataacacagggaaccaggaaggctggaggt

SEQ ID NO: 226668 - DNA, 201 bp, Homo sapiens
ttattcttttcacaggaagggacttttctctttagtccctggctctgtgtcccttcctactcccttcctccccacctctccttgacacacacacacacacwctctctctctctgtgtgtgtgtgtgtgtgtgtgtgtgtgtgtgtgtgtgtgtgtctccttacatcagtagaaatggcaactgccttgcctggtgacaaca

SEQ ID NO: 226669 - DNA, 201 bp, Homo sapiens
cgggttattgaagtggggggatgttcagaaatgaagaaggtctgaaagaagagggagaaaaggtgaagatttataacacagggaaccaggaaggctggagktgggccttatgatatgcaacggcaagttggttttcgtggcttaggacgtttcccaaaaagcaaaagggtaaagatttctgaaccttggttattgacttca

SEQ ID NO: 226670 - DNA, 201 bp, Homo sapiens
gctcgcttgcccaccactcacctcctgctgtgtggcctggtccctaacaggccacagactggtactggtctgccgcctggcggttggggaccccgacctayaatgaatacatactattgtgtttgtatgttaacattttcctttgtgttgcttttctgcccatgacatttatgaaacatccacactgatgcctataaaacc

SEQ ID NO: 226671 - DNA, 201 bp, Homo sapiens
aaggtgaagatttataacacagggaaccaggaaggctggaggtgggccttatgatatgcaacggcaagttggttttcgtggcttaggacgtttcccaaaawgcaaaagggtaaagatttctgaaccttggttattgacttcaggagcactgggcccctgataaccatttgataaaatggttaaaaaaaataaagtaaaaat

SEQ ID NO: 226672 - DNA, 201 bp, Homo sapiens
agcgtttctccatgttggccaggctggtctagaactcctgacttcaggtgatccaccctcctcggcctcctaaggtgctgggattacaggtgtgagccacygcacccagccctcactgtggttttaatttgcatttccctgatgatgagtgatgttgagcatttttttcatgtttggtggccacttgtatatcttcttttg

SEQ ID NO: 226673 - DNA, 201 bp, Homo sapiens
tgtggtccccagtacatgatccatacggctttttgcccacacaaaagcatagcaaagtataagaaatgagactaatataatcctgcttgatttttttttttacaaataaaacatttactatcatagtatgtatatattgtatatatgtatgatatcatctatgtaatggatatgtgtgtgcatgtatatatgtgtaatata

SEQ ID NO: 226674 - DNA, 201 bp, Homo sapiens
aaattaacattggtacaatccacagagtttagtcagattttaccaattttacagacacgtgtgtgtgtatgtctatgtacttctattggggttttttttttaactgtaatgtgtcaaacaaattactctgtcactgaaatcctaagctccacactcataaataaaagtagataaaactgaggtcatagacaaagtagggca

SEQ ID NO: 226675 - DNA, 201 bp, Homo sapiens
aactttgtgttttgaaataattcaacattcacaggagttgcaaaaatgcaaagactcacacacacttcatgcaaactctctatagttagcatcttgcttaactgtagtaactatagtctcatgtaagaactagaaaattaacattggtacaatccacagagtttagtcagattttaccaattttacagacacgtgtgtgtg

SEQ ID NO: 226676 - DNA, 201 bp, Homo sapiens
ataatcccaccaatgtaaatgcagtatccatctccctaagcatttttcctttgtgttagaagcaatccaattatactcttttattttaaaatgtacaattmaattatttactgtaatcaccttgttgtgctatcaaacactagctcttattcttcattctttctgttttttatactcactaactattcacccccctcccca

SEQ ID NO: 226677 - DNA, 201 bp, Homo sapiens
accgtgttagccaggatggtctcaatcacctgacctcatgatctgcccccctcggcctcccaaaatgctgggattacaggcgtgagccaccgcgcccagccttaagtgttatttttaagacataaagtaagttttaaaaacacaatttcaccaaaaatgcataaatatgaccatgaaattcaagaatacacatacgtattc

SEQ ID NO: 226678 - DNA, 201 bp, Homo sapiens
ttattacacacacacacattcagcaatgtactctattgaaatagcctgtccacttagaaatgcttaccgagttggcattttctttaaacaggataatttaatggtagaaccgtccacctgttttgcattctttaaataattaagctaatcatacaaggggtcctgcattccgtgattgataaattcgttttggtgcagccc

SEQ ID NO: 226679 - DNA, 201 bp, Homo sapiens
agcgaactaaaaagtacagtggacaccaaattaaattaataaaagtacgtggtgtggggatttttaaagggcagcctcttttattattacacacacacacmttcagcaatgtactctattgaaatagcctgtccacttagaaatgcttaccgagttggcattttctttaaacaggataatttaatggtagaaccgtccacc

SEQ ID NO: 226680 - DNA, 201 bp, Homo sapiens
gcaagttggttttcgtggcttaggacgtttcccaaaaagcaaaagggtaaagatttctgaaccttggttattgacttcaggagcactgggcccctgataamcatttgataaaatggttaaaaaaaataaagtaaaaatattttttcaagtagtaagaaaaacatattgggcttttcattagttgttgttttaccgatgttt

SEQ ID NO: 226681 - DNA, 201 bp, Homo sapiens
gtttcccaaaaagcaaaagggtaaagatttctgaaccttggttattgacttcaggagcactgggcccctgataaccatttgataaaatggttaaaaaaaataaagtaaaaatattttttcaagtagtaagaaaaacatattgggcttttcattagttgttgttttaccgatgtttaattcaaactatgttaatgttgcgat

SEQ ID NO: 226682 - DNA, 201 bp, Homo sapiens
gcaggttccttcttgaaaacatggtttttgttggtgtttttggtttatggctccttgcacacaacttttctatatcaaatgattttccattaataagtgargcattgtctgctgttatttcatccccaaattccccacttaacccagtgctggcattactggaactctctggaacccacttctgtagctgacctgcagctc

SEQ ID NO: 226683 - DNA, 201 bp, Homo sapiens
tctggaacccacttctgtagctgacctgcagctcctcattttttaaaatctctcttcctgctctgcattatctttctctcattatgaaaatccagcatccsctctcaaactcacttcctctggagtggcttaatggactttttctgtttattcttttctgctttgtcacttgcatagttctatacagttctatacaggacc

SEQ ID NO: 226684 - DNA, 201 bp, Homo sapiens
agtttacaataatatcctagatcttcacattcactcaccactccctcactggctcacccagaacaatttctagtcccgtaagcttcattcatgttaagtgstctatataggtctaccattttcattttctaccttttatgcctttttttttttttttttttttttgacagagtctagctctgtcgccaggctggagtgcag

SEQ ID NO: 226685 - DNA, 201 bp, Homo sapiens
taggtctaccattttcattttctaccttttatgcctttttttttttttttttttttttgacagagtctagctctgtcgccaggctggagtgcagtgcccckatctcggtttattgcaacctctgcctcccagtttcaagtgattctcctgcctcagcctcctgagtagctgggactacaggcgtgtgccaccagacctagc

SEQ ID NO: 226686 - DNA, 201 bp, Homo sapiens
tttattgcaacctctgcctcccagtttcaagtgattctcctgcctcagcctcctgagtagctgggactacaggcgtgtgccaccagacctagctaattttygtatttttagtagagatggggtttcaccatattggccaggatggtcttgatctcttgaccttgtgatgcacccacctcggcctcccaaagtgctgggatt

SEQ ID NO: 226687 - DNA, 201 bp, Homo sapiens
cggggcactggttctctttcctgtctgcttacttagtagttgttcactgaaatgcagatttgcagcttgaagtacctaggcaatcaaagcgagtttttccytctcaaagatacttggtctaaacagtaataggtagttaacagccgcattctgggaagtaaccttcagaggccagatctggaatttttccaaccctttctg

SEQ ID NO: 226688 - DNA, 201 bp, Homo sapiens
tttttttttttttggtttttttttttttttacattacttccaatttgcaaaggagagaagtaaacagtttgcatagggaaaacgcgtttttcgtcagtagmctgctgtggacggcaagagagaggagctttaccaggcattgaaatagtagcttttgtggtctcaggtcagagcatcgctctgtgtctctaggcagatttg

SEQ ID NO: 226689 - DNA, 201 bp, Homo sapiens
gcatagggaaaacgcgtttttcgtcagtagcctgctgtggacggcaagagagaggagctttaccaggcattgaaatagtagcttttgtggtctcaggtcaragcatcgctctgtgtctctaggcagatttggtttaaggccaaaacaaatagccccccttccttgggttctgacccctgggggcagaaaagggaactaagc

SEQ ID NO: 226690 - DNA, 201 bp, Homo sapiens
ttctggaagggtggcattttaatatcaataattactgacaaaaaggactgtagactatttaagttttagaaaccctacttactcctagaaagacttctatyttctctcctaatagtaaagagtatgtgcctgatgtctccaaaacccctttgctatttcttctctttacaaagactgactcagagttctactgtttgctgt

SEQ ID NO: 226691 - DNA, 201 bp, Homo sapiens
aagtattttgaggagaggtgttaggaaatgcaaaggaatgtttcctaaatgtttttacttgtttccatttccaatatggctaagtaagttctactggatcygaaattctcacagatatcaactataaagtaccaaaagaccaaaaacaaaaaaaaaaaaaagaaaagaaaaaagaaaagaaaaaagaaattacctggaagc

SEQ ID NO: 226692 - DNA, 201 bp, Homo sapiens
tatcaactataaagtaccaaaagaccaaaaacaaaaaaaaaaaaaagaaaagaaaaaagaaaagaaaaaagaaattacctggaagcattagagaataaaawtaagcagacagattctggaggggagctgaaattcaaaacttggaagcacaggtcggtccagagtgagtttcccattttacaacttttagagtgagaacag

SEQ ID NO: 226693 - DNA, 201 bp, Homo sapiens
ggcatttaggattttcaacttctcagccatcctagaaaagtttgacttttatatgatgcttaaatgtcaatatctaatttcagaaaatgaatttacaatttggggggaggtgatttcagagtacactttgcctacctctgatttggcaaaggatcaagaaaatttgtcgagttctgaaagcctgcatcttttaataagctt

SEQ ID NO: 226694 - DNA, 201 bp, Homo sapiens
caaagcattgactgggtggcccttacctttgtttagaagcaggataagaaaggttaatttatatatgtatgtatatatgtatgtatgtatgtatgtatgtdggcagtatagagttaagagctcagaccctggattcaaacctcatttatgtcacttacttagctgtcagatgcagggtaagttacatatccttgggctaat

SEQ ID NO: 226695 - DNA, 201 bp, Homo sapiens
aaaaaattaaataggacagcgatagagaattgggaaaaaatggttgctacagataggatagtctctgaggagatcaattttaggcagaattctgaagaagkagaaggagccagtcattaaaagatctatgggaagggtattccaggctgagggtccatgaaatgctaaaagtgtggaatgactggaatgactatgagctgg

SEQ ID NO: 226696 - DNA, 201 bp, Homo sapiens
gttttcagccaagaccacacactgcactccagcttgggtgacagagcaagaccctgtcaaataaaataaaataaaataaaataaaataaaataaaataaaaatcctggtgagagataaaaaggagaataaggcacatccctgccctcatggagattatggtttgggtggacatataatttgttgtccaaaagaggatgctt

SEQ ID NO: 226697 - DNA, 201 bp, Homo sapiens
agttttcagccaagaccacacactgcactccagcttgggtgacagagcaagaccctgtcaaataaaataaaataaaataaaataaaataaaataaaataaaaatcctggtgagagataaaaaggagaataaggcacatccctgccctcatggagattatggtttgggtggacatataatttgttgtccaaaagaggatgct

SEQ ID NO: 226698 - DNA, 201 bp, Homo sapiens
gagttttcagccaagaccacacactgcactccagcttgggtgacagagcaagaccctgtcaaataaaataaaataaaataaaataaaataaaataaaataaaaatcctggtgagagataaaaaggagaataaggcacatccctgccctcatggagattatggtttgggtggacatataatttgttgtccaaaagaggatgc

SEQ ID NO: 226699 - DNA, 201 bp, Homo sapiens
ggagttttcagccaagaccacacactgcactccagcttgggtgacagagcaagaccctgtcaaataaaataaaataaaataaaataaaataaaataaaataaaaatcctggtgagagataaaaaggagaataaggcacatccctgccctcatggagattatggtttgggtggacatataatttgttgtccaaaagaggatg

SEQ ID NO: 226700 - DNA, 201 bp, Homo sapiens
cggagttttcagccaagaccacacactgcactccagcttgggtgacagagcaagaccctgtcaaataaaataaaataaaataaaataaaataaaataaaataaaaatcctggtgagagataaaaaggagaataaggcacatccctgccctcatggagattatggtttgggtggacatataatttgttgtccaaaagaggat

SEQ ID NO: 226701 - DNA, 201 bp, Homo sapiens
agcatggtgtaagcaggtgtgagtgataagtggacttgagcacaggtggctttaatgtatgcagggtcaatgctataggctccttaggccaaacagttgtmagctagattctagagcactccagcttggtcttagtcatgatgtctttaattcagtgggcttttaaaaatttaaactttgttaaaaggagtttaagttatg

SEQ ID NO: 226702 - DNA, 201 bp, Homo sapiens
ccggagttttcagccaagaccacacactgcactccagcttgggtgacagagcaagaccctgtcaaataaaataaaataaaataaaataaaataaaataaawtaaaaatcctggtgagagataaaaaggagaataaggcacatccctgccctcatggagattatggtttgggtggacatataatttgttgtccaaaagagga

SEQ ID NO: 226703 - DNA, 201 bp, Homo sapiens
ctacaataatgctatggtgcctggaacacactaggaacataacaggggctcagtaaatatgtcgatggaccgagcatctcaaatataatcttttagctcartcacaggagtcgagtgattgtttagcaggtccctgctgctgtggtttcctcatcatttaacaaaggtttatatttaaatcgtaagaccattgcacttccc

SEQ ID NO: 226704 - DNA, 201 bp, Homo sapiens
tctctttgcttcaagggtgaattattactggcagctgcaggagtggtattctgtcagcaacattctccatcttgctccctgataaacttactagtgggtgwcttgtgattttttttattattgtattagatgaaactattcctctgcctagtgtccatctaccatcaaatatttatctagagcatctcaagtactccaaat

SEQ ID NO: 226705 - DNA, 201 bp, Homo sapiens
ctctttgcttcaagggtgaattattactggcagctgcaggagtggtattctgtcagcaacattctccatcttgctccctgataaacttactagtgggtgtyttgtgattttttttattattgtattagatgaaactattcctctgcctagtgtccatctaccatcaaatatttatctagagcatctcaagtactccaaatg

SEQ ID NO: 226706 - DNA, 201 bp, Homo sapiens
tgtcttgtgattttttttattattgtattagatgaaactattcctctgcctagtgtccatctaccatcaaatatttatctagagcatctcaagtactccaratgataacactgatttatggttatttgaagtttctttgaggcctgctgacagattacaaaaattgcttgatatatctgtcttaaaagagatcattgaact

SEQ ID NO: 226707 - DNA, 201 bp, Homo sapiens
gatgaaactattcctctgcctagtgtccatctaccatcaaatatttatctagagcatctcaagtactccaaatgataacactgatttatggttatttgaartttctttgaggcctgctgacagattacaaaaattgcttgatatatctgtcttaaaagagatcattgaactaagaatgagttgtcatgttgtttggaatag

SEQ ID NO: 226708 - DNA, 201 bp, Homo sapiens
ttttgcatttgctgaggagtgttttacttcaaattatgtggtcgattttagaataatgccacgtggaactgagaagaatgtgtattctgttgcgttggggwagggagttctgtagctgtctattaggtccgcttgatccagagccctccagagctgagtttatgtcctgaatatcctcattaattttctgtcttgttgatc

SEQ ID NO: 226709 - DNA, 201 bp, Homo sapiens
accacctttgtagttagccctattggttaatggccttttcattgtcatgtattttaagcctggcaatatttttctcccttctcccaggttgtctcttcacrttgtatttattctctcttgataatgtctctcacattcccctttctatttccacatccatatcctaaattcagattgtccctctctcttgaaatatgttga

SEQ ID NO: 226710 - DNA, 201 bp, Homo sapiens
attacagtttcacattttctctctgcataggaagatgagtagagggataacagggagtcttgctataaacagaaatggatgatttttttttttttgctttraagtttgctagtttggtgaaatcacatctgtgtctttgtctttgaattctttcttacaaagaaagaaaatcgtgtgtctacagggggaaaaataagaaaa

SEQ ID NO: 226711 - DNA, 201 bp, Homo sapiens
gtcatttttctctcctgtcagaagttctttaaggattaaaaacaatttttattttctctatgagaaaccaaagcatgtaaagttgaaaggcagcaaagacsagcgctgcttttaaaacagcattgtacatggctcatgcctgtaatcccagccctttgggaggccgagacgggcggatcatgaggtcaggagatcgagacc

SEQ ID NO: 226712 - DNA, 201 bp, Homo sapiens
ttctttgatgacctttggtaagaaacgtatcataattgcttcttaaagctacagaccactataatccaagaacaacattttagatacagtctgtgatacargttaccctgagtgctttggaatcccagtcctctagagtgattctcaaaatgtggtcctcaggctagcatttggcatcatctgtgagtttatttgaaatgc

SEQ ID NO: 226713 - DNA, 201 bp, Homo sapiens
agtatgatgggtttgggaattgatattttcctggtaaacatacagctgaggtgatggaactagattgtacagtgttctagaaggtagtctaggcaattttsgtgttctgggtaccacggacatcattatgttctcaaaggaattgcagaggtttgatttaacccaacaatgtggttagttggtgatcagcatgaatgttat

SEQ ID NO: 226714 - DNA, 201 bp, Homo sapiens
gaatataggtctggatttcccctgaatttagatgttgattgttttgcatgagaaggcctttatttagtaacataaatatgaatttatatcttagaactacrtaccctcatatgacatctgattatttaattgccatgtgaccacagataaataacacaacctgagtatcgtttacctaatctatataatgattattaaaaa

SEQ ID NO: 226715 - DNA, 201 bp, Homo sapiens
tcacatggatggaacaaatacattttgttttagtgaccgagtgtccaccatgactccaaagatagtgatattcaccattgatattggggaggctacaaaargagaagacatggaaacagaagctcaccagaacaaactagaagaaatgatcagtgagctggctgtggccatgacagctgtacagcacaaagaggaatacac

SEQ ID NO: 226716 - DNA, 201 bp, Homo sapiens
aaatgatttttgacaaagatgcaaaagcaacttaatgaaggaagtccagcctttcaacaaatgatgctagagcattagacatccattgggaaaaaaaatgmacattgatctaaatctcataccttcatacaaaaattaactcaaagtggatcatagaattaaatgtaaaataataacaattttaaaaaataaatgtgggag

SEQ ID NO: 226717 - DNA, 201 bp, Homo sapiens
aaaaaagaaaagaaaaaagaaattacctggaagcattagagaataaaattaagcagacagattctggaggggagctgaaattcaaaacttggaagcacagrtcggtccagagtgagtttcccattttacaacttttagagtgagaacaggctaaaattaatgtcacttcgggtggccatcctccaatagaaaactcacagt

SEQ ID NO: 226718 - DNA, 201 bp, Homo sapiens
aatgatttttgacaaagatgcaaaagcaacttaatgaaggaagtccagcctttcaacaaatgatgctagagcattagacatccattgggaaaaaaaatgarcattgatctaaatctcataccttcatacaaaaattaactcaaagtggatcatagaattaaatgtaaaataataacaattttaaaaaataaatgtgggaga

SEQ ID NO: 226719 - DNA, 201 bp, Homo sapiens
gaaagagaatgaaacagaacaaaatatttgaagaaataatgggcccaaattttcaaatttggtgaaatacataaatgcatagatcaagaaatgcagtgaaycccaaatgggatacatttgaagaaaactgtgcataggtacatcatattccaactggtgaggaccagcaataaagagagaatcttgatagtagccagagaa

SEQ ID NO: 226720 - DNA, 201 bp, Homo sapiens
atacataaatgcatagatcaagaaatgcagtgaaccccaaatgggatacatttgaagaaaactgtgcataggtacatcatattccaactggtgaggaccarcaataaagagagaatcttgatagtagccagagaaaaatggcacggtatctttggtggaacaatgctttaaatgaacgatgacttctcatcagaatttata

SEQ ID NO: 226721 - DNA, 201 bp, Homo sapiens
ctgtaatcccagctattcaagaggctgaggcaagagaattgcttgaacctgggagccggagttttcagccaagaccacacactgcactccagcttgggtgrcagagcaagaccctgtcaaataaaataaaataaaataaaataaaataaaataaaataaaaatcctggtgagagataaaaaggagaataaggcacatccct

SEQ ID NO: 226722 - DNA, 201 bp, Homo sapiens
atcttacatggcggcaggcaagatgtaagtacagggggcatgtacagggggactccccttcataaaaccatcagatcctgtgggacttactcactatcacragaacagcatgggaaagacctgcccccatgattcaattacctgccaccgggtccctcccatgacacatgggaattatgggagctacaattcaagatgagt

SEQ ID NO: 226723 - DNA, 201 bp, Homo sapiens
tttgaacccaggaggcggaggttgcagtgagccgagaccacgccattgcactcgagcctgggtgagagagtgagactctgtctcaaaaaaaaaaaaaacaacaaacaaaagcatagatatttaaaaatacatagaatctacttaacagagaaggattttgaccatggttgaaagatgcaatatgccatgttttagttgttt

SEQ ID NO: 226724 - DNA, 201 bp, Homo sapiens
tcatttgaacccaggaggcggaggttgcagtgagccgagaccacgccattgcactcgagcctgggtgagagagtgagactctgtctcaaaaaaaaaaaaaacaacaaacaaaagcatagatatttaaaaatacatagaatctacttaacagagaaggattttgaccatggttgaaagatgcaatatgccatgttttagttg

SEQ ID NO: 226725 - DNA, 201 bp, Homo sapiens
gtgcatatgtagctaaatgcatagaaaaagatctgaaactgataataaagattgcttttggggaggaaagtggattaaaaggagtgataagggagtttttrtatttttctatatggtttgaattttttacagtgagaatattttcaaatattactgtataagtaaaaaaaaggaaataaaacactcaattgccttgcaaaa

SEQ ID NO: 226726 - DNA, 201 bp, Homo sapiens
gttctggaaaaaacctgaggaactcattaagaaagggagggagtgtccaataaagtttgtatttgttgctgatacacaaattctttttttttttttttttttgagacggagtctcgcttggtgccaggctggagtgcagtggtacaatctcggctcactgccacctccgcctccaaggctcaagcgattttcctgcctcag

SEQ ID NO: 226727 - DNA, 201 bp, Homo sapiens
taaaatgagaacgctgattcaaggccattgtggttcacttgaaaatgtgcctatcaattcaagtaaagacctagtggcttggagattagactaacatctayttctcctggtgtgttaatatgctgacaaaaagcaaggagatggagaagcttggggagatgttcacatatgtgtatgtgtttatataaatatatatatatg

SEQ ID NO: 226728 - DNA, 201 bp, Homo sapiens
ccggctaatttttttttgtatttttttttaagttgagaaggggtttcgccttgttagccaggatggtctcgatcttctgacctagtgatccaccggcctckgcctcccaaagtgctgggattacaggcatgagccaccgcgcccagcccagtctttttttattatctgtttattaaataatcattatttgctctttcccat

SEQ ID NO: 226729 - DNA, 201 bp, Homo sapiens
ccacgcccggctaatttttttttgtatttttttttaagttgagaaggggtttcgccttgttagccaggatggtctcgatcttctgacctagtgatccaccrgcctcggcctcccaaagtgctgggattacaggcatgagccaccgcgcccagcccagtctttttttattatctgtttattaaataatcattatttgctctt

SEQ ID NO: 226730 - DNA, 201 bp, Homo sapiens
attcatttatttattttgagatggagtctcgctctgtcacccaggctggagtgcagtggcgctatctcggctcactgcaagctctgcctcctgggttcacrgcattctcctgcctcagcctcccgagtagctggaactacaggcacccgccaccacgcccggctaatttttttttgtatttttttttaagttgagaagggg

SEQ ID NO: 226731 - DNA, 201 bp, Homo sapiens
tgtcatggcgggcatagagcaggattcagcaagttttggctaaatgaatgataaatggagctttacttgcttttctctaagttaagtgcctgacaggaagscctcctaagaacatatagagagaattttataacttaatggagtatttatttatggttttaatgtattgtataatcactcccttttattgtaaatatgcct

SEQ ID NO: 226732 - DNA, 201 bp, Homo sapiens
agagagaattttataacttaatggagtatttatttatggttttaatgtattgtataatcactcccttttattgtaaatatgccttccttctctctgcctcrgtgacatcactgtccacattaagaaaaatccttgcctggctccagcagtcttgcccacatgtctacgatttatttatgccaactattgatcaagaacatc

SEQ ID NO: 226733 - DNA, 201 bp, Homo sapiens
ctactgcattccagtctggatgacagagcgaaactccatctcaaaaagaaaagaaaaaagaaaaaatgtggtacatatacacatggaatactatgcagccrtaaaagagaacaagatcatgtcctttgcagggataaggatggagctggaggccattatccttagcaaacgaatgtaggaacagaaaaccaaatactatac

SEQ ID NO: 226734 - DNA, 201 bp, Homo sapiens
taactttagatttatttgtttggagacaatgtaaaataaaccaaaaaagaagatctttgatacatgccacagtggagaaaaaacactgttacaaatgatamctgttttctttggtttaactatgaatgttgtagttagtaagatgttatttccaaaatgacaacccaaagagtagaaactatgatttggtgggtgggcagc

SEQ ID NO: 226735 - DNA, 201 bp, Homo sapiens
atatactgtaaaatgtttcaaaataattaggcaaaatgcaggaggaaattgaagagaaattattctgatatctctttggtataaagcaggcatttatctayggtaacactagtaccagtctgtcaagacatttaagaaaatggtttgaaaagacagtttgaatttgttattaaaacctgaaatagagacaaggtaatgtac

SEQ ID NO: 226736 - DNA, 201 bp, Homo sapiens
aacacagtcctatcaaagcctactttgttttcagtaaatgaagttcattcatatttgcttgattccgtttcccttgaatttgttggctaggattattcccygatacattggccagcaaaagacccaggttagttaaccaattgtttggaagggccctggctgtgcagtcacactgcctgaggttaattcctggttcccaat

SEQ ID NO: 226737 - DNA, 201 bp, Homo sapiens
tcatcaagaagttggtgactgttatctaaacttgatggagataagagcagaaaacagacataaaaaaataccagatgagagttataaaaatacagtgaagmgtgaagtatcctgccttagagagagaatgatataagagaataaaatgcagtatttttagctaatgtgatttgtaaaagtaacagtgcaagaaagcagttt

SEQ ID NO: 226738 - DNA, 201 bp, Homo sapiens
tgtaatcccagccctttgggaggccgagacgggcggatcatgaggtcaggagatcgagaccatcctggctaacatgatgaaaccctgtctctactacaaayacaaaaaaattagcccggcgaggtggcaggtgcctgtagtcccagctactcggtaggctgaggcaggagaatggcgtgaacctgggaagtggagcttgca

SEQ ID NO: 226739 - DNA, 201 bp, Homo sapiens
ccttacttctcgaagccaaaattctgatggcaatgacagagcctaggaagtagaaaattgtgatgatcaaacggtgaataatttgtaatgttctagagagrgtgttgactaaggagaaatgggagttggatttagattttagggtttttgtagtgctttctgtagaatggtaggggttggagtcaggttttgagctataag

SEQ ID NO: 226740 - DNA, 201 bp, Homo sapiens
tttatcatttttaatctttagtatggtctagacctaagaatgtttgtagcagtagggagggaattcgtgggaaggggaaaatgaacatgatatcatccgtyactgcttaaaccgtcctaggactttgggagactttagagcaacggagatctttctcttctttcaattgtatttcgcccatttaatacttccatggcaatt

SEQ ID NO: 226741 - DNA, 201 bp, Homo sapiens
aattttcattacaaaaagatcacccaggctgctatttgtggaagagattaggggagaagagtggtgtgtcccagagacttaagtcttttttctccattacraaatgaaagccatttttatgtctaacacctcactcgggaaaggcatgccagcttcaatcttagttactgcaactgtctttttaagttacccttgagttta

SEQ ID NO: 226742 - DNA, 201 bp, Homo sapiens
ccaactggtgaggaccagcaataaagagagaatcttgatagtagccagagaaaaatggcacggtatctttggtggaacaatgctttaaatgaacgatgacktctcatcagaatttataaaggccagaaaaagtgaaatgatgtttttaaagtacaaacgaggggtaaaaaaaaaagcaaaacactgttaatccggaattct

SEQ ID NO: 226743 - DNA, 201 bp, Homo sapiens
atcttgatagtagccagagaaaaatggcacggtatctttggtggaacaatgctttaaatgaacgatgacttctcatcagaatttataaaggccagaaaaaktgaaatgatgtttttaaagtacaaacgaggggtaaaaaaaaaagcaaaacactgttaatccggaattctatgtgtagcaaaaatatcctttgtgagtaaa

SEQ ID NO: 226744 - DNA, 201 bp, Homo sapiens
gacagcagatttctcataaaatggagatgagaaggaaatgccacaatatttttcaagtactgaaagaattatcaactgtaaattctatgtctggaaaaacyatacttccagagtgaagaggaaataaaaacattctcagatgaaggaaaagtaaatgaatttgttgctagcagacctactcttaaagattggctaaagaaa

SEQ ID NO: 226745 - DNA, 201 bp, Homo sapiens
atcaagcagaacaaaataacacctcaaagtctgtgaaaattagagtgccactggagccacagctgataaaagtagccaagacccacatgattaatttaacrgggttactgactgttacaacgaaagacttaaataggacctagtctctcctatcataataggcaaaatgcccaggattcaataaaaaattatccttcatac

SEQ ID NO: 226746 - DNA, 201 bp, Homo sapiens
tttatcaccatcttggtttcgatgggttttggccagcttctttacgcatctgcatcttgttttatcaggtgatttgcaccttgtgtcaacctcctatctcrtctgtgacttagaatgcctaacctcctggaaatacagcccagtaggtctcagccttattttacccagccgctattcaagatagagttgctctggttcaaa

SEQ ID NO: 226747 - DNA, 201 bp, Homo sapiens
catagagacaatacatataaggatataaagaaaatctgtggtattaaaatttcaggggggcaattagaaaacgctccttgcagggatgatgatgaaaaaaagattgagaaacagtgaggtgaaagtcgcatttcatcacaattgccttaaaaattccttccttaagtggctcattaatgagtacatggttttgatatattg

SEQ ID NO: 226748 - DNA, 201 bp, Homo sapiens
cctgctctctcattttgctggggtactctatgtcagagaccctctattttactctctacaggaacaaagcttaagtcactggccaggatgagggggtgtcrcaatctcctggctatcaggagtgggagatgggatctgaggatctaactcctccttaatcctttcccttcccctgctcaaacatctttagagagatataat

SEQ ID NO: 226749 - DNA, 201 bp, Homo sapiens
tataatagcataatttttccatggtatttttataaagtatttgaaaattttcattacattatgcaatttgcaagcatttcccatttattgtgtgtgtgtgkatatgtgacctcatgtagccctataaggcttgttactaaaaaataattcaaaacccctacattgtccctcctccctctccctcatttcttttaaactgat

SEQ ID NO: 226750 - DNA, 201 bp, Homo sapiens
ccacccctggctaattttttttgtatttttagtagagacaggatttcactatgttggccaggctggtcttgaactcctgaccttgtgatccacccgcctcrgcctcccaaagtgctgggattacaggtgtgagccaccatgcctggctgaggctttcttttaaacagaagaattacacttccaattcaataaaatttcctc

SEQ ID NO: 226751 - DNA, 201 bp, Homo sapiens
atttattgtcattttgtttattgacagtgactagaatagcagtatgatcagcatgatcattataaaaaataatgaggcttttttcttttttttgagacgayggagtcttgcactgttgctctggctggaatgcagtggtgtgatctcagctcactgcagcctctgcctcccaagttcaagcaattctccccctcagcctcc

SEQ ID NO: 226752 - DNA, 201 bp, Homo sapiens
aaagtttatctttaagaaatttctttttgcatgccttatttttgttgttgaaagctggaaataatacctcgagtgatgggaactaagaattttttttttttgttatgaggttttatgttaatctagcttagagctggactgtgtttaatgcttgctgtagctttaagtgccagatgcttctgtgtgctcgtattttttgtc

SEQ ID NO: 226753 - DNA, 201 bp, Homo sapiens
tatatgtgttcagttctttaaatttcctgcaaagcattgttttccttgcattccacaaattttgctaagctctattttcatttttatttagtttaaaatastttaaagtttatctttaagaaatttctttttgcatgccttatttttgttgttgaaagctggaaataatacctcgagtgatgggaactaagaatttttttt

SEQ ID NO: 226754 - DNA, 201 bp, Homo sapiens
aactgactttgttttgagaaattttagtggcattactaagaatttttggatcaaagatcacgtttattggtgagaggatatccgttgaaagataaaatatrcattataacatgtctttttgataaggagaagtgttttggctttgttcatcaaaagtacatctttgaagctgatatttgaagttattaagatttactagca

SEQ ID NO: 226755 - DNA, 201 bp, Homo sapiens
cacgctggagtgcggtggcacgatctccgctcactgcaagctccgcctcccaggttcacgccattctcctgcctcagcctcccaagtagctgagactagargtgcctgccaccatacctggctaatttttttgtatttttagtagagacggggtttcactgtgttagtcaggatggtcttgatctcctgacctcctgatct

SEQ ID NO: 226756 - DNA, 201 bp, Homo sapiens
agagtggtgtgtcccagagacttaagtcttttttctccattacgaaatgaaagccatttttatgtctaacacctcactcgggaaaggcatgccagcttcartcttagttactgcaactgtctttttaagttacccttgagtttatgtaaatcagaattgattgtccttcaacaatagcaataacaacaacaaaaaagaatg

SEQ ID NO: 226757 - DNA, 201 bp, Homo sapiens
ccatatgactctccagtatttggactttgggacatacgataaagcaaacatttgaaacctggagtcatatgggggcactcaaaaaatctgctgcttataarcaaggataaccaggctgagattttgatggacaaaattgacagctggtcagaaattttaaaatgcagaggcatttaagatgtcagaatatgccctcacact

SEQ ID NO: 226758 - DNA, 201 bp, Homo sapiens
ctagagtattgagatgttagtgaagagttggtacattcagcccacggaatcacgtttcctacatgatcatagctggtatgtctgagagcagttgaatagcycctctaatgattgtagaacactagagtgaatgacaaattattggtgtctgatattatatgattggtaaacaaccattatgcactttgtttccatccctcc

SEQ ID NO: 226759 - DNA, 201 bp, Homo sapiens
aggataaccaggctgagattttgatggacaaaattgacagctggtcagaaattttaaaatgcagaggcatttaagatgtcagaatatgccctcacactgcmtaagagctctccaatatgtccttttagctcaccctctaaaaatcaatctctaatcttttacctttgcctctacaaccttgctgcaggctgatagcgcctt

SEQ ID NO: 226760 - DNA, 201 bp, Homo sapiens
gaaaactgggcaatgattatgaatgagcagtttgccagagagaaatagccagtaaaaaggaaaagttaatctcagagaattgctaagtaaaataagatagrtttttttcccctgggatgtaggcacaacttaataatatatgacatccaatgctgttagaatgtggagaaatgctaggagcaatatatattgcttagcagt

SEQ ID NO: 226761 - DNA, 201 bp, Homo sapiens
cgatgacttctcatcagaatttataaaggccagaaaaagtgaaatgatgtttttaaagtacaaacgaggggtaaaaaaaaaagcaaaacactgttaatccrgaattctatgtgtagcaaaaatatcctttgtgagtaaaggcaaattagtacattttcagataaaaggaaactaagagcatttattatcagcagacctgcc

SEQ ID NO: 226762 - DNA, 201 bp, Homo sapiens
tgggcaatgattatgaatgagcagtttgccagagagaaatagccagtaaaaaggaaaagttaatctcagagaattgctaagtaaaataagataggtttttytcccctgggatgtaggcacaacttaataatatatgacatccaatgctgttagaatgtggagaaatgctaggagcaatatatattgcttagcagtttggct

SEQ ID NO: 226763 - DNA, 201 bp, Homo sapiens
ggactagaaggatgtagaatagacttttgacatctgtagtgggattatgaatggttttatctttgtttatttcattttttggtctttgtttttctaaaatkgacatgaattctctaagtggtaaaagccaaatttatttcaaaacgaagaaaaagtatagatgatattatgcccattttacccattaagaaactgaaccta

SEQ ID NO: 226764 - DNA, 201 bp, Homo sapiens
tgccgcgcccggcctgttctcagatttttaacgctacagtaaatgtctttgtccatgcctccttgtgcacatgagtaggtatcactctaaggtagcagttrataactacagctagctgctaagccaaatcatgcctgctgctgttttgttacagcctgcaagctaagaaatgtttttacatttttaagtggttgaaaaaaa

SEQ ID NO: 226765 - DNA, 201 bp, Homo sapiens
aacacgtaaaaaaagaatgaactatagcaaataatactgtcagggaagcctctttttctctgtgtgcctcaaatgatcctcccctgtctagagtcactggrgcaagaagacataaccagcaacaaggatgcaaccacaaaaagtggccaattctaggaagcctctttgttctcacatgcctgagactctccttccctgccc

SEQ ID NO: 226766 - DNA, 201 bp, Homo sapiens
caactctggtaatggtacaagagacaaccaaatgagagcgctgaaagacagtaagaatgagctggtttgctcacgcctgtaagcccagcactttgggaggscgaggcaggtggatcatgaggtcaggagagcgagaccatcctggctaacacggtggaaccccgtctctactaaaaatacaaaaacaaaattagccaggcg

SEQ ID NO: 226767 - DNA, 201 bp, Homo sapiens
cccccactcctgccagccagagaacaaaccccctttgactgtaattttcctttacctacccaaatcctataaaatggccccacccttatctcccttcgctractctctttttggactcagcccgcctgcacccaggtgaaataaacagccatgttgctcacacaaagcctgtttggtggtctcttcacacggacgtgcatg

SEQ ID NO: 226768 - DNA, 201 bp, Homo sapiens
ctctaattcaattttattgactgtagtcatcatattgtatattagatctctagacttgttcatcctacatgttactttgtatcctcccccccccctctatmtatgtgtgtgtgtgtgtgtgtgtgtgtgtgtgtgtgtgtgtgtgtgaagtagaatcgtagattttttttaattctgtagtctctgggatattatcagttt

SEQ ID NO: 226769 - DNA, 201 bp, Homo sapiens
ccctgagaacctgggcattcagttgaaaccccagaaaggccagcctcaggagtgagacctgtacactaccataaggctgtgttctacaactaaggacaaawttgaactagaccagttctaacaatgaaaggttcaagagaatattttagaaatgtaatttcctgccagaaaaaaactcagtaccctataaggaagacaata

SEQ ID NO: 226770 - DNA, 201 bp, Homo sapiens
agcattacatgcttgtttcaatgaactgataaggcagagtttgtactttgttgctgctgaggggctggaattagcagagtagggtactgaataagagagakgcatgaggtagggcatgtggaggtagtgtacatggaggtttctttgcaggtcattgtctgaaggattgactatgtataagcagggcaagacaccatgagg

SEQ ID NO: 226771 - DNA, 201 bp, Homo sapiens
cctttgttttcttgctctgggaagtgatgatttaagttccacaccaccaaaggattgtcaaatacacacaacaaaaataaacttgagctaaaattgtgatstaatatgcagagagattgaaaaagctaagaaaataaattataccactttggccatgcagatacaggaaccatctggaagcatctcagcaacctgaaaggg

SEQ ID NO: 226772 - DNA, 201 bp, Homo sapiens
taactgcaggtagcagctgtatgaagttgttgggtaactcatttttggttgtgttctctaggtgacacattaggcatttttgtctacctttaagtcctccrttctcacctctggtagagtgtaaactccataatgagagagactgcttctgacttgtccacctctgtaccctaatttaatgaaaacatgttgaacaaataa

SEQ ID NO: 226773 - DNA, 201 bp, Homo sapiens
atagtgaaataccacatgtcctcacacgtgggagctgaataatgtgtgtatgtagacatagagtatagaataatagtcactggagactcagaatgatgatrgggtgggaggggagtgaggtagtacaatgtacactatttaggtgttgattacattaaaagcccagacttgaccactatgcggtatatccatataacaaaa

SEQ ID NO: 226774 - DNA, 201 bp, Homo sapiens
tcagtgcttttctgtatctgttgctattatatgatttttcttctctggccagttgatacgctaagttacgtttgttgagttttttttgttgtttggttttyttctattgttttttttttttttttgagacagagtctcgttctgtcacccacgctggagtgcggtggcacgatctccgctcactgcaagctccgcctccca

SEQ ID NO: 226775 - DNA, 201 bp, Homo sapiens
gcatccagtttctctccattgagtatgatgtcatgttagctgtaggtttttttgtagattttttggtatcgagttgacgaagtttcatctattcctagttkgctgagagtttctactcataaatgagtgtgggattttgtcagtgcttttctgtatctgttgctattatatgatttttcttctctggccagttgatacgct

SEQ ID NO: 226776 - DNA, 201 bp, Homo sapiens
taataaaggtaatcactagaatacattgtctttctgcagtgccctagaaacttcttttattttccctattgtatacctttggcccatagtctcctttttttacctctttcggtgcactcttctcaacctctttttcattatttagtccaattgcatacatttttacacttaatttctttacaggtcaggaagacagtcttc

SEQ ID NO: 226777 - DNA, 201 bp, Homo sapiens
ttacatttaccatttgccaatgtcacacattgtactgttacgattcttaaatgtaagtgacatccattttcgagaaataagtgtttcattcatgaagggtmtttttaggtttatgttaagtttgttctcattttcagtttgctcttcagacaaatagtgtaatatatactgttcttcttccttcttattgaatattttcta

SEQ ID NO: 226778 - DNA, 201 bp, Homo sapiens
ataatatttgctaccatgaaattctttaaaaagtccatgcgttatcttagaaacattatgatacataaaaaaatgggaatgtctcattcttcagattactyggaaacaatgggtgtaaattagcaaagaaagtgagaaaaataaattaaaaaagtgtagctctttatgtaagtatcttatcagtaccatgtttcataacat

SEQ ID NO: 226779 - DNA, 201 bp, Homo sapiens
tcatttttgttaaccagggtcatattgactttgagtcataatatttgctaccatgaaattctttaaaaagtccatgcgttatcttagaaacattatgatayataaaaaaatgggaatgtctcattcttcagattactcggaaacaatgggtgtaaattagcaaagaaagtgagaaaaataaattaaaaaagtgtagctctt

SEQ ID NO: 226780 - DNA, 201 bp, Homo sapiens
gacttcatcaggtggccaaatggacccaggcatgtgtgcgtgcacacacccacacccccctccacacacacacacacacacacacacacacacacacacactgtgccagaacctagaaaacagaatgattaaggaggtttgcaattcgtggagcaagtgctggaccacagtcactttgaatacatggtgtcatttaatctt

SEQ ID NO: 226781 - DNA, 201 bp, Homo sapiens
agacttcatcaggtggccaaatggacccaggcatgtgtgcgtgcacacacccacacccccctccacacacacacacacacacacacacacacacacacacactgtgccagaacctagaaaacagaatgattaaggaggtttgcaattcgtggagcaagtgctggaccacagtcactttgaatacatggtgtcatttaatct

SEQ ID NO: 226782 - DNA, 201 bp, Homo sapiens
ctatcaggatttaataatagccatttgaaataaagccaataaaacaaaaaaatacacatttcaatttcattttatgactaggctttctttaaaagagttgsacactttttttcttcatagaaagcttttcttgatgttttctgatatgtccactgatggcattcagctttcattctttgatttcctgtcttcgttagttgg

SEQ ID NO: 226783 - DNA, 201 bp, Homo sapiens
tcattgacagaagtatagacacatagataaatgcaacagaatagagaacccagaaacagacctacacaaatatgcccactggtctttttttttttttttttgcaaaaataaaaaagcaattcagttagagaaagaatagacttttcaacaaattgtacagttaggaaaaaaaattaacctatacctcacaccttgcacaaa

SEQ ID NO: 226784 - DNA, 201 bp, Homo sapiens
gaaacagaagcctggagaaccagctaaggcaacttgtaggctcatctttgggagagtggttttccccagtcagaatgccttaccccattgatctcacatcyttatttcatttcaaccatactctccttccccaacaaaacctcagcacttaatgataccatcataattctttgatttattcacagtacatgcacaagagtc

SEQ ID NO: 226785 - DNA, 201 bp, Homo sapiens
catcagaatgcctgaggatgcctattaaagtgcacattcccgggcctcacttcatctgattccatcagaaactctgaggatggctctggtaatctacaccrttaacaagctcccaaatgatttgggggaagactaaagttgagagctacgaaactatcaaaattctggtagctttctatctaacttttcaaatactaataa

SEQ ID NO: 226786 - DNA, 201 bp, Homo sapiens
ggtccttcctttggcaaagataacagtagtggtcatagttgtcttgatcattagactcactccaagtcctagacaggttctgaatttggcactgatattgkcactgagcatgtgtcagggtatctagagcttccctgcctactcttccaacctcagctcaggcccctttctgtctcctgcactatgctctagtccggtaat

SEQ ID NO: 226787 - DNA, 201 bp, Homo sapiens
tacaagccacatacacatacacacacacacacacacacagagttccctgcagtcaacttgctttgcagctttcaaatccaatggcaatgcctttaccactrtagacatttccatttcagaagagacagtggtcaatttacctaacatgcacttattgagaaatgaacatgtggtatatcagggtctggcaaccagaaatgg

SEQ ID NO: 226788 - DNA, 201 bp, Homo sapiens
cccccaccttcctcaagatttttattaaggaaatgaaaatatactgcctttgttttatttacctatgtatctacttacctttagagatgggagtctcactrtgttgcccacgctagactgaaactcctaggctcaagccatcctcatgcttcagcttcctaagtagttgagactacaggtatgtgccaccatgtcctgttt

SEQ ID NO: 226789 - DNA, 201 bp, Homo sapiens
gaaatgaaaatatactgcctttgttttatttacctatgtatctacttacctttagagatgggagtctcactatgttgcccacgctagactgaaactcctargctcaagccatcctcatgcttcagcttcctaagtagttgagactacaggtatgtgccaccatgtcctgtttactttttaaaactttccaagctaaaacac

SEQ ID NO: 226790 - DNA, 201 bp, Homo sapiens
tttttttaaaaagacctaagcccaagggctttatgaatgcaagctactttcaaatgattgacaaaatgaataagttttgtgggcaaagaaaccaaacaaayaaaaataaataaatattcaaaaaaatgctgagatgattagaatgtataaaaaagcaagaacagctatgttctgttaagagatagcctttaaataaaaaaa

SEQ ID NO: 226791 - DNA, 201 bp, Homo sapiens
agaactagttcaagatttttctaatatgtaaagaatactggcatcagtatcatgtaattttgggtgcttgaatcttagatcgttctatgatggtgcagacrgaaatcctttatgtgtatttaacatatataacataccattttagatatataggtataaggggttaatgcttctccatctcctgtcaaatttgtctccttt

SEQ ID NO: 226792 - DNA, 201 bp, Homo sapiens
ctcaaatactgtctccttgtgatatggtttcgctgtgtccccattaaaatctcagcttgagttgtatctccccgaattcccacgtgttgtgggagggaccyagggggaggtaattgaatcatgggggctggtctttcccatgctattctcatgatagtgaataagtcttacgtgatctgatgggtttatcaggggtttctg

SEQ ID NO: 226793 - DNA, 201 bp, Homo sapiens
caactgagccccccaactgaatcccacaaattccaaagaaagcttaatttttcatctagataaaatagttgtgtatttgagtgccacatttgtttccattktctgaacttttgctaacataatgaagatctggatgccaggacttaaggagcaaaggcttgtggacttcctatggttaagttcctcctatgcacttaagta

SEQ ID NO: 226794 - DNA, 201 bp, Homo sapiens
ttttttttttaaccaatataaaagcaaattttaaaaaaaggtgttatttcccttggaaggaagctgtgattcccatggttggttattagtccaaagccgtrgaacttctttccttataaacctctcattctggcaagacaggacacttggacaatgattttcctaataagtataaccaaaagactttccctaattttaatg

SEQ ID NO: 226795 - DNA, 201 bp, Homo sapiens
agcttttaaacagatggaatgcatatctggtttttgagccatagcaaatattcctcatgctccttcaaagatacacccaggagaaaatctaaagaaggttygtgtagcatgggagtattgagatttgctgaatgaattgcattgttgtgaaaaattgagatttttgcattgtattttgatgataatctgtccctttcttga

SEQ ID NO: 226796 - DNA, 201 bp, Homo sapiens
taagctcaaatactgtctccttgtgatatggtttcgctgtgtccccattaaaatctcagcttgagttgtatctccccgaattcccacgtgttgtgggaggkacccagggggaggtaattgaatcatgggggctggtctttcccatgctattctcatgatagtgaataagtcttacgtgatctgatgggtttatcaggggtt

SEQ ID NO: 226797 - DNA, 201 bp, Homo sapiens
tcttcctatggctgtgaaggaaattgaacaggatgcagtgacagaatatagcaagaatcatatatattagactgaatggacttacaagtcttcttggaggygaaaatgtttaagcagagatgtaaaaatgaaaaaagtagccccgaaaaaggagtagggaaaggagaaacactgtagccagatgattgcatgtgcaaaggt

SEQ ID NO: 226798 - DNA, 201 bp, Homo sapiens
taccagaaggcgggaaagtcccccatgtatctgggtctgggaccttttatggactcagaatggggagtgcatgctgagtggtgtgtgagtaagcaaaaaakgttaaagtgaagacaccactcaaaggtgggcatgacaatttagaaaaccaattaggaaagggtagctatatgttaaataggtgaagggtgggttcagtca

SEQ ID NO: 226799 - DNA, 201 bp, Homo sapiens
aaggaacagccaaaaaactggaaaaaatgcagaaagaactaaataataaagataaaaataagaaattaggttttctaatttaaaaataaatccataagaawcataaataagctcaaatactgtctccttgtgatatggtttcgctgtgtccccattaaaatctcagcttgagttgtatctccccgaattcccacgtgttgt

SEQ ID NO: 226800 - DNA, 201 bp, Homo sapiens
agctaaagcctcgcttagaagaaaatgtatacagcctttaacacctgaatatttaaaaaagaataaaaataaaggaattacgcatctgacttaagaaaggracagccaaaaaactggaaaaaatgcagaaagaactaaataataaagataaaaataagaaattaggttttctaatttaaaaataaatccataagaaacata

SEQ ID NO: 226801 - DNA, 201 bp, Homo sapiens
gtatatgtgtgtgtatatatgtatacataatagaatactattcagccacagaaaatgaatgaaaacatgtcttttacaacaacatggatggaataggaggycattatcttaagtgaaaaaactcagaaacatagtgaaataccacatgtcctcacacgtgggagctgaataatgtgtgtatgtagacatagagtatagaat

SEQ ID NO: 226802 - DNA, 201 bp, Homo sapiens
acatatgagctatgggctacagctaaagcctcgcttagaagaaaatgtatacagcctttaacacctgaatatttaaaaaagaataaaaataaaggaattaygcatctgacttaagaaaggaacagccaaaaaactggaaaaaatgcagaaagaactaaataataaagataaaaataagaaattaggttttctaatttaaaa

SEQ ID NO: 226803 - DNA, 201 bp, Homo sapiens
aagttcaagacaagtttgatagacatatttgttgaagacatttcttaatttcagattttttgatatgtgaatatgccagttacgaacttctgaaaagaggrttgtggagaggaggactataagaagtagtgttttctgaactattttgacctttggctattttacaggacttttgggttgctgattgcaacatgagagaag

SEQ ID NO: 226804 - DNA, 201 bp, Homo sapiens
acaacaaccctctttgataaacaactcttaattcaaagaaacattttaaacccaacttgaaaaatatctagacaccattgataatgaaaatataacacatmtgagctatgggctacagctaaagcctcgcttagaagaaaatgtatacagcctttaacacctgaatatttaaaaaagaataaaaataaaggaattacgcat

SEQ ID NO: 226805 - DNA, 201 bp, Homo sapiens
tgcaacatgagagaaggacatcttgtctggtgggcatatacatgtacatagcctttttaagagaagcttttgggtttgatatggcagtagattgccctgcycacctccccaaccccaatatatttgaacatttctgaaattgggatgcggtttacaatcattccatgtgttttcttgttttttaacttgcaggaatgctgt

SEQ ID NO: 226806 - DNA, 201 bp, Homo sapiens
gcagacaaaacaaatggtaaatcttgttcttagaaagaaagagctatctgtccccattacagccagctgtcatgcccaggctggagccactcttgggacaraattagggacacttgaaaatggtaaatcttggaaactgagagctctgtatttttcaacttaggatcataatctattaacccctatttctatcccagtttt

SEQ ID NO: 226807 - DNA, 201 bp, Homo sapiens
ttcttaaagaaatagagatgcaggcaaaaattcattattatactttggtattatagtatttatagaataattaagtactctaaattatctgtcagtaaacwgtgaaattgttaaataaattatggaacataaggtagtgttttaaaatctttcaaaaattatatctaataatatgggaaaattgcattgctatgtaatccg

SEQ ID NO: 226808 - DNA, 201 bp, Homo sapiens
acaatttaaaacatgcaaaaaaaaccccatcattttcagctagttggcaaatgtagtggaattgggcatggggatattctccctagaaaaagaattttttmatgttttttgatctagtaatctcatttatagaaatctttcttaaagaaatagagatgcaggcaaaaattcattattatactttggtattatagtatttat

SEQ ID NO: 226809 - DNA, 201 bp, Homo sapiens
agagatactgcatgttcacttccagaccatcacaataaagtgaatattgcaataaaacaaggcacacaaacttttttgtttcccagtgaatataaaagttrtgtttacagtctatagtagtctagtatgcaatagcattataaaaaaaatatgttatcttaatttaaaaattttttttgctaaaaatactggtgatcattt

SEQ ID NO: 226810 - DNA, 201 bp, Homo sapiens
atgtgtgaactgaattgaattctaggatacccagttagcgtctgttggagaatctggtgtgagaagtgttgagtagtgtgtgagagtaggaaaacactttrgtattttatgccccctacgcaagttctgatacttttaatactttcattattgatcttgccagcacagtgagccaaggaaaggaaataaaagacatacaga

SEQ ID NO: 226811 - DNA, 201 bp, Homo sapiens
tcagatttttgcctaattataaaagaagtgcagcatagaggtcttattactgtggctaagatgaaggaaaacactctcacgatcaatcctccatgattttrttattattgataattcaaacgatatgactgtactctttgagcactgacgagcaccaagtgtatttttaaacatgccaagtgtgattagtactccttctac

SEQ ID NO: 226812 - DNA, 201 bp, Homo sapiens
gatacagaaaggatgatgtcctcctggtctgtaacagcccatactaattattccctctcctgagagttgtcagttaaccctgtaaacagaaagtcaggcccaatagtgggaactctacactgaaggaatgcagtaagctcaatcgcctctttccaagtttgagatgacttttctgtaaggcaagtaatactgtcatccata

SEQ ID NO: 226813 - DNA, 201 bp, Homo sapiens
agaatatacaacctgaatctaaactcaaggacacagcagagaacccccaaatgaggaatagttctatttaaacaaaatgaaacacacacacacacacacacgttggggtagaggggtttggggcatggaggtgtactgttaaaaaagaaaacagaaagacaaagtaatgtttgaggttaaaggagacttaagagttaggaa

SEQ ID NO: 226814 - DNA, 201 bp, Homo sapiens
cagaatatacaacctgaatctaaactcaaggacacagcagagaacccccaaatgaggaatagttctatttaaacaaaatgaaacacacacacacacacacacgttggggtagaggggtttggggcatggaggtgtactgttaaaaaagaaaacagaaagacaaagtaatgtttgaggttaaaggagacttaagagttagga

SEQ ID NO: 226815 - DNA, 201 bp, Homo sapiens
acagcctttgcataataaaagcttatagctcagaatggtagacaacacagagtgagcaattatgcattggtcctaatgtgtcattattttagacaaacaaaatacaactgtaagcttttataaatgtgcgtactttgttagtgtataactaaaatataatgagctagattctttgcctgcctaatatacactcagaatatt

SEQ ID NO: 226816 - DNA, 201 bp, Homo sapiens
cacagcctttgcataataaaagcttatagctcagaatggtagacaacacagagtgagcaattatgcattggtcctaatgtgtcattattttagacaaacaaaatacaactgtaagcttttataaatgtgcgtactttgttagtgtataactaaaatataatgagctagattctttgcctgcctaatatacactcagaatat

SEQ ID NO: 226817 - DNA, 201 bp, Homo sapiens
ccacagcctttgcataataaaagcttatagctcagaatggtagacaacacagagtgagcaattatgcattggtcctaatgtgtcattattttagacaaacaaaatacaactgtaagcttttataaatgtgcgtactttgttagtgtataactaaaatataatgagctagattctttgcctgcctaatatacactcagaata

SEQ ID NO: 226818 - DNA, 201 bp, Homo sapiens
accacagcctttgcataataaaagcttatagctcagaatggtagacaacacagagtgagcaattatgcattggtcctaatgtgtcattattttagacaaacaaaatacaactgtaagcttttataaatgtgcgtactttgttagtgtataactaaaatataatgagctagattctttgcctgcctaatatacactcagaat

SEQ ID NO: 226819 - DNA, 201 bp, Homo sapiens
tggcactttggggggccaaggcaaggaggatcacttgtgctcaggagttcgagaccagcctaggcaacatagtgagaccttgtctgtacaaaaaaattttwaaaaaaaatcagccaggcatgatggtgtatgcctataattctagttactcaggaggctaaggcaggaggattgcttgagcccaggtgtttgaggttatag

SEQ ID NO: 226820 - DNA, 201 bp, Homo sapiens
cttgaacgcttggactattggcttccattatcttctctgtagactagagtgtattattcatatgctaaagcagagaaccagtcaaaacctttgttttgcaytattggtatctctgtgaaataagaattttgttctgggcatgagcatgactgtacaaaggtggtccttgaaagtaggtaattgttccaagtgctggaatga

SEQ ID NO: 226821 - DNA, 201 bp, Homo sapiens
gaaagtctgatgccacgaacttggccaccctcttatatggagctcctcttggagctttttcctctgcaggccccaggctgctgccagggtcctccatcccstgcttcacattacagggcttctttcacctcctctgttctccatgtctccatgatgtgctctccgcttccatttcttaccctgctatagtatctagggaca

SEQ ID NO: 226822 - DNA, 201 bp, Homo sapiens
tagcctttttaagagaagcttttgggtttgatatggcagtagattgccctgctcacctccccaaccccaatatatttgaacatttctgaaattgggatgcrgtttacaatcattccatgtgttttcttgttttttaacttgcaggaatgctgttaatgaactgagagtgccttaaaattaattaagtaattcagcttttaa

SEQ ID NO: 226823 - DNA, 201 bp, Homo sapiens
gagtagaattcattaagtgaaaagaaagctctcagcaaagaggggatgtggggagcggttcccctacccgaaagtgggaaaattctctaatatggctgagsctgtggcttttatgggctcagtaaagggagtgtgtgctgattggtctgtgagtatgcaaaaaaggttaaagcaaagacgctactcaaaggtgggcgtggc

SEQ ID NO: 226824 - DNA, 201 bp, Homo sapiens
ttcctaggagtgttctgagacttttttcaaatggtttttcctttatcccatatctctaaagatcactttcatcccacttagttgtgtatgtatgttttcamacacatatatccttttgaggtgggtctagtgggaggtatctatttttactctttaccgaggtaagggtttccatgaaacaatgcaaatatatgtgaaatt

SEQ ID NO: 226825 - DNA, 201 bp, Homo sapiens
tcaaaggtgggcgtggcagtgtagacaactaattaggaaagggtaggtatatgtaaaataggtgaaaggtgaggatcaatcagaggaaagtgtgccaaacrggaagacaagttctcaatccagtccaagcatttaacctgtagcttggttttcaggctttaaactgttttcagcttggaagtggggttgcactggggacct

SEQ ID NO: 226826 - DNA, 201 bp, Homo sapiens
tgattagaaaatgcaaaatattttgcaaacaactttgaaatatgtttgtgataggaaagcccctctaaaatatgtggttcaaaatatatcaaataataaarcaatgtaatacaaacacatggcctttataagttatgaagaaattgcaggaaatttcaagaagctgaagtacaaataaagtccccattacctgattacaat

SEQ ID NO: 226827 - DNA, 201 bp, Homo sapiens
attaaagaagtgttttttatcctctgccatgagataacttttttaaggacaaaatctaaatgtataggtgaagccctagtttttacgtgattgaaaattgrccaaatatcaaagacaacagctcttgattattattgtacatgttctgttattgggctgatgacattttagtgagttttttaaaagactgaaatatttctt

SEQ ID NO: 226828 - DNA, 201 bp, Homo sapiens
ccattaaagaagtgttttttatcctctgccatgagataacttttttaaggacaaaatctaaatgtataggtgaagccctagtttttacgtgattgaaaatkgaccaaatatcaaagacaacagctcttgattattattgtacatgttctgttattgggctgatgacattttagtgagttttttaaaagactgaaatatttc

SEQ ID NO: 226829 - DNA, 201 bp, Homo sapiens
aaaccaaccctctagtgaatttcttgaagtgtaagtaaaacacagtaaaataaccatagtagaacaataatgtcacactgagacttaaaatgcaggcatayctatatctcagagatactgcatgttcacttccagaccatcacaataaagtgaatattgcaataaaacaaggcacacaaacttttttgtttcccagtgaat

SEQ ID NO: 226830 - DNA, 201 bp, Homo sapiens
ggatcacctgagggcgagagttggagaccagcctgaccaacatggagaaaccctgtctctactaaaaatacaaaattagctgggcatggtggcacatgccygtgatcccagctacgtgggaggctgaggcaggagaatcgcttgaacctgggaggtggaggttgcagtgagccgagattgcgccattgcactctagcctgg

SEQ ID NO: 226831 - DNA, 201 bp, Homo sapiens
gaaactgtctgggtattggaaaggaagtcacggatgcgcaatggaatttgtaaaggggtggcacagctcttgaatactctccttggaagagaccctggcayggagagaacagagtattaacctcactctgaggttgggaagactaagggaatctgaggtgtgaggagggatggagacgacaggtcacacaatgtgatggaa

SEQ ID NO: 226832 - DNA, 201 bp, Homo sapiens
tcttctgtcattcttcaggctcttgagcacttttgagaaactaatatgaatgggaaagatgtaatatttactcccaggaaggttgctttggtgatctagtytgtgaactagactcaggaaactgtctgggtattggaaaggaagtcacggatgcgcaatggaatttgtaaaggggtggcacagctcttgaatactctcctt

SEQ ID NO: 226833 - DNA, 201 bp, Homo sapiens
agccatatctttccgtggcttcttccctggcccatcctactccctcatttccccataggtttctcctgagggcactatttcaatcaatttcttgtacaagygtacccatttcagagtgtacttctagggaatctgatttaagatacccttttcccctgttttactctccctcgttcctcaatttgattatctagggttctt

SEQ ID NO: 226834 - DNA, 201 bp, Homo sapiens
ccaatgcagaagacataacatggtttgctttctttctcccgtccattttagtatcttaagtaccagcagatagaaggtccagaaaaaagaaagaggatgayattgtaggggaggccaaattttctctcttagggttttttagctgggcctgaggattgaattgacataaggcagatcagcgggagaaaagcatacaaattt

SEQ ID NO: 226835 - DNA, 201 bp, Homo sapiens
atacatgaaactgcactgctaaatactgccaacctaccttcaaaaactatgaaagcaagaagacaatgaaacaatatcttcaatgtgctgtaaggagatawgactatccaatcccgaagtccatatccaaagatactcatacttcaggaacggagtcaaaataaagttgcattcagaaaaacaaaaacagaatatttattg

SEQ ID NO: 226836 - DNA, 201 bp, Homo sapiens
gagccatgaagcatttagaaaaaaattgatcatatattatatctcaaagaaaccatattaaattatgaaatataaagtgttaacagcctccatgttctgcytacactgaaatagagctagacattaatagcaaaagtttaaatgcaaaaatcagtagcttggaaaagagaaataatgataacaaaaaccaaatttttttct

SEQ ID NO: 226837 - DNA, 201 bp, Homo sapiens
tagcattgtacgtgaaactaacggaagagagataataagcagcatttccaaagtactttgaactatgatatttttattataatttctctctctcttttgarcagctttttggtaatagtgtttcaaagatcatacttgggaaacgctgatttaagactgctaagatgcataagctggtttggctgatttcagagtaataaa

SEQ ID NO: 226838 - DNA, 201 bp, Homo sapiens
ctgttttctttctccctgttcctttccacctcttggtaccttcttttcttttttcttttcttttcctttcctttcctgtcctgtcctttcttttccttttyttttattctcttttctcttttcttttctttcttttttttttttttttttgagacacagtttcactctgctgcccaggctggagtgcagtggtgcagtctc

SEQ ID NO: 226839 - DNA, 201 bp, Homo sapiens
acacaaatagtagtgaaagattaataaaagctcttcggagcacaacgaacaaacaaaaacaaaacccgataccaaaaaacaaaaattgaagggactttccrtactccaggcaacattaatgaaaagggttttatatcatttcaacttggtaattttttaaagaataaagtaaaaaaaatccttcacacacacaggcaaaca

SEQ ID NO: 226840 - DNA, 201 bp, Homo sapiens
agggctgtgacccttgagacaaggtaaacccctgaggcaagccttgcattcaccttggctttctgcctaggggtgcattcactggactggctagtaaggargtggggccaagcattacatgcttgtttcaatgaactgataaggcagagtttgtactttgttgctgctgaggggctggaattagcagagtagggtactgaa

SEQ ID NO: 226841 - DNA, 201 bp, Homo sapiens
ctaacatctgtcttcacattattaggttcatttaatttaactctcatctcttgatgatgatggtaagagccagcatgctaggcgttgtattatgagatagraagtattatcatgctctctataggcagtcacactccagagtctctacctgagatgtgtctagtactattgttagacttggagatataaaggtggatgaga

SEQ ID NO: 226842 - DNA, 201 bp, Homo sapiens
aagctttgacagtctctcctacttgttgtcatgttggcacactgatttgttaatggggaaaatattatatatatatatatatacacacacacacacacacatatataattacatattatatgattatataatgatatatataattatatataatgatatatgtatatatatttccaatatattagcatcacttttgtgagg

SEQ ID NO: 226843 - DNA, 201 bp, Homo sapiens
gaagctttgacagtctctcctacttgttgtcatgttggcacactgatttgttaatggggaaaatattatatatatatatatatacacacacacacacacacatatataattacatattatatgattatataatgatatatataattatatataatgatatatgtatatatatttccaatatattagcatcacttttgtgag

SEQ ID NO: 226844 - DNA, 201 bp, Homo sapiens
gaacctaggaggtggaggttgcagtgagcaaagactgcaccactgtactacagcctcagcaacagagtgagaccctgtctcaaaataaaaaaaaaaaaaaagaagaaaaacttgcccagaatggaattttgaactagtacttcccagtactagagttctgtagcaactgtgaagctttgacagtctctcctacttgttgtc

SEQ ID NO: 226845 - DNA, 201 bp, Homo sapiens
acaaccagctgtttcttatcagcatcatcattattgcttctattgttaataagatttcatttcaacagaggattctagacctcaaagcagggttaaaaaaactgccctaccttggtgtttctggcaagcttgggaagttattccctttcatttctttcaacccttctcattagccagggggaagctttctcacctttctag

SEQ ID NO: 226846 - DNA, 201 bp, Homo sapiens
cgcccggccttagtaactggaatcttgaggggcagtctgggtggtcattaaaaacagggactctggggttacaggaccagggttttggctgttactagcakagagatttggggcccattacttgacctttctgtgtctcacaagtttgttaatgaggagtaaatgagttaatacttctaagtactgagtttacttgtattt

SEQ ID NO: 226847 - DNA, 201 bp, Homo sapiens
taaccatgcttagcataacacttcagctccttaatcccttttcaaccacaactctattgtcagttgctagtaactggaattctttttttttttttttttttctgatggagtctcgctctgtcacccaggcttggcgatcttggctcactgcaagctccgcctcctgggttcaggccattcttctgcctcagcatcccgagc

SEQ ID NO: 226848 - DNA, 201 bp, Homo sapiens
ataaccatgcttagcataacacttcagctccttaatcccttttcaaccacaactctattgtcagttgctagtaactggaattctttttttttttttttttttctgatggagtctcgctctgtcacccaggcttggcgatcttggctcactgcaagctccgcctcctgggttcaggccattcttctgcctcagcatcccgag

SEQ ID NO: 226849 - DNA, 201 bp, Homo sapiens
cataaccatgcttagcataacacttcagctccttaatcccttttcaaccacaactctattgtcagttgctagtaactggaattctttttttttttttttttttctgatggagtctcgctctgtcacccaggcttggcgatcttggctcactgcaagctccgcctcctgggttcaggccattcttctgcctcagcatcccga

SEQ ID NO: 226850 - DNA, 201 bp, Homo sapiens
tcataaccatgcttagcataacacttcagctccttaatcccttttcaaccacaactctattgtcagttgctagtaactggaattctttttttttttttttttttctgatggagtctcgctctgtcacccaggcttggcgatcttggctcactgcaagctccgcctcctgggttcaggccattcttctgcctcagcatcccg

SEQ ID NO: 226851 - DNA, 201 bp, Homo sapiens
ttcataaccatgcttagcataacacttcagctccttaatcccttttcaaccacaactctattgtcagttgctagtaactggaattctttttttttttttttttttctgatggagtctcgctctgtcacccaggcttggcgatcttggctcactgcaagctccgcctcctgggttcaggccattcttctgcctcagcatccc

SEQ ID NO: 226852 - DNA, 201 bp, Homo sapiens
cctgttcctgtctttgcccccatttttttcttttagtttttctttgtccccttcttgtctatttgtgaaattgtgttgccttttgtggatattaactatcrtctctcttgcatttttttctaaatcaaatattttaagaatgatttgctgttcataccagtgtgtacatatatgtttttgtgttcttaaagatcagttcca

SEQ ID NO: 226853 - DNA, 201 bp, Homo sapiens
acctgtgcacatgggtgaatactaataatctctgctagaaaaactgaaaacagcagcaaaacaatattaataccattaacatctaacatttattaagctcytctgtgcacgcatagtaatttacctgatatagctgagactcaaaaaggttgaataccttgcctaagtttatgaagaggtctatgaggagcccagagatga

SEQ ID NO: 226854 - DNA, 201 bp, Homo sapiens
ggccctggtcactttaacatggtgctttttcccattaacaaagagcaaccccaccgatttcagttgtgattcttgaaactcagccctttgcccagtaagtrctaaccggaagacttgttttcttacactttctaggtggataatctgatcaccacaaatggcaagggtgatgccatcaacagttgaaaacagaaactctcc

SEQ ID NO: 226855 - DNA, 201 bp, Homo sapiens
gtgccagacctcagtacgggagccactgtttgtcatgaatcagtctttaaataaaagcaagtttttaaaatggaccatgctaatttggattttgctaaccycttctgaagaaggcttggcctgttcggtgccagctggctgagttggcattcagcgagaaactgggtccttaccaaaaatcgcattgctcccctctccctc

SEQ ID NO: 226856 - DNA, 201 bp, Homo sapiens
gaacaaataccatgggagccattagcttatggtattgatgtgaggaatctgcctaataggaaattagtgatttaaaacaatgtgaaaaagtcaaatcagtrcaaatagtgtatgctgataacagcaatttgaattatgaagtgactaaagaaggggtgctggcatgagaagctggttcagagtttcagggctacataaagc

SEQ ID NO: 226857 - DNA, 201 bp, Homo sapiens
tacttcaactgattaataatttagaacaatgattgactggagaatggaagtggcgctaatagcctctcattttcctctttattatttcagacaaattggtragtcatggtggaggtgtgggatgtttctgggtcaactggctagaagctttaaattaaaaatgaaggatgatatttgatcttaattttctaagatgttggc

SEQ ID NO: 226858 - DNA, 201 bp, Homo sapiens
tcattctcatagacaagattatcaaaatatatgcataatgaaccttcaaaagatacagttgaaataaaaaaattagtgctcacttttcctccttttaaaaraaacaaaagtgtaaaagaaaaaaatcaatatttttagccacatatcacactacctttgaaagcacataccttacataaaagttgggactattaatgagca

SEQ ID NO: 226859 - DNA, 201 bp, Homo sapiens
tcattggaacactcattcttttttatacagtgaggttttgtctgattctagaatcacaaataaaagccagttaagatctttaaactaaatttgtttcaatyttgccttttgacctgtaaatatatctgatataatatggggttgagcctctcaaagaaaatgaacctaaagcctaggacggccatgtaggtatttccagac

SEQ ID NO: 226860 - DNA, 201 bp, Homo sapiens
ctgagaaatgatgtaatttgaccaaggccacagagaagtattttagtcagaattcgaacccctatctctctgtcaccaaggcctatgttttttccagtacrctgaatcatttctaaactattgaataatttaacagtttgggcattatttctaaaaacaattccagtttataaagtgatctgcatgaagaaccagcacata

SEQ ID NO: 226861 - DNA, 201 bp, Homo sapiens
atctgaagggattttttgtcatcctcaacagcatcaggaaacagaaagtgaaatgagagaataagtttagattgtaaaaagtaggattatttggaaaaggrgatggattagtcaagaaaatattgtaaagagaccagaatgtcataacacaattgaagtctgtgttggaagctgaaaagaaatcactatttaaaaaacact

SEQ ID NO: 226862 - DNA, 201 bp, Homo sapiens
atttcttgaggccaggagttcgagaccagcttgggcaacacgatgaaactccatctctactaaaaatacaaaaattagccaggcatgatgctgcttgggartctgagctgcttgggaggctgaggcaaaagaatcactggactccaggaagcagaggttgcagtgagccaagatgactccactgagcaacaacagccagac

SEQ ID NO: 226863 - DNA, 201 bp, Homo sapiens
cttcaatatcagcaatggccagtcaactctttttcctattgcattgctctgactattctacttctgtttttgagatttaatgacccttgtgattacattgktcccaccctggtactggaggataatctccctgttttaaggtcagacgattagcaaacttaattctatctgctaccttaattttcctttgccatgtaatct

SEQ ID NO: 226864 - DNA, 201 bp, Homo sapiens
ttcctttctgaggtctctaagggaaaatgtgtttccttgtccttcctaccttccagaagctgcctgcattccttagcttgtggccccctttcatcttcaayatcagcaatggccagtcaactctttttcctattgcattgctctgactattctacttctgtttttgagatttaatgacccttgtgattacattggtcccac

SEQ ID NO: 226865 - DNA, 201 bp, Homo sapiens
cgtccctgttcttacccagaatgctttgcagcctctccctagcagcagcagcaattatgttgaactcttgttagggattaggcactctgctacaagctttrcatgaattatcacagctgatcctcccaaagcagccagtgaggtaacagtattatcccccagtttacagatgtaggaaatgaagcataaataatttacata

SEQ ID NO: 226866 - DNA, 201 bp, Homo sapiens
aaaagagctagaattactttgtttgcatacagagtgggactgggctgcacactctccttatctccattcctccgtacaaagcccttggttttccataatcrcagctttaaaaccattcatgtacagctgaatagtttgtcagacatgtatcagatactagtctaaacacctaacaaatattaactctttaattctcacaac

SEQ ID NO: 226867 - DNA, 201 bp, Homo sapiens
ccctgttaatgaacttcacgaaccccttatttatcatagaaagcaaaacattagagattattctgtgaccacctttaagtgttgtatgagaataggtaatyaaagcacaaaaagaagccgagcagcggtgacataaaaccttcctaaattatcagccggatttggaagcaagaatgcgattgccggtgagagacagtggca

SEQ ID NO: 226868 - DNA, 201 bp, Homo sapiens
tttgcattgagaacagcaagcactatttgaaaggtcatcccatttcaagtagcagatggataggaaaaaaagactctggcttttacaaataatttaattgwattctccttgccatttctgcaggcaattcaggatattttttaaagcattgatccataattatcgctcagagtggttagcattgttagacagatgtgtaat

SEQ ID NO: 226869 - DNA, 201 bp, Homo sapiens
aaaaaaaaaaaaaaaagggtcttttcagttcagttgggaaatgtatgtttatctaataaaagatgctatgaaaattggcttttcatcagtaagttgtaaaygttagaccactattttttacaataaaaatctaaaaattcagatgaattaaatatatgaatgtacattaaacaatataaattttagaaaaataggaattct

SEQ ID NO: 226870 - DNA, 201 bp, Homo sapiens
aaaagaagccgagcagcggtgacataaaaccttcctaaattatcagccggatttggaagcaagaatgcgattgccggtgagagacagtggcaaacccgctrgtctcagcccaaggatattgtgctgctctttgctaagtcagttggccagaagctatctacagaagtggcaattattctattctttctaagcactatctcc

SEQ ID NO: 226871 - DNA, 201 bp, Homo sapiens
tgcagttccctcgtcttgagaaattggctctgtctaggcagtaggcaaggagaacccactgggcaattacagtggcacatgcctgtagtcccagctacttkggaggctgaggttggaggatcaccagagtcagggaagtcgaggctgcagtgagccgaggtcactcccctgcactccagcctggacaacaaagggagatcc

SEQ ID NO: 226872 - DNA, 201 bp, Homo sapiens
tttctacatttccagggtatgtttttcttctttaatcatctattaaaaacatatatgaataatatgaaaaaaaattgttttctctttcactctgtttttttgctgtgaagtgttgacctgctctttggaaaatattaagaatgaaaattccagggatatattagcacagtagaaacagtcacctttgtgtgaccttcagaa

SEQ ID NO: 226873 - DNA, 201 bp, Homo sapiens
tataaaaatatgtagcatggcttcatatttctacatttccagggtatgtttttcttctttaatcatctattaaaaacatatatgaataatatgaaaaaaaattgttttctctttcactctgtttttttgctgtgaagtgttgacctgctctttggaaaatattaagaatgaaaattccagggatatattagcacagtagaa

SEQ ID NO: 226874 - DNA, 201 bp, Homo sapiens
ttcattcataatattaaatatttagcacacaccatatgcaagacatggtctacaatggagttggcaactatagctctgggccacatctggtcctctggctrtttttgtaaataatgttttgttagaacatagccatgcccgtttatttatatatttattggctatggctgtttttgctctacggtgtcagagctaagtagc

SEQ ID NO: 226875 - DNA, 201 bp, Homo sapiens
cttaataatgtgggagaatcatgaggtacagatcttagggcatgcttcctggagtgtcagtagagtatatttcttttcttttctctcttttttttttttttccgagacagagttttgctcttgttgcccaggctggagtgcaacggcgcaatctcggctcaccacaacttccacctcctgggttcaagtgattctcctacc

SEQ ID NO: 226876 - DNA, 201 bp, Homo sapiens
aatgaaatttctgtccactgattttattttctctctgtctacatcttcaagcataacagatacactcatcaaactgacaaagaacttttttttttttttttgcttactttgacataatgcaactgcagtgagtttttttaaatagtcttagtctgcattctagtcacatgccttcctctgccctatttgcttctctcttta

SEQ ID NO: 226877 - DNA, 201 bp, Homo sapiens
caaccaatggtgtgttaccttcaaggcatggatcccaacagagtttagaacgcagtaaaaagattttctacaagtaattatgatttgtgatagaaacacakttttcgcattcaatcctgcctttgtctccacgtgggcctggttctccaggcttctgtagagtttgtgtatctatgggttttaaatgcagtgcttatttga

SEQ ID NO: 226878 - DNA, 201 bp, Homo sapiens
attttttgactttgtttttctgctttttacacactgcccccgactggcagcatttatagagaataaaaggaggaactaacaactcatttggacaagtattkattgattgattgattgatcaagacagggtctcactctgtcacccaggctgcagtgcagtggtgccatcatagctcactgcagtgtcaagctcccaggctc

SEQ ID NO: 226879 - DNA, 201 bp, Homo sapiens
ggagagtatagagatctcagtataactgctgctaagttttttattgtaatgttttacaacacgtgtttgcttcatttaatgcgttgtatatgtttaagcasctcccatgatctaggatcaagttggatgccttcaaaattcttcaaatggagttcatatttaattagtatgcaccagaacaggcattaagcctatgctggt

SEQ ID NO: 226880 - DNA, 201 bp, Homo sapiens
cactacagtttaaacagaaaactttaaggatttaggttaatgaatatggtttatgaatcactgttaccagtacagatatgtttagcgcaactgtccttgtmtttatgatgaacataatccttccaggtacattttatgttttcttgctgaagtttgttggtaaacgtggaaattaaactggaaaatatggataaatcagca

SEQ ID NO: 226881 - DNA, 201 bp, Homo sapiens
tataaaatacttaggaatacatctaaccaaggagatgaaatgtatctacaaggggaaccacaaaacactgctaaaagaaatcatagaagacacaaacagawggaaaaacattccatgctcatggattggaagaatcaatttcattaatgtggccatactgcccaaaataatctacaggttttatacaggtagtttataaaa

SEQ ID NO: 226882 - DNA, 201 bp, Homo sapiens
ctgaaaaaatagaagtatataaaatacttaggaatacatctaaccaaggagatgaaatgtatctacaaggggaaccacaaaacactgctaaaagaaatcayagaagacacaaacagatggaaaaacattccatgctcatggattggaagaatcaatttcattaatgtggccatactgcccaaaataatctacaggttttat

SEQ ID NO: 226883 - DNA, 201 bp, Homo sapiens
acttgcgagccaaatcaagaaggaaatctcatttacaatagcctgaaaaaatagaagtatataaaatacttaggaatacatctaaccaaggagatgaaatrtatctacaaggggaaccacaaaacactgctaaaagaaatcatagaagacacaaacagatggaaaaacattccatgctcatggattggaagaatcaatttc

SEQ ID NO: 226884 - DNA, 201 bp, Homo sapiens
acaatatgattctattcctaaaaaactcaaagacgccaccaaaagcctcctagaactcagaaacaacttcagtaaagtttcaggtcattaaatcaatgtayagaaatcagtagcatttctgtacaccaataatgttcaacttgcgagccaaatcaagaaggaaatctcatttacaatagcctgaaaaaatagaagtatata

SEQ ID NO: 226885 - DNA, 201 bp, Homo sapiens
acatagaggcaaaaatcctgaacataataccagcaaaccaaattcaacagcacatcaaaaggttaatttactatgatcaagtaggcttcattctggcatgsaaatttggtccaacatgagcaaatacaaatgtgattcaccacataaataggatttttaaaaagccttagaatcatctcactagatgtagaaaaagctttt

SEQ ID NO: 226886 - DNA, 201 bp, Homo sapiens
agaaatcaacaggccaatatccctgatgaacatagaggcaaaaatcctgaacataataccagcaaaccaaattcaacagcacatcaaaaggttaatttacyatgatcaagtaggcttcattctggcatgcaaatttggtccaacatgagcaaatacaaatgtgattcaccacataaataggatttttaaaaagccttagaa

SEQ ID NO: 226887 - DNA, 201 bp, Homo sapiens
gggggggagactgatttgagtaataataaaactcccgtctcccatacagcctgctctgcgtgaattaaactctttctctattgcagttccctcgtcttgakaaattggctctgtctaggcagtaggcaaggagaacccactgggcaattacagtggcacatgcctgtagtcccagctactttggaggctgaggttggagga

SEQ ID NO: 226888 - DNA, 201 bp, Homo sapiens
cctgatgtacaaagaagagctggtacaattctactgaactattccaaaaaattgaagaggagcaactcctcccaaactcattctgtgcatcaccctgatascaaacctgacaaacacacaataaaaaaaaagaaatcaacaggccaatatccctgatgaacatagaggcaaaaatcctgaacataataccagcaaaccaaa

SEQ ID NO: 226889 - DNA, 201 bp, Homo sapiens
accaacgttgaatttcaaacccgaattcaatagaattgcttttccttttctattttttaaaaaagtacattaaatccaaattagtgtcctgtatttctatsatctttctctttcttgtcttatttttgtgacttctttttgcaacttggggtgacaagccttcacttcattagctttgcttgcctgactctgaaacaaggt

SEQ ID NO: 226890 - DNA, 201 bp, Homo sapiens
ggaggagcaaacagaaaacatataataaacttgcagctctaaatgcaatcatatcagtaatcagactaaatgtcagtggactaatcactaattaaaatgtrgcagtgtcatagcaaaattctacctgatgtacaaagaagagctggtacaattctactgaactattccaaaaaattgaagaggagcaactcctcccaaact

SEQ ID NO: 226891 - DNA, 201 bp, Homo sapiens
actgctggactctaattgctaccttgtaggcagaacttttggctgcattgactgtagatgggttccctctgattactgacatctgacatctcctggaagasagttctagagcctagggaagtgatttgggcctagaaattaaaaataaccatgaaaattccacctagttaaagttgtagtcatttataatttatccgtgga

SEQ ID NO: 226892 - DNA, 201 bp, Homo sapiens
atcatacataactataatctttgaatgtatcaatatcagttgcctggggctgtgttcttttcatgagtgactggcagatttggcattttcgcatctagaasaacattataacctagtttttactttgcctttccttaagcccagtgcccttacaattgttaaaatacatgtctctacttcattggttagctggaaggaaaa

SEQ ID NO: 226893 - DNA, 201 bp, Homo sapiens
atttagtgtttcttgcccaaccatcccaaggcactttactaataagcatcatctttctttcagagctaaggccaatggagagaggctaagggacttgatayagtggggctggctgttgggcatgccttcaccatttctgtggcatctagattgttctaccacagttcaggtatatgcctgagcatttgccttaattgtttg

SEQ ID NO: 226894 - DNA, 201 bp, Homo sapiens
cattgagaatgtgcaaacagacagaggtccgataagaaagtttatggtatggttttgggatatttcctataagttatttttagcatagatttttaaggtcmaattggagtgtagttaaaaggaaaaaaatagcaggcctccaaactttgtaagtaatagagatggtttattagatcatctaccctgtaatgagggtaataa

SEQ ID NO: 226895 - DNA, 201 bp, Homo sapiens
catgtgaaccttgtctgtctccctacaaagaccatgatcttaatcataaactctacagctcctgaaagatggagagttatacagcaggctaagaaatttgsatttacctgtaggtgattggcagtcattgagaatgtgcaaacagacagaggtccgataagaaagtttatggtatggttttgggatatttcctataagtta

SEQ ID NO: 226896 - DNA, 201 bp, Homo sapiens
gagaaatgagaacagcttggactaaggtaatgaagggaaagagacaggtaaggatatttgcgtggaccttaggacttgaggatggattcaaaggagtagasgatgaatgccatctccaagtttactattattacctccaatttgcagaggagctggtcaaagcgtatgagaatttgtgtagttcttctcaaactacagtgt

SEQ ID NO: 226897 - DNA, 201 bp, Homo sapiens
ttttcattaaatcaaacaaacaaggtaaacaaataaatacctgtgtcttaagggtgttgatgaagggtgtggatgttatgggtggtgatttggaataacaraagaattatattacacctaacacttcaaaatttattcaacttttctccaacatccttcttttccctacaagttccattccctatggcaactgtttgcttg

SEQ ID NO: 226898 - DNA, 201 bp, Homo sapiens
tgggatttgttttgaaatagttttgtgagtgatagtggaggtataaatgattcattatatcattctatgtctttgaaattttttatgataaaaagaaaaaatcttaaaatgtagacttttatgatatcttggctaataaaattctttgaagtgggtgatggactgatttgataccagtttccaaagagtgttagaatacag

SEQ ID NO: 226899 - DNA, 201 bp, Homo sapiens
gaccaaaacagttcagttggtaggcagattgggaatctttgcattggaaaaaaaaattcaagaatatcataaaagtatatttgcaactccatctattttttatcaaatcataagataatatatttcccatgtaagcattatatttctagatgatacgcctgatagaagaaattaagtgtccatatgatctacaggaaaaaa

SEQ ID NO: 226900 - DNA, 201 bp, Homo sapiens
tcaaaaaaaaatgaaaagataggcatgcttggggtttggggcaaataacacaaaagtgtgtacaaaacaaaacaaaacaaaaaacaaaccccccccccccsccaaaccagtggtgatctgaagacaggattgaatgttttcaattttgcttccaagtggagaatcatctcggggctgtagaatgaattttccttcttaaga

SEQ ID NO: 226901 - DNA, 201 bp, Homo sapiens
cgagactttgtctcaaaaaaaaatgaaaagataggcatgcttggggtttggggcaaataacacaaaagtgtgtacaaaacaaaacaaaacaaaaaacaaacccccccccccccccaaaccagtggtgatctgaagacaggattgaatgttttcaattttgcttccaagtggagaatcatctcggggctgtagaatgaattt

SEQ ID NO: 226902 - DNA, 201 bp, Homo sapiens
ctattgcactccagcctgggcaacaagagcgagactttgtctcaaaaaaaaatgaaaagataggcatgcttggggtttggggcaaataacacaaaagtgtrtacaaaacaaaacaaaacaaaaaacaaacccccccccccccccaaaccagtggtgatctgaagacaggattgaatgttttcaattttgcttccaagtgga

SEQ ID NO: 226903 - DNA, 201 bp, Homo sapiens
acactaggtcattctctcctgcttatcatggtgtgctcgtgtctttcattaacacagagaaaaagaaattcatgataggctttccttcatttcatttcaarcaagtataggatttttactatgcttgcaagaaattatatacatatttggagaagcagcctgtgatatcaataggtaagttttctagttatccaggtgtcc

SEQ ID NO: 226904 - DNA, 201 bp, Homo sapiens
gatccaaaagttgcagagggaagaaaaagaaaaacaagaagtggaggagcaaacagaaaacatataataaacttgcagctctaaatgcaatcatatcagtmatcagactaaatgtcagtggactaatcactaattaaaatgtagcagtgtcatagcaaaattctacctgatgtacaaagaagagctggtacaattctactg

SEQ ID NO: 226905 - DNA, 201 bp, Homo sapiens
agaaaaaaatgatccaaaagttgcagagggaagaaaaagaaaaacaagaagtggaggagcaaacagaaaacatataataaacttgcagctctaaatgcaaycatatcagtaatcagactaaatgtcagtggactaatcactaattaaaatgtagcagtgtcatagcaaaattctacctgatgtacaaagaagagctggtac

SEQ ID NO: 226906 - DNA, 201 bp, Homo sapiens
ctgctacccaggggatagttttaaatttgagtataactaattgcctgctaaaacaaataaatcaatacccttcagaaaactataacaggattgaagctctkcatacaataacatcaatacttgcatatcatacaaccccaaattacacgctatatggaaacccaataaaatgtgactcattctgaagacaaaaagcaatta

SEQ ID NO: 226907 - DNA, 201 bp, Homo sapiens
gtatattcttgatggagcagacacaaattatcacaaagataaaagaactgaactgagattcgagctgctacccaggggatagttttaaatttgagtataamtaattgcctgctaaaacaaataaatcaatacccttcagaaaactataacaggattgaagctcttcatacaataacatcaatacttgcatatcatacaacc

SEQ ID NO: 226908 - DNA, 201 bp, Homo sapiens
atgtaattctgaggtatatgtcatgtgtatattcttgatggagcagacacaaattatcacaaagataaaagaactgaactgagattcgagctgctacccargggatagttttaaatttgagtataactaattgcctgctaaaacaaataaatcaatacccttcagaaaactataacaggattgaagctcttcatacaataa

SEQ ID NO: 226909 - DNA, 201 bp, Homo sapiens
ggctggagtacaatggtgtgatctcagctaaccgcaacctctacctcctgggtttaagcaatttttgtgcctcagcctcccaagtagctgggattacaagygcccgccaccaggcccacctaatttttgtatttttagtagagatggggttttaccgtgttggccaggctggtcttgaacccctgacctcaagtgatccac

SEQ ID NO: 226910 - DNA, 201 bp, Homo sapiens
cattacgaaatgaaagccatttttatgtctaacacctcactcgggaaaggcatgccagcttcaatcttagttactgcaactgtctttttaagttacccttsagtttatgtaaatcagaattgattgtccttcaacaatagcaataacaacaacaaaaaagaatgttgtaaagaacaagaaaatattgattctttttaggta

SEQ ID NO: 226911 - DNA, 201 bp, Homo sapiens
cagaaaggttttcttctggcttgggtaatagatggagagtttccaccatctggctgctgtcaaggagccaggggaaatgaattgctagatttttactacaygtattcatattattgcccctttctgtgggccacagactcatgccatgattaatgaggactcttcttgacgcccagtatgctattctctggaaggctggga

SEQ ID NO: 226912 - DNA, 201 bp, Homo sapiens
tacaaagaggctttacgttagagtaaaataatcacttatctgtatgcatctttgaatgatttcaccggatatgttgaatatgtatttttaaaaatagcagsaaagggcctgtaatcccagtactttgggaggccgaggtaggtggatcacttgaggtcaggagtttgagaccagcctggccaacatggtgaaacctcatct

SEQ ID NO: 226913 - DNA, 201 bp, Homo sapiens
tgttacatcatggaggaaccttgaaaacattttggtaagtgaaagaagccactcacaaaagaccacatatcatatgaccaattgtgaagtgtcaaaaatargtaaatccatagcggcagaaactctagtggttgcctagctgggtggttgggagaaaatgggtagtgactgtaaatggatatagggtttctttgtggggtg

SEQ ID NO: 226914 - DNA, 201 bp, Homo sapiens
aggtcttacaaagaggctttacgttagagtaaaataatcacttatctgtatgcatctttgaatgatttcaccggatatgttgaatatgtatttttaaaaayagcagcaaagggcctgtaatcccagtactttgggaggccgaggtaggtggatcacttgaggtcaggagtttgagaccagcctggccaacatggtgaaacc

SEQ ID NO: 226915 - DNA, 201 bp, Homo sapiens
gaaagagaattaaacttgactgacttttctgccataaagttatttgaatttgggaacatcaactgcttatctcgtctacattttctccactgaaaactgaycagactcagcccactacccatctgggaaaacactcccaagatcaagttgctctatagttttagtcttttcaaagttattttttacttgaattttgcccta

SEQ ID NO: 226916 - DNA, 201 bp, Homo sapiens
atgaaccacttacacccttttgagccacagtctccaatgtacagattaatgacaatgcctgcaaaaatcacatatgtaccttcattctgcccttttaacartacctgtgtggcaatgctcagtattcatggtgaacgttcctaatgaaattgtacctagagccatctggatcactgctgaaataatcatctgaatttcttg

SEQ ID NO: 226917 - DNA, 201 bp, Homo sapiens
gctagtatagggaaagagaattaaacttgactgacttttctgccataaagttatttgaatttgggaacatcaactgcttatctcgtctacattttctccaytgaaaactgaccagactcagcccactacccatctgggaaaacactcccaagatcaagttgctctatagttttagtcttttcaaagttattttttacttga

SEQ ID NO: 226918 - DNA, 201 bp, Homo sapiens
ggctcttttcatttccacactggcgcatccactttctccactcttggaatgtaggaagtatgcattcatgtaattggaaaaatctggatttctgaagccaraaggttaaagcctgttaaacttcattgcagtgatatacagccgctattttatttttgatccgtggccttcgggccactgtttaaccagggcactgaacat

SEQ ID NO: 226919 - DNA, 201 bp, Homo sapiens
tatgctgccaggctgggcacttttatactttgttttcaagttttgcttttaaaggtaagacttgccccagcacctattttcccccatacattttacattgwaccttaggactcagtcacctccacttaaaattgatgacacaagccgcatacaaccattttttgtctttattttttgcgtaactttctaaggagtctctgt

SEQ ID NO: 226920 - DNA, 201 bp, Homo sapiens
ctgctctaaaacttgctttggtgtctccttctgccttatgccccttggttgaactctttcttctgaagaggtaagaactgaggttgctgcagacccatacrgattcactgctggtaacattctttgatgacgcatgactcagatatgttcggccagtaacgtactgctgtcttatttttattttttatttttatttattta

SEQ ID NO: 226921 - DNA, 201 bp, Homo sapiens
atttgttgaatgacatgaatatgaacatcaaaaagctcaccaaaatacaaatagggtgagcctgaaagactcacaccaaaacacattataaatactactaytgaaagtcagagacaaagagagaattttgaaagcagcagaagagaagagatttgtcatgcactagggatcctcactaagattatcagcagattttttcat

SEQ ID NO: 226922 - DNA, 201 bp, Homo sapiens
cctgctctaaaacttgctttggtgtctccttctgccttatgccccttggttgaactctttcttctgaagaggtaagaactgaggttgctgcagacccatayggattcactgctggtaacattctttgatgacgcatgactcagatatgttcggccagtaacgtactgctgtcttatttttattttttatttttatttattt

SEQ ID NO: 226923 - DNA, 201 bp, Homo sapiens; identical to SEQ ID NO: 148597

SEQ ID NO: 226924 - DNA, 201 bp, Homo sapiens
tcacgtcactgtactccagcttgagtggcaaagaccctgactcaaaaaaaaaaaacgaaaaataaattaatataaataataatttatgaatgctagttcartgattgtaacaactctatcatatatggaagttgctaataatagtggaaactaggtgtggcatatatgggaactctgaactctttataatttttctgtaga

SEQ ID NO: 226925 - DNA, 201 bp, Homo sapiens
gaaaactgcatatatgagatggtgccttcaataaagtcatgtcatgatatgggcaaaacttcattcattactgataggccatatgtttttaacagaaaacstcagtctccttgcttatttgaacataattcagatataatttgtcacataattataagagaaagccctcaaggcaatacagaaaaagaagaatgtggggag

SEQ ID NO: 226926 - DNA, 201 bp, Homo sapiens
gtgatcatgtatgaaccacttacacccttttgagccacagtctccaatgtacagattaatgacaatgcctgcaaaaatcacatatgtaccttcattctgcscttttaacagtacctgtgtggcaatgctcagtattcatggtgaacgttcctaatgaaattgtacctagagccatctggatcactgctgaaataatcatct

SEQ ID NO: 226927 - DNA, 201 bp, Homo sapiens
agagtccttttatttgctgcaaattgtagctttggaaccaatagtaaaaagtaatttccaggagtaactatttgttttacattagctgaaggaaagaaggyatttaaaaaaaaatagcatccctcagaaatattgccctaaattaaaatttcaaaaagaaaagcaagataaagttaaattaaaagatagaaatattttgac

SEQ ID NO: 226928 - DNA, 201 bp, Homo sapiens
ctggactaggaatcagaaatgaataattaaggcatggttctgccccttttcttgtgtgatcatgtatgaaccacttacacccttttgagccacagtctccmatgtacagattaatgacaatgcctgcaaaaatcacatatgtaccttcattctgcccttttaacagtacctgtgtggcaatgctcagtattcatggtgaac

SEQ ID NO: 226929 - DNA, 201 bp, Homo sapiens
aaaaaaaaatcctcttcataaatgtacccttcaaatattattatacccgtttgatagagatagaaagtgagcctcagtgatgttgagcagctacataggayacagaagtagtaaacacattactaggattcaaactcaggccagtgggaccaaaaaaacccatgtttctttgcttgtcagattccttcagattctgtggac

SEQ ID NO: 226930 - DNA, 201 bp, Homo sapiens
cctagcatctaacatgtgccagaaactgtacttgatactttattctcatttagaaaaaaaaaatcctcttcataaatgtacccttcaaatattattatacmcgtttgatagagatagaaagtgagcctcagtgatgttgagcagctacataggacacagaagtagtaaacacattactaggattcaaactcaggccagtgg

SEQ ID NO: 226931 - DNA, 201 bp, Homo sapiens
ccctgtcacttgtccactttggggttatccctgcaagtaaggtgggtcatggggctttcactttgccctagcatctaacatgtgccagaaactgtacttgrtactttattctcatttagaaaaaaaaaatcctcttcataaatgtacccttcaaatattattatacccgtttgatagagatagaaagtgagcctcagtgat

SEQ ID NO: 226932 - DNA, 201 bp, Homo sapiens
aactatttaaccactcatgtattttacatatgtattttgtttgtttgtctcctctaccagaaggtaggcagcatgatggcctgatcttggactattatgtycactgctatagagaatagtgcctgacaccttagtagagtctcaataaatacttgttaaatgaatgatcatctgctttcaattactacattgagctgacca

SEQ ID NO: 226933 - DNA, 201 bp, Homo sapiens
aactatataatgttgatgaaataaattttaaaaatgtaaataaatggagaaaaatgttgtgttcatgatttgaaagtcacagcgtagtaaagataccgatwcttcccaaattgatatacaggtttaaagcagttcctatcaaaaatctcagtatgatttttttcatatatagatgacattattctaaaatttatacagaaa

SEQ ID NO: 226934 - DNA, 201 bp, Homo sapiens
acccatagtactcaccatctcccttcctactttgtgtttctccagagtccttagaactatttaaccactcatgtattttacatatgtattttgtttgtttrtctcctctaccagaaggtaggcagcatgatggcctgatcttggactattatgttcactgctatagagaatagtgcctgacaccttagtagagtctcaata

SEQ ID NO: 226935 - DNA, 201 bp, Homo sapiens
tgtctgcattcatctttgcctctcagcagcattccttgcttctgggtatggggcaggacgctttctggaatgggggtctaatgacctataattaagcaagktaggtcagatagtttctttatggccagttattatgcaggaaggtggtagggattagaataatatttttaggttttgtggctggcctatggggagaaaatt

SEQ ID NO: 226936 - DNA, 201 bp, Homo sapiens; identical to SEQ ID NO: 27580

SEQ ID NO: 226937 - DNA, 201 bp, Homo sapiens
ggggaacagaattcaacccatagtactcaccatctcccttcctactttgtgtttctccagagtccttagaactatttaaccactcatgtattttacatatrtattttgtttgtttgtctcctctaccagaaggtaggcagcatgatggcctgatcttggactattatgttcactgctatagagaatagtgcctgacacctt

SEQ ID NO: 226938 - DNA, 201 bp, Homo sapiens
ctctcagcagcattccttgcttctgggtatggggcaggacgctttctggaatgggggtctaatgacctataattaagcaaggtaggtcagatagtttcttyatggccagttattatgcaggaaggtggtagggattagaataatatttttaggttttgtggctggcctatggggagaaaattagaggctagagagaggagg

SEQ ID NO: 226939 - DNA, 201 bp, Homo sapiens
cggagactgaggcaggagaatcacttgaacccggaaggtggagattgcagtgagccgagattgtgccgctgcactccagcctgggtgacagagcgagactytgtcaaaaaaaaaaaaaaaaaaaaaagcagtctttgcagacgctgccactgccgggagcaccctactatcagccatggtcaaccccaccgtgtacttcca

SEQ ID NO: 226940 - DNA, 201 bp, Homo sapiens
tttgccttttcctaacttctagtgatttgctggcaatccttggcttgcagctacataactccaatctctgcctttattctcacatggcgttccttctcccstgtgtctctgtgtcttcacgtggtcatcctcttatatccaatcatattggatgagaggcctgcccaccgatctccagtatgacttcatcttaacttaaat

SEQ ID NO: 226941 - DNA, 201 bp, Homo sapiens
gaatgacataacccagaggtctcgatctgtcagctcactggcctaaaaacaaaacaaaacaaaacaaaacaaaaaccacacaaataaaaaaccagatgtgygctacacaggaatatagaaataaaatatattggaacaataaaagatttcaagcaaaaattagaaaatactagaaaatctggaagtttcacataaaatgca

SEQ ID NO: 226942 - DNA, 201 bp, Homo sapiens
tccatccctgcttacatcttgaaaggaagtcccaatgctgaaagtttgtaggattgggacagttgctttgatacttcagaccaacagacggattcttcttkcattattcagataaagtgttttatgttgcctgtccacctaagtgttttaatcctcaagattaccttaactatggagacttgacttagacttaatattttg

SEQ ID NO: 226943 - DNA, 201 bp, Homo sapiens
ataaacaagatggacacgatacatctaggataccatgttaaaatggtttctaagactgcattcagccttagaagaaaagaacgttgtgatcacttaatgawgtctgtcacaggcccaggagagtgaaacaatggcgcttgcattgtatattttccatccctgcttacatcttgaaaggaagtcccaatgctgaaagtttgt

SEQ ID NO: 226944 - DNA, 201 bp, Homo sapiens
ctttttaaggaactgccagatgctttttgaagcaccattttataatcccacttgccaatatgagacttcaaatttctccacagcctagaaaacacttgttrttgtctatctttttgatcatagccattctagtgagtgtgaagtggtatcattgtagagctgatttgcatttccttcttgactaatgatgttcaacatttt

SEQ ID NO: 226945 - DNA, 201 bp, Homo sapiens; identical to SEQ ID NO: 148596

SEQ ID NO: 226946 - DNA, 201 bp, Homo sapiens
cccaagctcttgtccagcatcctagaagaattgggtcacacacaggcttgaaggatgcatgcaggggttttattcagtggtggaggtggctctcaatgggwtggatggggagctggctgggggatggaatgggaagatgatcttcccctggagttttggctgttcagcggccaaactcttctccgactgcccccagctgag

SEQ ID NO: 226947 - DNA, 201 bp, Homo sapiens
aacagtatggaatcgtgcaaaggagctcaacctgtgaaattttgagaggatcacagaatatctactcatcttctagtctcctgcagcatctagcaagaaactttttccttcccatttaagtagtacctcctagtccatcaagtcttcttgacttgagtcttctttgtaaactcatggggaggactccatcttgggcatgct

SEQ ID NO: 226948 - DNA, 201 bp, Homo sapiens
ctttgatgtgaagttgtaaaatgccactttccacttaaacttgtgagcttctcaggagcaggaacagtatctttctacatggcagataataggtgctcagyaaaatttttgtcttgatgaatttccagtgataatgaaggtatctatgtaagttttcctaataattagggggcactatctgggtgtatggctcattaattt

SEQ ID NO: 226949 - DNA, 201 bp, Homo sapiens
cctccctgctgttctaacatacaaacatgcacctgcctgggaggtttgtactttctgttccctctgcctagaatttcttcatccagagccatcatcatggytgtcccctgcacctcaaatcttccctgagacattaccttttcagtgagatctttcctgatctccttgctcaaaaatgcaacaatctccccaaacacactg

SEQ ID NO: 226950 - DNA, 201 bp, Homo sapiens
ttcaagaatgacctccttggctcaaagaggatcttgcagttattagcagcaaaaatgaattatcctaaagcaaactcttttttttttaagcaaagttttcwttttgtggggggaaaacctaatctcaagtcctagaacatggaaggttaatgaccaacttgctttaaagagagaaatatgacaagcaaaattgcgaaatct

SEQ ID NO: 226951 - DNA, 201 bp, Homo sapiens
gtatggtaaacatgagtaaggtttgttatgcagatttaagttggtgtcttctccattggtaagagtctctagtgatttggtcatccttctcttcctggtayagaaagggagacacccttatgagtagaaatttcctttatagatgtaaaatccttttacaaaaaggtaacttctcttctgttttcagatcttctcctgtag

SEQ ID NO: 226952 - DNA, 201 bp, Homo sapiens
atgtggtgcttctgtttggttattgggctgctttacaatgaaaatcatgctaaacttttcagccacttttttgagttctttcctctgaacctggagactasagaaaagtaagtgtagggaaggaaaaataattttctctttaccctttatggtccttaggttgggatagacccagaaacaagagaaaaacaaacagaagtt

SEQ ID NO: 226953 - DNA, 201 bp, Homo sapiens
ttaaattagataatatatgaaaagttattggcatactaagtgttccataattattaatttttatgattatggttttattgtaaatatgaactaagtctgargctggtggcagaggtacaacccgaactctggcaggtctttttattcagtgctctctcttctccattttgctatctaattggttagtttttattcatcctt

SEQ ID NO: 226954 - DNA, 201 bp, Homo sapiens
gaaggagaaggagaaagggcatttcaggcaaagtgaccacaggcaaaagtcacagagtcgaaactggacttgaagtgcctggggggaatgttacaaagtcmatatgcctgggcagatagtgacagatgtaaagtgtgtattatcagttgagtccgagtggagtctgtcttgggatgtcccagcagaattggcttcagctgt

SEQ ID NO: 226955 - DNA, 201 bp, Homo sapiens
gctgggtggtcttggacaaactcttcaactgcttttctcttatgtggtgtctccctcataggttgttaggatgattaaattagataatatatgaaaagttmttggcatactaagtgttccataattattaatttttatgattatggttttattgtaaatatgaactaagtctgaagctggtggcagaggtacaacccgaac

SEQ ID NO: 226956 - DNA, 201 bp, Homo sapiens
gtgtgaagcccatttactctttcactaaatttttctctgatagaggaaggttttgcaagctggactattggaagtgaaaagtagctttttaaggacattcrttgtaattagcatcataatttcacttactgaggcatcatttaagaattttgcactcattccctcatgtggtcctttctaagaccttgtgacactccccta

SEQ ID NO: 226957 - DNA, 201 bp, Homo sapiens
ttagagaagaagctgctcaactgggctacaaagtcacttcaaaaacctgagatttttttccattatacaatcatgtctcataaatcttagcgccctattgytgaaagaagccttttagatcatcctaggaggtttctgaactattctgcagagtgagtggttaagggttgggctctggggtccaaaaaaatcgtgtttgaa

SEQ ID NO: 226958 - DNA, 201 bp, Homo sapiens
acctctgaactagaccataagcttcctggaggtgcagattgtgttgatcttgtttgctctggtattacccaggacctagcacagtacctgctgcataatarcagttcaacatctattgacctgcatccctaggagactcactatgctgtcattcccttgatattaatgacaataaagtacaacaataattagatcaatgac

SEQ ID NO: 226959 - DNA, 201 bp, Homo sapiens
tgtgttgtctaatatggtagccactagcaacatatatggctactgagcattcagactaatcaggttagtctgatttgagatgggccttaaatgtaaagtamactctgaattttgaatgcttagcgtaaaatctcttattaacttttattaacatgttgaaataatatttttgatatattgggttaagtaaaagctattatt

SEQ ID NO: 226960 - DNA, 201 bp, Homo sapiens
ttggtgcttaaaaggtacctaataaatatggattacatgattggccaaataaataaattcaatacaagtttaatcagaagatgggccttaccttgtcattkagggatttatctagttaagaattccagatgaatctctatcagaacagccaacagagaaaatgtattcagatgcaggaaggctagaaggcagcctgtagca

SEQ ID NO: 226961 - DNA, 201 bp, Homo sapiens
gggatacccacctttccattctcagtgttttgaaatcttagattcatcattcaaatcctggcattgctgattatataaccttgaaaaatcacttacctctytgaaccttgggttccacatttgttaatggggataatattatcaagttacagggttgttgttgaaaacaactaacacaggacttgtgtcatgaacacacat

SEQ ID NO: 226962 - DNA, 201 bp, Homo sapiens
agatgtgctttccctgtgttggccaggctggtcttgaactcctgacctcaagtgatccgcccacctcggcctcccaaagtgctgggattacaggtgtgagmcaccgcacttggcctagatatgatttaaattatacgggaggatgtgtacaggttatatttgctattttatataaggaatgtgaacctggattctggtatc

SEQ ID NO: 226963 - DNA, 201 bp, Homo sapiens
gatatacccacatttactatggcttcaagttatggctttaggcaaatgactcccaagttgcatttcctgcactgatcactttctggttttctggttccacrtttccaattgtctcctagagatttttcctgctgtgtcttattcagcatgtttaaaatttcccccttcaaactagtactttctcctgactggcttccttat

SEQ ID NO: 226964 - DNA, 201 bp, Homo sapiens
tcttcctccattgccctccatcccacagtcctgtccatgaaggcatgagtcagatggtccctgagtgaggcaacatgcctttgatcccatctctgttgtcyactagttatatggctttgacaagatacattactctcagccttggttttaatgaaatagaggtagtgcctacgtcataaaatgacatagaaaaagttccca

SEQ ID NO: 226965 - DNA, 201 bp, Homo sapiens
agaattctatcattcatttactctctagtatgaatttaaaccagtttgttacagtattccatgtggtacatgagatgagatgaatgaatacatttttggtkagtcacatgaaatcttttcagtttccttctatttatggcaagtgatattggctatatacaatatgtataccagtgacattggatatttacagtggggata

SEQ ID NO: 226966 - DNA, 201 bp, Homo sapiens
catggtgcttggcactgaaaacattcagatcattcccctcactctcatcatgccaaatagtgccctgtgagcaaacacagatctcactggggatattttcrtagtttcttttctgattacagagatgatactcgctcattacagatacttttcgaaaatacataaaaatataatgcaggaaattacaatcatccatggtta

SEQ ID NO: 226967 - DNA, 201 bp, Homo sapiens
gtgtcaccagggccatgctccctctaaaatctgcaggggaatctttctttgccttttcctaacttctagtgatttgctggcaatccttggcttgcagctayataactccaatctctgcctttattctcacatggcgttccttctcccgtgtgtctctgtgtcttcacgtggtcatcctcttatatccaatcatattggatg

SEQ ID NO: 226968 - DNA, 201 bp, Homo sapiens
tgtcaccagggccatgctccctctaaaatctgcaggggaatctttctttgccttttcctaacttctagtgatttgctggcaatccttggcttgcagctacrtaactccaatctctgcctttattctcacatggcgttccttctcccgtgtgtctctgtgtcttcacgtggtcatcctcttatatccaatcatattggatga

SEQ ID NO: 226969 - DNA, 201 bp, Homo sapiens
cccaagagcaaggatcactgtccccatttacatagaggaacttgaggcacagaagaactcaccagcttgcccacagtctcacagttattcagtcttggctstcactctctgtgagacacagcctcccagatccaggacttgcagaaaccctgggcaggcctttctttgtagtttttgtcaggtaagacatgccaagtgggc

SEQ ID NO: 226970 - DNA, 201 bp, Homo sapiens
taatgggtgcagggtttcccttcgggataatgaaaatgttctgaaactaggtagcggtgatgtttgcacaacactgttgaatgcactaaatgccactgaaygatatactttaaaatggctaaatggtggattttatgttatgtgtgtatgtttcaccacagacatataaattgctttcttccgatccacccactagttatc

SEQ ID NO: 226971 - DNA, 201 bp, Homo sapiens
atgttctgaaactaggtagcggtgatgtttgcacaacactgttgaatgcactaaatgccactgaatgatatactttaaaatggctaaatggtggattttaygttatgtgtgtatgtttcaccacagacatataaattgctttcttccgatccacccactagttatctacctgctccatgaaaccaaacaagtttaattcct

SEQ ID NO: 226972 - DNA, 201 bp, Homo sapiens
ttttcaaattccagggaagaatgagttctttggcagaaatggtgtcaagagaacttcttctgtgattatgtgctaatgcagttctaattgtttctctgcasatggattgagtattgctgacagaggtttatgcaccttccctaaacgggttggtggttacctgctttttacaataaatgtaatgagcatctatttgcattg

SEQ ID NO: 226973 - DNA, 201 bp, Homo sapiens
ttgattttgttgttctcattgtttctccagtgataatttggtttgagtcactaagaggacacccccatgttccacagctgcattctaaccccatacactgkggagatacacatatatatatgtatacatatatatgtatatatatatataaaccctatacccatatatatatatgatttgctcaactgctttaactcactt

SEQ ID NO: 226974 - DNA, 201 bp, Homo sapiens
aataaagagagtaagagagggagaaaagaaagaaagataaaggaaggaagaaagaaaagaagggagaaaggcaagcaggaaggaaggaaaaaaggaaagcrggaaggaaggaagggaaaagaaaaaaagaaagaagcctgcataattcattccagctcccacgtttctctgcttcccatttacagcaaagaacatcagagg

SEQ ID NO: 226975 - DNA, 201 bp, Homo sapiens
tggtagtctgctgaagtgtgtcaatcctcaagtttacccacaatacctcatctggatgtttaaggtttgaactcacggaaggaatgttgtctctaggatakacaactggaaaatgtaattgataaccctgttcaactctagagtccttctttccacattactatgtgtttatgaattataaaaaattatttcctggaatct

SEQ ID NO: 226976 - DNA, 201 bp, Homo sapiens
actctgaataaactaggtattaatggaacgtatctcaaaataataagaactatttatgacaaacccgcagccaatatcatactgaatggataaaaactggmagcattccctttgaaaactggcacaagacaaggatgccctctctcaccactcctattcaatatagtgttggaagttctggccagggcaataaggcaagat

SEQ ID NO: 226977 - DNA, 201 bp, Homo sapiens
ttaatggaacgtatctcaaaataataagaactatttatgacaaacccgcagccaatatcatactgaatggataaaaactggaagcattccctttgaaaacyggcacaagacaaggatgccctctctcaccactcctattcaatatagtgttggaagttctggccagggcaataaggcaagataaagaaataaagggtattt

SEQ ID NO: 226978 - DNA, 201 bp, Homo sapiens
caattatctagaactagaattaccatttgacccagcaatcccattactgggtatatacccaaaggattataaatcatgctactataaagacatatgcacaygtatgtgtattgcagcactattcacaatagcaaagacttcgaaccaacccaaatgcccatcaatgatagactggataaggaaaatgtggcacatatacac

SEQ ID NO: 226979 - DNA, 201 bp, Homo sapiens
tagaattaccatttgacccagcaatcccattactgggtatatacccaaaggattataaatcatgctactataaagacatatgcacatgtatgtgtattgcrgcactattcacaatagcaaagacttcgaaccaacccaaatgcccatcaatgatagactggataaggaaaatgtggcacatatacaccatggaatactatg

SEQ ID NO: 226980 - DNA, 201 bp, Homo sapiens
cagtggactgcacccactgtcctgcacccactgtctgacatgccccagtgagatgaacccgatacctcagttggaaatgcagaaatcatccatcttctgcrtcgctcacgctgggaggtacagactggagctgttcctattcggccatcttggaatcgcccccgtctttttttttttttttttttttgagattgagtctca

SEQ ID NO: 226981 - DNA, 201 bp, Homo sapiens
tcagttggaaatgcagaaatcatccatcttctgcatcgctcacgctgggaggtacagactggagctgttcctattcggccatcttggaatcgcccccgtctttttttttttttttttttttgagattgagtctcactctgttgcctaggctgaagtgcattggtgcaatctcagttcacagcagcctccccctcccaggtt

SEQ ID NO: 226982 - DNA, 201 bp, Homo sapiens
cagttggaaatgcagaaatcatccatcttctgcatcgctcacgctgggaggtacagactggagctgttcctattcggccatcttggaatcgcccccgtctttttttttttttttttttttgagattgagtctcactctgttgcctaggctgaagtgcattggtgcaatctcagttcacagcagcctccccctcccaggttt

SEQ ID NO: 226983 - DNA, 201 bp, Homo sapiens
caaaatggctgccagagctttcaacaccacagtgtcctggattagcattcaacacaggataggagggaagggagcaaaaagggccatctcgtggtgggccyctctctctctttccatttcaggaaagaaaatctttccttaaagtctcttagcagatatctttcgatttctctttggctagaactgagtcacacatgcatc

SEQ ID NO: 226984 - DNA, 201 bp, Homo sapiens
caacaccacagtgtcctggattagcattcaacacaggataggagggaagggagcaaaaagggccatctcgtggtgggcctctctctctctttccatttcargaaagaaaatctttccttaaagtctcttagcagatatctttcgatttctctttggctagaactgagtcacacatgcatcccatcccagaccagtcaatgt

SEQ ID NO: 226985 - DNA, 201 bp, Homo sapiens
cattcaacacaggataggagggaagggagcaaaaagggccatctcgtggtgggcctctctctctctttccatttcaggaaagaaaatctttccttaaagtstcttagcagatatctttcgatttctctttggctagaactgagtcacacatgcatcccatcccagaccagtcaatgtcaatgaagtattcagttaccttca

SEQ ID NO: 226986 - DNA, 201 bp, Homo sapiens
gtgtcattgcagtctgacaggcagctgtgtgttttaaatacgagccttgctcagggccatgaggtgaaaaggcccagctgtaatcctaggcaggcccacargcatggctgcatggttagttagtggctgtagcaggtttttgtttctggtgtctgctcagcccatggcccctttctctaagaactgtcactttatcttcaa

SEQ ID NO: 226987 - DNA, 201 bp, Homo sapiens
ttatttcattactattgataagtggaagaaatcagtgaaatcttttaaaatcacttaaagaaggtatttataagagttttaactgatgcctcctggtttakttttcataaactagaccaaaatttttatgaatgtcgtaccctcagtgtttggcaggaaataaagttgtgtcattgttttgtactcaaagtaatagcctgc

SEQ ID NO: 226988 - DNA, 201 bp, Homo sapiens
ggaggggagctgaaattcaaaacttggaagcacaggtcggtccagagtgagtttcccattttacaacttttagagtgagaacaggctaaaattaatgtcayttcgggtggccatcctccaatagaaaactcacagtgtttttggtttgaagacccaaagaacagggttcagggcaatcatagccacaggaaaatgaattca

SEQ ID NO: 226989 - DNA, 201 bp, Homo sapiens
atttattaatatgagacaaactaaactttcagacaaaaagagttaccagagatgaaggagaacatttcatgatagtaaatcattatattaagaagaagtargaattgtagatgaatatgcacttgataaaattccaagtgagatcacgtcatgtaattctgaggtatatgtcatgtgtatattcttgatggagcagacaca

SEQ ID NO: 226990 - DNA, 201 bp, Homo sapiens
aggcagtggcaaatggatttatacagttgcaaggttttccaattttatatgagatagtataaaattaaatctaagtagactgtgaaagatcaagaatataygttttaattcctagaaaaaccaccgaaaatccaaagataaaatagaatcctaaattaagaaaaaaatgatccaaaagttgcagagggaagaaaaagaaaa

SEQ ID NO: 226991 - DNA, 201 bp, Homo sapiens
gggaagggagcaaaaagggccatctcgtggtgggcctctctctctctttccatttcaggaaagaaaatctttccttaaagtctcttagcagatatctttckatttctctttggctagaactgagtcacacatgcatcccatcccagaccagtcaatgtcaatgaagtattcagttaccttcactggctgagaccagtacgt

SEQ ID NO: 226992 - DNA, 201 bp, Homo sapiens
agttgcaaggttttccaattttatatgagatagtataaaattaaatctaagtagactgtgaaagatcaagaatatacgttttaattcctagaaaaaccacygaaaatccaaagataaaatagaatcctaaattaagaaaaaaatgatccaaaagttgcagagggaagaaaaagaaaaacaagaagtggaggagcaaacaga

SEQ ID NO: 226993 - DNA, 201 bp, Homo sapiens
agcatcatgtccttgctactagatttaggaaaactcaacacagaccttgtctaaagcctagccctagtggaaaagagacgcatcacagatgcctttttttyctgaaaaacaaacaaacaaacaaacaaaagatactaacaacaactgtggttagtgcaacaaaggaaaggaatgcagaggtatgcaaatgcacgtgtaatg

SEQ ID NO: 226994 - DNA, 201 bp, Homo sapiens
ttaggcacagaggtagaaatgtctagatctggcttgggaactgtgcagggaagggaatggctaaattgcagggtttatacagaacctctctagtagaatarttatattgatgaaatacagaaatatctgaaaaccatgagtcacaaatcaaaaacattggttggtcaaaaacgaaagcttgttatgtttaaaatgttactg

SEQ ID NO: 226995 - DNA, 201 bp, Homo sapiens
cctctgcttattgatttgggacctgtgccagtttctaattgtttcctttagattgggttcgctccagattgctgattcttgtctagtaatttctctcttcyatattgtgcctttccttgccctcctttactaatttcctgagtagccagagaagctatgggtttgacccatcaactcataccaaggccatatgagctatgg

SEQ ID NO: 226996 - DNA, 201 bp, Homo sapiens
taatgattgtcattctaactgatgtgagatggtatctcattgtggttttgatttgcatttctctgatggccagtgatgatgagcattttttcatgtgtctkttggctgcataaatgtcttcttttgagaactgtctgttcatatccttcacccactttttgatggggttgtttgatttttttcttgtaaatttgtttaagt

SEQ ID NO: 226997 - DNA, 201 bp, Homo sapiens
tcctcttttatttcgttgagcagtggtttgtagttctccttgaagaggttcttcacatcttttgtaagttgcattcctaggcattttattctctttgaagyaattgagaatgggagttcactcatgatttggctctctgtttgtctgttattgctgtataggaatgcttgtgatttttgcacattgattttgtatcctgag

SEQ ID NO: 226998 - DNA, 201 bp, Homo sapiens
gtctgattgccctggccagaacttccaacaggattggtgaaagagggcatccctgtcttgtgccaggtttcaaagggaatgcttctagcttttgcccattyggtatgatattggctgtgggtttgtcataaatagctcttattattttgagatacatcccatcaatacctagtttattgagagtttttagcatgaaggcct

SEQ ID NO: 226999 - DNA, 201 bp, Homo sapiens
tctgattgccctggccagaacttccaacaggattggtgaaagagggcatccctgtcttgtgccaggtttcaaagggaatgcttctagcttttgcccattcrgtatgatattggctgtgggtttgtcataaatagctcttattattttgagatacatcccatcaatacctagtttattgagagtttttagcatgaaggcctg

SEQ ID NO: 227000 - DNA, 201 bp, Homo sapiens
gggattactctgaaacttagacaagacaggacagcgttcagttcttcctcatacaggggcattccaagtgtggaaattttaatcctttgagttaaaatttwaaaaaaatgtgtctggattcaggaataatctaaagcatagtattcttctaaactccatttccatgagatgctctaagaaggtttttgtaataaatccatt

SEQ ID NO: 227001 - DNA, 201 bp, Homo sapiens
ttgcccattcggtatgatattggctgtgggtttgtcataaatagctcttattattttgagatacatcccatcaatacctagtttattgagagtttttagcwtgaaggcctgtcaaattttttcgaaggctttttctgcgtctagtcagataatcatgtggtttttgtctttggttctgtttatatgatggattacgttttt

SEQ ID NO: 227002 - DNA, 201 bp, Homo sapiens
cattttgatgttagctggttatttggcttcttagttgatgcagtttcttcctagtattgatggtctttatagtgtggcatgtttttgcagtggctggtacyggttgttcctttccatgtttagtgcttccttcaggagctcttgtaaggcaggcctggtggtggctaaatctctcagtattggcttgtctgtaaaggattt

SEQ ID NO: 227003 - DNA, 201 bp, Homo sapiens
caggatattctaatctcatcttgttcctgtcctgtcccattaatggagccaaccacttctccaaggaggtctggttccttttttatttttattttttggaraatggtatttagaaaccaagatctggacatcaggtatgctaatttatagtggggtatcattgcttcagcctctctgtgagtagaggtaggcaatacatgc

SEQ ID NO: 227004 - DNA, 201 bp, Homo sapiens
tcaatcatctttctttctttcctttttctcttcaaaattaattttaaaataattattgtagtaggaatcctcaacagctgagctgtaccatctcagagtaycattattatcactctgttaggtgacatgataataatcatttctaatctggtgtctcactacataaacatgcattgctaatcacaatatgcctctgatctc

SEQ ID NO: 227005 - DNA, 201 bp, Homo sapiens
taccatctcagagtatcattattatcactctgttaggtgacatgataataatcatttctaatctggtgtctcactacataaacatgcattgctaatcacartatgcctctgatctcatttgtttaaaaaaagcagcagcagcagaagcagaagtagagaataagagaagaatccttctgaaagctcttagtttggccatat

SEQ ID NO: 227006 - DNA, 201 bp, Homo sapiens
attttgatgttagctggttatttggcttcttagttgatgcagtttcttcctagtattgatggtctttatagtgtggcatgtttttgcagtggctggtactrgttgttcctttccatgtttagtgcttccttcaggagctcttgtaaggcaggcctggtggtggctaaatctctcagtattggcttgtctgtaaaggatttt

SEQ ID NO: 227007 - DNA, 201 bp, Homo sapiens
tctcatttgtttaaaaaaagcagcagcagcagaagcagaagtagagaataagagaagaatccttctgaaagctcttagtttggccatattaccccacagtrtggcttgtataaaacactttcactttcttgcacgaggaacataatgggaatccaggaagacaatatgaataattttataagttggctatttaaagagaaa

SEQ ID NO: 227008 - DNA, 201 bp, Homo sapiens
tcttcctagtattgatggtctttatagtgtggcatgtttttgcagtggctggtactggttgttcctttccatgtttagtgcttccttcaggagctcttgtmaggcaggcctggtggtggctaaatctctcagtattggcttgtctgtaaaggattttatttctccttcacttgtgaagattagtttggctagttatgaaat

SEQ ID NO: 227009 - DNA, 201 bp, Homo sapiens
gcttgtataaaacactttcactttcttgcacgaggaacataatgggaatccaggaagacaatatgaataattttataagttggctatttaaagagaaatasgcttttctgagtttctggcatatccaacttaatattacagtactggacctcattctgaatacttagaatatttacgacacttgatgtttggactttataa

SEQ ID NO: 227010 - DNA, 201 bp, Homo sapiens
gtttctgtgatgattaaaatgtatatggcagacattagccacatgtgctaattgagaacttaaatgtggttagtgcaaataaatccttgaattttaatttyatttaattttaactaactgaaatgttaatagtcacatttggctagtggctacataccataaatgacactgcagatctcgcaaacgtattgaatgaacgaa

SEQ ID NO: 227011 - DNA, 201 bp, Homo sapiens
tcttaagatcaaaaagggacatcattataaggattcagaggtatggcataaatcacaggggagggcataaactcagcttcatgagaatgccaggcctcagraccaggacccaagaaaactattctctttagtatctctgtgtcttctataattgatggccatgtattatagagaataggagttctacaaggctgtccatgg

SEQ ID NO: 227012 - DNA, 201 bp, Homo sapiens
ttcagattttgcacataagaatatgttggtcatttttctgtttaaggtaggcaagctatatagggatgaaaacacaatgtctaactggaaatggagagtggagagaaggtgaaaaagggatattttttgctgacagttcatagatatagacaaggtaatgtctaaaacgtatctttacagcttttataaacactgtcttga

SEQ ID NO: 227013 - DNA, 201 bp, Homo sapiens
tcagattttgcacataagaatatgttggtcatttttctgtttaaggtaggcaagctatatagggatgaaaacacaatgtctaactggaaatggagagtggagagaaggtgaaaaagggatattttttgctgacagttcatagatatagacaaggtaatgtctaaaacgtatctttacagcttttataaacactgtcttgaa

SEQ ID NO: 227014 - DNA, 201 bp, Homo sapiens
attttgcacataagaatatgttggtcatttttctgtttaaggtaggcaagctatatagggatgaaaacacaatgtctaactggaaatggagagtggagagaaggtgaaaaagggatattttttgctgacagttcatagatatagacaaggtaatgtctaaaacgtatctttacagcttttataaacactgtcttgaaaaca

SEQ ID NO: 227015 - DNA, 201 bp, Homo sapiens
tctctatctccttcaaatttgccctgatcttagttatttcttgtcttctgctagcttttgaatttgtttgctcttgcttttctagttctcttaattgtgakgttagggtgtcgattttagatctttcctgctttctcttgtgagcatttagtgctatacatttccctctaaatactgctttagctgtgtcccagagattct

SEQ ID NO: 227016 - DNA, 201 bp, Homo sapiens
tatgtatatggatgtatgtatagatatacacatatatacatgcatatatatacatatatatacatatataaggatgtgtatacatatatatatatatatatttttttttttttttttttttttttttttgaggcagagtctcgctctgtcacccaggctggagtgcagtggtgcgatcttggctcactgcaagctccgcct

SEQ ID NO: 227017 - DNA, 201 bp, Homo sapiens
atgtatatggatgtatgtatagatatacacatatatacatgcatatatatacatatatatacatatataaggatgtgtatacatatatatatatatatatwtttttttttttttttttttttttttttgaggcagagtctcgctctgtcacccaggctggagtgcagtggtgcgatcttggctcactgcaagctccgcctc

SEQ ID NO: 227018 - DNA, 201 bp, Homo sapiens
tgtatatggatgtatgtatagatatacacatatatacatgcatatatatacatatatatacatatataaggatgtgtatacatatatatatatatatattwttttttttttttttttttttttttttgaggcagagtctcgctctgtcacccaggctggagtgcagtggtgcgatcttggctcactgcaagctccgcctcc

SEQ ID NO: 227019 - DNA, 201 bp, Homo sapiens
gggcttctcagcaggaatacagttttcaggctcatttaactcctgtggacacatgtaaggagctgggcgggcaattcgaattcattttcgaggtgacagcrccaaactttggctgtgttagctcacagaaacattaatgggataatgtgctccatcatggagaatgagaatcaaaaaagactttaatggggcttcattatc

SEQ ID NO: 227020 - DNA, 201 bp, Homo sapiens
aaagatgcctggcatgcatggctgttattcctggcactctctctgattagggtcctgtatatatctctcaaaacacacacacatattcacacaccccacasatctataataaactaggggttttccttattatcggatagttaataaaccgcagcataattaaataagagcctacatttattattgtcattcagtaagcag

SEQ ID NO: 227021 - DNA, 201 bp, Homo sapiens
ttattcctggcactctctctgattagggtcctgtatatatctctcaaaacacacacacatattcacacaccccacagatctataataaactaggggttttycttattatcggatagttaataaaccgcagcataattaaataagagcctacatttattattgtcattcagtaagcagcatatagttttggatttcctggtt

SEQ ID NO: 227022 - DNA, 201 bp, Homo sapiens
gtatatggatgtatgtatagatatacacatatatacatgcatatatatacatatatatacatatataaggatgtgtatacatatatatatatatatatttwtttttttttttttttttttttttttgaggcagagtctcgctctgtcacccaggctggagtgcagtggtgcgatcttggctcactgcaagctccgcctcct

SEQ ID NO: 227023 - DNA, 201 bp, Homo sapiens
tatatggatgtatgtatagatatacacatatatacatgcatatatatacatatatatacatatataaggatgtgtatacatatatatatatatatattttwttttttttttttttttttttttttgaggcagagtctcgctctgtcacccaggctggagtgcagtggtgcgatcttggctcactgcaagctccgcctcctg

SEQ ID NO: 227024 - DNA, 201 bp, Homo sapiens
tatggatgtatgtatagatatacacatatatacatgcatatatatacatatatatacatatataaggatgtgtatacatatatatatatatatattttttwttttttttttttttttttttttgaggcagagtctcgctctgtcacccaggctggagtgcagtggtgcgatcttggctcactgcaagctccgcctcctggg

SEQ ID NO: 227025 - DNA, 201 bp, Homo sapiens
tggatttcctggttggagtccatccatagttaataattgggtaggatatgctggtatctcaatcaggatatgaatgattagccaatagttccttgaacagwaccttattactaatgaggagcagtagattgagttgagttttaagcaacttcaggatcactctgttttccttggtgggagaggagggagtgtgatacagag

SEQ ID NO: 227026 - DNA, 201 bp, Homo sapiens
tggatgtatgtatagatatacacatatatacatgcatatatatacatatatatacatatataaggatgtgtatacatatatatatatatatattttttttwttttttttttttttttttttgaggcagagtctcgctctgtcacccaggctggagtgcagtggtgcgatcttggctcactgcaagctccgcctcctgggtt

SEQ ID NO: 227027 - DNA, 201 bp, Homo sapiens
caaatgatgtgactttgtagatcttaggaacttcttttcacacaattacataacaggcatgtgattcccctccatccccaacttgtgcttataaaacactrtggacagtaccttttaaaatggctgagatattgattacctgcaaaaactggaaaaccatttgtatgcctgtctgttctgtaatgtttgcttctacagggt

SEQ ID NO: 227028 - DNA, 201 bp, Homo sapiens
aggggccctactcaggggcctgcaccctgcctatggatgggtgtatgaccacaagcttggctaagtaaatgctccttctttggaatttgattctttagctraaggattctcccttgtcctaggtgggcattctgatctgccaacatgtactatgagaccactgttgcctccatgtctgtcttggctagtagtcatggcctc

SEQ ID NO: 227029 - DNA, 201 bp, Homo sapiens
accaccgcttggtgtctaacattaacattctactgtgtttattatattacatttgtacctatctgttaccccttctttctatttgtcaattcatcagctgyagtgattttgaaactctactctgtaaagttccaggaattgtgtgtgtgtgtgtatgtgtgtattttggaagtggggtagtgttttgagaacactagtagt

SEQ ID NO: 227030 - DNA, 201 bp, Homo sapiens
gagggctcttgggagaaaccaggaagggagtgagggaattagtataaggaagtggaagaagctaccaaggttgtggtttcaggtgaaattaacctgatcamatggggagtcttgggagcatgaaacatactacagggtcagttctgccttgagacaggagtgtagacttttgtaccttcccttcccaccattcagtcttta

SEQ ID NO: 227031 - DNA, 201 bp, Homo sapiens
tgtaaaggtttttctataaagagaaaatgtgttatgtatattttatttaaaagtgtgatgcagttctccaaatgcagttaattgtaaaaaaaaaaaaaaadgttttccaaatcagtgggggacttttttggtgccttcttttgatttttcatacttttttttcagaaaggaaattttatacataaaagttggtaatgtctc

SEQ ID NO: 227032 - DNA, 201 bp, Homo sapiens
tataggaatttgttttttgagaaagttctcaagttgatcttaatagacctagttttaaaactagtgctctgagatgtgcttttcaaacgttaatgtacaawcagcctagctggggatcttgttaaaatacaggtttatgcattacatctaggctggggcctgggaatctacatttcttacaactctcaagtgatgctgttg

SEQ ID NO: 227033 - DNA, 201 bp, Homo sapiens
ttggaatatggcaagtatataatacatatttattaaatgaataggtgattagagtttgatgaggaaaggttattaagtatatgtaatccctgaacatcttkttaggagacagggaagaaactggtgagaatgaggttaaatatgtaaaacaagtaggtttacaaaaaaaaaaaaatgacagaacagagaagaggtaactga

SEQ ID NO: 227034 - DNA, 201 bp, Homo sapiens
ttattggtgtctgatattatatgattggtaaacaaccattatgcactttgtttccatccctccaggaaagctagattatccccagatagtagattgctgtrtggaaatgccaatatttgctccctgttaatccaaggtaacaattcaagaacggtcatttgatataagaaatttttactgtaatcccagcactttgggagg

SEQ ID NO: 227035 - DNA, 201 bp, Homo sapiens
ctgctgtgtatatggggatggtaaatgaaaatattatcttattcttttcacaggaagggacttttctctttagtccctggctctgtgtcccttcctactcmcttcctccccacctctccttgacacacacacacacactctctctctctctgtgtgtgtgtgtgtgtgtgtgtgtgtgtgtgtgtgtgtgtgtctccttac

SEQ ID NO: 227036 - DNA, 201 bp, Homo sapiens
gctgggaggttaaacaggagcccagagatacatacgctttccatcttctcagtgggttagtgggaaaagtgaaatggatattagcaagcgcttggttagtragagacctcttgtggggcagtttttgaggatcagaacattatactgtgcattgtcctctaaagtgagagagagcacaccagcaatttgagtggaaacatc

SEQ ID NO: 227037 - DNA, 201 bp, Homo sapiens
gggggatactgaggcaatttccttccttccttccttccttttttccttccttcctttcttttccttttgtatatgtgtttggggtaactgtggcagtggaragtatatttatatacatataactaatatcttacattaagataattttaaataattaaaattatattttatgactaacaatgcattattggagtcaatatt

SEQ ID NO: 227038 - DNA, 201 bp, Homo sapiens
agacatccatttatactgttggtcaagtaaacagtaaaatagcacccttggatttagggagtggtctgatcttaaattttaatatgcagaaccaccccccraaacgtatataaaatgcaaatcttagagtcccagccacagacattcaggctcaccagacctgggtcagagcccaggaatctgcattttaaataaccccct

SEQ ID NO: 227039 - DNA, 201 bp, Homo sapiens
cccatgtctagaggtacatggttgccaatgaatgcaaaactcagaaaggagactagaactctagccctctctttcactcctcctctttcctggcaaggtcrcaagaacagtcatctatttcatccaagtgtttgcatctaacacaatcactgcattcagttttgagatttgtcatcaaacaaactgcacccttggtaagta

SEQ ID NO: 227040 - DNA, 201 bp, Homo sapiens
tctatcattagcacatctttactgtacctttttaatagtgtaatatcatttgacattctgggcattatttttttcagatctgatgaacaataagaatgcayccccttccctgcattcattttctgctttttacttagaattttctgggctttggcaagcactgaagtttatggttgcgcaggaggttagtgtgagttggag

SEQ ID NO: 227041 - DNA, 201 bp, Homo sapiens
gtccatgggctacacttgaaataaaaagatttcagatttttgtggcttctactaagttgccattctgttttaatgtaatgagtagtattgtttagaatttrtatatatatatatatatatatatatatatatatatatatatggccagttgtttttctttgcagttttatttctctttgtaaaatggacataatagtaccc

SEQ ID NO: 227042 - DNA, 201 bp, Homo sapiens
gaaaataaccaccaattaccccaacttcagtagggaagataatatacttttaattagtggcagactagatagaaatataaatccttatcatcctaaaaaakaattctaccatttgccaacccttgcaagtaataaacatgaaagtgccctcttcgaaagaggcccaccgaggaagtgactgtttagttccctgagaccatc

SEQ ID NO: 227043 - DNA, 201 bp, Homo sapiens
gggggtgggggtgttggagaggaatgtgtagttttctcaaattctccagctaaattattagcacatttgaagtctgaacattgctttatgggaatgaaaarcctggtgattgtaataaactgttgaatgtgatatagaaagaaaatatgcagtagttgtggcagatgttgtatattctttatctcatactttccttcattc

SEQ ID NO: 227044 - DNA, 201 bp, Homo sapiens
taatctgctcatcggcaattcaaagcttctatttctgtggtgtctgaaaatttatattattctagaagatttataaaaaccctggtggttttcagctgggmgaagggctttagtggtgtggttatcaatgattatttgcccttccttggatactatagtgactgccatatggaagagggactaaaatttattctttctaat

SEQ ID NO: 227045 - DNA, 201 bp, Homo sapiens
agaccaatggtggctctagttcatgggagtctgggctttacccaggacttttgattctcattccattgttcatttcaccttctccagttacatttcacatrtgctgcaaacttctatgtacggtggggtgggtgtcctgagaagttcttctccctagagtttaaacctttcccattagccccactttctagtgttgtattt

SEQ ID NO: 227046 - DNA, 201 bp, Homo sapiens
gtacgatacatattttctctgttaatccttgtgaaaaccctttaagatagttaatattatcattttaatttcactgatggataaccttatgcaaagtctcmctgaaagtaatgggcagacatgagactcacacctaggcattctgatgatagagtttagattcttgaccactctgctgtacatgtgttttacgtttttaat

SEQ ID NO: 227047 - DNA, 201 bp, Homo sapiens
gaaaaagtaatgttgttttcaattgtgtagaaacacattttagaaagtaaaaagccccatttaaaagcatgtgtgaggagcctgtgtttctgctcctgacmtagaacagcattgtctctgcggcctgcacatcacctcgggtgcccccaaactgctttcagacagtaacgccctctaatgggttgttgtattttggattta

SEQ ID NO: 227048 - DNA, 201 bp, Homo sapiens
gtgtagaaacacattttagaaagtaaaaagccccatttaaaagcatgtgtgaggagcctgtgtttctgctcctgacctagaacagcattgtctctgcggcstgcacatcacctcgggtgcccccaaactgctttcagacagtaacgccctctaatgggttgttgtattttggatttaccaaaaacaagctatacttactgt

SEQ ID NO: 227049 - DNA, 201 bp, Homo sapiens
aagccccatttaaaagcatgtgtgaggagcctgtgtttctgctcctgacctagaacagcattgtctctgcggcctgcacatcacctcgggtgcccccaaastgctttcagacagtaacgccctctaatgggttgttgtattttggatttaccaaaaacaagctatacttactgtgtgcttcaggggccagctcttgggttg

SEQ ID NO: 227050 - DNA, 201 bp, Homo sapiens
gaggagcctgtgtttctgctcctgacctagaacagcattgtctctgcggcctgcacatcacctcgggtgcccccaaactgctttcagacagtaacgccctmtaatgggttgttgtattttggatttaccaaaaacaagctatacttactgtgtgcttcaggggccagctcttgggttggagctttgcagcaccatcttgtt

SEQ ID NO: 227051 - DNA, 201 bp, Homo sapiens
catttaatcagtaagaaacttgtgacacttattttagctgtggttatttaagcagtttctattttcttttaagtgatgatggtaaagacagtgacaatggkgatgttggtaatgagagattatggggccgatgtctgattccccatgacagaagactgttggttgtcaaagacatgtttttaatatctaagcatataaaga

SEQ ID NO: 227052 - DNA, 201 bp, Homo sapiens
atgaagtcagaaagctcttgtgttaaaatggaccttgggcaggttactgatcccttcaatgctgctcctccctgtccattgtgaaatctgtgaaatggggwtgatgataacagaatggaatctatagggttgttttgaggattaaatgaacttgctttctctcagtttgcccactattctgaagagatccaagattcctgg

SEQ ID NO: 227053 - DNA, 201 bp, Homo sapiens
tggacttattttactaatggaataagattttttaggcatgcacacagaagttgcaaaataaatatttgttgattggctttccagtgcttaagtaattcccygctgcaaggcagccacctctaaaactcattaatggttttggatattatttataacattaaaacagttttctgaaagtgcatatatattatgccctgtttc

SEQ ID NO: 227054 - DNA, 201 bp, Homo sapiens
ctcttctttccattcctctaagatcttgagatcattcttgccttggcaattgctgtttcctccatctggaacattttatccccatatagtcacatacagtrgacttcttatcattcaactcgcagatcaaacgtgagattcccctttcctttgacacttaggcagccacttctgcctcctccaagtcccttcctgttcttg

SEQ ID NO: 227055 - DNA, 201 bp, Homo sapiens
gccccggtgtgtgatgttcccctccctgtgtccatgcgttctcattgttcaactcccacttatgagtgagaacgtgtggtgtttgcttttctgttcctgtrttagtttgctgagaatggtgagcctgagtaatactatgcagagtccggttacctgcatttcgaccttattccgagggcatttgggaaattgtttaatggc

SEQ ID NO: 227056 - DNA, 201 bp, Homo sapiens
tttttcctcataagtaaactcaggcttagagaacttaaataacttgctcagtgtttcacagctatttacagtggagtctggtgattccatctttgttgagrcccatctttgttctatgccaatgagtctctaacaagcatcagtttcacctgaagcgattgttgatacctagatggctggtccctcttccagagtttctga

SEQ ID NO: 227057 - DNA, 201 bp, Homo sapiens
tctgcaggtggtgggtcagtgttctatttttctatatagtctggacactgtccattgaatgttcagcttcccatgggctagagttacaatggttgtgttcrctgtatgtgtgtactatatttcttaggacatgctttgacttgcggcctggccagatttgagttacaacagagctccgtgcgattccagctggcagtttgc

SEQ ID NO: 227058 - DNA, 201 bp, Homo sapiens
ctcacatggagtcagtccagcatcctcaatctatgctcaccattgctttgtgacttttcatatagttttaggcatctctatggattcctaaagtgtgtatwtttgtattgtctttagggaatttttttaaactaatatattgttaagatttctccctatgagctgtgtgtcactatcaaacatttgttttgcttgagccat

SEQ ID NO: 227059 - DNA, 201 bp, Homo sapiens
aaagttgaaacaaaaaaaaaaattcttaccacatttctgtgggatagtttttgttgttattatccccatttttcctcataagtaaactcaggcttagagarcttaaataacttgctcagtgtttcacagctatttacagtggagtctggtgattccatctttgttgaggcccatctttgttctatgccaatgagtctctaa

SEQ ID NO: 227060 - DNA, 201 bp, Homo sapiens
gcatgtgtgctaagtgcttgtgtaacctcttaaattctgtacctatctaagttagtatattttagtataaatgactgacaaaaaacggtggcatcagctasaagacagtaatggtgcacaaatttggattcctcctgcccaattcctaagagccctatgcacgctttgctgatgtatgaggcaaaaggacaacagtttctt

SEQ ID NO: 227061 - DNA, 201 bp, Homo sapiens
gggaaaatgaacatgatatcatccgtcactgcttaaaccgtcctaggactttgggagactttagagcaacggagatctttctcttctttcaattgtatttygcccatttaatacttccatggcaattattgtatgccaggccttatttgcaagcacttggcaagtattcactcacttaatttttacaatcatcatgtgagt

SEQ ID NO: 227062 - DNA, 201 bp, Homo sapiens
tggtcatgacttgtgtgaggccttgtgacaccccttgtattgttattgctgtgcacataaattctctgcatattacatatcaattccccagccaggtggtragctgctcagagacaaggacatatttccataacacttttccttcttcatggcatcttatatggggtggctatcaataaatatatattgatttgatttaag

SEQ ID NO: 227063 - DNA, 201 bp, Homo sapiens
attttagctgtggttatttaagcagtttctattttcttttaagtgatgatggtaaagacagtgacaatggtgatgttggtaatgagagattatggggccgmtgtctgattccccatgacagaagactgttggttgtcaaagacatgtttttaatatctaagcatataaagaaaatgagagtgaattttaggattcttcagg

SEQ ID NO: 227064 - DNA, 201 bp, Homo sapiens
tttttttctaaaccaaccattcgttcagcttttatttgttggtgtgaaatatgctattattttgaaaaaacacttttaacatcccaatgaagtaggtacasatattaactccaatttaggaagaggacagtaggctaggagatttgaagaagaaagagtagacaggagttttttgtttgaaaccctggatttgtgaatgta

SEQ ID NO: 227065 - DNA, 201 bp, Homo sapiens
caaccattcgttcagcttttatttgttggtgtgaaatatgctattattttgaaaaaacacttttaacatcccaatgaagtaggtacagatattaactccamtttaggaagaggacagtaggctaggagatttgaagaagaaagagtagacaggagttttttgtttgaaaccctggatttgtgaatgtatttctttgactgt

SEQ ID NO: 227066 - DNA, 201 bp, Homo sapiens
gagacattaacgttcctctgaagtatctgctgacatagaaagcctctttctccactcaggagaatatgccaacattttcccttctcaaattgaaacaggakatttccaattgtaacatctcaaatttatctcaaactgtagtaatagtttagctaatgtaagacagactgtaatttataagcatgtatatatttatatgtg

SEQ ID NO: 227067 - DNA, 201 bp, Homo sapiens
tgtcaagagaaactaatgttattttcacattggcagaatttcatgttcatagttaggattataattaattttaggacacattgtaaattatgaaaacagtrgtttagttcatttgggatgctctaaggtaataccacaaactgggtggcttataaacgaccaacatttttttctcacattcttgaggctgggaagttcaag

SEQ ID NO: 227068 - DNA, 201 bp, Homo sapiens
tttgcttgaacaagttccttgccttttttctcaggtattcagtgaaattattttgagtttctccatcatggtaatttagttttcagctttgactttttctwtttctgtttctaatgaatttattaagtttttattggtatgtaatatattcagagtacttccttaactctggaatttccttttcaaaaccttgtttgtgtt

SEQ ID NO: 227069 - DNA, 201 bp, Homo sapiens
cccatttccacgacaaccagaagctgaccaaggcctttatatcttcttggtcggagtcctgctctaccctggattcccctcacttttgtggtcaaaagtayttaattaattgcgtggttctgccagttttttctctttatgttttctctctacacaaggccagactcacctgtgcactttctctcactgtactaaatgtaa

SEQ ID NO: 227070 - DNA, 201 bp, Homo sapiens
tcttgctttatagaatggatgggatatagttactggatatagatcagatttttatgttgtggttttgtcacttaccagctgagagatcttggacaaataakctcacctcactgaaattgggtttcctttgttgtaaaatgtggatgatccctaaatacagagttgttttatggactaaataaattatgccaaaaccctgtg

SEQ ID NO: 227071 - DNA, 201 bp, Homo sapiens
gacctttgaggcacattccaggaacaaagacatcatgaagaagggtgcccagatggaaaggctatttgagagttagggtggtacttgcctaagcctagtgrataaaacaatgaagaatgcttttccataagaagcaaaaggctaagggctgggcgcggtggctcatgcctgtaattccagcactgtgggaggccgaggtgg

SEQ ID NO: 227072 - DNA, 201 bp, Homo sapiens
tttaactcaggcgtttgtcttcagtttctacccttcactgctaaacattctgtctctgagcttgatgttggatagatatgtccagtgtaatatcagtggamaagactttaagttagggattctcttattgattcatatacttggttgtccagcacctgtgaatattttcagacatctaaggatttttcagagtctcaagat

SEQ ID NO: 227073 - DNA, 201 bp, Homo sapiens
ggtatcttctttacttataatttagatcattcttacaataattgcatgctcacatcttctactattaacagaaatgccttccttgccgtaatcctcagaaygctctatgtttgaaggcagatgccaccttttgatctcttttatcttctctattaaatatgctctgataacatcaggttctttggatggtagatactgtgt

SEQ ID NO: 227074 - DNA, 201 bp, Homo sapiens
gattataattaattttaggacacattgtaaattatgaaaacagtggtttagttcatttgggatgctctaaggtaataccacaaactgggtggcttataaaygaccaacatttttttctcacattcttgaggctgggaagttcaagatcaagacactggcagctttgttgtctggtgaatgcccactttctggttcatagat

SEQ ID NO: 227075 - DNA, 201 bp, Homo sapiens
ttggaaaggtgtaaacccctctaaggatggaaagtatgactgttttatggattctgtttgagggaacttcagttgattgatggctgagaaggatgaatatytgataggcagggaatgctctttatggcacagaatgtctttccaagaagaaactttactagagtcacagcaaacctctcagccacagtgcccaaaatgtca

SEQ ID NO: 227076 - DNA, 201 bp, Homo sapiens
taaggaacttaacaaatttacaaggaaaaaatgaaccccataaaaaagtgggcaaaggacttgatagacacttttcaaaagaagacatacatgcggccaamaatcgtgtgcaaaaaagctcaacatcactgatcattagagaaatgcaaatcaacaccgcaatgagataccatctcacaccagtcagaatggctactatta

SEQ ID NO: 227077 - DNA, 201 bp, Homo sapiens
gctggaccccttggctagagccttatggtgttgtctcatttaatcctcacactaatatcagagtagctgtgatgactcctattttacagatgaggaaattkaggcttaagagtacatggcctgatgtcattcagggagtatgtaaaagctgggactggagccagggtcggcctgctgctaagcccttcttctcatcattgc

SEQ ID NO: 227078 - DNA, 201 bp, Homo sapiens
ggaaagcatgttttcgggtaataactagtggatcaagttaactggaaagcataactttacctaggaagagtcagaattatctttctctctctctctctctstttctctctttctctttttctttctctctttctctctcttttctttttttttcttttctttcattttccagattcccatagtctgggcaataaaaaagag

SEQ ID NO: 227079 - DNA, 201 bp, Homo sapiens
ttttgatacactattattaaccaagtctgtaggttatgttatggttcagtctgcattgtacatcctatgggttttgacagctgttgaatgacatgcaaccmccgttatatcattcagaatagttttactgccctaaaaaatctcctatgttctatctagccatccctctttccctccccctcctctgagcccttgcaaacc

SEQ ID NO: 227080 - DNA, 201 bp, Homo sapiens
tagttatccattgtcttaagctgtttgtgctgctgtagcaaaatatcacagacttggtcatttgtaaaccacagaaatttgtcacagttctggaggctgaraagtccaagatcaatgcaccagtaggactggtgtctgttgagggctgctctctaattccaagatggtgctttgttgctgcatcctctggagggaagtaca

SEQ ID NO: 227081 - DNA, 201 bp, Homo sapiens
ttgttgcagtgaaagattcattagaaaaatgtaacaataaaaagaagaggtattgatgttttccagaaagctgtatttcttgaggtgtttaattttttgtrtgtctcacacagcaagtttcctggtggcagaacaacatctagccttgacatgtggtgtaaatctttatgctctcttcagaataaaatgattgcagcactt

SEQ ID NO: 227082 - DNA, 201 bp, Homo sapiens
agggagacattgaccttgagagaagccttctgttccctccaactggcttcttcaggcaagtttaaagaccaaatcgggttgggcaaatagatggttaaccrgtgtgttcctgaagacacgccgaaacgaggacttccttgctcttcccatagttttactaccatgacagtccatttctaactgcaatttaatttgtatctt

SEQ ID NO: 227083 - DNA, 201 bp, Homo sapiens
tctttaatttctctcaatcctccacctttaaattttcttattgaagtatgacaaaaacagcaaaagtgcacacattttaagtgtttagctcaataaatatwttcaaaataaacatcccatgtaactatttctcaaagatgtagaaaataccactcactagcactagtacccagaaatttcctgttcactaagtgaacacct

SEQ ID NO: 227084 - DNA, 201 bp, Homo sapiens
tacagctataggataaagggttatctgctgagtccaaaatctgttgccttcttgagaaagatattgagaaacatccataactcttcagagttctttttttwaaaaactatatatccattcaaaatatgactctcactatgcaacctggtggaaaactctgcatttggccttgaaattcttctgttaataacagacattgtt

SEQ ID NO: 227085 - DNA, 201 bp, Homo sapiens
gtggggctcagcaatctagtttaacaagccctccatgtgattccaatatatgtttaagttagagctccatctagatcctagaatttggattcataaaggcrtttcctaaccactgtatgtaaatgcatttctctgtcatccacccgcctatcattccagtctttatcattgtgcctcatttatttccttcatattctatca

SEQ ID NO: 227086 - DNA, 201 bp, Homo sapiens
ttgatggctgagaaggatgaatatttgataggcagggaatgctctttatggcacagaatgtctttccaagaagaaactttactagagtcacagcaaacctytcagccacagtgcccaaaatgtcatagttagttgaattatttactatgaaaatgatggttaactgaaaatctctttaaaatatatgagtctcttttactg

SEQ ID NO: 227087 - DNA, 201 bp, Homo sapiens
agctttgtccttaggatagcaattacaagtttactcattctttttattgacttaatagcatttcatgtatggaagtaccataatttatataaccacttctrtattttagtaatagagaaacagtcttacaataaacatccttgtacatatgttttatgtattttatgcatattaatgtaatcatttagcatagattcttag

SEQ ID NO: 227088 - DNA, 201 bp, Homo sapiens
tgatatttctgttggacagtgctggtttagagactgtcatagcagtttgacactaccactaaatccaagtgcaatttttattgtattttataaaagtatcrccaacccacaacatattggagtgaaaaatatagtcaactagttttacatcctaaatagtttgtgaagcactgctttaaaccattcataacttccagagca

SEQ ID NO: 227089 - DNA, 201 bp, Homo sapiens
ctttcctgcggtggtgctcctccagaatccaatgttcacaaagcagaccttctgtcatgcacaacttcttgtttaaaaggtcaaccccaacttaacttaarggtgtgacatggcccttaggctcaagtctgtctgcaaagccctgtaaaccagctttctctgcctccctaacacgcccccgggcaaactcctctgctttcg

SEQ ID NO: 227090 - DNA, 201 bp, Homo sapiens
ctaaaacaagtatcttaaagatgctcaaaaaactaaaagatatggaaaaagtaaaaaataaatgatgtatgaactaaccagcaacatcaatacagagattyagaaaaagtaaaaatagaacgagaaatttttcagttgaaaagtataataactgaaatgaaaaattcactggagatattcaaaggcatatttgaacaggta

SEQ ID NO: 227091 - DNA, 201 bp, Homo sapiens
gtggatctactagacaaagagtctaaaacaagtatcttaaagatgctcaaaaaactaaaagatatggaaaaagtaaaaaataaatgatgtatgaactaacyagcaacatcaatacagagatttagaaaaagtaaaaatagaacgagaaatttttcagttgaaaagtataataactgaaatgaaaaattcactggagatatt

SEQ ID NO: 227092 - DNA, 201 bp, Homo sapiens
tttatttcaatgtccggttttcaacaacaacaacaaaatcacagcacataaaaagaaacaggcaagtatggcacattcaaaggaaagaaaatgaaccaacraggtctgtccctgaaaaagttataattgtggatctactagacaaagagtctaaaacaagtatcttaaagatgctcaaaaaactaaaagatatggaaaaag

SEQ ID NO: 227093 - DNA, 201 bp, Homo sapiens
caaaagcaacttaatgaaggaagtccagcctttcaacaaatgatgctagagcattagacatccattgggaaaaaaaatgaacattgatctaaatctcatamcttcatacaaaaattaactcaaagtggatcatagaattaaatgtaaaataataacaattttaaaaaataaatgtgggagaaaatctctgtatgtaaggca

SEQ ID NO: 227094 - DNA, 201 bp, Homo sapiens
tattatttatcattgtggtttagtgattttctgtagtgataagttttgcttcttttctctttttttctgtgtatctgctctactagtgagtttgttgttgwtgttgttgttgttgtttgtttttgagatgagtttcactcttgttgcccaggctggagtgcaatggcacgatctcagctcactgcaacctccacctcctgg

SEQ ID NO: 227095 - DNA, 201 bp, Homo sapiens
atttttgacaaagatgcaaaagcaacttaatgaaggaagtccagcctttcaacaaatgatgctagagcattagacatccattgggaaaaaaaatgaacatygatctaaatctcataccttcatacaaaaattaactcaaagtggatcatagaattaaatgtaaaataataacaattttaaaaaataaatgtgggagaaaat

SEQ ID NO: 227096 - DNA, 201 bp, Homo sapiens
cccaggtgaaactgatgttctgttctgtggttcacagtttgagtagcatgggtgaaaacaggcaagcccatccattcaaagatttacaagttgcttattaytatcaggcagattatacttgcctttttgttgaaatttcaaattctgtactggctcattcatctgtatattagatactcaagtctcaacactatagagtca

SEQ ID NO: 227097 - DNA, 201 bp, Homo sapiens
  misc_feature (1)...(201): n = A,T,C or G
ctcagttcaggctgtgaaggagatgaaggtgagcagggctgcttctagattttgagtctaggtaactgaaagactagtgttgtcaaaacaagatctctttncatgggaaaattgatatgtcaactttgtaccttctgagcctgatgtgctggctgtacaagttggagcccccaacaaggagctagggatgtgggtctggag

SEQ ID NO: 227098 - DNA, 201 bp, Homo sapiens
ctgtgtgttatttcccacataatacacaatactttgtggcatgcttgtgtagggaaatctgggcatgagtggaaaagatacgctgaaggggactggaaggscctttttccccttggagactcttaataaactgtgttatgcaactgcattttgattatgacccatcacatgaggtcaggggtggaattttccacttgtggc

SEQ ID NO: 227099 - DNA, 201 bp, Homo sapiens
tggaggtaagctttatgaaagtgattttggcatgggtttaaaggatgggttggaatggataattactggagatgaggaaacaagtgaggggcactgtaacyatccagaggtaaaacagggagtgtttaagcaagtgccaactcaaagtgggtggaaaggaaggaaggaattgtgtcaaaaatatctctaacccagctatgt

SEQ ID NO: 227100 - DNA, 201 bp, Homo sapiens
tgttttgatgtgttttaatcttataagtaaaaaacaaacacaaaaatgtgttttcaaaaaccataatcaaatataaacaagtataggtgatttgatgttartaggtgacaacatccaagaaaagcacattggtaggttggcaacatgttaattttactcctgtcaccaatgcttcccccagtagatccatgtgagctattt

SEQ ID NO: 227101 - DNA, 201 bp, Homo sapiens
aaagcctgccttatccttgcacgttttgtttatgtccatgactgaccagtttcgtggtaataaagcgacaaagcaagaatgactaataaactatcaggggytaactactgtgcttgcttttcctttcctggagtgtgtgtgagagaaagaaaaacatacgactctctcctcgcatggggctaaagataccaaacctttaaa

SEQ ID NO: 227102 - DNA, 201 bp, Homo sapiens
aagaacatcattaataattaggctgccacttaattctactttatatcatcatctctgttgtgaaacttaagatattatggaagttattattagattagtartagtctctattaaaaattatctccaatttttttttttttttttaagacggagtcttggtctgtcaccaggctggagtgcagtggtgtgatctcagctcac

SEQ ID NO: 227103 - DNA, 201 bp, Homo sapiens
ctaaaacctcctaccaggccccacctccaactttggggatcacattttaatatgaaatttgaaagggacaaacatccaaactatatcagcacttacctttwaggattgctgtgaggcttaagtgagataataaatgtaaagtttctagaatagtgaatggatcacataacctcctgtctaaattttagctattattattga

SEQ ID NO: 227104 - DNA, 201 bp, Homo sapiens
caaatgatttttgacaaagatgcaaaagcaacttaatgaaggaagtccagcctttcaacaaatgatgctagagcattagacatccattgggaaaaaaaatsaacattgatctaaatctcataccttcatacaaaaattaactcaaagtggatcatagaattaaatgtaaaataataacaattttaaaaaataaatgtggga

SEQ ID NO: 227105 - DNA, 201 bp, Homo sapiens
catcatatatctttacccaaaagagtttttgaggattttctgtgagtcccaaggggcacaaatgtgaaggtcaaagataatgggtccccatctgacactgrgctgatttgccaagcacccaggatgcatttttatttctttttcatggtaaaagccagagagaacactgtagagtttaaacacggtttctttatctggtgc

SEQ ID NO: 227106 - DNA, 201 bp, Homo sapiens
aaagtaaataatatcatcatataaaaaggcgtctgacaaaatccaacatctatttataataaaaattctcagcaatttagaaatagtgatgaattatctcracttgctaaagagcatccctgagattagaaacaaggccaggaggttcactctcatgacttttattcaaccagtactggaaagtctagccaaaacaataag

SEQ ID NO: 227107 - DNA, 201 bp, Homo sapiens
taactgtatgctgcctacaagaaactcacttcaaattctatgattagttaagttgaaagtaaaagggtggaaaaacatatatcatacaaatattaattttwaaaaaaacaggagtgcttatactagtatctgataaaagtggactttggaacaaagaaaatatctggaaacaagaaggaacattatataatgataaaagaa

SEQ ID NO: 227108 - DNA, 201 bp, Homo sapiens
gctcagacatattttttcatggaaacctcatcaatggctaatagatgtaaagctatttcagctttttccaggtccttagtttagtggttttatatttctgyccttgttctttccaatttccaggtgcatgggatccagttattttttcttttctttttttcttttttttgatagggctgtacaggaatcagaattgacaca

SEQ ID NO: 227109 - DNA, 201 bp, Homo sapiens
aaacaagtaatgaaatggtatagtgaaatgctaacttatcaatagttaccttgaaggtaaatcatctaaacaccatcaaaagacagagataaacaaagtgmataatagaacataatctaactgtatgctgcctacaagaaactcacttcaaattctatgattagttaagttgaaagtaaaagggtggaaaaacatatatca

SEQ ID NO: 227110 - DNA, 201 bp, Homo sapiens
tgggcgccaccctagaccagtggttctcagttgggttctttttgactcttctcccccggggcacatttggcattgtctggaggcatgtgtgcttgtcccarcttgagtggggctgtgtgccactagcatcaagtaggtagaggccagggatgctgctcaacatgctgtaatacagaagacagcagctgcaataaagaattg

SEQ ID NO: 227111 - DNA, 201 bp, Homo sapiens
gggtgagactccatctcaaaaaaaaaaaaaaaagaaaagaaaagaaaaaagaaaaaaaaaaagcagtagaccacttctgcacctgagagaggcagacattytgtgagctcacatatttttctcatcagactctgaaacagcatttcactgtattttgatacaaatgttcaaactacacattaggggtaatttctgcctcat

SEQ ID NO: 227112 - DNA, 201 bp, Homo sapiens
acttggatttcacttcaaagtacagaactaaggaattcactaaaaatcttctgagcaatcactacaagcaaagcaaaaataacctttacaaatgcatagawaatgtctttagtcatggatagatcctttaaatcaggtgctaccaggggctgcagaattgggtgtctccaggggcaggccagccgtatcaatgattaaatt

SEQ ID NO: 227113 - DNA, 201 bp, Homo sapiens
aatgtctctagatctactctgagaagaaaaatgaaagtgccacatgtaccctgatggtcttggtttgtaagctctatctgcaaggcagagtgcctcctgaraaaccaggaacatacctgaagaaaatttaggcaaacgttacaattgttggcttttctgtcactcttcataatcagcctgtttgtgtggaaactatgggcg

SEQ ID NO: 227114 - DNA, 201 bp, Homo sapiens
acatgtagtaattgcaataaccagattcaccacatactagagattccgccttctgtgtagcttgttttaattgacttttctctacttcctgaaccaccagraccaagtgcctaggctaaaacctccttattggcttttctgctaccagtctttctgcctttaatcttttcttccatggctactagagctgtttgaaccaga

SEQ ID NO: 227115 - DNA, 201 bp, Homo sapiens
agcaaaaacagtaacaacgtgacctcagtgataatgtgtctctagtccatgaagctgagccaggtgttgtattaaatacctttgagacagaaactcatttytaaaatccagacatttgctgaatgaatgaatgaatgaatgaataagcaaattttaatttgtgtctgtctagggataagaacttttgatgctttgctcttc

SEQ ID NO: 227116 - DNA, 201 bp, Homo sapiens
aaacgaagtgggtacattctcataagccacattaccgtcttataaacccatcgttaaaataggaaaggtgacagaactatgacaacagctccctttcctastctggatgagaagcccatatgccattcccctctttctcctcatctgcaatcaatgcttcctttgctttacaaagacaaatgctagacaaggcatgttttc

SEQ ID NO: 227117 - DNA, 201 bp, Homo sapiens
ctgttgagagatcataggtttaagactcgtggtagaaagatagctatagccaatttccttgtcaaaatgcttctactccaaatttttatgcagtgtctaasgagctcatgcctagatctatctggcaatctatattatccctcctagtctcagttcacatagtagactgctggaatgactgagggtgatgtttggcctgta

SEQ ID NO: 227118 - DNA, 201 bp, Homo sapiens
cacacatttggaaaaaaaagaaaaaaaaacagaacaaaataacttctgaaaaatgctgggttcccttacatgattattgtggctgtaaacaatagtgcaartgcccatgaaggtttctggccttctgatttgcttccagtgttggttttctccctgctcttctcctttgcactcttcaagttaaactgccattgcttgatt

SEQ ID NO: 227119 - DNA, 201 bp, Homo sapiens
cctccaattagtcatggtaaatttaatccaccataaggctgaacattgggaaattctttaggcctcaaattcacgattcagtcccctcatccgcaaaccastttcggacattttggctttcacgaaatgaatgaatcaagaatcgtcttagagtctcaaagatagtccttttgagtgcactattcaaatttaatctattcc

SEQ ID NO: 227120 - DNA, 201 bp, Homo sapiens
ttaaataatattttcttaaagaaactgtagaaagcaagcaagaagatatttatgtagttctgtgagatttagtatataattagatatatattgtcacatayatatgcatgtgtttaaatcagatatatctcctgagtggagtctgtatttcccatacactatattttctatgaacctccatccatatatcatacttcaagc

SEQ ID NO: 227121 - DNA, 201 bp, Homo sapiens
ttttgaggggctgctggaaatattagtgtagatgatgaagctgtactaaagtcaccttataggcaccatgaatttgtgcccattgagggaaatatccttasgtgaacttaacaaaatgtatctaatacacgcaagtacgcaaatgaagcataaagtagctggtaatggccccaaattatacaaaacacagttactgttccc

SEQ ID NO: 227122 - DNA, 201 bp, Homo sapiens
agagtgtcccaacccaacagaagatggtcacctagaccgagtgtttcctaactgagtgtttcctaactccaagcctggcaacaagaagcagctcagggagrctgattttttttttttttttttttttttttcctgattgagcggatgtccctctggaactatcagacaagttcaacgctaccagccaaagagattaattgg

SEQ ID NO: 227123 - DNA, 201 bp, Homo sapiens
atgatttttgacaaagatgcaaaagcaacttaatgaaggaagtccagcctttcaacaaatgatgctagagcattagacatccattgggaaaaaaaatgaamattgatctaaatctcataccttcatacaaaaattaactcaaagtggatcatagaattaaatgtaaaataataacaattttaaaaaataaatgtgggagaa

SEQ ID NO: 227124 - DNA, 201 bp, Homo sapiens
aggcctggaggaacagcacagtagcagagtgtttagagtgtcccaacccaacagaagatggtcacctagaccgagtgtttcctaactgagtgtttcctaastccaagcctggcaacaagaagcagctcagggagactgattttttttttttttttttttttttttcctgattgagcggatgtccctctggaactatcagac

SEQ ID NO: 227125 - DNA, 201 bp, Homo sapiens
tgatttttgacaaagatgcaaaagcaacttaatgaaggaagtccagcctttcaacaaatgatgctagagcattagacatccattgggaaaaaaaatgaacmttgatctaaatctcataccttcatacaaaaattaactcaaagtggatcatagaattaaatgtaaaataataacaattttaaaaaataaatgtgggagaaa

SEQ ID NO: 227126 - DNA, 201 bp, Homo sapiens
gggcgacagagcgagattccgtctcaaaaaaaaaaaaaaaaaaaaaagaatgagctggcctccctaggcctggaggaacagcacagtagcagagtgtttaragtgtcccaacccaacagaagatggtcacctagaccgagtgtttcctaactgagtgtttcctaactccaagcctggcaacaagaagcagctcagggagac

SEQ ID NO: 227127 - DNA, 201 bp, Homo sapiens
gattggggccttggtctgatctttctgctagatcagaccaagttcttgtttttcctctcatttggtatccttatgaagccctcactggccaacttgcaggrgaagccagaacaccaaggggcctgtcagtgtagtccacatagatcagccttctgcagcacagaacagagaaagaaggggaggaagagatttgaaggagca

SEQ ID NO: 227128 - DNA, 201 bp, Homo sapiens
catatctagatcatttttgcaggcaggatgcaggataatggagctgacttgaagtcacttatttcagatgagcatgggctgtgttataagaataggtatcyaaggatgaagaaagacacaaacatcagggaaaacagaagattcaagtatttttttttgaaagatagacattttattaatgaacctggttttagggcagat

SEQ ID NO: 227129 - DNA, 201 bp, Homo sapiens
gtggggtagtgttttgagaacactagtagtcctcatttgaccaaataatttatacttttatctattattctatcttatatattggacttctgtttaggttmcctgaaaacatggttttgtgagtaaaggaaaattttgaaagcttttatcaagggtattctgagggtaatccactctcccaatctagttaagcataatcta

SEQ ID NO: 227130 - DNA, 201 bp, Homo sapiens
atattgtattatgaaaaaattaaacgtatatgaaaactgaagtaattttatagtgaacaccctgtgtaaccaccgcttggtgtctaacattaacattctaytgtgtttattatattacatttgtacctatctgttaccccttctttctatttgtcaattcatcagctgcagtgattttgaaactctactctgtaaagttcc

SEQ ID NO: 227131 - DNA, 201 bp, Homo sapiens
aaaaacgatatgattatttcaatttttgctgaaaaagcatttcataaaattcaacatcctttcatgattaaaaacccacagaaactgtgtatagaaggaayataccttgacacaataaaagccatatatgacagacccacagctaatatagtgaaggggaaacacctgaaggttttctccctacaatctgaaatgagacaa

SEQ ID NO: 227132 - DNA, 201 bp, Homo sapiens
cctaatggcagtatggtgtcaaatacatgattttatttgtatttatgtaaccattacataccatttttgtgataagcattatacgaagcaacttaacaatrttagcttatgtatgagttgacaattaacaattgtttattgaataaaattaggcattacttttgtcaaggcaaaatacaccaatattgtgactagcactta

SEQ ID NO: 227133 - DNA, 201 bp, Homo sapiens
ttctgactaactggcaaaaaaaaaaaaatgaaaaacacaaaacctaagcaagcagccggatgaagtctcctgacctccctcccttctttcccaagcccackgtcctaaccccataatatcgtacgtttcagtctgtgagggaataagcagggagcagcgggcatcttctagatccctggaccagcagcatcagcatcacct

SEQ ID NO: 227134 - DNA, 201 bp, Homo sapiens
tgagtgatgattctttttgatttctgtgtctctatactggaataaagaatctctgaaatttgtaatctataaaattcttgaactaaaatcttttttttttyttttttttttctttttttatcaaacagacgagttgtttctcatcctgagggcatatgtgcttgggaaaaactctgacatcttaagaaatgatgttactca

SEQ ID NO: 227135 - DNA, 201 bp, Homo sapiens
ttagtttgcattttggttgaggggaatgagggcccacaaaaaaataagtaaaatatgcacatgttaagtggcgattagtgcaatgaagaaaagtaaagctrgaacagggactagagaaggctgggcattggcactgaatataagtaaaattatttgtaatgaatagccgtggtagaatgcaacctgcttttgttgggttgg

SEQ ID NO: 227136 - DNA, 201 bp, Homo sapiens
aaatatgcacatgttaagtggcgattagtgcaatgaagaaaagtaaagctagaacagggactagagaaggctgggcattggcactgaatataagtaaaatyatttgtaatgaatagccgtggtagaatgcaacctgcttttgttgggttggtatattgaccactgataaggtctggagttggtgtagaacttttctctcta

SEQ ID NO: 227137 - DNA, 201 bp, Homo sapiens
caaggcaagagaagaccaaaaatgcaagataaggcagtaaagataatggggccaactaaagccttctaggcttcgtttgggatccaagtctctatttttartatggtaggaaatgactgaaggccagaaacagagggaatcagaattgtgtttcaagagcgtcactatacggttaggatggaagacagattagaggaaatg

SEQ ID NO: 227138 - DNA, 201 bp, Homo sapiens
agcatatgctgctcgtttgaaatgtagtttcattaaaaatcttttccattgcaccctaaaacaatctgtccttgccagataacacattggacaccaaaagrctgttccctccgcttgctttcttagttgtaagccaacccttataaaaataagaacacagctgctcgtgacaaaataaatttgtcagcttgtctttgaaag

SEQ ID NO: 227139 - DNA, 201 bp, Homo sapiens
ttcactcttttcttcctttgttcatctaatcttttcttctccatcctcccctaaagcagaattatggtagctttatatactatatgttgtattttgtagcrttctttggatctactgggcttatccaacaaacatagaaactgaggtgcctttgggagccatgctggctcttcgtgaacacctttgccaagcttccaccaa

SEQ ID NO: 227140 - DNA, 201 bp, Homo sapiens
gggacaagaaagaggtgctttctctcttgggtgccagcttctagtttttgcccaatgggaggttgaatactaagagtcttatttgtttgaatacctctgcwttgttagaatacctctgctgtaattcttcacgggctccaaaaagcaattcagcagttttatctgcaaattctagaattatctttctctggatacctttgc

SEQ ID NO: 227141 - DNA, 201 bp, Homo sapiens
gccagcttctagtttttgcccaatgggaggttgaatactaagagtcttatttgtttgaatacctctgctttgttagaatacctctgctgtaattcttcacrggctccaaaaagcaattcagcagttttatctgcaaattctagaattatctttctctggatacctttgcatgtggccatgtttacttagatgttttcaaat

SEQ ID NO: 227142 - DNA, 201 bp, Homo sapiens
tcccaaggccagttaacttcaacgatcctttccttggacttattatagacaatttaagtggcctctgcagtatcagacatacagtaagttttgttattttwctttcaagaaaatatctcgcttttgaggggctgctggaaatattagtgtagatgatgaagctgtactaaagtcaccttataggcaccatgaatttgtgcc

SEQ ID NO: 227143 - DNA, 201 bp, Homo sapiens
catcccaagcattaattcgccccaagctgtgttagtgccggacgagacagcttgtatgaaaatttaggagtcccggagaacaacaataacaaaaattaacmaatggcaggatgagtagcagaagggaaaatcaagcatatgctgctcgtttgaaatgtagtttcattaaaaatcttttccattgcaccctaaaacaatctg

SEQ ID NO: 227144 - DNA, 201 bp, Homo sapiens
aggaaaaatgctatcattgtttcatttgcatccaaatccttttttgtgtacccaacagaaaggcacccagagggaatcactctacaaattaatgttctgayatgatgtataaataaaaaaatagatattcttcatattttgtctaacaaagacagcaccctggaaataatttgtaaagatcagaagatatccaaagaaagg

SEQ ID NO: 227145 - DNA, 201 bp, Homo sapiens
tactgaataagacaagagaaactcagtgagctaaactagggtataagccacttgcaggagcagagcagggtcaggcattggtctgacttgctgtgaagacyttaagctgtgaactcataggacttggattccacttgtcagggagtttgattggttcagaatctggggcaggatggaacctgcaggaaaaagctgactggc

SEQ ID NO: 227146 - DNA, 201 bp, Homo sapiens
gtgaggctagaaacacaagaacttcaaacttacattttggtaaaaagatacttttcaatggggaagaaaggtgtgtacaatgtgatcataatggctcttcrtagaccatatctttgtatgcacaagaactttcaagcaaaagaaaatgacaagaatggcgaagaaaatcagtgcatatatttcttcttttaagcaagctaa

SEQ ID NO: 227147 - DNA, 201 bp, Homo sapiens
acaggaaagttaagtaacattgatcttctaggaattctaatacaatttagacttggttataattcgtaaatatatgttctttgccctatcacttcagtacktagaggctcttgtttttggtctatgcagcaactcttcctccctcatgactggattaattatagttactcaatcccctttggccacaggggtaatacagga

SEQ ID NO: 227148 - DNA, 201 bp, Homo sapiens
aatgtgatcataatggctcttcatagaccatatctttgtatgcacaagaactttcaagcaaaagaaaatgacaagaatggcgaagaaaatcagtgcatatwtttcttcttttaagcaagctaagaaattaagagcagtgtagttgtctattttttaaccatccattcatccatccatgcacctatctgtccacattcccac

SEQ ID NO: 227149 - DNA, 201 bp, Homo sapiens
ttggcccatggtgggtggacctgaaatgccatgtcttatcaatggcgaccctttgtaaccagtttgggctttggatttggtaccacacagctttatggaargacacttggggccgtcattttacttgcaaatagaaacaggctttgtggtgtgatttcttccctgggatttgttttgaatgtgtggctggtttgcagtccc

SEQ ID NO: 227150 - DNA, 201 bp, Homo sapiens
tctcaggtgaccttccacccttccctctgtgtccttatttcctgtgttggaataattggattatacctgagactggctggctctttccagagaaccacttkttactttcttcaccaagtgtcagtttccccccatttagaaataaatcaattcaaaatgaaattacccgaagcattcatttttcaccatctagtaaatgaa

SEQ ID NO: 227151 - DNA, 201 bp, Homo sapiens
atgcacaagaactttcaagcaaaagaaaatgacaagaatggcgaagaaaatcagtgcatatatttcttcttttaagcaagctaagaaattaagagcagtgwagttgtctattttttaaccatccattcatccatccatgcacctatctgtccacattcccactcatgtacctagctacccacccatccacccacccactca

SEQ ID NO: 227152 - DNA, 201 bp, Homo sapiens
tgccatgtctgtgttaagagtagctaaacttcccccaaatgctttgtgtgtatgtgttgtatgtcaaaccatttgagtccccttcaggcaggtagttcagytcagagtgggtttatcaagcttatgttgcaaaccgtgtttctggagagactaaatgaaggcagtgaatgaaaacctctgttaatgtttagtgagatacaa

SEQ ID NO: 227153 - DNA, 201 bp, Homo sapiens
aacaacagctgagaagcacaagggtgacaaatcttgaaacatcctctgtatctcctaaaagtcattttgaaactttcatacgttttcagatggagacattrctaaggcactgtcccttcccacccagcagcaagcagaaccaattttacaagaacctctgagctcctgcatgtctaactgaacaggaagactctatcttgg

SEQ ID NO: 227154 - DNA, 201 bp, Homo sapiens
ttgaagtcacttatttcagatgagcatgggctgtgttataagaataggtatccaaggatgaagaaagacacaaacatcagggaaaacagaagattcaagtwtttttttttgaaagatagacattttattaatgaacctggttttagggcagatacttgctagctcaagaaataagcctttctgagcataattgctacaggg

SEQ ID NO: 227155 - DNA, 201 bp, Homo sapiens
ttgagtgatgattctttttgatttctgtgtctctatactggaataaagaatctctgaaatttgtaatctataaaattcttgaactaaaatctttttttttycttttttttttctttttttatcaaacagacgagttgtttctcatcctgagggcatatgtgcttgggaaaaactctgacatcttaagaaatgatgttactc

SEQ ID NO: 227156 - DNA, 201 bp, Homo sapiens
attttaggtagattttgataagataaggatgcatattgttagtcctagagcatgcacgcacacacacacacacacacacacacacacacacacacacacaygctacaaagaggtataattaaaaaccctaatagtggtataaagatggaaactttagaaatatgcattttaacagaaagaaggcaagaaagaaggaagaag

SEQ ID NO: 227157 - DNA, 201 bp, Homo sapiens
taatgaatatatatttatatatgttttttctgcatatatacatatatatatttgtggtaagatacacataacataaaatttactattttaaccattttcargagtacagttcagtggcattaaatacaggcatatgaaactataattacatctaccaggtgtccccacctaatagacctatgtatatttgagtgatgattc

SEQ ID NO: 227158 - DNA, 201 bp, Homo sapiens
cagcctaaaagaaagtgaaagcaaatggaaacagattaacaggaaggaatgaggagcacagaaatggtaaatatatggaataatatatatatttttaaacygtctttattttctgttaagctcttacggggtaacttactatttaaagcaaaactcatgacaatgtattgaaaggattataatgcaaatagaagtaaaaca

SEQ ID NO: 227159 - DNA, 201 bp, Homo sapiens
tacaggttgaagatgtttagcaaaccaaagcaggataaaaacaaagaaaaccatacctggatgtatgacggccaactgataaaaatccaaaagtaaagaaraaagctgctgaggatgggaggagtggagagacattacatataggagaacaacagtaagagttattttagactcctaaataaaaactattcaagccagaag

SEQ ID NO: 227160 - DNA, 201 bp, Homo sapiens
attttataaatacctaagttcaaaactattgggaatgggtagagatgtatgttctcccttatttccataatgttcactatttgagcaccactatttgtctrttgtgatgttgtggggtttgttgggggcatgtgataaataatttccacataatcataagacttttcctctagtggatgaaacttcccaccaaaattctta

SEQ ID NO: 227161 - DNA, 201 bp, Homo sapiens
tcacacacacacgtgcctggaagtccaaagtgtagttggtttttaaatgcttctgtcaggtaaccatggccttgggaaaaattatattatgttttcataaytgcagtgaaatgcaaccacagagaggggaaatatgccaagtacaatcagtcattccttttattatactagtttttaaaggagaggaagtgctcatggctg

SEQ ID NO: 227162 - DNA, 201 bp, Homo sapiens
tcacgccattctcctgcctcagcctcccaagtagctggggactacaggtgcctgccaccatgcccagcaaatttttttttatgtgtgtgtatttttggtaragatggggtttcaccgtgttagccaggatggtctgtatctcctgacctcgtgatctgcccgctttggcctcccaaagtgctgggattacaggcatgggcc

SEQ ID NO: 227163 - DNA, 201 bp, Homo sapiens
gcttattagaaataaaatattggcaatgctgaatcctatgcaaagtgcaaactatttgcttagtgtatatatgctagaaaaattgatggattcagttgttstattattatttcatttattgtgattcttattcccacagattatgtttgtgttcttgagctagcaaatgcatgtgtgaacaattgctttaagtttgaattt

SEQ ID NO: 227164 - DNA, 201 bp, Homo sapiens
gtattgtatttacatgtccctggaagtttttgacattgggaactgcttcatctctgcatttccatttccataacggcctagcagttccagctatgaatcartcaagcagtaagatcgaagatgagaaaaatggccctaatagctagtgttcctaacagctttgaatcctccaattagtcatggtaaatttaatccaccata

SEQ ID NO: 227165 - DNA, 201 bp, Homo sapiens
agttggagtggttatagggatacatagtataaaacagatatgcaaaatacttttaaaaattagaaccaagggaagtgtaattaaaaatagaagcttttatygaaacgcaagaggaagaaagatgcagatgctcataacaaaaggaagaagtgtattagaagaatatagtgattgacgagaatgtttattgctttccatgaa

SEQ ID NO: 227166 - DNA, 201 bp, Homo sapiens
aatagaagcttttattgaaacgcaagaggaagaaagatgcagatgctcataacaaaaggaagaagtgtattagaagaatatagtgattgacgagaatgttyattgctttccatgaacattgttttccaaagtaccccttctctatctatcccaaagcctcaaccatttctagctataaaactgactgtcaagataatgtct

SEQ ID NO: 227167 - DNA, 201 bp, Homo sapiens
ctatctggtcaggtcagaaatctagggattatccttgcctcctgcttcctcatcttcccaaatccaatttatcagtaagtgctttagattttaccccacartatttcttaaatccatccatttctgctcatctctaccaccatcacctaatcaaagctaccaagtgtctctgatctgaactaagtgacctgttacaggttg

SEQ ID NO: 227168 - DNA, 201 bp, Homo sapiens
gacagactgaattagggcataattttaacttgatggtctcactttaacttactttcctctttaaagcccctgcctccaattaaagtcacattgagaggtastggggatgagggcttcaacataataatcacagggtcacagaactcagcctgtaaagctcagttcctcagctcctctgccaggtttccaggactgaaggaa

SEQ ID NO: 227169 - DNA, 201 bp, Homo sapiens
gatttttgacaataatgtttactgagtgtttttcttctgccaggtagtagtttcagtgcttcacacattttgttttattgaatattcaccactatgtgagrtggctactgttcttatccccattttacagatgattaaagtaaggtacatagttttactaaggagattgtcttttttttatttttggagacagtcttgttc

SEQ ID NO: 227170 - DNA, 201 bp, Homo sapiens
cgccatacctatttccttcttaacacctcccacacttgacataatttattactttattattcaatacctgcatcccccaattatgtgttacagtctttagrgcagggatctaatctggcctagggtggaccttcagtgaatatttgaaaatgaatgaacacatttaaaaaaaaacaaggtgttgaactagaagaacctgaa

SEQ ID NO: 227171 - DNA, 201 bp, Homo sapiens
atgagggtagatccatcatgaatagattaatgacctctctgttggtgagttactccctactctgttagttcccatgaaagctggttgttaaaaagagtgtrgtgcctcttcccttctctcttgcttcctcgctccccatgtgatctctgcacacacagccccccttcacccttgccatgagtggaagcagccagaggccct

SEQ ID NO: 227172 - DNA, 201 bp, Homo sapiens
ttgtttcttcctgtaattgcctgagcccagggcagcaccttttatctgctaatcatgaggtgatgttttagtactgtgactcccaaaatgaagcccaagakcctaacctccttctctattgctgttttcctttcccctgctgaggactccagtgacttgaggagacccccatgaaggaatgcctgcataaaatggttaggg

SEQ ID NO: 227173 - DNA, 201 bp, Homo sapiens
gaggtgatgttttagtactgtgactcccaaaatgaagcccaagatcctaacctccttctctattgctgttttcctttcccctgctgaggactccagtgacktgaggagacccccatgaaggaatgcctgcataaaatggttagggaaagtacatcaacggtggcttcagtgactactcccactcagccccatttctgtaat

SEQ ID NO: 227174 - DNA, 201 bp, Homo sapiens
gctgggactatagatgcacaccaccaagcccagctaatgtttgtatttttagtagagatgaggtttcaccatgttggccaggatggtctcgatctcttgayctcaagatctgcccgcctcggcctcccaaagtgctgagattataggcgtgagccaccatgcccggccttttttctttttcttttttggcaaataggtctt

SEQ ID NO: 227175 - DNA, 201 bp, Homo sapiens
tttcaccatgttggccaggatggtctcgatctcttgacctcaagatctgcccgcctcggcctcccaaagtgctgagattataggcgtgagccaccatgccyggccttttttctttttcttttttggcaaataggtcttgcttcgttgcccagactggtctcaaactcctgggctcaggtgatcctcctgggaggctgtgtg

SEQ ID NO: 227176 - DNA, 201 bp, Homo sapiens
tcgatctcttgacctcaagatctgcccgcctcggcctcccaaagtgctgagattataggcgtgagccaccatgcccggccttttttctttttcttttttgrcaaataggtcttgcttcgttgcccagactggtctcaaactcctgggctcaggtgatcctcctgggaggctgtgtgctgggattacagatgtgagccacca

SEQ ID NO: 227177 - DNA, 201 bp, Homo sapiens
agagaatgccagttgcagaggctggaaaggtttggtgtgctaggtgtcagcagtggttttagattctgtttggcctcttggtgctgagtgggaggccgagmacagtacttaatttatctatggcagctcaatactctttcattgtatatgttggagattcctacagcatgagttttgttggggaaaaacgaggaaagatac

SEQ ID NO: 227178 - DNA, 201 bp, Homo sapiens
acctggccgggaatcatgtgcggctaacatatttgaaatgggtcaactctaagtgttttgcagagccctacacctcaagaaatgtgtgcatagggagacaytcactggaggaggaggacatgcacacaaggacccaatgcacgcatgaagacagtcataaggagagagagacactcacacagagagacatcaagaccgaga

SEQ ID NO: 227179 - DNA, 201 bp, Homo sapiens
gaccctgagtgttggtgtaatttagagattcccagtcaacagcaatggctacaaagtcgtggaggcaataaagcaaaaaacagcaacttccatttctgtgytatttccatgcacagaacccaggtgggttcatggtggtccctaggaagggaacacacattagctcttccaggataatacggggttaagtttgtgacctga

SEQ ID NO: 227180 - DNA, 201 bp, Homo sapiens
gtcaacagcaatggctacaaagtcgtggaggcaataaagcaaaaaacagcaacttccatttctgtgttatttccatgcacagaacccaggtgggttcatgrtggtccctaggaagggaacacacattagctcttccaggataatacggggttaagtttgtgacctgatgctaccacctctcctctggaaaaatcccttaac

SEQ ID NO: 227181 - DNA, 201 bp, Homo sapiens
ttgttttgttttgtttttaccagagccaaatttggggaactgaaaagcaaacaagcacttcagagagagcagaacactgcagaggttggggtgaaattcargcgttaggattaatgaaacattagcatttacctttctacttaactcatattagagcccaaaatttgggggtttggggactgttttgtatggatagaagct

SEQ ID NO: 227182 - DNA, 201 bp, Homo sapiens
gagtcaatggatgtgcactagaatttactagactgtaattcaagacagtagggcctttgtctcttgatcactgttgtattcaggcctacatctaaggtttrtggggcccagggcaaaaaggaggccatataccatctgtctaaatatttaaaaattaacaaatccagctagtaagccattaaagaagtgttttttatcctc

SEQ ID NO: 227183 - DNA, 201 bp, Homo sapiens
tatgtttcttagtctttcttcttccttctccttttcttcattttcttcactcttttcttcctttgttcatctaatcttttcttctccatcctcccctaaarcagaattatggtagctttatatactatatgttgtattttgtagcattctttggatctactgggcttatccaacaaacatagaaactgaggtgcctttggg

SEQ ID NO: 227184 - DNA, 201 bp, Homo sapiens
aatggttgaagtagtttacagtcccaccaacaatgtaaaagtgttcctatttctccacatcctctccagcacctattgtttcctgactttttaatgatcgycattctaactggtgtgaggtgatatctcattgtggttttaatttgcatttctctgattgttttctttctttctttcctttctttttttttttatttaatg

SEQ ID NO: 227185 - DNA, 201 bp, Homo sapiens
gctgagagtaaggcctatcttccctggacacactaccacctgcaggtacctgagaaagatcaaggtatgttagcaaggatgaaggactgatggctgctggraaagcacctcacactgctgctatacttctgtccatgttaatgcttatgtgtggaggtcagagggaactaagtcatcgtcaaagtgtttttaaacatgaca

SEQ ID NO: 227186 - DNA, 201 bp, Homo sapiens
tagagaccaggtttcaccatattagccaggatggtctcgatctcctgacctcgtgatccacccacctcggactcccaacacttaaaactaatcttgacgargatgatgaagaagaaaatgatgacatctctacgagtctgtgttaatgatatcagttagtcctccaaggcgccatttggaatgcgtagcacagcatcttca

SEQ ID NO: 227187 - DNA, 201 bp, Homo sapiens
ctttctagagcccacagcttcagctctttcagtgactttgaagcaccccattccccagttctctctgtacttcgaaaagctcaaccctgcctgaaaaacaracttacctctactgagactcagtctctatccaaaacttggagatagcatgacaacttatgaggttgtcatgaggatgcaatgagaagaggcaggcaggga

SEQ ID NO: 227188 - DNA, 201 bp, Homo sapiens
gtagaagcaggacatctgtgcttgccccaactcattccctgctctacccctccaggcaggagaagttttggcagggagctggctttgagcccaaaggattraaatgaaatttgccttttattactcagtttccagtattttattagcaagggaagaattgaagtttgtgggggtagagaaaggcagaaacacggagaactt

SEQ ID NO: 227189 - DNA, 201 bp, Homo sapiens
aatgaatcaattacttctagttgcaacagcaaggatcattctaacagcagaagacagatacaaaagcatgtgctgaatgttaccattcatataaaatcccmaaccatgtaaaactaatcaatgttgttagaggtcaggataatggtttcctttgggctggagcaggaggaaattaattgggaagggatatgaaatgtgctt

SEQ ID NO: 227190 - DNA, 201 bp, Homo sapiens
ccaaataggaaggatgatggagaagagggtgcaggcttaattgagcttgacgtagtgggtcgttgggatgtaatggtgtaagaaaaatagttcttggtatwtgtacctgctcagtatctgtactcctcttctttgagttataaagtagatttttcccttggggaatagccttctccaccaaacacagtattattggagctg

SEQ ID NO: 227191 - DNA, 201 bp, Homo sapiens
gaggacaggaatgttttcagatttactttgccaactctgtggcacctctagcacacagcctagaatgtagtggttaacaaatacacattttctggaatttmtagagacttatactttctccttgatgtgatactatctcatttgaatattttacagtaagcaggtattaccatgcaatcaggagaaaaagtgaagatataa

SEQ ID NO: 227192 - DNA, 201 bp, Homo sapiens
tttagcctcttcttgtattaaacttaattgtattttttatttgtctgaagaaaaaaatggttatatgcaaaggaagtgagggtgatttgaagtcttcatakagccagttttttacactggagtttgtggttgatagatttgttttgttttgggaggtccttcaacctgtagaaattatatgtgaacatttatgtgtatgtg
